United States Patent Application Publication US 2022/0267394 A1 - sequence listing, part 4

SEQ ID NO: 32455 - protein, 36 aa, Artificial Sequence
  GFR-binding peptide
  MOD_RES (2), (3): Xaa is C or S
  MOD_RES (17), (18), (19), (20), (21): Xaa is A or G
  MOD_RES (22), (23), (24), (25): Xaa is A or G or is absent
TXXVPTRLSPINILYFXXXXXXXXXYGKIPDMVVES

SEQ ID NO: 32456 - protein, 31 aa, Artificial Sequence
  GFR-binding peptide
  MOD_RES (1), (1): Xaa is C or S
XAPTKLSPINVLYFDDSSNVIYGKIPNMVVR

SEQ ID NO: 32457 - protein, 41 aa, Artificial Sequence
  GFR-binding peptide
  MOD_RES (6), (7), (40): Xaa is C or S
KVGKAXXVPTKLSPINVLYFDDMGVPTYGKIPEGMSVAEXG

SEQ ID NO: 32458 - protein, 37 aa, Artificial Sequence
  GFR-binding peptide
  MOD_RES (2), (3): Xaa is C or S
  MOD_RES (17), (18), (19), (20), (21): Xaa is A or G
  MOD_RES (22), (23), (24), (25): Xaa is A or G or is absent
AXXVPTKLSPINVLYFXXXXXXXXXYGKIPEGMSVAE

SEQ ID NO: 32459 - protein, 37 aa, Artificial Sequence
  GFR-binding peptide
  MOD_RES (1), (2), (36): Xaa is C or S
  MOD_RES (16), (17), (18), (19), (20): Xaa is A or G
  MOD_RES (21), (22), (23), (24): Xaa is A or G or is absent
XXAPTKLSPINVLYFXXXXXXXXXYGKIPNMVVRSXG

SEQ ID NO: 32460 - protein, 32 aa, Artificial Sequence
  GFR-binding peptide
  MOD_RES (1), (2): Xaa is C or S
XXVPTRLSPINILYFDSANNVVYGKIPDMVVE

SEQ ID NO: 32461 - protein, 34 aa, Artificial Sequence
  GFR-binding peptide
  MOD_RES (1), (2): Xaa is C or S
  MOD_RES (16), (17), (18), (19), (20): Xaa is A or G
  MOD_RES (21), (22), (23), (24): Xaa is A or G or is absent
XXVPARLSPINILYFXXXXXXXXXYGKIPDMVVE

SEQ ID NO: 32462 - protein, 38 aa, Artificial Sequence
  GFR-binding peptide
  MOD_RES (2), (3), (36), (38): Xaa is C or S
AXXVPTKLSPINVLYFDDMGVPTYGKIPEGMSVAEXGX

SEQ ID NO: 32463 - protein, 36 aa, Artificial Sequence
  GFR-binding peptide
  MOD_RES (2), (3), (35): Xaa is C or S
PXXAPTKLSPINVLYFDDSSNVIYGKIPNMVVRSXG

SEQ ID NO: 32464 - protein, 34 aa, Artificial Sequence
  GFR-binding peptide
  MOD_RES (3), (4): Xaa is C or S
KAXXVPTKLSPINILYFDKGVVTYYGKIPGMAVS

SEQ ID NO: 32465 - protein, 43 aa, Artificial Sequence
  GFR-binding peptide
  MOD_RES (5), (6), (40), (42): Xaa is C or S
  MOD_RES (20), (21), (22), (23), (24): Xaa is A or G
  MOD_RES (25), (26), (27), (28): Xaa is A or G or is absent
TPPTXXVPTRLSPINILYFXXXXXXXXXYGKIPDMVVESXGXR

SEQ ID NO: 32466 - protein, 32 aa, Artificial Sequence
  GFR-binding peptide
  MOD_RES (1), (2): Xaa is C or S
XXVPARLSPINILYFDAANNVVYGKIPDMVVE

SEQ ID NO: 32467 - protein, 36 aa, Artificial Sequence
  GFR-binding peptide
  MOD_RES (1), (2), (34), (36): Xaa is C or S
XXVPTRLSPINILYFDSANNVVYGKIPDMVVESXGX

SEQ ID NO: 32468 - protein, 37 aa, Artificial Sequence
  GFR-binding peptide
  MOD_RES (4), (4): Xaa is C or S
  MOD_RES (18), (19), (20), (21), (22): Xaa is A or G
  MOD_RES (23), (24), (25), (26): Xaa is A or G or is absent
KPTXAPTKLSPINVLYFXXXXXXXXXYGKIPNMVVRS

SEQ ID NO: 32469 - protein, 38 aa, Artificial Sequence
  GFR-binding peptide
  MOD_RES (5), (6), (38): Xaa is C or S
ASKAXXVPTKLSPINILYFDKGVVTYYGKIPGMAVSEX

SEQ ID NO: 32470 - protein, 38 aa, Artificial Sequence
  GFR-binding peptide
  MOD_RES (3), (4), (38): Xaa is C or S
  MOD_RES (18), (19), (20), (21), (22): Xaa is A or G
  MOD_RES (23), (24), (25), (26): Xaa is A or G or is absent
KAXXVPTELSPINMLYFXXXXXXXXXYGKIPDMVVEGX

SEQ ID NO: 32471 - protein, 37 aa, Artificial Sequence
  GFR-binding peptide
  MOD_RES (2), (3), (35), (37): Xaa is C or S
PXXAPTQLSPINVLYFDDSSNVIYGKIPNMVVRAXGX

SEQ ID NO: 32472 - protein, 38 aa, Artificial Sequence
  GFR-binding peptide
  MOD_RES (5), (6): Xaa is C or S
  MOD_RES (20), (21), (22), (23), (24): Xaa is A or G
  MOD_RES (25), (26), (27), (28): Xaa is A or G or is absent
VPKPXXAPTQLSPINVLYFXXXXXXXXXYGKIPNMVVR

SEQ ID NO: 32473 - protein, 35 aa, Artificial Sequence
  GFR-binding peptide
  MOD_RES (1), (2): Xaa is C or S
  MOD_RES (16), (17), (18), (19), (20): Xaa is A or G
  MOD_RES (21), (22), (23), (24): Xaa is A or G or is absent
XXVPTELSPINMLYFXXXXXXXXXYGKIPDMVVEG

SEQ ID NO: 32474 - protein, 33 aa, Artificial Sequence
  GFR-binding peptide
  MOD_RES (14), (15), (16), (17), (18): Xaa is A or G
  MOD_RES (19), (20), (21), (22): Xaa is A or G or is absent
VPARLSPINILYFXXXXXXXXXYGKIPDMVVEA

SEQ ID NO: 32475 - protein, 34 aa, Artificial Sequence
  GFR-binding peptide
  MOD_RES (3), (4): Xaa is C or S
PTXXVPTRLSPINILYFDSANNVVYGKIPDMVVE

SEQ ID NO: 32476 - protein, 36 aa, Artificial Sequence
  GFR-binding peptide
  MOD_RES (3), (4): Xaa is C or S
  MOD_RES (18), (19), (20), (21), (22): Xaa is A or G
  MOD_RES (23), (24), (25), (26): Xaa is A or G or is absent
ASXXVPARLSPINILYFXXXXXXXXXYGKIPDMVVE

SEQ ID NO: 32477 - protein, 40 aa, Artificial Sequence
  GFR-binding peptide
  MOD_RES (5), (37), (39): Xaa is C or S
TKPTXAPTKLSPINVLYFDDSSNVIYGKIPNMVVRSXGXH

SEQ ID NO: 32478 - protein, 39 aa, Artificial Sequence
  GFR-binding peptide
  MOD_RES (4), (5), (37), (39): Xaa is C or S
PKAXXAPTKLSPINVLYFDSSNNVIYGKIPNMVVKAXGX

SEQ ID NO: 32479 - protein, 42 aa, Artificial Sequence
  GFR-binding peptide
  MOD_RES (4), (5), (40), (42): Xaa is C or S
  MOD_RES (19), (20), (21), (22), (23): Xaa is A or G
  MOD_RES (24), (25), (26), (27): Xaa is A or G or is absent
GKAXXVPTKLSPINVLYFXXXXXXXXXYGKIPEGMSVAEXGX

SEQ ID NO: 32480 - protein, 39 aa, Artificial Sequence
  GFR-binding peptide
  MOD_RES (5), (6): Xaa is C or S
  MOD_RES (20), (21), (22), (23), (24): Xaa is A or G
  MOD_RES (25), (26), (27), (28): Xaa is A or G or is absent
IPKAXXVPTELSPINMLYFXXXXXXXXXYGKIPEMVVEG

SEQ ID NO: 32481 - protein, 34 aa, Artificial Sequence
  GFR-binding peptide
  MOD_RES (1), (2): Xaa is C or S
  MOD_RES (16), (17), (18), (19), (20): Xaa is A or G
  MOD_RES (21), (22), (23), (24): Xaa is A or G or is absent
XXVPTRLSPINILYFXXXXXXXXXYGKIPDMVVE

SEQ ID NO: 32482 - protein, 37 aa, Artificial Sequence
  GFR-binding peptide
  MOD_RES (3), (4): Xaa is C or S
  MOD_RES (18), (19), (20), (21), (22): Xaa is A or G
  MOD_RES (23), (24), (25), (26): Xaa is A or G or is absent
KAXXVPTELSPINMLYFXXXXXXXXXYGKIPEMVVEG

SEQ ID NO: 32483 - protein, 34 aa, Artificial Sequence
  GFR-binding peptide
  MOD_RES (2), (3): Xaa is C or S
AXXVPTELSPINMLYFDEYDKVVYGKIPEMVVEG

SEQ ID NO: 32484 - protein, 38 aa, Artificial Sequence
  GFR-binding peptide
  MOD_RES (2), (3), (35), (37): Xaa is C or S
TXXVPTRLSPINILYFDSANNVVYGKIPDMVVESXGXR

SEQ ID NO: 32485 - protein, 33 aa, Artificial Sequence
  GFR-binding peptide
  MOD_RES (2), (3): Xaa is C or S
PXXAPTKLSPINVLYFDDSSNVIYGKIPNMVVR

SEQ ID NO: 32486 - protein, 38 aa, Artificial Sequence
  GFR-binding peptide
  MOD_RES (1), (35), (37): Xaa is C or S
  MOD_RES (15), (16), (17), (18), (19): Xaa is A or G
  MOD_RES (20), (21), (22), (23): Xaa is A or G or is absent
XVPTKLSPINILYFXXXXXXXXXYGKIPGMAVSEXGXR

SEQ ID NO: 32487 - protein, 33 aa, Artificial Sequence
  GFR-binding peptide
  MOD_RES (32), (32): Xaa is C or S
APTKLSPINVLYFDSSNNVIYGKIPNMVVKAXG

SEQ ID NO: 32488 - protein, 37 aa, Artificial Sequence
  GFR-binding peptide
  MOD_RES (2), (3), (37): Xaa is C or S
  MOD_RES (17), (18), (19), (20), (21): Xaa is A or G
  MOD_RES (22), (23), (24), (25): Xaa is A or G or is absent
PXXAPTKLSPINVLYFXXXXXXXXXYGKIPNMVVRSX

SEQ ID NO: 32489 - protein, 39 aa, Artificial Sequence
  GFR-binding peptide
  MOD_RES (1), (2), (36), (38): Xaa is C or S
  MOD_RES (16), (17), (18), (19), (20): Xaa is A or G
  MOD_RES (21), (22), (23), (24): Xaa is A or G or is absent
XXVPTELSPINMLYFXXXXXXXXXYGKIPEMVVEGXGXR

SEQ ID NO: 32490 - protein, 41 aa, Artificial Sequence
  GFR-binding peptide
  MOD_RES (3), (4), (38), (40): Xaa is C or S
  MOD_RES (18), (19), (20), (21), (22): Xaa is A or G
  MOD_RES (23), (24), (25), (26): Xaa is A or G or is absent
ASXXVPARLSPINILYFXXXXXXXXXYGKIPDMVVEAXGXR

SEQ ID NO: 32491 - protein, 40 aa, Artificial Sequence
  GFR-binding peptide
  MOD_RES (2), (3), (38), (40): Xaa is C or S
  MOD_RES (17), (18), (19), (20), (21): Xaa is A or G
  MOD_RES (22), (23), (24), (25): Xaa is A or G or is absent
AXXVPTKLSPINVLYFXXXXXXXXXYGKIPEGMSVAEXGX

SEQ ID NO: 32492 - protein, 39 aa, Artificial Sequence
  GFR-binding peptide
  MOD_RES (4), (5), (37), (39): Xaa is C or S
PKAXXVPTELSPINMLYFDENEKVVYGKIPDMVVEGXGX

SEQ ID NO: 32493 - protein, 33 aa, Artificial Sequence
  GFR-binding peptide
  MOD_RES (32), (32): Xaa is C or S
VPARLSPINILYFDAANNVVYGKIPDMVVEAXG

SEQ ID NO: 32494 - protein, 35 aa, Artificial Sequence
  GFR-binding peptide
  MOD_RES (34), (34): Xaa is C or S
  MOD_RES (14), (15), (16), (17), (18): Xaa is A or G
  MOD_RES (19), (20), (21), (22): Xaa is A or G or is absent
VPTKLSPINILYFXXXXXXXXXYGKIPGMAVSEXG

SEQ ID NO: 32495 - protein, 33 aa, Artificial Sequence
  GFR-binding peptide
  MOD_RES (32), (32): Xaa is C or S
APTKLSPINVLYFDDSSNVIYGKIPNMVVRSXG

SEQ ID NO: 32496 - protein, 39 aa, Artificial Sequence
  GFR-binding peptide
  MOD_RES (2), (3), (37), (39): Xaa is C or S
  MOD_RES (17), (18), (19), (20), (21): Xaa is A or G
  MOD_RES (22), (23), (24), (25): Xaa is A or G or is absent
TXXVPTRLSPINILYFXXXXXXXXXYGKIPDMVVESXGX

SEQ ID NO: 32497 - protein, 37 aa, Artificial Sequence
  GFR-binding peptide
  MOD_RES (2), (3), (37): Xaa is C or S
  MOD_RES (17), (18), (19), (20), (21): Xaa is A or G
  MOD_RES (22), (23), (24), (25): Xaa is A or G or is absent
AXXVPTELSPINMLYFXXXXXXXXXYGKIPDMVVEGX

SEQ ID NO: 32498 - protein, 33 aa, Artificial Sequence
  GFR-binding peptide
  MOD_RES (1), (33): Xaa is C or S
XVPTKLSPINILYFDKGVVTYYGKIPGMAVSEX

SEQ ID NO: 32499 - protein, 36 aa, Artificial Sequence
  GFR-binding peptide
  MOD_RES (1), (2), (36): Xaa is C or S
  MOD_RES (16), (17), (18), (19), (20): Xaa is A or G
  MOD_RES (21), (22), (23), (24): Xaa is A or G or is absent
XXVPTELSPINMLYFXXXXXXXXXYGKIPDMVVEGX

SEQ ID NO: 32500 - protein, 35 aa, Artificial Sequence
  GFR-binding peptide
  MOD_RES (2), (3): Xaa is C or S
AXXVPTKLSPINVLYFDDMGVPTYGKIPEGMSVAE

SEQ ID NO: 32501 - protein, 42 aa, Artificial Sequence
  GFR-binding peptide
  MOD_RES (6), (7), (42): Xaa is C or S
  MOD_RES (21), (22), (23), (24), (25): Xaa is A or G
  MOD_RES (26), (27), (28), (29): Xaa is A or G or is absent
KVGKAXXVPTKLSPINVLYFXXXXXXXXXYGKIPEGMSVAEX

SEQ ID NO: 32502 - protein, 39 aa, Artificial Sequence
  GFR-binding peptide
  MOD_RES (4), (5), (37), (39): Xaa is C or S
PPTXXVPTRLSPINILYFDSANNVVYGKIPDMVVESXGX

SEQ ID NO: 32503 - protein, 33 aa, Artificial Sequence
  GFR-binding peptide
  MOD_RES (14), (15), (16), (17), (18): Xaa is A or G
  MOD_RES (19), (20), (21), (22): Xaa is A or G or is absent
TPTKMSPINMLYFXXXXXXXXXYGKIPGMVVDR

SEQ ID NO: 32504 - protein, 38 aa, Artificial Sequence
  GFR-binding peptide
  MOD_RES (5), (6): Xaa is C or S
  MOD_RES (20), (21), (22), (23), (24): Xaa is A or G
  MOD_RES (25), (26), (27), (28): Xaa is A or G or is absent
APASXXVPARLSPINILYFXXXXXXXXXYGKIPDMVVE

SEQ ID NO: 32505 - protein, 37 aa, Artificial Sequence
  GFR-binding peptide
  MOD_RES (1), (2), (36): Xaa is C or S
  MOD_RES (16), (17), (18), (19), (20): Xaa is A or G
  MOD_RES (21), (22), (23), (24): Xaa is A or G or is absent
XXVPTELSPINMLYFXXXXXXXXXYGKIPDMVVEGXG

SEQ ID NO: 32506 - protein, 38 aa, Artificial Sequence
  GFR-binding peptide
  MOD_RES (4), (5): Xaa is C or S
  MOD_RES (19), (20), (21), (22), (23): Xaa is A or G
  MOD_RES (24), (25), (26), (27): Xaa is A or G or is absent
PKPXXAPTKLSPINVLYFXXXXXXXXXYGKIPNMVVRS

SEQ ID NO: 32507 - protein, 33 aa, Artificial Sequence
  GFR-binding peptide
  MOD_RES (32), (32): Xaa is C or S
VPTRLSPINILYFDSANNVVYGKIPDMVVESXG

SEQ ID NO: 32508 - protein, 35 aa, Artificial Sequence
  GFR-binding peptide
  MOD_RES (3), (4): Xaa is C or S
ASXXVPARLSPINILYFDAANNVVYGKIPDMVVEA

SEQ ID NO: 32509 - protein, 35 aa, Artificial Sequence
  GFR-binding peptide
  MOD_RES (1), (2), (33), (35): Xaa is C or S
XXAPVKTSPINMLYFDNGRVLLYGKIPMIVEEXGX

SEQ ID NO: 32510 - protein, 42 aa, Artificial Sequence
  GFR-binding peptide
  MOD_RES (6), (7), (39), (41): Xaa is C or S
KASKAXXVPTKLSPINILYFDKGVVTYYGKIPGMAVSEXGXR

SEQ ID NO: 32511 - protein, 35 aa, Artificial Sequence
  GFR-binding peptide
  MOD_RES (2), (3): Xaa is C or S
  MOD_RES (17), (18), (19), (20), (21): Xaa is A or G
  MOD_RES (22), (23), (24), (25): Xaa is A or G or is absent
TXXAPVKTSPINMLYFXXXXXXXXXYGKIPMIVEE

SEQ ID NO: 32512 - protein, 39 aa, Artificial Sequence
  GFR-binding peptide
  MOD_RES (2), (3), (37), (39): Xaa is C or S
  MOD_RES (17), (18), (19), (20), (21): Xaa is A or G
  MOD_RES (22), (23), (24), (25): Xaa is A or G or is absent
AXXAPTKLSPINVLYFXXXXXXXXXYGKIPNMVVKAXGX

SEQ ID NO: 32513 - protein, 33 aa, Artificial Sequence
  GFR-binding peptide
  MOD_RES (1), (2): Xaa is C or S
XXVPTELSPINMLYFDENEKVVYGKIPDMVVEG

SEQ ID NO: 32514 - protein, 38 aa, Artificial Sequence
  GFR-binding peptide
  MOD_RES (4), (5): Xaa is C or S
  MOD_RES (19), (20), (21), (22), (23): Xaa is A or G
  MOD_RES (24), (25), (26), (27): Xaa is A or G or is absent
PKAXXVPTELSPINMLYFXXXXXXXXXYGKIPDMVVEG

SEQ ID NO: 32515 - protein, 35 aa, Artificial Sequence
  GFR-binding peptide
  MOD_RES (1), (33), (35): Xaa is C or S
XVPTELSPINMLYFDENEKVVYGKIPDMVVEGXGX

SEQ ID NO: 32516 - protein, 40 aa, Artificial Sequence
  GFR-binding peptide
  MOD_RES (4), (5), (37), (39): Xaa is C or S
PKPXXAPTQLSPINVLYFDDSSNVIYGKIPNMVVRAXGXH

SEQ ID NO: 32517 - protein, 41 aa, Artificial Sequence
  GFR-binding peptide
  MOD_RES (6), (7), (39), (41): Xaa is C or S
KASKAXXVPTKLSPINILYFDKGVVTYYGKIPGMAVSEXGX

SEQ ID NO: 32518 - protein, 32 aa, Artificial Sequence
  GFR-binding peptide
  MOD_RES (1), (2): Xaa is C or S
XXAPTKLSPINVLYFDDSSNVIYGKIPNMVVR

SEQ ID NO: 32519 - protein, 43 aa, Artificial Sequence
  GFR-binding peptide
  MOD_RES (6), (7), (41), (43): Xaa is C or S
  MOD_RES (21), (22), (23), (24), (25): Xaa is A or G
  MOD_RES (26), (27), (28), (29): Xaa is A or G or is absent
STPPTXXVPTRLSPINILYFXXXXXXXXXYGKIPDMVVESXGX

SEQ ID NO: 32520 - protein, 38 aa, Artificial Sequence
  GFR-binding peptide
  MOD_RES (3), (4), (36), (38): Xaa is C or S
KAXXVPTKLSPINILYFDKGVVTYYGKIPGMAVSEXGX

SEQ ID NO: 32521 - protein, 38 aa, Artificial Sequence
  GFR-binding peptide
  MOD_RES (6), (7): Xaa is C or S
AAPASXXVPARLSPINILYFDAANNVVYGKIPDMVVEA

SEQ ID NO: 32522 - protein, 44 aa, Artificial Sequence
  GFR-binding peptide
  MOD_RES (6), (7), (41), (43): Xaa is C or S
  MOD_RES (21), (22), (23), (24), (25): Xaa is A or G
  MOD_RES (26), (27), (28), (29): Xaa is A or G or is absent
STPPTXXVPTRLSPINILYFXXXXXXXXXYGKIPDMVVESXGXR

SEQ ID NO: 32523 - protein, 41 aa, Artificial Sequence
  GFR-binding peptide
  MOD_RES (5), (6), (38), (40): Xaa is C or S
TPPTXXVPTRLSPINILYFDSANNVVYGKIPDMVVESXGXR

SEQ ID NO: 32524 - protein, 36 aa, Artificial Sequence
  GFR-binding peptide
  MOD_RES (33), (35): Xaa is C or S
VPTKLSPINVLYFDDMGVPTYGKIPEGMSVAEXGXR

SEQ ID NO: 32525 - protein, 41 aa, Artificial Sequence
  GFR-binding peptide
  MOD_RES (6), (7), (39), (41): Xaa is C or S
TVPKPXXAPTQLSPINVLYFDDSSNVIYGKIPNMVVRAXGX

SEQ ID NO: 32526 - protein, 33 aa, Artificial Sequence
  GFR-binding peptide
  MOD_RES (1), (1): Xaa is C or S
  MOD_RES (15), (16), (17), (18), (19): Xaa is A or G
  MOD_RES (20), (21), (22), (23): Xaa is A or G or is absent
XAPTQLSPINVLYFXXXXXXXXXYGKIPNMVVR

SEQ ID NO: 32527 - protein, 35 aa, Artificial Sequence
  GFR-binding peptide
  MOD_RES (2), (3), (34): Xaa is C or S
TXXAPVKTSPINMLYFDNGRVLLYGKIPMIVEEXG

SEQ ID NO: 32528 - protein, 34 aa, Artificial Sequence
  GFR-binding peptide
  MOD_RES (1), (2), (34): Xaa is C or S
XXVPTRLSPINILYFDSANNVVYGKIPDMVVESX

SEQ ID NO: 32529 - protein, 35 aa, Artificial Sequence
  GFR-binding peptide
  MOD_RES (3), (4): Xaa is C or S
KAXXVPTKLSPINILYFDKGVVTYYGKIPGMAVSE

SEQ ID NO: 32530 - protein, 43 aa, Artificial Sequence
  GFR-binding peptide
  MOD_RES (6), (7), (42): Xaa is C or S
  MOD_RES (21), (22), (23), (24), (25): Xaa is A or G
  MOD_RES (26), (27), (28), (29): Xaa is A or G or is absent
KVGKAXXVPTKLSPINVLYFXXXXXXXXXYGKIPEGMSVAEXG

SEQ ID NO: 32531 - protein, 43 aa, Artificial Sequence
  GFR-binding peptide
  MOD_RES (5), (6), (40), (42): Xaa is C or S
  MOD_RES (20), (21), (22), (23), (24): Xaa is A or G
  MOD_RES (25), (26), (27), (28): Xaa is A or G or is absent
VPKPXXAPTQLSPINVLYFXXXXXXXXXYGKIPNMVVRAXGXH

SEQ ID NO: 32532 - protein, 40 aa, Artificial Sequence
  GFR-binding peptide
  MOD_RES (5), (6), (38), (40): Xaa is C or S
TPPTXXVPTRLSPINILYFDSANNVVYGKIPDMVVESXGX

SEQ ID NO: 32533 - protein, 36 aa, Artificial Sequence
  GFR-binding peptide
  MOD_RES (34), (36): Xaa is C or S
  MOD_RES (14), (15), (16), (17), (18): Xaa is A or G
  MOD_RES (19), (20), (21), (22): Xaa is A or G or is absent
TPTKMSPINMLYFXXXXXXXXXYGKIPGMVVDRXGX

SEQ ID NO: 32534 - protein, 33 aa, Artificial Sequence
  GFR-binding peptide
  MOD_RES (1), (1): Xaa is C or S
XVPTKLSPINVLYFDDMGVPTYGKIPEGMSVAE

SEQ ID NO: 32535 - protein, 38 aa, Artificial Sequence
  GFR-binding peptide
  MOD_RES (6), (6): Xaa is C or S
  MOD_RES (20), (21), (22), (23), (24): Xaa is A or G
  MOD_RES (25), (26), (27), (28): Xaa is A or G or is absent
VTKPTXAPTKLSPINVLYFXXXXXXXXXYGKIPNMVVR

SEQ ID NO: 32536 - protein, 44 aa, Artificial Sequence
  GFR-binding peptide
  MOD_RES (6), (7), (42), (44): Xaa is C or S
  MOD_RES (21), (22), (23), (24), (25): Xaa is A or G
  MOD_RES (26), (27), (28), (29): Xaa is A or G or is absent
KVGKAXXVPTKLSPINVLYFXXXXXXXXXYGKIPEGMSVAEXGX

SEQ ID NO: 32537 - protein, 38 aa, Artificial Sequence
  GFR-binding peptide
  MOD_RES (4), (5), (37): Xaa is C or S
SKAXXVPTKLSPINILYFDKGVVTYYGKIPGMAVSEXG

SEQ ID NO: 32538 - protein, 39 aa, Artificial Sequence
  GFR-binding peptide
  MOD_RES (4), (5): Xaa is C or S
  MOD_RES (19), (20), (21), (22), (23): Xaa is A or G
  MOD_RES (24), (25), (26), (27): Xaa is A or G or is absent
GKAXXVPTKLSPINVLYFXXXXXXXXXYGKIPEGMSVAE

SEQ ID NO: 32539 - protein, 41 aa, Artificial Sequence
  GFR-binding peptide
  MOD_RES (6), (7), (41): Xaa is C or S
  MOD_RES (21), (22), (23), (24), (25): Xaa is A or G
  MOD_RES (26), (27), (28), (29): Xaa is A or G or is absent
YVPKPXXAPTKLSPINVLYFXXXXXXXXXYGKIPNMVVRSX

SEQ ID NO: 32540 - protein, 41 aa, Artificial Sequence
  GFR-binding peptide
  MOD_RES (6), (7), (41): Xaa is C or S
  MOD_RES (21), (22), (23), (24), (25): Xaa is A or G
  MOD_RES (26), (27), (28), (29): Xaa is A or G or is absent
AAPASXXVPARLSPINILYFXXXXXXXXXYGKIPDMVVEAX

SEQ ID NO: 32541 - protein, 33 aa, Artificial Sequence
  GFR-binding peptide
  MOD_RES (1), (33): Xaa is C or S
XAPTQLSPINVLYFDDSSNVIYGKIPNMVVRAX

SEQ ID NO: 32542 - protein, 34 aa, Artificial Sequence
  GFR-binding peptide
  MOD_RES (34), (34): Xaa is C or S
  MOD_RES (14), (15), (16), (17), (18): Xaa is A or G
  MOD_RES (19), (20), (21), (22): Xaa is A or G or is absent
APTKLSPINVLYFXXXXXXXXXYGKIPNMVVKAX

SEQ ID NO: 32543 - protein, 33 aa, Artificial Sequence
  GFR-binding peptide
  MOD_RES (33), (33): Xaa is C or S
  MOD_RES (14), (15), (16), (17), (18): Xaa is A or G
  MOD_RES (19), (20), (21), (22): Xaa is A or G or is absent
APVKTSPINMLYFXXXXXXXXXYGKIPMIVEEX

SEQ ID NO: 32544 - protein, 35 aa, Artificial Sequence
  GFR-binding peptide
  MOD_RES (32), (34): Xaa is C or S
VPTRLSPINILYFDSANNVVYGKIPDMVVESXGXR

SEQ ID NO: 32545 - protein, 39 aa, Artificial Sequence
  GFR-binding peptide
  MOD_RES (3), (4), (37), (39): Xaa is C or S
KAXXVPTKLSPINVLYFDDMGVPTYGKIPEGMSVAEXGX

SEQ ID NO: 32546 - protein, 34 aa, Artificial Sequence
  GFR-binding peptide
  MOD_RES (2), (3): Xaa is C or S
AXXAPTKLSPINVLYFDSSNNVIYGKIPNMVVKA

SEQ ID NO: 32547 - protein, 32 aa, Artificial Sequence
  GFR-binding peptide
  MOD_RES (1), (1): Xaa is C or S
XAPTQLSPINVLYFDDSSNVIYGKIPNMVVRA

SEQ ID NO: 32548 - protein, 39 aa, Artificial Sequence
  GFR-binding peptide
  MOD_RES (4), (5), (37), (39): Xaa is C or S
PKAXXVPTELSPINMLYFDEYDKVVYGKIPEMVVEGXGX

SEQ ID NO: 32549 - protein, 38 aa, Artificial Sequence
  GFR-binding peptide
  MOD_RES (5), (6): Xaa is C or S
  MOD_RES (20), (21), (22), (23), (24): Xaa is A or G
  MOD_RES (25), (26), (27), (28): Xaa is A or G or is absent
ASKAXXVPTKLSPINILYFXXXXXXXXXYGKIPGMAVS

SEQ ID NO: 32550 - protein, 42 aa, Artificial Sequence
  GFR-binding peptide
  MOD_RES (5), (6), (40), (42): Xaa is C or S
  MOD_RES (20), (21), (22), (23), (24): Xaa is A or G
  MOD_RES (25), (26), (27), (28): Xaa is A or G or is absent
IPKAXXVPTELSPINMLYFXXXXXXXXXYGKIPEMVVEGXGX

SEQ ID NO: 32551 - protein, 36 aa, Artificial Sequence
  GFR-binding peptide
  MOD_RES (3), (4), (36): Xaa is C or S
PTXXVPTRLSPINILYFDSANNVVYGKIPDMVVESX

SEQ ID NO: 32552 - protein, 41 aa, Artificial Sequence
  GFR-binding peptide
  MOD_RES (5), (6), (40): Xaa is C or S
  MOD_RES (20), (21), (22), (23), (24): Xaa is A or G
  MOD_RES (25), (26), (27), (28): Xaa is A or G or is absent
SAGPXXTPTKMSPINMLYFXXXXXXXXXYGKIPGMVVDRXG

SEQ ID NO: 32553 - protein, 41 aa, Artificial Sequence
  GFR-binding peptide
  MOD_RES (5), (6), (41): Xaa is C or S
  MOD_RES (20), (21), (22), (23), (24): Xaa is A or G
  MOD_RES (25), (26), (27), (28): Xaa is A or G or is absent
VGKAXXVPTKLSPINVLYFXXXXXXXXXYGKIPEGMSVAEX

SEQ ID NO: 32554 - protein, 34 aa, Artificial Sequence
  GFR-binding peptide
  MOD_RES (1), (2): Xaa is C or S
  MOD_RES (16), (17), (18), (19), (20): Xaa is A or G
  MOD_RES (21), (22), (23), (24): Xaa is A or G or is absent
XXVPTKLSPINILYFXXXXXXXXXYGKIPGMAVS

SEQ ID NO: 32555 - protein, 36 aa, Artificial Sequence
  GFR-binding peptide
  MOD_RES (1), (35): Xaa is C or S
  MOD_RES (15), (16), (17), (18), (19): Xaa is A or G
  MOD_RES (20), (21), (22), (23): Xaa is A or G or is absent
XTPTKMSPINMLYFXXXXXXXXXYGKIPGMVVDRXG

SEQ ID NO: 32556 - protein, 37 aa, Artificial Sequence
  GFR-binding peptide
  MOD_RES (4), (5): Xaa is C or S
  MOD_RES (19), (20), (21), (22), (23): Xaa is A or G
  MOD_RES (24), (25), (26), (27): Xaa is A or G or is absent
AGPXXTPTKMSPINMLYFXXXXXXXXXYGKIPGMVVD

SEQ ID NO: 32557 - protein, 32 aa, Artificial Sequence
  GFR-binding peptide
  MOD_RES (1), (2): Xaa is C or S
XXVPTKLSPINILYFDKGVVTYYGKIPGMAVS

SEQ ID NO: 32558 - protein, 38 aa, Artificial Sequence
  GFR-binding peptide
  MOD_RES (2), (3), (35), (37): Xaa is C or S
AXXAPTKLSPINVLYFDSSNNVIYGKIPNMVVKAXGXH

SEQ ID NO: 32559 - protein, 37 aa, Artificial Sequence
  GFR-binding peptide
  MOD_RES (1), (2), (36): Xaa is C or S
  MOD_RES (16), (17), (18), (19), (20): Xaa is A or G
  MOD_RES (21), (22), (23), (24): Xaa is A or G or is absent
XXAPTKLSPINVLYFXXXXXXXXXYGKIPNMVVKAXG

SEQ ID NO: 32560 - protein, 36 aa, Artificial Sequence
  GFR-binding peptide
  MOD_RES (4), (5): Xaa is C or S
PASXXVPARLSPINILYFDAANNVVYGKIPDMVVEA

SEQ ID NO: 32561 - protein, 31 aa, Artificial Sequence
  GFR-binding peptide
  MOD_RES (31), (31): Xaa is C or S
APVKTSPINMLYFDNGRVLLYGKIPMIVEEX

SEQ ID NO: 32562 - protein, 34 aa, Artificial Sequence
  GFR-binding peptide
  MOD_RES (31), (33): Xaa is C or S
APVKTSPINMLYFDNGRVLLYGKIPMIVEEXGXL

SEQ ID NO: 32563 - protein, 40 aa, Artificial Sequence
  GFR-binding peptide
  MOD_RES (3), (4), (38), (40): Xaa is C or S
  MOD_RES (18), (19), (20), (21), (22): Xaa is A or G
  MOD_RES (23), (24), (25), (26): Xaa is A or G or is absent
KAXXVPTELSPINMLYFXXXXXXXXXYGKIPDMVVEGXGX

SEQ ID NO: 32564 - protein, 39 aa, Artificial Sequence
  GFR-binding peptide
  MOD_RES (6), (7), (39): Xaa is C or S
AVPKAXXAPTKLSPINVLYFDSSNNVIYGKIPNMVVKAX

SEQ ID NO: 32565 - protein, 35 aa, Artificial Sequence
  GFR-binding peptide
  MOD_RES (2), (3): Xaa is C or S
  MOD_RES (17), (18), (19), (20), (21): Xaa is A or G
  MOD_RES (22), (23), (24), (25): Xaa is A or G or is absent
AXXVPTELSPINMLYFXXXXXXXXXYGKIPEMVVE

SEQ ID NO: 32566 - protein, 42 aa, Artificial Sequence
  GFR-binding peptide
  MOD_RES (6), (7), (39), (41): Xaa is C or S
STPPTXXVPTRLSPINILYFDSANNVVYGKIPDMVVESXGXR

SEQ ID NO: 32567 - protein, 41 aa, Artificial Sequence
  GFR-binding peptide
  MOD_RES (5), (6), (38), (40): Xaa is C or S
ASKAXXVPTKLSPINILYFDKGVVTYYGKIPGMAVSEXGXR

SEQ ID NO: 32568 - protein, 39 aa, Artificial Sequence
  GFR-binding peptide
  MOD_RES (1), (2), (36), (38): Xaa is C or S
  MOD_RES (16), (17), (18), (19), (20): Xaa is A or G
  MOD_RES (21), (22), (23), (24): Xaa is A or G or is absent
XXVPTRLSPINILYFXXXXXXXXXYGKIPDMVVESXGXR

SEQ ID NO: 32569 - protein, 42 aa, Artificial Sequence
  GFR-binding peptide
  MOD_RES (6), (7), (41): Xaa is C or S
  MOD_RES (21), (22), (23), (24), (25): Xaa is A or G
  MOD_RES (26), (27), (28), (29): Xaa is A or G or is absent
GSAGPXXTPTKMSPINMLYFXXXXXXXXXYGKIPGMVVDRXG

SEQ ID NO: 32570 - protein, 37 aa, Artificial Sequence
  GFR-binding peptide
  MOD_RES (1), (2), (36): Xaa is C or S
  MOD_RES (16), (17), (18), (19), (20): Xaa is A or G
  MOD_RES (21), (22), (23), (24): Xaa is A or G or is absent
XXAPTQLSPINVLYFXXXXXXXXXYGKIPNMVVRAXG

SEQ ID NO: 32571 - protein, 39 aa, Artificial Sequence
  GFR-binding peptide
  MOD_RES (3), (4), (38): Xaa is C or S
  MOD_RES (18), (19), (20), (21), (22): Xaa is A or G
  MOD_RES (23), (24), (25), (26): Xaa is A or G or is absent
ASXXVPARLSPINILYFXXXXXXXXXYGKIPDMVVEAXG

SEQ ID NO: 32572 - protein, 37 aa, Artificial Sequence
  GFR-binding peptide
  MOD_RES (4), (5), (37): Xaa is C or S
PKAXXVPTELSPINMLYFDENEKVVYGKIPDMVVEGX

SEQ ID NO: 32573 - protein, 41 aa, Artificial Sequence
  GFR-binding peptide
  MOD_RES (5), (6), (38), (40): Xaa is C or S
VPKPXXAPTKLSPINVLYFDDSSNVIYGKIPNMVVRSXGXH

SEQ ID NO: 32574 - protein, 39 aa, Artificial Sequence
  GFR-binding peptide
  MOD_RES (5), (6): Xaa is C or S
  MOD_RES (20), (21), (22), (23), (24): Xaa is A or G
  MOD_RES (25), (26), (27), (28): Xaa is A or G or is absent
TPPTXXVPTRLSPINILYFXXXXXXXXXYGKIPDMVVES

SEQ ID NO: 32575 - protein, 36 aa, Artificial Sequence
  GFR-binding peptide
  MOD_RES (34), (36): Xaa is C or S
  MOD_RES (14), (15), (16), (17), (18): Xaa is A or G
  MOD_RES (19), (20), (21), (22): Xaa is A or G or is absent
APTKLSPINVLYFXXXXXXXXXYGKIPNMVVRSXGX

SEQ ID NO: 32576 - protein, 37 aa, Artificial Sequence
  GFR-binding peptide
  MOD_RES (2), (3), (35), (37): Xaa is C or S
AXXVPTELSPINMLYFDENEKVVYGKIPDMVVEGXGX

SEQ ID NO: 32577 - protein, 33 aa, Artificial Sequence
  GFR-binding peptide
  MOD_RES (1), (32): Xaa is C or S
XAPVKTSPINMLYFDNGRVLLYGKIPMIVEEXG

SEQ ID NO: 32578 - protein, 36 aa, Artificial Sequence
  GFR-binding peptide
  MOD_RES (1), (2), (35): Xaa is C or S
  MOD_RES (16), (17), (18), (19), (20): Xaa is A or G
  MOD_RES (21), (22), (23), (24): Xaa is A or G or is absent
XXAPVKTSPINMLYFXXXXXXXXXYGKIPMIVEEXG

SEQ ID NO: 32579 - protein, 34 aa, Artificial Sequence
  GFR-binding peptide
  MOD_RES (34), (34): Xaa is C or S
  MOD_RES (14), (15), (16), (17), (18): Xaa is A or G
  MOD_RES (19), (20), (21), (22): Xaa is A or G or is absent
VPTRLSPINILYFXXXXXXXXXYGKIPDMVVESX

SEQ ID NO: 32580 - protein, 35 aa, Artificial Sequence
  GFR-binding peptide
  MOD_RES (1), (2), (34): Xaa is C or S
XXAPTKLSPINVLYFDSSNNVIYGKIPNMVVKAXG

SEQ ID NO: 32581 - protein, 41 aa, Artificial Sequence
  GFR-binding peptide
  MOD_RES (3), (4), (38), (40): Xaa is C or S
  MOD_RES (18), (19), (20), (21), (22): Xaa is A or G
  MOD_RES (23), (24), (25), (26): Xaa is A or G or is absent
KPXXAPTQLSPINVLYFXXXXXXXXXYGKIPNMVVRAXGXH

SEQ ID NO: 32582 - protein, 43 aa, Artificial Sequence
  GFR-binding peptide
  MOD_RES (6), (7), (41), (43): Xaa is C or S
  MOD_RES (21), (22), (23), (24), (25): Xaa is A or G
  MOD_RES (26), (27), (28), (29): Xaa is A or G or is absent
AAPASXXVPARLSPINILYFXXXXXXXXXYGKIPDMVVEAXGX

SEQ ID NO: 32583 - protein, 36 aa, Artificial Sequence
  GFR-binding peptide
  MOD_RES (4), (36): Xaa is C or S
KPTXAPTKLSPINVLYFDDSSNVIYGKIPNMVVRSX

SEQ ID NO: 32584 - protein, 35 aa, Artificial Sequence
  GFR-binding peptide
  MOD_RES (2), (3): Xaa is C or S
  MOD_RES (17), (18), (19), (20), (21): Xaa is A or G
  MOD_RES (22), (23), (24), (25): Xaa is A or G or is absent
PXXAPTKLSPINVLYFXXXXXXXXXYGKIPNMVVR

SEQ ID NO: 32585 - protein, 36 aa, Artificial Sequence
  GFR-binding peptide
  MOD_RES (1), (35): Xaa is C or S
  MOD_RES (15), (16), (17), (18), (19): Xaa is A or G
  MOD_RES (20), (21), (22), (23): Xaa is A or G or is absent
XVPTRLSPINILYFXXXXXXXXXYGKIPDMVVESXG

SEQ ID NO: 32586 - protein, 35 aa, Artificial Sequence
  GFR-binding peptide
  MOD_RES (1), (2), (35): Xaa is C or S
  MOD_RES (16), (17), (18), (19), (20): Xaa is A or G
  MOD_RES (21), (22), (23), (24): Xaa is A or G or is absent
XXAPVKTSPINMLYFXXXXXXXXXYGKIPMIVEEX

SEQ ID NO: 32587 - protein, 32 aa, Artificial Sequence
  GFR-binding peptide
  MOD_RES (14), (15), (16), (17), (18): Xaa is A or G
  MOD_RES (19), (20), (21), (22): Xaa is A or G or is absent
VPTRLSPINILYFXXXXXXXXXYGKIPDMVVE

SEQ ID NO: 32588 - protein, 32 aa, Artificial Sequence
  GFR-binding peptide
  MOD_RES (1), (2): Xaa is C or S
XXAPVKTSPINMLYFDNGRVLLYGKIPMIVEE

SEQ ID NO: 32589 - protein, 40 aa, Artificial Sequence
  GFR-binding peptide
  MOD_RES (4), (5), (40): Xaa is C or S
  MOD_RES (19), (20), (21), (22), (23): Xaa is A or G
  MOD_RES (24), (25), (26), (27): Xaa is A or G or is absent
GKAXXVPTKLSPINVLYFXXXXXXXXXYGKIPEGMSVAEX

SEQ ID NO: 32590 - protein, 32 aa, Artificial Sequence
  GFR-binding peptide
  MOD_RES (14), (15), (16), (17), (18): Xaa is A or G
  MOD_RES (19), (20), (21), (22): Xaa is A or G or is absent
VPARLSPINILYFXXXXXXXXXYGKIPDMVVE

SEQ ID NO: 32591 - protein, 36 aa, Artificial Sequence
  GFR-binding peptide
  MOD_RES (1), (33), (35): Xaa is C or S
XVPTELSPINMLYFDEYDKVVYGKIPEMVVEGXGXR

SEQ ID NO: 32592 - protein, 38 aa, Artificial Sequence
  GFR-binding peptide
  MOD_RES (4), (5): Xaa is C or S
  MOD_RES (19), (20), (21), (22), (23): Xaa is A or G
  MOD_RES (24), (25), (26), (27): Xaa is A or G or is absent
AGPXXTPTKMSPINMLYFXXXXXXXXXYGKIPGMVVDR

SEQ ID NO: 32593 - protein, 42 aa, Artificial Sequence
  GFR-binding peptide
  MOD_RES (5), (6), (40), (42): Xaa is C or S
  MOD_RES (20), (21), (22), (23), (24): Xaa is A or G
  MOD_RES (25), (26), (27), (28): Xaa is A or G or is absent
ASKAXXVPTKLSPINILYFXXXXXXXXXYGKIPGMAVSEXGX

SEQ ID NO: 32594 - protein, 39 aa, Artificial Sequence
  GFR-binding peptide
  MOD_RES (5), (6), (39): Xaa is C or S
  MOD_RES (20), (21), (22), (23), (24): Xaa is A or G
  MOD_RES (25), (26), (27), (28): Xaa is A or G or is absent
VPSTXXAPVKTSPINMLYFXXXXXXXXXYGKIPMIVEEX

SEQ ID NO: 32595 - protein, 43 aa, Artificial Sequence
  GFR-binding peptide
  MOD_RES (6), (7), (41), (43): Xaa is C or S
  MOD_RES (21), (22), (23), (24), (25): Xaa is A or G
  MOD_RES (26), (27), (28), (29): Xaa is A or G or is absent
SIPKAXXVPTELSPINMLYFXXXXXXXXXYGKIPEMVVEGXGX

SEQ ID NO: 32596 - protein, 43 aa, Artificial Sequence
  GFR-binding peptide
  MOD_RES (5), (6), (40), (42): Xaa is C or S
  MOD_RES (20), (21), (22), (23), (24): Xaa is A or G
  MOD_RES (25), (26), (27), (28): Xaa is A or G or is absent
APASXXVPARLSPINILYFXXXXXXXXXYGKIPDMVVEAXGXR

SEQ ID NO: 32597 - protein, 42 aa, Artificial Sequence
  GFR-binding peptide
  MOD_RES (6), (7), (39), (41): Xaa is C or S
AAPASXXVPARLSPINILYFDAANNVVYGKIPDMVVEAXGXR

SEQ ID NO: 32598 - protein, 35 aa, Artificial Sequence
  GFR-binding peptide
  MOD_RES (1), (2): Xaa is C or S
  MOD_RES (16), (17), (18), (19), (20): Xaa is A or G
  MOD_RES (21), (22), (23), (24): Xaa is A or G or is absent
XXVPTRLSPINILYFXXXXXXXXXYGKIPDMVVES

SEQ ID NO: 32599 - protein, 37 aa, Artificial Sequence
  GFR-binding peptide
  MOD_RES (1), (35), (37): Xaa is C or S
  MOD_RES (15), (16), (17), (18), (19): Xaa is A or G
  MOD_RES (20), (21), (22), (23): Xaa is A or G or is absent
XAPTKLSPINVLYFXXXXXXXXXYGKIPNMVVRSXGX

SEQ ID NO: 32600 - protein, 33 aa, Artificial Sequence
  GFR-binding peptide
  MOD_RES (1), (1): Xaa is C or S
  MOD_RES (15), (16), (17), (18), (19): Xaa is A or G
  MOD_RES (20), (21), (22), (23): Xaa is A or G or is absent
XAPVKTSPINMLYFXXXXXXXXXYGKIPMIVEE

SEQ ID NO: 32601 - protein, 37 aa, Artificial Sequence
  GFR-binding peptide
  MOD_RES (6), (7): Xaa is C or S
HVPKPXXAPTKLSPINVLYFDDSSNVIYGKIPNMVVR

SEQ ID NO: 32602 - protein, 41 aa, Artificial Sequence
  GFR-binding peptide
  MOD_RES (6), (40): Xaa is C or S
  MOD_RES (20), (21), (22), (23), (24): Xaa is A or G
  MOD_RES (25), (26), (27), (28): Xaa is A or G or is absent
VTKPTXAPTKLSPINVLYFXXXXXXXXXYGKIPNMVVRSXG

SEQ ID NO: 32603 - protein, 37 aa, Artificial Sequence
  GFR-binding peptide
  MOD_RES (1), (34), (36): Xaa is C or S
XVPTKLSPINVLYFDDMGVPTYGKIPEGMSVAEXGXR

SEQ ID NO: 32604 - protein, 40 aa, Artificial Sequence
  GFR-binding peptide
  MOD_RES (3), (4), (38), (40): Xaa is C or S
  MOD_RES (18), (19), (20), (21), (22): Xaa is A or G
  MOD_RES (23), (24), (25), (26): Xaa is A or G or is absent
KPXXAPTKLSPINVLYFXXXXXXXXXYGKIPNMVVRSXGX

SEQ ID NO: 32605 - protein, 38 aa, Artificial Sequence
  GFR-binding peptide
  MOD_RES (4), (5), (37): Xaa is C or S
PKPXXAPTQLSPINVLYFDDSSNVIYGKIPNMVVRAXG

SEQ ID NO: 32606 - protein, 33 aa, Artificial Sequence
  GFR-binding peptide
  MOD_RES (2), (3): Xaa is C or S
AXXVPTELSPINMLYFDENEKVVYGKIPDMVVE

SEQ ID NO: 32607 - protein, 36 aa, Artificial Sequence
  GFR-binding peptide
  MOD_RES (3), (4): Xaa is C or S
  MOD_RES (18), (19), (20), (21), (22): Xaa is A or G
  MOD_RES (23), (24), (25), (26): Xaa is A or G or is absent
PTXXVPTRLSPINILYFXXXXXXXXXYGKIPDMVVE

SEQ ID NO: 32608 - protein, 39 aa, Artificial Sequence
  GFR-binding peptide
  MOD_RES (3), (4), (38): Xaa is C or S
  MOD_RES (18), (19), (20), (21), (22): Xaa is A or G
  MOD_RES (23), (24), (25), (26): Xaa is A or G or is absent
KAXXVPTELSPINMLYFXXXXXXXXXYGKIPEMVVEGXG

SEQ ID NO: 32609 - protein, 38 aa, Artificial Sequence
  GFR-binding peptide
  MOD_RES (4), (38): Xaa is C or S
  MOD_RES (18), (19), (20), (21), (22): Xaa is A or G
  MOD_RES (23), (24), (25), (26): Xaa is A or G or is absent
KPTXAPTKLSPINVLYFXXXXXXXXXYGKIPNMVVRSX

SEQ ID NO: 32610 - protein, 38 aa, Artificial Sequence
  GFR-binding peptide
  MOD_RES (3), (35), (37): Xaa is C or S
PTXAPTKLSPINVLYFDDSSNVIYGKIPNMVVRSXGXH

SEQ ID NO: 32611 - protein, 42 aa, Artificial Sequence
  GFR-binding peptide
  MOD_RES (6), (7), (41): Xaa is C or S
  MOD_RES (21), (22), (23), (24), (25): Xaa is A or G
  MOD_RES (26), (27), (28), (29): Xaa is A or G or is absent
HVPKPXXAPTKLSPINVLYFXXXXXXXXXYGKIPNMVVRSXG

SEQ ID NO: 32612 - protein, 41 aa, Artificial Sequence
  GFR-binding peptide
  MOD_RES (5), (39), (41): Xaa is C or S
  MOD_RES (19), (20), (21), (22), (23): Xaa is A or G
  MOD_RES (24), (25), (26), (27): Xaa is A or G or is absent
TKPTXAPTKLSPINVLYFXXXXXXXXXYGKIPNMVVRSXGX

SEQ ID NO: 32613 - protein, 40 aa, Artificial Sequence
  GFR-binding peptide
  MOD_RES (6), (7), (39): Xaa is C or S
KIPKAXXVPTELSPINMLYFDENEKVVYGKIPDMVVEGXG

SEQ ID NO: 32614 - protein, 37 aa, Artificial Sequence
  GFR-binding peptide
  MOD_RES (2), (3), (34), (36): Xaa is C or S
TXXAPVKTSPINMLYFDNGRVLLYGKIPMIVEEXGXL

SEQ ID NO: 32615 - protein, 39 aa, Artificial Sequence
  GFR-binding peptide
  MOD_RES (3), (4), (36), (38): Xaa is C or S
KAXXVPTELSPINMLYFDEYDKVVYGKIPEMVVEGXGXR

SEQ ID NO: 32616 - protein, 40 aa, Artificial Sequence
  GFR-binding peptide
  MOD_RES (1), (2), (37), (39): Xaa is C or S
  MOD_RES (16), (17), (18), (19), (20): Xaa is A or G
  MOD_RES (21), (22), (23), (24): Xaa is A or G or is absent
XXVPTKLSPINVLYFXXXXXXXXXYGKIPEGMSVAEXGXR

SEQ ID NO: 32617 - protein, 43 aa, Artificial Sequence
  GFR-binding peptide
  MOD_RES (6), (40), (42): Xaa is C or S
  MOD_RES (20), (21), (22), (23), (24): Xaa is A or G
  MOD_RES (25), (26), (27), (28): Xaa is A or G or is absent
VTKPTXAPTKLSPINVLYFXXXXXXXXXYGKIPNMVVRSXGXH

SEQ ID NO: 32618 - protein, 33 aa, Artificial Sequence
  GFR-binding peptide
  MOD_RES (1), (33): Xaa is C or S
XAPTKLSPINVLYFDSSNNVIYGKIPNMVVKAX

SEQ ID NO: 32619 - protein, 33 aa, Artificial Sequence
  GFR-binding peptide
  MOD_RES (1), (1): Xaa is C or S
  MOD_RES (15), (16), (17), (18), (19): Xaa is A or G
  MOD_RES (20), (21), (22), (23): Xaa is A or G or is absent
XAPTKLSPINVLYFXXXXXXXXXYGKIPNMVVK

SEQ ID NO: 32620 - protein, 36 aa, Artificial Sequence
  GFR-binding peptide
  MOD_RES (2), (3), (35): Xaa is C or S
AXXVPTELSPINMLYFDENEKVVYGKIPDMVVEGXG

SEQ ID NO: 32621 - protein, 38 aa, Artificial Sequence
  GFR-binding peptide
  MOD_RES (3), (37): Xaa is C or S
  MOD_RES (17), (18), (19), (20), (21): Xaa is A or G
  MOD_RES (22), (23), (24), (25): Xaa is A or G or is absent
PTXAPTKLSPINVLYFXXXXXXXXXYGKIPNMVVRSXG

SEQ ID NO: 32622 - protein, 37 aa, Artificial Sequence
  GFR-binding peptide
  MOD_RES (4), (5): Xaa is C or S
GKAXXVPTKLSPINVLYFDDMGVPTYGKIPEGMSVAE

SEQ ID NO: 32623 - protein, 33 aa, Artificial Sequence
  GFR-binding peptide
  MOD_RES (1), (1): Xaa is C or S
  MOD_RES (15), (16), (17), (18), (19): Xaa is A or G
  MOD_RES (20), (21), (22), (23): Xaa is A or G or is absent
XAPTKLSPINVLYFXXXXXXXXXYGKIPNMVVR

SEQ ID NO: 32624 - protein, 34 aa, Artificial Sequence
  GFR-binding peptide
  MOD_RES (1), (1): Xaa is C or S
  MOD_RES (15), (16), (17), (18), (19): Xaa is A or G
  MOD_RES (20), (21), (22), (23): Xaa is A or G or is absent
XAPTKLSPINVLYFXXXXXXXXXYGKIPNMVVKA

SEQ ID NO: 32625 - protein, 38 aa, Artificial Sequence
  GFR-binding peptide
  MOD_RES (2), (3), (37): Xaa is C or S
  MOD_RES (17), (18), (19), (20), (21): Xaa is A or G
  MOD_RES (22), (23), (24), (25): Xaa is A or G or is absent
AXXVPTELSPINMLYFXXXXXXXXXYGKIPDMVVEGXG

SEQ ID NO: 32626 - protein, 41 aa, Artificial Sequence
  GFR-binding peptide
  MOD_RES (5), (6), (40): Xaa is C or S
  MOD_RES (20), (21), (22), (23), (24): Xaa is A or G
  MOD_RES (25), (26), (27), (28): Xaa is A or G or is absent
IPKAXXVPTELSPINMLYFXXXXXXXXXYGKIPDMVVEGXG

SEQ ID NO: 32627 - protein, 37 aa, Artificial Sequence
  GFR-binding peptide
  MOD_RES (3), (4): Xaa is C or S
  MOD_RES (18), (19), (20), (21), (22): Xaa is A or G
  MOD_RES (23), (24), (25), (26): Xaa is A or G or is absent
KAXXVPTELSPINMLYFXXXXXXXXXYGKIPDMVVEG

SEQ ID NO: 32628 - protein, 37 aa, Artificial Sequence
  GFR-binding peptide
  MOD_RES (2), (3), (37): Xaa is C or S
  MOD_RES (17), (18), (19), (20), (21): Xaa is A or G
  MOD_RES (22), (23), (24), (25): Xaa is A or G or is absent
AXXVPTELSPINMLYFXXXXXXXXXYGKIPEMVVEGX

SEQ ID NO: 32629 - protein, 38 aa, Artificial Sequence
  GFR-binding peptide
  MOD_RES (5), (6), (38): Xaa is C or S
APASXXVPARLSPINILYFDAANNVVYGKIPDMVVEAX

SEQ ID NO: 32630 - protein, 38 aa, Artificial Sequence
  GFR-binding peptide
  MOD_RES (1), (35), (37): Xaa is C or S
  MOD_RES (15), (16), (17), (18), (19): Xaa is A or G
  MOD_RES (20), (21), (22), (23): Xaa is A or G or is absent
XAPTKLSPINVLYFXXXXXXXXXYGKIPNMVVKAXGXH

SEQ ID NO: 32631 - protein, 42 aa, Artificial Sequence
  GFR-binding peptide
  MOD_RES (5), (6), (40), (42): Xaa is C or S
  MOD_RES (20), (21), (22), (23), (24): Xaa is A or G
  MOD_RES (25), (26), (27), (28): Xaa is A or G or is absent
VPKPXXAPTQLSPINVLYFXXXXXXXXXYGKIPNMVVRAXGX

SEQ ID NO: 32632 - protein, 36 aa, Artificial Sequence
  GFR-binding peptide
  MOD_RES (1), (35): Xaa is C or S
  MOD_RES (15), (16), (17), (18), (19): Xaa is A or G
  MOD_RES (20), (21), (22), (23): Xaa is A or G or is absent
XAPTKLSPINVLYFXXXXXXXXXYGKIPNMVVKAXG

SEQ ID NO: 32633 - protein, 30 aa, Artificial Sequence
  GFR-binding peptide
APTQLSPINVLYFDDSSNVIYGKIPNMVVR

SEQ ID NO: 32634 - protein, 36 aa, Artificial Sequence
  GFR-binding peptide
  MOD_RES (1), (2), (33), (35): Xaa is C or S
XXAPVKTSPINMLYFDNGRVLLYGKIPMIVEEXGXL

SEQ ID NO: 32635 - protein, 37 aa, Artificial Sequence
  GFR-binding peptide
  MOD_RES (3), (4), (37): Xaa is C or S
KAXXVPTKLSPINVLYFDDMGVPTYGKIPEGMSVAEX

SEQ ID NO: 32636 - protein, 38 aa, Artificial Sequence
  GFR-binding peptide
  MOD_RES (2), (3), (35), (37): Xaa is C or S
PXXAPTKLSPINVLYFDDSSNVIYGKIPNMVVRSXGXH

SEQ ID NO: 32637 - protein, 33 aa, Artificial Sequence
  GFR-binding peptide
  MOD_RES (1), (33): Xaa is C or S
XVPTELSPINMLYFDEYDKVVYGKIPEMVVEGX

SEQ ID NO: 32638 - protein, 37 aa, Artificial Sequence
  GFR-binding peptide
  MOD_RES (5), (5): Xaa is C or S
  MOD_RES (19), (20), (21), (22), (23): Xaa is A or G
  MOD_RES (24), (25), (26), (27): Xaa is A or G or is absent
TKPTXAPTKLSPINVLYFXXXXXXXXXYGKIPNMVVR

SEQ ID NO: 32639 - protein, 35 aa, Artificial Sequence
  GFR-binding peptide
  MOD_RES (2), (3), (35): Xaa is C or S
PXXAPTKLSPINVLYFDDSSNVIYGKIPNMVVRSX

SEQ ID NO: 32640 - protein, 43 aa, Artificial Sequence
  GFR-binding peptide
  MOD_RES (5), (6), (41), (43): Xaa is C or S
  MOD_RES (20), (21), (22), (23), (24): Xaa is A or G
  MOD_RES (25), (26), (27), (28): Xaa is A or G or is absent
VGKAXXVPTKLSPINVLYFXXXXXXXXXYGKIPEGMSVAEXGX

SEQ ID NO: 32641 - protein, 34 aa, Artificial Sequence
  GFR-binding peptide
  MOD_RES (1), (1): Xaa is C or S
  MOD_RES (15), (16), (17), (18), (19): Xaa is A or G
  MOD_RES (20), (21), (22), (23): Xaa is A or G or is absent
XVPTELSPINMLYFXXXXXXXXXYGKIPDMVVEG

SEQ ID NO: 32642 - protein, 37 aa, Artificial Sequence
  GFR-binding peptide
  MOD_RES (5), (6): Xaa is C or S
VPKAXXAPTKLSPINVLYFDSSNNVIYGKIPNMVVKA

SEQ ID NO: 32643 - protein, 39 aa, Artificial Sequence
  GFR-binding peptide
  MOD_RES (1), (2), (37), (39): Xaa is C or S
  MOD_RES (16), (17), (18), (19), (20): Xaa is A or G
  MOD_RES (21), (22), (23), (24): Xaa is A or G or is absent
XXVPTKLSPINVLYFXXXXXXXXXYGKIPEGMSVAEXGX

SEQ ID NO: 32644 - protein, 35 aa, Artificial Sequence
  GFR-binding peptide
  MOD_RES (1), (34): Xaa is C or S
XVPTKLSPINVLYFDDMGVPTYGKIPEGMSVAEXG

SEQ ID NO: 32645 - protein, 38 aa, Artificial Sequence
  GFR-binding peptide
  MOD_RES (2), (3), (37): Xaa is C or S
  MOD_RES (17), (18), (19), (20), (21): Xaa is A or G
  MOD_RES (22), (23), (24), (25): Xaa is A or G or is absent
TXXVPTRLSPINILYFXXXXXXXXXYGKIPDMVVESXG

SEQ ID NO: 32646 - protein, 43 aa, Artificial Sequence
  GFR-binding peptide
  MOD_RES (6), (7), (40), (42): Xaa is C or S
KVGKAXXVPTKLSPINVLYFDDMGVPTYGKIPEGMSVAEXGXR

SEQ ID NO: 32647 - protein, 36 aa, Artificial Sequence
  GFR-binding peptide
  MOD_RES (2), (3), (36): Xaa is C or S
AXXVPTKLSPINVLYFDDMGVPTYGKIPEGMSVAEX

SEQ ID NO: 32648 - protein, 41 aa, Artificial Sequence
  GFR-binding peptide
  MOD_RES (6), (7): Xaa is C or S
  MOD_RES (21), (22), (23), (24), (25): Xaa is A or G
  MOD_RES (26), (27), (28), (29): Xaa is A or G or is absent
KVGKAXXVPTKLSPINVLYFXXXXXXXXXYGKIPEGMSVAE

SEQ ID NO: 32649 - protein, 39 aa, Artificial Sequence
  GFR-binding peptide
  MOD_RES (1), (2), (36), (38): Xaa is C or S
  MOD_RES (16), (17), (18), (19), (20): Xaa is A or G
  MOD_RES (21), (22), (23), (24): Xaa is A or G or is absent
XXAPTQLSPINVLYFXXXXXXXXXYGKIPNMVVRAXGXH

SEQ ID NO: 32650 - protein, 39 aa, Artificial Sequence
  GFR-binding peptide
  MOD_RES (2), (3), (37), (39): Xaa is C or S
  MOD_RES (17), (18), (19), (20), (21): Xaa is A or G
  MOD_RES (22), (23), (24), (25): Xaa is A or G or is absent
PXXTPTKMSPINMLYFXXXXXXXXXYGKIPGMVVDRXGX

SEQ ID NO: 32651 - protein, 33 aa, Artificial Sequence
  GFR-binding peptide
  MOD_RES (2), (3): Xaa is C or S
AXXVPTELSPINMLYFDEYDKVVYGKIPEMVVE

SEQ ID NO: 32652 - protein, 34 aa, Artificial Sequence
  GFR-binding peptide
  MOD_RES (1), (33): Xaa is C or S
XAPTQLSPINVLYFDDSSNVIYGKIPNMVVRAXG

SEQ ID NO: 32653 - protein, 36 aa, Artificial Sequence
  GFR-binding peptide
  MOD_RES (3), (4), (36): Xaa is C or S
KAXXVPTELSPINMLYFDEYDKVVYGKIPEMVVEGX

SEQ ID NO: 32654 - protein, 38 aa, Artificial Sequence
  GFR-binding peptide
  MOD_RES (4), (5): Xaa is C or S
  MOD_RES (19), (20), (21), (22), (23): Xaa is A or G
  MOD_RES (24), (25), (26), (27): Xaa is A or G or is absent
PKAXXVPTELSPINMLYFXXXXXXXXXYGKIPEMVVEG

SEQ ID NO: 32655 - protein, 41 aa, Artificial Sequence
  GFR-binding peptide
  MOD_RES (5), (6), (39), (41): Xaa is C or S
VGKAXXVPTKLSPINVLYFDDMGVPTYGKIPEGMSVAEXGX

SEQ ID NO: 32656 - protein, 40 aa, Artificial Sequence
  GFR-binding peptide
  MOD_RES (4), (5), (37), (39): Xaa is C or S
PKAXXVPTELSPINMLYFDEYDKVVYGKIPEMVVEGXGXR

SEQ ID NO: 32657 - protein, 35 aa, Artificial Sequence
  GFR-binding peptide
  MOD_RES (1), (2), (34): Xaa is C or S
XXVPARLSPINILYFDAANNVVYGKIPDMVVEAXG

SEQ ID NO: 32658 - protein, 41 aa, Artificial Sequence
  GFR-binding peptide
  MOD_RES (5), (6), (40): Xaa is C or S
  MOD_RES (20), (21), (22), (23), (24): Xaa is A or G
  MOD_RES (25), (26), (27), (28): Xaa is A or G or is absent
VPKPXXAPTQLSPINVLYFXXXXXXXXXYGKIPNMVVRAXG

SEQ ID NO: 32659 - protein, 38 aa, Artificial Sequence
  GFR-binding peptide
  MOD_RES (3), (4), (36), (38): Xaa is C or S
ASXXVPARLSPINILYFDAANNVVYGKIPDMVVEAXGX

SEQ ID NO: 32660 - protein, 34 aa, Artificial Sequence
  GFR-binding peptide
  MOD_RES (1), (2): Xaa is C or S
  MOD_RES (16), (17), (18), (19), (20): Xaa is A or G
  MOD_RES (21), (22), (23), (24): Xaa is A or G or is absent
XXTPTKMSPINMLYFXXXXXXXXXYGKIPGMVVD

SEQ ID NO: 32661 - protein, 40 aa, Artificial Sequence
  GFR-binding peptide
  MOD_RES (6), (7): Xaa is C or S
  MOD_RES (21), (22), (23), (24), (25): Xaa is A or G
  MOD_RES (26), (27), (28), (29): Xaa is A or G or is absent
AAPASXXVPARLSPINILYFXXXXXXXXXYGKIPDMVVEA

SEQ ID NO: 32662 - protein, 40 aa, Artificial Sequence
  GFR-binding peptide
  MOD_RES (3), (4), (38), (40): Xaa is C or S
  MOD_RES (18), (19), (20), (21), (22): Xaa is A or G
  MOD_RES (23), (24), (25), (26): Xaa is A or G or is absent
KAXXAPTKLSPINVLYFXXXXXXXXXYGKIPNMVVKAXGX

SEQ ID NO: 32663 - protein, 40 aa, Artificial Sequence
  GFR-binding peptide
  MOD_RES (5), (6), (39): Xaa is C or S
VGKAXXVPTKLSPINVLYFDDMGVPTYGKIPEGMSVAEXG

SEQ ID NO: 32664 - protein, 36 aa, Artificial Sequence
  GFR-binding peptide
  MOD_RES (3), (4): Xaa is C or S
KAXXVPTKLSPINVLYFDDMGVPTYGKIPEGMSVAE

SEQ ID NO: 32665 - protein, 39 aa, Artificial Sequence
  GFR-binding peptide
  MOD_RES (1), (2), (36), (38): Xaa is C or S
  MOD_RES (16), (17), (18), (19), (20): Xaa is A or G
  MOD_RES (21), (22), (23), (24): Xaa is A or G or is absent
XXVPTELSPINMLYFXXXXXXXXXYGKIPDMVVEGXGXR

SEQ ID NO: 32666 - protein, 39 aa, Artificial Sequence
  GFR-binding peptide
  MOD_RES (5), (37), (39): Xaa is C or S
TKPTXAPTKLSPINVLYFDDSSNVIYGKIPNMVVRSXGX

SEQ ID NO: 32667 - protein, 38 aa, Artificial Sequence
  GFR-binding peptide
  MOD_RES (4), (5): Xaa is C or S
  MOD_RES (19), (20), (21), (22), (23): Xaa is A or G
  MOD_RES (24), (25), (26), (27): Xaa is A or G or is absent
PKPXXAPTQLSPINVLYFXXXXXXXXXYGKIPNMVVRA

SEQ ID NO: 32668 - protein, 36 aa, Artificial Sequence
  GFR-binding peptide
  MOD_RES (2), (3): Xaa is C or S
  MOD_RES (17), (18), (19), (20), (21): Xaa is A or G
  MOD_RES (22), (23), (24), (25): Xaa is A or G or is absent
AXXVPTKLSPINILYFXXXXXXXXXYGKIPGMAVSE

SEQ ID NO: 32669 - protein, 34 aa, Artificial Sequence
  GFR-binding peptide
  MOD_RES (1), (2): Xaa is C or S
  MOD_RES (16), (17), (18), (19), (20): Xaa is A or G
  MOD_RES (21), (22), (23), (24): Xaa is A or G or is absent
XXAPVKTSPINMLYFXXXXXXXXXYGKIPMIVEE

SEQ ID NO: 32670 - protein, 33 aa, Artificial Sequence
  GFR-binding peptide
  MOD_RES (2), (3): Xaa is C or S
SXXVPARLSPINILYFDAANNVVYGKIPDMVVE

SEQ ID NO: 32671 - protein, 38 aa, Artificial Sequence
  GFR-binding peptide
  MOD_RES (1), (36), (38): Xaa is C or S
  MOD_RES (15), (16), (17), (18), (19): Xaa is A or G
  MOD_RES (20), (21), (22), (23): Xaa is A or G or is absent
XVPTKLSPINVLYFXXXXXXXXXYGKIPEGMSVAEXGX

SEQ ID NO: 32672 - protein, 35 aa, Artificial Sequence
  GFR-binding peptide
  MOD_RES (34), (34): Xaa is C or S
  MOD_RES (14), (15), (16), (17), (18): Xaa is A or G
  MOD_RES (19), (20), (21), (22): Xaa is A or G or is absent
VPTELSPINMLYFXXXXXXXXXYGKIPEMVVEGXG

SEQ ID NO: 32673 - protein, 32 aa, Artificial Sequence
  GFR-binding peptide
  MOD_RES (1), (1): Xaa is C or S
XVPTELSPINMLYFDEYDKVVYGKIPEMVVEG

SEQ ID NO: 32674 - protein, 34 aa, Artificial Sequence
  GFR-binding peptide
  MOD_RES (1), (33): Xaa is C or S
XVPTKLSPINILYFDKGVVTYYGKIPGMAVSEXG

SEQ ID NO: 32675 - protein, 40 aa, Artificial Sequence
  GFR-binding peptide
  MOD_RES (3), (4), (37), (39): Xaa is C or S
  MOD_RES (18), (19), (20), (21), (22): Xaa is A or G
  MOD_RES (23), (24), (25), (26): Xaa is A or G or is absent
STXXAPVKTSPINMLYFXXXXXXXXXYGKIPMIVEEXGXL

SEQ ID NO: 32676 - protein, 37 aa, Artificial Sequence
  GFR-binding peptide
  MOD_RES (1), (2), (36): Xaa is C or S
  MOD_RES (16), (17), (18), (19), (20): Xaa is A or G
  MOD_RES (21), (22), (23), (24): Xaa is A or G or is absent
XXVPARLSPINILYFXXXXXXXXXYGKIPDMVVEAXG

SEQ ID NO: 32677 - protein, 35 aa, Artificial Sequence
  GFR-binding peptide
  MOD_RES (1), (2): Xaa is C or S
  MOD_RES (16), (17), (18), (19), (20): Xaa is A or G
  MOD_RES (21), (22), (23), (24): Xaa is A or G or is absent
XXAPTQLSPINVLYFXXXXXXXXXYGKIPNMVVRA

SEQ ID NO: 32678 - protein, 34 aa, Artificial Sequence
  GFR-binding peptide
  MOD_RES (1), (2), (34): Xaa is C or S
XXVPTELSPINMLYFDENEKVVYGKIPDMVVEGX

SEQ ID NO: 32679 - protein, 38 aa, Artificial Sequence
  GFR-binding peptide
  MOD_RES (6), (7): Xaa is C or S
TVPKPXXAPTQLSPINVLYFDDSSNVIYGKIPNMVVRA

SEQ ID NO: 32680 - protein, 38 aa, Artificial Sequence
  GFR-binding peptide
  MOD_RES (1), (2), (36), (38): Xaa is C or S
  MOD_RES (16), (17), (18), (19), (20): Xaa is A or G
  MOD_RES (21), (22), (23), (24): Xaa is A or G or is absent
XXTPTKMSPINMLYFXXXXXXXXXYGKIPGMVVDRXGX

SEQ ID NO: 32681 - protein, 34 aa, Artificial Sequence
  GFR-binding peptide
  MOD_RES (1), (2): Xaa is C or S
  MOD_RES (16), (17), (18), (19), (20): Xaa is A or G
  MOD_RES (21), (22), (23), (24): Xaa is A or G or is absent
XXAPTKLSPINVLYFXXXXXXXXXYGKIPNMVVR

SEQ ID NO: 32682 - protein, 34 aa, Artificial Sequence
  GFR-binding peptide
  MOD_RES (1), (2): Xaa is C or S
  MOD_RES (16), (17), (18), (19), (20): Xaa is A or G
  MOD_RES (21), (22), (23), (24): Xaa is A or G or is absent
XXAPTKLSPINVLYFXXXXXXXXXYGKIPNMVVK

SEQ ID NO: 32683 - protein, 36 aa, Artificial Sequence
  GFR-binding peptide
  MOD_RES (35), (35): Xaa is C or S
  MOD_RES (14), (15), (16), (17), (18): Xaa is A or G
  MOD_RES (19), (20), (21), (22): Xaa is A or G or is absent
VPTKLSPINVLYFXXXXXXXXXYGKIPEGMSVAEXG

SEQ ID NO: 32684 - protein, 38 aa, Artificial Sequence
  GFR-binding peptide
  MOD_RES (4), (5), (37): Xaa is C or S
PKAXXVPTELSPINMLYFDEYDKVVYGKIPEMVVEGXG

SEQ ID NO: 32685 - protein, 36 aa, Artificial Sequence
  GFR-binding peptide
  MOD_RES (1), (35): Xaa is C or S
  MOD_RES (15), (16), (17), (18), (19): Xaa is A or G
  MOD_RES (20), (21), (22), (23): Xaa is A or G or is absent
XVPTELSPINMLYFXXXXXXXXXYGKIPEMVVEGXG

SEQ ID NO: 32686 - protein, 43 aa, Artificial Sequence
  GFR-binding peptide
  MOD_RES (7), (41), (43): Xaa is C or S
  MOD_RES (21), (22), (23), (24), (25): Xaa is A or G
  MOD_RES (26), (27), (28), (29): Xaa is A or G or is absent
HVTKPTXAPTKLSPINVLYFXXXXXXXXXYGKIPNMVVRSXGX

SEQ ID NO: 32687 - protein, 36 aa, Artificial Sequence
  GFR-binding peptide
  MOD_RES (1), (2): Xaa is C or S
  MOD_RES (16), (17), (18), (19), (20): Xaa is A or G
  MOD_RES (21), (22), (23), (24): Xaa is A or G or is absent
XXVPTKLSPINVLYFXXXXXXXXXYGKIPEGMSVAE

SEQ ID NO: 32688 - protein, 32 aa, Artificial Sequence
  GFR-binding peptide
  MOD_RES (32), (32): Xaa is C or S
VPTELSPINMLYFDENEKVVYGKIPDMVVEGX

SEQ ID NO: 32689 - protein, 40 aa, Artificial Sequence
  GFR-binding peptide
  MOD_RES (2), (3), (37), (39): Xaa is C or S
  MOD_RES (17), (18), (19), (20), (21): Xaa is A or G
  MOD_RES (22), (23), (24), (25): Xaa is A or G or is absent
TXXVPTRLSPINILYFXXXXXXXXXYGKIPDMVVESXGXR

SEQ ID NO: 32690 - protein, 39 aa, Artificial Sequence
  GFR-binding peptide
  MOD_RES (6), (7): Xaa is C or S
  MOD_RES (21), (22), (23), (24), (25): Xaa is A or G
  MOD_RES (26), (27), (28), (29): Xaa is A or G or is absent
GSAGPXXTPTKMSPINMLYFXXXXXXXXXYGKIPGMVVD

SEQ ID NO: 32691 - protein, 39 aa, Artificial Sequence
  GFR-binding peptide
  MOD_RES (4), (5), (39): Xaa is C or S
  MOD_RES (19), (20), (21), (22), (23): Xaa is A or G
  MOD_RES (24), (25), (26), (27): Xaa is A or G or is absent
PKPXXAPTKLSPINVLYFXXXXXXXXXYGKIPNMVVRSX

SEQ ID NO: 32692 - protein, 38 aa, Artificial Sequence
  GFR-binding peptide
  MOD_RES (4), (5): Xaa is C or S
  MOD_RES (19), (20), (21), (22), (23): Xaa is A or G
  MOD_RES (24), (25), (26), (27): Xaa is A or G or is absent
PASXXVPARLSPINILYFXXXXXXXXXYGKIPDMVVEA

SEQ ID NO: 32693 - protein, 38 aa, Artificial Sequence
  GFR-binding peptide
  MOD_RES (3), (4), (35), (37): Xaa is C or S
STXXAPVKTSPINMLYFDNGRVLLYGKIPMIVEEXGXL

SEQ ID NO: 32694 - protein, 36 aa, Artificial Sequence
  GFR-binding peptide
  MOD_RES (3), (4): Xaa is C or S
  MOD_RES (18), (19), (20), (21), (22): Xaa is A or G
  MOD_RES (23), (24), (25), (26): Xaa is A or G or is absent
KAXXVPTKLSPINILYFXXXXXXXXXYGKIPGMAVS

SEQ ID NO: 32695 - protein, 34 aa, Artificial Sequence
  GFR-binding peptide
  MOD_RES (32), (34): Xaa is C or S
APTKLSPINVLYFDSSNNVIYGKIPNMVVKAXGX

SEQ ID NO: 32696 - protein, 39 aa, Artificial Sequence
  GFR-binding peptide
  MOD_RES (4), (5), (39): Xaa is C or S
  MOD_RES (19), (20), (21), (22), (23): Xaa is A or G
  MOD_RES (24), (25), (26), (27): Xaa is A or G or is absent
PKAXXVPTELSPINMLYFXXXXXXXXXYGKIPDMVVEGX

SEQ ID NO: 32697 - protein, 40 aa, Artificial Sequence
  GFR-binding peptide
  MOD_RES (5), (6), (38), (40): Xaa is C or S
IPKAXXVPTELSPINMLYFDENEKVVYGKIPDMVVEGXGX

SEQ ID NO: 32698 - protein, 34 aa, Artificial Sequence
  GFR-binding peptide
  MOD_RES (1), (2), (34): Xaa is C or S
XXVPTELSPINMLYFDEYDKVVYGKIPEMVVEGX

SEQ ID NO: 32699 - protein, 33 aa, Artificial Sequence
  GFR-binding peptide
  MOD_RES (14), (15), (16), (17), (18): Xaa is A or G
  MOD_RES (19), (20), (21), (22): Xaa is A or G or is absent
APTQLSPINVLYFXXXXXXXXXYGKIPNMVVRA

SEQ ID NO: 32700 - protein, 40 aa, Artificial Sequence
  GFR-binding peptide
  MOD_RES (2), (3), (37), (39): Xaa is C or S
  MOD_RES (17), (18), (19), (20), (21): Xaa is A or G
  MOD_RES (22), (23), (24), (25): Xaa is A or G or is absent
PXXAPTQLSPINVLYFXXXXXXXXXYGKIPNMVVRAXGXH

SEQ ID NO: 32701 - protein, 36 aa, Artificial Sequence
  GFR-binding peptide
  MOD_RES (34), (36): Xaa is C or S
  MOD_RES (14), (15), (16), (17), (18): Xaa is A or G
  MOD_RES (19), (20), (21), (22): Xaa is A or G or is absent
VPTRLSPINILYFXXXXXXXXXYGKIPDMVVESXGX

SEQ ID NO: 32702 - protein, 39 aa, Artificial Sequence
  GFR-binding peptide
  MOD_RES (4), (5), (39): Xaa is C or S
  MOD_RES (19), (20), (21), (22), (23): Xaa is A or G
  MOD_RES (24), (25), (26), (27): Xaa is A or G or is absent
PPTXXVPTRLSPINILYFXXXXXXXXXYGKIPDMVVESX

SEQ ID NO: 32703 - protein, 37 aa, Artificial Sequence
  GFR-binding peptide
  MOD_RES (1), (2), (34), (36): Xaa is C or S
XXVPTELSPINMLYFDEYDKVVYGKIPEMVVEGXGXR

SEQ ID NO: 32704 - protein, 39 aa, Artificial Sequence
  GFR-binding peptide
  MOD_RES (5), (6): Xaa is C or S
  MOD_RES (20), (21), (22), (23), (24): Xaa is A or G
  MOD_RES (25), (26), (27), (28): Xaa is A or G or is absent
APASXXVPARLSPINILYFXXXXXXXXXYGKIPDMVVEA

SEQ ID NO: 32705 - protein, 37 aa, Artificial Sequence
  GFR-binding peptide
  MOD_RES (1), (2), (34), (36): Xaa is C or S
XXVPTRLSPINILYFDSANNVVYGKIPDMVVESXGXR

SEQ ID NO: 32706 - protein, 37 aa, Artificial Sequence
  GFR-binding peptide
  MOD_RES (3), (4), (36): Xaa is C or S
KAXXVPTKLSPINILYFDKGVVTYYGKIPGMAVSEXG

SEQ ID NO: 32707 - protein, 36 aa, Artificial Sequence
  GFR-binding peptide
  MOD_RES (2), (3): Xaa is C or S
  MOD_RES (17), (18), (19), (20), (21): Xaa is A or G
  MOD_RES (22), (23), (24), (25): Xaa is A or G or is absent
AXXAPTKLSPINVLYFXXXXXXXXXYGKIPNMVVKA

SEQ ID NO: 32708 - protein, 38 aa, Artificial Sequence
  GFR-binding peptide
  MOD_RES (3), (4), (36), (38): Xaa is C or S
KAXXAPTKLSPINVLYFDSSNNVIYGKIPNMVVKAXGX

SEQ ID NO: 32709 - protein, 36 aa, Artificial Sequence
  GFR-binding peptide
  MOD_RES (4), (5): Xaa is C or S
PKPXXAPTKLSPINVLYFDDSSNVIYGKIPNMVVRS

SEQ ID NO: 32710 - protein, 38 aa, Artificial Sequence
  GFR-binding peptide
  MOD_RES (2), (3), (38): Xaa is C or S
  MOD_RES (17), (18), (19), (20), (21): Xaa is A or G
  MOD_RES (22), (23), (24), (25): Xaa is A or G or is absent
AXXVPTKLSPINVLYFXXXXXXXXXYGKIPEGMSVAEX

SEQ ID NO: 32711 - protein, 35 aa, Artificial Sequence
  GFR-binding peptide
  MOD_RES (1), (2), (34): Xaa is C or S
XXAPTKLSPINVLYFDDSSNVIYGKIPNMVVRSXG

SEQ ID NO: 32712 - protein, 41 aa, Artificial Sequence
  GFR-binding peptide
  MOD_RES (3), (4), (38), (40): Xaa is C or S
  MOD_RES (18), (19), (20), (21), (22): Xaa is A or G
  MOD_RES (23), (24), (25), (26): Xaa is A or G or is absent
KPXXAPTKLSPINVLYFXXXXXXXXXYGKIPNMVVRSXGXH

SEQ ID NO: 32713 - protein, 42 aa, Artificial Sequence
  GFR-binding peptide
  MOD_RES (5), (39), (41): Xaa is C or S
  MOD_RES (19), (20), (21), (22), (23): Xaa is A or G
  MOD_RES (24), (25), (26), (27): Xaa is A or G or is absent
TKPTXAPTKLSPINVLYFXXXXXXXXXYGKIPNMVVRSXGXH

SEQ ID NO: 32714 - protein, 38 aa, Artificial Sequence
  GFR-binding peptide
  MOD_RES (3), (4), (36), (38): Xaa is C or S
PTXXVPTRLSPINILYFDSANNVVYGKIPDMVVESXGX

SEQ ID NO: 32715 - protein, 38 aa, Artificial Sequence
  GFR-binding peptide
  MOD_RES (7), (7): Xaa is C or S
HVTKPTXAPTKLSPINVLYFDDSSNVIYGKIPNMVVRS

SEQ ID NO: 32716 - protein, 37 aa, Artificial Sequence
  GFR-binding peptide
  MOD_RES (1), (35), (37): Xaa is C or S
  MOD_RES (15), (16), (17), (18), (19): Xaa is A or G
  MOD_RES (20), (21), (22), (23): Xaa is A or G or is absent
XAPTQLSPINVLYFXXXXXXXXXYGKIPNMVVRAXGX

SEQ ID NO: 32717 - protein, 34 aa, Artificial Sequence
  GFR-binding peptide
  MOD_RES (32), (34): Xaa is C or S
APTKLSPINVLYFDDSSNVIYGKIPNMVVRSXGX

SEQ ID NO: 32718 - protein, 40 aa, Artificial Sequence
  GFR-binding peptide
  MOD_RES (5), (6), (38), (40): Xaa is C or S
IPKAXXVPTELSPINMLYFDEYDKVVYGKIPEMVVEGXGX

SEQ ID NO: 32719 - protein, 42 aa, Artificial Sequence
  GFR-binding peptide
  MOD_RES (6), (7), (41): Xaa is C or S
  MOD_RES (21), (22), (23), (24), (25): Xaa is A or G
  MOD_RES (26), (27), (28), (29): Xaa is A or G or is absent
TVPKPXXAPTQLSPINVLYFXXXXXXXXXYGKIPNMVVRAXG

SEQ ID NO: 32720 - protein, 40 aa, Artificial Sequence
  GFR-binding peptide
  MOD_RES (6), (7): Xaa is C or S
  MOD_RES (21), (22), (23), (24), (25): Xaa is A or G
  MOD_RES (26), (27), (28), (29): Xaa is A or G or is absent
YVPKPXXAPTKLSPINVLYFXXXXXXXXXYGKIPNMVVRS

SEQ ID NO: 32721 - protein, 33 aa, Artificial Sequence
  GFR-binding peptide
  MOD_RES (31), (33): Xaa is C or S
APVKTSPINMLYFDNGRVLLYGKIPMIVEEXGX

SEQ ID NO: 32722 - protein, 35 aa, Artificial Sequence
  GFR-binding peptide
  MOD_RES (1), (35): Xaa is C or S
  MOD_RES (15), (16), (17), (18), (19): Xaa is A or G
  MOD_RES (20), (21), (22), (23): Xaa is A or G or is absent
XVPTELSPINMLYFXXXXXXXXXYGKIPDMVVEGX

SEQ ID NO: 32723 - protein, 37 aa, Artificial Sequence
  GFR-binding peptide
  MOD_RES (6), (7): Xaa is C or S
SIPKAXXVPTELSPINMLYFDEYDKVVYGKIPEMVVE

SEQ ID NO: 32724 - protein, 37 aa, Artificial Sequence
  GFR-binding peptide
  MOD_RES (5), (6): Xaa is C or S
VPKPXXAPTKLSPINVLYFDDSSNVIYGKIPNMVVRS

SEQ ID NO: 32725 - protein, 43 aa, Artificial Sequence
  GFR-binding peptide
  MOD_RES (5), (6), (40), (42): Xaa is C or S
  MOD_RES (20), (21), (22), (23), (24): Xaa is A or G
  MOD_RES (25), (26), (27), (28): Xaa is A or G or is absent
VPKPXXAPTKLSPINVLYFXXXXXXXXXYGKIPNMVVRSXGXH

SEQ ID NO: 32726 - protein, 37 aa, Artificial Sequence
  GFR-binding peptide
  MOD_RES (1), (35), (37): Xaa is C or S
  MOD_RES (15), (16), (17), (18), (19): Xaa is A or G
  MOD_RES (20), (21), (22), (23): Xaa is A or G or is absent
XVPTELSPINMLYFXXXXXXXXXYGKIPDMVVEGXGX

SEQ ID NO: 32727 - protein, 36 aa, Artificial Sequence
  GFR-binding peptide
  MOD_RES (1), (2), (34), (36): Xaa is C or S
XXAPTQLSPINVLYFDDSSNVIYGKIPNMVVRAXGX

SEQ ID NO: 32728 - protein, 39 aa, Artificial Sequence
  GFR-binding peptide
  MOD_RES (1), (36), (38): Xaa is C or S
  MOD_RES (15), (16), (17), (18), (19): Xaa is A or G
  MOD_RES (20), (21), (22), (23): Xaa is A or G or is absent
XVPTKLSPINVLYFXXXXXXXXXYGKIPEGMSVAEXGXR

SEQ ID NO: 32729 - protein, 33 aa, Artificial Sequence
  GFR-binding peptide
  MOD_RES (1), (1): Xaa is C or S
  MOD_RES (15), (16), (17), (18), (19): Xaa is A or G
  MOD_RES (20), (21), (22), (23): Xaa is A or G or is absent
XVPTKLSPINILYFXXXXXXXXXYGKIPGMAVS

SEQ ID NO: 32730 - protein, 40 aa, Artificial Sequence
  GFR-binding peptide
  MOD_RES (4), (5), (38), (40): Xaa is C or S
GKAXXVPTKLSPINVLYFDDMGVPTYGKIPEGMSVAEXGX

SEQ ID NO: 32731 - protein, 37 aa, Artificial Sequence
  GFR-binding peptide
  MOD_RES (6), (7): Xaa is C or S
STPPTXXVPTRLSPINILYFDSANNVVYGKIPDMVVE

SEQ ID NO: 32732 - protein, 35 aa, Artificial Sequence
  GFR-binding peptide
  MOD_RES (34), (34): Xaa is C or S
  MOD_RES (14), (15), (16), (17), (18): Xaa is A or G
  MOD_RES (19), (20), (21), (22): Xaa is A or G or is absent
TPTKMSPINMLYFXXXXXXXXXYGKIPGMVVDRXG

SEQ ID NO: 32733 - protein, 36 aa, Artificial Sequence
  GFR-binding peptide
  MOD_RES (3), (4), (36): Xaa is C or S
ASXXVPARLSPINILYFDAANNVVYGKIPDMVVEAX

SEQ ID NO: 32734 - protein, 37 aa, Artificial Sequence
  GFR-binding peptide
  MOD_RES (1), (35), (37): Xaa is C or S
  MOD_RES (15), (16), (17), (18), (19): Xaa is A or G
  MOD_RES (20), (21), (22), (23): Xaa is A or G or is absent
XVPTKLSPINILYFXXXXXXXXXYGKIPGMAVSEXGX

SEQ ID NO: 32735 - protein, 39 aa, Artificial Sequence
  GFR-binding peptide
  MOD_RES (3), (4), (38): Xaa is C or S
  MOD_RES (18), (19), (20), (21), (22): Xaa is A or G
  MOD_RES (23), (24), (25), (26): Xaa is A or G or is absent
GPXXTPTKMSPINMLYFXXXXXXXXXYGKIPGMVVDRXG

SEQ ID NO: 32736 - protein, 38 aa, Artificial Sequence
  GFR-binding peptide
  MOD_RES (1), (35), (37): Xaa is C or S
  MOD_RES (15), (16), (17), (18), (19): Xaa is A or G
  MOD_RES (20), (21), (22), (23): Xaa is A or G or is absent
XVPTELSPINMLYFXXXXXXXXXYGKIPEMVVEGXGXR

SEQ ID NO: 32737 - protein, 40 aa, Artificial Sequence
  GFR-binding peptide
  MOD_RES (4), (5), (39): Xaa is C or S
  MOD_RES (19), (20), (21), (22), (23): Xaa is A or G
  MOD_RES (24), (25), (26), (27): Xaa is A or G or is absent
PKPXXAPTQLSPINVLYFXXXXXXXXXYGKIPNMVVRAXG

SEQ ID NO: 32738 - protein, 36 aa, Artificial Sequence
  GFR-binding peptide
  MOD_RES (2), (34), (36): Xaa is C or S
TXAPTKLSPINVLYFDDSSNVIYGKIPNMVVRSXGX

SEQ ID NO: 32739 - protein, 34 aa, Artificial Sequence
  GFR-binding peptide
  MOD_RES (1), (1): Xaa is C or S
  MOD_RES (15), (16), (17), (18), (19): Xaa is A or G
  MOD_RES (20), (21), (22), (23): Xaa is A or G or is absent
XAPTKLSPINVLYFXXXXXXXXXYGKIPNMVVRS

SEQ ID NO: 32740 - protein, 36 aa, Artificial Sequence
  GFR-binding peptide
  MOD_RES (1), (33), (35): Xaa is C or S
XVPTRLSPINILYFDSANNVVYGKIPDMVVESXGXR

SEQ ID NO: 32741 - protein, 41 aa, Artificial Sequence
  GFR-binding peptide
  MOD_RES (4), (5), (39), (41): Xaa is C or S
  MOD_RES (19), (20), (21), (22), (23): Xaa is A or G
  MOD_RES (24), (25), (26), (27): Xaa is A or G or is absent
PPTXXVPTRLSPINILYFXXXXXXXXXYGKIPDMVVESXGX

SEQ ID NO: 32742 - protein, 37 aa, Artificial Sequence
  GFR-binding peptide
  MOD_RES (2), (3), (37): Xaa is C or S
  MOD_RES (17), (18), (19), (20), (21): Xaa is A or G
  MOD_RES (22), (23), (24), (25): Xaa is A or G or is absent
AXXAPTKLSPINVLYFXXXXXXXXXYGKIPNMVVKAX

SEQ ID NO: 32743 - protein, 37 aa, Artificial Sequence
  GFR-binding peptide
  MOD_RES (3), (35), (37): Xaa is C or S
PTXAPTKLSPINVLYFDDSSNVIYGKIPNMVVRSXGX

SEQ ID NO: 32744 - protein, 39 aa, Artificial Sequence
  GFR-binding peptide
  MOD_RES (5), (6): Xaa is C or S
  MOD_RES (20), (21), (22), (23), (24): Xaa is A or G
  MOD_RES (25), (26), (27), (28): Xaa is A or G or is absent
VPKPXXAPTQLSPINVLYFXXXXXXXXXYGKIPNMVVRA

SEQ ID NO: 32745 - protein, 37 aa, Artificial Sequence
  GFR-binding peptide
  MOD_RES (4), (5), (37): Xaa is C or S
PASXXVPARLSPINILYFDAANNVVYGKIPDMVVEAX

SEQ ID NO: 32746 - protein, 37 aa, Artificial Sequence
  GFR-binding peptide
  MOD_RES (1), (35), (37): Xaa is C or S
  MOD_RES (15), (16), (17), (18), (19): Xaa is A or G
  MOD_RES (20), (21), (22), (23): Xaa is A or G or is absent
XVPTELSPINMLYFXXXXXXXXXYGKIPEMVVEGXGX

SEQ ID NO: 32747 - protein, 39 aa, Artificial Sequence
  GFR-binding peptide
  MOD_RES (5), (6), (39): Xaa is C or S
VGKAXXVPTKLSPINVLYFDDMGVPTYGKIPEGMSVAEX

SEQ ID NO: 32748 - protein, 37 aa, Artificial Sequence
  GFR-binding peptide
  MOD_RES (4), (5): Xaa is C or S
  MOD_RES (19), (20), (21), (22), (23): Xaa is A or G
  MOD_RES (24), (25), (26), (27): Xaa is A or G or is absent
PKAXXVPTELSPINMLYFXXXXXXXXXYGKIPEMVVE

SEQ ID NO: 32749 - protein, 35 aa, Artificial Sequence
  GFR-binding peptide
  MOD_RES (1), (35): Xaa is C or S
  MOD_RES (15), (16), (17), (18), (19): Xaa is A or G
  MOD_RES (20), (21), (22), (23): Xaa is A or G or is absent
XAPTKLSPINVLYFXXXXXXXXXYGKIPNMVVRSX

SEQ ID NO: 32750 - protein, 34 aa, Artificial Sequence
  GFR-binding peptide
  MOD_RES (34), (34): Xaa is C or S
  MOD_RES (14), (15), (16), (17), (18): Xaa is A or G
  MOD_RES (19), (20), (21), (22): Xaa is A or G or is absent
VPTKLSPINILYFXXXXXXXXXYGKIPGMAVSEX

SEQ ID NO: 32751 - protein, 38 aa, Artificial Sequence
  GFR-binding peptide
  MOD_RES (2), (3), (35), (37): Xaa is C or S
SXXVPARLSPINILYFDAANNVVYGKIPDMVVEAXGXR

SEQ ID NO: 32752 - protein, 38 aa, Artificial Sequence
  GFR-binding peptide
  MOD_RES (5), (6): Xaa is C or S
  MOD_RES (20), (21), (22), (23), (24): Xaa is A or G
  MOD_RES (25), (26), (27), (28): Xaa is A or G or is absent
IPKAXXVPTELSPINMLYFXXXXXXXXXYGKIPEMVVE

SEQ ID NO: 32753 - protein, 32 aa, Artificial Sequence
  GFR-binding peptide
  MOD_RES (14), (15), (16), (17), (18): Xaa is A or G
  MOD_RES (19), (20), (21), (22): Xaa is A or G or is absent
APTKLSPINVLYFXXXXXXXXXYGKIPNMVVR

SEQ ID NO: 32754 - protein, 36 aa, Artificial Sequence
  GFR-binding peptide
  MOD_RES (3), (4): Xaa is C or S
  MOD_RES (18), (19), (20), (21), (22): Xaa is A or G
  MOD_RES (23), (24), (25), (26): Xaa is A or G or is absent
KAXXAPTKLSPINVLYFXXXXXXXXXYGKIPNMVVK

SEQ ID NO: 32755 - protein, 44 aa, Artificial Sequence
  GFR-binding peptide
  MOD_RES (6), (7), (41), (43): Xaa is C or S
  MOD_RES (21), (22), (23), (24), (25): Xaa is A or G
  MOD_RES (26), (27), (28), (29): Xaa is A or G or is absent
HVPKPXXAPTKLSPINVLYFXXXXXXXXXYGKIPNMVVRSXGXH

SEQ ID NO: 32756 - protein, 32 aa, Artificial Sequence
  GFR-binding peptide
  MOD_RES (1), (1): Xaa is C or S
XVPTKLSPINILYFDKGVVTYYGKIPGMAVSE

SEQ ID NO: 32757 - protein, 40 aa, Artificial Sequence
  GFR-binding peptide
  MOD_RES (2), (3), (37), (39): Xaa is C or S
  MOD_RES (17), (18), (19), (20), (21): Xaa is A or G
  MOD_RES (22), (23), (24), (25): Xaa is A or G or is absent
AXXVPTELSPINMLYFXXXXXXXXXYGKIPDMVVEGXGXR

SEQ ID NO: 32758 - protein, 38 aa, Artificial Sequence
  GFR-binding peptide
  MOD_RES (5), (6): Xaa is C or S
VGKAXXVPTKLSPINVLYFDDMGVPTYGKIPEGMSVAE

SEQ ID NO: 32759 - protein, 43 aa, Artificial Sequence
  GFR-binding peptide
  MOD_RES (6), (7), (41), (43): Xaa is C or S
  MOD_RES (21), (22), (23), (24), (25): Xaa is A or G
  MOD_RES (26), (27), (28), (29): Xaa is A or G or is absent
HVPKPXXAPTKLSPINVLYFXXXXXXXXXYGKIPNMVVRSXGX

SEQ ID NO: 32760 - protein, 32 aa, Artificial Sequence
  GFR-binding peptide
  MOD_RES (2), (2): Xaa is C or S
TXAPTKLSPINVLYFDDSSNVIYGKIPNMVVR

SEQ ID NO: 32761 - protein, 37 aa, Artificial Sequence
  GFR-binding peptide
  MOD_RES (4), (5): Xaa is C or S
  MOD_RES (19), (20), (21), (22), (23): Xaa is A or G
  MOD_RES (24), (25), (26), (27): Xaa is A or G or is absent
PKPXXAPTKLSPINVLYFXXXXXXXXXYGKIPNMVVR

SEQ ID NO: 32762 - protein, 37 aa, Artificial Sequence
  GFR-binding peptide
  MOD_RES (1), (2), (34), (36): Xaa is C or S
XXVPTELSPINMLYFDENEKVVYGKIPDMVVEGXGXR

SEQ ID NO: 32763 - protein, 37 aa, Artificial Sequence
  GFR-binding peptide
  MOD_RES (2), (3), (35), (37): Xaa is C or S
PXXAPTKLSPINVLYFDDSSNVIYGKIPNMVVRSXGX

SEQ ID NO: 32764 - protein, 37 aa, Artificial Sequence
  GFR-binding peptide
  MOD_RES (2), (3), (35), (37): Xaa is C or S
TXXVPTRLSPINILYFDSANNVVYGKIPDMVVESXGX

SEQ ID NO: 32765 - protein, 41 aa, Artificial Sequence
  GFR-binding peptide
  MOD_RES (5), (6), (38), (40): Xaa is C or S
VPKAXXAPTKLSPINVLYFDSSNNVIYGKIPNMVVKAXGXH

SEQ ID NO: 32766 - protein, 39 aa, Artificial Sequence
  GFR-binding peptide
  MOD_RES (1), (2), (36), (38): Xaa is C or S
  MOD_RES (16), (17), (18), (19), (20): Xaa is A or G
  MOD_RES (21), (22), (23), (24): Xaa is A or G or is absent
XXAPTKLSPINVLYFXXXXXXXXXYGKIPNMVVRSXGXH

SEQ ID NO: 32767 - protein, 35 aa, Artificial Sequence
  GFR-binding peptide
  MOD_RES (2), (34): Xaa is C or S
TXAPTKLSPINVLYFDDSSNVIYGKIPNMVVRSXG

SEQ ID NO: 32768 - protein, 34 aa, Artificial Sequence
  GFR-binding peptide
  MOD_RES (1), (33): Xaa is C or S
XVPARLSPINILYFDAANNVVYGKIPDMVVEAXG

SEQ ID NO: 32769 - protein, 35 aa, Artificial Sequence
  GFR-binding peptide
  MOD_RES (4), (5): Xaa is C or S
PPTXXVPTRLSPINILYFDSANNVVYGKIPDMVVE

SEQ ID NO: 32770 - protein, 34 aa, Artificial Sequence
  GFR-binding peptide
  MOD_RES (1), (2), (34): Xaa is C or S
XXAPTKLSPINVLYFDSSNNVIYGKIPNMVVKAX

SEQ ID NO: 32771 - protein, 40 aa, Artificial Sequence
  GFR-binding peptide
  MOD_RES (6), (7), (39): Xaa is C or S
YVPKPXXAPTKLSPINVLYFDDSSNVIYGKIPNMVVRSXG

SEQ ID NO: 32772 - protein, 36 aa, Artificial Sequence
  GFR-binding peptide
  MOD_RES (3), (3): Xaa is C or S
  MOD_RES (17), (18), (19), (20), (21): Xaa is A or G
  MOD_RES (22), (23), (24), (25): Xaa is A or G or is absent
PTXAPTKLSPINVLYFXXXXXXXXXYGKIPNMVVRS

SEQ ID NO: 32773 - protein, 39 aa, Artificial Sequence
  GFR-binding peptide
  MOD_RES (5), (6), (38): Xaa is C or S
ASKAXXVPTKLSPINILYFDKGVVTYYGKIPGMAVSEXG

SEQ ID NO: 32774 - protein, 37 aa, Artificial Sequence
  GFR-binding peptide
  MOD_RES (34), (36): Xaa is C or S
  MOD_RES (14), (15), (16), (17), (18): Xaa is A or G
  MOD_RES (19), (20), (21), (22): Xaa is A or G or is absent
APTKLSPINVLYFXXXXXXXXXYGKIPNMVVKAXGXH

SEQ ID NO: 32775 - protein, 38 aa, Artificial Sequence
  GFR-binding peptide
  MOD_RES (4), (5), (37): Xaa is C or S
PKAXXAPTKLSPINVLYFDSSNNVIYGKIPNMVVKAXG

SEQ ID NO: 32776 - protein, 32 aa, Artificial Sequence
  GFR-binding peptide
  MOD_RES (32), (32): Xaa is C or S
VPARLSPINILYFDAANNVVYGKIPDMVVEAX

SEQ ID NO: 32777 - protein, 39 aa, Artificial Sequence
  GFR-binding peptide
  MOD_RES (2), (3), (38): Xaa is C or S
  MOD_RES (17), (18), (19), (20), (21): Xaa is A or G
  MOD_RES (22), (23), (24), (25): Xaa is A or G or is absent
AXXVPTKLSPINVLYFXXXXXXXXXYGKIPEGMSVAEXG

SEQ ID NO: 32778 - protein, 35 aa, Artificial Sequence
  GFR-binding peptide
  MOD_RES (4), (5): Xaa is C or S
PKAXXAPTKLSPINVLYFDSSNNVIYGKIPNMVVK

SEQ ID NO: 32779 - protein, 34 aa, Artificial Sequence
  GFR-binding peptide
  MOD_RES (33), (33): Xaa is C or S
  MOD_RES (14), (15), (16), (17), (18): Xaa is A or G
  MOD_RES (19), (20), (21), (22): Xaa is A or G or is absent
APVKTSPINMLYFXXXXXXXXXYGKIPMIVEEXG

SEQ ID NO: 32780 - protein, 34 aa, Artificial Sequence
  GFR-binding peptide
  MOD_RES (3), (4): Xaa is C or S
KPXXAPTKLSPINVLYFDDSSNVIYGKIPNMVVR

SEQ ID NO: 32781 - protein, 39 aa, Artificial Sequence
  GFR-binding peptide
  MOD_RES (4), (5), (39): Xaa is C or S
  MOD_RES (19), (20), (21), (22), (23): Xaa is A or G
  MOD_RES (24), (25), (26), (27): Xaa is A or G or is absent
AGPXXTPTKMSPINMLYFXXXXXXXXXYGKIPGMVVDRX

SEQ ID NO: 32782 - protein, 41 aa, Artificial Sequence
  GFR-binding peptide
  MOD_RES (6), (7), (39), (41): Xaa is C or S
KIPKAXXVPTELSPINMLYFDENEKVVYGKIPDMVVEGXGX

SEQ ID NO: 32783 - protein, 37 aa, Artificial Sequence
  GFR-binding peptide
  MOD_RES (2), (36): Xaa is C or S
  MOD_RES (16), (17), (18), (19), (20): Xaa is A or G
  MOD_RES (21), (22), (23), (24): Xaa is A or G or is absent
TXAPTKLSPINVLYFXXXXXXXXXYGKIPNMVVRSXG

SEQ ID NO: 32784 - protein, 35 aa, Artificial Sequence
  GFR-binding peptide
  MOD_RES (4), (5): Xaa is C or S
SKAXXVPTKLSPINILYFDKGVVTYYGKIPGMAVS

SEQ ID NO: 32785 - protein, 36 aa, Artificial Sequence
  GFR-binding peptide
  MOD_RES (3), (4): Xaa is C or S
  MOD_RES (18), (19), (20), (21), (22): Xaa is A or G
  MOD_RES (23), (24), (25), (26): Xaa is A or G or is absent
STXXAPVKTSPINMLYFXXXXXXXXXYGKIPMIVEE

SEQ ID NO: 32786 - protein, 39 aa, Artificial Sequence
  GFR-binding peptide
  MOD_RES (2), (3), (37), (39): Xaa is C or S
  MOD_RES (17), (18), (19), (20), (21): Xaa is A or G
  MOD_RES (22), (23), (24), (25): Xaa is A or G or is absent
AXXVPTELSPINMLYFXXXXXXXXXYGKIPEMVVEGXGX

SEQ ID NO: 32787 - protein, 38 aa, Artificial Sequence
  GFR-binding peptide
  MOD_RES (4), (5), (37): Xaa is C or S
PASXXVPARLSPINILYFDAANNVVYGKIPDMVVEAXG

SEQ ID NO: 32788 - protein, 39 aa, Artificial Sequence
  GFR-binding peptide
  MOD_RES (4), (5), (37), (39): Xaa is C or S
PASXXVPARLSPINILYFDAANNVVYGKIPDMVVEAXGX

SEQ ID NO: 32789 - protein, 35 aa, Artificial Sequence
  GFR-binding peptide
  MOD_RES (34), (34): Xaa is C or S
  MOD_RES (14), (15), (16), (17), (18): Xaa is A or G
  MOD_RES (19), (20), (21), (22): Xaa is A or G or is absent
VPTRLSPINILYFXXXXXXXXXYGKIPDMVVESXG

SEQ ID NO: 32790 - protein, 40 aa, Artificial Sequence
  GFR-binding peptide
  MOD_RES (5), (6), (40): Xaa is C or S
  MOD_RES (20), (21), (22), (23), (24): Xaa is A or G
  MOD_RES (25), (26), (27), (28): Xaa is A or G or is absent
VPKPXXAPTKLSPINVLYFXXXXXXXXXYGKIPNMVVRSX

SEQ ID NO: 32791 - protein, 37 aa, Artificial Sequence
  GFR-binding peptide
  MOD_RES (3), (37): Xaa is C or S
  MOD_RES (17), (18), (19), (20), (21): Xaa is A or G
  MOD_RES (22), (23), (24), (25): Xaa is A or G or is absent
PTXAPTKLSPINVLYFXXXXXXXXXYGKIPNMVVRSX

SEQ ID NO: 32792 - protein, 35 aa, Artificial Sequence
  GFR-binding peptide
  MOD_RES (34), (34): Xaa is C or S
  MOD_RES (14), (15), (16), (17), (18): Xaa is A or G
  MOD_RES (19), (20), (21), (22): Xaa is A or G or is absent
APTKLSPINVLYFXXXXXXXXXYGKIPNMVVRSXG

SEQ ID NO: 32793 - protein, 38 aa, Artificial Sequence
  GFR-binding peptide
  MOD_RES (5), (6): Xaa is C or S
  MOD_RES (20), (21), (22), (23), (24): Xaa is A or G
  MOD_RES (25), (26), (27), (28): Xaa is A or G or is absent
IPKAXXVPTELSPINMLYFXXXXXXXXXYGKIPDMVVE

SEQ ID NO: 32794 - protein, 32 aa, Artificial Sequence
  GFR-binding peptide
  MOD_RES (1), (1): Xaa is C or S
XAPTKLSPINVLYFDSSNNVIYGKIPNMVVKA

SEQ ID NO: 32795 - protein, 38 aa, Artificial Sequence
  GFR-binding peptide
  MOD_RES (6), (7): Xaa is C or S
AVPKAXXAPTKLSPINVLYFDSSNNVIYGKIPNMVVKA

SEQ ID NO: 32796 - protein, 34 aa, Artificial Sequence
  GFR-binding peptide
  MOD_RES (33), (33): Xaa is C or S
VPTKLSPINVLYFDDMGVPTYGKIPEGMSVAEXG

SEQ ID NO: 32797 - protein, 40 aa, Artificial Sequence
  GFR-binding peptide
  MOD_RES (6), (38), (40): Xaa is C or S
VTKPTXAPTKLSPINVLYFDDSSNVIYGKIPNMVVRSXGX

SEQ ID NO: 32798 - protein, 37 aa, Artificial Sequence
  GFR-binding peptide
  MOD_RES (5), (6): Xaa is C or S
VPKPXXAPTQLSPINVLYFDDSSNVIYGKIPNMVVRA

SEQ ID NO: 32799 - protein, 37 aa, Artificial Sequence
  GFR-binding peptide
  MOD_RES (6), (7): Xaa is C or S
AVPKAXXAPTKLSPINVLYFDSSNNVIYGKIPNMVVK

SEQ ID NO: 32800 - protein, 35 aa, Artificial Sequence
  GFR-binding peptide
  MOD_RES (3), (4): Xaa is C or S
KAXXVPTELSPINMLYFDEYDKVVYGKIPEMVVEG

SEQ ID NO: 32801 - protein, 40 aa, Artificial Sequence
  GFR-binding peptide
  MOD_RES (2), (3), (37), (39): Xaa is C or S
  MOD_RES (17), (18), (19), (20), (21): Xaa is A or G
  MOD_RES (22), (23), (24), (25): Xaa is A or G or is absent
SXXVPARLSPINILYFXXXXXXXXXYGKIPDMVVEAXGXR

SEQ ID NO: 32802 - protein, 36 aa, Artificial Sequence
  GFR-binding peptide
  MOD_RES (5), (6): Xaa is C or S
VPKPXXAPTQLSPINVLYFDDSSNVIYGKIPNMVVR

SEQ ID NO: 32803 - protein, 39 aa, Artificial Sequence
  GFR-binding peptide
  MOD_RES (3), (4), (38): Xaa is C or S
  MOD_RES (18), (19), (20), (21), (22): Xaa is A or G
  MOD_RES (23), (24), (25), (26): Xaa is A or G or is absent
PTXXVPTRLSPINILYFXXXXXXXXXYGKIPDMVVESXG

SEQ ID NO: 32804 - protein, 32 aa, Artificial Sequence
  GFR-binding peptide
  MOD_RES (14), (15), (16), (17), (18): Xaa is A or G
  MOD_RES (19), (20), (21), (22): Xaa is A or G or is absent
VPTKLSPINILYFXXXXXXXXXYGKIPGMAVS

SEQ ID NO: 32805 - protein, 40 aa, Artificial Sequence
  GFR-binding peptide
  MOD_RES (2), (3), (37), (39): Xaa is C or S
  MOD_RES (17), (18), (19), (20), (21): Xaa is A or G
  MOD_RES (22), (23), (24), (25): Xaa is A or G or is absent
PXXAPTKLSPINVLYFXXXXXXXXXYGKIPNMVVRSXGXH

SEQ ID NO: 32806 - protein, 40 aa, Artificial Sequence
  GFR-binding peptide
  MOD_RES (4), (5), (39): Xaa is C or S
  MOD_RES (19), (20), (21), (22), (23): Xaa is A or G
  MOD_RES (24), (25), (26), (27): Xaa is A or G or is absent
PKAXXVPTELSPINMLYFXXXXXXXXXYGKIPEMVVEGXG

SEQ ID NO: 32807 - protein, 42 aa, Artificial Sequence
  GFR-binding peptide
  MOD_RES (4), (5), (39), (41): Xaa is C or S
  MOD_RES (19), (20), (21), (22), (23): Xaa is A or G
  MOD_RES (24), (25), (26), (27): Xaa is A or G or is absent
SKAXXVPTKLSPINILYFXXXXXXXXXYGKIPGMAVSEXGXR

SEQ ID NO: 32808 - protein, 42 aa, Artificial Sequence
  GFR-binding peptide
  MOD_RES (7), (39), (41): Xaa is C or S
HVTKPTXAPTKLSPINVLYFDDSSNVIYGKIPNMVVRSXGXH

SEQ ID NO: 32809 - protein, 38 aa, Artificial Sequence
  GFR-binding peptide
  MOD_RES (1), (35), (37): Xaa is C or S
  MOD_RES (15), (16), (17), (18), (19): Xaa is A or G
  MOD_RES (20), (21), (22), (23): Xaa is A or G or is absent
XVPTRLSPINILYFXXXXXXXXXYGKIPDMVVESXGXR

SEQ ID NO: 32810 - protein, 33 aa, Artificial Sequence
  GFR-binding peptide
  MOD_RES (1), (2), (33): Xaa is C or S
XXAPVKTSPINMLYFDNGRVLLYGKIPMIVEEX

SEQ ID NO: 32811 - protein, 36 aa, Artificial Sequence
  GFR-binding peptide
  MOD_RES (1), (2), (36): Xaa is C or S
  MOD_RES (16), (17), (18), (19), (20): Xaa is A or G
  MOD_RES (21), (22), (23), (24): Xaa is A or G or is absent
XXAPTKLSPINVLYFXXXXXXXXXYGKIPNMVVKAX

SEQ ID NO: 32812 - protein, 42 aa, Artificial Sequence
  GFR-binding peptide
  MOD_RES (4), (5), (39), (41): Xaa is C or S
  MOD_RES (19), (20), (21), (22), (23): Xaa is A or G
  MOD_RES (24), (25), (26), (27): Xaa is A or G or is absent
PKPXXAPTKLSPINVLYFXXXXXXXXXYGKIPNMVVRSXGXH

SEQ ID NO: 32813 - protein, 39 aa, Artificial Sequence
  GFR-binding peptide
  MOD_RES (5), (39): Xaa is C or S
  MOD_RES (19), (20), (21), (22), (23): Xaa is A or G
  MOD_RES (24), (25), (26), (27): Xaa is A or G or is absent
TKPTXAPTKLSPINVLYFXXXXXXXXXYGKIPNMVVRSX

SEQ ID NO: 32814 - protein, 35 aa, Artificial Sequence
  GFR-binding peptide
  MOD_RES (32), (34): Xaa is C or S
VPARLSPINILYFDAANNVVYGKIPDMVVEAXGXR

SEQ ID NO: 32815 - protein, 41 aa, Artificial Sequence
  GFR-binding peptide
  MOD_RES (4), (5), (38), (40): Xaa is C or S
GKAXXVPTKLSPINVLYFDDMGVPTYGKIPEGMSVAEXGXR

SEQ ID NO: 32816 - protein, 32 aa, Artificial Sequence
  GFR-binding peptide
  MOD_RES (32), (32): Xaa is C or S
APTQLSPINVLYFDDSSNVIYGKIPNMVVRAX

SEQ ID NO: 32817 - protein, 41 aa, Artificial Sequence
  GFR-binding peptide
  MOD_RES (5), (6), (38), (40): Xaa is C or S
IPKAXXVPTELSPINMLYFDENEKVVYGKIPDMVVEGXGXR

SEQ ID NO: 32818 - protein, 39 aa, Artificial Sequence
  GFR-binding peptide
  MOD_RES (4), (5), (36), (38): Xaa is C or S
PSTXXAPVKTSPINMLYFDNGRVLLYGKIPMIVEEXGXL

SEQ ID NO: 32819 - protein, 34 aa, Artificial Sequence
  GFR-binding peptide
  MOD_RES (34), (34): Xaa is C or S
  MOD_RES (14), (15), (16), (17), (18): Xaa is A or G
  MOD_RES (19), (20), (21), (22): Xaa is A or G or is absent
VPTELSPINMLYFXXXXXXXXXYGKIPDMVVEGX

SEQ ID NO: 32820 - protein, 38 aa, Artificial Sequence
  GFR-binding peptide
  MOD_RES (5), (6), (38): Xaa is C or S
VPKPXXAPTQLSPINVLYFDDSSNVIYGKIPNMVVRAX

SEQ ID NO: 32821 - protein, 38 aa, Artificial Sequence
  GFR-binding peptide
  MOD_RES (2), (3), (37): Xaa is C or S
  MOD_RES (17), (18), (19), (20), (21): Xaa is A or G
  MOD_RES (22), (23), (24), (25): Xaa is A or G or is absent
PXXTPTKMSPINMLYFXXXXXXXXXYGKIPGMVVDRXG

SEQ ID NO: 32822 - protein, 39 aa, Artificial Sequence
  GFR-binding peptide
  MOD_RES (2), (3), (37), (39): Xaa is C or S
  MOD_RES (17), (18), (19), (20), (21): Xaa is A or G
  MOD_RES (22), (23), (24), (25): Xaa is A or G or is absent
AXXVPTKLSPINILYFXXXXXXXXXYGKIPGMAVSEXGX

SEQ ID NO: 32823 - protein, 35 aa, Artificial Sequence
  GFR-binding peptide
  MOD_RES (4), (5): Xaa is C or S
PSTXXAPVKTSPINMLYFDNGRVLLYGKIPMIVEE

SEQ ID NO: 32824 - protein, 42 aa, Artificial Sequence
  GFR-binding peptide
  MOD_RES (4), (5), (39), (41): Xaa is C or S
  MOD_RES (19), (20), (21), (22), (23): Xaa is A or G
  MOD_RES (24), (25), (26), (27): Xaa is A or G or is absent
AGPXXTPTKMSPINMLYFXXXXXXXXXYGKIPGMVVDRXGXS

SEQ ID NO: 32825 - protein, 42 aa, Artificial Sequence
  GFR-binding peptide
  MOD_RES (3), (4), (39), (41): Xaa is C or S
  MOD_RES (18), (19), (20), (21), (22): Xaa is A or G
  MOD_RES (23), (24), (25), (26): Xaa is A or G or is absent
KAXXVPTKLSPINVLYFXXXXXXXXXYGKIPEGMSVAEXGXR

SEQ ID NO: 32826 - protein, 36 aa, Artificial Sequence
  GFR-binding peptide
  MOD_RES (2), (3): Xaa is C or S
  MOD_RES (17), (18), (19), (20), (21): Xaa is A or G
  MOD_RES (22), (23), (24), (25): Xaa is A or G or is absent
PXXTPTKMSPINMLYFXXXXXXXXXYGKIPGMVVDR

SEQ ID NO: 32827 - protein, 37 aa, Artificial Sequence
  GFR-binding peptide
  MOD_RES (3), (4): Xaa is C or S
  MOD_RES (18), (19), (20), (21), (22): Xaa is A or G
  MOD_RES (23), (24), (25), (26): Xaa is A or G or is absent
KPXXAPTQLSPINVLYFXXXXXXXXXYGKIPNMVVRA

SEQ ID NO: 32828 - protein, 35 aa, Artificial Sequence
  GFR-binding peptide
  MOD_RES (2), (3), (35): Xaa is C or S
SXXVPARLSPINILYFDAANNVVYGKIPDMVVEAX

SEQ ID NO: 32829 - protein, 38 aa, Artificial Sequence
  GFR-binding peptide
  MOD_RES (2), (3), (37): Xaa is C or S
  MOD_RES (17), (18), (19), (20), (21): Xaa is A or G
  MOD_RES (22), (23), (24), (25): Xaa is A or G or is absent
PXXAPTKLSPINVLYFXXXXXXXXXYGKIPNMVVRSXG

SEQ ID NO: 32830 - protein, 34 aa, Artificial Sequence
  GFR-binding peptide
  MOD_RES (34), (34): Xaa is C or S
  MOD_RES (14), (15), (16), (17), (18): Xaa is A or G
  MOD_RES (19), (20), (21), (22): Xaa is A or G or is absent
APTKLSPINVLYFXXXXXXXXXYGKIPNMVVRSX

SEQ ID NO: 32831 - protein, 35 aa, Artificial Sequence
  GFR-binding peptide
  MOD_RES (2), (3), (35): Xaa is C or S
AXXVPTKLSPINILYFDKGVVTYYGKIPGMAVSEX

SEQ ID NO: 32832 - protein, 43 aa, Artificial Sequence
  GFR-binding peptide
  MOD_RES (6), (7), (41), (43): Xaa is C or S
  MOD_RES (21), (22), (23), (24), (25): Xaa is A or G
  MOD_RES (26), (27), (28), (29): Xaa is A or G or is absent
YVPKPXXAPTKLSPINVLYFXXXXXXXXXYGKIPNMVVRSXGX

SEQ ID NO: 32833 - protein, 41 aa, Artificial Sequence
  GFR-binding peptide
  MOD_RES (4), (5), (39), (41): Xaa is C or S
  MOD_RES (19), (20), (21), (22), (23): Xaa is A or G
  MOD_RES (24), (25), (26), (27): Xaa is A or G or is absent
PKPXXAPTQLSPINVLYFXXXXXXXXXYGKIPNMVVRAXGX

SEQ ID NO: 32834 - protein, 35 aa, Artificial Sequence
  GFR-binding peptide
  MOD_RES (1), (34): Xaa is C or S
  MOD_RES (15), (16), (17), (18), (19): Xaa is A or G
  MOD_RES (20), (21), (22), (23): Xaa is A or G or is absent
XAPVKTSPINMLYFXXXXXXXXXYGKIPMIVEEXG

SEQ ID NO: 32835 - protein, 37 aa, Artificial Sequence
  GFR-binding peptide
  MOD_RES (4), (5), (37): Xaa is C or S
PKPXXAPTQLSPINVLYFDDSSNVIYGKIPNMVVRAX

SEQ ID NO: 32836 - protein, 39 aa, Artificial Sequence
  GFR-binding peptide
  MOD_RES (2), (3), (37), (39): Xaa is C or S
  MOD_RES (17), (18), (19), (20), (21): Xaa is A or G
  MOD_RES (22), (23), (24), (25): Xaa is A or G or is absent
AXXVPTELSPINMLYFXXXXXXXXXYGKIPDMVVEGXGX

SEQ ID NO: 32837 - protein, 41 aa, Artificial Sequence
  GFR-binding peptide
  MOD_RES (4), (5), (39), (41): Xaa is C or S
  MOD_RES (19), (20), (21), (22), (23): Xaa is A or G
  MOD_RES (24), (25), (26), (27): Xaa is A or G or is absent
AGPXXTPTKMSPINMLYFXXXXXXXXXYGKIPGMVVDRXGX

SEQ ID NO: 32838 - protein, 34 aa, Artificial Sequence
  GFR-binding peptide
  MOD_RES (1), (2): Xaa is C or S
XXVPTKLSPINVLYFDDMGVPTYGKIPEGMSVAE

SEQ ID NO: 32839 - protein, 35 aa, Artificial Sequence
  GFR-binding peptide
  MOD_RES (1), (35): Xaa is C or S
  MOD_RES (15), (16), (17), (18), (19): Xaa is A or G
  MOD_RES (20), (21), (22), (23): Xaa is A or G or is absent
XVPTKLSPINILYFXXXXXXXXXYGKIPGMAVSEX

SEQ ID NO: 32840 - protein, 35 aa, Artificial Sequence
  GFR-binding peptide
  MOD_RES (2), (3), (35): Xaa is C or S
PXXAPTQLSPINVLYFDDSSNVIYGKIPNMVVRAX

SEQ ID NO: 32841 - protein, 39 aa, Artificial Sequence
  GFR-binding peptide
  MOD_RES (2), (36), (38): Xaa is C or S
  MOD_RES (16), (17), (18), (19), (20): Xaa is A or G
  MOD_RES (21), (22), (23), (24): Xaa is A or G or is absent
TXAPTKLSPINVLYFXXXXXXXXXYGKIPNMVVRSXGXH

SEQ ID NO: 32842 - protein, 40 aa, Artificial Sequence
  GFR-binding peptide
  MOD_RES (4), (5), (37), (39): Xaa is C or S
PASXXVPARLSPINILYFDAANNVVYGKIPDMVVEAXGXR

SEQ ID NO: 32843 - protein, 36 aa, Artificial Sequence
  GFR-binding peptide
  MOD_RES (1), (2), (34), (36): Xaa is C or S
XXVPARLSPINILYFDAANNVVYGKIPDMVVEAXGX

SEQ ID NO: 32844 - protein, 40 aa, Artificial Sequence
  GFR-binding peptide
  MOD_RES (4), (5), (37), (39): Xaa is C or S
PKAXXAPTKLSPINVLYFDSSNNVIYGKIPNMVVKAXGXH

SEQ ID NO: 32845 - protein, 37 aa, Artificial Sequence
  GFR-binding peptide
  MOD_RES (5), (37): Xaa is C or S
TKPTXAPTKLSPINVLYFDDSSNVIYGKIPNMVVRSX

SEQ ID NO: 32846 - protein, 41 aa, Artificial Sequence
  GFR-binding peptide
  MOD_RES (5), (6), (38), (40): Xaa is C or S
APASXXVPARLSPINILYFDAANNVVYGKIPDMVVEAXGXR

SEQ ID NO: 32847 - protein, 42 aa, Artificial Sequence
  GFR-binding peptide
  MOD_RES (5), (6), (40), (42): Xaa is C or S
  MOD_RES (20), (21), (22), (23), (24): Xaa is A or G
  MOD_RES (25), (26), (27), (28): Xaa is A or G or is absent
APASXXVPARLSPINILYFXXXXXXXXXYGKIPDMVVEAXGX

SEQ ID NO: 32848 - protein, 35 aa, Artificial Sequence
  GFR-binding peptide
  MOD_RES (1), (35): Xaa is C or S
  MOD_RES (15), (16), (17), (18), (19): Xaa is A or G
  MOD_RES (20), (21), (22), (23): Xaa is A or G or is absent
XVPTELSPINMLYFXXXXXXXXXYGKIPEMVVEGX

SEQ ID NO: 32849 - protein, 36 aa, Artificial Sequence
  GFR-binding peptide
  MOD_RES (2), (3), (35): Xaa is C or S
AXXVPTELSPINMLYFDEYDKVVYGKIPEMVVEGXG

SEQ ID NO: 32850 - protein, 37 aa, Artificial Sequence
  GFR-binding peptide
  MOD_RES (34), (36): Xaa is C or S
  MOD_RES (14), (15), (16), (17), (18): Xaa is A or G
  MOD_RES (19), (20), (21), (22): Xaa is A or G or is absent
VPTRLSPINILYFXXXXXXXXXYGKIPDMVVESXGXR

SEQ ID NO: 32851 - protein, 32 aa, Artificial Sequence
  GFR-binding peptide
VPTKLSPINVLYFDDMGVPTYGKIPEGMSVAE

SEQ ID NO: 32852 - protein, 38 aa, Artificial Sequence
  GFR-binding peptide
  MOD_RES (2), (3), (36), (38): Xaa is C or S
  MOD_RES (17), (18), (19), (20), (21): Xaa is A or G
  MOD_RES (22), (23), (24), (25): Xaa is A or G or is absent
TXXAPVKTSPINMLYFXXXXXXXXXYGKIPMIVEEXGX

SEQ ID NO: 32853 - protein, 38 aa, Artificial Sequence
  GFR-binding peptide
  MOD_RES (3), (4), (38): Xaa is C or S
  MOD_RES (18), (19), (20), (21), (22): Xaa is A or G
  MOD_RES (23), (24), (25), (26): Xaa is A or G or is absent
PTXXVPTRLSPINILYFXXXXXXXXXYGKIPDMVVESX

SEQ ID NO: 32854 - protein, 40 aa, Artificial Sequence
  GFR-binding peptide
  MOD_RES (4), (5), (38), (40): Xaa is C or S
  MOD_RES (19), (20), (21), (22), (23): Xaa is A or G
  MOD_RES (24), (25), (26), (27): Xaa is A or G or is absent
PSTXXAPVKTSPINMLYFXXXXXXXXXYGKIPMIVEEXGX

SEQ ID NO: 32855 - protein, 35 aa, Artificial Sequence
  GFR-binding peptide
  MOD_RES (1), (2), (34): Xaa is C or S
XXVPTKLSPINILYFDKGVVTYYGKIPGMAVSEXG

SEQ ID NO: 32856 - protein, 36 aa, Artificial Sequence
  GFR-binding peptide
  MOD_RES (5), (6): Xaa is C or S
IPKAXXVPTELSPINMLYFDENEKVVYGKIPDMVVE

SEQ ID NO: 32857 - protein, 40 aa, Artificial Sequence
  GFR-binding peptide
  MOD_RES (7), (39): Xaa is C or S
HVTKPTXAPTKLSPINVLYFDDSSNVIYGKIPNMVVRSXG

SEQ ID NO: 32858 - protein, 39 aa, Artificial Sequence
  GFR-binding peptide
  MOD_RES (3), (4), (36), (38): Xaa is C or S
KAXXVPTELSPINMLYFDENEKVVYGKIPDMVVEGXGXR

SEQ ID NO: 32859 - protein, 35 aa, Artificial Sequence
  GFR-binding peptide
  MOD_RES (33), (35): Xaa is C or S
VPTKLSPINVLYFDDMGVPTYGKIPEGMSVAEXGX

SEQ ID NO: 32860 - protein, 36 aa, Artificial Sequence
  GFR-binding peptide
  MOD_RES (5), (6): Xaa is C or S
VPKPXXAPTKLSPINVLYFDDSSNVIYGKIPNMVVR

SEQ ID NO: 32861 - protein, 37 aa, Artificial Sequence
  GFR-binding peptide
  MOD_RES (3), (4), (35), (37): Xaa is C or S
STXXAPVKTSPINMLYFDNGRVLLYGKIPMIVEEXGX

SEQ ID NO: 32862 - protein, 41 aa, Artificial Sequence
  GFR-binding peptide
  MOD_RES (6), (7), (39), (41): Xaa is C or S
STPPTXXVPTRLSPINILYFDSANNVVYGKIPDMVVESXGX

SEQ ID NO: 32863 - protein, 36 aa, Artificial Sequence
  GFR-binding peptide
  MOD_RES (2), (3): Xaa is C or S
  MOD_RES (17), (18), (19), (20), (21): Xaa is A or G
  MOD_RES (22), (23), (24), (25): Xaa is A or G or is absent
SXXVPARLSPINILYFXXXXXXXXXYGKIPDMVVEA

SEQ ID NO: 32864 - protein, 36 aa, Artificial Sequence
  GFR-binding peptide
  MOD_RES (3), (4): Xaa is C or S
  MOD_RES (18), (19), (20), (21), (22): Xaa is A or G
  MOD_RES (23), (24), (25), (26): Xaa is A or G or is absent
KPXXAPTQLSPINVLYFXXXXXXXXXYGKIPNMVVR

SEQ ID NO: 32865 - protein, 36 aa, Artificial Sequence
  GFR-binding peptide
  MOD_RES (1), (35): Xaa is C or S
  MOD_RES (15), (16), (17), (18), (19): Xaa is A or G
  MOD_RES (20), (21), (22), (23): Xaa is A or G or is absent
XVPTKLSPINILYFXXXXXXXXXYGKIPGMAVSEXG

SEQ ID NO: 32866 - protein, 32 aa, Artificial Sequence
  GFR-binding peptide
  MOD_RES (14), (15), (16), (17), (18): Xaa is A or G
  MOD_RES (19), (20), (21), (22): Xaa is A or G or is absent
APTQLSPINVLYFXXXXXXXXXYGKIPNMVVR

SEQ ID NO: 32867 - protein, 40 aa, Artificial Sequence
  GFR-binding peptide
  MOD_RES (5), (6), (40): Xaa is C or S
  MOD_RES (20), (21), (22), (23), (24): Xaa is A or G
  MOD_RES (25), (26), (27), (28): Xaa is A or G or is absent
TPPTXXVPTRLSPINILYFXXXXXXXXXYGKIPDMVVESX

SEQ ID NO: 32868 - protein, 39 aa, Artificial Sequence
  GFR-binding peptide
  MOD_RES (5), (6), (38): Xaa is C or S
TPPTXXVPTRLSPINILYFDSANNVVYGKIPDMVVESXG

SEQ ID NO: 32869 - protein, 35 aa, Artificial Sequence
  GFR-binding peptide
  MOD_RES (33), (35): Xaa is C or S
  MOD_RES (14), (15), (16), (17), (18): Xaa is A or G
  MOD_RES (19), (20), (21), (22): Xaa is A or G or is absent
APVKTSPINMLYFXXXXXXXXXYGKIPMIVEEXGX

SEQ ID NO: 32870 - protein, 36 aa, Artificial Sequence
  GFR-binding peptide
  MOD_RES (5), (6): Xaa is C or S
VPSTXXAPVKTSPINMLYFDNGRVLLYGKIPMIVEE

SEQ ID NO: 32871 - protein, 37 aa, Artificial Sequence
  GFR-binding peptide
  MOD_RES (2), (3), (35), (37): Xaa is C or S
AXXAPTKLSPINVLYFDSSNNVIYGKIPNMVVKAXGX

SEQ ID NO: 32872 - protein, 40 aa, Artificial Sequence
  GFR-binding peptide
  MOD_RES (3), (4), (38), (40): Xaa is C or S
  MOD_RES (18), (19), (20), (21), (22): Xaa is A or G
  MOD_RES (23), (24), (25), (26): Xaa is A or G or is absent
KAXXVPTELSPINMLYFXXXXXXXXXYGKIPEMVVEGXGX

SEQ ID NO: 32873 - protein, 37 aa, Artificial Sequence
  GFR-binding peptide
  MOD_RES (1), (34), (36): Xaa is C or S
  MOD_RES (15), (16), (17), (18), (19): Xaa is A or G
  MOD_RES (20), (21), (22), (23): Xaa is A or G or is absent
XAPVKTSPINMLYFXXXXXXXXXYGKIPMIVEEXGXL

SEQ ID NO: 32874 - protein, 41 aa, Artificial Sequence
  GFR-binding peptide
  MOD_RES (6), (38), (40): Xaa is C or S
VTKPTXAPTKLSPINVLYFDDSSNVIYGKIPNMVVRSXGXH

SEQ ID NO: 32875 - protein, 37 aa, Artificial Sequence
  GFR-binding peptide
  MOD_RES (34), (36): Xaa is C or S
  MOD_RES (14), (15), (16), (17), (18): Xaa is A or G
  MOD_RES (19), (20), (21), (22): Xaa is A or G or is absent
APTKLSPINVLYFXXXXXXXXXYGKIPNMVVRSXGXH

SEQ ID NO: 32876 - protein, 35 aa, Artificial Sequence
  GFR-binding peptide
  MOD_RES (1), (2): Xaa is C or S
  MOD_RES (16), (17), (18), (19), (20): Xaa is A or G
  MOD_RES (21), (22), (23), (24): Xaa is A or G or is absent
XXTPTKMSPINMLYFXXXXXXXXXYGKIPGMVVDR

SEQ ID NO: 32877 - protein, 45 aa, Artificial Sequence
  GFR-binding peptide
  MOD_RES (6), (7), (42), (44): Xaa is C or S
  MOD_RES (21), (22), (23), (24), (25): Xaa is A or G
  MOD_RES (26), (27), (28), (29): Xaa is A or G or is absent
KVGKAXXVPTKLSPINVLYFXXXXXXXXXYGKIPEGMSVAEXGXR

SEQ ID NO: 32878 - protein, 33 aa, Artificial Sequence
  GFR-binding peptide
  MOD_RES (1), (2): Xaa is C or S
XXAPTKLSPINVLYFDSSNNVIYGKIPNMVVKA

SEQ ID NO: 32879 - protein, 36 aa, Artificial Sequence
  GFR-binding peptide
  MOD_RES (1), (33), (35): Xaa is C or S
XAPTKLSPINVLYFDDSSNVIYGKIPNMVVRSXGXH

SEQ ID NO: 32880 - protein, 39 aa, Artificial Sequence
  GFR-binding peptide
  MOD_RES (6), (7): Xaa is C or S
  MOD_RES (21), (22), (23), (24), (25): Xaa is A or G
  MOD_RES (26), (27), (28), (29): Xaa is A or G or is absent
SIPKAXXVPTELSPINMLYFXXXXXXXXXYGKIPEMVVE

SEQ ID NO: 32881 - protein, 32 aa, Artificial Sequence
  GFR-binding peptide
  MOD_RES (32), (32): Xaa is C or S
VPTRLSPINILYFDSANNVVYGKIPDMVVESX

SEQ ID NO: 32882 - protein, 35 aa, Artificial Sequence
  GFR-binding peptide
  MOD_RES (2), (3): Xaa is C or S
  MOD_RES (17), (18), (19), (20), (21): Xaa is A or G
  MOD_RES (22), (23), (24), (25): Xaa is A or G or is absent
AXXAPTKLSPINVLYFXXXXXXXXXYGKIPNMVVK

SEQ ID NO: 32883 - protein, 39 aa, Artificial Sequence
  GFR-binding peptide
  MOD_RES (4), (5), (39): Xaa is C or S
  MOD_RES (19), (20), (21), (22), (23): Xaa is A or G
  MOD_RES (24), (25), (26), (27): Xaa is A or G or is absent
PKPXXAPTQLSPINVLYFXXXXXXXXXYGKIPNMVVRAX

SEQ ID NO: 32884 - protein, 38 aa, Artificial Sequence
  GFR-binding peptide
  MOD_RES (5), (6): Xaa is C or S
  MOD_RES (20), (21), (22), (23), (24): Xaa is A or G
  MOD_RES (25), (26), (27), (28): Xaa is A or G or is absent
VPKPXXAPTKLSPINVLYFXXXXXXXXXYGKIPNMVVR

SEQ ID NO: 32885 - protein, 32 aa, Artificial Sequence
  GFR-binding peptide
  MOD_RES (14), (15), (16), (17), (18): Xaa is A or G
  MOD_RES (19), (20), (21), (22): Xaa is A or G or is absent
VPTELSPINMLYFXXXXXXXXXYGKIPEMVVE

SEQ ID NO: 32886 - protein, 36 aa, Artificial Sequence
  GFR-binding peptide
  MOD_RES (1), (33), (35): Xaa is C or S
XAPTKLSPINVLYFDSSNNVIYGKIPNMVVKAXGXH

SEQ ID NO: 32887 - protein, 31 aa, Artificial Sequence
  GFR-binding peptide
  MOD_RES (1), (1): Xaa is C or S
XAPVKTSPINMLYFDNGRVLLYGKIPMIVEE

SEQ ID NO: 32888 - protein, 41 aa, Artificial Sequence
  GFR-binding peptide
  MOD_RES (5), (6), (40): Xaa is C or S
  MOD_RES (20), (21), (22), (23), (24): Xaa is A or G
  MOD_RES (25), (26), (27), (28): Xaa is A or G or is absent
ASKAXXVPTKLSPINILYFXXXXXXXXXYGKIPGMAVSEXG

SEQ ID NO: 32889 - protein, 34 aa, Artificial Sequence
  GFR-binding peptide
  MOD_RES (2), (3): Xaa is C or S
AXXVPTKLSPINILYFDKGVVTYYGKIPGMAVSE

SEQ ID NO: 32890 - protein, 34 aa, Artificial Sequence
  GFR-binding peptide
  MOD_RES (32), (34): Xaa is C or S
VPTELSPINMLYFDENEKVVYGKIPDMVVEGXGX

SEQ ID NO: 32891 - protein, 34 aa, Artificial Sequence
  GFR-binding peptide
  MOD_RES (2), (3): Xaa is C or S
TXXVPTRLSPINILYFDSANNVVYGKIPDMVVES

SEQ ID NO: 32892 - protein, 41 aa, Artificial Sequence
  GFR-binding peptide
  MOD_RES (3), (4), (38), (40): Xaa is C or S
  MOD_RES (18), (19), (20), (21), (22): Xaa is A or G
  MOD_RES (23), (24), (25), (26): Xaa is A or G or is absent
KAXXAPTKLSPINVLYFXXXXXXXXXYGKIPNMVVKAXGXH

SEQ ID NO: 32893 - protein, 40 aa, Artificial Sequence
  GFR-binding peptide
  MOD_RES (6), (7), (39): Xaa is C or S
SIPKAXXVPTELSPINMLYFDEYDKVVYGKIPEMVVEGXG

SEQ ID NO: 32894 - protein, 40 aa, Artificial Sequence
  GFR-binding peptide
  MOD_RES (3), (37), (39): Xaa is C or S
  MOD_RES (17), (18), (19), (20), (21): Xaa is A or G
  MOD_RES (22), (23), (24), (25): Xaa is A or G or is absent
PTXAPTKLSPINVLYFXXXXXXXXXYGKIPNMVVRSXGXH

SEQ ID NO: 32895 - protein, 33 aa, Artificial Sequence
  GFR-binding peptide
  MOD_RES (14), (15), (16), (17), (18): Xaa is A or G
  MOD_RES (19), (20), (21), (22): Xaa is A or G or is absent
VPTELSPINMLYFXXXXXXXXXYGKIPDMVVEG

SEQ ID NO: 32896 - protein, 40 aa, Artificial Sequence
  GFR-binding peptide
  MOD_RES (6), (7), (39): Xaa is C or S
KASKAXXVPTKLSPINILYFDKGVVTYYGKIPGMAVSEXG

SEQ ID NO: 32897 - protein, 33 aa, Artificial Sequence
  GFR-binding peptide
  MOD_RES (14), (15), (16), (17), (18): Xaa is A or G
  MOD_RES (19), (20), (21), (22): Xaa is A or G or is absent
APTKLSPINVLYFXXXXXXXXXYGKIPNMVVKA

SEQ ID NO: 32898 - protein, 38 aa, Artificial Sequence
  GFR-binding peptide
  MOD_RES (6), (7): Xaa is C or S
KASKAXXVPTKLSPINILYFDKGVVTYYGKIPGMAVSE

SEQ ID NO: 32899 - protein, 36 aa, Artificial Sequence
  GFR-binding peptide
  MOD_RES (2), (3): Xaa is C or S
  MOD_RES (17), (18), (19), (20), (21): Xaa is A or G
  MOD_RES (22), (23), (24), (25): Xaa is A or G or is absent
AXXVPTELSPINMLYFXXXXXXXXXYGKIPEMVVEG

SEQ ID NO: 32900 - protein, 36 aa, Artificial Sequence
  GFR-binding peptide
  MOD_RES (34), (36): Xaa is C or S
  MOD_RES (14), (15), (16), (17), (18): Xaa is A or G
  MOD_RES (19), (20), (21), (22): Xaa is A or G or is absent
VPTELSPINMLYFXXXXXXXXXYGKIPDMVVEGXGX

SEQ ID NO: 32901 - protein, 37 aa, Artificial Sequence
  GFR-binding peptide
  MOD_RES (34), (36): Xaa is C or S
  MOD_RES (14), (15), (16), (17), (18): Xaa is A or G
  MOD_RES (19), (20), (21), (22): Xaa is A or G or is absent
VPTELSPINMLYFXXXXXXXXXYGKIPEMVVEGXGXR

SEQ ID NO: 32902 - protein, 42 aa, Artificial Sequence
  GFR-binding peptide
  MOD_RES (6), (7), (41): Xaa is C or S
  MOD_RES (21), (22), (23), (24), (25): Xaa is A or G
  MOD_RES (26), (27), (28), (29): Xaa is A or G or is absent
YVPKPXXAPTKLSPINVLYFXXXXXXXXXYGKIPNMVVRSXG

SEQ ID NO: 32903 - protein, 38 aa, Artificial Sequence
  GFR-binding peptide
  MOD_RES (3), (4), (38): Xaa is C or S
  MOD_RES (18), (19), (20), (21), (22): Xaa is A or G
  MOD_RES (23), (24), (25), (26): Xaa is A or G or is absent
KAXXVPTELSPINMLYFXXXXXXXXXYGKIPEMVVEGX

SEQ ID NO: 32904 - protein, 38 aa, Artificial Sequence
  GFR-binding peptide
  MOD_RES (2), (3), (37): Xaa is C or S
  MOD_RES (17), (18), (19), (20), (21): Xaa is A or G
  MOD_RES (22), (23), (24), (25): Xaa is A or G or is absent
SXXVPARLSPINILYFXXXXXXXXXYGKIPDMVVEAXG

SEQ ID NO: 32905 - protein, 34 aa, Artificial Sequence
  GFR-binding peptide
  MOD_RES (2), (34): Xaa is C or S
TXAPTKLSPINVLYFDDSSNVIYGKIPNMVVRSX

SEQ ID NO: 32906 - protein, 38 aa, Artificial Sequence
  GFR-binding peptide
  MOD_RES (3), (4), (38): Xaa is C or S
  MOD_RES (18), (19), (20), (21), (22): Xaa is A or G
  MOD_RES (23), (24), (25), (26): Xaa is A or G or is absent
KAXXVPTKLSPINILYFXXXXXXXXXYGKIPGMAVSEX

SEQ ID NO: 32907 - protein, 33 aa, Artificial Sequence
  GFR-binding peptide
  MOD_RES (14), (15), (16), (17), (18): Xaa is A or G
  MOD_RES (19), (20), (21), (22): Xaa is A or G or is absent
APTKLSPINVLYFXXXXXXXXXYGKIPNMVVRS

SEQ ID NO: 32908 - protein, 43 aa, Artificial Sequence
  GFR-binding peptide
  MOD_RES (4), (5), (40), (42): Xaa is C or S
  MOD_RES (19), (20), (21), (22), (23): Xaa is A or G
  MOD_RES (24), (25), (26), (27): Xaa is A or G or is absent
GKAXXVPTKLSPINVLYFXXXXXXXXXYGKIPEGMSVAEXGXR

SEQ ID NO: 32909 - protein, 40 aa, Artificial Sequence
  GFR-binding peptide
  MOD_RES (5), (6), (38), (40): Xaa is C or S
APASXXVPARLSPINILYFDAANNVVYGKIPDMVVEAXGX

SEQ ID NO: 32910 - protein, 36 aa, Artificial Sequence
  GFR-binding peptide
  MOD_RES (1), (2), (34), (36): Xaa is C or S
XXVPTKLSPINILYFDKGVVTYYGKIPGMAVSEXGX

SEQ ID NO: 32911 - protein, 36 aa, Artificial Sequence
  GFR-binding peptide
  MOD_RES (34), (36): Xaa is C or S
  MOD_RES (14), (15), (16), (17), (18): Xaa is A or G
  MOD_RES (19), (20), (21), (22): Xaa is A or G or is absent
VPARLSPINILYFXXXXXXXXXYGKIPDMVVEAXGX

SEQ ID NO: 32912 - protein, 30 aa, Artificial Sequence
  GFR-binding peptide
VPTRLSPINILYFDSANNVVYGKIPDMVVE

SEQ ID NO: 32913 - protein, 35 aa, Artificial Sequence
  GFR-binding peptide
  MOD_RES (1), (2), (34): Xaa is C or S
XXVPTELSPINMLYFDENEKVVYGKIPDMVVEGXG

SEQ ID NO: 32914 - protein, 38 aa, Artificial Sequence
  GFR-binding peptide
  MOD_RES (3), (4): Xaa is C or S
  MOD_RES (18), (19), (20), (21), (22): Xaa is A or G
  MOD_RES (23), (24), (25), (26): Xaa is A or G or is absent
KAXXVPTKLSPINVLYFXXXXXXXXXYGKIPEGMSVAE

SEQ ID NO: 32915 - protein, 34 aa, Artificial Sequence
  GFR-binding peptide
  MOD_RES (32), (34): Xaa is C or S
VPARLSPINILYFDAANNVVYGKIPDMVVEAXGX

SEQ ID NO: 32916 - protein, 33 aa, Artificial Sequence
  GFR-binding peptide
  MOD_RES (32), (32): Xaa is C or S
VPTELSPINMLYFDEYDKVVYGKIPEMVVEGXG

SEQ ID NO: 32917 - protein, 34 aa, Artificial Sequence
  GFR-binding peptide
  MOD_RES (3), (4): Xaa is C or S
STXXAPVKTSPINMLYFDNGRVLLYGKIPMIVEE

SEQ ID NO: 32918 - protein, 40 aa, Artificial Sequence
  GFR-binding peptide
  MOD_RES (5), (6), (40): Xaa is C or S
  MOD_RES (20), (21), (22), (23), (24): Xaa is A or G
  MOD_RES (25), (26), (27), (28): Xaa is A or G or is absent
IPKAXXVPTELSPINMLYFXXXXXXXXXYGKIPEMVVEGX

SEQ ID NO: 32919 - protein, 33 aa, Artificial Sequence
  GFR-binding peptide
  MOD_RES (14), (15), (16), (17), (18): Xaa is A or G
  MOD_RES (19), (20), (21), (22): Xaa is A or G or is absent
VPTKLSPINILYFXXXXXXXXXYGKIPGMAVSE

SEQ ID NO: 32920 - protein, 37 aa, Artificial Sequence
  GFR-binding peptide
  MOD_RES (1), (2), (34), (36): Xaa is C or S
XXAPTKLSPINVLYFDDSSNVIYGKIPNMVVRSXGXH

SEQ ID NO: 32921 - protein, 41 aa, Artificial Sequence
  GFR-binding peptide
  MOD_RES (6), (7), (39), (41): Xaa is C or S
AAPASXXVPARLSPINILYFDAANNVVYGKIPDMVVEAXGX

SEQ ID NO: 32922 - protein, 41 aa, Artificial Sequence
  GFR-binding peptide
  MOD_RES (6), (7), (39), (41): Xaa is C or S
AVPKAXXAPTKLSPINVLYFDSSNNVIYGKIPNMVVKAXGX

SEQ ID NO: 32923 - protein, 35 aa, Artificial Sequence
  GFR-binding peptide
  MOD_RES (3), (3): Xaa is C or S
  MOD_RES (17), (18), (19), (20), (21): Xaa is A or G
  MOD_RES (22), (23), (24), (25): Xaa is A or G or is absent
PTXAPTKLSPINVLYFXXXXXXXXXYGKIPNMVVR

SEQ ID NO: 32924 - protein, 38 aa, Artificial Sequence
  GFR-binding peptide
  MOD_RES (4), (5), (37): Xaa is C or S
PKAXXVPTELSPINMLYFDENEKVVYGKIPDMVVEGXG

SEQ ID NO: 32925 - protein, 37 aa, Artificial Sequence
  GFR-binding peptide
  MOD_RES (2), (3), (37): Xaa is C or S
  MOD_RES (17), (18), (19), (20), (21): Xaa is A or G
  MOD_RES (22), (23), (24), (25): Xaa is A or G or is absent
SXXVPARLSPINILYFXXXXXXXXXYGKIPDMVVEAX

SEQ ID NO: 32926 - protein, 40 aa, Artificial Sequence
  GFR-binding peptide
  MOD_RES (2), (3), (37), (39): Xaa is C or S
  MOD_RES (17), (18), (19), (20), (21): Xaa is A or G
  MOD_RES (22), (23), (24), (25): Xaa is A or G or is absent
PXXTPTKMSPINMLYFXXXXXXXXXYGKIPGMVVDRXGXS

SEQ ID NO: 32927 - protein, 40 aa, Artificial Sequence
  GFR-binding peptide
  MOD_RES (5), (6), (37), (39): Xaa is C or S
VPSTXXAPVKTSPINMLYFDNGRVLLYGKIPMIVEEXGXL

SEQ ID NO: 32928 - protein, 41 aa, Artificial Sequence
  GFR-binding peptide
  MOD_RES (4), (5), (39), (41): Xaa is C or S
  MOD_RES (19), (20), (21), (22), (23): Xaa is A or G
  MOD_RES (24), (25), (26), (27): Xaa is A or G or is absent
PKAXXVPTELSPINMLYFXXXXXXXXXYGKIPDMVVEGXGX

SEQ ID NO: 32929 - protein, 35 aa, Artificial Sequence
  GFR-binding peptide
  MOD_RES (1), (2), (34): Xaa is C or S
XXVPTRLSPINILYFDSANNVVYGKIPDMVVESXG

SEQ ID NO: 32930 - protein, 31 aa, Artificial Sequence
  GFR-binding peptide
VPTRLSPINILYFDSANNVVYGKIPDMVVES

SEQ ID NO: 32931 - protein, 35 aa, Artificial Sequence
  GFR-binding peptide
  MOD_RES (4), (5): Xaa is C or S
PKAXXVPTELSPINMLYFDENEKVVYGKIPDMVVE

SEQ ID NO: 32932 - protein, 37 aa, Artificial Sequence
  GFR-binding peptide
  MOD_RES (1), (2), (34), (36): Xaa is C or S
XXVPARLSPINILYFDAANNVVYGKIPDMVVEAXGXR

SEQ ID NO: 32933 - protein, 41 aa, Artificial Sequence
  GFR-binding peptide
  MOD_RES (5), (6), (40): Xaa is C or S
  MOD_RES (20), (21), (22), (23), (24): Xaa is A or G
  MOD_RES (25), (26), (27), (28): Xaa is A or G or is absent
VPKAXXAPTKLSPINVLYFXXXXXXXXXYGKIPNMVVKAXG

SEQ ID NO: 32934 - protein, 36 aa, Artificial Sequence
  GFR-binding peptide
  MOD_RES (1), (2), (34), (36): Xaa is C or S
XXVPTELSPINMLYFDEYDKVVYGKIPEMVVEGXGX

SEQ ID NO: 32935 - protein, 33 aa, Artificial Sequence
  GFR-binding peptide
  MOD_RES (2), (3): Xaa is C or S
AXXAPTKLSPINVLYFDSSNNVIYGKIPNMVVK

SEQ ID NO: 32936 - protein, 43 aa, Artificial Sequence
  GFR-binding peptide
  MOD_RES (6), (7), (40), (42): Xaa is C or S
  MOD_RES (21), (22), (23), (24), (25): Xaa is A or G
  MOD_RES (26), (27), (28), (29): Xaa is A or G or is absent
RVPSTXXAPVKTSPINMLYFXXXXXXXXXYGKIPMIVEEXGXL

SEQ ID NO: 32937 - protein, 36 aa, Artificial Sequence
  GFR-binding peptide
  MOD_RES (1), (34), (36): Xaa is C or S
XVPTKLSPINVLYFDDMGVPTYGKIPEGMSVAEXGX

SEQ ID NO: 32938 - protein, 31 aa, Artificial Sequence
  GFR-binding peptide
  MOD_RES (1), (1): Xaa is C or S
XVPTRLSPINILYFDSANNVVYGKIPDMVVE

SEQ ID NO: 32939 - protein, 37 aa, Artificial Sequence
  GFR-binding peptide
  MOD_RES (4), (5): Xaa is C or S
  MOD_RES (19), (20), (21), (22), (23): Xaa is A or G
  MOD_RES (24), (25), (26), (27): Xaa is A or G or is absent
PKAXXVPTELSPINMLYFXXXXXXXXXYGKIPDMVVE

SEQ ID NO: 32940 - protein, 41 aa, Artificial Sequence
  GFR-binding peptide
  MOD_RES (3), (4), (38), (40): Xaa is C or S
  MOD_RES (18), (19), (20), (21), (22): Xaa is A or G
  MOD_RES (23), (24), (25), (26): Xaa is A or G or is absent
GPXXTPTKMSPINMLYFXXXXXXXXXYGKIPGMVVDRXGXS

SEQ ID NO: 32941 - protein, 33 aa, Artificial Sequence
  GFR-binding peptide
  MOD_RES (2), (3): Xaa is C or S
AXXVPTKLSPINILYFDKGVVTYYGKIPGMAVS

SEQ ID NO: 32942 - protein, 36 aa, Artificial Sequence
  GFR-binding peptide
  MOD_RES (1), (33), (35): Xaa is C or S
XVPTKLSPINILYFDKGVVTYYGKIPGMAVSEXGXR

SEQ ID NO: 32943 - protein, 36 aa, Artificial Sequence
  GFR-binding peptide
  MOD_RES (1), (34), (36): Xaa is C or S
  MOD_RES (15), (16), (17), (18), (19): Xaa is A or G
  MOD_RES (20), (21), (22), (23): Xaa is A or G or is absent
XAPVKTSPINMLYFXXXXXXXXXYGKIPMIVEEXGX

SEQ ID NO: 32944 - protein, 32 aa, Artificial Sequence
  GFR-binding peptide
  MOD_RES (14), (15), (16), (17), (18): Xaa is A or G
  MOD_RES (19), (20), (21), (22): Xaa is A or G or is absent
VPTELSPINMLYFXXXXXXXXXYGKIPDMVVE

SEQ ID NO: 32945 - protein, 38 aa, Artificial Sequence
  GFR-binding peptide
  MOD_RES (1), (35), (37): Xaa is C or S
  MOD_RES (15), (16), (17), (18), (19): Xaa is A or G
  MOD_RES (20), (21), (22), (23): Xaa is A or G or is absent
XTPTKMSPINMLYFXXXXXXXXXYGKIPGMVVDRXGXS

SEQ ID NO: 32946 - protein, 44 aa, Artificial Sequence
  GFR-binding peptide
  MOD_RES (6), (7), (41), (43): Xaa is C or S
  MOD_RES (21), (22), (23), (24), (25): Xaa is A or G
  MOD_RES (26), (27), (28), (29): Xaa is A or G or is absent
AAPASXXVPARLSPINILYFXXXXXXXXXYGKIPDMVVEAXGXR

SEQ ID NO: 32947 - protein, 41 aa, Artificial Sequence
  GFR-binding peptide
  MOD_RES (6), (7), (41): Xaa is C or S
  MOD_RES (21), (22), (23), (24), (25): Xaa is A or G
  MOD_RES (26), (27), (28), (29): Xaa is A or G or is absent
KASKAXXVPTKLSPINILYFXXXXXXXXXYGKIPGMAVSEX

SEQ ID NO: 32948 - protein, 34 aa, Artificial Sequence
  GFR-binding peptide
  MOD_RES (1), (1): Xaa is C or S
  MOD_RES (15), (16), (17), (18), (19): Xaa is A or G
  MOD_RES (20), (21), (22), (23): Xaa is A or G or is absent
XAPTQLSPINVLYFXXXXXXXXXYGKIPNMVVRA

SEQ ID NO: 32949 - protein, 36 aa, Artificial Sequence
  GFR-binding peptide
  MOD_RES (3), (4), (36): Xaa is C or S
KAXXVPTELSPINMLYFDENEKVVYGKIPDMVVEGX

SEQ ID NO: 32950 - protein, 37 aa, Artificial Sequence
  GFR-binding peptide
  MOD_RES (2), (3), (36): Xaa is C or S
  MOD_RES (17), (18), (19), (20), (21): Xaa is A or G
  MOD_RES (22), (23), (24), (25): Xaa is A or G or is absent
TXXAPVKTSPINMLYFXXXXXXXXXYGKIPMIVEEXG

SEQ ID NO: 32951 - protein, 35 aa, Artificial Sequence
  GFR-binding peptide
  MOD_RES (5), (5): Xaa is C or S
TKPTXAPTKLSPINVLYFDDSSNVIYGKIPNMVVR

SEQ ID NO: 32952 - protein, 35 aa, Artificial Sequence
  GFR-binding peptide
  MOD_RES (2), (3): Xaa is C or S
  MOD_RES (17), (18), (19), (20), (21): Xaa is A or G
  MOD_RES (22), (23), (24), (25): Xaa is A or G or is absent
PXXAPTQLSPINVLYFXXXXXXXXXYGKIPNMVVR

SEQ ID NO: 32953 - protein, 39 aa, Artificial Sequence
  GFR-binding peptide
  MOD_RES (5), (6): Xaa is C or S
  MOD_RES (20), (21), (22), (23), (24): Xaa is A or G
  MOD_RES (25), (26), (27), (28): Xaa is A or G or is absent
SAGPXXTPTKMSPINMLYFXXXXXXXXXYGKIPGMVVDR

SEQ ID NO: 32954 - protein, 35 aa, Artificial Sequence
  GFR-binding peptide
  MOD_RES (32), (34): Xaa is C or S
APTQLSPINVLYFDDSSNVIYGKIPNMVVRAXGXH

SEQ ID NO: 32955 - protein, 38 aa, Artificial Sequence
  GFR-binding peptide
  MOD_RES (1), (35), (37): Xaa is C or S
  MOD_RES (15), (16), (17), (18), (19): Xaa is A or G
  MOD_RES (20), (21), (22), (23): Xaa is A or G or is absent
XVPARLSPINILYFXXXXXXXXXYGKIPDMVVEAXGXR

SEQ ID NO: 32956 - protein, 36 aa, Artificial Sequence
  GFR-binding peptide
  MOD_RES (1), (2), (36): Xaa is C or S
  MOD_RES (16), (17), (18), (19), (20): Xaa is A or G
  MOD_RES (21), (22), (23), (24): Xaa is A or G or is absent
XXVPTELSPINMLYFXXXXXXXXXYGKIPEMVVEGX

SEQ ID NO: 32957 - protein, 35 aa, Artificial Sequence
  GFR-binding peptide
  MOD_RES (2), (3), (35): Xaa is C or S
TXXVPTRLSPINILYFDSANNVVYGKIPDMVVESX

SEQ ID NO: 32958 - protein, 35 aa, Artificial Sequence
  GFR-binding peptide
  MOD_RES (32), (34): Xaa is C or S
VPTKLSPINILYFDKGVVTYYGKIPGMAVSEXGXR

SEQ ID NO: 32959 - protein, 39 aa, Artificial Sequence
  GFR-binding peptide
  MOD_RES (2), (3), (37), (39): Xaa is C or S
  MOD_RES (17), (18), (19), (20), (21): Xaa is A or G
  MOD_RES (22), (23), (24), (25): Xaa is A or G or is absent
SXXVPARLSPINILYFXXXXXXXXXYGKIPDMVVEAXGX

SEQ ID NO: 32960 - protein, 39 aa, Artificial Sequence
  GFR-binding peptide
  MOD_RES (4), (38): Xaa is C or S
  MOD_RES (18), (19), (20), (21), (22): Xaa is A or G
  MOD_RES (23), (24), (25), (26): Xaa is A or G or is absent
KPTXAPTKLSPINVLYFXXXXXXXXXYGKIPNMVVRSXG

SEQ ID NO: 32961 - protein, 40 aa, Artificial Sequence
  GFR-binding peptide
  MOD_RES (5), (6), (38), (40): Xaa is C or S
VPKAXXAPTKLSPINVLYFDSSNNVIYGKIPNMVVKAXGX

SEQ ID NO: 32962 - protein, 33 aa, Artificial Sequence
  GFR-binding peptide
  MOD_RES (1), (33): Xaa is C or S
XVPTELSPINMLYFDENEKVVYGKIPDMVVEGX

SEQ ID NO: 32963 - protein, 40 aa, Artificial Sequence
  GFR-binding peptide
  MOD_RES (5), (6), (40): Xaa is C or S
  MOD_RES (20), (21), (22), (23), (24): Xaa is A or G
  MOD_RES (25), (26), (27), (28): Xaa is A or G or is absent
SAGPXXTPTKMSPINMLYFXXXXXXXXXYGKIPGMVVDRX

SEQ ID NO: 32964 - protein, 38 aa, Artificial Sequence
  GFR-binding peptide
  MOD_RES (35), (37): Xaa is C or S
  MOD_RES (14), (15), (16), (17), (18): Xaa is A or G
  MOD_RES (19), (20), (21), (22): Xaa is A or G or is absent
VPTKLSPINVLYFXXXXXXXXXYGKIPEGMSVAEXGXR

SEQ ID NO: 32965 - protein, 37 aa, Artificial Sequence
  GFR-binding peptide
  MOD_RES (2), (3), (35), (37): Xaa is C or S
AXXVPTKLSPINILYFDKGVVTYYGKIPGMAVSEXGX

SEQ ID NO: 32966 - protein, 38 aa, Artificial Sequence
  GFR-binding peptide
  MOD_RES (6), (7): Xaa is C or S
KIPKAXXVPTELSPINMLYFDENEKVVYGKIPDMVVEG

SEQ ID NO: 32967 - protein, 36 aa, Artificial Sequence
  GFR-binding peptide
  MOD_RES (1), (33), (35): Xaa is C or S
XAPTQLSPINVLYFDDSSNVIYGKIPNMVVRAXGXH

SEQ ID NO: 32968 - protein, 39 aa, Artificial Sequence
  GFR-binding peptide
  MOD_RES (3), (4), (38): Xaa is C or S
  MOD_RES (18), (19), (20), (21), (22): Xaa is A or G
  MOD_RES (23), (24), (25), (26): Xaa is A or G or is absent
KPXXAPTQLSPINVLYFXXXXXXXXXYGKIPNMVVRAXG

SEQ ID NO: 32969 - protein, 38 aa, Artificial Sequence
  GFR-binding peptide
  MOD_RES (2), (3), (35), (37): Xaa is C or S
AXXVPTELSPINMLYFDENEKVVYGKIPDMVVEGXGXR

SEQ ID NO: 32970 - protein, 42 aa, Artificial Sequence
  GFR-binding peptide
  MOD_RES (4), (5), (39), (41): Xaa is C or S
  MOD_RES (19), (20), (21), (22), (23): Xaa is A or G
  MOD_RES (24), (25), (26), (27): Xaa is A or G or is absent
PKPXXAPTQLSPINVLYFXXXXXXXXXYGKIPNMVVRAXGXH

SEQ ID NO: 32971 - protein, 40 aa, Artificial Sequence
  GFR-binding peptide
  MOD_RES (3), (4), (38), (40): Xaa is C or S
  MOD_RES (18), (19), (20), (21), (22): Xaa is A or G
  MOD_RES (23), (24), (25), (26): Xaa is A or G or is absent
PTXXVPTRLSPINILYFXXXXXXXXXYGKIPDMVVESXGX

SEQ ID NO: 32972 - protein, 36 aa, Artificial Sequence
  GFR-binding peptide
  MOD_RES (1), (36): Xaa is C or S
  MOD_RES (15), (16), (17), (18), (19): Xaa is A or G
  MOD_RES (20), (21), (22), (23): Xaa is A or G or is absent
XVPTKLSPINVLYFXXXXXXXXXYGKIPEGMSVAEX

SEQ ID NO: 32973 - protein, 33 aa, Artificial Sequence
  GFR-binding peptide
  MOD_RES (1), (2): Xaa is C or S
XXVPTELSPINMLYFDEYDKVVYGKIPEMVVEG

SEQ ID NO: 32974 - protein, 42 aa, Artificial Sequence
  GFR-binding peptide
  MOD_RES (5), (6), (39), (41): Xaa is C or S
  MOD_RES (20), (21), (22), (23), (24): Xaa is A or G
  MOD_RES (25), (26), (27), (28): Xaa is A or G or is absent
VPSTXXAPVKTSPINMLYFXXXXXXXXXYGKIPMIVEEXGXL

SEQ ID NO: 32975 - protein, 38 aa, Artificial Sequence
  GFR-binding peptide
  MOD_RES (1), (35), (37): Xaa is C or S
  MOD_RES (15), (16), (17), (18), (19): Xaa is A or G
  MOD_RES (20), (21), (22), (23): Xaa is A or G or is absent
XAPTKLSPINVLYFXXXXXXXXXYGKIPNMVVRSXGXH

SEQ ID NO: 32976 - protein, 37 aa, Artificial Sequence
  GFR-binding peptide
  MOD_RES (34), (36): Xaa is C or S
  MOD_RES (14), (15), (16), (17), (18): Xaa is A or G
  MOD_RES (19), (20), (21), (22): Xaa is A or G or is absent
TPTKMSPINMLYFXXXXXXXXXYGKIPGMVVDRXGXS

SEQ ID NO: 32977 - protein, 37 aa, Artificial Sequence
  GFR-binding peptide
  MOD_RES (2), (3), (35), (37): Xaa is C or S
AXXVPTELSPINMLYFDEYDKVVYGKIPEMVVEGXGX

SEQ ID NO: 32978 - protein, 35 aa, Artificial Sequence
  GFR-binding peptide
  MOD_RES (3), (4): Xaa is C or S
KAXXAPTKLSPINVLYFDSSNNVIYGKIPNMVVKA

SEQ ID NO: 32979 - protein, 34 aa, Artificial Sequence
  GFR-binding peptide
  MOD_RES (32), (34): Xaa is C or S
VPTKLSPINILYFDKGVVTYYGKIPGMAVSEXGX

SEQ ID NO: 32980 - protein, 37 aa, Artificial Sequence
  GFR-binding peptide
  MOD_RES (1), (35), (37): Xaa is C or S
  MOD_RES (15), (16), (17), (18), (19): Xaa is A or G
  MOD_RES (20), (21), (22), (23): Xaa is A or G or is absent
XVPTRLSPINILYFXXXXXXXXXYGKIPDMVVESXGX

SEQ ID NO: 32981 - protein, 37 aa, Artificial Sequence
  GFR-binding peptide
  MOD_RES (1), (35), (37): Xaa is C or S
  MOD_RES (15), (16), (17), (18), (19): Xaa is A or G
  MOD_RES (20), (21), (22), (23): Xaa is A or G or is absent
XAPTKLSPINVLYFXXXXXXXXXYGKIPNMVVKAXGX

SEQ ID NO: 32982 - protein, 35 aa, Artificial Sequence
  GFR-binding peptide
  MOD_RES (4), (5): Xaa is C or S
PKPXXAPTQLSPINVLYFDDSSNVIYGKIPNMVVR

SEQ ID NO: 32983 - protein, 34 aa, Artificial Sequence
  GFR-binding peptide
  MOD_RES (32), (34): Xaa is C or S
VPTELSPINMLYFDEYDKVVYGKIPEMVVEGXGX

SEQ ID NO: 32984 - protein, 32 aa, Artificial Sequence
  GFR-binding peptide
  MOD_RES (1), (1): Xaa is C or S
XVPTRLSPINILYFDSANNVVYGKIPDMVVES

SEQ ID NO: 32985 - protein, 31 aa, Artificial Sequence
  GFR-binding peptide
  MOD_RES (1), (1): Xaa is C or S
XVPTKLSPINILYFDKGVVTYYGKIPGMAVS

SEQ ID NO: 32986 - protein, 35 aa, Artificial Sequence
  GFR-binding peptide
  MOD_RES (34), (34): Xaa is C or S
  MOD_RES (14), (15), (16), (17), (18): Xaa is A or G
  MOD_RES (19), (20), (21), (22): Xaa is A or G or is absent
VPARLSPINILYFXXXXXXXXXYGKIPDMVVEAXG

SEQ ID NO: 32987 - protein, 37 aa, Artificial Sequence
  GFR-binding peptide
  MOD_RES (2), (3), (37): Xaa is C or S
  MOD_RES (17), (18), (19), (20), (21): Xaa is A or G
  MOD_RES (22), (23), (24), (25): Xaa is A or G or is absent
AXXVPTKLSPINILYFXXXXXXXXXYGKIPGMAVSEX

SEQ ID NO: 32988 - protein, 40 aa, Artificial Sequence
  GFR-binding peptide
  MOD_RES (5), (39): Xaa is C or S
  MOD_RES (19), (20), (21), (22), (23): Xaa is A or G
  MOD_RES (24), (25), (26), (27): Xaa is A or G or is absent
TKPTXAPTKLSPINVLYFXXXXXXXXXYGKIPNMVVRSXG

SEQ ID NO: 32989 - protein, 37 aa, Artificial Sequence
  GFR-binding peptide
  MOD_RES (4), (5): Xaa is C or S
  MOD_RES (19), (20), (21), (22), (23): Xaa is A or G
  MOD_RES (24), (25), (26), (27): Xaa is A or G or is absent
PASXXVPARLSPINILYFXXXXXXXXXYGKIPDMVVE

SEQ ID NO: 32990 - protein, 36 aa, Artificial Sequence
  GFR-binding peptide
  MOD_RES (4), (5): Xaa is C or S
PKAXXAPTKLSPINVLYFDSSNNVIYGKIPNMVVKA

SEQ ID NO: 32991 - protein, 37 aa, Artificial Sequence
  GFR-binding peptide
  MOD_RES (5), (6): Xaa is C or S
TPPTXXVPTRLSPINILYFDSANNVVYGKIPDMVVES

SEQ ID NO: 32992 - protein, 36 aa, Artificial Sequence
  GFR-binding peptide
  MOD_RES (5), (6): Xaa is C or S
ASKAXXVPTKLSPINILYFDKGVVTYYGKIPGMAVS

SEQ ID NO: 32993 - protein, 34 aa, Artificial Sequence
  GFR-binding peptide
  MOD_RES (2), (3): Xaa is C or S
SXXVPARLSPINILYFDAANNVVYGKIPDMVVEA

SEQ ID NO: 32994 - protein, 32 aa, Artificial Sequence
  GFR-binding peptide
  MOD_RES (32), (32): Xaa is C or S
VPTELSPINMLYFDEYDKVVYGKIPEMVVEGX

SEQ ID NO: 32995 - protein, 36 aa, Artificial Sequence
  GFR-binding peptide
  MOD_RES (1), (2), (36): Xaa is C or S
  MOD_RES (16), (17), (18), (19), (20): Xaa is A or G
  MOD_RES (21), (22), (23), (24): Xaa is A or G or is absent
XXAPTKLSPINVLYFXXXXXXXXXYGKIPNMVVRSX

SEQ ID NO: 32996 - protein, 40 aa, Artificial Sequence
  GFR-binding peptide
  MOD_RES (6), (7), (40): Xaa is C or S
  MOD_RES (21), (22), (23), (24), (25): Xaa is A or G
  MOD_RES (26), (27), (28), (29): Xaa is A or G or is absent
RVPSTXXAPVKTSPINMLYFXXXXXXXXXYGKIPMIVEEX

SEQ ID NO: 32997 - protein, 40 aa, Artificial Sequence
  GFR-binding peptide
  MOD_RES (4), (5), (37), (39): Xaa is C or S
PPTXXVPTRLSPINILYFDSANNVVYGKIPDMVVESXGXR

SEQ ID NO: 32998 - protein, 39 aa, Artificial Sequence
  GFR-binding peptide
  MOD_RES (3), (4), (38): Xaa is C or S
  MOD_RES (18), (19), (20), (21), (22): Xaa is A or G
  MOD_RES (23), (24), (25), (26): Xaa is A or G or is absent
KPXXAPTKLSPINVLYFXXXXXXXXXYGKIPNMVVRSXG

SEQ ID NO: 32999 - protein, 38 aa, Artificial Sequence
  GFR-binding peptide
  MOD_RES (5), (6), (38): Xaa is C or S
TPPTXXVPTRLSPINILYFDSANNVVYGKIPDMVVESX

SEQ ID NO: 33000 - protein, 38 aa, Artificial Sequence
  GFR-binding peptide
  MOD_RES (4), (5): Xaa is C or S
  MOD_RES (19), (20), (21), (22), (23): Xaa is A or G
  MOD_RES (24), (25), (26), (27): Xaa is A or G or is absent
SKAXXVPTKLSPINILYFXXXXXXXXXYGKIPGMAVSE

SEQ ID NO: 33001 - protein, 41 aa, Artificial Sequence
  GFR-binding peptide
  MOD_RES (5), (6), (40): Xaa is C or S
  MOD_RES (20), (21), (22), (23), (24): Xaa is A or G
  MOD_RES (25), (26), (27), (28): Xaa is A or G or is absent
TPPTXXVPTRLSPINILYFXXXXXXXXXYGKIPDMVVESXG

SEQ ID NO: 33002 - protein, 36 aa, Artificial Sequence
  GFR-binding peptide
  MOD_RES (2), (3), (34), (36): Xaa is C or S
TXXAPVKTSPINMLYFDNGRVLLYGKIPMIVEEXGX

SEQ ID NO: 33003 - protein, 36 aa, Artificial Sequence
  GFR-binding peptide
  MOD_RES (1), (2), (34), (36): Xaa is C or S
XXAPTKLSPINVLYFDSSNNVIYGKIPNMVVKAXGX

SEQ ID NO: 33004 - protein, 33 aa, Artificial Sequence
  GFR-binding peptide
  MOD_RES (2), (3): Xaa is C or S
TXXVPTRLSPINILYFDSANNVVYGKIPDMVVE

SEQ ID NO: 33005 - protein, 39 aa, Artificial Sequence
  GFR-binding peptide
  MOD_RES (6), (6): Xaa is C or S
  MOD_RES (20), (21), (22), (23), (24): Xaa is A or G
  MOD_RES (25), (26), (27), (28): Xaa is A or G or is absent
VTKPTXAPTKLSPINVLYFXXXXXXXXXYGKIPNMVVRS

SEQ ID NO: 33006 - protein, 34 aa, Artificial Sequence
  GFR-binding peptide
  MOD_RES (2), (3): Xaa is C or S
AXXVPTELSPINMLYFDENEKVVYGKIPDMVVEG

SEQ ID NO: 33007 - protein, 38 aa, Artificial Sequence
  GFR-binding peptide
  MOD_RES (5), (37): Xaa is C or S
TKPTXAPTKLSPINVLYFDDSSNVIYGKIPNMVVRSXG

SEQ ID NO: 33008 - protein, 35 aa, Artificial Sequence
  GFR-binding peptide
  MOD_RES (32), (34): Xaa is C or S
APTKLSPINVLYFDDSSNVIYGKIPNMVVRSXGXH

SEQ ID NO: 33009 - protein, 41 aa, Artificial Sequence
  GFR-binding peptide
  MOD_RES (3), (4), (38), (40): Xaa is C or S
  MOD_RES (18), (19), (20), (21), (22): Xaa is A or G
  MOD_RES (23), (24), (25), (26): Xaa is A or G or is absent
PTXXVPTRLSPINILYFXXXXXXXXXYGKIPDMVVESXGXR

SEQ ID NO: 33010 - protein, 30 aa, Artificial Sequence
  GFR-binding peptide
APTKLSPINVLYFDSSNNVIYGKIPNMVVK

SEQ ID NO: 33011 - protein, 38 aa, Artificial Sequence
  GFR-binding peptide
  MOD_RES (6), (38): Xaa is C or S
VTKPTXAPTKLSPINVLYFDDSSNVIYGKIPNMVVRSX

SEQ ID NO: 33012 - protein, 41 aa, Artificial Sequence
  GFR-binding peptide
  MOD_RES (6), (7), (39), (41): Xaa is C or S
SIPKAXXVPTELSPINMLYFDEYDKVVYGKIPEMVVEGXGX

SEQ ID NO: 33013 - protein, 42 aa, Artificial Sequence
  GFR-binding peptide
  MOD_RES (6), (40), (42): Xaa is C or S
  MOD_RES (20), (21), (22), (23), (24): Xaa is A or G
  MOD_RES (25), (26), (27), (28): Xaa is A or G or is absent
VTKPTXAPTKLSPINVLYFXXXXXXXXXYGKIPNMVVRSXGX

SEQ ID NO: 33014 - protein, 36 aa, Artificial Sequence
  GFR-binding peptide
  MOD_RES (5), (5): Xaa is C or S
TKPTXAPTKLSPINVLYFDDSSNVIYGKIPNMVVRS

SEQ ID NO: 33015 - protein, 36 aa, Artificial Sequence
  GFR-binding peptide
  MOD_RES (1), (35): Xaa is C or S
  MOD_RES (15), (16), (17), (18), (19): Xaa is A or G
  MOD_RES (20), (21), (22), (23): Xaa is A or G or is absent
XAPTQLSPINVLYFXXXXXXXXXYGKIPNMVVRAXG

SEQ ID NO: 33016 - protein, 35 aa, Artificial Sequence
  GFR-binding peptide
  MOD_RES (1), (35): Xaa is C or S
  MOD_RES (15), (16), (17), (18), (19): Xaa is A or G
  MOD_RES (20), (21), (22), (23): Xaa is A or G or is absent
XVPTRLSPINILYFXXXXXXXXXYGKIPDMVVESX

SEQ ID NO: 33017 - protein, 37 aa, Artificial Sequence
  GFR-binding peptide
  MOD_RES (3), (4): Xaa is C or S
  MOD_RES (18), (19), (20), (21), (22): Xaa is A or G
  MOD_RES (23), (24), (25), (26): Xaa is A or G or is absent
KAXXVPTKLSPINILYFXXXXXXXXXYGKIPGMAVSE

SEQ ID NO: 33018 - protein, 34 aa, Artificial Sequence
  GFR-binding peptide
  MOD_RES (1), (2), (34): Xaa is C or S
XXVPARLSPINILYFDAANNVVYGKIPDMVVEAX

SEQ ID NO: 33019 - protein, 40 aa, Artificial Sequence
  GFR-binding peptide
  MOD_RES (6), (7), (40): Xaa is C or S
KVGKAXXVPTKLSPINVLYFDDMGVPTYGKIPEGMSVAEX

SEQ ID NO: 33020 - protein, 39 aa, Artificial Sequence
  GFR-binding peptide
  MOD_RES (4), (5), (37), (39): Xaa is C or S
SKAXXVPTKLSPINILYFDKGVVTYYGKIPGMAVSEXGX

SEQ ID NO: 33021 - protein, 34 aa, Artificial Sequence
  GFR-binding peptide
  MOD_RES (1), (2), (33): Xaa is C or S
XXAPVKTSPINMLYFDNGRVLLYGKIPMIVEEXG

SEQ ID NO: 33022 - protein, 39 aa, Artificial Sequence
  GFR-binding peptide
  MOD_RES (4), (5), (38): Xaa is C or S
GKAXXVPTKLSPINVLYFDDMGVPTYGKIPEGMSVAEXG

SEQ ID NO: 33023 - protein, 38 aa, Artificial Sequence
  GFR-binding peptide
  MOD_RES (3), (4), (38): Xaa is C or S
  MOD_RES (18), (19), (20), (21), (22): Xaa is A or G
  MOD_RES (23), (24), (25), (26): Xaa is A or G or is absent
GPXXTPTKMSPINMLYFXXXXXXXXXYGKIPGMVVDRX

SEQ ID NO: 33024 - protein, 41 aa, Artificial Sequence
  GFR-binding peptide
  MOD_RES (3), (4), (38), (40): Xaa is C or S
  MOD_RES (18), (19), (20), (21), (22): Xaa is A or G
  MOD_RES (23), (24), (25), (26): Xaa is A or G or is absent
KAXXVPTELSPINMLYFXXXXXXXXXYGKIPDMVVEGXGXR

SEQ ID NO: 33025 - protein, 35 aa, Artificial Sequence
  GFR-binding peptide
  MOD_RES (3), (4): Xaa is C or S
KPXXAPTQLSPINVLYFDDSSNVIYGKIPNMVVRA

SEQ ID NO: 33026 - protein, 39 aa, Artificial Sequence
  GFR-binding peptide
  MOD_RES (5), (6): Xaa is C or S
  MOD_RES (20), (21), (22), (23), (24): Xaa is A or G
  MOD_RES (25), (26), (27), (28): Xaa is A or G or is absent
VPKPXXAPTKLSPINVLYFXXXXXXXXXYGKIPNMVVRS

SEQ ID NO: 33027 - protein, 39 aa, Artificial Sequence
  GFR-binding peptide
  MOD_RES (3), (4), (38): Xaa is C or S
  MOD_RES (18), (19), (20), (21), (22): Xaa is A or G
  MOD_RES (23), (24), (25), (26): Xaa is A or G or is absent
KAXXVPTKLSPINILYFXXXXXXXXXYGKIPGMAVSEXG

SEQ ID NO: 33028 - protein, 32 aa, Artificial Sequence
  GFR-binding peptide
  MOD_RES (32), (32): Xaa is C or S
APTKLSPINVLYFDSSNNVIYGKIPNMVVKAX

SEQ ID NO: 33029 - protein, 39 aa, Artificial Sequence
  GFR-binding peptide
  MOD_RES (6), (7), (39): Xaa is C or S
SIPKAXXVPTELSPINMLYFDEYDKVVYGKIPEMVVEGX

SEQ ID NO: 33030 - protein, 39 aa, Artificial Sequence
  GFR-binding peptide
  MOD_RES (5), (6): Xaa is C or S
  MOD_RES (20), (21), (22), (23), (24): Xaa is A or G
  MOD_RES (25), (26), (27), (28): Xaa is A or G or is absent
ASKAXXVPTKLSPINILYFXXXXXXXXXYGKIPGMAVSE

SEQ ID NO: 33031 - protein, 42 aa, Artificial Sequence
  GFR-binding peptide
  MOD_RES (4), (5), (39), (41): Xaa is C or S
  MOD_RES (19), (20), (21), (22), (23): Xaa is A or G
  MOD_RES (24), (25), (26), (27): Xaa is A or G or is absent
PKAXXVPTELSPINMLYFXXXXXXXXXYGKIPEMVVEGXGXR

SEQ ID NO: 33032 - protein, 37 aa, Artificial Sequence
  GFR-binding peptide
  MOD_RES (4), (5): Xaa is C or S
  MOD_RES (19), (20), (21), (22), (23): Xaa is A or G
  MOD_RES (24), (25), (26), (27): Xaa is A or G or is absent
SKAXXVPTKLSPINILYFXXXXXXXXXYGKIPGMAVS

SEQ ID NO: 33033 - protein, 40 aa, Artificial Sequence
  GFR-binding peptide
  MOD_RES (3), (4), (38), (40): Xaa is C or S
  MOD_RES (18), (19), (20), (21), (22): Xaa is A or G
  MOD_RES (23), (24), (25), (26): Xaa is A or G or is absent
KPXXAPTQLSPINVLYFXXXXXXXXXYGKIPNMVVRAXGX

SEQ ID NO: 33034 - protein, 33 aa, Artificial Sequence
  GFR-binding peptide
  MOD_RES (1), (33): Xaa is C or S
XVPTRLSPINILYFDSANNVVYGKIPDMVVESX

SEQ ID NO: 33035 - protein, 39 aa, Artificial Sequence
  GFR-binding peptide
  MOD_RES (6), (7): Xaa is C or S
  MOD_RES (21), (22), (23), (24), (25): Xaa is A or G
  MOD_RES (26), (27), (28), (29): Xaa is A or G or is absent
AAPASXXVPARLSPINILYFXXXXXXXXXYGKIPDMVVE

SEQ ID NO: 33036 - protein, 37 aa, Artificial Sequence
  GFR-binding peptide
  MOD_RES (3), (4), (36): Xaa is C or S
KAXXVPTELSPINMLYFDENEKVVYGKIPDMVVEGXG

SEQ ID NO: 33037 - protein, 31 aa, Artificial Sequence
  GFR-binding peptide
VPTKLSPINILYFDKGVVTYYGKIPGMAVSE

SEQ ID NO: 33038 - protein, 34 aa, Artificial Sequence
  GFR-binding peptide
  MOD_RES (2), (2): Xaa is C or S
  MOD_RES (16), (17), (18), (19), (20): Xaa is A or G
  MOD_RES (21), (22), (23), (24): Xaa is A or G or is absent
TXAPTKLSPINVLYFXXXXXXXXXYGKIPNMVVR

SEQ ID NO: 33039 - protein, 34 aa, Artificial Sequence
  GFR-binding peptide
  MOD_RES (32), (34): Xaa is C or S
APTQLSPINVLYFDDSSNVIYGKIPNMVVRAXGX

SEQ ID NO: 33040 - protein, 38 aa, Artificial Sequence
  GFR-binding peptide
  MOD_RES (5), (6), (38): Xaa is C or S
VPKPXXAPTKLSPINVLYFDDSSNVIYGKIPNMVVRSX

SEQ ID NO: 33041 - protein, 37 aa, Artificial Sequence
  GFR-binding peptide
  MOD_RES (1), (2), (34), (36): Xaa is C or S
XXVPTKLSPINILYFDKGVVTYYGKIPGMAVSEXGXR

SEQ ID NO: 33042 - protein, 37 aa, Artificial Sequence
  GFR-binding peptide
  MOD_RES (34), (36): Xaa is C or S
  MOD_RES (14), (15), (16), (17), (18): Xaa is A or G
  MOD_RES (19), (20), (21), (22): Xaa is A or G or is absent
VPARLSPINILYFXXXXXXXXXYGKIPDMVVEAXGXR

SEQ ID NO: 33043 - protein, 36 aa, Artificial Sequence
  GFR-binding peptide
  MOD_RES (1), (35): Xaa is C or S
  MOD_RES (15), (16), (17), (18), (19): Xaa is A or G
  MOD_RES (20), (21), (22), (23): Xaa is A or G or is absent
XVPTELSPINMLYFXXXXXXXXXYGKIPDMVVEGXG

SEQ ID NO: 33044 - protein, 38 aa, Artificial Sequence
  GFR-binding peptide
  MOD_RES (1), (2), (36), (38): Xaa is C or S
  MOD_RES (16), (17), (18), (19), (20): Xaa is A or G
  MOD_RES (21), (22), (23), (24): Xaa is A or G or is absent
XXAPTKLSPINVLYFXXXXXXXXXYGKIPNMVVKAXGX

SEQ ID NO: 33045 - protein, 33 aa, Artificial Sequence
  GFR-binding peptide
  MOD_RES (14), (15), (16), (17), (18): Xaa is A or G
  MOD_RES (19), (20), (21), (22): Xaa is A or G or is absent
VPTELSPINMLYFXXXXXXXXXYGKIPEMVVEG

SEQ ID NO: 33046 - protein, 41 aa, Artificial Sequence
  GFR-binding peptide
  MOD_RES (6), (7), (39), (41): Xaa is C or S
YVPKPXXAPTKLSPINVLYFDDSSNVIYGKIPNMVVRSXGX

SEQ ID NO: 33047 - protein, 39 aa, Artificial Sequence
  GFR-binding peptide
  MOD_RES (6), (7): Xaa is C or S
  MOD_RES (21), (22), (23), (24), (25): Xaa is A or G
  MOD_RES (26), (27), (28), (29): Xaa is A or G or is absent
YVPKPXXAPTKLSPINVLYFXXXXXXXXXYGKIPNMVVR

SEQ ID NO: 33048 - protein, 41 aa, Artificial Sequence
  GFR-binding peptide
  MOD_RES (5), (6), (40): Xaa is C or S
  MOD_RES (20), (21), (22), (23), (24): Xaa is A or G
  MOD_RES (25), (26), (27), (28): Xaa is A or G or is absent
IPKAXXVPTELSPINMLYFXXXXXXXXXYGKIPEMVVEGXG

SEQ ID NO: 33049 - protein, 37 aa, Artificial Sequence
  GFR-binding peptide
  MOD_RES (4), (5), (36): Xaa is C or S
PSTXXAPVKTSPINMLYFDNGRVLLYGKIPMIVEEXG

SEQ ID NO: 33050 - protein, 36 aa, Artificial Sequence
  GFR-binding peptide
  MOD_RES (1), (2), (34), (36): Xaa is C or S
XXAPTKLSPINVLYFDDSSNVIYGKIPNMVVRSXGX

SEQ ID NO: 33051 - protein, 37 aa, Artificial Sequence
  GFR-binding peptide
  MOD_RES (5), (6), (37): Xaa is C or S
VPSTXXAPVKTSPINMLYFDNGRVLLYGKIPMIVEEX

SEQ ID NO: 33052 - protein, 37 aa, Artificial Sequence
  GFR-binding peptide
  MOD_RES (3), (4): Xaa is C or S
  MOD_RES (18), (19), (20), (21), (22): Xaa is A or G
  MOD_RES (23), (24), (25), (26): Xaa is A or G or is absent
KPXXAPTKLSPINVLYFXXXXXXXXXYGKIPNMVVRS

SEQ ID NO: 33053 - protein, 37 aa, Artificial Sequence
  GFR-binding peptide
  MOD_RES (2), (3), (35), (37): Xaa is C or S
SXXVPARLSPINILYFDAANNVVYGKIPDMVVEAXGX

SEQ ID NO: 33054 - protein, 37 aa, Artificial Sequence
  GFR-binding peptide
  MOD_RES (1), (2), (36): Xaa is C or S
  MOD_RES (16), (17), (18), (19), (20): Xaa is A or G
  MOD_RES (21), (22), (23), (24): Xaa is A or G or is absent
XXTPTKMSPINMLYFXXXXXXXXXYGKIPGMVVDRXG

SEQ ID NO: 33055 - protein, 38 aa, Artificial Sequence
  GFR-binding peptide
  MOD_RES (3), (4), (37): Xaa is C or S
  MOD_RES (18), (19), (20), (21), (22): Xaa is A or G
  MOD_RES (23), (24), (25), (26): Xaa is A or G or is absent
STXXAPVKTSPINMLYFXXXXXXXXXYGKIPMIVEEXG

SEQ ID NO: 33056 - protein, 32 aa, Artificial Sequence
  GFR-binding peptide
  MOD_RES (32), (32): Xaa is C or S
APTKLSPINVLYFDDSSNVIYGKIPNMVVRSX

SEQ ID NO: 33057 - protein, 40 aa, Artificial Sequence
  GFR-binding peptide
  MOD_RES (6), (7): Xaa is C or S
  MOD_RES (21), (22), (23), (24), (25): Xaa is A or G
  MOD_RES (26), (27), (28), (29): Xaa is A or G or is absent
KIPKAXXVPTELSPINMLYFXXXXXXXXXYGKIPDMVVEG

SEQ ID NO: 33058 - protein, 38 aa, Artificial Sequence
  GFR-binding peptide
  MOD_RES (6), (7): Xaa is C or S
HVPKPXXAPTKLSPINVLYFDDSSNVIYGKIPNMVVRS

SEQ ID NO: 33059 - protein, 34 aa, Artificial Sequence
  GFR-binding peptide
  MOD_RES (1), (2), (34): Xaa is C or S
XXVPTKLSPINILYFDKGVVTYYGKIPGMAVSEX

SEQ ID NO: 33060 - protein, 42 aa, Artificial Sequence
  GFR-binding peptide
  MOD_RES (6), (7), (39), (41): Xaa is C or S
TVPKPXXAPTQLSPINVLYFDDSSNVIYGKIPNMVVRAXGXH

SEQ ID NO: 33061 - protein, 35 aa, Artificial Sequence
  GFR-binding peptide
  MOD_RES (32), (34): Xaa is C or S
VPTELSPINMLYFDEYDKVVYGKIPEMVVEGXGXR

SEQ ID NO: 33062 - protein, 32 aa, Artificial Sequence
  GFR-binding peptide
  MOD_RES (1), (32): Xaa is C or S
XAPVKTSPINMLYFDNGRVLLYGKIPMIVEEX

SEQ ID NO: 33063 - protein, 34 aa, Artificial Sequence
  GFR-binding peptide
  MOD_RES (3), (3): Xaa is C or S
PTXAPTKLSPINVLYFDDSSNVIYGKIPNMVVRS

SEQ ID NO: 33064 - protein, 37 aa, Artificial Sequence
  GFR-binding peptide
  MOD_RES (3), (4), (36): Xaa is C or S
KAXXAPTKLSPINVLYFDSSNNVIYGKIPNMVVKAXG

SEQ ID NO: 33065 - protein, 37 aa, Artificial Sequence
  GFR-binding peptide
  MOD_RES (6), (7): Xaa is C or S
TVPKPXXAPTQLSPINVLYFDDSSNVIYGKIPNMVVR

SEQ ID NO: 33066 - protein, 40 aa, Artificial Sequence
  GFR-binding peptide
  MOD_RES (3), (4), (38), (40): Xaa is C or S
  MOD_RES (18), (19), (20), (21), (22): Xaa is A or G
  MOD_RES (23), (24), (25), (26): Xaa is A or G or is absent
KAXXVPTKLSPINILYFXXXXXXXXXYGKIPGMAVSEXGX

SEQ ID NO: 33067 - protein, 34 aa, Artificial Sequence
  GFR-binding peptide
  MOD_RES (1), (1): Xaa is C or S
  MOD_RES (15), (16), (17), (18), (19): Xaa is A or G
  MOD_RES (20), (21), (22), (23): Xaa is A or G or is absent
XVPTRLSPINILYFXXXXXXXXXYGKIPDMVVES

SEQ ID NO: 33068 - protein, 32 aa, Artificial Sequence
  GFR-binding peptide
  MOD_RES (1), (2): Xaa is C or S
XXAPTQLSPINVLYFDDSSNVIYGKIPNMVVR

SEQ ID NO: 33069 - protein, 36 aa, Artificial Sequence
  GFR-binding peptide
  MOD_RES (4), (5): Xaa is C or S
PKPXXAPTQLSPINVLYFDDSSNVIYGKIPNMVVRA

SEQ ID NO: 33070 - protein, 37 aa, Artificial Sequence
  GFR-binding peptide
  MOD_RES (2), (3), (37): Xaa is C or S
  MOD_RES (17), (18), (19), (20), (21): Xaa is A or G
  MOD_RES (22), (23), (24), (25): Xaa is A or G or is absent
PXXAPTQLSPINVLYFXXXXXXXXXYGKIPNMVVRAX

SEQ ID NO: 33071 - protein, 44 aa, Artificial Sequence
  GFR-binding peptide
  MOD_RES (7), (41), (43): Xaa is C or S
  MOD_RES (21), (22), (23), (24), (25): Xaa is A or G
  MOD_RES (26), (27), (28), (29): Xaa is A or G or is absent
HVTKPTXAPTKLSPINVLYFXXXXXXXXXYGKIPNMVVRSXGXH

SEQ ID NO: 33072 - protein, 33 aa, Artificial Sequence
  GFR-binding peptide
  MOD_RES (2), (2): Xaa is C or S
TXAPTKLSPINVLYFDDSSNVIYGKIPNMVVRS

SEQ ID NO: 33073 - protein, 36 aa, Artificial Sequence
  GFR-binding peptide
  MOD_RES (1), (2), (36): Xaa is C or S
  MOD_RES (16), (17), (18), (19), (20): Xaa is A or G
  MOD_RES (21), (22), (23), (24): Xaa is A or G or is absent
XXTPTKMSPINMLYFXXXXXXXXXYGKIPGMVVDRX

SEQ ID NO: 33074 - protein, 44 aa, Artificial Sequence
  GFR-binding peptide
  MOD_RES (6), (7), (41), (43): Xaa is C or S
  MOD_RES (21), (22), (23), (24), (25): Xaa is A or G
  MOD_RES (26), (27), (28), (29): Xaa is A or G or is absent
SIPKAXXVPTELSPINMLYFXXXXXXXXXYGKIPEMVVEGXGXR

SEQ ID NO: 33075 - protein, 38 aa, Artificial Sequence
  GFR-binding peptide
  MOD_RES (1), (2), (36), (38): Xaa is C or S
  MOD_RES (16), (17), (18), (19), (20): Xaa is A or G
  MOD_RES (21), (22), (23), (24): Xaa is A or G or is absent
XXVPTRLSPINILYFXXXXXXXXXYGKIPDMVVESXGX

SEQ ID NO: 33076 - protein, 38 aa, Artificial Sequence
  GFR-binding peptide
  MOD_RES (6), (7): Xaa is C or S
YVPKPXXAPTKLSPINVLYFDDSSNVIYGKIPNMVVRS

SEQ ID NO: 33077 - protein, 36 aa, Artificial Sequence
  GFR-binding peptide
  MOD_RES (2), (3), (35): Xaa is C or S
PXXAPTQLSPINVLYFDDSSNVIYGKIPNMVVRAXG

SEQ ID NO: 33078 - protein, 38 aa, Artificial Sequence
  GFR-binding peptide
  MOD_RES (2), (3), (37): Xaa is C or S
  MOD_RES (17), (18), (19), (20), (21): Xaa is A or G
  MOD_RES (22), (23), (24), (25): Xaa is A or G or is absent
AXXAPTKLSPINVLYFXXXXXXXXXYGKIPNMVVKAXG

SEQ ID NO: 33079 - protein, 41 aa, Artificial Sequence
  GFR-binding peptide
  MOD_RES (6), (7), (41): Xaa is C or S
  MOD_RES (21), (22), (23), (24), (25): Xaa is A or G
  MOD_RES (26), (27), (28), (29): Xaa is A or G or is absent
GSAGPXXTPTKMSPINMLYFXXXXXXXXXYGKIPGMVVDRX

SEQ ID NO: 33080 - protein, 35 aa, Artificial Sequence
  GFR-binding peptide
  MOD_RES (1), (35): Xaa is C or S
  MOD_RES (15), (16), (17), (18), (19): Xaa is A or G
  MOD_RES (20), (21), (22), (23): Xaa is A or G or is absent
XAPTKLSPINVLYFXXXXXXXXXYGKIPNMVVKAX

SEQ ID NO: 33081 - protein, 31 aa, Artificial Sequence
  GFR-binding peptide
  MOD_RES (1), (1): Xaa is C or S
XAPTQLSPINVLYFDDSSNVIYGKIPNMVVR

SEQ ID NO: 33082 - protein, 35 aa, Artificial Sequence
  GFR-binding peptide
  MOD_RES (4), (5): Xaa is C or S
PASXXVPARLSPINILYFDAANNVVYGKIPDMVVE

SEQ ID NO: 33083 - protein, 43 aa, Artificial Sequence
  GFR-binding peptide
  MOD_RES (6), (7), (41), (43): Xaa is C or S
  MOD_RES (21), (22), (23), (24), (25): Xaa is A or G
  MOD_RES (26), (27), (28), (29): Xaa is A or G or is absent
KIPKAXXVPTELSPINMLYFXXXXXXXXXYGKIPDMVVEGXGX

SEQ ID NO: 33084 - protein, 37 aa, Artificial Sequence
  GFR-binding peptide
  MOD_RES (3), (4): Xaa is C or S
  MOD_RES (18), (19), (20), (21), (22): Xaa is A or G
  MOD_RES (23), (24), (25), (26): Xaa is A or G or is absent
ASXXVPARLSPINILYFXXXXXXXXXYGKIPDMVVEA

SEQ ID NO: 33085 - protein, 33 aa, Artificial Sequence
  GFR-binding peptide
  MOD_RES (2), (3): Xaa is C or S
PXXAPTQLSPINVLYFDDSSNVIYGKIPNMVVR

SEQ ID NO: 33086 - protein, 42 aa, Artificial Sequence
  GFR-binding peptide
  MOD_RES (5), (6), (40), (42): Xaa is C or S
  MOD_RES (20), (21), (22), (23), (24): Xaa is A or G
  MOD_RES (25), (26), (27), (28): Xaa is A or G or is absent
IPKAXXVPTELSPINMLYFXXXXXXXXXYGKIPDMVVEGXGX

SEQ ID NO: 33087 - protein, 38 aa, Artificial Sequence
  GFR-binding peptide
  MOD_RES (1), (2), (37): Xaa is C or S
  MOD_RES (16), (17), (18), (19), (20): Xaa is A or G
  MOD_RES (21), (22), (23), (24): Xaa is A or G or is absent
XXVPTKLSPINVLYFXXXXXXXXXYGKIPEGMSVAEXG

SEQ ID NO: 33088 - protein, 35 aa, Artificial Sequence
  GFR-binding peptide
  MOD_RES (2), (3), (35): Xaa is C or S
AXXAPTKLSPINVLYFDSSNNVIYGKIPNMVVKAX

SEQ ID NO: 33089 - protein, 39 aa, Artificial Sequence
  GFR-binding peptide
  MOD_RES (4), (5), (39): Xaa is C or S
  MOD_RES (19), (20), (21), (22), (23): Xaa is A or G
  MOD_RES (24), (25), (26), (27): Xaa is A or G or is absent
PASXXVPARLSPINILYFXXXXXXXXXYGKIPDMVVEAX

SEQ ID NO: 33090 - protein, 33 aa, Artificial Sequence
  GFR-binding peptide
  MOD_RES (1), (2): Xaa is C or S
XXVPARLSPINILYFDAANNVVYGKIPDMVVEA

SEQ ID NO: 33091 - protein, 34 aa, Artificial Sequence
  GFR-binding peptide
  MOD_RES (1), (2), (34): Xaa is C or S
XXAPTQLSPINVLYFDDSSNVIYGKIPNMVVRAX

SEQ ID NO: 33092 - protein, 39 aa, Artificial Sequence
  GFR-binding peptide
  MOD_RES (3), (4), (36), (38): Xaa is C or S
KPXXAPTQLSPINVLYFDDSSNVIYGKIPNMVVRAXGXH

SEQ ID NO: 33093 - protein, 36 aa, Artificial Sequence
  GFR-binding peptide
  MOD_RES (2), (3), (35): Xaa is C or S
AXXVPTKLSPINILYFDKGVVTYYGKIPGMAVSEXG

SEQ ID NO: 33094 - protein, 41 aa, Artificial Sequence
  GFR-binding peptide
  MOD_RES (5), (6), (40): Xaa is C or S
  MOD_RES (20), (21), (22), (23), (24): Xaa is A or G
  MOD_RES (25), (26), (27), (28): Xaa is A or G or is absent
APASXXVPARLSPINILYFXXXXXXXXXYGKIPDMVVEAXG

SEQ ID NO: 33095 - protein, 39 aa, Artificial Sequence
  GFR-binding peptide
  MOD_RES (6), (7): Xaa is C or S
  MOD_RES (21), (22), (23), (24), (25): Xaa is A or G
  MOD_RES (26), (27), (28), (29): Xaa is A or G or is absent
KASKAXXVPTKLSPINILYFXXXXXXXXXYGKIPGMAVS

SEQ ID NO: 33096 - protein, 39 aa, Artificial Sequence
  GFR-binding peptide
  MOD_RES (5), (6), (38): Xaa is C or S
APASXXVPARLSPINILYFDAANNVVYGKIPDMVVEAXG

SEQ ID NO: 33097 - protein, 36 aa, Artificial Sequence
  GFR-binding peptide
  MOD_RES (1), (2), (36): Xaa is C or S
  MOD_RES (16), (17), (18), (19), (20): Xaa is A or G
  MOD_RES (21), (22), (23), (24): Xaa is A or G or is absent
XXVPTKLSPINILYFXXXXXXXXXYGKIPGMAVSEX

SEQ ID NO: 33098 - protein, 37 aa, Artificial Sequence
  GFR-binding peptide
  MOD_RES (3), (4), (36): Xaa is C or S
PTXXVPTRLSPINILYFDSANNVVYGKIPDMVVESXG

SEQ ID NO: 33099 - protein, 36 aa, Artificial Sequence
  GFR-binding peptide
  MOD_RES (1), (35): Xaa is C or S
  MOD_RES (15), (16), (17), (18), (19): Xaa is A or G
  MOD_RES (20), (21), (22), (23): Xaa is A or G or is absent
XAPTKLSPINVLYFXXXXXXXXXYGKIPNMVVRSXG

SEQ ID NO: 33100 - protein, 36 aa, Artificial Sequence
  GFR-binding peptide
  MOD_RES (1), (2), (34), (36): Xaa is C or S
XXVPTELSPINMLYFDENEKVVYGKIPDMVVEGXGX

SEQ ID NO: 33101 - protein, 37 aa, Artificial Sequence
  GFR-binding peptide
  MOD_RES (3), (4): Xaa is C or S
  MOD_RES (18), (19), (20), (21), (22): Xaa is A or G
  MOD_RES (23), (24), (25), (26): Xaa is A or G or is absent
PTXXVPTRLSPINILYFXXXXXXXXXYGKIPDMVVES

SEQ ID NO: 33102 - protein, 36 aa, Artificial Sequence
  GFR-binding peptide
  MOD_RES (1), (33), (35): Xaa is C or S
XVPARLSPINILYFDAANNVVYGKIPDMVVEAXGXR

SEQ ID NO: 33103 - protein, 37 aa, Artificial Sequence
  GFR-binding peptide
  MOD_RES (5), (6): Xaa is C or S
IPKAXXVPTELSPINMLYFDEYDKVVYGKIPEMVVEG

SEQ ID NO: 33104 - protein, 37 aa, Artificial Sequence
  GFR-binding peptide
  MOD_RES (3), (4), (36): Xaa is C or S
ASXXVPARLSPINILYFDAANNVVYGKIPDMVVEAXG

SEQ ID NO: 33105 - protein, 41 aa, Artificial Sequence
  GFR-binding peptide
  MOD_RES (7), (41): Xaa is C or S
  MOD_RES (21), (22), (23), (24), (25): Xaa is A or G
  MOD_RES (26), (27), (28), (29): Xaa is A or G or is absent
HVTKPTXAPTKLSPINVLYFXXXXXXXXXYGKIPNMVVRSX

SEQ ID NO: 33106 - protein, 39 aa, Artificial Sequence
  GFR-binding peptide
  MOD_RES (3), (4), (36), (38): Xaa is C or S
KPXXAPTKLSPINVLYFDDSSNVIYGKIPNMVVRSXGXH

SEQ ID NO: 33107 - protein, 39 aa, Artificial Sequence
  GFR-binding peptide
  MOD_RES (6), (7), (39): Xaa is C or S
AAPASXXVPARLSPINILYFDAANNVVYGKIPDMVVEAX

SEQ ID NO: 33108 - protein, 42 aa, Artificial Sequence
  GFR-binding peptide
  MOD_RES (6), (7), (40), (42): Xaa is C or S
KVGKAXXVPTKLSPINVLYFDDMGVPTYGKIPEGMSVAEXGX

SEQ ID NO: 33109 - protein, 39 aa, Artificial Sequence
  GFR-binding peptide
  MOD_RES (4), (5), (37), (39): Xaa is C or S
PKPXXAPTKLSPINVLYFDDSSNVIYGKIPNMVVRSXGX

SEQ ID NO: 33110 - protein, 35 aa, Artificial Sequence
  GFR-binding peptide
  MOD_RES (1), (2): Xaa is C or S
  MOD_RES (16), (17), (18), (19), (20): Xaa is A or G
  MOD_RES (21), (22), (23), (24): Xaa is A or G or is absent
XXVPTELSPINMLYFXXXXXXXXXYGKIPEMVVEG

SEQ ID NO: 33111 - protein, 40 aa, Artificial Sequence
  GFR-binding peptide
  MOD_RES (6), (7), (39): Xaa is C or S
AAPASXXVPARLSPINILYFDAANNVVYGKIPDMVVEAXG

SEQ ID NO: 33112 - protein, 38 aa, Artificial Sequence
  GFR-binding peptide
  MOD_RES (3), (4), (38): Xaa is C or S
  MOD_RES (18), (19), (20), (21), (22): Xaa is A or G
  MOD_RES (23), (24), (25), (26): Xaa is A or G or is absent
ASXXVPARLSPINILYFXXXXXXXXXYGKIPDMVVEAX

SEQ ID NO: 33113 - protein, 43 aa, Artificial Sequence
  GFR-binding peptide
  MOD_RES (5), (6), (40), (42): Xaa is C or S
  MOD_RES (20), (21), (22), (23), (24): Xaa is A or G
  MOD_RES (25), (26), (27), (28): Xaa is A or G or is absent
IPKAXXVPTELSPINMLYFXXXXXXXXXYGKIPEMVVEGXGXR

SEQ ID NO: 33114 - protein, 41 aa, Artificial Sequence
  GFR-binding peptide
  MOD_RES (6), (7), (41): Xaa is C or S
  MOD_RES (21), (22), (23), (24), (25): Xaa is A or G
  MOD_RES (26), (27), (28), (29): Xaa is A or G or is absent
KIPKAXXVPTELSPINMLYFXXXXXXXXXYGKIPDMVVEGX

SEQ ID NO: 33115 - protein, 39 aa, Artificial Sequence
  GFR-binding peptide
  MOD_RES (5), (6), (38): Xaa is C or S
VPKAXXAPTKLSPINVLYFDSSNNVIYGKIPNMVVKAXG

SEQ ID NO: 33116 - protein, 37 aa, Artificial Sequence
  GFR-binding peptide
  MOD_RES (1), (2), (36): Xaa is C or S
  MOD_RES (16), (17), (18), (19), (20): Xaa is A or G
  MOD_RES (21), (22), (23), (24): Xaa is A or G or is absent
XXVPTRLSPINILYFXXXXXXXXXYGKIPDMVVESXG

SEQ ID NO: 33117 - protein, 34 aa, Artificial Sequence
  GFR-binding peptide
  MOD_RES (1), (34): Xaa is C or S
  MOD_RES (15), (16), (17), (18), (19): Xaa is A or G
  MOD_RES (20), (21), (22), (23): Xaa is A or G or is absent
XAPVKTSPINMLYFXXXXXXXXXYGKIPMIVEEX

SEQ ID NO: 33118 - protein, 37 aa, Artificial Sequence
  GFR-binding peptide
  MOD_RES (4), (5), (37): Xaa is C or S
PKAXXAPTKLSPINVLYFDSSNNVIYGKIPNMVVKAX

SEQ ID NO: 33119 - protein, 34 aa, Artificial Sequence
  GFR-binding peptide
  MOD_RES (1), (2), (34): Xaa is C or S
XXAPTKLSPINVLYFDDSSNVIYGKIPNMVVRSX

SEQ ID NO: 33120 - protein, 38 aa, Artificial Sequence
  GFR-binding peptide
  MOD_RES (3), (4), (37): Xaa is C or S
KAXXVPTKLSPINVLYFDDMGVPTYGKIPEGMSVAEXG

SEQ ID NO: 33121 - protein, 40 aa, Artificial Sequence
  GFR-binding peptide
  MOD_RES (5), (6), (40): Xaa is C or S
  MOD_RES (20), (21), (22), (23), (24): Xaa is A or G
  MOD_RES (25), (26), (27), (28): Xaa is A or G or is absent
VPKAXXAPTKLSPINVLYFXXXXXXXXXYGKIPNMVVKAX

SEQ ID NO: 33122 - protein, 39 aa, Artificial Sequence
  GFR-binding peptide
  MOD_RES (7), (7): Xaa is C or S
  MOD_RES (21), (22), (23), (24), (25): Xaa is A or G
  MOD_RES (26), (27), (28), (29): Xaa is A or G or is absent
HVTKPTXAPTKLSPINVLYFXXXXXXXXXYGKIPNMVVR

SEQ ID NO: 33123 - protein, 39 aa, Artificial Sequence
  GFR-binding peptide
  MOD_RES (4), (5), (39): Xaa is C or S
  MOD_RES (19), (20), (21), (22), (23): Xaa is A or G
  MOD_RES (24), (25), (26), (27): Xaa is A or G or is absent
PKAXXVPTELSPINMLYFXXXXXXXXXYGKIPEMVVEGX

SEQ ID NO: 33124 - protein, 36 aa, Artificial Sequence
  GFR-binding peptide
  MOD_RES (1), (2), (36): Xaa is C or S
  MOD_RES (16), (17), (18), (19), (20): Xaa is A or G
  MOD_RES (21), (22), (23), (24): Xaa is A or G or is absent
XXVPARLSPINILYFXXXXXXXXXYGKIPDMVVEAX

SEQ ID NO: 33125 - protein, 38 aa, Artificial Sequence
  GFR-binding peptide
  MOD_RES (3), (4), (36), (38): Xaa is C or S
KPXXAPTKLSPINVLYFDDSSNVIYGKIPNMVVRSXGX

SEQ ID NO: 33126 - protein, 37 aa, Artificial Sequence
  GFR-binding peptide
  MOD_RES (1), (2), (36): Xaa is C or S
  MOD_RES (16), (17), (18), (19), (20): Xaa is A or G
  MOD_RES (21), (22), (23), (24): Xaa is A or G or is absent
XXVPTELSPINMLYFXXXXXXXXXYGKIPEMVVEGXG

SEQ ID NO: 33127 - protein, 38 aa, Artificial Sequence
  GFR-binding peptide
  MOD_RES (5), (5): Xaa is C or S
  MOD_RES (19), (20), (21), (22), (23): Xaa is A or G
  MOD_RES (24), (25), (26), (27): Xaa is A or G or is absent
TKPTXAPTKLSPINVLYFXXXXXXXXXYGKIPNMVVRS

SEQ ID NO: 33128 - protein, 43 aa, Artificial Sequence
  GFR-binding peptide
  MOD_RES (5), (6), (40), (42): Xaa is C or S
  MOD_RES (20), (21), (22), (23), (24): Xaa is A or G
  MOD_RES (25), (26), (27), (28): Xaa is A or G or is absent
SAGPXXTPTKMSPINMLYFXXXXXXXXXYGKIPGMVVDRXGXS

SEQ ID NO: 33129 - protein, 31 aa, Artificial Sequence
  GFR-binding peptide
VPTELSPINMLYFDENEKVVYGKIPDMVVEG

SEQ ID NO: 33130 - protein, 38 aa, Artificial Sequence
  GFR-binding peptide
  MOD_RES (3), (4), (38): Xaa is C or S
  MOD_RES (18), (19), (20), (21), (22): Xaa is A or G
  MOD_RES (23), (24), (25), (26): Xaa is A or G or is absent
KPXXAPTQLSPINVLYFXXXXXXXXXYGKIPNMVVRAX

SEQ ID NO: 33131 - protein, 33 aa, Artificial Sequence
  GFR-binding peptide
  MOD_RES (1), (1): Xaa is C or S
  MOD_RES (15), (16), (17), (18), (19): Xaa is A or G
  MOD_RES (20), (21), (22), (23): Xaa is A or G or is absent
XVPTELSPINMLYFXXXXXXXXXYGKIPEMVVE

SEQ ID NO: 33132 - protein, 37 aa, Artificial Sequence
  GFR-binding peptide
  MOD_RES (3), (4): Xaa is C or S
  MOD_RES (18), (19), (20), (21), (22): Xaa is A or G
  MOD_RES (23), (24), (25), (26): Xaa is A or G or is absent
KAXXAPTKLSPINVLYFXXXXXXXXXYGKIPNMVVKA

SEQ ID NO: 33133 - protein, 37 aa, Artificial Sequence
  GFR-binding peptide
  MOD_RES (2), (3), (37): Xaa is C or S
  MOD_RES (17), (18), (19), (20), (21): Xaa is A or G
  MOD_RES (22), (23), (24), (25): Xaa is A or G or is absent
TXXVPTRLSPINILYFXXXXXXXXXYGKIPDMVVESX

SEQ ID NO: 33134 - protein, 33 aa, Artificial Sequence
  GFR-binding peptide
  MOD_RES (1), (33): Xaa is C or S
XVPARLSPINILYFDAANNVVYGKIPDMVVEAX

SEQ ID NO: 33135 - protein, 35 aa, Artificial Sequence
  GFR-binding peptide
  MOD_RES (4), (4): Xaa is C or S
KPTXAPTKLSPINVLYFDDSSNVIYGKIPNMVVRS

SEQ ID NO: 33136 - protein, 40 aa, Artificial Sequence
  GFR-binding peptide
  MOD_RES (4), (5), (37), (39): Xaa is C or S
PKPXXAPTKLSPINVLYFDDSSNVIYGKIPNMVVRSXGXH

SEQ ID NO: 33137 - protein, 42 aa, Artificial Sequence
  GFR-binding peptide
  MOD_RES (6), (7), (40), (42): Xaa is C or S
  MOD_RES (21), (22), (23), (24), (25): Xaa is A or G
  MOD_RES (26), (27), (28), (29): Xaa is A or G or is absent
RVPSTXXAPVKTSPINMLYFXXXXXXXXXYGKIPMIVEEXGX

SEQ ID NO: 33138 - protein, 41 aa, Artificial Sequence
  GFR-binding peptide
  MOD_RES (4), (5), (39), (41): Xaa is C or S
  MOD_RES (19), (20), (21), (22), (23): Xaa is A or G
  MOD_RES (24), (25), (26), (27): Xaa is A or G or is absent
PASXXVPARLSPINILYFXXXXXXXXXYGKIPDMVVEAXGX

SEQ ID NO: 33139 - protein, 40 aa, Artificial Sequence
  GFR-binding peptide
  MOD_RES (5), (6): Xaa is C or S
  MOD_RES (20), (21), (22), (23), (24): Xaa is A or G
  MOD_RES (25), (26), (27), (28): Xaa is A or G or is absent
VGKAXXVPTKLSPINVLYFXXXXXXXXXYGKIPEGMSVAE

SEQ ID NO: 33140 - protein, 37 aa, Artificial Sequence
  GFR-binding peptide
  MOD_RES (4), (5): Xaa is C or S
  MOD_RES (19), (20), (21), (22), (23): Xaa is A or G
  MOD_RES (24), (25), (26), (27): Xaa is A or G or is absent
PPTXXVPTRLSPINILYFXXXXXXXXXYGKIPDMVVE

SEQ ID NO: 33141 - protein, 35 aa, Artificial Sequence
  GFR-binding peptide
  MOD_RES (1), (35): Xaa is C or S
  MOD_RES (15), (16), (17), (18), (19): Xaa is A or G
  MOD_RES (20), (21), (22), (23): Xaa is A or G or is absent
XVPARLSPINILYFXXXXXXXXXYGKIPDMVVEAX

SEQ ID NO: 33142 - protein, 36 aa, Artificial Sequence
  GFR-binding peptide
  MOD_RES (4), (5): Xaa is C or S
SKAXXVPTKLSPINILYFDKGVVTYYGKIPGMAVSE

SEQ ID NO: 33143 - protein, 41 aa, Artificial Sequence
  GFR-binding peptide
  MOD_RES (2), (3), (38), (40): Xaa is C or S
  MOD_RES (17), (18), (19), (20), (21): Xaa is A or G
  MOD_RES (22), (23), (24), (25): Xaa is A or G or is absent
AXXVPTKLSPINVLYFXXXXXXXXXYGKIPEGMSVAEXGXR

SEQ ID NO: 33144 - protein, 44 aa, Artificial Sequence
  GFR-binding peptide
  MOD_RES (6), (7), (41), (43): Xaa is C or S
  MOD_RES (21), (22), (23), (24), (25): Xaa is A or G
  MOD_RES (26), (27), (28), (29): Xaa is A or G or is absent
KASKAXXVPTKLSPINILYFXXXXXXXXXYGKIPGMAVSEXGXR

SEQ ID NO: 33145 - protein, 41 aa, Artificial Sequence
  GFR-binding peptide
  MOD_RES (4), (5), (39), (41): Xaa is C or S
  MOD_RES (19), (20), (21), (22), (23): Xaa is A or G
  MOD_RES (24), (25), (26), (27): Xaa is A or G or is absent
PKAXXVPTELSPINMLYFXXXXXXXXXYGKIPEMVVEGXGX

SEQ ID NO: 33146 - protein, 39 aa, Artificial Sequence
  GFR-binding peptide
  MOD_RES (2), (3), (37), (39): Xaa is C or S
  MOD_RES (17), (18), (19), (20), (21): Xaa is A or G
  MOD_RES (22), (23), (24), (25): Xaa is A or G or is absent
PXXAPTKLSPINVLYFXXXXXXXXXYGKIPNMVVRSXGX

SEQ ID NO: 33147 - protein, 42 aa, Artificial Sequence
  GFR-binding peptide
  MOD_RES (6), (7), (39), (41): Xaa is C or S
HVPKPXXAPTKLSPINVLYFDDSSNVIYGKIPNMVVRSXGXH

SEQ ID NO: 33148 - protein, 42 aa, Artificial Sequence
  GFR-binding peptide
  MOD_RES (7), (41): Xaa is C or S
  MOD_RES (21), (22), (23), (24), (25): Xaa is A or G
  MOD_RES (26), (27), (28), (29): Xaa is A or G or is absent
HVTKPTXAPTKLSPINVLYFXXXXXXXXXYGKIPNMVVRSXG

SEQ ID NO: 33149 - protein, 35 aa, Artificial Sequence
  GFR-binding peptide
  MOD_RES (1), (33), (35): Xaa is C or S
XAPTKLSPINVLYFDDSSNVIYGKIPNMVVRSXGX

SEQ ID NO: 33150 - protein, 36 aa, Artificial Sequence
  GFR-binding peptide
  MOD_RES (1), (2), (35): Xaa is C or S
XXVPTKLSPINVLYFDDMGVPTYGKIPEGMSVAEXG

SEQ ID NO: 33151 - protein, 36 aa, Artificial Sequence
  GFR-binding peptide
  MOD_RES (2), (3), (36): Xaa is C or S
  MOD_RES (17), (18), (19), (20), (21): Xaa is A or G
  MOD_RES (22), (23), (24), (25): Xaa is A or G or is absent
TXXAPVKTSPINMLYFXXXXXXXXXYGKIPMIVEEX

SEQ ID NO: 33152 - protein, 36 aa, Artificial Sequence
  GFR-binding peptide
  MOD_RES (1), (35): Xaa is C or S
  MOD_RES (15), (16), (17), (18), (19): Xaa is A or G
  MOD_RES (20), (21), (22), (23): Xaa is A or G or is absent
XVPARLSPINILYFXXXXXXXXXYGKIPDMVVEAXG

SEQ ID NO: 33153 - protein, 40 aa, Artificial Sequence
  GFR-binding peptide
  MOD_RES (2), (3), (37), (39): Xaa is C or S
  MOD_RES (17), (18), (19), (20), (21): Xaa is A or G
  MOD_RES (22), (23), (24), (25): Xaa is A or G or is absent
AXXVPTELSPINMLYFXXXXXXXXXYGKIPEMVVEGXGXR

SEQ ID NO: 33154 - protein, 35 aa, Artificial Sequence
  GFR-binding peptide
  MOD_RES (2), (3): Xaa is C or S
  MOD_RES (17), (18), (19), (20), (21): Xaa is A or G
  MOD_RES (22), (23), (24), (25): Xaa is A or G or is absent
PXXTPTKMSPINMLYFXXXXXXXXXYGKIPGMVVD

SEQ ID NO: 33155 - protein, 40 aa, Artificial Sequence
  GFR-binding peptide
  MOD_RES (4), (5), (39): Xaa is C or S
  MOD_RES (19), (20), (21), (22), (23): Xaa is A or G
  MOD_RES (24), (25), (26), (27): Xaa is A or G or is absent
PKAXXAPTKLSPINVLYFXXXXXXXXXYGKIPNMVVKAXG

SEQ ID NO: 33156 - protein, 39 aa, Artificial Sequence
  GFR-binding peptide
  MOD_RES (3), (4), (38): Xaa is C or S
  MOD_RES (18), (19), (20), (21), (22): Xaa is A or G
  MOD_RES (23), (24), (25), (26): Xaa is A or G or is absent
KAXXAPTKLSPINVLYFXXXXXXXXXYGKIPNMVVKAXG

SEQ ID NO: 33157 - protein, 37 aa, Artificial Sequence
  GFR-binding peptide
  MOD_RES (4), (5), (37): Xaa is C or S
PKAXXVPTELSPINMLYFDEYDKVVYGKIPEMVVEGX

SEQ ID NO: 33158 - protein, 37 aa, Artificial Sequence
  GFR-binding peptide
  MOD_RES (4), (5), (37): Xaa is C or S
SKAXXVPTKLSPINILYFDKGVVTYYGKIPGMAVSEX

SEQ ID NO: 33159 - protein, 34 aa, Artificial Sequence
  GFR-binding peptide
  MOD_RES (34), (34): Xaa is C or S
  MOD_RES (14), (15), (16), (17), (18): Xaa is A or G
  MOD_RES (19), (20), (21), (22): Xaa is A or G or is absent
TPTKMSPINMLYFXXXXXXXXXYGKIPGMVVDRX

SEQ ID NO: 33160 - protein, 40 aa, Artificial Sequence
  GFR-binding peptide
  MOD_RES (6), (7): Xaa is C or S
  MOD_RES (21), (22), (23), (24), (25): Xaa is A or G
  MOD_RES (26), (27), (28), (29): Xaa is A or G or is absent
SIPKAXXVPTELSPINMLYFXXXXXXXXXYGKIPEMVVEG

SEQ ID NO: 33161 - protein, 32 aa, Artificial Sequence
  GFR-binding peptide
  MOD_RES (32), (32): Xaa is C or S
VPTKLSPINILYFDKGVVTYYGKIPGMAVSEX

SEQ ID NO: 33162 - protein, 33 aa, Artificial Sequence
  GFR-binding peptide
  MOD_RES (32), (32): Xaa is C or S
APTQLSPINVLYFDDSSNVIYGKIPNMVVRAXG

SEQ ID NO: 33163 - protein, 40 aa, Artificial Sequence
  GFR-binding peptide
  MOD_RES (6), (40): Xaa is C or S
  MOD_RES (20), (21), (22), (23), (24): Xaa is A or G
  MOD_RES (25), (26), (27), (28): Xaa is A or G or is absent
VTKPTXAPTKLSPINVLYFXXXXXXXXXYGKIPNMVVRSX

SEQ ID NO: 33164 - protein, 37 aa, Artificial Sequence
  GFR-binding peptide
  MOD_RES (34), (36): Xaa is C or S
  MOD_RES (14), (15), (16), (17), (18): Xaa is A or G
  MOD_RES (19), (20), (21), (22): Xaa is A or G or is absent
APTQLSPINVLYFXXXXXXXXXYGKIPNMVVRAXGXH

SEQ ID NO: 33165 - protein, 42 aa, Artificial Sequence
  GFR-binding peptide
  MOD_RES (6), (7), (41): Xaa is C or S
  MOD_RES (21), (22), (23), (24), (25): Xaa is A or G
  MOD_RES (26), (27), (28), (29): Xaa is A or G or is absent
SIPKAXXVPTELSPINMLYFXXXXXXXXXYGKIPEMVVEGXG

SEQ ID NO: 33166 - protein, 31 aa, Artificial Sequence
  GFR-binding peptide
  MOD_RES (1), (1): Xaa is C or S
XVPTELSPINMLYFDEYDKVVYGKIPEMVVE

SEQ ID NO: 33167 - protein, 39 aa, Artificial Sequence
  GFR-binding peptide
  MOD_RES (1), (2), (36), (38): Xaa is C or S
  MOD_RES (16), (17), (18), (19), (20): Xaa is A or G
  MOD_RES (21), (22), (23), (24): Xaa is A or G or is absent
XXAPTKLSPINVLYFXXXXXXXXXYGKIPNMVVKAXGXH

SEQ ID NO: 33168 - protein, 44 aa, Artificial Sequence
  GFR-binding peptide
  MOD_RES (6), (7), (41), (43): Xaa is C or S
  MOD_RES (21), (22), (23), (24), (25): Xaa is A or G
  MOD_RES (26), (27), (28), (29): Xaa is A or G or is absent
TVPKPXXAPTQLSPINVLYFXXXXXXXXXYGKIPNMVVRAXGXH

SEQ ID NO: 33169 - protein, 36 aa, Artificial Sequence
  GFR-binding peptide
  MOD_RES (2), (36): Xaa is C or S
  MOD_RES (16), (17), (18), (19), (20): Xaa is A or G
  MOD_RES (21), (22), (23), (24): Xaa is A or G or is absent
TXAPTKLSPINVLYFXXXXXXXXXYGKIPNMVVRSX

SEQ ID NO: 33170 - protein, 37 aa, Artificial Sequence
  GFR-binding peptide
  MOD_RES (34), (36): Xaa is C or S
  MOD_RES (14), (15), (16), (17), (18): Xaa is A or G
  MOD_RES (19), (20), (21), (22): Xaa is A or G or is absent
VPTELSPINMLYFXXXXXXXXXYGKIPDMVVEGXGXR

SEQ ID NO: 33171 - protein, 39 aa, Artificial Sequence
  GFR-binding peptide
  MOD_RES (5), (6), (38): Xaa is C or S
IPKAXXVPTELSPINMLYFDENEKVVYGKIPDMVVEGXG

SEQ ID NO: 33172 - protein, 37 aa, Artificial Sequence
  GFR-binding peptide
  MOD_RES (1), (35), (37): Xaa is C or S
  MOD_RES (15), (16), (17), (18), (19): Xaa is A or G
  MOD_RES (20), (21), (22), (23): Xaa is A or G or is absent
XTPTKMSPINMLYFXXXXXXXXXYGKIPGMVVDRXGX

SEQ ID NO: 33173 - protein, 44 aa, Artificial Sequence
  GFR-binding peptide
  MOD_RES (6), (7), (41), (43): Xaa is C or S
  MOD_RES (21), (22), (23), (24), (25): Xaa is A or G
  MOD_RES (26), (27), (28), (29): Xaa is A or G or is absent
KIPKAXXVPTELSPINMLYFXXXXXXXXXYGKIPDMVVEGXGXR

SEQ ID NO: 33174 - protein, 33 aa, Artificial Sequence
  GFR-binding peptide
  MOD_RES (32), (32): Xaa is C or S
VPTKLSPINILYFDKGVVTYYGKIPGMAVSEXG

SEQ ID NO: 33175 - protein, 37 aa, Artificial Sequence
  GFR-binding peptide
  MOD_RES (35), (37): Xaa is C or S
  MOD_RES (14), (15), (16), (17), (18): Xaa is A or G
  MOD_RES (19), (20), (21), (22): Xaa is A or G or is absent
VPTKLSPINVLYFXXXXXXXXXYGKIPEGMSVAEXGX

SEQ ID NO: 33176 - protein, 37 aa, Artificial Sequence
  GFR-binding peptide
  MOD_RES (4), (5): Xaa is C or S
  MOD_RES (19), (20), (21), (22), (23): Xaa is A or G
  MOD_RES (24), (25), (26), (27): Xaa is A or G or is absent
PSTXXAPVKTSPINMLYFXXXXXXXXXYGKIPMIVEE

SEQ ID NO: 33177 - protein, 40 aa, Artificial Sequence
  GFR-binding peptide
  MOD_RES (6), (7): Xaa is C or S
  MOD_RES (21), (22), (23), (24), (25): Xaa is A or G
  MOD_RES (26), (27), (28), (29): Xaa is A or G or is absent
GSAGPXXTPTKMSPINMLYFXXXXXXXXXYGKIPGMVVDR

SEQ ID NO: 33178 - protein, 38 aa, Artificial Sequence
  GFR-binding peptide
  MOD_RES (2), (36), (38): Xaa is C or S
  MOD_RES (16), (17), (18), (19), (20): Xaa is A or G
  MOD_RES (21), (22), (23), (24): Xaa is A or G or is absent
TXAPTKLSPINVLYFXXXXXXXXXYGKIPNMVVRSXGX

SEQ ID NO: 33179 - protein, 35 aa, Artificial Sequence
  GFR-binding peptide
  MOD_RES (3), (4): Xaa is C or S
KPXXAPTKLSPINVLYFDDSSNVIYGKIPNMVVRS

SEQ ID NO: 33180 - protein, 38 aa, Artificial Sequence
  GFR-binding peptide
  MOD_RES (4), (36), (38): Xaa is C or S
KPTXAPTKLSPINVLYFDDSSNVIYGKIPNMVVRSXGX

SEQ ID NO: 33181 - protein, 33 aa, Artificial Sequence
  GFR-binding peptide
  MOD_RES (1), (2): Xaa is C or S
XXVPTRLSPINILYFDSANNVVYGKIPDMVVES

SEQ ID NO: 33182 - protein, 38 aa, Artificial Sequence
  GFR-binding peptide
  MOD_RES (6), (7): Xaa is C or S
STPPTXXVPTRLSPINILYFDSANNVVYGKIPDMVVES

SEQ ID NO: 33183 - protein, 40 aa, Artificial Sequence
  GFR-binding peptide
  MOD_RES (5), (6), (40): Xaa is C or S
  MOD_RES (20), (21), (22), (23), (24): Xaa is A or G
  MOD_RES (25), (26), (27), (28): Xaa is A or G or is absent
APASXXVPARLSPINILYFXXXXXXXXXYGKIPDMVVEAX

SEQ ID NO: 33184 - protein, 39 aa, Artificial Sequence
  GFR-binding peptide
  MOD_RES (4), (5), (37), (39): Xaa is C or S
PKPXXAPTQLSPINVLYFDDSSNVIYGKIPNMVVRAXGX

SEQ ID NO: 33185 - protein, 31 aa, Artificial Sequence
  GFR-binding peptide
  MOD_RES (1), (1): Xaa is C or S
XVPARLSPINILYFDAANNVVYGKIPDMVVE

SEQ ID NO: 33186 - protein, 39 aa, Artificial Sequence
  GFR-binding peptide
  MOD_RES (2), (3), (36), (38): Xaa is C or S
  MOD_RES (17), (18), (19), (20), (21): Xaa is A or G
  MOD_RES (22), (23), (24), (25): Xaa is A or G or is absent
TXXAPVKTSPINMLYFXXXXXXXXXYGKIPMIVEEXGXL

SEQ ID NO: 33187 - protein, 38 aa, Artificial Sequence
  GFR-binding peptide
  MOD_RES (4), (5): Xaa is C or S
  MOD_RES (19), (20), (21), (22), (23): Xaa is A or G
  MOD_RES (24), (25), (26), (27): Xaa is A or G or is absent
PKAXXAPTKLSPINVLYFXXXXXXXXXYGKIPNMVVKA

SEQ ID NO: 33188 - protein, 38 aa, Artificial Sequence
  GFR-binding peptide
  MOD_RES (5), (6), (38): Xaa is C or S
VPKAXXAPTKLSPINVLYFDSSNNVIYGKIPNMVVKAX

SEQ ID NO: 33189 - protein, 34 aa, Artificial Sequence
  GFR-binding peptide
  MOD_RES (34), (34): Xaa is C or S
  MOD_RES (14), (15), (16), (17), (18): Xaa is A or G
  MOD_RES (19), (20), (21), (22): Xaa is A or G or is absent
VPARLSPINILYFXXXXXXXXXYGKIPDMVVEAX

SEQ ID NO: 33190 - protein, 38 aa, Artificial Sequence
  GFR-binding peptide
  MOD_RES (5), (6): Xaa is C or S
  MOD_RES (20), (21), (22), (23), (24): Xaa is A or G
  MOD_RES (25), (26), (27), (28): Xaa is A or G or is absent
TPPTXXVPTRLSPINILYFXXXXXXXXXYGKIPDMVVE

SEQ ID NO: 33191 - protein, 38 aa, Artificial Sequence
  GFR-binding peptide
  MOD_RES (1), (2), (35), (37): Xaa is C or S
XXVPTKLSPINVLYFDDMGVPTYGKIPEGMSVAEXGXR

SEQ ID NO: 33192 - protein, 37 aa, Artificial Sequence
  GFR-binding peptide
  MOD_RES (3), (4), (36): Xaa is C or S
KPXXAPTKLSPINVLYFDDSSNVIYGKIPNMVVRSXG

SEQ ID NO: 33193 - protein, 40 aa, Artificial Sequence
  GFR-binding peptide
  MOD_RES (4), (5), (39): Xaa is C or S
  MOD_RES (19), (20), (21), (22), (23): Xaa is A or G
  MOD_RES (24), (25), (26), (27): Xaa is A or G or is absent
AGPXXTPTKMSPINMLYFXXXXXXXXXYGKIPGMVVDRXG

SEQ ID NO: 33194 - protein, 30 aa, Artificial Sequence
  GFR-binding peptide
VPARLSPINILYFDAANNVVYGKIPDMVVE

SEQ ID NO: 33195 - protein, 41 aa, Artificial Sequence
  GFR-binding peptide
  MOD_RES (5), (6), (39), (41): Xaa is C or S
  MOD_RES (20), (21), (22), (23), (24): Xaa is A or G
  MOD_RES (25), (26), (27), (28): Xaa is A or G or is absent
VPSTXXAPVKTSPINMLYFXXXXXXXXXYGKIPMIVEEXGX

SEQ ID NO: 33196 - protein, 31 aa, Artificial Sequence
  GFR-binding peptide
  MOD_RES (1), (1): Xaa is C or S
XVPTELSPINMLYFDENEKVVYGKIPDMVVE

SEQ ID NO: 33197 - protein, 35 aa, Artificial Sequence
  GFR-binding peptide
  MOD_RES (2), (3): Xaa is C or S
  MOD_RES (17), (18), (19), (20), (21): Xaa is A or G
  MOD_RES (22), (23), (24), (25): Xaa is A or G or is absent
SXXVPARLSPINILYFXXXXXXXXXYGKIPDMVVE

SEQ ID NO: 33198 - protein, 38 aa, Artificial Sequence
  GFR-binding peptide
  MOD_RES (1), (2), (36), (38): Xaa is C or S
  MOD_RES (16), (17), (18), (19), (20): Xaa is A or G
  MOD_RES (21), (22), (23), (24): Xaa is A or G or is absent
XXAPTKLSPINVLYFXXXXXXXXXYGKIPNMVVRSXGX

SEQ ID NO: 33199 - protein, 39 aa, Artificial Sequence
  GFR-binding peptide
  MOD_RES (6), (7), (38): Xaa is C or S
RVPSTXXAPVKTSPINMLYFDNGRVLLYGKIPMIVEEXG

SEQ ID NO: 33200 - protein, 35 aa, Artificial Sequence
  GFR-binding peptide
  MOD_RES (1), (33), (35): Xaa is C or S
XVPTRLSPINILYFDSANNVVYGKIPDMVVESXGX

SEQ ID NO: 33201 - protein, 37 aa, Artificial Sequence
  GFR-binding peptide
  MOD_RES (2), (3), (37): Xaa is C or S
  MOD_RES (17), (18), (19), (20), (21): Xaa is A or G
  MOD_RES (22), (23), (24), (25): Xaa is A or G or is absent
PXXTPTKMSPINMLYFXXXXXXXXXYGKIPGMVVDRX

SEQ ID NO: 33202 - protein, 33 aa, Artificial Sequence
  GFR-binding peptide
  MOD_RES (1), (1): Xaa is C or S
  MOD_RES (15), (16), (17), (18), (19): Xaa is A or G
  MOD_RES (20), (21), (22), (23): Xaa is A or G or is absent
XVPTELSPINMLYFXXXXXXXXXYGKIPDMVVE

SEQ ID NO: 33203 - protein, 34 aa, Artificial Sequence
  GFR-binding peptide
  MOD_RES (3), (4): Xaa is C or S
ASXXVPARLSPINILYFDAANNVVYGKIPDMVVE

SEQ ID NO: 33204 - protein, 34 aa, Artificial Sequence
  GFR-binding peptide
  MOD_RES (4), (4): Xaa is C or S
KPTXAPTKLSPINVLYFDDSSNVIYGKIPNMVVR

SEQ ID NO: 33205 - protein, 40 aa, Artificial Sequence
  GFR-binding peptide
  MOD_RES (6), (7): Xaa is C or S
  MOD_RES (21), (22), (23), (24), (25): Xaa is A or G
  MOD_RES (26), (27), (28), (29): Xaa is A or G or is absent
STPPTXXVPTRLSPINILYFXXXXXXXXXYGKIPDMVVES

SEQ ID NO: 33206 - protein, 38 aa, Artificial Sequence
  GFR-binding peptide
  MOD_RES (1), (35), (37): Xaa is C or S
  MOD_RES (15), (16), (17), (18), (19): Xaa is A or G
  MOD_RES (20), (21), (22), (23): Xaa is A or G or is absent
XAPTQLSPINVLYFXXXXXXXXXYGKIPNMVVRAXGXH

SEQ ID NO: 33207 - protein, 35 aa, Artificial Sequence
  GFR-binding peptide
  MOD_RES (2), (2): Xaa is C or S
  MOD_RES (16), (17), (18), (19), (20): Xaa is A or G
  MOD_RES (21), (22), (23), (24): Xaa is A or G or is absent
TXAPTKLSPINVLYFXXXXXXXXXYGKIPNMVVRS

SEQ ID NO: 33208 - protein, 36 aa, Artificial Sequence
  GFR-binding peptide
  MOD_RES (3), (4), (36): Xaa is C or S
KAXXAPTKLSPINVLYFDSSNNVIYGKIPNMVVKAX

SEQ ID NO: 33209 - protein, 35 aa, Artificial Sequence
  GFR-binding peptide
  MOD_RES (2), (3): Xaa is C or S
  MOD_RES (17), (18), (19), (20), (21): Xaa is A or G
  MOD_RES (22), (23), (24), (25): Xaa is A or G or is absent
AXXVPTKLSPINILYFXXXXXXXXXYGKIPGMAVS

SEQ ID NO: 33210 - protein, 32 aa, Artificial Sequence
  GFR-binding peptide
  MOD_RES (14), (15), (16), (17), (18): Xaa is A or G
  MOD_RES (19), (20), (21), (22): Xaa is A or G or is absent
TPTKMSPINMLYFXXXXXXXXXYGKIPGMVVD

SEQ ID NO: 33211 - protein, 36 aa, Artificial Sequence
  GFR-binding peptide
  MOD_RES (4), (5): Xaa is C or S
PKAXXVPTELSPINMLYFDEYDKVVYGKIPEMVVEG

SEQ ID NO: 33212 - protein, 36 aa, Artificial Sequence
  GFR-binding peptide
  MOD_RES (3), (4), (36): Xaa is C or S
KPXXAPTKLSPINVLYFDDSSNVIYGKIPNMVVRSX

SEQ ID NO: 33213 - protein, 36 aa, Artificial Sequence
  GFR-binding peptide
  MOD_RES (2), (3): Xaa is C or S
  MOD_RES (17), (18), (19), (20), (21): Xaa is A or G
  MOD_RES (22), (23), (24), (25): Xaa is A or G or is absent
PXXAPTQLSPINVLYFXXXXXXXXXYGKIPNMVVRA

SEQ ID NO: 33214 - protein, 40 aa, Artificial Sequence
  GFR-binding peptide
  MOD_RES (6), (7): Xaa is C or S
  MOD_RES (21), (22), (23), (24), (25): Xaa is A or G
  MOD_RES (26), (27), (28), (29): Xaa is A or G or is absent
HVPKPXXAPTKLSPINVLYFXXXXXXXXXYGKIPNMVVRS

SEQ ID NO: 33215 - protein, 37 aa, Artificial Sequence
  GFR-binding peptide
  MOD_RES (7), (7): Xaa is C or S
HVTKPTXAPTKLSPINVLYFDDSSNVIYGKIPNMVVR

SEQ ID NO: 33216 - protein, 38 aa, Artificial Sequence
  GFR-binding peptide
  MOD_RES (5), (6), (38): Xaa is C or S
IPKAXXVPTELSPINMLYFDENEKVVYGKIPDMVVEGX

SEQ ID NO: 33217 - protein, 41 aa, Artificial Sequence
  GFR-binding peptide
  MOD_RES (6), (7), (41): Xaa is C or S
  MOD_RES (21), (22), (23), (24), (25): Xaa is A or G
  MOD_RES (26), (27), (28), (29): Xaa is A or G or is absent
HVPKPXXAPTKLSPINVLYFXXXXXXXXXYGKIPNMVVRSX

SEQ ID NO: 33218 - protein, 42 aa, Artificial Sequence
  GFR-binding peptide
  MOD_RES (5), (6), (40), (42): Xaa is C or S
  MOD_RES (20), (21), (22), (23), (24): Xaa is A or G
  MOD_RES (25), (26), (27), (28): Xaa is A or G or is absent
VPKAXXAPTKLSPINVLYFXXXXXXXXXYGKIPNMVVKAXGX

SEQ ID NO: 33219 - protein, 34 aa, Artificial Sequence
  GFR-binding peptide
  MOD_RES (1), (2): Xaa is C or S
  MOD_RES (16), (17), (18), (19), (20): Xaa is A or G
  MOD_RES (21), (22), (23), (24): Xaa is A or G or is absent
XXVPTELSPINMLYFXXXXXXXXXYGKIPDMVVE

SEQ ID NO: 33220 - protein, 39 aa, Artificial Sequence
  GFR-binding peptide
  MOD_RES (6), (7): Xaa is C or S
  MOD_RES (21), (22), (23), (24), (25): Xaa is A or G
  MOD_RES (26), (27), (28), (29): Xaa is A or G or is absent
TVPKPXXAPTQLSPINVLYFXXXXXXXXXYGKIPNMVVR

SEQ ID NO: 33221 - protein, 38 aa, Artificial Sequence
  GFR-binding peptide
  MOD_RES (2), (3), (35), (37): Xaa is C or S
PXXAPTQLSPINVLYFDDSSNVIYGKIPNMVVRAXGXH

SEQ ID NO: 33222 - protein, 41 aa, Artificial Sequence
  GFR-binding peptide
  MOD_RES (4), (5), (40): Xaa is C or S
  MOD_RES (19), (20), (21), (22), (23): Xaa is A or G
  MOD_RES (24), (25), (26), (27): Xaa is A or G or is absent
GKAXXVPTKLSPINVLYFXXXXXXXXXYGKIPEGMSVAEXG

SEQ ID NO: 33223 - protein, 41 aa, Artificial Sequence
  GFR-binding peptide
  MOD_RES (5), (6), (38), (40): Xaa is C or S
VPKPXXAPTQLSPINVLYFDDSSNVIYGKIPNMVVRAXGXH

SEQ ID NO: 33224 - protein, 39 aa, Artificial Sequence
  GFR-binding peptide
  MOD_RES (4), (5), (39): Xaa is C or S
  MOD_RES (19), (20), (21), (22), (23): Xaa is A or G
  MOD_RES (24), (25), (26), (27): Xaa is A or G or is absent
PKAXXAPTKLSPINVLYFXXXXXXXXXYGKIPNMVVKAX

SEQ ID NO: 33225 - protein, 41 aa, Artificial Sequence
  GFR-binding peptide
  MOD_RES (6), (7), (41): Xaa is C or S
  MOD_RES (21), (22), (23), (24), (25): Xaa is A or G
  MOD_RES (26), (27), (28), (29): Xaa is A or G or is absent
TVPKPXXAPTQLSPINVLYFXXXXXXXXXYGKIPNMVVRAX

SEQ ID NO: 33226 - protein, 35 aa, Artificial Sequence
  GFR-binding peptide
  MOD_RES (1), (2), (34): Xaa is C or S
XXVPTELSPINMLYFDEYDKVVYGKIPEMVVEGXG

SEQ ID NO: 33227 - protein, 33 aa, Artificial Sequence
  GFR-binding peptide
  MOD_RES (33), (33): Xaa is C or S
VPTKLSPINVLYFDDMGVPTYGKIPEGMSVAEX

SEQ ID NO: 33228 - protein, 40 aa, Artificial Sequence
  GFR-binding peptide
  MOD_RES (2), (3), (37), (39): Xaa is C or S
  MOD_RES (17), (18), (19), (20), (21): Xaa is A or G
  MOD_RES (22), (23), (24), (25): Xaa is A or G or is absent
AXXVPTKLSPINILYFXXXXXXXXXYGKIPGMAVSEXGXR

SEQ ID NO: 33229 - protein, 34 aa, Artificial Sequence
  GFR-binding peptide
  MOD_RES (1), (34): Xaa is C or S
XVPTKLSPINVLYFDDMGVPTYGKIPEGMSVAEX

SEQ ID NO: 33230 - protein, 39 aa, Artificial Sequence
  GFR-binding peptide
  MOD_RES (6), (7), (39): Xaa is C or S
KASKAXXVPTKLSPINILYFDKGVVTYYGKIPGMAVSEX

SEQ ID NO: 33231 - protein, 33 aa, Artificial Sequence
  GFR-binding peptide
  MOD_RES (32), (32): Xaa is C or S
VPTELSPINMLYFDENEKVVYGKIPDMVVEGXG

SEQ ID NO: 33232 - protein, 34 aa, Artificial Sequence
  GFR-binding peptide
  MOD_RES (1), (33): Xaa is C or S
XVPTELSPINMLYFDEYDKVVYGKIPEMVVEGXG

SEQ ID NO: 33233 - protein, 38 aa, Artificial Sequence
  GFR-binding peptide
  MOD_RES (4), (5), (38): Xaa is C or S
  MOD_RES (19), (20), (21), (22), (23): Xaa is A or G
  MOD_RES (24), (25), (26), (27): Xaa is A or G or is absent
PSTXXAPVKTSPINMLYFXXXXXXXXXYGKIPMIVEEX

SEQ ID NO: 33234 - protein, 41 aa, Artificial Sequence
  GFR-binding peptide
  MOD_RES (6), (7), (41): Xaa is C or S
  MOD_RES (21), (22), (23), (24), (25): Xaa is A or G
  MOD_RES (26), (27), (28), (29): Xaa is A or G or is absent
SIPKAXXVPTELSPINMLYFXXXXXXXXXYGKIPEMVVEGX

SEQ ID NO: 33235 - protein, 41 aa, Artificial Sequence
  GFR-binding peptide
  MOD_RES (3), (4), (38), (40): Xaa is C or S
  MOD_RES (18), (19), (20), (21), (22): Xaa is A or G
  MOD_RES (23), (24), (25), (26): Xaa is A or G or is absent
KAXXVPTKLSPINILYFXXXXXXXXXYGKIPGMAVSEXGXR

SEQ ID NO: 33236 - protein, 39 aa, Artificial Sequence
  GFR-binding peptide
  MOD_RES (6), (7): Xaa is C or S
  MOD_RES (21), (22), (23), (24), (25): Xaa is A or G
  MOD_RES (26), (27), (28), (29): Xaa is A or G or is absent
HVPKPXXAPTKLSPINVLYFXXXXXXXXXYGKIPNMVVR

SEQ ID NO: 33237 - protein, 37 aa, Artificial Sequence
  GFR-binding peptide
  MOD_RES (4), (5), (37): Xaa is C or S
PPTXXVPTRLSPINILYFDSANNVVYGKIPDMVVESX

SEQ ID NO: 33238 - protein, 40 aa, Artificial Sequence
  GFR-binding peptide
  MOD_RES (6), (7), (39): Xaa is C or S
HVPKPXXAPTKLSPINVLYFDDSSNVIYGKIPNMVVRSXG

SEQ ID NO: 33239 - protein, 34 aa, Artificial Sequence
  GFR-binding peptide
  MOD_RES (2), (3): Xaa is C or S
PXXAPTKLSPINVLYFDDSSNVIYGKIPNMVVRS

SEQ ID NO: 33240 - protein, 40 aa, Artificial Sequence
  GFR-binding peptide
  MOD_RES (4), (5), (39): Xaa is C or S
  MOD_RES (19), (20), (21), (22), (23): Xaa is A or G
  MOD_RES (24), (25), (26), (27): Xaa is A or G or is absent
PKAXXVPTELSPINMLYFXXXXXXXXXYGKIPDMVVEGXG

SEQ ID NO: 33241 - protein, 37 aa, Artificial Sequence
  GFR-binding peptide
  MOD_RES (6), (6): Xaa is C or S
VTKPTXAPTKLSPINVLYFDDSSNVIYGKIPNMVVRS

SEQ ID NO: 33242 - protein, 36 aa, Artificial Sequence
  GFR-binding peptide
  MOD_RES (4), (4): Xaa is C or S
  MOD_RES (18), (19), (20), (21), (22): Xaa is A or G
  MOD_RES (23), (24), (25), (26): Xaa is A or G or is absent
KPTXAPTKLSPINVLYFXXXXXXXXXYGKIPNMVVR

SEQ ID NO: 33243 - protein, 40 aa, Artificial Sequence
  GFR-binding peptide
  MOD_RES (4), (5), (39): Xaa is C or S
  MOD_RES (19), (20), (21), (22), (23): Xaa is A or G
  MOD_RES (24), (25), (26), (27): Xaa is A or G or is absent
SKAXXVPTKLSPINILYFXXXXXXXXXYGKIPGMAVSEXG

SEQ ID NO: 33244 - protein, 40 aa, Artificial Sequence
  GFR-binding peptide
  MOD_RES (5), (6), (40): Xaa is C or S
  MOD_RES (20), (21), (22), (23), (24): Xaa is A or G
  MOD_RES (25), (26), (27), (28): Xaa is A or G or is absent
VPKPXXAPTQLSPINVLYFXXXXXXXXXYGKIPNMVVRAX

SEQ ID NO: 33245 - protein, 38 aa, Artificial Sequence
  GFR-binding peptide
  MOD_RES (4), (5), (37): Xaa is C or S
PPTXXVPTRLSPINILYFDSANNVVYGKIPDMVVESXG

SEQ ID NO: 33246 - protein, 31 aa, Artificial Sequence
  GFR-binding peptide
APTQLSPINVLYFDDSSNVIYGKIPNMVVRA

SEQ ID NO: 33247 - protein, 39 aa, Artificial Sequence
  GFR-binding peptide
  MOD_RES (6), (7), (39): Xaa is C or S
YVPKPXXAPTKLSPINVLYFDDSSNVIYGKIPNMVVRSX

SEQ ID NO: 33248 - protein, 38 aa, Artificial Sequence
  GFR-binding peptide
  MOD_RES (1), (35), (37): Xaa is C or S
  MOD_RES (15), (16), (17), (18), (19): Xaa is A or G
  MOD_RES (20), (21), (22), (23): Xaa is A or G or is absent
XVPTELSPINMLYFXXXXXXXXXYGKIPDMVVEGXGXR

SEQ ID NO: 33249 - protein, 39 aa, Artificial Sequence
  GFR-binding peptide
  MOD_RES (3), (4), (36), (38): Xaa is C or S
PTXXVPTRLSPINILYFDSANNVVYGKIPDMVVESXGXR

SEQ ID NO: 33250 - protein, 37 aa, Artificial Sequence
  GFR-binding peptide
  MOD_RES (1), (36): Xaa is C or S
  MOD_RES (15), (16), (17), (18), (19): Xaa is A or G
  MOD_RES (20), (21), (22), (23): Xaa is A or G or is absent
XVPTKLSPINVLYFXXXXXXXXXYGKIPEGMSVAEXG

SEQ ID NO: 33251 - protein, 41 aa, Artificial Sequence
  GFR-binding peptide
  MOD_RES (5), (6), (40): Xaa is C or S
  MOD_RES (20), (21), (22), (23), (24): Xaa is A or G
  MOD_RES (25), (26), (27), (28): Xaa is A or G or is absent
VPKPXXAPTKLSPINVLYFXXXXXXXXXYGKIPNMVVRSXG

SEQ ID NO: 33252 - protein, 42 aa, Artificial Sequence
  GFR-binding peptide
  MOD_RES (5), (6), (40), (42): Xaa is C or S
  MOD_RES (20), (21), (22), (23), (24): Xaa is A or G
  MOD_RES (25), (26), (27), (28): Xaa is A or G or is absent
SAGPXXTPTKMSPINMLYFXXXXXXXXXYGKIPGMVVDRXGX

SEQ ID NO: 33253 - protein, 36 aa, Artificial Sequence
  GFR-binding peptide
  MOD_RES (3), (4): Xaa is C or S
  MOD_RES (18), (19), (20), (21), (22): Xaa is A or G
  MOD_RES (23), (24), (25), (26): Xaa is A or G or is absent
KPXXAPTKLSPINVLYFXXXXXXXXXYGKIPNMVVR

SEQ ID NO: 33254 - protein, 41 aa, Artificial Sequence
  GFR-binding peptide
  MOD_RES (6), (7), (41): Xaa is C or S
  MOD_RES (21), (22), (23), (24), (25): Xaa is A or G
  MOD_RES (26), (27), (28), (29): Xaa is A or G or is absent
STPPTXXVPTRLSPINILYFXXXXXXXXXYGKIPDMVVESX

SEQ ID NO: 33255 - protein, 39 aa, Artificial Sequence
  GFR-binding peptide
  MOD_RES (1), (2), (36), (38): Xaa is C or S
  MOD_RES (16), (17), (18), (19), (20): Xaa is A or G
  MOD_RES (21), (22), (23), (24): Xaa is A or G or is absent
XXVPTKLSPINILYFXXXXXXXXXYGKIPGMAVSEXGXR

SEQ ID NO: 33256 - protein, 41 aa, Artificial Sequence
  GFR-binding peptide
  MOD_RES (6), (7), (41): Xaa is C or S
  MOD_RES (21), (22), (23), (24), (25): Xaa is A or G
  MOD_RES (26), (27), (28), (29): Xaa is A or G or is absent
AVPKAXXAPTKLSPINVLYFXXXXXXXXXYGKIPNMVVKAX

SEQ ID NO: 33257 - protein, 30 aa, Artificial Sequence
  GFR-binding peptide
APTKLSPINVLYFDDSSNVIYGKIPNMVVR

SEQ ID NO: 33258 - protein, 33 aa, Artificial Sequence
  GFR-binding peptide
  MOD_RES (1), (1): Xaa is C or S
  MOD_RES (15), (16), (17), (18), (19): Xaa is A or G
  MOD_RES (20), (21), (22), (23): Xaa is A or G or is absent
XTPTKMSPINMLYFXXXXXXXXXYGKIPGMVVD

SEQ ID NO: 33259 - protein, 34 aa, Artificial Sequence
  GFR-binding peptide
  MOD_RES (34), (34): Xaa is C or S
  MOD_RES (14), (15), (16), (17), (18): Xaa is A or G
  MOD_RES (19), (20), (21), (22): Xaa is A or G or is absent
APTQLSPINVLYFXXXXXXXXXYGKIPNMVVRAX

SEQ ID NO: 33260 - protein, 42 aa, Artificial Sequence
  GFR-binding peptide
  MOD_RES (6), (7), (41): Xaa is C or S
  MOD_RES (21), (22), (23), (24), (25): Xaa is A or G
  MOD_RES (26), (27), (28), (29): Xaa is A or G or is absent
STPPTXXVPTRLSPINILYFXXXXXXXXXYGKIPDMVVESXG

SEQ ID NO: 33261 - protein, 40 aa, Artificial Sequence
  GFR-binding peptide
  MOD_RES (3), (4), (39): Xaa is C or S
  MOD_RES (18), (19), (20), (21), (22): Xaa is A or G
  MOD_RES (23), (24), (25), (26): Xaa is A or G or is absent
KAXXVPTKLSPINVLYFXXXXXXXXXYGKIPEGMSVAEXG

SEQ ID NO: 33262 - protein, 36 aa, Artificial Sequence
  GFR-binding peptide
  MOD_RES (5), (6): Xaa is C or S
APASXXVPARLSPINILYFDAANNVVYGKIPDMVVE

SEQ ID NO: 33263 - protein, 32 aa, Artificial Sequence
  GFR-binding peptide
  MOD_RES (1), (2): Xaa is C or S
XXVPTELSPINMLYFDEYDKVVYGKIPEMVVE

SEQ ID NO: 33264 - protein, 36 aa, Artificial Sequence
  GFR-binding peptide
  MOD_RES (4), (5), (36): Xaa is C or S
PSTXXAPVKTSPINMLYFDNGRVLLYGKIPMIVEEX

SEQ ID NO: 33265 - protein, 35 aa, Artificial Sequence
  GFR-binding peptide
  MOD_RES (2), (3), (35): Xaa is C or S
AXXVPTELSPINMLYFDEYDKVVYGKIPEMVVEGX

SEQ ID NO: 33266 - protein, 36 aa, Artificial Sequence
  GFR-binding peptide
  MOD_RES (3), (4): Xaa is C or S
  MOD_RES (18), (19), (20), (21), (22): Xaa is A or G
  MOD_RES (23), (24), (25), (26): Xaa is A or G or is absent
KAXXVPTELSPINMLYFXXXXXXXXXYGKIPEMVVE

SEQ ID NO: 33267 - protein, 31 aa, Artificial Sequence
  GFR-binding peptide
  MOD_RES (1), (1): Xaa is C or S
XAPTKLSPINVLYFDSSNNVIYGKIPNMVVK

SEQ ID NO: 33268 - protein, 38 aa, Artificial Sequence
  GFR-binding peptide
  MOD_RES (1), (2), (36), (38): Xaa is C or S
  MOD_RES (16), (17), (18), (19), (20): Xaa is A or G
  MOD_RES (21), (22), (23), (24): Xaa is A or G or is absent
XXVPTKLSPINILYFXXXXXXXXXYGKIPGMAVSEXGX

SEQ ID NO: 33269 - protein, 33 aa, Artificial Sequence
  GFR-binding peptide
  MOD_RES (1), (33): Xaa is C or S
XAPTKLSPINVLYFDDSSNVIYGKIPNMVVRSX

SEQ ID NO: 33270 - protein, 34 aa, Artificial Sequence
  GFR-binding peptide
  MOD_RES (1), (1): Xaa is C or S
  MOD_RES (15), (16), (17), (18), (19): Xaa is A or G
  MOD_RES (20), (21), (22), (23): Xaa is A or G or is absent
XVPTKLSPINILYFXXXXXXXXXYGKIPGMAVSE

SEQ ID NO: 33271 - protein, 40 aa, Artificial Sequence
  GFR-binding peptide
  MOD_RES (2), (3), (37), (39): Xaa is C or S
  MOD_RES (17), (18), (19), (20), (21): Xaa is A or G
  MOD_RES (22), (23), (24), (25): Xaa is A or G or is absent
AXXAPTKLSPINVLYFXXXXXXXXXYGKIPNMVVKAXGXH

SEQ ID NO: 33272 - protein, 40 aa, Artificial Sequence
  GFR-binding peptide
  MOD_RES (4), (5), (37), (39): Xaa is C or S
SKAXXVPTKLSPINILYFDKGVVTYYGKIPGMAVSEXGXR

SEQ ID NO: 33273 - protein, 34 aa, Artificial Sequence
  GFR-binding peptide
  MOD_RES (3), (4): Xaa is C or S
KPXXAPTQLSPINVLYFDDSSNVIYGKIPNMVVR

SEQ ID NO: 33274 - protein, 42 aa, Artificial Sequence
  GFR-binding peptide
  MOD_RES (6), (7), (41): Xaa is C or S
  MOD_RES (21), (22), (23), (24), (25): Xaa is A or G
  MOD_RES (26), (27), (28), (29): Xaa is A or G or is absent
KASKAXXVPTKLSPINILYFXXXXXXXXXYGKIPGMAVSEXG

SEQ ID NO: 33275 - protein, 38 aa, Artificial Sequence
  GFR-binding peptide
  MOD_RES (1), (2), (36), (38): Xaa is C or S
  MOD_RES (16), (17), (18), (19), (20): Xaa is A or G
  MOD_RES (21), (22), (23), (24): Xaa is A or G or is absent
XXVPTELSPINMLYFXXXXXXXXXYGKIPDMVVEGXGX

SEQ ID NO: 33276 - protein, 36 aa, Artificial Sequence
  GFR-binding peptide
  MOD_RES (3), (4), (36): Xaa is C or S
KAXXVPTKLSPINILYFDKGVVTYYGKIPGMAVSEX

SEQ ID NO: 33277 - protein, 39 aa, Artificial Sequence
  GFR-binding peptide
  MOD_RES (2), (3), (37), (39): Xaa is C or S
  MOD_RES (17), (18), (19), (20), (21): Xaa is A or G
  MOD_RES (22), (23), (24), (25): Xaa is A or G or is absent
PXXAPTQLSPINVLYFXXXXXXXXXYGKIPNMVVRAXGX

SEQ ID NO: 33278 - protein, 35 aa, Artificial Sequence
  GFR-binding peptide
  MOD_RES (32), (34): Xaa is C or S
APTKLSPINVLYFDSSNNVIYGKIPNMVVKAXGXH

SEQ ID NO: 33279 - protein, 38 aa, Artificial Sequence
  GFR-binding peptide
  MOD_RES (3), (4), (36), (38): Xaa is C or S
KPXXAPTQLSPINVLYFDDSSNVIYGKIPNMVVRAXGX

SEQ ID NO: 33280 - protein, 37 aa, Artificial Sequence
  GFR-binding peptide
  MOD_RES (6), (7): Xaa is C or S
KIPKAXXVPTELSPINMLYFDENEKVVYGKIPDMVVE

SEQ ID NO: 33281 - protein, 38 aa, Artificial Sequence
  GFR-binding peptide
  MOD_RES (2), (3), (35), (37): Xaa is C or S
AXXVPTELSPINMLYFDEYDKVVYGKIPEMVVEGXGXR

SEQ ID NO: 33282 - protein, 39 aa, Artificial Sequence
  GFR-binding peptide
  MOD_RES (6), (7): Xaa is C or S
  MOD_RES (21), (22), (23), (24), (25): Xaa is A or G
  MOD_RES (26), (27), (28), (29): Xaa is A or G or is absent
STPPTXXVPTRLSPINILYFXXXXXXXXXYGKIPDMVVE

SEQ ID NO: 33283 - protein, 39 aa, Artificial Sequence
  GFR-binding peptide
  MOD_RES (4), (36), (38): Xaa is C or S
KPTXAPTKLSPINVLYFDDSSNVIYGKIPNMVVRSXGXH

SEQ ID NO: 33284 - protein, 40 aa, Artificial Sequence
  GFR-binding peptide
  MOD_RES (4), (5), (39): Xaa is C or S
  MOD_RES (19), (20), (21), (22), (23): Xaa is A or G
  MOD_RES (24), (25), (26), (27): Xaa is A or G or is absent
PKPXXAPTKLSPINVLYFXXXXXXXXXYGKIPNMVVRSXG

SEQ ID NO: 33285 - protein, 38 aa, Artificial Sequence
  GFR-binding peptide
  MOD_RES (5), (6): Xaa is C or S
  MOD_RES (20), (21), (22), (23), (24): Xaa is A or G
  MOD_RES (25), (26), (27), (28): Xaa is A or G or is absent
VPSTXXAPVKTSPINMLYFXXXXXXXXXYGKIPMIVEE

SEQ ID NO: 33286 - protein, 35 aa, Artificial Sequence
  GFR-binding peptide
  MOD_RES (34), (34): Xaa is C or S
  MOD_RES (14), (15), (16), (17), (18): Xaa is A or G
  MOD_RES (19), (20), (21), (22): Xaa is A or G or is absent
APTKLSPINVLYFXXXXXXXXXYGKIPNMVVKAXG

SEQ ID NO: 33287 - protein, 41 aa, Artificial Sequence
  GFR-binding peptide
  MOD_RES (6), (7), (40): Xaa is C or S
  MOD_RES (21), (22), (23), (24), (25): Xaa is A or G
  MOD_RES (26), (27), (28), (29): Xaa is A or G or is absent
RVPSTXXAPVKTSPINMLYFXXXXXXXXXYGKIPMIVEEXG

SEQ ID NO: 33288 - protein, 43 aa, Artificial Sequence
  GFR-binding peptide
  MOD_RES (5), (6), (40), (42): Xaa is C or S
  MOD_RES (20), (21), (22), (23), (24): Xaa is A or G
  MOD_RES (25), (26), (27), (28): Xaa is A or G or is absent
VPKAXXAPTKLSPINVLYFXXXXXXXXXYGKIPNMVVKAXGXH

SEQ ID NO: 33289 - protein, 34 aa, Artificial Sequence
  GFR-binding peptide
  MOD_RES (1), (2): Xaa is C or S
  MOD_RES (16), (17), (18), (19), (20): Xaa is A or G
  MOD_RES (21), (22), (23), (24): Xaa is A or G or is absent
XXVPTELSPINMLYFXXXXXXXXXYGKIPEMVVE

SEQ ID NO: 33290 - protein, 42 aa, Artificial Sequence
  GFR-binding peptide
  MOD_RES (6), (7), (41): Xaa is C or S
  MOD_RES (21), (22), (23), (24), (25): Xaa is A or G
  MOD_RES (26), (27), (28), (29): Xaa is A or G or is absent
AAPASXXVPARLSPINILYFXXXXXXXXXYGKIPDMVVEAXG

SEQ ID NO: 33291 - protein, 39 aa, Artificial Sequence
  GFR-binding peptide
  MOD_RES (5), (6), (38): Xaa is C or S
VPKPXXAPTKLSPINVLYFDDSSNVIYGKIPNMVVRSXG

SEQ ID NO: 33292 - protein, 39 aa, Artificial Sequence
  GFR-binding peptide
  MOD_RES (5), (6): Xaa is C or S
  MOD_RES (20), (21), (22), (23), (24): Xaa is A or G
  MOD_RES (25), (26), (27), (28): Xaa is A or G or is absent
VPKAXXAPTKLSPINVLYFXXXXXXXXXYGKIPNMVVKA

SEQ ID NO: 33293 - protein, 39 aa, Artificial Sequence
  GFR-binding peptide
  MOD_RES (6), (7), (39): Xaa is C or S
TVPKPXXAPTQLSPINVLYFDDSSNVIYGKIPNMVVRAX

SEQ ID NO: 33294 - protein, 38 aa, Artificial Sequence
  GFR-binding peptide
  MOD_RES (3), (4), (38): Xaa is C or S
  MOD_RES (18), (19), (20), (21), (22): Xaa is A or G
  MOD_RES (23), (24), (25), (26): Xaa is A or G or is absent
KAXXAPTKLSPINVLYFXXXXXXXXXYGKIPNMVVKAX

SEQ ID NO: 33295 - protein, 40 aa, Artificial Sequence
  GFR-binding peptide
  MOD_RES (5), (6), (40): Xaa is C or S
  MOD_RES (20), (21), (22), (23), (24): Xaa is A or G
  MOD_RES (25), (26), (27), (28): Xaa is A or G or is absent
IPKAXXVPTELSPINMLYFXXXXXXXXXYGKIPDMVVEGX

SEQ ID NO: 33296 - protein, 40 aa, Artificial Sequence
  GFR-binding peptide
  MOD_RES (3), (4), (37), (39): Xaa is C or S
KAXXVPTKLSPINVLYFDDMGVPTYGKIPEGMSVAEXGXR

SEQ ID NO: 33297 - protein, 36 aa, Artificial Sequence
  GFR-binding peptide
  MOD_RES (1), (2), (36): Xaa is C or S
  MOD_RES (16), (17), (18), (19), (20): Xaa is A or G
  MOD_RES (21), (22), (23), (24): Xaa is A or G or is absent
XXVPTRLSPINILYFXXXXXXXXXYGKIPDMVVESX

SEQ ID NO: 33298 - protein, 38 aa, Artificial Sequence
  GFR-binding peptide
  MOD_RES (1), (2), (36), (38): Xaa is C or S
  MOD_RES (16), (17), (18), (19), (20): Xaa is A or G
  MOD_RES (21), (22), (23), (24): Xaa is A or G or is absent
XXVPARLSPINILYFXXXXXXXXXYGKIPDMVVEAXGX

SEQ ID NO: 33299 - protein, 37 aa, Artificial Sequence
  GFR-binding peptide
  MOD_RES (5), (6): Xaa is C or S
ASKAXXVPTKLSPINILYFDKGVVTYYGKIPGMAVSE

SEQ ID NO: 33300 - protein, 40 aa, Artificial Sequence
  GFR-binding peptide
  MOD_RES (5), (6), (39): Xaa is C or S
  MOD_RES (20), (21), (22), (23), (24): Xaa is A or G
  MOD_RES (25), (26), (27), (28): Xaa is A or G or is absent
VPSTXXAPVKTSPINMLYFXXXXXXXXXYGKIPMIVEEXG

SEQ ID NO: 33301 - protein, 37 aa, Artificial Sequence
  GFR-binding peptide
  MOD_RES (6), (7): Xaa is C or S
RVPSTXXAPVKTSPINMLYFDNGRVLLYGKIPMIVEE

SEQ ID NO: 33302 - protein, 35 aa, Artificial Sequence
  GFR-binding peptide
  MOD_RES (1), (35): Xaa is C or S
  MOD_RES (15), (16), (17), (18), (19): Xaa is A or G
  MOD_RES (20), (21), (22), (23): Xaa is A or G or is absent
XTPTKMSPINMLYFXXXXXXXXXYGKIPGMVVDRX

SEQ ID NO: 33303 - protein, 42 aa, Artificial Sequence
  GFR-binding peptide
  MOD_RES (4), (5), (39), (41): Xaa is C or S
  MOD_RES (19), (20), (21), (22), (23): Xaa is A or G
  MOD_RES (24), (25), (26), (27): Xaa is A or G or is absent
PASXXVPARLSPINILYFXXXXXXXXXYGKIPDMVVEAXGXR

SEQ ID NO: 33304 - protein, 36 aa, Artificial Sequence
  GFR-binding peptide
  MOD_RES (2), (3): Xaa is C or S
  MOD_RES (17), (18), (19), (20), (21): Xaa is A or G
  MOD_RES (22), (23), (24), (25): Xaa is A or G or is absent
AXXVPTELSPINMLYFXXXXXXXXXYGKIPDMVVEG

SEQ ID NO: 33305 - protein, 34 aa, Artificial Sequence
  GFR-binding peptide
  MOD_RES (3), (4): Xaa is C or S
KAXXVPTELSPINMLYFDEYDKVVYGKIPEMVVE

SEQ ID NO: 33306 - protein, 33 aa, Artificial Sequence
  GFR-binding peptide
  MOD_RES (1), (2): Xaa is C or S
XXAPTQLSPINVLYFDDSSNVIYGKIPNMVVRA

SEQ ID NO: 33307 - protein, 37 aa, Artificial Sequence
  GFR-binding peptide
  MOD_RES (1), (2), (34), (36): Xaa is C or S
XXAPTKLSPINVLYFDSSNNVIYGKIPNMVVKAXGXH

SEQ ID NO: 33308 - protein, 32 aa, Artificial Sequence
  GFR-binding peptide
  MOD_RES (1), (2): Xaa is C or S
XXAPTKLSPINVLYFDSSNNVIYGKIPNMVVK

SEQ ID NO: 33309 - protein, 35 aa, Artificial Sequence
  GFR-binding peptide
  MOD_RES (1), (32), (34): Xaa is C or S
XAPVKTSPINMLYFDNGRVLLYGKIPMIVEEXGXL

SEQ ID NO: 33310 - protein, 34 aa, Artificial Sequence
  GFR-binding peptide
  MOD_RES (1), (1): Xaa is C or S
  MOD_RES (15), (16), (17), (18), (19): Xaa is A or G
  MOD_RES (20), (21), (22), (23): Xaa is A or G or is absent
XVPARLSPINILYFXXXXXXXXXYGKIPDMVVEA

SEQ ID NO: 33311 - protein, 38 aa, Artificial Sequence
  GFR-binding peptide
  MOD_RES (4), (5), (38): Xaa is C or S
GKAXXVPTKLSPINVLYFDDMGVPTYGKIPEGMSVAEX

SEQ ID NO: 33312 - protein, 33 aa, Artificial Sequence
  GFR-binding peptide
  MOD_RES (3), (3): Xaa is C or S
PTXAPTKLSPINVLYFDDSSNVIYGKIPNMVVR

SEQ ID NO: 33313 - protein, 38 aa, Artificial Sequence
  GFR-binding peptide
  MOD_RES (2), (3), (37): Xaa is C or S
  MOD_RES (17), (18), (19), (20), (21): Xaa is A or G
  MOD_RES (22), (23), (24), (25): Xaa is A or G or is absent
PXXAPTQLSPINVLYFXXXXXXXXXYGKIPNMVVRAXG

SEQ ID NO: 33314 - protein, 44 aa, Artificial Sequence
  GFR-binding peptide
  MOD_RES (5), (6), (41), (43): Xaa is C or S
  MOD_RES (20), (21), (22), (23), (24): Xaa is A or G
  MOD_RES (25), (26), (27), (28): Xaa is A or G or is absent
VGKAXXVPTKLSPINVLYFXXXXXXXXXYGKIPEGMSVAEXGXR

SEQ ID NO: 33315 - protein, 35 aa, Artificial Sequence
  GFR-binding peptide
  MOD_RES (1), (33), (35): Xaa is C or S
XAPTQLSPINVLYFDDSSNVIYGKIPNMVVRAXGX

SEQ ID NO: 33316 - protein, 39 aa, Artificial Sequence
  GFR-binding peptide
  MOD_RES (5), (6), (38): Xaa is C or S
VPKPXXAPTQLSPINVLYFDDSSNVIYGKIPNMVVRAXG

SEQ ID NO: 33317 - protein, 42 aa, Artificial Sequence
  GFR-binding peptide
  MOD_RES (6), (7), (39), (41): Xaa is C or S
AVPKAXXAPTKLSPINVLYFDSSNNVIYGKIPNMVVKAXGXH

SEQ ID NO: 33318 - protein, 42 aa, Artificial Sequence
  GFR-binding peptide
  MOD_RES (6), (7), (41): Xaa is C or S
  MOD_RES (21), (22), (23), (24), (25): Xaa is A or G
  MOD_RES (26), (27), (28), (29): Xaa is A or G or is absent
AVPKAXXAPTKLSPINVLYFXXXXXXXXXYGKIPNMVVKAXG

SEQ ID NO: 33319 - protein, 39 aa, Artificial Sequence
  GFR-binding peptide
  MOD_RES (3), (4), (39): Xaa is C or S
  MOD_RES (18), (19), (20), (21), (22): Xaa is A or G
  MOD_RES (23), (24), (25), (26): Xaa is A or G or is absent
KAXXVPTKLSPINVLYFXXXXXXXXXYGKIPEGMSVAEX

SEQ ID NO: 33320 - protein, 36 aa, Artificial Sequence
  GFR-binding peptide
  MOD_RES (34), (36): Xaa is C or S
  MOD_RES (14), (15), (16), (17), (18): Xaa is A or G
  MOD_RES (19), (20), (21), (22): Xaa is A or G or is absent
APTQLSPINVLYFXXXXXXXXXYGKIPNMVVRAXGX

SEQ ID NO: 33321 - protein, 35 aa, Artificial Sequence
  GFR-binding peptide
  MOD_RES (3), (35): Xaa is C or S
PTXAPTKLSPINVLYFDDSSNVIYGKIPNMVVRSX

SEQ ID NO: 33322 - protein, 34 aa, Artificial Sequence
  GFR-binding peptide
  MOD_RES (1), (1): Xaa is C or S
  MOD_RES (15), (16), (17), (18), (19): Xaa is A or G
  MOD_RES (20), (21), (22), (23): Xaa is A or G or is absent
XTPTKMSPINMLYFXXXXXXXXXYGKIPGMVVDR

SEQ ID NO: 33323 - protein, 38 aa, Artificial Sequence
  GFR-binding peptide
  MOD_RES (2), (3), (37): Xaa is C or S
  MOD_RES (17), (18), (19), (20), (21): Xaa is A or G
  MOD_RES (22), (23), (24), (25): Xaa is A or G or is absent
AXXVPTKLSPINILYFXXXXXXXXXYGKIPGMAVSEXG

SEQ ID NO: 33324 - protein, 34 aa, Artificial Sequence
  GFR-binding peptide
  MOD_RES (1), (1): Xaa is C or S
  MOD_RES (15), (16), (17), (18), (19): Xaa is A or G
  MOD_RES (20), (21), (22), (23): Xaa is A or G or is absent
XVPTELSPINMLYFXXXXXXXXXYGKIPEMVVEG

SEQ ID NO: 33325 - protein, 40 aa, Artificial Sequence
  GFR-binding peptide
  MOD_RES (6), (7): Xaa is C or S
  MOD_RES (21), (22), (23), (24), (25): Xaa is A or G
  MOD_RES (26), (27), (28), (29): Xaa is A or G or is absent
KASKAXXVPTKLSPINILYFXXXXXXXXXYGKIPGMAVSE

SEQ ID NO: 33326 - protein, 39 aa, Artificial Sequence
  GFR-binding peptide
  MOD_RES (4), (5), (39): Xaa is C or S
  MOD_RES (19), (20), (21), (22), (23): Xaa is A or G
  MOD_RES (24), (25), (26), (27): Xaa is A or G or is absent
SKAXXVPTKLSPINILYFXXXXXXXXXYGKIPGMAVSEX

SEQ ID NO: 33327 - protein, 41 aa, Artificial Sequence
  GFR-binding peptide
  MOD_RES (4), (5), (38), (40): Xaa is C or S
  MOD_RES (19), (20), (21), (22), (23): Xaa is A or G
  MOD_RES (24), (25), (26), (27): Xaa is A or G or is absent
PSTXXAPVKTSPINMLYFXXXXXXXXXYGKIPMIVEEXGXL

SEQ ID NO: 33328 - protein, 35 aa, Artificial Sequence
  GFR-binding peptide
  MOD_RES (2), (3): Xaa is C or S
  MOD_RES (17), (18), (19), (20), (21): Xaa is A or G
  MOD_RES (22), (23), (24), (25): Xaa is A or G or is absent
TXXVPTRLSPINILYFXXXXXXXXXYGKIPDMVVE

SEQ ID NO: 33329 - protein, 31 aa, Artificial Sequence
  GFR-binding peptide
APTKLSPINVLYFDDSSNVIYGKIPNMVVRS

SEQ ID NO: 33330 - protein, 39 aa, Artificial Sequence
  GFR-binding peptide
  MOD_RES (6), (7): Xaa is C or S
  MOD_RES (21), (22), (23), (24), (25): Xaa is A or G
  MOD_RES (26), (27), (28), (29): Xaa is A or G or is absent
KIPKAXXVPTELSPINMLYFXXXXXXXXXYGKIPDMVVE

SEQ ID NO: 33331 - protein, 42 aa, Artificial Sequence
  GFR-binding peptide
  MOD_RES (5), (6), (40), (42): Xaa is C or S
  MOD_RES (20), (21), (22), (23), (24): Xaa is A or G
  MOD_RES (25), (26), (27), (28): Xaa is A or G or is absent
VPKPXXAPTKLSPINVLYFXXXXXXXXXYGKIPNMVVRSXGX

SEQ ID NO: 33332 - protein, 34 aa, Artificial Sequence
  GFR-binding peptide
  MOD_RES (1), (2): Xaa is C or S
  MOD_RES (16), (17), (18), (19), (20): Xaa is A or G
  MOD_RES (21), (22), (23), (24): Xaa is A or G or is absent
XXAPTQLSPINVLYFXXXXXXXXXYGKIPNMVVR

SEQ ID NO: 33333 - protein, 36 aa, Artificial Sequence
  GFR-binding peptide
  MOD_RES (34), (36): Xaa is C or S
  MOD_RES (14), (15), (16), (17), (18): Xaa is A or G
  MOD_RES (19), (20), (21), (22): Xaa is A or G or is absent
VPTELSPINMLYFXXXXXXXXXYGKIPEMVVEGXGX

SEQ ID NO: 33334 - protein, 39 aa, Artificial Sequence
  GFR-binding peptide
  MOD_RES (3), (4), (37), (39): Xaa is C or S
  MOD_RES (18), (19), (20), (21), (22): Xaa is A or G
  MOD_RES (23), (24), (25), (26): Xaa is A or G or is absent
STXXAPVKTSPINMLYFXXXXXXXXXYGKIPMIVEEXGX

SEQ ID NO: 33335 - protein, 38 aa, Artificial Sequence
  GFR-binding peptide
  MOD_RES (4), (5), (36), (38): Xaa is C or S
PSTXXAPVKTSPINMLYFDNGRVLLYGKIPMIVEEXGX

SEQ ID NO: 33336 - protein, 37 aa, Artificial Sequence
  GFR-binding peptide
  MOD_RES (1), (2), (36): Xaa is C or S
  MOD_RES (16), (17), (18), (19), (20): Xaa is A or G
  MOD_RES (21), (22), (23), (24): Xaa is A or G or is absent
XXVPTKLSPINILYFXXXXXXXXXYGKIPGMAVSEXG

SEQ ID NO: 33337 - protein, 36 aa, Artificial Sequence
  GFR-binding peptide
  MOD_RES (3), (4): Xaa is C or S
  MOD_RES (18), (19), (20), (21), (22): Xaa is A or G
  MOD_RES (23), (24), (25), (26): Xaa is A or G or is absent
KAXXVPTELSPINMLYFXXXXXXXXXYGKIPDMVVE

SEQ ID NO: 33338 - protein, 37 aa, Artificial Sequence
  GFR-binding peptide
  MOD_RES (1), (2), (34), (36): Xaa is C or S
XXAPTQLSPINVLYFDDSSNVIYGKIPNMVVRAXGXH

SEQ ID NO: 33339 - protein, 38 aa, Artificial Sequence
  GFR-binding peptide
  MOD_RES (6), (7), (38): Xaa is C or S
RVPSTXXAPVKTSPINMLYFDNGRVLLYGKIPMIVEEX

SEQ ID NO: 33340 - protein, 34 aa, Artificial Sequence
  GFR-binding peptide
  MOD_RES (1), (33): Xaa is C or S
XAPTKLSPINVLYFDSSNNVIYGKIPNMVVKAXG

SEQ ID NO: 33341 - protein, 39 aa, Artificial Sequence
  GFR-binding peptide
  MOD_RES (6), (7): Xaa is C or S
  MOD_RES (21), (22), (23), (24), (25): Xaa is A or G
  MOD_RES (26), (27), (28), (29): Xaa is A or G or is absent
AVPKAXXAPTKLSPINVLYFXXXXXXXXXYGKIPNMVVK

SEQ ID NO: 33342 - protein, 39 aa, Artificial Sequence
  GFR-binding peptide
  MOD_RES (3), (4), (38): Xaa is C or S
  MOD_RES (18), (19), (20), (21), (22): Xaa is A or G
  MOD_RES (23), (24), (25), (26): Xaa is A or G or is absent
KAXXVPTELSPINMLYFXXXXXXXXXYGKIPDMVVEGXG

SEQ ID NO: 33343 - protein, 30 aa, Artificial Sequence
  GFR-binding peptide
VPTKLSPINILYFDKGVVTYYGKIPGMAVS

SEQ ID NO: 33344 - protein, 35 aa, Artificial Sequence
  GFR-binding peptide
  MOD_RES (34), (34): Xaa is C or S
  MOD_RES (14), (15), (16), (17), (18): Xaa is A or G
  MOD_RES (19), (20), (21), (22): Xaa is A or G or is absent
VPTELSPINMLYFXXXXXXXXXYGKIPDMVVEGXG

SEQ ID NO: 33345 - protein, 39 aa, Artificial Sequence
  GFR-binding peptide
  MOD_RES (7), (39): Xaa is C or S
HVTKPTXAPTKLSPINVLYFDDSSNVIYGKIPNMVVRSX

SEQ ID NO: 33346 - protein, 32 aa, Artificial Sequence
  GFR-binding peptide
  MOD_RES (1), (1): Xaa is C or S
XVPARLSPINILYFDAANNVVYGKIPDMVVEA

SEQ ID NO: 33347 - protein, 36 aa, Artificial Sequence
  GFR-binding peptide
  MOD_RES (3), (35): Xaa is C or S
PTXAPTKLSPINVLYFDDSSNVIYGKIPNMVVRSXG

SEQ ID NO: 33348 - protein, 33 aa, Artificial Sequence
  GFR-binding peptide
  MOD_RES (14), (15), (16), (17), (18): Xaa is A or G
  MOD_RES (19), (20), (21), (22): Xaa is A or G or is absent
VPTRLSPINILYFXXXXXXXXXYGKIPDMVVES

SEQ ID NO: 33349 - protein, 33 aa, Artificial Sequence
  GFR-binding peptide
  MOD_RES (2), (3): Xaa is C or S
TXXAPVKTSPINMLYFDNGRVLLYGKIPMIVEE

SEQ ID NO: 33350 - protein, 37 aa, Artificial Sequence
  GFR-binding peptide
  MOD_RES (1), (2), (35), (37): Xaa is C or S
XXVPTKLSPINVLYFDDMGVPTYGKIPEGMSVAEXGX

SEQ ID NO: 33351 - protein, 38 aa, Artificial Sequence
  GFR-binding peptide
  MOD_RES (1), (2), (35), (37): Xaa is C or S
  MOD_RES (16), (17), (18), (19), (20): Xaa is A or G
  MOD_RES (21), (22), (23), (24): Xaa is A or G or is absent
XXAPVKTSPINMLYFXXXXXXXXXYGKIPMIVEEXGXL

SEQ ID NO: 33352 - protein, 35 aa, Artificial Sequence
  GFR-binding peptide
  MOD_RES (1), (2): Xaa is C or S
  MOD_RES (16), (17), (18), (19), (20): Xaa is A or G
  MOD_RES (21), (22), (23), (24): Xaa is A or G or is absent
XXVPARLSPINILYFXXXXXXXXXYGKIPDMVVEA

SEQ ID NO: 33353 - protein, 38 aa, Artificial Sequence
  GFR-binding peptide
  MOD_RES (5), (6): Xaa is C or S
  MOD_RES (20), (21), (22), (23), (24): Xaa is A or G
  MOD_RES (25), (26), (27), (28): Xaa is A or G or is absent
VPKAXXAPTKLSPINVLYFXXXXXXXXXYGKIPNMVVK

SEQ ID NO: 33354 - protein, 37 aa, Artificial Sequence
  GFR-binding peptide
  MOD_RES (1), (2), (35), (37): Xaa is C or S
  MOD_RES (16), (17), (18), (19), (20): Xaa is A or G
  MOD_RES (21), (22), (23), (24): Xaa is A or G or is absent
XXAPVKTSPINMLYFXXXXXXXXXYGKIPMIVEEXGX

SEQ ID NO: 33355 - protein, 39 aa, Artificial Sequence; identical to SEQ ID NO: 31199
  GFR-binding peptide
  MOD_RES (1), (33), (34): Xaa is C or S

SEQ ID NO: 33356 - protein, 35 aa, Artificial Sequence; identical to SEQ ID NO: 31200
  GFR-binding peptide
  MOD_RES (31), (32): Xaa is C or S

SEQ ID NO: 33357 - protein, 43 aa, Artificial Sequence; identical to SEQ ID NO: 31201
  GFR-binding peptide
  MOD_RES (1), (3), (37), (38): Xaa is C or S
  MOD_RES (15), (16), (17), (18), (19): Xaa is A or G
  MOD_RES (20), (21), (22), (23): Xaa is A or G or is absent

SEQ ID NO: 33358 - protein, 40 aa, Artificial Sequence; identical to SEQ ID NO: 31202
  GFR-binding peptide
  MOD_RES (34), (35): Xaa is C or S
  MOD_RES (12), (13), (14), (15), (16): Xaa is A or G
  MOD_RES (17), (18), (19), (20): Xaa is A or G or is absent

SEQ ID NO: 33359 - protein, 37 aa, Artificial Sequence; identical to SEQ ID NO: 31203
  GFR-binding peptide
  MOD_RES (32), (33): Xaa is C or S

SEQ ID NO: 33360 - protein, 40 aa, Artificial Sequence; identical to SEQ ID NO: 31204
  GFR-binding peptide
  MOD_RES (1), (3), (37), (38): Xaa is C or S
  MOD_RES (15), (16), (17), (18), (19): Xaa is A or G
  MOD_RES (20), (21), (22), (23): Xaa is A or G or is absent

SEQ ID NO: 33361 - protein, 32 aa, Artificial Sequence; identical to SEQ ID NO: 31205
  GFR-binding peptide
  MOD_RES (2), (2): Xaa is C or S

SEQ ID NO: 33362 - protein, 35 aa, Artificial Sequence; identical to SEQ ID NO: 31206
  GFR-binding peptide
  MOD_RES (32), (33): Xaa is C or S

SEQ ID NO: 33363 - protein, 42 aa, Artificial Sequence; identical to SEQ ID NO: 31207
  GFR-binding peptide
  MOD_RES (1), (3), (37), (38): Xaa is C or S
  MOD_RES (15), (16), (17), (18), (19): Xaa is A or G
  MOD_RES (20), (21), (22), (23): Xaa is A or G or is absent

SEQ ID NO: 33364 - protein, 39 aa, Artificial Sequence; identical to SEQ ID NO: 31208
  GFR-binding peptide
  MOD_RES (2), (4), (36), (37): Xaa is C or S

SEQ ID NO: 33365 - protein, 40 aa, Artificial Sequence; identical to SEQ ID NO: 31209
  GFR-binding peptide
  MOD_RES (1), (3), (35), (36): Xaa is C or S

SEQ ID NO: 33366 - protein, 41 aa, Artificial Sequence; identical to SEQ ID NO: 31210
  GFR-binding peptide
  MOD_RES (1), (3), (37), (38): Xaa is C or S
  MOD_RES (15), (16), (17), (18), (19): Xaa is A or G
  MOD_RES (20), (21), (22), (23): Xaa is A or G or is absent

SEQ ID NO: 33367 - protein, 35 aa, Artificial Sequence; identical to SEQ ID NO: 31211
  GFR-binding peptide
  MOD_RES (1), (33), (34): Xaa is C or S

SEQ ID NO: 33368 - protein, 33 aa, Artificial Sequence; identical to SEQ ID NO: 31212
  GFR-binding peptide
  MOD_RES (1), (33): Xaa is C or S

SEQ ID NO: 33369 - protein, 35 aa, Artificial Sequence; identical to SEQ ID NO: 31213
  GFR-binding peptide
  MOD_RES (34), (35): Xaa is C or S
  MOD_RES (12), (13), (14), (15), (16): Xaa is A or G
  MOD_RES (17), (18), (19), (20): Xaa is A or G or is absent

SEQ ID NO: 33370 - protein, 40 aa, Artificial Sequence; identical to SEQ ID NO: 31214
  GFR-binding peptide
  MOD_RES (1), (3), (35), (36): Xaa is C or S

SEQ ID NO: 33371 - protein, 37 aa, Artificial Sequence; identical to SEQ ID NO: 31215
  GFR-binding peptide
  MOD_RES (2), (34): Xaa is C or S

SEQ ID NO: 33372 - protein, 40 aa, Artificial Sequence; identical to SEQ ID NO: 31216
  GFR-binding peptide
  MOD_RES (34), (34): Xaa is C or S
  MOD_RES (12), (13), (14), (15), (16): Xaa is A or G
  MOD_RES (17), (18), (19), (20): Xaa is A or G or is absent

SEQ ID NO: 33373 - protein, 37 aa, Artificial Sequence; identical to SEQ ID NO: 31217
  GFR-binding peptide
  MOD_RES (34), (35): Xaa is C or S
  MOD_RES (12), (13), (14), (15), (16): Xaa is A or G
  MOD_RES (17), (18), (19), (20): Xaa is A or G or is absent

SEQ ID NO: 33374 - protein, 34 aa, Artificial Sequence; identical to SEQ ID NO: 31218
  GFR-binding peptide
  MOD_RES (2), (34): Xaa is C or S

SEQ ID NO: 33375 - protein, 41 aa, Artificial Sequence; identical to SEQ ID NO: 31219
  GFR-binding peptide
  MOD_RES (1), (3), (37), (38): Xaa is C or S
  MOD_RES (15), (16), (17), (18), (19): Xaa is A or G
  MOD_RES (20), (21), (22), (23): Xaa is A or G or is absent

SEQ ID NO: 33376 - protein, 40 aa, Artificial Sequence; identical to SEQ ID NO: 31220
  GFR-binding peptide
  MOD_RES (1), (35), (36): Xaa is C or S
  MOD_RES (13), (14), (15), (16), (17): Xaa is A or G
  MOD_RES (18), (19), (20), (21): Xaa is A or G or is absent

SEQ ID NO: 33377 - protein, 35 aa, Artificial Sequence; identical to SEQ ID NO: 31221
  GFR-binding peptide
  MOD_RES (32), (33): Xaa is C or S

SEQ ID NO: 33378 - protein, 38 aa, Artificial Sequence; identical to SEQ ID NO: 31222
  GFR-binding peptide
  MOD_RES (2), (34), (35): Xaa is C or S

SEQ ID NO: 33379 - protein, 36 aa, Artificial Sequence; identical to SEQ ID NO: 31223
  GFR-binding peptide
  MOD_RES (31), (32): Xaa is C or S

SEQ ID NO: 33380 - protein, 39 aa, Artificial Sequence; identical to SEQ ID NO: 31224
  GFR-binding peptide
  MOD_RES (2), (4), (38), (39): Xaa is C or S
  MOD_RES (16), (17), (18), (19), (20): Xaa is A or G
  MOD_RES (21), (22), (23), (24): Xaa is A or G or is absent

SEQ ID NO: 33381 - protein, 35 aa, Artificial Sequence; identical to SEQ ID NO: 31225
  GFR-binding peptide
  MOD_RES (33), (34): Xaa is C or S
  MOD_RES (11), (12), (13), (14), (15): Xaa is A or G
  MOD_RES (16), (17), (18), (19): Xaa is A or G or is absent

SEQ ID NO: 33382 - protein, 39 aa, Artificial Sequence; identical to SEQ ID NO: 31226
  GFR-binding peptide
  MOD_RES (2), (4), (37), (38): Xaa is C or S

SEQ ID NO: 33383 - protein, 39 aa, Artificial Sequence; identical to SEQ ID NO: 31227
  GFR-binding peptide
  MOD_RES (1), (3), (37): Xaa is C or S
  MOD_RES (15), (16), (17), (18), (19): Xaa is A or G
  MOD_RES (20), (21), (22), (23): Xaa is A or G or is absent

SEQ ID NO: 33384 - protein, 36 aa, Artificial Sequence; identical to SEQ ID NO: 31228
  GFR-binding peptide
  MOD_RES (32), (33): Xaa is C or S

SEQ ID NO: 33385 - protein, 37 aa, Artificial Sequence; identical to SEQ ID NO: 31229
  GFR-binding peptide
  MOD_RES (33), (34): Xaa is C or S
  MOD_RES (11), (12), (13), (14), (15): Xaa is A or G
  MOD_RES (16), (17), (18), (19): Xaa is A or G or is absent

SEQ ID NO: 33386 - protein, 36 aa, Artificial Sequence; identical to SEQ ID NO: 31230
  GFR-binding peptide
  MOD_RES (2), (34), (35): Xaa is C or S

SEQ ID NO: 33387 - protein, 42 aa, Artificial Sequence; identical to SEQ ID NO: 31231
  GFR-binding peptide
  MOD_RES (2), (4), (37), (38): Xaa is C or S

SEQ ID NO: 33388 - protein, 33 aa, Artificial Sequence; identical to SEQ ID NO: 31232
  GFR-binding peptide
  MOD_RES (32), (33): Xaa is C or S

SEQ ID NO: 33389 - protein, 35 aa, Artificial Sequence; identical to SEQ ID NO: 31233
  GFR-binding peptide
  MOD_RES (1), (3), (35): Xaa is C or S

SEQ ID NO: 33390 - protein, 39 aa, Artificial Sequence; identical to SEQ ID NO: 31234
  GFR-binding peptide
  MOD_RES (2), (4), (36), (37): Xaa is C or S

SEQ ID NO: 33391 - protein, 35 aa, Artificial Sequence; identical to SEQ ID NO: 31235
  GFR-binding peptide
  MOD_RES (1), (34), (35): Xaa is C or S

SEQ ID NO: 33392 - protein, 38 aa, Artificial Sequence; identical to SEQ ID NO: 31236
  GFR-binding peptide
  MOD_RES (2), (33), (34): Xaa is C or S

SEQ ID NO: 33393 - protein, 43 aa, Artificial Sequence; identical to SEQ ID NO: 31237
  GFR-binding peptide
  MOD_RES (2), (4), (38), (39): Xaa is C or S
  MOD_RES (16), (17), (18), (19), (20): Xaa is A or G
  MOD_RES (21), (22), (23), (24): Xaa is A or G or is absent

SEQ ID NO: 33394 - protein, 43 aa, Artificial Sequence; identical to SEQ ID NO: 31238
  GFR-binding peptide
  MOD_RES (1), (3), (37), (38): Xaa is C or S
  MOD_RES (15), (16), (17), (18), (19): Xaa is A or G
  MOD_RES (20), (21), (22), (23): Xaa is A or G or is absent

SEQ ID NO: 33395 - protein, 36 aa, Artificial Sequence; identical to SEQ ID NO: 31239
  GFR-binding peptide
  MOD_RES (1), (3): Xaa is C or S
  MOD_RES (15), (16), (17), (18), (19): Xaa is A or G
  MOD_RES (20), (21), (22), (23): Xaa is A or G or is absent

SEQ ID NO: 33396 - protein, 40 aa, Artificial Sequence; identical to SEQ ID NO: 31240
  GFR-binding peptide
  MOD_RES (1), (3), (37): Xaa is C or S
  MOD_RES (15), (16), (17), (18), (19): Xaa is A or G
  MOD_RES (20), (21), (22), (23): Xaa is A or G or is absent

SEQ ID NO: 33397 - protein, 44 aa, Artificial Sequence; identical to SEQ ID NO: 31241
  GFR-binding peptide
  MOD_RES (2), (4), (38), (39): Xaa is C or S
  MOD_RES (16), (17), (18), (19), (20): Xaa is A or G
  MOD_RES (21), (22), (23), (24): Xaa is A or G or is absent

SEQ ID NO: 33398 - protein, 44 aa, Artificial Sequence; identical to SEQ ID NO: 31242
  GFR-binding peptide
  MOD_RES (2), (4), (38), (39): Xaa is C or S
  MOD_RES (16), (17), (18), (19), (20): Xaa is A or G
  MOD_RES (21), (22), (23), (24): Xaa is A or G or is absent

SEQ ID NO: 33399 - protein, 39 aa, Artificial Sequence; identical to SEQ ID NO: 31243
  GFR-binding peptide
  MOD_RES (1), (33), (34): Xaa is C or S

SEQ ID NO: 33400 - protein, 43 aa, Artificial Sequence; identical to SEQ ID NO: 31244
  GFR-binding peptide
  MOD_RES (1), (3), (37), (38): Xaa is C or S
  MOD_RES (15), (16), (17), (18), (19): Xaa is A or G
  MOD_RES (20), (21), (22), (23): Xaa is A or G or is absent

SEQ ID NO: 33401 - protein, 34 aa, Artificial Sequence; identical to SEQ ID NO: 31245
  GFR-binding peptide
  MOD_RES (32), (33): Xaa is C or S

SEQ ID NO: 33402 - protein, 37 aa, Artificial Sequence; identical to SEQ ID NO: 31246
  GFR-binding peptide
  MOD_RES (2), (4), (36): Xaa is C or S

SEQ ID NO: 33403 - protein, 35 aa, Artificial Sequence; identical to SEQ ID NO: 31247
  GFR-binding peptide
  MOD_RES (1), (1): Xaa is C or S
  MOD_RES (14), (15), (16), (17), (18): Xaa is A or G
  MOD_RES (19), (20), (21), (22): Xaa is A or G or is absent

SEQ ID NO: 33404 - protein, 39 aa, Artificial Sequence; identical to SEQ ID NO: 31248
  GFR-binding peptide
  MOD_RES (2), (4), (36), (37): Xaa is C or S

SEQ ID NO: 33405 - protein, 37 aa, Artificial Sequence; identical to SEQ ID NO: 31249
  GFR-binding peptide
  MOD_RES (2), (35), (36): Xaa is C or S

SEQ ID NO: 33406 - protein, 42 aa, Artificial Sequence; identical to SEQ ID NO: 31250
  GFR-binding peptide
  MOD_RES (2), (4), (38), (39): Xaa is C or S
  MOD_RES (16), (17), (18), (19), (20): Xaa is A or G
  MOD_RES (21), (22), (23), (24): Xaa is A or G or is absent

SEQ ID NO: 33407 - protein, 34 aa, Artificial Sequence; identical to SEQ ID NO: 31251
  GFR-binding peptide
  MOD_RES (1), (3), (34): Xaa is C or S

SEQ ID NO: 33408 - protein, 42 aa, Artificial Sequence; identical to SEQ ID NO: 31252
  GFR-binding peptide
  MOD_RES (2), (4), (38), (39): Xaa is C or S
  MOD_RES (16), (17), (18), (19), (20): Xaa is A or G
  MOD_RES (21), (22), (23), (24): Xaa is A or G or is absent

SEQ ID NO: 33409 - protein, 36 aa, Artificial Sequence; identical to SEQ ID NO: 31253
  GFR-binding peptide
  MOD_RES (2), (4), (36): Xaa is C or S

SEQ ID NO: 33410 - protein, 37 aa, Artificial Sequence; identical to SEQ ID NO: 31254
  GFR-binding peptide
  MOD_RES (31), (32): Xaa is C or S

SEQ ID NO: 33411 - protein, 40 aa, Artificial Sequence; identical to SEQ ID NO: 31255
  GFR-binding peptide
  MOD_RES (1), (3), (37), (38): Xaa is C or S
  MOD_RES (15), (16), (17), (18), (19): Xaa is A or G
  MOD_RES (20), (21), (22), (23): Xaa is A or G or is absent

SEQ ID NO: 33412 - protein, 40 aa, Artificial Sequence; identical to SEQ ID NO: 31256
  GFR-binding peptide
  MOD_RES (2), (34), (35): Xaa is C or S

SEQ ID NO: 33413 - protein, 40 aa, Artificial Sequence; identical to SEQ ID NO: 31257
  GFR-binding peptide
  MOD_RES (2), (36), (37): Xaa is C or S
  MOD_RES (14), (15), (16), (17), (18): Xaa is A or G
  MOD_RES (19), (20), (21), (22): Xaa is A or G or is absent

SEQ ID NO: 33414 - protein, 35 aa, Artificial Sequence; identical to SEQ ID NO: 31258
  GFR-binding peptide
  MOD_RES (34), (35): Xaa is C or S
  MOD_RES (12), (13), (14), (15), (16): Xaa is A or G
  MOD_RES (17), (18), (19), (20): Xaa is A or G or is absent

SEQ ID NO: 33415 - protein, 39 aa, Artificial Sequence; identical to SEQ ID NO: 31259
  GFR-binding peptide
  MOD_RES (34), (35): Xaa is C or S
  MOD_RES (12), (13), (14), (15), (16): Xaa is A or G
  MOD_RES (17), (18), (19), (20): Xaa is A or G or is absent

SEQ ID NO: 33416 - protein, 35 aa, Artificial Sequence; identical to SEQ ID NO: 31260
  GFR-binding peptide
  MOD_RES (1), (3), (35): Xaa is C or S

SEQ ID NO: 33417 - protein, 35 aa, Artificial Sequence; identical to SEQ ID NO: 31261
  GFR-binding peptide
  MOD_RES (2), (2): Xaa is C or S
  MOD_RES (14), (15), (16), (17), (18): Xaa is A or G
  MOD_RES (19), (20), (21), (22): Xaa is A or G or is absent

SEQ ID NO: 33418 - protein, 36 aa, Artificial Sequence; identical to SEQ ID NO: 31262
  GFR-binding peptide
  MOD_RES (31), (32): Xaa is C or S

SEQ ID NO: 33419 - protein, 38 aa, Artificial Sequence; identical to SEQ ID NO: 31263
  GFR-binding peptide
  MOD_RES (1), (3), (35), (36): Xaa is C or S

SEQ ID NO: 33420 - protein, 36 aa, Artificial Sequence; identical to SEQ ID NO: 31264
  GFR-binding peptide
  MOD_RES (1), (33), (34): Xaa is C or S

SEQ ID NO: 33421 - protein, 42 aa, Artificial Sequence; identical to SEQ ID NO: 31265
  GFR-binding peptide
  MOD_RES (2), (4), (38), (39): Xaa is C or S
  MOD_RES (16), (17), (18), (19), (20): Xaa is A or G
  MOD_RES (21), (22), (23), (24): Xaa is A or G or is absent

SEQ ID NO: 33422 - protein, 41 aa, Artificial Sequence; identical to SEQ ID NO: 31266
  GFR-binding peptide
  MOD_RES (1), (3), (38), (39): Xaa is C or S
  MOD_RES (16), (17), (18), (19), (20): Xaa is A or G
  MOD_RES (21), (22), (23), (24): Xaa is A or G or is absent

SEQ ID NO: 33423 - protein, 36 aa, Artificial Sequence; identical to SEQ ID NO: 31267
  GFR-binding peptide
  MOD_RES (32), (33): Xaa is C or S

SEQ ID NO: 33424 - protein, 39 aa, Artificial Sequence; identical to SEQ ID NO: 31268
  GFR-binding peptide
  MOD_RES (2), (35), (36): Xaa is C or S
  MOD_RES (13), (14), (15), (16), (17): Xaa is A or G
  MOD_RES (18), (19), (20), (21): Xaa is A or G or is absent

SEQ ID NO: 33425 - protein, 39 aa, Artificial Sequence; identical to SEQ ID NO: 31269
  GFR-binding peptide
  MOD_RES (2), (34): Xaa is C or S

SEQ ID NO: 33426 - protein, 42 aa, Artificial Sequence; identical to SEQ ID NO: 31270
  GFR-binding peptide
  MOD_RES (2), (37), (38): Xaa is C or S
  MOD_RES (15), (16), (17), (18), (19): Xaa is A or G
  MOD_RES (20), (21), (22), (23): Xaa is A or G or is absent

SEQ ID NO: 33427 - protein, 40 aa, Artificial Sequence; identical to SEQ ID NO: 31271
  GFR-binding peptide
  MOD_RES (2), (34), (35): Xaa is C or S

SEQ ID NO: 33428 - protein, 38 aa, Artificial Sequence; identical to SEQ ID NO: 31272
  GFR-binding peptide
  MOD_RES (1), (35), (36): Xaa is C or S
  MOD_RES (13), (14), (15), (16), (17): Xaa is A or G
  MOD_RES (18), (19), (20), (21): Xaa is A or G or is absent

SEQ ID NO: 33429 - protein, 34 aa, Artificial Sequence; identical to SEQ ID NO: 31273
  GFR-binding peptide
  MOD_RES (13), (14), (15), (16), (17): Xaa is A or G
  MOD_RES (18), (19), (20), (21): Xaa is A or G or is absent

SEQ ID NO: 33430 - protein, 32 aa, Artificial Sequence; identical to SEQ ID NO: 31274
  GFR-binding peptide
  MOD_RES (32), (32): Xaa is C or S

SEQ ID NO: 33431 - protein, 37 aa, Artificial Sequence; identical to SEQ ID NO: 31275
  GFR-binding peptide
  MOD_RES (2), (34), (35): Xaa is C or S

SEQ ID NO: 33432 - protein, 36 aa, Artificial Sequence; identical to SEQ ID NO: 31276
  GFR-binding peptide
  MOD_RES (33), (34): Xaa is C or S
  MOD_RES (11), (12), (13), (14), (15): Xaa is A or G
  MOD_RES (16), (17), (18), (19): Xaa is A or G or is absent

SEQ ID NO: 33433 - protein, 41 aa, Artificial Sequence; identical to SEQ ID NO: 31277
  GFR-binding peptide
  MOD_RES (1), (3), (37), (38): Xaa is C or S
  MOD_RES (15), (16), (17), (18), (19): Xaa is A or G
  MOD_RES (20), (21), (22), (23): Xaa is A or G or is absent

SEQ ID NO: 33434 - protein, 40 aa, Artificial Sequence; identical to SEQ ID NO: 31278
  GFR-binding peptide
  MOD_RES (1), (3), (35), (36): Xaa is C or S

SEQ ID NO: 33435 - protein, 36 aa, Artificial Sequence; identical to SEQ ID NO: 31279
  GFR-binding peptide
  MOD_RES (1), (3): Xaa is C or S
  MOD_RES (15), (16), (17), (18), (19): Xaa is A or G
  MOD_RES (20), (21), (22), (23): Xaa is A or G or is absent

SEQ ID NO: 33436 - protein, 34 aa, Artificial Sequence; identical to SEQ ID NO: 31280
  GFR-binding peptide
  MOD_RES (2), (34): Xaa is C or S

SEQ ID NO: 33437 - protein, 37 aa, Artificial Sequence; identical to SEQ ID NO: 31281
  GFR-binding peptide
  MOD_RES (32), (33): Xaa is C or S

SEQ ID NO: 33438 - protein, 35 aa, Artificial Sequence; identical to SEQ ID NO: 31282
  GFR-binding peptide
  MOD_RES (2), (4): Xaa is C or S

SEQ ID NO: 33439 - protein, 41 aa, Artificial Sequence; identical to SEQ ID NO: 31283
  GFR-binding peptide
  MOD_RES (2), (4), (36), (37): Xaa is C or S

SEQ ID NO: 33440 - protein, 34 aa, Artificial Sequence; identical to SEQ ID NO: 31284
  GFR-binding peptide
  MOD_RES (31), (32): Xaa is C or S

SEQ ID NO: 33441 - protein, 41 aa, Artificial Sequence; identical to SEQ ID NO: 31285
  GFR-binding peptide
  MOD_RES (1), (3), (35): Xaa is C or S

SEQ ID NO: 33442 - protein, 40 aa, Artificial Sequence; identical to SEQ ID NO: 31286
  GFR-binding peptide
  MOD_RES (2), (4), (36), (37): Xaa is C or S

SEQ ID NO: 33443 - protein, 35 aa, Artificial Sequence; identical to SEQ ID NO: 31287
  GFR-binding peptide
  MOD_RES (31), (32): Xaa is C or S

SEQ ID NO: 33444 - protein, 41 aa, Artificial Sequence; identical to SEQ ID NO: 31288
  GFR-binding peptide
  MOD_RES (1), (3), (35), (36): Xaa is C or S

SEQ ID NO: 33445 - protein, 38 aa, Artificial Sequence; identical to SEQ ID NO: 31289
  GFR-binding peptide
  MOD_RES (2), (36), (37): Xaa is C or S
  MOD_RES (14), (15), (16), (17), (18): Xaa is A or G
  MOD_RES (19), (20), (21), (22): Xaa is A or G or is absent

SEQ ID NO: 33446 - protein, 38 aa, Artificial Sequence; identical to SEQ ID NO: 31290
  GFR-binding peptide
  MOD_RES (1), (3), (37), (38): Xaa is C or S
  MOD_RES (15), (16), (17), (18), (19): Xaa is A or G
  MOD_RES (20), (21), (22), (23): Xaa is A or G or is absent

SEQ ID NO: 33447 - protein, 38 aa, Artificial Sequence; identical to SEQ ID NO: 31291
  GFR-binding peptide
  MOD_RES (1), (33), (34): Xaa is C or S

SEQ ID NO: 33448 - protein, 37 aa, Artificial Sequence; identical to SEQ ID NO: 31292
  GFR-binding peptide
  MOD_RES (1), (34), (35): Xaa is C or S
  MOD_RES (12), (13), (14), (15), (16): Xaa is A or G
  MOD_RES (17), (18), (19), (20): Xaa is A or G or is absent

SEQ ID NO: 33449 - protein, 35 aa, Artificial Sequence; identical to SEQ ID NO: 31293
  GFR-binding peptide
  MOD_RES (31), (32): Xaa is C or S

SEQ ID NO: 33450 - protein, 41 aa, Artificial Sequence; identical to SEQ ID NO: 31294
  GFR-binding peptide
  MOD_RES (2), (4), (38): Xaa is C or S
  MOD_RES (16), (17), (18), (19), (20): Xaa is A or G
  MOD_RES (21), (22), (23), (24): Xaa is A or G or is absent

SEQ ID NO: 33451 - protein, 39 aa, Artificial Sequence; identical to SEQ ID NO: 31295
  GFR-binding peptide
  MOD_RES (33), (34): Xaa is C or S

SEQ ID NO: 33452 - protein, 31 aa, Artificial Sequence; identical to SEQ ID NO: 31296
  GFR-binding peptide

SEQ ID NO: 33453 - protein, 32 aa, Artificial Sequence; identical to SEQ ID NO: 31297
  GFR-binding peptide
  MOD_RES (11), (12), (13), (14), (15): Xaa is A or G
  MOD_RES (16), (17), (18), (19): Xaa is A or G or is absent

SEQ ID NO: 33454 - protein, 43 aa, Artificial Sequence; identical to SEQ ID NO: 31298
  GFR-binding peptide
  MOD_RES (2), (4), (38), (39): Xaa is C or S
  MOD_RES (16), (17), (18), (19), (20): Xaa is A or G
  MOD_RES (21), (22), (23), (24): Xaa is A or G or is absent

SEQ ID NO: 33455 - protein, 42 aa, Artificial Sequence; identical to SEQ ID NO: 31299
  GFR-binding peptide
  MOD_RES (2), (36), (37): Xaa is C or S
  MOD_RES (14), (15), (16), (17), (18): Xaa is A or G
  MOD_RES (19), (20), (21), (22): Xaa is A or G or is absent

SEQ ID NO: 33456 - protein, 38 aa, Artificial Sequence; identical to SEQ ID NO: 31300
  GFR-binding peptide
  MOD_RES (1), (3), (35), (36): Xaa is C or S

SEQ ID NO: 33457 - protein, 32 aa, Artificial Sequence; identical to SEQ ID NO: 31301
  GFR-binding peptide
  MOD_RES (11), (12), (13), (14), (15): Xaa is A or G
  MOD_RES (16), (17), (18), (19): Xaa is A or G or is absent

SEQ ID NO: 33458 - protein, 38 aa, Artificial Sequence; identical to SEQ ID NO: 31302
  GFR-binding peptide
  MOD_RES (1), (3), (35), (36): Xaa is C or S

SEQ ID NO: 33459 - protein, 33 aa, Artificial Sequence; identical to SEQ ID NO: 31303
  GFR-binding peptide
  MOD_RES (33), (33): Xaa is C or S
  MOD_RES (11), (12), (13), (14), (15): Xaa is A or G
  MOD_RES (16), (17), (18), (19): Xaa is A or G or is absent

SEQ ID NO: 33460 - protein, 39 aa, Artificial Sequence; identical to SEQ ID NO: 31304
  GFR-binding peptide
  MOD_RES (2), (4), (38), (39): Xaa is C or S
  MOD_RES (16), (17), (18), (19), (20): Xaa is A or G
  MOD_RES (21), (22), (23), (24): Xaa is A or G or is absent

SEQ ID NO: 33461 - protein, 34 aa, Artificial Sequence; identical to SEQ ID NO: 31305
  GFR-binding peptide
  MOD_RES (2), (34): Xaa is C or S

SEQ ID NO: 33462 - protein, 35 aa, Artificial Sequence; identical to SEQ ID NO: 31306
  GFR-binding peptide
  MOD_RES (2), (34), (35): Xaa is C or S

SEQ ID NO: 33463 - protein, 31 aa, Artificial Sequence; identical to SEQ ID NO: 31307
  GFR-binding peptide

SEQ ID NO: 33464 - protein, 38 aa, Artificial Sequence; identical to SEQ ID NO: 31308
  GFR-binding peptide
  MOD_RES (2), (4), (36), (37): Xaa is C or S

SEQ ID NO: 33465 - protein, 40 aa, Artificial Sequence; identical to SEQ ID NO: 31309
  GFR-binding peptide
  MOD_RES (2), (4), (36), (37): Xaa is C or S

SEQ ID NO: 33466 - protein, 37 aa, Artificial Sequence; identical to SEQ ID NO: 31310
  GFR-binding peptide
  MOD_RES (2), (4): Xaa is C or S
  MOD_RES (16), (17), (18), (19), (20): Xaa is A or G
  MOD_RES (21), (22), (23), (24): Xaa is A or G or is absent

SEQ ID NO: 33467 - protein, 40 aa, Artificial Sequence; identical to SEQ ID NO: 31311
  GFR-binding peptide
  MOD_RES (2), (34), (35): Xaa is C or S

SEQ ID NO: 33468 - protein, 36 aa, Artificial Sequence; identical to SEQ ID NO: 31312
  GFR-binding peptide
  MOD_RES (2), (34), (35): Xaa is C or S

SEQ ID NO: 33469 - protein, 34 aa, Artificial Sequence; identical to SEQ ID NO: 31313
  GFR-binding peptide
  MOD_RES (1), (3): Xaa is C or S

SEQ ID NO: 33470 - protein, 37 aa, Artificial Sequence; identical to SEQ ID NO: 31314
  GFR-binding peptide
  MOD_RES (31), (32): Xaa is C or S

SEQ ID NO: 33471 - protein, 39 aa, Artificial Sequence; identical to SEQ ID NO: 31315
  GFR-binding peptide
  MOD_RES (2), (34), (35): Xaa is C or S

SEQ ID NO: 33472 - protein, 32 aa, Artificial Sequence; identical to SEQ ID NO: 31316
  GFR-binding peptide
  MOD_RES (32), (32): Xaa is C or S

SEQ ID NO: 33473 - protein, 35 aa, Artificial Sequence; identical to SEQ ID NO: 31317
  GFR-binding peptide
  MOD_RES (1), (3), (35): Xaa is C or S

SEQ ID NO: 33474 - protein, 36 aa, Artificial Sequence; identical to SEQ ID NO: 31318
  GFR-binding peptide
  MOD_RES (32), (33): Xaa is C or S

SEQ ID NO: 33475 - protein, 40 aa, Artificial Sequence; identical to SEQ ID NO: 31319
  GFR-binding peptide
  MOD_RES (2), (36), (37): Xaa is C or S
  MOD_RES (14), (15), (16), (17), (18): Xaa is A or G
  MOD_RES (19), (20), (21), (22): Xaa is A or G or is absent

SEQ ID NO: 33476 - protein, 35 aa, Artificial Sequence; identical to SEQ ID NO: 31320
  GFR-binding peptide
  MOD_RES (1), (32), (33): Xaa is C or S

SEQ ID NO: 33477 - protein, 36 aa, Artificial Sequence; identical to SEQ ID NO: 31321
  GFR-binding peptide
  MOD_RES (31), (31): Xaa is C or S

SEQ ID NO: 33478 - protein, 39 aa, Artificial Sequence; identical to SEQ ID NO: 31322
  GFR-binding peptide
  MOD_RES (1), (33), (34): Xaa is C or S

SEQ ID NO: 33479 - protein, 40 aa, Artificial Sequence; identical to SEQ ID NO: 31323
  GFR-binding peptide
  MOD_RES (1), (3), (34), (35): Xaa is C or S

SEQ ID NO: 33480 - protein, 38 aa, Artificial Sequence; identical to SEQ ID NO: 31324
  GFR-binding peptide
  MOD_RES (2), (34), (35): Xaa is C or S

SEQ ID NO: 33481 - protein, 36 aa, Artificial Sequence; identical to SEQ ID NO: 31325
  GFR-binding peptide
  MOD_RES (1), (33), (34): Xaa is C or S

SEQ ID NO: 33482 - protein, 36 aa, Artificial Sequence; identical to SEQ ID NO: 31326
  GFR-binding peptide
  MOD_RES (34), (35): Xaa is C or S
  MOD_RES (12), (13), (14), (15), (16): Xaa is A or G
  MOD_RES (17), (18), (19), (20): Xaa is A or G or is absent

SEQ ID NO: 33483 - protein, 36 aa, Artificial Sequence; identical to SEQ ID NO: 31327
  GFR-binding peptide
  MOD_RES (2), (33), (34): Xaa is C or S

SEQ ID NO: 33484 - protein, 40 aa, Artificial Sequence; identical to SEQ ID NO: 31328
  GFR-binding peptide
  MOD_RES (34), (35): Xaa is C or S
  MOD_RES (12), (13), (14), (15), (16): Xaa is A or G
  MOD_RES (17), (18), (19), (20): Xaa is A or G or is absent

SEQ ID NO: 33485 - protein, 32 aa, Artificial Sequence; identical to SEQ ID NO: 31329
  GFR-binding peptide
  MOD_RES (31), (32): Xaa is C or S

SEQ ID NO: 33486 - protein, 35 aa, Artificial Sequence; identical to SEQ ID NO: 31330
  GFR-binding peptide
  MOD_RES (1), (35): Xaa is C or S
  MOD_RES (13), (14), (15), (16), (17): Xaa is A or G
  MOD_RES (18), (19), (20), (21): Xaa is A or G or is absent

SEQ ID NO: 33487 - protein, 44 aa, Artificial Sequence; identical to SEQ ID NO: 31331
  GFR-binding peptide
  MOD_RES (2), (4), (38), (39): Xaa is C or S
  MOD_RES (16), (17), (18), (19), (20): Xaa is A or G
  MOD_RES (21), (22), (23), (24): Xaa is A or G or is absent

SEQ ID NO: 33488 - protein, 39 aa, Artificial Sequence; identical to SEQ ID NO: 31332
  GFR-binding peptide
  MOD_RES (33), (34): Xaa is C or S
  MOD_RES (11), (12), (13), (14), (15): Xaa is A or G
  MOD_RES (16), (17), (18), (19): Xaa is A or G or is absent

SEQ ID NO: 33489 - protein, 34 aa, Artificial Sequence; identical to SEQ ID NO: 31333
  GFR-binding peptide
  MOD_RES (1), (1): Xaa is C or S
  MOD_RES (13), (14), (15), (16), (17): Xaa is A or G
  MOD_RES (18), (19), (20), (21): Xaa is A or G or is absent

SEQ ID NO: 33490 - protein, 38 aa, Artificial Sequence; identical to SEQ ID NO: 31334
  GFR-binding peptide
  MOD_RES (33), (34): Xaa is C or S
  MOD_RES (11), (12), (13), (14), (15): Xaa is A or G
  MOD_RES (16), (17), (18), (19): Xaa is A or G or is absent

SEQ ID NO: 33491 - protein, 38 aa, Artificial Sequence; identical to SEQ ID NO: 31335
  GFR-binding peptide
  MOD_RES (34), (35): Xaa is C or S
  MOD_RES (12), (13), (14), (15), (16): Xaa is A or G
  MOD_RES (17), (18), (19), (20): Xaa is A or G or is absent

SEQ ID NO: 33492 - protein, 36 aa, Artificial Sequence; identical to SEQ ID NO: 31336
  GFR-binding peptide
  MOD_RES (2), (4): Xaa is C or S
  MOD_RES (15), (16), (17), (18), (19): Xaa is A or G
  MOD_RES (20), (21), (22), (23): Xaa is A or G or is absent

SEQ ID NO: 33493 - protein, 33 aa, Artificial Sequence; identical to SEQ ID NO: 31337
  GFR-binding peptide
  MOD_RES (32), (33): Xaa is C or S

SEQ ID NO: 33494 - protein, 35 aa, Artificial Sequence; identical to SEQ ID NO: 31338
  GFR-binding peptide
  MOD_RES (1), (3), (35): Xaa is C or S

SEQ ID NO: 33495 - protein, 37 aa, Artificial Sequence; identical to SEQ ID NO: 31339
  GFR-binding peptide
  MOD_RES (2), (34), (35): Xaa is C or S

SEQ ID NO: 33496 - protein, 37 aa, Artificial Sequence; identical to SEQ ID NO: 31340
  GFR-binding peptide
  MOD_RES (32), (33): Xaa is C or S

SEQ ID NO: 33497 - protein, 37 aa, Artificial Sequence; identical to SEQ ID NO: 31341
  GFR-binding peptide
  MOD_RES (1), (36), (37): Xaa is C or S
  MOD_RES (14), (15), (16), (17), (18): Xaa is A or G
  MOD_RES (19), (20), (21), (22): Xaa is A or G or is absent

SEQ ID NO: 33498 - protein, 33 aa, Artificial Sequence; identical to SEQ ID NO: 31342
  GFR-binding peptide
  MOD_RES (33), (33): Xaa is C or S
  MOD_RES (11), (12), (13), (14), (15): Xaa is A or G
  MOD_RES (16), (17), (18), (19): Xaa is A or G or is absent

SEQ ID NO: 33499 - protein, 39 aa, Artificial Sequence; identical to SEQ ID NO: 31343
  GFR-binding peptide
  MOD_RES (1), (3), (34), (35): Xaa is C or S

SEQ ID NO: 33500 - protein, 34 aa, Artificial Sequence; identical to SEQ ID NO: 31344
  GFR-binding peptide
  MOD_RES (31), (32): Xaa is C or S

SEQ ID NO: 33501 - protein, 37 aa, Artificial Sequence; identical to SEQ ID NO: 31345
  GFR-binding peptide
  MOD_RES (1), (3), (37): Xaa is C or S
  MOD_RES (15), (16), (17), (18), (19): Xaa is A or G
  MOD_RES (20), (21), (22), (23): Xaa is A or G or is absent

SEQ ID NO: 33502 - protein, 42 aa, Artificial Sequence; identical to SEQ ID NO: 31346
  GFR-binding peptide
  MOD_RES (2), (4), (36), (37): Xaa is C or S

SEQ ID NO: 33503 - protein, 35 aa, Artificial Sequence; identical to SEQ ID NO: 31347
  GFR-binding peptide
  MOD_RES (35), (35): Xaa is C or S
  MOD_RES (13), (14), (15), (16), (17): Xaa is A or G
  MOD_RES (18), (19), (20), (21): Xaa is A or G or is absent

SEQ ID NO: 33504 - protein, 36 aa, Artificial Sequence; identical to SEQ ID NO: 31348
  GFR-binding peptide
  MOD_RES (2), (34), (35): Xaa is C or S

SEQ ID NO: 33505 - protein, 38 aa, Artificial Sequence; identical to SEQ ID NO: 31349
  GFR-binding peptide
  MOD_RES (32), (33): Xaa is C or S

SEQ ID NO: 33506 - protein, 38 aa, Artificial Sequence; identical to SEQ ID NO: 31350
  GFR-binding peptide
  MOD_RES (1), (3), (37), (38): Xaa is C or S
  MOD_RES (15), (16), (17), (18), (19): Xaa is A or G
  MOD_RES (20), (21), (22), (23): Xaa is A or G or is absent

SEQ ID NO: 33507 - protein, 36 aa, Artificial Sequence; identical to SEQ ID NO: 31351
  GFR-binding peptide
  MOD_RES (1), (35), (36): Xaa is C or S
  MOD_RES (13), (14), (15), (16), (17): Xaa is A or G
  MOD_RES (18), (19), (20), (21): Xaa is A or G or is absent

SEQ ID NO: 33508 - protein, 36 aa, Artificial Sequence; identical to SEQ ID NO: 31352
  GFR-binding peptide
  MOD_RES (31), (32): Xaa is C or S

SEQ ID NO: 33509 - protein, 43 aa, Artificial Sequence; identical to SEQ ID NO: 31353
  GFR-binding peptide
  MOD_RES (1), (3), (37), (38): Xaa is C or S
  MOD_RES (15), (16), (17), (18), (19): Xaa is A or G
  MOD_RES (20), (21), (22), (23): Xaa is A or G or is absent

SEQ ID NO: 33510 - protein, 37 aa, Artificial Sequence; identical to SEQ ID NO: 31354
  GFR-binding peptide
  MOD_RES (33), (34): Xaa is C or S
  MOD_RES (11), (12), (13), (14), (15): Xaa is A or G
  MOD_RES (16), (17), (18), (19): Xaa is A or G or is absent

SEQ ID NO: 33511 - protein, 35 aa, Artificial Sequence; identical to SEQ ID NO: 31355
  GFR-binding peptide
  MOD_RES (34), (35): Xaa is C or S
  MOD_RES (12), (13), (14), (15), (16): Xaa is A or G
  MOD_RES (17), (18), (19), (20): Xaa is A or G or is absent

SEQ ID NO: 33512 - protein, 31 aa, Artificial Sequence; identical to SEQ ID NO: 31356
  GFR-binding peptide

SEQ ID NO: 33513 - protein, 41 aa, Artificial Sequence; identical to SEQ ID NO: 31357
  GFR-binding peptide
  MOD_RES (2), (4), (38), (39): Xaa is C or S
  MOD_RES (16), (17), (18), (19), (20): Xaa is A or G
  MOD_RES (21), (22), (23), (24): Xaa is A or G or is absent

SEQ ID NO: 33514 - protein, 40 aa, Artificial Sequence; identical to SEQ ID NO: 31358
  GFR-binding peptide
  MOD_RES (1), (3), (35), (36): Xaa is C or S

SEQ ID NO: 33515 - protein, 37 aa, Artificial Sequence; identical to SEQ ID NO: 31359
  GFR-binding peptide
  MOD_RES (1), (33), (34): Xaa is C or S

SEQ ID NO: 33516 - protein, 37 aa, Artificial Sequence; identical to SEQ ID NO: 31360
  GFR-binding peptide
  MOD_RES (31), (32): Xaa is C or S

SEQ ID NO: 33517 - protein, 34 aa, Artificial Sequence; identical to SEQ ID NO: 31361
  GFR-binding peptide
  MOD_RES (1), (32), (33): Xaa is C or S

SEQ ID NO: 33518 - protein, 36 aa, Artificial Sequence; identical to SEQ ID NO: 31362
  GFR-binding peptide
  MOD_RES (34), (35): Xaa is C or S
  MOD_RES (12), (13), (14), (15), (16): Xaa is A or G
  MOD_RES (17), (18), (19), (20): Xaa is A or G or is absent

SEQ ID NO: 33519 - protein, 31 aa, Artificial Sequence; identical to SEQ ID NO: 31363
  GFR-binding peptide
  MOD_RES (31), (31): Xaa is C or S

SEQ ID NO: 33520 - protein, 41 aa, Artificial Sequence; identical to SEQ ID NO: 31364
  GFR-binding peptide
  MOD_RES (2), (35), (36): Xaa is C or S

SEQ ID NO: 33521 - protein, 37 aa, Artificial Sequence; identical to SEQ ID NO: 31365
  GFR-binding peptide
  MOD_RES (35), (36): Xaa is C or S
  MOD_RES (13), (14), (15), (16), (17): Xaa is A or G
  MOD_RES (18), (19), (20), (21): Xaa is A or G or is absent

SEQ ID NO: 33522 - protein, 37 aa, Artificial Sequence; identical to SEQ ID NO: 31366
  GFR-binding peptide
  MOD_RES (2), (36), (37): Xaa is C or S
  MOD_RES (14), (15), (16), (17), (18): Xaa is A or G
  MOD_RES (19), (20), (21), (22): Xaa is A or G or is absent

SEQ ID NO: 33523 - protein, 32 aa, Artificial Sequence; identical to SEQ ID NO: 31367
  GFR-binding peptide
  MOD_RES (31), (32): Xaa is C or S

SEQ ID NO: 33524 - protein, 34 aa, Artificial Sequence; identical to SEQ ID NO: 31368
  GFR-binding peptide
  MOD_RES (33), (34): Xaa is C or S
  MOD_RES (11), (12), (13), (14), (15): Xaa is A or G
  MOD_RES (16), (17), (18), (19): Xaa is A or G or is absent

SEQ ID NO: 33525 - protein, 38 aa, Artificial Sequence; identical to SEQ ID NO: 31369
  GFR-binding peptide
  MOD_RES (1), (3), (36), (37): Xaa is C or S

SEQ ID NO: 33526 - protein, 36 aa, Artificial Sequence; identical to SEQ ID NO: 31370
  GFR-binding peptide
  MOD_RES (2), (34), (35): Xaa is C or S

SEQ ID NO: 33527 - protein, 34 aa, Artificial Sequence; identical to SEQ ID NO: 31371
  GFR-binding peptide
  MOD_RES (31), (32): Xaa is C or S

SEQ ID NO: 33528 - protein, 43 aa, Artificial Sequence; identical to SEQ ID NO: 31372
  GFR-binding peptide
  MOD_RES (2), (4), (38), (39): Xaa is C or S
  MOD_RES (16), (17), (18), (19), (20): Xaa is A or G
  MOD_RES (21), (22), (23), (24): Xaa is A or G or is absent

SEQ ID NO: 33529 - protein, 32 aa, Artificial Sequence; identical to SEQ ID NO: 31373
  GFR-binding peptide
  MOD_RES (31), (32): Xaa is C or S

SEQ ID NO: 33530 - protein, 41 aa, Artificial Sequence; identical to SEQ ID NO: 31374
  GFR-binding peptide
  MOD_RES (1), (3), (35), (36): Xaa is C or S

SEQ ID NO: 33531 - protein, 36 aa, Artificial Sequence; identical to SEQ ID NO: 31375
  GFR-binding peptide
  MOD_RES (1), (3), (35), (36): Xaa is C or S

SEQ ID NO: 33532 - protein, 37 aa, Artificial Sequence; identical to SEQ ID NO: 31376
  GFR-binding peptide
  MOD_RES (34), (34): Xaa is C or S
  MOD_RES (12), (13), (14), (15), (16): Xaa is A or G
  MOD_RES (17), (18), (19), (20): Xaa is A or G or is absent

SEQ ID NO: 33533 - protein, 38 aa, Artificial Sequence; identical to SEQ ID NO: 31377
  GFR-binding peptide
  MOD_RES (1), (33), (34): Xaa is C or S

SEQ ID NO: 33534 - protein, 38 aa, Artificial Sequence; identical to SEQ ID NO: 31378
  GFR-binding peptide
  MOD_RES (1), (35), (36): Xaa is C or S
  MOD_RES (13), (14), (15), (16), (17): Xaa is A or G
  MOD_RES (18), (19), (20), (21): Xaa is A or G or is absent

SEQ ID NO: 33535 - protein, 37 aa, Artificial Sequence; identical to SEQ ID NO: 31379
  GFR-binding peptide
  MOD_RES (1), (3), (35), (36): Xaa is C or S

SEQ ID NO: 33536 - protein, 38 aa, Artificial Sequence; identical to SEQ ID NO: 31380
  GFR-binding peptide
  MOD_RES (33), (34): Xaa is C or S
  MOD_RES (11), (12), (13), (14), (15): Xaa is A or G
  MOD_RES (16), (17), (18), (19): Xaa is A or G or is absent

SEQ ID NO: 33537 - protein, 35 aa, Artificial Sequence; identical to SEQ ID NO: 31381
  GFR-binding peptide
  MOD_RES (34), (35): Xaa is C or S
  MOD_RES (12), (13), (14), (15), (16): Xaa is A or G
  MOD_RES (17), (18), (19), (20): Xaa is A or G or is absent

SEQ ID NO: 33538 - protein, 33 aa, Artificial Sequence; identical to SEQ ID NO: 31382
  GFR-binding peptide
  MOD_RES (12), (13), (14), (15), (16): Xaa is A or G
  MOD_RES (17), (18), (19), (20): Xaa is A or G or is absent

SEQ ID NO: 33539 - protein, 34 aa, Artificial Sequence; identical to SEQ ID NO: 31383
  GFR-binding peptide
  MOD_RES (31), (32): Xaa is C or S

SEQ ID NO: 33540 - protein, 36 aa, Artificial Sequence; identical to SEQ ID NO: 31384
  GFR-binding peptide
  MOD_RES (33), (34): Xaa is C or S
  MOD_RES (11), (12), (13), (14), (15): Xaa is A or G
  MOD_RES (16), (17), (18), (19): Xaa is A or G or is absent

SEQ ID NO: 33541 - protein, 40 aa, Artificial Sequence; identical to SEQ ID NO: 31385
  GFR-binding peptide
  MOD_RES (2), (4), (36): Xaa is C or S

SEQ ID NO: 33542 - protein, 37 aa, Artificial Sequence; identical to SEQ ID NO: 31386
  GFR-binding peptide
  MOD_RES (2), (4), (36), (37): Xaa is C or S

SEQ ID NO: 33543 - protein, 39 aa, Artificial Sequence; identical to SEQ ID NO: 31387
  GFR-binding peptide
  MOD_RES (1), (3), (35), (36): Xaa is C or S

SEQ ID NO: 33544 - protein, 42 aa, Artificial Sequence; identical to SEQ ID NO: 31388
  GFR-binding peptide
  MOD_RES (1), (3), (38), (39): Xaa is C or S
  MOD_RES (16), (17), (18), (19), (20): Xaa is A or G
  MOD_RES (21), (22), (23), (24): Xaa is A or G or is absent

SEQ ID NO: 33545 - protein, 39 aa, Artificial Sequence; identical to SEQ ID NO: 31389
  GFR-binding peptide
  MOD_RES (34), (35): Xaa is C or S
  MOD_RES (12), (13), (14), (15), (16): Xaa is A or G
  MOD_RES (17), (18), (19), (20): Xaa is A or G or is absent

SEQ ID NO: 33546 - protein, 34 aa, Artificial Sequence; identical to SEQ ID NO: 31390
  GFR-binding peptide
  MOD_RES (33), (34): Xaa is C or S
  MOD_RES (11), (12), (13), (14), (15): Xaa is A or G
  MOD_RES (16), (17), (18), (19): Xaa is A or G or is absent

SEQ ID NO: 33547 - protein, 37 aa, Artificial Sequence; identical to SEQ ID NO: 31391
  GFR-binding peptide
  MOD_RES (34), (35): Xaa is C or S
  MOD_RES (12), (13), (14), (15), (16): Xaa is A or G
  MOD_RES (17), (18), (19), (20): Xaa is A or G or is absent

SEQ ID NO: 33548 - protein, 34 aa, Artificial Sequence; identical to SEQ ID NO: 31392
  GFR-binding peptide
  MOD_RES (32), (33): Xaa is C or S

SEQ ID NO: 33549 - protein, 38 aa, Artificial Sequence; identical to SEQ ID NO: 31393
  GFR-binding peptide
  MOD_RES (2), (4), (36), (37): Xaa is C or S

SEQ ID NO: 33550 - protein, 33 aa, Artificial Sequence; identical to SEQ ID NO: 31394
  GFR-binding peptide
  MOD_RES (31), (32): Xaa is C or S

SEQ ID NO: 33551 - protein, 38 aa, Artificial Sequence; identical to SEQ ID NO: 31395
  GFR-binding peptide
  MOD_RES (2), (4), (38): Xaa is C or S
  MOD_RES (16), (17), (18), (19), (20): Xaa is A or G
  MOD_RES (21), (22), (23), (24): Xaa is A or G or is absent

SEQ ID NO: 33552 - protein, 33 aa, Artificial Sequence; identical to SEQ ID NO: 31396
  GFR-binding peptide
  MOD_RES (2), (2): Xaa is C or S

SEQ ID NO: 33553 - protein, 37 aa, Artificial Sequence; identical to SEQ ID NO: 31397
  GFR-binding peptide
  MOD_RES (1), (35), (36): Xaa is C or S
  MOD_RES (13), (14), (15), (16), (17): Xaa is A or G
  MOD_RES (18), (19), (20), (21): Xaa is A or G or is absent

SEQ ID NO: 33554 - protein, 39 aa, Artificial Sequence; identical to SEQ ID NO: 31398
  GFR-binding peptide
  MOD_RES (2), (4), (38), (39): Xaa is C or S
  MOD_RES (16), (17), (18), (19), (20): Xaa is A or G
  MOD_RES (21), (22), (23), (24): Xaa is A or G or is absent

SEQ ID NO: 33555 - protein, 41 aa, Artificial Sequence; identical to SEQ ID NO: 31399
  GFR-binding peptide
  MOD_RES (2), (4), (38), (39): Xaa is C or S
  MOD_RES (16), (17), (18), (19), (20): Xaa is A or G
  MOD_RES (21), (22), (23), (24): Xaa is A or G or is absent

SEQ ID NO: 33556 - protein, 40 aa, Artificial Sequence; identical to SEQ ID NO: 31400
  GFR-binding peptide
  MOD_RES (1), (3), (38), (39): Xaa is C or S
  MOD_RES (16), (17), (18), (19), (20): Xaa is A or G
  MOD_RES (21), (22), (23), (24): Xaa is A or G or is absent

SEQ ID NO: 33557 - protein, 39 aa, Artificial Sequence; identical to SEQ ID NO: 31401
  GFR-binding peptide
  MOD_RES (1), (3), (35), (36): Xaa is C or S

SEQ ID NO: 33558 - protein, 33 aa, Artificial Sequence; identical to SEQ ID NO: 31402
  GFR-binding peptide
  MOD_RES (2), (2): Xaa is C or S

SEQ ID NO: 33559 - protein, 35 aa, Artificial Sequence; identical to SEQ ID NO: 31403
  GFR-binding peptide
  MOD_RES (2), (2): Xaa is C or S
  MOD_RES (14), (15), (16), (17), (18): Xaa is A or G
  MOD_RES (19), (20), (21), (22): Xaa is A or G or is absent

SEQ ID NO: 33560 - protein, 33 aa, Artificial Sequence; identical to SEQ ID NO: 31404
  GFR-binding peptide
  MOD_RES (2), (2): Xaa is C or S

SEQ ID NO: 33561 - protein, 39 aa, Artificial Sequence; identical to SEQ ID NO: 31405
  GFR-binding peptide
  MOD_RES (1), (3), (37), (38): Xaa is C or S
  MOD_RES (15), (16), (17), (18), (19): Xaa is A or G
  MOD_RES (20), (21), (22), (23): Xaa is A or G or is absent

SEQ ID NO: 33562 - protein, 37 aa, Artificial Sequence; identical to SEQ ID NO: 31406
  GFR-binding peptide
  MOD_RES (1), (35), (36): Xaa is C or S
  MOD_RES (13), (14), (15), (16), (17): Xaa is A or G
  MOD_RES (18), (19), (20), (21): Xaa is A or G or is absent

SEQ ID NO: 33563 - protein, 33 aa, Artificial Sequence; identical to SEQ ID NO: 31407
  GFR-binding peptide
  MOD_RES (1), (33): Xaa is C or S

SEQ ID NO: 33564 - protein, 36 aa, Artificial Sequence; identical to SEQ ID NO: 31408
  GFR-binding peptide
  MOD_RES (1), (35), (36): Xaa is C or S
  MOD_RES (13), (14), (15), (16), (17): Xaa is A or G
  MOD_RES (18), (19), (20), (21): Xaa is A or G or is absent

SEQ ID NO: 33565 - protein, 35 aa, Artificial Sequence; identical to SEQ ID NO: 31409
  GFR-binding peptide
  MOD_RES (33), (34): Xaa is C or S

SEQ ID NO: 33566 - protein, 42 aa, Artificial Sequence; identical to SEQ ID NO: 31410
  GFR-binding peptide
  MOD_RES (1), (36), (37): Xaa is C or S
  MOD_RES (14), (15), (16), (17), (18): Xaa is A or G
  MOD_RES (19), (20), (21), (22): Xaa is A or G or is absent

SEQ ID NO: 33567 - protein, 39 aa, Artificial Sequence; identical to SEQ ID NO: 31411
  GFR-binding peptide
  MOD_RES (1), (3), (35), (36): Xaa is C or S

SEQ ID NO: 33568 - protein, 33 aa, Artificial Sequence; identical to SEQ ID NO: 31412
  GFR-binding peptide
  MOD_RES (12), (13), (14), (15), (16): Xaa is A or G
  MOD_RES (17), (18), (19), (20): Xaa is A or G or is absent

SEQ ID NO: 33569 - protein, 38 aa, Artificial Sequence; identical to SEQ ID NO: 31413
  GFR-binding peptide
  MOD_RES (33), (34): Xaa is C or S
  MOD_RES (11), (12), (13), (14), (15): Xaa is A or G
  MOD_RES (16), (17), (18), (19): Xaa is A or G or is absent

SEQ ID NO: 33570 - protein, 37 aa, Artificial Sequence; identical to SEQ ID NO: 31414
  GFR-binding peptide
  MOD_RES (2), (36), (37): Xaa is C or S
  MOD_RES (14), (15), (16), (17), (18): Xaa is A or G
  MOD_RES (19), (20), (21), (22): Xaa is A or G or is absent

SEQ ID NO: 33571 - protein, 38 aa, Artificial Sequence; identical to SEQ ID NO: 31415
  GFR-binding peptide
  MOD_RES (34), (35): Xaa is C or S
  MOD_RES (12), (13), (14), (15), (16): Xaa is A or G
  MOD_RES (17), (18), (19), (20): Xaa is A or G or is absent

SEQ ID NO: 33572 - protein, 33 aa, Artificial Sequence; identical to SEQ ID NO: 31416
  GFR-binding peptide
  MOD_RES (2), (2): Xaa is C or S

SEQ ID NO: 33573 - protein, 35 aa, Artificial Sequence; identical to SEQ ID NO: 31417
  GFR-binding peptide
  MOD_RES (32), (33): Xaa is C or S

SEQ ID NO: 33574 - protein, 35 aa, Artificial Sequence; identical to SEQ ID NO: 31418
  GFR-binding peptide
  MOD_RES (1), (3), (34), (35): Xaa is C or S

SEQ ID NO: 33575 - protein, 42 aa, Artificial Sequence; identical to SEQ ID NO: 31419
  GFR-binding peptide
  MOD_RES (2), (4), (36), (37): Xaa is C or S

SEQ ID NO: 33576 - protein, 35 aa, Artificial Sequence; identical to SEQ ID NO: 31420
  GFR-binding peptide
  MOD_RES (33), (34): Xaa is C or S
  MOD_RES (11), (12), (13), (14), (15): Xaa is A or G
  MOD_RES (16), (17), (18), (19): Xaa is A or G or is absent

SEQ ID NO: 33577 - protein, 39 aa, Artificial Sequence; identical to SEQ ID NO: 31421
  GFR-binding peptide
  MOD_RES (1), (3), (37), (38): Xaa is C or S
  MOD_RES (15), (16), (17), (18), (19): Xaa is A or G
  MOD_RES (20), (21), (22), (23): Xaa is A or G or is absent

SEQ ID NO: 33578 - protein, 33 aa, Artificial Sequence; identical to SEQ ID NO: 31422
  GFR-binding peptide
  MOD_RES (32), (33): Xaa is C or S

SEQ ID NO: 33579 - protein, 38 aa, Artificial Sequence; identical to SEQ ID NO: 31423
  GFR-binding peptide
  MOD_RES (34), (35): Xaa is C or S
  MOD_RES (12), (13), (14), (15), (16): Xaa is A or G
  MOD_RES (17), (18), (19), (20): Xaa is A or G or is absent

SEQ ID NO: 33580 - protein, 35 aa, Artificial Sequence; identical to SEQ ID NO: 31424
  GFR-binding peptide
  MOD_RES (1), (3), (35): Xaa is C or S

SEQ ID NO: 33581 - protein, 40 aa, Artificial Sequence; identical to SEQ ID NO: 31425
  GFR-binding peptide
  MOD_RES (2), (4), (36), (37): Xaa is C or S

SEQ ID NO: 33582 - protein, 41 aa, Artificial Sequence; identical to SEQ ID NO: 31426
  GFR-binding peptide
  MOD_RES (1), (3), (35), (36): Xaa is C or S

SEQ ID NO: 33583 - protein, 32 aa, Artificial Sequence; identical to SEQ ID NO: 31427
  GFR-binding peptide
  MOD_RES (31), (32): Xaa is C or S

SEQ ID NO: 33584 - protein, 43 aa, Artificial Sequence; identical to SEQ ID NO: 31428
  GFR-binding peptide
  MOD_RES (1), (3), (37), (38): Xaa is C or S
  MOD_RES (15), (16), (17), (18), (19): Xaa is A or G
  MOD_RES (20), (21), (22), (23): Xaa is A or G or is absent

SEQ ID NO: 33585 - protein, 38 aa, Artificial Sequence; identical to SEQ ID NO: 31429
  GFR-binding peptide
  MOD_RES (1), (3), (35), (36): Xaa is C or S

SEQ ID NO: 33586 - protein, 38 aa, Artificial Sequence; identical to SEQ ID NO: 31430
  GFR-binding peptide
  MOD_RES (32), (33): Xaa is C or S

SEQ ID NO: 33587 - protein, 44 aa, Artificial Sequence; identical to SEQ ID NO: 31431
  GFR-binding peptide
  MOD_RES (2), (4), (38), (39): Xaa is C or S
  MOD_RES (16), (17), (18), (19), (20): Xaa is A or G
  MOD_RES (21), (22), (23), (24): Xaa is A or G or is absent

SEQ ID NO: 33588 - protein, 41 aa, Artificial Sequence; identical to SEQ ID NO: 31432
  GFR-binding peptide
  MOD_RES (2), (4), (36), (37): Xaa is C or S

SEQ ID NO: 33589 - protein, 36 aa, Artificial Sequence; identical to SEQ ID NO: 31433
  GFR-binding peptide
  MOD_RES (2), (4): Xaa is C or S

SEQ ID NO: 33590 - protein, 41 aa, Artificial Sequence; identical to SEQ ID NO: 31434
  GFR-binding peptide
  MOD_RES (1), (3), (35), (36): Xaa is C or S

SEQ ID NO: 33591 - protein, 33 aa, Artificial Sequence; identical to SEQ ID NO: 31435
  GFR-binding peptide
  MOD_RES (33), (33): Xaa is C or S
  MOD_RES (11), (12), (13), (14), (15): Xaa is A or G
  MOD_RES (16), (17), (18), (19): Xaa is A or G or is absent

SEQ ID NO: 33592 - protein, 35 aa, Artificial Sequence; identical to SEQ ID NO: 31436
  GFR-binding peptide
  MOD_RES (2), (33), (34): Xaa is C or S

SEQ ID NO: 33593 - protein, 34 aa, Artificial Sequence; identical to SEQ ID NO: 31437
  GFR-binding peptide
  MOD_RES (1), (33), (34): Xaa is C or S

SEQ ID NO: 33594 - protein, 35 aa, Artificial Sequence; identical to SEQ ID NO: 31438
  GFR-binding peptide
  MOD_RES (32), (33): Xaa is C or S

SEQ ID NO: 33595 - protein, 43 aa, Artificial Sequence; identical to SEQ ID NO: 31439
  GFR-binding peptide
  MOD_RES (2), (37), (38): Xaa is C or S
  MOD_RES (15), (16), (17), (18), (19): Xaa is A or G
  MOD_RES (20), (21), (22), (23): Xaa is A or G or is absent

SEQ ID NO: 33596 - protein, 43 aa, Artificial Sequence; identical to SEQ ID NO: 31440
  GFR-binding peptide
  MOD_RES (2), (4), (38), (39): Xaa is C or S
  MOD_RES (16), (17), (18), (19), (20): Xaa is A or G
  MOD_RES (21), (22), (23), (24): Xaa is A or G or is absent

SEQ ID NO: 33597 - protein, 40 aa, Artificial Sequence; identical to SEQ ID NO: 31441
  GFR-binding peptide
  MOD_RES (1), (3), (35), (36): Xaa is C or S

SEQ ID NO: 33598 - protein, 36 aa, Artificial Sequence; identical to SEQ ID NO: 31442
  GFR-binding peptide
  MOD_RES (1), (3): Xaa is C or S
  MOD_RES (15), (16), (17), (18), (19): Xaa is A or G
  MOD_RES (20), (21), (22), (23): Xaa is A or G or is absent

SEQ ID NO: 33599 - protein, 33 aa, Artificial Sequence; identical to SEQ ID NO: 31443
  GFR-binding peptide
  MOD_RES (33), (33): Xaa is C or S

SEQ ID NO: 33600 - protein, 38 aa, Artificial Sequence; identical to SEQ ID NO: 31444
  GFR-binding peptide
  MOD_RES (33), (33): Xaa is C or S
  MOD_RES (11), (12), (13), (14), (15): Xaa is A or G
  MOD_RES (16), (17), (18), (19): Xaa is A or G or is absent

SEQ ID NO: 33601 - protein, 44 aa, Artificial Sequence; identical to SEQ ID NO: 31445
  GFR-binding peptide
  MOD_RES (1), (3), (38), (39): Xaa is C or S
  MOD_RES (16), (17), (18), (19), (20): Xaa is A or G
  MOD_RES (21), (22), (23), (24): Xaa is A or G or is absent

SEQ ID NO: 33602 - protein, 38 aa, Artificial Sequence; identical to SEQ ID NO: 31446
  GFR-binding peptide
  MOD_RES (2), (34), (35): Xaa is C or S

SEQ ID NO: 33603 - protein, 39 aa, Artificial Sequence; identical to SEQ ID NO: 31447
  GFR-binding peptide
  MOD_RES (35), (36): Xaa is C or S
  MOD_RES (13), (14), (15), (16), (17): Xaa is A or G
  MOD_RES (18), (19), (20), (21): Xaa is A or G or is absent

SEQ ID NO: 33604 - protein, 41 aa, Artificial Sequence; identical to SEQ ID NO: 31448
  GFR-binding peptide
  MOD_RES (1), (35), (36): Xaa is C or S
  MOD_RES (13), (14), (15), (16), (17): Xaa is A or G
  MOD_RES (18), (19), (20), (21): Xaa is A or G or is absent

SEQ ID NO: 33605 - protein, 41 aa, Artificial Sequence; identical to SEQ ID NO: 31449
  GFR-binding peptide
  MOD_RES (1), (35), (36): Xaa is C or S
  MOD_RES (13), (14), (15), (16), (17): Xaa is A or G
  MOD_RES (18), (19), (20), (21): Xaa is A or G or is absent

SEQ ID NO: 33606 - protein, 33 aa, Artificial Sequence; identical to SEQ ID NO: 31450
  GFR-binding peptide
  MOD_RES (1), (33): Xaa is C or S

SEQ ID NO: 33607 - protein, 34 aa, Artificial Sequence; identical to SEQ ID NO: 31451
  GFR-binding peptide
  MOD_RES (1), (1): Xaa is C or S
  MOD_RES (13), (14), (15), (16), (17): Xaa is A or G
  MOD_RES (18), (19), (20), (21): Xaa is A or G or is absent

SEQ ID NO: 33608 - protein, 33 aa, Artificial Sequence; identical to SEQ ID NO: 31452
  GFR-binding peptide
  MOD_RES (1), (1): Xaa is C or S
  MOD_RES (12), (13), (14), (15), (16): Xaa is A or G
  MOD_RES (17), (18), (19), (20): Xaa is A or G or is absent

SEQ ID NO: 33609 - protein, 35 aa, Artificial Sequence; identical to SEQ ID NO: 31453
  GFR-binding peptide
  MOD_RES (2), (4): Xaa is C or S

SEQ ID NO: 33610 - protein, 39 aa, Artificial Sequence; identical to SEQ ID NO: 31454
  GFR-binding peptide
  MOD_RES (1), (3), (36), (37): Xaa is C or S

SEQ ID NO: 33611 - protein, 34 aa, Artificial Sequence; identical to SEQ ID NO: 31455
  GFR-binding peptide
  MOD_RES (32), (33): Xaa is C or S

SEQ ID NO: 33612 - protein, 32 aa, Artificial Sequence; identical to SEQ ID NO: 31456
  GFR-binding peptide
  MOD_RES (32), (32): Xaa is C or S

SEQ ID NO: 33613 - protein, 39 aa, Artificial Sequence; identical to SEQ ID NO: 31457
  GFR-binding peptide
  MOD_RES (1), (3), (35), (36): Xaa is C or S

SEQ ID NO: 33614 - protein, 38 aa, Artificial Sequence; identical to SEQ ID NO: 31458
  GFR-binding peptide
  MOD_RES (33), (34): Xaa is C or S
  MOD_RES (11), (12), (13), (14), (15): Xaa is A or G
  MOD_RES (16), (17), (18), (19): Xaa is A or G or is absent

SEQ ID NO: 33615 - protein, 42 aa, Artificial Sequence; identical to SEQ ID NO: 31459
  GFR-binding peptide
  MOD_RES (1), (3), (37), (38): Xaa is C or S
  MOD_RES (15), (16), (17), (18), (19): Xaa is A or G
  MOD_RES (20), (21), (22), (23): Xaa is A or G or is absent

SEQ ID NO: 33616 - protein, 36 aa, Artificial Sequence; identical to SEQ ID NO: 31460
  GFR-binding peptide
  MOD_RES (1), (33), (34): Xaa is C or S

SEQ ID NO: 33617 - protein, 41 aa, Artificial Sequence; identical to SEQ ID NO: 31461
  GFR-binding peptide
  MOD_RES (2), (36), (37): Xaa is C or S
  MOD_RES (14), (15), (16), (17), (18): Xaa is A or G
  MOD_RES (19), (20), (21), (22): Xaa is A or G or is absent

SEQ ID NO: 33618 - protein, 41 aa, Artificial Sequence; identical to SEQ ID NO: 31462
  GFR-binding peptide
  MOD_RES (1), (36), (37): Xaa is C or S
  MOD_RES (14), (15), (16), (17), (18): Xaa is A or G
  MOD_RES (19), (20), (21), (22): Xaa is A or G or is absent

SEQ ID NO: 33619 - protein, 34 aa, Artificial Sequence; identical to SEQ ID NO: 31463
  GFR-binding peptide
  MOD_RES (33), (34): Xaa is C or S
  MOD_RES (11), (12), (13), (14), (15): Xaa is A or G
  MOD_RES (16), (17), (18), (19): Xaa is A or G or is absent

SEQ ID NO: 33620 - protein, 36 aa, Artificial Sequence; identical to SEQ ID NO: 31464
  GFR-binding peptide
  MOD_RES (2), (36): Xaa is C or S
  MOD_RES (14), (15), (16), (17), (18): Xaa is A or G
  MOD_RES (19), (20), (21), (22): Xaa is A or G or is absent

SEQ ID NO: 33621 - protein, 37 aa, Artificial Sequence; identical to SEQ ID NO: 31465
  GFR-binding peptide
  MOD_RES (33), (34): Xaa is C or S
  MOD_RES (11), (12), (13), (14), (15): Xaa is A or G
  MOD_RES (16), (17), (18), (19): Xaa is A or G or is absent

SEQ ID NO: 33622 - protein, 32 aa, Artificial Sequence; identical to SEQ ID NO: 31466
  GFR-binding peptide
  MOD_RES (31), (32): Xaa is C or S

SEQ ID NO: 33623 - protein, 38 aa, Artificial Sequence; identical to SEQ ID NO: 31467
  GFR-binding peptide
  MOD_RES (2), (4), (36), (37): Xaa is C or S

SEQ ID NO: 33624 - protein, 37 aa, Artificial Sequence; identical to SEQ ID NO: 31468
  GFR-binding peptide
  MOD_RES (2), (36), (37): Xaa is C or S
  MOD_RES (14), (15), (16), (17), (18): Xaa is A or G
  MOD_RES (19), (20), (21), (22): Xaa is A or G or is absent

SEQ ID NO: 33625 - protein, 36 aa, Artificial Sequence; identical to SEQ ID NO: 31469
  GFR-binding peptide
  MOD_RES (32), (33): Xaa is C or S

SEQ ID NO: 33626 - protein, 31 aa, Artificial Sequence; identical to SEQ ID NO: 31470
  GFR-binding peptide
  MOD_RES (1), (1): Xaa is C or S

SEQ ID NO: 33627 - protein, 34 aa, Artificial Sequence; identical to SEQ ID NO: 31471
  GFR-binding peptide
  MOD_RES (2), (4): Xaa is C or S

SEQ ID NO: 33628 - protein, 40 aa, Artificial Sequence; identical to SEQ ID NO: 31472
  GFR-binding peptide
  MOD_RES (1), (3), (37), (38): Xaa is C or S
  MOD_RES (15), (16), (17), (18), (19): Xaa is A or G
  MOD_RES (20), (21), (22), (23): Xaa is A or G or is absent

SEQ ID NO: 33629 - protein, 39 aa, Artificial Sequence; identical to SEQ ID NO: 31473
  GFR-binding peptide
  MOD_RES (1), (33), (34): Xaa is C or S

SEQ ID NO: 33630 - protein, 39 aa, Artificial Sequence; identical to SEQ ID NO: 31474
  GFR-binding peptide
  MOD_RES (1), (3), (35), (36): Xaa is C or S

SEQ ID NO: 33631 - protein, 35 aa, Artificial Sequence; identical to SEQ ID NO: 31475
  GFR-binding peptide
  MOD_RES (33), (34): Xaa is C or S
  MOD_RES (11), (12), (13), (14), (15): Xaa is A or G
  MOD_RES (16), (17), (18), (19): Xaa is A or G or is absent

SEQ ID NO: 33632 - protein, 42 aa, Artificial Sequence; identical to SEQ ID NO: 31476
  GFR-binding peptide
  MOD_RES (2), (4), (36), (37): Xaa is C or S

SEQ ID NO: 33633 - protein, 41 aa, Artificial Sequence; identical to SEQ ID NO: 31477
  GFR-binding peptide
  MOD_RES (2), (4), (36), (37): Xaa is C or S

SEQ ID NO: 33634 - protein, 30 aa, Artificial Sequence; identical to SEQ ID NO: 31478
  GFR-binding peptide

SEQ ID NO: 33635 - protein, 39 aa, Artificial Sequence; identical to SEQ ID NO: 31479
  GFR-binding peptide
  MOD_RES (2), (4), (38), (39): Xaa is C or S
  MOD_RES (16), (17), (18), (19), (20): Xaa is A or G
  MOD_RES (21), (22), (23), (24): Xaa is A or G or is absent

SEQ ID NO: 33636 - protein, 42 aa, Artificial Sequence; identical to SEQ ID NO: 31480
  GFR-binding peptide
  MOD_RES (2), (36), (37): Xaa is C or S
  MOD_RES (14), (15), (16), (17), (18): Xaa is A or G
  MOD_RES (19), (20), (21), (22): Xaa is A or G or is absent

SEQ ID NO: 33637 - protein, 37 aa, Artificial Sequence; identical to SEQ ID NO: 31481
  GFR-binding peptide
  MOD_RES (2), (36), (37): Xaa is C or S
  MOD_RES (14), (15), (16), (17), (18): Xaa is A or G
  MOD_RES (19), (20), (21), (22): Xaa is A or G or is absent

SEQ ID NO: 33638 - protein, 39 aa, Artificial Sequence; identical to SEQ ID NO: 31482
  GFR-binding peptide
  MOD_RES (2), (36), (37): Xaa is C or S
  MOD_RES (14), (15), (16), (17), (18): Xaa is A or G
  MOD_RES (19), (20), (21), (22): Xaa is A or G or is absent

SEQ ID NO: 33639 - protein, 37 aa, Artificial Sequence; identical to SEQ ID NO: 31483
  GFR-binding peptide
  MOD_RES (1), (33), (34): Xaa is C or S

SEQ ID NO: 33640 - protein, 41 aa, Artificial Sequence; identical to SEQ ID NO: 31484
  GFR-binding peptide
  MOD_RES (2), (4), (36), (37): Xaa is C or S

SEQ ID NO: 33641 - protein, 39 aa, Artificial Sequence; identical to SEQ ID NO: 31485
  GFR-binding peptide
  MOD_RES (34), (35): Xaa is C or S
  MOD_RES (12), (13), (14), (15), (16): Xaa is A or G
  MOD_RES (17), (18), (19), (20): Xaa is A or G or is absent

SEQ ID NO: 33642 - protein, 36 aa, Artificial Sequence; identical to SEQ ID NO: 31486
  GFR-binding peptide
  MOD_RES (1), (3): Xaa is C or S
  MOD_RES (15), (16), (17), (18), (19): Xaa is A or G
  MOD_RES (20), (21), (22), (23): Xaa is A or G or is absent

SEQ ID NO: 33643 - protein, 37 aa, Artificial Sequence; identical to SEQ ID NO: 31487
  GFR-binding peptide
  MOD_RES (1), (3), (35), (36): Xaa is C or S

SEQ ID NO: 33644 - protein, 33 aa, Artificial Sequence; identical to SEQ ID NO: 31488
  GFR-binding peptide
  MOD_RES (2), (33): Xaa is C or S

SEQ ID NO: 33645 - protein, 36 aa, Artificial Sequence; identical to SEQ ID NO: 31489
  GFR-binding peptide
  MOD_RES (2), (35), (36): Xaa is C or S
  MOD_RES (13), (14), (15), (16), (17): Xaa is A or G
  MOD_RES (18), (19), (20), (21): Xaa is A or G or is absent

SEQ ID NO: 33646 - protein, 34 aa, Artificial Sequence; identical to SEQ ID NO: 31490
  GFR-binding peptide
  MOD_RES (1), (1): Xaa is C or S
  MOD_RES (13), (14), (15), (16), (17): Xaa is A or G
  MOD_RES (18), (19), (20), (21): Xaa is A or G or is absent

SEQ ID NO: 33647 - protein, 35 aa, Artificial Sequence; identical to SEQ ID NO: 31491
  GFR-binding peptide
  MOD_RES (2), (34), (35): Xaa is C or S

SEQ ID NO: 33648 - protein, 41 aa, Artificial Sequence; identical to SEQ ID NO: 31492
  GFR-binding peptide
  MOD_RES (2), (4), (38), (39): Xaa is C or S
  MOD_RES (16), (17), (18), (19), (20): Xaa is A or G
  MOD_RES (21), (22), (23), (24): Xaa is A or G or is absent

SEQ ID NO: 33649 - protein, 43 aa, Artificial Sequence; identical to SEQ ID NO: 31493
  GFR-binding peptide
  MOD_RES (1), (3), (37), (38): Xaa is C or S
  MOD_RES (15), (16), (17), (18), (19): Xaa is A or G
  MOD_RES (20), (21), (22), (23): Xaa is A or G or is absent

SEQ ID NO: 33650 - protein, 36 aa, Artificial Sequence; identical to SEQ ID NO: 31494
  GFR-binding peptide
  MOD_RES (1), (33): Xaa is C or S

SEQ ID NO: 33651 - protein, 35 aa, Artificial Sequence; identical to SEQ ID NO: 31495
  GFR-binding peptide
  MOD_RES (33), (34): Xaa is C or S
  MOD_RES (11), (12), (13), (14), (15): Xaa is A or G
  MOD_RES (16), (17), (18), (19): Xaa is A or G or is absent

SEQ ID NO: 33652 - protein, 36 aa, Artificial Sequence; identical to SEQ ID NO: 31496
  GFR-binding peptide
  MOD_RES (2), (36): Xaa is C or S
  MOD_RES (14), (15), (16), (17), (18): Xaa is A or G
  MOD_RES (19), (20), (21), (22): Xaa is A or G or is absent

SEQ ID NO: 33653 - protein, 35 aa, Artificial Sequence; identical to SEQ ID NO: 31497
  GFR-binding peptide
  MOD_RES (1), (34), (35): Xaa is C or S
  MOD_RES (12), (13), (14), (15), (16): Xaa is A or G
  MOD_RES (17), (18), (19), (20): Xaa is A or G or is absent

SEQ ID NO: 33654 - protein, 32 aa, Artificial Sequence; identical to SEQ ID NO: 31498
  GFR-binding peptide
  MOD_RES (11), (12), (13), (14), (15): Xaa is A or G
  MOD_RES (16), (17), (18), (19): Xaa is A or G or is absent

SEQ ID NO: 33655 - protein, 32 aa, Artificial Sequence; identical to SEQ ID NO: 31499
  GFR-binding peptide
  MOD_RES (31), (32): Xaa is C or S

SEQ ID NO: 33656 - protein, 40 aa, Artificial Sequence; identical to SEQ ID NO: 31500
  GFR-binding peptide
  MOD_RES (1), (36), (37): Xaa is C or S
  MOD_RES (14), (15), (16), (17), (18): Xaa is A or G
  MOD_RES (19), (20), (21), (22): Xaa is A or G or is absent

SEQ ID NO: 33657 - protein, 32 aa, Artificial Sequence; identical to SEQ ID NO: 31501
  GFR-binding peptide
  MOD_RES (11), (12), (13), (14), (15): Xaa is A or G
  MOD_RES (16), (17), (18), (19): Xaa is A or G or is absent

SEQ ID NO: 33658 - protein, 36 aa, Artificial Sequence; identical to SEQ ID NO: 31502
  GFR-binding peptide
  MOD_RES (2), (4), (36): Xaa is C or S

SEQ ID NO: 33659 - protein, 35 aa, Artificial Sequence; identical to SEQ ID NO: 31503
  GFR-binding peptide
  MOD_RES (32), (33): Xaa is C or S

SEQ ID NO: 33660 - protein, 38 aa, Artificial Sequence; identical to SEQ ID NO: 31504
  GFR-binding peptide
  MOD_RES (34), (35): Xaa is C or S
  MOD_RES (12), (13), (14), (15), (16): Xaa is A or G
  MOD_RES (17), (18), (19), (20): Xaa is A or G or is absent

SEQ ID NO: 33661 - protein, 42 aa, Artificial Sequence; identical to SEQ ID NO: 31505
  GFR-binding peptide
  MOD_RES (1), (3), (37), (38): Xaa is C or S
  MOD_RES (15), (16), (17), (18), (19): Xaa is A or G
  MOD_RES (20), (21), (22), (23): Xaa is A or G or is absent

SEQ ID NO: 33662 - protein, 39 aa, Artificial Sequence; identical to SEQ ID NO: 31506
  GFR-binding peptide
  MOD_RES (1), (34), (35): Xaa is C or S
  MOD_RES (12), (13), (14), (15), (16): Xaa is A or G
  MOD_RES (17), (18), (19), (20): Xaa is A or G or is absent

SEQ ID NO: 33663 - protein, 43 aa, Artificial Sequence; identical to SEQ ID NO: 31507
  GFR-binding peptide
  MOD_RES (1), (3), (37), (38): Xaa is C or S
  MOD_RES (15), (16), (17), (18), (19): Xaa is A or G
  MOD_RES (20), (21), (22), (23): Xaa is A or G or is absent

SEQ ID NO: 33664 - protein, 43 aa, Artificial Sequence; identical to SEQ ID NO: 31508
  GFR-binding peptide
  MOD_RES (2), (4), (38), (39): Xaa is C or S
  MOD_RES (16), (17), (18), (19), (20): Xaa is A or G
  MOD_RES (21), (22), (23), (24): Xaa is A or G or is absent

SEQ ID NO: 33665 - protein, 42 aa, Artificial Sequence; identical to SEQ ID NO: 31509
  GFR-binding peptide
  MOD_RES (2), (4), (36), (37): Xaa is C or S

SEQ ID NO: 33666 - protein, 35 aa, Artificial Sequence; identical to SEQ ID NO: 31510
  GFR-binding peptide
  MOD_RES (34), (35): Xaa is C or S
  MOD_RES (12), (13), (14), (15), (16): Xaa is A or G
  MOD_RES (17), (18), (19), (20): Xaa is A or G or is absent

SEQ ID NO: 33667 - protein, 37 aa, Artificial Sequence; identical to SEQ ID NO: 31511
  GFR-binding peptide
  MOD_RES (1), (3), (37): Xaa is C or S
  MOD_RES (15), (16), (17), (18), (19): Xaa is A or G
  MOD_RES (20), (21), (22), (23): Xaa is A or G or is absent

SEQ ID NO: 33668 - protein, 33 aa, Artificial Sequence; identical to SEQ ID NO: 31512
  GFR-binding peptide
  MOD_RES (33), (33): Xaa is C or S
  MOD_RES (11), (12), (13), (14), (15): Xaa is A or G
  MOD_RES (16), (17), (18), (19): Xaa is A or G or is absent

SEQ ID NO: 33669 - protein, 37 aa, Artificial Sequence; identical to SEQ ID NO: 31513
  GFR-binding peptide
  MOD_RES (31), (32): Xaa is C or S

SEQ ID NO: 33670 - protein, 41 aa, Artificial Sequence; identical to SEQ ID NO: 31514
  GFR-binding peptide
  MOD_RES (2), (36): Xaa is C or S
  MOD_RES (14), (15), (16), (17), (18): Xaa is A or G
  MOD_RES (19), (20), (21), (22): Xaa is A or G or is absent

SEQ ID NO: 33671 - protein, 37 aa, Artificial Sequence; identical to SEQ ID NO: 31515
  GFR-binding peptide
  MOD_RES (2), (4), (37): Xaa is C or S

SEQ ID NO: 33672 - protein, 40 aa, Artificial Sequence; identical to SEQ ID NO: 31516
  GFR-binding peptide
  MOD_RES (1), (3), (37), (38): Xaa is C or S
  MOD_RES (15), (16), (17), (18), (19): Xaa is A or G
  MOD_RES (20), (21), (22), (23): Xaa is A or G or is absent

SEQ ID NO: 33673 - protein, 38 aa, Artificial Sequence; identical to SEQ ID NO: 31517
  GFR-binding peptide
  MOD_RES (2), (34), (35): Xaa is C or S

SEQ ID NO: 33674 - protein, 33 aa, Artificial Sequence; identical to SEQ ID NO: 31518
  GFR-binding peptide
  MOD_RES (31), (32): Xaa is C or S

SEQ ID NO: 33675 - protein, 36 aa, Artificial Sequence; identical to SEQ ID NO: 31519
  GFR-binding peptide
  MOD_RES (33), (34): Xaa is C or S
  MOD_RES (11), (12), (13), (14), (15): Xaa is A or G
  MOD_RES (16), (17), (18), (19): Xaa is A or G or is absent

SEQ ID NO: 33676 - protein, 39 aa, Artificial Sequence; identical to SEQ ID NO: 31520
  GFR-binding peptide
  MOD_RES (2), (36), (37): Xaa is C or S
  MOD_RES (14), (15), (16), (17), (18): Xaa is A or G
  MOD_RES (19), (20), (21), (22): Xaa is A or G or is absent

SEQ ID NO: 33677 - protein, 38 aa, Artificial Sequence; identical to SEQ ID NO: 31521
  GFR-binding peptide
  MOD_RES (1), (35): Xaa is C or S
  MOD_RES (13), (14), (15), (16), (17): Xaa is A or G
  MOD_RES (18), (19), (20), (21): Xaa is A or G or is absent

SEQ ID NO: 33678 - protein, 38 aa, Artificial Sequence; identical to SEQ ID NO: 31522
  GFR-binding peptide
  MOD_RES (2), (4), (36): Xaa is C or S

SEQ ID NO: 33679 - protein, 42 aa, Artificial Sequence; identical to SEQ ID NO: 31523
  GFR-binding peptide
  MOD_RES (2), (36), (37): Xaa is C or S
  MOD_RES (14), (15), (16), (17), (18): Xaa is A or G
  MOD_RES (19), (20), (21), (22): Xaa is A or G or is absent

SEQ ID NO: 33680 - protein, 41 aa, Artificial Sequence; identical to SEQ ID NO: 31524
  GFR-binding peptide
  MOD_RES (1), (3), (37): Xaa is C or S
  MOD_RES (15), (16), (17), (18), (19): Xaa is A or G
  MOD_RES (20), (21), (22), (23): Xaa is A or G or is absent

SEQ ID NO: 33681 - protein, 40 aa, Artificial Sequence; identical to SEQ ID NO: 31525
  GFR-binding peptide
  MOD_RES (2), (34), (35): Xaa is C or S

SEQ ID NO: 33682 - protein, 37 aa, Artificial Sequence; identical to SEQ ID NO: 31526
  GFR-binding peptide
  MOD_RES (2), (4), (35), (36): Xaa is C or S

SEQ ID NO: 33683 - protein, 39 aa, Artificial Sequence; identical to SEQ ID NO: 31527
  GFR-binding peptide
  MOD_RES (2), (4), (36), (37): Xaa is C or S

SEQ ID NO: 33684 - protein, 40 aa, Artificial Sequence; identical to SEQ ID NO: 31528
  GFR-binding peptide
  MOD_RES (2), (4), (39), (40): Xaa is C or S
  MOD_RES (17), (18), (19), (20), (21): Xaa is A or G
  MOD_RES (22), (23), (24), (25): Xaa is A or G or is absent

SEQ ID NO: 33685 - protein, 43 aa, Artificial Sequence; identical to SEQ ID NO: 31529
  GFR-binding peptide
  MOD_RES (2), (4), (38): Xaa is C or S
  MOD_RES (16), (17), (18), (19), (20): Xaa is A or G
  MOD_RES (21), (22), (23), (24): Xaa is A or G or is absent

SEQ ID NO: 33686 - protein, 33 aa, Artificial Sequence; identical to SEQ ID NO: 31530
  GFR-binding peptide
  MOD_RES (1), (33): Xaa is C or S

SEQ ID NO: 33687 - protein, 39 aa, Artificial Sequence; identical to SEQ ID NO: 31531
  GFR-binding peptide
  MOD_RES (1), (33), (34): Xaa is C or S

SEQ ID NO: 33688 - protein, 33 aa, Artificial Sequence; identical to SEQ ID NO: 31532
  GFR-binding peptide
  MOD_RES (33), (33): Xaa is C or S
  MOD_RES (11), (12), (13), (14), (15): Xaa is A or G
  MOD_RES (16), (17), (18), (19): Xaa is A or G or is absent

SEQ ID NO: 33689 - protein, 41 aa, Artificial Sequence; identical to SEQ ID NO: 31533
  GFR-binding peptide
  MOD_RES (2), (4), (36), (37): Xaa is C or S

SEQ ID NO: 33690 - protein, 36 aa, Artificial Sequence; identical to SEQ ID NO: 31534
  GFR-binding peptide
  MOD_RES (2), (34), (35): Xaa is C or S

SEQ ID NO: 33691 - protein, 38 aa, Artificial Sequence; identical to SEQ ID NO: 31535
  GFR-binding peptide
  MOD_RES (2), (36): Xaa is C or S
  MOD_RES (14), (15), (16), (17), (18): Xaa is A or G
  MOD_RES (19), (20), (21), (22): Xaa is A or G or is absent

SEQ ID NO: 33692 - protein, 37 aa, Artificial Sequence; identical to SEQ ID NO: 31536
  GFR-binding peptide
  MOD_RES (33), (34): Xaa is C or S

SEQ ID NO: 33693 - protein, 33 aa, Artificial Sequence; identical to SEQ ID NO: 31537
  GFR-binding peptide
  MOD_RES (33), (33): Xaa is C or S
  MOD_RES (11), (12), (13), (14), (15): Xaa is A or G
  MOD_RES (16), (17), (18), (19): Xaa is A or G or is absent

SEQ ID NO: 33694 - protein, 34 aa, Artificial Sequence; identical to SEQ ID NO: 31538
  GFR-binding peptide
  MOD_RES (34), (34): Xaa is C or S
  MOD_RES (12), (13), (14), (15), (16): Xaa is A or G
  MOD_RES (17), (18), (19), (20): Xaa is A or G or is absent

SEQ ID NO: 33695 - protein, 38 aa, Artificial Sequence; identical to SEQ ID NO: 31539
  GFR-binding peptide
  MOD_RES (2), (36), (37): Xaa is C or S
  MOD_RES (14), (15), (16), (17), (18): Xaa is A or G
  MOD_RES (19), (20), (21), (22): Xaa is A or G or is absent

SEQ ID NO: 33696 - protein, 41 aa, Artificial Sequence; identical to SEQ ID NO: 31540
  GFR-binding peptide
  MOD_RES (2), (36), (37): Xaa is C or S
  MOD_RES (14), (15), (16), (17), (18): Xaa is A or G
  MOD_RES (19), (20), (21), (22): Xaa is A or G or is absent

SEQ ID NO: 33697 - protein, 37 aa, Artificial Sequence; identical to SEQ ID NO: 31541
  GFR-binding peptide
  MOD_RES (34), (35): Xaa is C or S
  MOD_RES (12), (13), (14), (15), (16): Xaa is A or G
  MOD_RES (17), (18), (19), (20): Xaa is A or G or is absent

SEQ ID NO: 33698 - protein, 37 aa, Artificial Sequence; identical to SEQ ID NO: 31542
  GFR-binding peptide
  MOD_RES (1), (35), (36): Xaa is C or S
  MOD_RES (13), (14), (15), (16), (17): Xaa is A or G
  MOD_RES (18), (19), (20), (21): Xaa is A or G or is absent

SEQ ID NO: 33699 - protein, 38 aa, Artificial Sequence; identical to SEQ ID NO: 31543
  GFR-binding peptide
  MOD_RES (1), (33), (34): Xaa is C or S

SEQ ID NO: 33700 - protein, 38 aa, Artificial Sequence; identical to SEQ ID NO: 31544
  GFR-binding peptide
  MOD_RES (2), (4), (38): Xaa is C or S
  MOD_RES (16), (17), (18), (19), (20): Xaa is A or G
  MOD_RES (21), (22), (23), (24): Xaa is A or G or is absent

SEQ ID NO: 33701 - protein, 42 aa, Artificial Sequence; identical to SEQ ID NO: 31545
  GFR-binding peptide
  MOD_RES (1), (3), (37), (38): Xaa is C or S
  MOD_RES (15), (16), (17), (18), (19): Xaa is A or G
  MOD_RES (20), (21), (22), (23): Xaa is A or G or is absent

SEQ ID NO: 33702 - protein, 36 aa, Artificial Sequence; identical to SEQ ID NO: 31546
  GFR-binding peptide
  MOD_RES (2), (36): Xaa is C or S
  MOD_RES (14), (15), (16), (17), (18): Xaa is A or G
  MOD_RES (19), (20), (21), (22): Xaa is A or G or is absent

SEQ ID NO: 33703 - protein, 30 aa, Artificial Sequence; identical to SEQ ID NO: 31547
  GFR-binding peptide

SEQ ID NO: 33704 - protein, 36 aa, Artificial Sequence; identical to SEQ ID NO: 31548
  GFR-binding peptide
  MOD_RES (2), (4), (35), (36): Xaa is C or S

SEQ ID NO: 33705 - protein, 37 aa, Artificial Sequence; identical to SEQ ID NO: 31549
  GFR-binding peptide
  MOD_RES (1), (34), (35): Xaa is C or S

SEQ ID NO: 33706 - protein, 38 aa, Artificial Sequence; identical to SEQ ID NO: 31550
  GFR-binding peptide
  MOD_RES (2), (4), (36), (37): Xaa is C or S

SEQ ID NO: 33707 - protein, 33 aa, Artificial Sequence; identical to SEQ ID NO: 31551
  GFR-binding peptide
  MOD_RES (1), (33): Xaa is C or S

SEQ ID NO: 33708 - protein, 37 aa, Artificial Sequence; identical to SEQ ID NO: 31552
  GFR-binding peptide
  MOD_RES (33), (33): Xaa is C or S
  MOD_RES (11), (12), (13), (14), (15): Xaa is A or G
  MOD_RES (16), (17), (18), (19): Xaa is A or G or is absent

SEQ ID NO: 33709 - protein, 35 aa, Artificial Sequence; identical to SEQ ID NO: 31553
  GFR-binding peptide
  MOD_RES (1), (33), (34): Xaa is C or S

SEQ ID NO: 33710 - protein, 43 aa, Artificial Sequence; identical to SEQ ID NO: 31554
  GFR-binding peptide
  MOD_RES (1), (3), (38), (39): Xaa is C or S
  MOD_RES (16), (17), (18), (19), (20): Xaa is A or G
  MOD_RES (21), (22), (23), (24): Xaa is A or G or is absent

SEQ ID NO: 33711 - protein, 34 aa, Artificial Sequence; identical to SEQ ID NO: 31555
  GFR-binding peptide
  MOD_RES (34), (34): Xaa is C or S
  MOD_RES (12), (13), (14), (15), (16): Xaa is A or G
  MOD_RES (17), (18), (19), (20): Xaa is A or G or is absent

SEQ ID NO: 33712 - protein, 37 aa, Artificial Sequence; identical to SEQ ID NO: 31556
  GFR-binding peptide
  MOD_RES (32), (33): Xaa is C or S

SEQ ID NO: 33713 - protein, 39 aa, Artificial Sequence; identical to SEQ ID NO: 31557
  GFR-binding peptide
  MOD_RES (1), (3), (38), (39): Xaa is C or S
  MOD_RES (16), (17), (18), (19), (20): Xaa is A or G
  MOD_RES (21), (22), (23), (24): Xaa is A or G or is absent

SEQ ID NO: 33714 - protein, 35 aa, Artificial Sequence; identical to SEQ ID NO: 31558
  GFR-binding peptide
  MOD_RES (2), (35): Xaa is C or S

SEQ ID NO: 33715 - protein, 38 aa, Artificial Sequence; identical to SEQ ID NO: 31559
  GFR-binding peptide
  MOD_RES (2), (36), (37): Xaa is C or S
  MOD_RES (14), (15), (16), (17), (18): Xaa is A or G
  MOD_RES (19), (20), (21), (22): Xaa is A or G or is absent

SEQ ID NO: 33716 - protein, 43 aa, Artificial Sequence; identical to SEQ ID NO: 31560
  GFR-binding peptide
  MOD_RES (2), (4), (37), (38): Xaa is C or S

SEQ ID NO: 33717 - protein, 36 aa, Artificial Sequence; identical to SEQ ID NO: 31561
  GFR-binding peptide
  MOD_RES (1), (34), (35): Xaa is C or S

SEQ ID NO: 33718 - protein, 35 aa, Artificial Sequence; identical to SEQ ID NO: 31562
  GFR-binding peptide
  MOD_RES (2), (4): Xaa is C or S

SEQ ID NO: 33719 - protein, 41 aa, Artificial Sequence; identical to SEQ ID NO: 31563
  GFR-binding peptide
  MOD_RES (35), (36): Xaa is C or S
  MOD_RES (13), (14), (15), (16), (17): Xaa is A or G
  MOD_RES (18), (19), (20), (21): Xaa is A or G or is absent

SEQ ID NO: 33720 - protein, 39 aa, Artificial Sequence; identical to SEQ ID NO: 31564
  GFR-binding peptide
  MOD_RES (2), (4), (38), (39): Xaa is C or S
  MOD_RES (16), (17), (18), (19), (20): Xaa is A or G
  MOD_RES (21), (22), (23), (24): Xaa is A or G or is absent

SEQ ID NO: 33721 - protein, 39 aa, Artificial Sequence; identical to SEQ ID NO: 31565
  GFR-binding peptide
  MOD_RES (1), (3), (37), (38): Xaa is C or S
  MOD_RES (15), (16), (17), (18), (19): Xaa is A or G
  MOD_RES (20), (21), (22), (23): Xaa is A or G or is absent

SEQ ID NO: 33722 - protein, 33 aa, Artificial Sequence; identical to SEQ ID NO: 31566
  GFR-binding peptide
  MOD_RES (31), (32): Xaa is C or S

SEQ ID NO: 33723 - protein, 34 aa, Artificial Sequence; identical to SEQ ID NO: 31567
  GFR-binding peptide
  MOD_RES (2), (34): Xaa is C or S

SEQ ID NO: 33724 - protein, 36 aa, Artificial Sequence; identical to SEQ ID NO: 31568
  GFR-binding peptide
  MOD_RES (1), (33), (34): Xaa is C or S

SEQ ID NO: 33725 - protein, 38 aa, Artificial Sequence; identical to SEQ ID NO: 31569
  GFR-binding peptide
  MOD_RES (34), (35): Xaa is C or S
  MOD_RES (12), (13), (14), (15), (16): Xaa is A or G
  MOD_RES (17), (18), (19), (20): Xaa is A or G or is absent

SEQ ID NO: 33726 - protein, 41 aa, Artificial Sequence; identical to SEQ ID NO: 31570
  GFR-binding peptide
  MOD_RES (1), (3), (36), (37): Xaa is C or S

SEQ ID NO: 33727 - protein, 40 aa, Artificial Sequence; identical to SEQ ID NO: 31571
  GFR-binding peptide
  MOD_RES (2), (4), (36), (37): Xaa is C or S

SEQ ID NO: 33728 - protein, 35 aa, Artificial Sequence; identical to SEQ ID NO: 31572
  GFR-binding peptide
  MOD_RES (2), (34), (35): Xaa is C or S

SEQ ID NO: 33729 - protein, 41 aa, Artificial Sequence; identical to SEQ ID NO: 31573
  GFR-binding peptide
  MOD_RES (2), (36), (37): Xaa is C or S
  MOD_RES (14), (15), (16), (17), (18): Xaa is A or G
  MOD_RES (19), (20), (21), (22): Xaa is A or G or is absent

SEQ ID NO: 33730 - protein, 38 aa, Artificial Sequence; identical to SEQ ID NO: 31574
  GFR-binding peptide
  MOD_RES (1), (3), (35), (36): Xaa is C or S

SEQ ID NO: 33731 - protein, 34 aa, Artificial Sequence; identical to SEQ ID NO: 31575
  GFR-binding peptide
  MOD_RES (33), (34): Xaa is C or S
  MOD_RES (11), (12), (13), (14), (15): Xaa is A or G
  MOD_RES (16), (17), (18), (19): Xaa is A or G or is absent

SEQ ID NO: 33732 - protein, 40 aa, Artificial Sequence; identical to SEQ ID NO: 31576
  GFR-binding peptide
  MOD_RES (34), (35): Xaa is C or S
  MOD_RES (12), (13), (14), (15), (16): Xaa is A or G
  MOD_RES (17), (18), (19), (20): Xaa is A or G or is absent

SEQ ID NO: 33733 - protein, 40 aa, Artificial Sequence; identical to SEQ ID NO: 31577
  GFR-binding peptide
  MOD_RES (1), (3), (37), (38): Xaa is C or S
  MOD_RES (15), (16), (17), (18), (19): Xaa is A or G
  MOD_RES (20), (21), (22), (23): Xaa is A or G or is absent

SEQ ID NO: 33734 - protein, 40 aa, Artificial Sequence; identical to SEQ ID NO: 31578
  GFR-binding peptide
  MOD_RES (2), (35), (36): Xaa is C or S

SEQ ID NO: 33735 - protein, 36 aa, Artificial Sequence; identical to SEQ ID NO: 31579
  GFR-binding peptide
  MOD_RES (33), (34): Xaa is C or S

SEQ ID NO: 33736 - protein, 39 aa, Artificial Sequence; identical to SEQ ID NO: 31580
  GFR-binding peptide
  MOD_RES (2), (4), (38), (39): Xaa is C or S
  MOD_RES (16), (17), (18), (19), (20): Xaa is A or G
  MOD_RES (21), (22), (23), (24): Xaa is A or G or is absent

SEQ ID NO: 33737 - protein, 39 aa, Artificial Sequence; identical to SEQ ID NO: 31581
  GFR-binding peptide
  MOD_RES (1), (3), (35): Xaa is C or S

SEQ ID NO: 33738 - protein, 38 aa, Artificial Sequence; identical to SEQ ID NO: 31582
  GFR-binding peptide
  MOD_RES (34), (35): Xaa is C or S
  MOD_RES (12), (13), (14), (15), (16): Xaa is A or G
  MOD_RES (17), (18), (19), (20): Xaa is A or G or is absent

SEQ ID NO: 33739 - protein, 36 aa, Artificial Sequence; identical to SEQ ID NO: 31583
  GFR-binding peptide
  MOD_RES (34), (35): Xaa is C or S
  MOD_RES (12), (13), (14), (15), (16): Xaa is A or G
  MOD_RES (17), (18), (19), (20): Xaa is A or G or is absent

SEQ ID NO: 33740 - protein, 34 aa, Artificial Sequence; identical to SEQ ID NO: 31584
  GFR-binding peptide
  MOD_RES (33), (34): Xaa is C or S
  MOD_RES (11), (12), (13), (14), (15): Xaa is A or G
  MOD_RES (16), (17), (18), (19): Xaa is A or G or is absent

SEQ ID NO: 33741 - protein, 33 aa, Artificial Sequence; identical to SEQ ID NO: 31585
  GFR-binding peptide
  MOD_RES (31), (32): Xaa is C or S

SEQ ID NO: 33742 - protein, 38 aa, Artificial Sequence; identical to SEQ ID NO: 31586
  GFR-binding peptide
  MOD_RES (1), (3), (38): Xaa is C or S
  MOD_RES (16), (17), (18), (19), (20): Xaa is A or G
  MOD_RES (21), (22), (23), (24): Xaa is A or G or is absent

SEQ ID NO: 33743 - protein, 35 aa, Artificial Sequence; identical to SEQ ID NO: 31587
  GFR-binding peptide
  MOD_RES (2), (2): Xaa is C or S
  MOD_RES (14), (15), (16), (17), (18): Xaa is A or G
  MOD_RES (19), (20), (21), (22): Xaa is A or G or is absent

SEQ ID NO: 33744 - protein, 32 aa, Artificial Sequence; identical to SEQ ID NO: 31588
  GFR-binding peptide
  MOD_RES (32), (32): Xaa is C or S

SEQ ID NO: 33745 - protein, 34 aa, Artificial Sequence; identical to SEQ ID NO: 31589
  GFR-binding peptide
  MOD_RES (2), (34): Xaa is C or S

SEQ ID NO: 33746 - protein, 40 aa, Artificial Sequence; identical to SEQ ID NO: 31590
  GFR-binding peptide
  MOD_RES (2), (4), (37), (38): Xaa is C or S
  MOD_RES (15), (16), (17), (18), (19): Xaa is A or G
  MOD_RES (20), (21), (22), (23): Xaa is A or G or is absent

SEQ ID NO: 33747 - protein, 37 aa, Artificial Sequence; identical to SEQ ID NO: 31591
  GFR-binding peptide
  MOD_RES (2), (36), (37): Xaa is C or S
  MOD_RES (14), (15), (16), (17), (18): Xaa is A or G
  MOD_RES (19), (20), (21), (22): Xaa is A or G or is absent

SEQ ID NO: 33748 - protein, 35 aa, Artificial Sequence; identical to SEQ ID NO: 31592
  GFR-binding peptide
  MOD_RES (34), (35): Xaa is C or S
  MOD_RES (12), (13), (14), (15), (16): Xaa is A or G
  MOD_RES (17), (18), (19), (20): Xaa is A or G or is absent

SEQ ID NO: 33749 - protein, 34 aa, Artificial Sequence; identical to SEQ ID NO: 31593
  GFR-binding peptide
  MOD_RES (1), (33), (34): Xaa is C or S

SEQ ID NO: 33750 - protein, 38 aa, Artificial Sequence; identical to SEQ ID NO: 31594
  GFR-binding peptide
  MOD_RES (32), (33): Xaa is C or S

SEQ ID NO: 33751 - protein, 38 aa, Artificial Sequence; identical to SEQ ID NO: 31595
  GFR-binding peptide
  MOD_RES (1), (3), (37), (38): Xaa is C or S
  MOD_RES (15), (16), (17), (18), (19): Xaa is A or G
  MOD_RES (20), (21), (22), (23): Xaa is A or G or is absent

SEQ ID NO: 33752 - protein, 34 aa, Artificial Sequence; identical to SEQ ID NO: 31596
  GFR-binding peptide
  MOD_RES (33), (34): Xaa is C or S
  MOD_RES (11), (12), (13), (14), (15): Xaa is A or G
  MOD_RES (16), (17), (18), (19): Xaa is A or G or is absent

SEQ ID NO: 33753 - protein, 34 aa, Artificial Sequence; identical to SEQ ID NO: 31597
  GFR-binding peptide
  MOD_RES (33), (34): Xaa is C or S
  MOD_RES (11), (12), (13), (14), (15): Xaa is A or G
  MOD_RES (16), (17), (18), (19): Xaa is A or G or is absent

SEQ ID NO: 33754 - protein, 36 aa, Artificial Sequence; identical to SEQ ID NO: 31598
  GFR-binding peptide
  MOD_RES (2), (2): Xaa is C or S
  MOD_RES (15), (16), (17), (18), (19): Xaa is A or G
  MOD_RES (20), (21), (22), (23): Xaa is A or G or is absent

SEQ ID NO: 33755 - protein, 38 aa, Artificial Sequence; identical to SEQ ID NO: 31599
  GFR-binding peptide
  MOD_RES (2), (34), (35): Xaa is C or S

SEQ ID NO: 33756 - protein, 36 aa, Artificial Sequence; identical to SEQ ID NO: 31600
  GFR-binding peptide
  MOD_RES (2), (36): Xaa is C or S
  MOD_RES (14), (15), (16), (17), (18): Xaa is A or G
  MOD_RES (19), (20), (21), (22): Xaa is A or G or is absent

SEQ ID NO: 33757 - protein, 43 aa, Artificial Sequence; identical to SEQ ID NO: 31601
  GFR-binding peptide
  MOD_RES (1), (3), (37): Xaa is C or S
  MOD_RES (15), (16), (17), (18), (19): Xaa is A or G
  MOD_RES (20), (21), (22), (23): Xaa is A or G or is absent

SEQ ID NO: 33758 - protein, 36 aa, Artificial Sequence; identical to SEQ ID NO: 31602
  GFR-binding peptide
  MOD_RES (35), (36): Xaa is C or S
  MOD_RES (13), (14), (15), (16), (17): Xaa is A or G
  MOD_RES (18), (19), (20), (21): Xaa is A or G or is absent

SEQ ID NO: 33759 - protein, 32 aa, Artificial Sequence; identical to SEQ ID NO: 31603
  GFR-binding peptide
  MOD_RES (1), (1): Xaa is C or S

SEQ ID NO: 33760 - protein, 40 aa, Artificial Sequence; identical to SEQ ID NO: 31604
  GFR-binding peptide
  MOD_RES (2), (4), (38), (39): Xaa is C or S
  MOD_RES (16), (17), (18), (19), (20): Xaa is A or G
  MOD_RES (21), (22), (23), (24): Xaa is A or G or is absent

SEQ ID NO: 33761 - protein, 39 aa, Artificial Sequence; identical to SEQ ID NO: 31605
  GFR-binding peptide
  MOD_RES (33), (34): Xaa is C or S
  MOD_RES (11), (12), (13), (14), (15): Xaa is A or G
  MOD_RES (16), (17), (18), (19): Xaa is A or G or is absent

SEQ ID NO: 33762 - protein, 39 aa, Artificial Sequence; identical to SEQ ID NO: 31606
  GFR-binding peptide
  MOD_RES (1), (35), (36): Xaa is C or S
  MOD_RES (13), (14), (15), (16), (17): Xaa is A or G
  MOD_RES (18), (19), (20), (21): Xaa is A or G or is absent

SEQ ID NO: 33763 - protein, 38 aa, Artificial Sequence; identical to SEQ ID NO: 31607
  GFR-binding peptide
  MOD_RES (34), (35): Xaa is C or S
  MOD_RES (12), (13), (14), (15), (16): Xaa is A or G
  MOD_RES (17), (18), (19), (20): Xaa is A or G or is absent

SEQ ID NO: 33764 - protein, 38 aa, Artificial Sequence; identical to SEQ ID NO: 31608
  GFR-binding peptide
  MOD_RES (2), (4), (35), (36): Xaa is C or S

SEQ ID NO: 33765 - protein, 36 aa, Artificial Sequence; identical to SEQ ID NO: 31609
  GFR-binding peptide
  MOD_RES (33), (34): Xaa is C or S
  MOD_RES (11), (12), (13), (14), (15): Xaa is A or G
  MOD_RES (16), (17), (18), (19): Xaa is A or G or is absent

SEQ ID NO: 33766 - protein, 34 aa, Artificial Sequence; identical to SEQ ID NO: 31610
  GFR-binding peptide
  MOD_RES (1), (3): Xaa is C or S

SEQ ID NO: 33767 - protein, 39 aa, Artificial Sequence; identical to SEQ ID NO: 31611
  GFR-binding peptide
  MOD_RES (1), (35), (36): Xaa is C or S
  MOD_RES (13), (14), (15), (16), (17): Xaa is A or G
  MOD_RES (18), (19), (20), (21): Xaa is A or G or is absent

SEQ ID NO: 33768 - protein, 40 aa, Artificial Sequence; identical to SEQ ID NO: 31612
  GFR-binding peptide
  MOD_RES (1), (3), (35), (36): Xaa is C or S

SEQ ID NO: 33769 - protein, 34 aa, Artificial Sequence; identical to SEQ ID NO: 31613
  GFR-binding peptide
  MOD_RES (1), (33), (34): Xaa is C or S

SEQ ID NO: 33770 - protein, 33 aa, Artificial Sequence; identical to SEQ ID NO: 31614
  GFR-binding peptide
  MOD_RES (12), (13), (14), (15), (16): Xaa is A or G
  MOD_RES (17), (18), (19), (20): Xaa is A or G or is absent

SEQ ID NO: 33771 - protein, 40 aa, Artificial Sequence; identical to SEQ ID NO: 31615
  GFR-binding peptide
  MOD_RES (2), (4), (38), (39): Xaa is C or S
  MOD_RES (16), (17), (18), (19), (20): Xaa is A or G
  MOD_RES (21), (22), (23), (24): Xaa is A or G or is absent

SEQ ID NO: 33772 - protein, 36 aa, Artificial Sequence; identical to SEQ ID NO: 31616
  GFR-binding peptide
  MOD_RES (1), (3): Xaa is C or S
  MOD_RES (15), (16), (17), (18), (19): Xaa is A or G
  MOD_RES (20), (21), (22), (23): Xaa is A or G or is absent

SEQ ID NO: 33773 - protein, 33 aa, Artificial Sequence; identical to SEQ ID NO: 31617
  GFR-binding peptide
  MOD_RES (2), (2): Xaa is C or S

SEQ ID NO: 33774 - protein, 39 aa, Artificial Sequence; identical to SEQ ID NO: 31618
  GFR-binding peptide
  MOD_RES (1), (35), (36): Xaa is C or S
  MOD_RES (13), (14), (15), (16), (17): Xaa is A or G
  MOD_RES (18), (19), (20), (21): Xaa is A or G or is absent

SEQ ID NO: 33775 - protein, 37 aa, Artificial Sequence; identical to SEQ ID NO: 31619
  GFR-binding peptide
  MOD_RES (2), (4), (36), (37): Xaa is C or S

SEQ ID NO: 33776 - protein, 39 aa, Artificial Sequence; identical to SEQ ID NO: 31620
  GFR-binding peptide
  MOD_RES (34), (35): Xaa is C or S
  MOD_RES (12), (13), (14), (15), (16): Xaa is A or G
  MOD_RES (17), (18), (19), (20): Xaa is A or G or is absent

SEQ ID NO: 33777 - protein, 37 aa, Artificial Sequence; identical to SEQ ID NO: 31621
  GFR-binding peptide
  MOD_RES (2), (4), (36), (37): Xaa is C or S

SEQ ID NO: 33778 - protein, 37 aa, Artificial Sequence; identical to SEQ ID NO: 31622
  GFR-binding peptide
  MOD_RES (2), (34), (35): Xaa is C or S

SEQ ID NO: 33779 - protein, 36 aa, Artificial Sequence; identical to SEQ ID NO: 31623
  GFR-binding peptide
  MOD_RES (34), (35): Xaa is C or S
  MOD_RES (12), (13), (14), (15), (16): Xaa is A or G
  MOD_RES (17), (18), (19), (20): Xaa is A or G or is absent

SEQ ID NO: 33780 - protein, 38 aa, Artificial Sequence; identical to SEQ ID NO: 31624
  GFR-binding peptide
  MOD_RES (1), (3), (35), (36): Xaa is C or S

SEQ ID NO: 33781 - protein, 36 aa, Artificial Sequence; identical to SEQ ID NO: 31625
  GFR-binding peptide
  MOD_RES (32), (33): Xaa is C or S

SEQ ID NO: 33782 - protein, 38 aa, Artificial Sequence; identical to SEQ ID NO: 31626
  GFR-binding peptide
  MOD_RES (1), (36), (37): Xaa is C or S
  MOD_RES (14), (15), (16), (17), (18): Xaa is A or G
  MOD_RES (19), (20), (21), (22): Xaa is A or G or is absent

SEQ ID NO: 33783 - protein, 35 aa, Artificial Sequence; identical to SEQ ID NO: 31627
  GFR-binding peptide
  MOD_RES (2), (34), (35): Xaa is C or S

SEQ ID NO: 33784 - protein, 41 aa, Artificial Sequence; identical to SEQ ID NO: 31628
  GFR-binding peptide
  MOD_RES (2), (4), (38), (39): Xaa is C or S
  MOD_RES (16), (17), (18), (19), (20): Xaa is A or G
  MOD_RES (21), (22), (23), (24): Xaa is A or G or is absent

SEQ ID NO: 33785 - protein, 42 aa, Artificial Sequence; identical to SEQ ID NO: 31629
  GFR-binding peptide
  MOD_RES (2), (4), (38): Xaa is C or S
  MOD_RES (16), (17), (18), (19), (20): Xaa is A or G
  MOD_RES (21), (22), (23), (24): Xaa is A or G or is absent

SEQ ID NO: 33786 - protein, 38 aa, Artificial Sequence; identical to SEQ ID NO: 31630
  GFR-binding peptide
  MOD_RES (1), (3), (35), (36): Xaa is C or S

SEQ ID NO: 33787 - protein, 38 aa, Artificial Sequence; identical to SEQ ID NO: 31631
  GFR-binding peptide
  MOD_RES (32), (32): Xaa is C or S

SEQ ID NO: 33788 - protein, 37 aa, Artificial Sequence; identical to SEQ ID NO: 31632
  GFR-binding peptide
  MOD_RES (1), (3), (37): Xaa is C or S
  MOD_RES (15), (16), (17), (18), (19): Xaa is A or G
  MOD_RES (20), (21), (22), (23): Xaa is A or G or is absent

SEQ ID NO: 33789 - protein, 34 aa, Artificial Sequence; identical to SEQ ID NO: 31633
  GFR-binding peptide
  MOD_RES (1), (3): Xaa is C or S

SEQ ID NO: 33790 - protein, 40 aa, Artificial Sequence; identical to SEQ ID NO: 31634
  GFR-binding peptide
  MOD_RES (1), (3), (35), (36): Xaa is C or S

SEQ ID NO: 33791 - protein, 42 aa, Artificial Sequence; identical to SEQ ID NO: 31635
  GFR-binding peptide
  MOD_RES (2), (36), (37): Xaa is C or S
  MOD_RES (14), (15), (16), (17), (18): Xaa is A or G
  MOD_RES (19), (20), (21), (22): Xaa is A or G or is absent

SEQ ID NO: 33792 - protein, 40 aa, Artificial Sequence; identical to SEQ ID NO: 31636
  GFR-binding peptide
  MOD_RES (34), (35): Xaa is C or S
  MOD_RES (12), (13), (14), (15), (16): Xaa is A or G
  MOD_RES (17), (18), (19), (20): Xaa is A or G or is absent

SEQ ID NO: 33793 - protein, 33 aa, Artificial Sequence; identical to SEQ ID NO: 31637
  GFR-binding peptide
  MOD_RES (1), (3): Xaa is C or S

SEQ ID NO: 33794 - protein, 35 aa, Artificial Sequence; identical to SEQ ID NO: 31638
  GFR-binding peptide
  MOD_RES (1), (35): Xaa is C or S
  MOD_RES (13), (14), (15), (16), (17): Xaa is A or G
  MOD_RES (18), (19), (20), (21): Xaa is A or G or is absent

SEQ ID NO: 33795 - protein, 37 aa, Artificial Sequence; identical to SEQ ID NO: 31639
  GFR-binding peptide
  MOD_RES (31), (32): Xaa is C or S

SEQ ID NO: 33796 - protein, 37 aa, Artificial Sequence; identical to SEQ ID NO: 31640
  GFR-binding peptide
  MOD_RES (32), (33): Xaa is C or S

SEQ ID NO: 33797 - protein, 43 aa, Artificial Sequence; identical to SEQ ID NO: 31641
  GFR-binding peptide
  MOD_RES (2), (4), (38), (39): Xaa is C or S
  MOD_RES (16), (17), (18), (19), (20): Xaa is A or G
  MOD_RES (21), (22), (23), (24): Xaa is A or G or is absent

SEQ ID NO: 33798 - protein, 37 aa, Artificial Sequence; identical to SEQ ID NO: 31642
  GFR-binding peptide
  MOD_RES (1), (3), (37): Xaa is C or S
  MOD_RES (15), (16), (17), (18), (19): Xaa is A or G
  MOD_RES (20), (21), (22), (23): Xaa is A or G or is absent

SEQ ID NO: 33799 - protein, 36 aa, Artificial Sequence; identical to SEQ ID NO: 31643
  GFR-binding peptide
  MOD_RES (1), (3), (35), (36): Xaa is C or S

SEQ ID NO: 33800 - protein, 39 aa, Artificial Sequence; identical to SEQ ID NO: 31644
  GFR-binding peptide
  MOD_RES (2), (4), (39): Xaa is C or S
  MOD_RES (17), (18), (19), (20), (21): Xaa is A or G
  MOD_RES (22), (23), (24), (25): Xaa is A or G or is absent

SEQ ID NO: 33801 - protein, 33 aa, Artificial Sequence; identical to SEQ ID NO: 31645
  GFR-binding peptide
  MOD_RES (33), (33): Xaa is C or S
  MOD_RES (11), (12), (13), (14), (15): Xaa is A or G
  MOD_RES (16), (17), (18), (19): Xaa is A or G or is absent

SEQ ID NO: 33802 - protein, 40 aa, Artificial Sequence; identical to SEQ ID NO: 31646
  GFR-binding peptide
  MOD_RES (1), (3), (36), (37): Xaa is C or S

SEQ ID NO: 33803 - protein, 34 aa, Artificial Sequence; identical to SEQ ID NO: 31647
  GFR-binding peptide
  MOD_RES (1), (3): Xaa is C or S

SEQ ID NO: 33804 - protein, 37 aa, Artificial Sequence; identical to SEQ ID NO: 31648
  GFR-binding peptide
  MOD_RES (31), (32): Xaa is C or S

SEQ ID NO: 33805 - protein, 35 aa, Artificial Sequence; identical to SEQ ID NO: 31649
  GFR-binding peptide
  MOD_RES (2), (2): Xaa is C or S
  MOD_RES (14), (15), (16), (17), (18): Xaa is A or G
  MOD_RES (19), (20), (21), (22): Xaa is A or G or is absent

SEQ ID NO: 33806 - protein, 36 aa, Artificial Sequence; identical to SEQ ID NO: 31650
  GFR-binding peptide
  MOD_RES (1), (33), (34): Xaa is C or S

SEQ ID NO: 33807 - protein, 37 aa, Artificial Sequence; identical to SEQ ID NO: 31651
  GFR-binding peptide
  MOD_RES (1), (3), (37): Xaa is C or S
  MOD_RES (15), (16), (17), (18), (19): Xaa is A or G
  MOD_RES (20), (21), (22), (23): Xaa is A or G or is absent

SEQ ID NO: 33808 - protein, 39 aa, Artificial Sequence; identical to SEQ ID NO: 31652
  GFR-binding peptide
  MOD_RES (2), (36), (37): Xaa is C or S
  MOD_RES (14), (15), (16), (17), (18): Xaa is A or G
  MOD_RES (19), (20), (21), (22): Xaa is A or G or is absent

SEQ ID NO: 33809 - protein, 38 aa, Artificial Sequence; identical to SEQ ID NO: 31653
  GFR-binding peptide
  MOD_RES (2), (4), (38): Xaa is C or S
  MOD_RES (16), (17), (18), (19), (20): Xaa is A or G
  MOD_RES (21), (22), (23), (24): Xaa is A or G or is absent

SEQ ID NO: 33810 - protein, 40 aa, Artificial Sequence; identical to SEQ ID NO: 31654
  GFR-binding peptide
  MOD_RES (2), (36), (37): Xaa is C or S
  MOD_RES (14), (15), (16), (17), (18): Xaa is A or G
  MOD_RES (19), (20), (21), (22): Xaa is A or G or is absent

SEQ ID NO: 33811 - protein, 36 aa, Artificial Sequence; identical to SEQ ID NO: 31655
  GFR-binding peptide
  MOD_RES (1), (3), (35): Xaa is C or S

SEQ ID NO: 33812 - protein, 34 aa, Artificial Sequence; identical to SEQ ID NO: 31656
  GFR-binding peptide
  MOD_RES (34), (34): Xaa is C or S
  MOD_RES (12), (13), (14), (15), (16): Xaa is A or G
  MOD_RES (17), (18), (19), (20): Xaa is A or G or is absent

SEQ ID NO: 33813 - protein, 36 aa, Artificial Sequence; identical to SEQ ID NO: 31657
  GFR-binding peptide
  MOD_RES (2), (4), (36): Xaa is C or S

SEQ ID NO: 33814 - protein, 41 aa, Artificial Sequence; identical to SEQ ID NO: 31658
  GFR-binding peptide
  MOD_RES (1), (3), (37), (38): Xaa is C or S
  MOD_RES (15), (16), (17), (18), (19): Xaa is A or G
  MOD_RES (20), (21), (22), (23): Xaa is A or G or is absent

SEQ ID NO: 33815 - protein, 37 aa, Artificial Sequence; identical to SEQ ID NO: 31659
  GFR-binding peptide
  MOD_RES (1), (35), (36): Xaa is C or S
  MOD_RES (13), (14), (15), (16), (17): Xaa is A or G
  MOD_RES (18), (19), (20), (21): Xaa is A or G or is absent

SEQ ID NO: 33816 - protein, 37 aa, Artificial Sequence; identical to SEQ ID NO: 31660
  GFR-binding peptide
  MOD_RES (1), (3), (35): Xaa is C or S

SEQ ID NO: 33817 - protein, 39 aa, Artificial Sequence; identical to SEQ ID NO: 31661
  GFR-binding peptide
  MOD_RES (34), (35): Xaa is C or S
  MOD_RES (12), (13), (14), (15), (16): Xaa is A or G
  MOD_RES (17), (18), (19), (20): Xaa is A or G or is absent

SEQ ID NO: 33818 - protein, 37 aa, Artificial Sequence; identical to SEQ ID NO: 31662
  GFR-binding peptide
  MOD_RES (1), (33), (34): Xaa is C or S

SEQ ID NO: 33819 - protein, 37 aa, Artificial Sequence; identical to SEQ ID NO: 31663
  GFR-binding peptide
  MOD_RES (1), (3), (37): Xaa is C or S
  MOD_RES (15), (16), (17), (18), (19): Xaa is A or G
  MOD_RES (20), (21), (22), (23): Xaa is A or G or is absent

SEQ ID NO: 33820 - protein, 39 aa, Artificial Sequence; identical to SEQ ID NO: 31664
  GFR-binding peptide
  MOD_RES (1), (34), (35): Xaa is C or S

SEQ ID NO: 33821 - protein, 37 aa, Artificial Sequence; identical to SEQ ID NO: 31665
  GFR-binding peptide
  MOD_RES (33), (34): Xaa is C or S
  MOD_RES (11), (12), (13), (14), (15): Xaa is A or G
  MOD_RES (16), (17), (18), (19): Xaa is A or G or is absent

SEQ ID NO: 33822 - protein, 32 aa, Artificial Sequence; identical to SEQ ID NO: 31666
  GFR-binding peptide
  MOD_RES (1), (1): Xaa is C or S

SEQ ID NO: 33823 - protein, 35 aa, Artificial Sequence; identical to SEQ ID NO: 31667
  GFR-binding peptide
  MOD_RES (1), (35): Xaa is C or S
  MOD_RES (13), (14), (15), (16), (17): Xaa is A or G
  MOD_RES (18), (19), (20), (21): Xaa is A or G or is absent

SEQ ID NO: 33824 - protein, 34 aa, Artificial Sequence; identical to SEQ ID NO: 31668
  GFR-binding peptide
  MOD_RES (1), (1): Xaa is C or S
  MOD_RES (13), (14), (15), (16), (17): Xaa is A or G
  MOD_RES (18), (19), (20), (21): Xaa is A or G or is absent

SEQ ID NO: 33825 - protein, 38 aa, Artificial Sequence; identical to SEQ ID NO: 31669
  GFR-binding peptide
  MOD_RES (2), (4), (36), (37): Xaa is C or S

SEQ ID NO: 33826 - protein, 42 aa, Artificial Sequence; identical to SEQ ID NO: 31670
  GFR-binding peptide
  MOD_RES (2), (4), (36), (37): Xaa is C or S

SEQ ID NO: 33827 - protein, 38 aa, Artificial Sequence; identical to SEQ ID NO: 31671
  GFR-binding peptide
  MOD_RES (33), (34): Xaa is C or S
  MOD_RES (11), (12), (13), (14), (15): Xaa is A or G
  MOD_RES (16), (17), (18), (19): Xaa is A or G or is absent

SEQ ID NO: 33828 - protein, 32 aa, Artificial Sequence; identical to SEQ ID NO: 31672
  GFR-binding peptide
  MOD_RES (11), (12), (13), (14), (15): Xaa is A or G
  MOD_RES (16), (17), (18), (19): Xaa is A or G or is absent

SEQ ID NO: 33829 - protein, 36 aa, Artificial Sequence; identical to SEQ ID NO: 31673
  GFR-binding peptide
  MOD_RES (33), (34): Xaa is C or S
  MOD_RES (11), (12), (13), (14), (15): Xaa is A or G
  MOD_RES (16), (17), (18), (19): Xaa is A or G or is absent

SEQ ID NO: 33830 - protein, 44 aa, Artificial Sequence; identical to SEQ ID NO: 31674
  GFR-binding peptide
  MOD_RES (2), (4), (38), (39): Xaa is C or S
  MOD_RES (16), (17), (18), (19), (20): Xaa is A or G
  MOD_RES (21), (22), (23), (24): Xaa is A or G or is absent

SEQ ID NO: 33831 - protein, 37 aa, Artificial Sequence; identical to SEQ ID NO: 31675
  GFR-binding peptide
  MOD_RES (1), (3), (35), (36): Xaa is C or S

SEQ ID NO: 33832 - protein, 32 aa, Artificial Sequence; identical to SEQ ID NO: 31676
  GFR-binding peptide
  MOD_RES (32), (32): Xaa is C or S

SEQ ID NO: 33833 - protein, 40 aa, Artificial Sequence; identical to SEQ ID NO: 31677
  GFR-binding peptide
  MOD_RES (2), (4), (38), (39): Xaa is C or S
  MOD_RES (16), (17), (18), (19), (20): Xaa is A or G
  MOD_RES (21), (22), (23), (24): Xaa is A or G or is absent

SEQ ID NO: 33834 - protein, 38 aa, Artificial Sequence; identical to SEQ ID NO: 31678
  GFR-binding peptide
  MOD_RES (33), (34): Xaa is C or S

SEQ ID NO: 33835 - protein, 43 aa, Artificial Sequence; identical to SEQ ID NO: 31679
  GFR-binding peptide
  MOD_RES (1), (3), (37), (38): Xaa is C or S
  MOD_RES (15), (16), (17), (18), (19): Xaa is A or G
  MOD_RES (20), (21), (22), (23): Xaa is A or G or is absent

SEQ ID NO: 33836 - protein, 32 aa, Artificial Sequence; identical to SEQ ID NO: 31680
  GFR-binding peptide
  MOD_RES (31), (31): Xaa is C or S

SEQ ID NO: 33837 - protein, 37 aa, Artificial Sequence; identical to SEQ ID NO: 31681
  GFR-binding peptide
  MOD_RES (33), (34): Xaa is C or S
  MOD_RES (11), (12), (13), (14), (15): Xaa is A or G
  MOD_RES (16), (17), (18), (19): Xaa is A or G or is absent

SEQ ID NO: 33838 - protein, 37 aa, Artificial Sequence; identical to SEQ ID NO: 31682
  GFR-binding peptide
  MOD_RES (2), (4), (36), (37): Xaa is C or S

SEQ ID NO: 33839 - protein, 37 aa, Artificial Sequence; identical to SEQ ID NO: 31683
  GFR-binding peptide
  MOD_RES (1), (3), (35), (36): Xaa is C or S

SEQ ID NO: 33840 - protein, 37 aa, Artificial Sequence; identical to SEQ ID NO: 31684
  GFR-binding peptide
  MOD_RES (1), (3), (35), (36): Xaa is C or S

SEQ ID NO: 33841 - protein, 41 aa, Artificial Sequence; identical to SEQ ID NO: 31685
  GFR-binding peptide
  MOD_RES (2), (4), (36), (37): Xaa is C or S

SEQ ID NO: 33842 - protein, 39 aa, Artificial Sequence; identical to SEQ ID NO: 31686
  GFR-binding peptide
  MOD_RES (2), (4), (38), (39): Xaa is C or S
  MOD_RES (16), (17), (18), (19), (20): Xaa is A or G
  MOD_RES (21), (22), (23), (24): Xaa is A or G or is absent

SEQ ID NO: 33843 - protein, 35 aa, Artificial Sequence; identical to SEQ ID NO: 31687
  GFR-binding peptide
  MOD_RES (2), (34): Xaa is C or S

SEQ ID NO: 33844 - protein, 34 aa, Artificial Sequence; identical to SEQ ID NO: 31688
  GFR-binding peptide
  MOD_RES (2), (34): Xaa is C or S

SEQ ID NO: 33845 - protein, 35 aa, Artificial Sequence; identical to SEQ ID NO: 31689
  GFR-binding peptide
  MOD_RES (31), (32): Xaa is C or S

SEQ ID NO: 33846 - protein, 34 aa, Artificial Sequence; identical to SEQ ID NO: 31690
  GFR-binding peptide
  MOD_RES (1), (33), (34): Xaa is C or S

SEQ ID NO: 33847 - protein, 40 aa, Artificial Sequence; identical to SEQ ID NO: 31691
  GFR-binding peptide
  MOD_RES (2), (34), (35): Xaa is C or S

SEQ ID NO: 33848 - protein, 36 aa, Artificial Sequence; identical to SEQ ID NO: 31692
  GFR-binding peptide
  MOD_RES (34), (34): Xaa is C or S
  MOD_RES (12), (13), (14), (15), (16): Xaa is A or G
  MOD_RES (17), (18), (19), (20): Xaa is A or G or is absent

SEQ ID NO: 33849 - protein, 39 aa, Artificial Sequence; identical to SEQ ID NO: 31693
  GFR-binding peptide
  MOD_RES (2), (34), (35): Xaa is C or S

SEQ ID NO: 33850 - protein, 37 aa, Artificial Sequence; identical to SEQ ID NO: 31694
  GFR-binding peptide
  MOD_RES (2), (4): Xaa is C or S
  MOD_RES (16), (17), (18), (19), (20): Xaa is A or G
  MOD_RES (21), (22), (23), (24): Xaa is A or G or is absent

SEQ ID NO: 33851 - protein, 38 aa, Artificial Sequence; identical to SEQ ID NO: 31695
  GFR-binding peptide
  MOD_RES (2), (34), (35): Xaa is C or S

SEQ ID NO: 33852 - protein, 32 aa, Artificial Sequence; identical to SEQ ID NO: 31696
  GFR-binding peptide
  MOD_RES (1), (1): Xaa is C or S

SEQ ID NO: 33853 - protein, 39 aa, Artificial Sequence; identical to SEQ ID NO: 31697
  GFR-binding peptide
  MOD_RES (2), (37), (38): Xaa is C or S
  MOD_RES (15), (16), (17), (18), (19): Xaa is A or G
  MOD_RES (20), (21), (22), (23): Xaa is A or G or is absent

SEQ ID NO: 33854 - protein, 37 aa, Artificial Sequence; identical to SEQ ID NO: 31698
  GFR-binding peptide
  MOD_RES (2), (34), (35): Xaa is C or S

SEQ ID NO: 33855 - protein, 35 aa, Artificial Sequence; identical to SEQ ID NO: 31699
  GFR-binding peptide
  MOD_RES (31), (32): Xaa is C or S

SEQ ID NO: 33856 - protein, 34 aa, Artificial Sequence; identical to SEQ ID NO: 31700
  GFR-binding peptide
  MOD_RES (2), (2): Xaa is C or S
  MOD_RES (13), (14), (15), (16), (17): Xaa is A or G
  MOD_RES (18), (19), (20), (21): Xaa is A or G or is absent

SEQ ID NO: 33857 - protein, 34 aa, Artificial Sequence; identical to SEQ ID NO: 31701
  GFR-binding peptide
  MOD_RES (31), (32): Xaa is C or S

SEQ ID NO: 33858 - protein, 39 aa, Artificial Sequence; identical to SEQ ID NO: 31702
  GFR-binding peptide
  MOD_RES (1), (35), (36): Xaa is C or S
  MOD_RES (13), (14), (15), (16), (17): Xaa is A or G
  MOD_RES (18), (19), (20), (21): Xaa is A or G or is absent

SEQ ID NO: 33859 - protein, 41 aa, Artificial Sequence; identical to SEQ ID NO: 31703
  GFR-binding peptide
  MOD_RES (1), (3), (35), (36): Xaa is C or S

SEQ ID NO: 33860 - protein, 37 aa, Artificial Sequence; identical to SEQ ID NO: 31704
  GFR-binding peptide
  MOD_RES (2), (36): Xaa is C or S
  MOD_RES (14), (15), (16), (17), (18): Xaa is A or G
  MOD_RES (19), (20), (21), (22): Xaa is A or G or is absent

SEQ ID NO: 33861 - protein, 35 aa, Artificial Sequence; identical to SEQ ID NO: 31705
  GFR-binding peptide
  MOD_RES (31), (32): Xaa is C or S

SEQ ID NO: 33862 - protein, 36 aa, Artificial Sequence; identical to SEQ ID NO: 31706
  GFR-binding peptide
  MOD_RES (33), (34): Xaa is C or S
  MOD_RES (11), (12), (13), (14), (15): Xaa is A or G
  MOD_RES (16), (17), (18), (19): Xaa is A or G or is absent

SEQ ID NO: 33863 - protein, 39 aa, Artificial Sequence; identical to SEQ ID NO: 31707
  GFR-binding peptide
  MOD_RES (1), (3), (37), (38): Xaa is C or S
  MOD_RES (15), (16), (17), (18), (19): Xaa is A or G
  MOD_RES (20), (21), (22), (23): Xaa is A or G or is absent

SEQ ID NO: 33864 - protein, 38 aa, Artificial Sequence; identical to SEQ ID NO: 31708
  GFR-binding peptide
  MOD_RES (2), (34), (35): Xaa is C or S

SEQ ID NO: 33865 - protein, 39 aa, Artificial Sequence; identical to SEQ ID NO: 31709
  GFR-binding peptide
  MOD_RES (1), (3), (35), (36): Xaa is C or S

SEQ ID NO: 33866 - protein, 35 aa, Artificial Sequence; identical to SEQ ID NO: 31710
  GFR-binding peptide
  MOD_RES (2), (2): Xaa is C or S
  MOD_RES (14), (15), (16), (17), (18): Xaa is A or G
  MOD_RES (19), (20), (21), (22): Xaa is A or G or is absent

SEQ ID NO: 33867 - protein, 40 aa, Artificial Sequence; identical to SEQ ID NO: 31711
  GFR-binding peptide
  MOD_RES (1), (35), (36): Xaa is C or S
  MOD_RES (13), (14), (15), (16), (17): Xaa is A or G
  MOD_RES (18), (19), (20), (21): Xaa is A or G or is absent

SEQ ID NO: 33868 - protein, 37 aa, Artificial Sequence; identical to SEQ ID NO: 31712
  GFR-binding peptide
  MOD_RES (1), (35): Xaa is C or S
  MOD_RES (13), (14), (15), (16), (17): Xaa is A or G
  MOD_RES (18), (19), (20), (21): Xaa is A or G or is absent

SEQ ID NO: 33869 - protein, 35 aa, Artificial Sequence; identical to SEQ ID NO: 31713
  GFR-binding peptide
  MOD_RES (2), (2): Xaa is C or S
  MOD_RES (14), (15), (16), (17), (18): Xaa is A or G
  MOD_RES (19), (20), (21), (22): Xaa is A or G or is absent

SEQ ID NO: 33870 - protein, 38 aa, Artificial Sequence; identical to SEQ ID NO: 31714
  GFR-binding peptide
  MOD_RES (33), (34): Xaa is C or S
  MOD_RES (11), (12), (13), (14), (15): Xaa is A or G
  MOD_RES (16), (17), (18), (19): Xaa is A or G or is absent

SEQ ID NO: 33871 - protein, 32 aa, Artificial Sequence; identical to SEQ ID NO: 31715
  GFR-binding peptide
  MOD_RES (32), (32): Xaa is C or S

SEQ ID NO: 33872 - protein, 38 aa, Artificial Sequence; identical to SEQ ID NO: 31716
  GFR-binding peptide
  MOD_RES (32), (33): Xaa is C or S

SEQ ID NO: 33873 - protein, 34 aa, Artificial Sequence; identical to SEQ ID NO: 31717
  GFR-binding peptide
  MOD_RES (2), (2): Xaa is C or S

SEQ ID NO: 33874 - protein, 40 aa, Artificial Sequence; identical to SEQ ID NO: 31718
  GFR-binding peptide
  MOD_RES (1), (3), (35): Xaa is C or S

SEQ ID NO: 33875 - protein, 37 aa, Artificial Sequence; identical to SEQ ID NO: 31719
  GFR-binding peptide
  MOD_RES (32), (33): Xaa is C or S

SEQ ID NO: 33876 - protein, 37 aa, Artificial Sequence; identical to SEQ ID NO: 31720
  GFR-binding peptide
  MOD_RES (31), (32): Xaa is C or S

SEQ ID NO: 33877 - protein, 35 aa, Artificial Sequence; identical to SEQ ID NO: 31721
  GFR-binding peptide
  MOD_RES (32), (33): Xaa is C or S

SEQ ID NO: 33878 - protein, 40 aa, Artificial Sequence; identical to SEQ ID NO: 31722
  GFR-binding peptide
  MOD_RES (2), (4), (38), (39): Xaa is C or S
  MOD_RES (16), (17), (18), (19), (20): Xaa is A or G
  MOD_RES (21), (22), (23), (24): Xaa is A or G or is absent

SEQ ID NO: 33879 - protein, 36 aa, Artificial Sequence; identical to SEQ ID NO: 31723
  GFR-binding peptide
  MOD_RES (31), (32): Xaa is C or S

SEQ ID NO: 33880 - protein, 39 aa, Artificial Sequence; identical to SEQ ID NO: 31724
  GFR-binding peptide
  MOD_RES (2), (4), (36), (37): Xaa is C or S

SEQ ID NO: 33881 - protein, 37 aa, Artificial Sequence; identical to SEQ ID NO: 31725
  GFR-binding peptide
  MOD_RES (1), (33), (34): Xaa is C or S

SEQ ID NO: 33882 - protein, 39 aa, Artificial Sequence; identical to SEQ ID NO: 31726
  GFR-binding peptide
  MOD_RES (2), (36), (37): Xaa is C or S
  MOD_RES (14), (15), (16), (17), (18): Xaa is A or G
  MOD_RES (19), (20), (21), (22): Xaa is A or G or is absent

SEQ ID NO: 33883 - protein, 32 aa, Artificial Sequence; identical to SEQ ID NO: 31727
  GFR-binding peptide
  MOD_RES (11), (12), (13), (14), (15): Xaa is A or G
  MOD_RES (16), (17), (18), (19): Xaa is A or G or is absent

SEQ ID NO: 33884 - protein, 40 aa, Artificial Sequence; identical to SEQ ID NO: 31728
  GFR-binding peptide
  MOD_RES (2), (4), (38), (39): Xaa is C or S
  MOD_RES (16), (17), (18), (19), (20): Xaa is A or G
  MOD_RES (21), (22), (23), (24): Xaa is A or G or is absent

SEQ ID NO: 33885 - protein, 40 aa, Artificial Sequence; identical to SEQ ID NO: 31729
  GFR-binding peptide
  MOD_RES (2), (36), (37): Xaa is C or S
  MOD_RES (14), (15), (16), (17), (18): Xaa is A or G
  MOD_RES (19), (20), (21), (22): Xaa is A or G or is absent

SEQ ID NO: 33886 - protein, 42 aa, Artificial Sequence; identical to SEQ ID NO: 31730
  GFR-binding peptide
  MOD_RES (2), (4), (38), (39): Xaa is C or S
  MOD_RES (16), (17), (18), (19), (20): Xaa is A or G
  MOD_RES (21), (22), (23), (24): Xaa is A or G or is absent

SEQ ID NO: 33887 - protein, 42 aa, Artificial Sequence; identical to SEQ ID NO: 31731
  GFR-binding peptide
  MOD_RES (2), (4), (36): Xaa is C or S

SEQ ID NO: 33888 - protein, 38 aa, Artificial Sequence; identical to SEQ ID NO: 31732
  GFR-binding peptide
  MOD_RES (2), (4), (38): Xaa is C or S
  MOD_RES (16), (17), (18), (19), (20): Xaa is A or G
  MOD_RES (21), (22), (23), (24): Xaa is A or G or is absent

SEQ ID NO: 33889 - protein, 33 aa, Artificial Sequence; identical to SEQ ID NO: 31733
  GFR-binding peptide
  MOD_RES (1), (32), (33): Xaa is C or S

SEQ ID NO: 33890 - protein, 36 aa, Artificial Sequence; identical to SEQ ID NO: 31734
  GFR-binding peptide
  MOD_RES (1), (35), (36): Xaa is C or S
  MOD_RES (13), (14), (15), (16), (17): Xaa is A or G
  MOD_RES (18), (19), (20), (21): Xaa is A or G or is absent

SEQ ID NO: 33891 - protein, 42 aa, Artificial Sequence; identical to SEQ ID NO: 31735
  GFR-binding peptide
  MOD_RES (2), (4), (38), (39): Xaa is C or S
  MOD_RES (16), (17), (18), (19), (20): Xaa is A or G
  MOD_RES (21), (22), (23), (24): Xaa is A or G or is absent

SEQ ID NO: 33892 - protein, 39 aa, Artificial Sequence; identical to SEQ ID NO: 31736
  GFR-binding peptide
  MOD_RES (1), (35): Xaa is C or S
  MOD_RES (13), (14), (15), (16), (17): Xaa is A or G
  MOD_RES (18), (19), (20), (21): Xaa is A or G or is absent

SEQ ID NO: 33893 - protein, 35 aa, Artificial Sequence; identical to SEQ ID NO: 31737
  GFR-binding peptide
  MOD_RES (2), (4): Xaa is C or S

SEQ ID NO: 33894 - protein, 41 aa, Artificial Sequence; identical to SEQ ID NO: 31738
  GFR-binding peptide
  MOD_RES (2), (4), (37), (38): Xaa is C or S

SEQ ID NO: 33895 - protein, 32 aa, Artificial Sequence; identical to SEQ ID NO: 31739
  GFR-binding peptide
  MOD_RES (1), (1): Xaa is C or S

SEQ ID NO: 33896 - protein, 41 aa, Artificial Sequence; identical to SEQ ID NO: 31740
  GFR-binding peptide
  MOD_RES (2), (4), (36), (37): Xaa is C or S

SEQ ID NO: 33897 - protein, 39 aa, Artificial Sequence; identical to SEQ ID NO: 31741
  GFR-binding peptide
  MOD_RES (2), (4), (35), (36): Xaa is C or S

SEQ ID NO: 33898 - protein, 34 aa, Artificial Sequence; identical to SEQ ID NO: 31742
  GFR-binding peptide
  MOD_RES (1), (1): Xaa is C or S
  MOD_RES (13), (14), (15), (16), (17): Xaa is A or G
  MOD_RES (18), (19), (20), (21): Xaa is A or G or is absent

SEQ ID NO: 33899 - protein, 38 aa, Artificial Sequence; identical to SEQ ID NO: 31743
  GFR-binding peptide
  MOD_RES (1), (33), (34): Xaa is C or S

SEQ ID NO: 33900 - protein, 38 aa, Artificial Sequence; identical to SEQ ID NO: 31744
  GFR-binding peptide
  MOD_RES (2), (36), (37): Xaa is C or S
  MOD_RES (14), (15), (16), (17), (18): Xaa is A or G
  MOD_RES (19), (20), (21), (22): Xaa is A or G or is absent

SEQ ID NO: 33901 - protein, 39 aa, Artificial Sequence; identical to SEQ ID NO: 31745
  GFR-binding peptide
  MOD_RES (1), (3), (37), (38): Xaa is C or S
  MOD_RES (15), (16), (17), (18), (19): Xaa is A or G
  MOD_RES (20), (21), (22), (23): Xaa is A or G or is absent

SEQ ID NO: 33902 - protein, 35 aa, Artificial Sequence; identical to SEQ ID NO: 31746
  GFR-binding peptide
  MOD_RES (31), (32): Xaa is C or S

SEQ ID NO: 33903 - protein, 42 aa, Artificial Sequence; identical to SEQ ID NO: 31747
  GFR-binding peptide
  MOD_RES (2), (4), (38), (39): Xaa is C or S
  MOD_RES (16), (17), (18), (19), (20): Xaa is A or G
  MOD_RES (21), (22), (23), (24): Xaa is A or G or is absent

SEQ ID NO: 33904 - protein, 42 aa, Artificial Sequence; identical to SEQ ID NO: 31748
  GFR-binding peptide
  MOD_RES (2), (4), (39), (40): Xaa is C or S
  MOD_RES (17), (18), (19), (20), (21): Xaa is A or G
  MOD_RES (22), (23), (24), (25): Xaa is A or G or is absent

SEQ ID NO: 33905 - protein, 36 aa, Artificial Sequence; identical to SEQ ID NO: 31749
  GFR-binding peptide
  MOD_RES (34), (35): Xaa is C or S
  MOD_RES (12), (13), (14), (15), (16): Xaa is A or G
  MOD_RES (17), (18), (19), (20): Xaa is A or G or is absent

SEQ ID NO: 33906 - protein, 37 aa, Artificial Sequence; identical to SEQ ID NO: 31750
  GFR-binding peptide
  MOD_RES (34), (35): Xaa is C or S
  MOD_RES (12), (13), (14), (15), (16): Xaa is A or G
  MOD_RES (17), (18), (19), (20): Xaa is A or G or is absent

SEQ ID NO: 33907 - protein, 35 aa, Artificial Sequence; identical to SEQ ID NO: 31751
  GFR-binding peptide
  MOD_RES (1), (33), (34): Xaa is C or S

SEQ ID NO: 33908 - protein, 38 aa, Artificial Sequence; identical to SEQ ID NO: 31752
  GFR-binding peptide
  MOD_RES (2), (36), (37): Xaa is C or S
  MOD_RES (14), (15), (16), (17), (18): Xaa is A or G
  MOD_RES (19), (20), (21), (22): Xaa is A or G or is absent

SEQ ID NO: 33909 - protein, 38 aa, Artificial Sequence; identical to SEQ ID NO: 31753
  GFR-binding peptide
  MOD_RES (32), (33): Xaa is C or S

SEQ ID NO: 33910 - protein, 34 aa, Artificial Sequence; identical to SEQ ID NO: 31754
  GFR-binding peptide
  MOD_RES (1), (1): Xaa is C or S
  MOD_RES (13), (14), (15), (16), (17): Xaa is A or G
  MOD_RES (18), (19), (20), (21): Xaa is A or G or is absent

SEQ ID NO: 33911 - protein, 35 aa, Artificial Sequence; identical to SEQ ID NO: 31755
  GFR-binding peptide
  MOD_RES (1), (33), (34): Xaa is C or S

SEQ ID NO: 33912 - protein, 43 aa, Artificial Sequence; identical to SEQ ID NO: 31756
  GFR-binding peptide
  MOD_RES (1), (3), (37), (38): Xaa is C or S
  MOD_RES (15), (16), (17), (18), (19): Xaa is A or G
  MOD_RES (20), (21), (22), (23): Xaa is A or G or is absent

SEQ ID NO: 33913 - protein, 41 aa, Artificial Sequence; identical to SEQ ID NO: 31757
  GFR-binding peptide
  MOD_RES (1), (3), (37), (38): Xaa is C or S
  MOD_RES (15), (16), (17), (18), (19): Xaa is A or G
  MOD_RES (20), (21), (22), (23): Xaa is A or G or is absent

SEQ ID NO: 33914 - protein, 35 aa, Artificial Sequence; identical to SEQ ID NO: 31758
  GFR-binding peptide
  MOD_RES (2), (35): Xaa is C or S
  MOD_RES (13), (14), (15), (16), (17): Xaa is A or G
  MOD_RES (18), (19), (20), (21): Xaa is A or G or is absent

SEQ ID NO: 33915 - protein, 37 aa, Artificial Sequence; identical to SEQ ID NO: 31759
  GFR-binding peptide
  MOD_RES (1), (33), (34): Xaa is C or S

SEQ ID NO: 33916 - protein, 39 aa, Artificial Sequence; identical to SEQ ID NO: 31760
  GFR-binding peptide
  MOD_RES (1), (3), (37), (38): Xaa is C or S
  MOD_RES (15), (16), (17), (18), (19): Xaa is A or G
  MOD_RES (20), (21), (22), (23): Xaa is A or G or is absent

SEQ ID NO: 33917 - protein, 41 aa, Artificial Sequence; identical to SEQ ID NO: 31761
  GFR-binding peptide
  MOD_RES (1), (3), (37), (38): Xaa is C or S
  MOD_RES (15), (16), (17), (18), (19): Xaa is A or G
  MOD_RES (20), (21), (22), (23): Xaa is A or G or is absent

SEQ ID NO: 33918 - protein, 34 aa, Artificial Sequence; identical to SEQ ID NO: 31762
  GFR-binding peptide
  MOD_RES (33), (34): Xaa is C or S

SEQ ID NO: 33919 - protein, 35 aa, Artificial Sequence; identical to SEQ ID NO: 31763
  GFR-binding peptide
  MOD_RES (1), (35): Xaa is C or S
  MOD_RES (13), (14), (15), (16), (17): Xaa is A or G
  MOD_RES (18), (19), (20), (21): Xaa is A or G or is absent

SEQ ID NO: 33920 - protein, 35 aa, Artificial Sequence; identical to SEQ ID NO: 31764
  GFR-binding peptide
  MOD_RES (1), (33), (34): Xaa is C or S

SEQ ID NO: 33921 - protein, 39 aa, Artificial Sequence; identical to SEQ ID NO: 31765
  GFR-binding peptide
  MOD_RES (2), (4), (38): Xaa is C or S
  MOD_RES (16), (17), (18), (19), (20): Xaa is A or G
  MOD_RES (21), (22), (23), (24): Xaa is A or G or is absent

SEQ ID NO: 33922 - protein, 40 aa, Artificial Sequence; identical to SEQ ID NO: 31766
  GFR-binding peptide
  MOD_RES (2), (4), (36), (37): Xaa is C or S

SEQ ID NO: 33923 - protein, 36 aa, Artificial Sequence; identical to SEQ ID NO: 31767
  GFR-binding peptide
  MOD_RES (1), (3), (35), (36): Xaa is C or S

SEQ ID NO: 33924 - protein, 40 aa, Artificial Sequence; identical to SEQ ID NO: 31768
  GFR-binding peptide
  MOD_RES (2), (4), (36), (37): Xaa is C or S

SEQ ID NO: 33925 - protein, 37 aa, Artificial Sequence; identical to SEQ ID NO: 31769
  GFR-binding peptide
  MOD_RES (1), (33): Xaa is C or S

SEQ ID NO: 33926 - protein, 41 aa, Artificial Sequence; identical to SEQ ID NO: 31770
  GFR-binding peptide
  MOD_RES (2), (4), (36), (37): Xaa is C or S

SEQ ID NO: 33927 - protein, 42 aa, Artificial Sequence; identical to SEQ ID NO: 31771
  GFR-binding peptide
  MOD_RES (1), (3), (37), (38): Xaa is C or S
  MOD_RES (15), (16), (17), (18), (19): Xaa is A or G
  MOD_RES (20), (21), (22), (23): Xaa is A or G or is absent

SEQ ID NO: 33928 - protein, 35 aa, Artificial Sequence; identical to SEQ ID NO: 31772
  GFR-binding peptide
  MOD_RES (1), (35): Xaa is C or S
  MOD_RES (13), (14), (15), (16), (17): Xaa is A or G
  MOD_RES (18), (19), (20), (21): Xaa is A or G or is absent

SEQ ID NO: 33929 - protein, 36 aa, Artificial Sequence; identical to SEQ ID NO: 31773
  GFR-binding peptide
  MOD_RES (2), (34), (35): Xaa is C or S

SEQ ID NO: 33930 - protein, 37 aa, Artificial Sequence; identical to SEQ ID NO: 31774
  GFR-binding peptide
  MOD_RES (2), (4): Xaa is C or S
  MOD_RES (16), (17), (18), (19), (20): Xaa is A or G
  MOD_RES (21), (22), (23), (24): Xaa is A or G or is absent

SEQ ID NO: 33931 - protein, 32 aa, Artificial Sequence; identical to SEQ ID NO: 31775
  GFR-binding peptide

SEQ ID NO: 33932 - protein, 38 aa, Artificial Sequence; identical to SEQ ID NO: 31776
  GFR-binding peptide
  MOD_RES (1), (3), (36), (37): Xaa is C or S
  MOD_RES (14), (15), (16), (17), (18): Xaa is A or G
  MOD_RES (19), (20), (21), (22): Xaa is A or G or is absent

SEQ ID NO: 33933 - protein, 38 aa, Artificial Sequence; identical to SEQ ID NO: 31777
  GFR-binding peptide
  MOD_RES (1), (35), (36): Xaa is C or S
  MOD_RES (13), (14), (15), (16), (17): Xaa is A or G
  MOD_RES (18), (19), (20), (21): Xaa is A or G or is absent

SEQ ID NO: 33934 - protein, 40 aa, Artificial Sequence; identical to SEQ ID NO: 31778
  GFR-binding peptide
  MOD_RES (1), (3), (36), (37): Xaa is C or S
  MOD_RES (14), (15), (16), (17), (18): Xaa is A or G
  MOD_RES (19), (20), (21), (22): Xaa is A or G or is absent

SEQ ID NO: 33935 - protein, 35 aa, Artificial Sequence; identical to SEQ ID NO: 31779
  GFR-binding peptide
  MOD_RES (2), (34), (35): Xaa is C or S

SEQ ID NO: 33936 - protein, 36 aa, Artificial Sequence; identical to SEQ ID NO: 31780
  GFR-binding peptide
  MOD_RES (31), (32): Xaa is C or S

SEQ ID NO: 33937 - protein, 40 aa, Artificial Sequence; identical to SEQ ID NO: 31781
  GFR-binding peptide
  MOD_RES (2), (34): Xaa is C or S

SEQ ID NO: 33938 - protein, 39 aa, Artificial Sequence; identical to SEQ ID NO: 31782
  GFR-binding peptide
  MOD_RES (2), (4), (36), (37): Xaa is C or S

SEQ ID NO: 33939 - protein, 35 aa, Artificial Sequence; identical to SEQ ID NO: 31783
  GFR-binding peptide
  MOD_RES (1), (3): Xaa is C or S

SEQ ID NO: 33940 - protein, 36 aa, Artificial Sequence; identical to SEQ ID NO: 31784
  GFR-binding peptide
  MOD_RES (31), (32): Xaa is C or S

SEQ ID NO: 33941 - protein, 37 aa, Artificial Sequence; identical to SEQ ID NO: 31785
  GFR-binding peptide
  MOD_RES (1), (3), (34), (35): Xaa is C or S

SEQ ID NO: 33942 - protein, 41 aa, Artificial Sequence; identical to SEQ ID NO: 31786
  GFR-binding peptide
  MOD_RES (1), (3), (35), (36): Xaa is C or S

SEQ ID NO: 33943 - protein, 36 aa, Artificial Sequence; identical to SEQ ID NO: 31787
  GFR-binding peptide
  MOD_RES (34), (35): Xaa is C or S
  MOD_RES (12), (13), (14), (15), (16): Xaa is A or G
  MOD_RES (17), (18), (19), (20): Xaa is A or G or is absent

SEQ ID NO: 33944 - protein, 36 aa, Artificial Sequence; identical to SEQ ID NO: 31788
  GFR-binding peptide
  MOD_RES (33), (34): Xaa is C or S
  MOD_RES (11), (12), (13), (14), (15): Xaa is A or G
  MOD_RES (16), (17), (18), (19): Xaa is A or G or is absent

SEQ ID NO: 33945 - protein, 36 aa, Artificial Sequence; identical to SEQ ID NO: 31789
  GFR-binding peptide
  MOD_RES (2), (36): Xaa is C or S
  MOD_RES (14), (15), (16), (17), (18): Xaa is A or G
  MOD_RES (19), (20), (21), (22): Xaa is A or G or is absent

SEQ ID NO: 33946 - protein, 32 aa, Artificial Sequence; identical to SEQ ID NO: 31790
  GFR-binding peptide
  MOD_RES (11), (12), (13), (14), (15): Xaa is A or G
  MOD_RES (16), (17), (18), (19): Xaa is A or G or is absent

SEQ ID NO: 33947 - protein, 40 aa, Artificial Sequence; identical to SEQ ID NO: 31791
  GFR-binding peptide
  MOD_RES (1), (35), (36): Xaa is C or S
  MOD_RES (13), (14), (15), (16), (17): Xaa is A or G
  MOD_RES (18), (19), (20), (21): Xaa is A or G or is absent

SEQ ID NO: 33948 - protein, 39 aa, Artificial Sequence; identical to SEQ ID NO: 31792
  GFR-binding peptide
  MOD_RES (2), (34), (35): Xaa is C or S

SEQ ID NO: 33949 - protein, 35 aa, Artificial Sequence; identical to SEQ ID NO: 31793
  GFR-binding peptide
  MOD_RES (1), (3): Xaa is C or S
  MOD_RES (14), (15), (16), (17), (18): Xaa is A or G
  MOD_RES (19), (20), (21), (22): Xaa is A or G or is absent

SEQ ID NO: 33950 - protein, 36 aa, Artificial Sequence; identical to SEQ ID NO: 31794
  GFR-binding peptide
  MOD_RES (31), (32): Xaa is C or S

SEQ ID NO: 33951 - protein, 37 aa, Artificial Sequence; identical to SEQ ID NO: 31795
  GFR-binding peptide
  MOD_RES (1), (3), (35), (36): Xaa is C or S

SEQ ID NO: 33952 - protein, 40 aa, Artificial Sequence; identical to SEQ ID NO: 31796
  GFR-binding peptide
  MOD_RES (1), (3), (37), (38): Xaa is C or S
  MOD_RES (15), (16), (17), (18), (19): Xaa is A or G
  MOD_RES (20), (21), (22), (23): Xaa is A or G or is absent

SEQ ID NO: 33953 - protein, 37 aa, Artificial Sequence; identical to SEQ ID NO: 31797
  GFR-binding peptide
  MOD_RES (2), (4), (37): Xaa is C or S
  MOD_RES (15), (16), (17), (18), (19): Xaa is A or G
  MOD_RES (20), (21), (22), (23): Xaa is A or G or is absent

SEQ ID NO: 33954 - protein, 41 aa, Artificial Sequence; identical to SEQ ID NO: 31798
  GFR-binding peptide
  MOD_RES (2), (4), (36): Xaa is C or S

SEQ ID NO: 33955 - protein, 37 aa, Artificial Sequence; identical to SEQ ID NO: 31799
  GFR-binding peptide
  MOD_RES (2), (4): Xaa is C or S
  MOD_RES (16), (17), (18), (19), (20): Xaa is A or G
  MOD_RES (21), (22), (23), (24): Xaa is A or G or is absent

SEQ ID NO: 33956 - protein, 35 aa, Artificial Sequence; identical to SEQ ID NO: 31800
  GFR-binding peptide
  MOD_RES (34), (35): Xaa is C or S
  MOD_RES (12), (13), (14), (15), (16): Xaa is A or G
  MOD_RES (17), (18), (19), (20): Xaa is A or G or is absent

SEQ ID NO: 33957 - protein, 45 aa, Artificial Sequence; identical to SEQ ID NO: 31801
  GFR-binding peptide
  MOD_RES (2), (4), (39), (40): Xaa is C or S
  MOD_RES (17), (18), (19), (20), (21): Xaa is A or G
  MOD_RES (22), (23), (24), (25): Xaa is A or G or is absent

SEQ ID NO: 33958 - protein, 33 aa, Artificial Sequence; identical to SEQ ID NO: 31802
  GFR-binding peptide
  MOD_RES (32), (33): Xaa is C or S

SEQ ID NO: 33959 - protein, 36 aa, Artificial Sequence; identical to SEQ ID NO: 31803
  GFR-binding peptide
  MOD_RES (2), (4), (36): Xaa is C or S

SEQ ID NO: 33960 - protein, 39 aa, Artificial Sequence; identical to SEQ ID NO: 31804
  GFR-binding peptide
  MOD_RES (33), (34): Xaa is C or S
  MOD_RES (11), (12), (13), (14), (15): Xaa is A or G
  MOD_RES (16), (17), (18), (19): Xaa is A or G or is absent

SEQ ID NO: 33961 - protein, 32 aa, Artificial Sequence; identical to SEQ ID NO: 31805
  GFR-binding peptide
  MOD_RES (1), (1): Xaa is C or S

SEQ ID NO: 33962 - protein, 35 aa, Artificial Sequence; identical to SEQ ID NO: 31806
  GFR-binding peptide
  MOD_RES (33), (34): Xaa is C or S
  MOD_RES (11), (12), (13), (14), (15): Xaa is A or G
  MOD_RES (16), (17), (18), (19): Xaa is A or G or is absent

SEQ ID NO: 33963 - protein, 39 aa, Artificial Sequence; identical to SEQ ID NO: 31807
  GFR-binding peptide
  MOD_RES (1), (35), (36): Xaa is C or S
  MOD_RES (13), (14), (15), (16), (17): Xaa is A or G
  MOD_RES (18), (19), (20), (21): Xaa is A or G or is absent

SEQ ID NO: 33964 - protein, 38 aa, Artificial Sequence; identical to SEQ ID NO: 31808
  GFR-binding peptide
  MOD_RES (33), (34): Xaa is C or S
  MOD_RES (11), (12), (13), (14), (15): Xaa is A or G
  MOD_RES (16), (17), (18), (19): Xaa is A or G or is absent

SEQ ID NO: 33965 - protein, 32 aa, Artificial Sequence; identical to SEQ ID NO: 31809
  GFR-binding peptide
  MOD_RES (11), (12), (13), (14), (15): Xaa is A or G
  MOD_RES (16), (17), (18), (19): Xaa is A or G or is absent

SEQ ID NO: 33966 - protein, 36 aa, Artificial Sequence; identical to SEQ ID NO: 31810
  GFR-binding peptide
  MOD_RES (2), (4), (36): Xaa is C or S

SEQ ID NO: 33967 - protein, 31 aa, Artificial Sequence; identical to SEQ ID NO: 31811
  GFR-binding peptide
  MOD_RES (31), (31): Xaa is C or S

SEQ ID NO: 33968 - protein, 41 aa, Artificial Sequence; identical to SEQ ID NO: 31812
  GFR-binding peptide
  MOD_RES (2), (36), (37): Xaa is C or S
  MOD_RES (14), (15), (16), (17), (18): Xaa is A or G
  MOD_RES (19), (20), (21), (22): Xaa is A or G or is absent

SEQ ID NO: 33969 - protein, 34 aa, Artificial Sequence; identical to SEQ ID NO: 31813
  GFR-binding peptide
  MOD_RES (32), (33): Xaa is C or S

SEQ ID NO: 33970 - protein, 34 aa, Artificial Sequence; identical to SEQ ID NO: 31814
  GFR-binding peptide
  MOD_RES (1), (3): Xaa is C or S

SEQ ID NO: 33971 - protein, 34 aa, Artificial Sequence; identical to SEQ ID NO: 31815
  GFR-binding peptide
  MOD_RES (32), (33): Xaa is C or S

SEQ ID NO: 33972 - protein, 32 aa, Artificial Sequence; identical to SEQ ID NO: 31816
  GFR-binding peptide
  MOD_RES (32), (32): Xaa is C or S

SEQ ID NO: 33973 - protein, 41 aa, Artificial Sequence; identical to SEQ ID NO: 31817
  GFR-binding peptide
  MOD_RES (2), (4), (38), (39): Xaa is C or S
  MOD_RES (16), (17), (18), (19), (20): Xaa is A or G
  MOD_RES (21), (22), (23), (24): Xaa is A or G or is absent

SEQ ID NO: 33974 - protein, 40 aa, Artificial Sequence; identical to SEQ ID NO: 31818
  GFR-binding peptide
  MOD_RES (2), (34), (35): Xaa is C or S

SEQ ID NO: 33975 - protein, 40 aa, Artificial Sequence; identical to SEQ ID NO: 31819
  GFR-binding peptide
  MOD_RES (2), (4), (38): Xaa is C or S
  MOD_RES (16), (17), (18), (19), (20): Xaa is A or G
  MOD_RES (21), (22), (23), (24): Xaa is A or G or is absent

SEQ ID NO: 33976 - protein, 33 aa, Artificial Sequence; identical to SEQ ID NO: 31820
  GFR-binding peptide
  MOD_RES (12), (13), (14), (15), (16): Xaa is A or G
  MOD_RES (17), (18), (19), (20): Xaa is A or G or is absent

SEQ ID NO: 33977 - protein, 40 aa, Artificial Sequence; identical to SEQ ID NO: 31821
  GFR-binding peptide
  MOD_RES (2), (34), (35): Xaa is C or S

SEQ ID NO: 33978 - protein, 33 aa, Artificial Sequence; identical to SEQ ID NO: 31822
  GFR-binding peptide
  MOD_RES (12), (13), (14), (15), (16): Xaa is A or G
  MOD_RES (17), (18), (19), (20): Xaa is A or G or is absent

SEQ ID NO: 33979 - protein, 38 aa, Artificial Sequence; identical to SEQ ID NO: 31823
  GFR-binding peptide
  MOD_RES (32), (33): Xaa is C or S

SEQ ID NO: 33980 - protein, 36 aa, Artificial Sequence; identical to SEQ ID NO: 31824
  GFR-binding peptide
  MOD_RES (34), (35): Xaa is C or S
  MOD_RES (12), (13), (14), (15), (16): Xaa is A or G
  MOD_RES (17), (18), (19), (20): Xaa is A or G or is absent

SEQ ID NO: 33981 - protein, 36 aa, Artificial Sequence; identical to SEQ ID NO: 31825
  GFR-binding peptide
  MOD_RES (1), (3): Xaa is C or S
  MOD_RES (15), (16), (17), (18), (19): Xaa is A or G
  MOD_RES (20), (21), (22), (23): Xaa is A or G or is absent

SEQ ID NO: 33982 - protein, 37 aa, Artificial Sequence; identical to SEQ ID NO: 31826
  GFR-binding peptide
  MOD_RES (2), (4): Xaa is C or S
  MOD_RES (16), (17), (18), (19), (20): Xaa is A or G
  MOD_RES (21), (22), (23), (24): Xaa is A or G or is absent

SEQ ID NO: 33983 - protein, 42 aa, Artificial Sequence; identical to SEQ ID NO: 31827
  GFR-binding peptide
  MOD_RES (2), (36), (37): Xaa is C or S
  MOD_RES (14), (15), (16), (17), (18): Xaa is A or G
  MOD_RES (19), (20), (21), (22): Xaa is A or G or is absent

SEQ ID NO: 33984 - protein, 38 aa, Artificial Sequence; identical to SEQ ID NO: 31828
  GFR-binding peptide
  MOD_RES (1), (35), (36): Xaa is C or S
  MOD_RES (13), (14), (15), (16), (17): Xaa is A or G
  MOD_RES (18), (19), (20), (21): Xaa is A or G or is absent

SEQ ID NO: 33985 - protein, 38 aa, Artificial Sequence; identical to SEQ ID NO: 31829
  GFR-binding peptide
  MOD_RES (2), (36), (37): Xaa is C or S
  MOD_RES (14), (15), (16), (17), (18): Xaa is A or G
  MOD_RES (19), (20), (21), (22): Xaa is A or G or is absent

SEQ ID NO: 33986 - protein, 34 aa, Artificial Sequence; identical to SEQ ID NO: 31830
  GFR-binding peptide
  MOD_RES (1), (33): Xaa is C or S

SEQ ID NO: 33987 - protein, 38 aa, Artificial Sequence; identical to SEQ ID NO: 31831
  GFR-binding peptide
  MOD_RES (1), (35), (36): Xaa is C or S
  MOD_RES (13), (14), (15), (16), (17): Xaa is A or G
  MOD_RES (18), (19), (20), (21): Xaa is A or G or is absent

SEQ ID NO: 33988 - protein, 33 aa, Artificial Sequence; identical to SEQ ID NO: 31832
  GFR-binding peptide
  MOD_RES (12), (13), (14), (15), (16): Xaa is A or G
  MOD_RES (17), (18), (19), (20): Xaa is A or G or is absent

SEQ ID NO: 33989 - protein, 43 aa, Artificial Sequence; identical to SEQ ID NO: 31833
  GFR-binding peptide
  MOD_RES (2), (4), (39), (40): Xaa is C or S
  MOD_RES (17), (18), (19), (20), (21): Xaa is A or G
  MOD_RES (22), (23), (24), (25): Xaa is A or G or is absent

SEQ ID NO: 33990 - protein, 40 aa, Artificial Sequence; identical to SEQ ID NO: 31834
  GFR-binding peptide
  MOD_RES (1), (3), (35), (36): Xaa is C or S

SEQ ID NO: 33991 - protein, 36 aa, Artificial Sequence; identical to SEQ ID NO: 31835
  GFR-binding peptide
  MOD_RES (1), (3), (35), (36): Xaa is C or S

SEQ ID NO: 33992 - protein, 36 aa, Artificial Sequence; identical to SEQ ID NO: 31836
  GFR-binding peptide
  MOD_RES (1), (3): Xaa is C or S
  MOD_RES (15), (16), (17), (18), (19): Xaa is A or G
  MOD_RES (20), (21), (22), (23): Xaa is A or G or is absent

SEQ ID NO: 33993 - protein, 30 aa, Artificial Sequence; identical to SEQ ID NO: 31837
  GFR-binding peptide

SEQ ID NO: 33994 - protein, 35 aa, Artificial Sequence; identical to SEQ ID NO: 31838
  GFR-binding peptide
  MOD_RES (2), (34), (35): Xaa is C or S

SEQ ID NO: 33995 - protein, 38 aa, Artificial Sequence; identical to SEQ ID NO: 31839
  GFR-binding peptide
  MOD_RES (35), (36): Xaa is C or S
  MOD_RES (13), (14), (15), (16), (17): Xaa is A or G
  MOD_RES (18), (19), (20), (21): Xaa is A or G or is absent

SEQ ID NO: 33996 - protein, 34 aa, Artificial Sequence; identical to SEQ ID NO: 31840
  GFR-binding peptide
  MOD_RES (1), (3): Xaa is C or S

SEQ ID NO: 33997 - protein, 33 aa, Artificial Sequence; identical to SEQ ID NO: 31841
  GFR-binding peptide
  MOD_RES (2), (2): Xaa is C or S

SEQ ID NO: 33998 - protein, 34 aa, Artificial Sequence; identical to SEQ ID NO: 31842
  GFR-binding peptide
  MOD_RES (31), (32): Xaa is C or S

SEQ ID NO: 33999 - protein, 40 aa, Artificial Sequence; identical to SEQ ID NO: 31843
  GFR-binding peptide
  MOD_RES (1), (35), (36): Xaa is C or S
  MOD_RES (13), (14), (15), (16), (17): Xaa is A or G
  MOD_RES (18), (19), (20), (21): Xaa is A or G or is absent

SEQ ID NO: 34000 - protein, 33 aa, Artificial Sequence; identical to SEQ ID NO: 31844
  GFR-binding peptide
  MOD_RES (12), (13), (14), (15), (16): Xaa is A or G
  MOD_RES (17), (18), (19), (20): Xaa is A or G or is absent

SEQ ID NO: 34001 - protein, 37 aa, Artificial Sequence; identical to SEQ ID NO: 31845
  GFR-binding peptide
  MOD_RES (2), (4), (36), (37): Xaa is C or S

SEQ ID NO: 34002 - protein, 41 aa, Artificial Sequence; identical to SEQ ID NO: 31846
  GFR-binding peptide
  MOD_RES (1), (3), (35), (36): Xaa is C or S

SEQ ID NO: 34003 - protein, 41 aa, Artificial Sequence; identical to SEQ ID NO: 31847
  GFR-binding peptide
  MOD_RES (1), (3), (35), (36): Xaa is C or S

SEQ ID NO: 34004 - protein, 35 aa, Artificial Sequence; identical to SEQ ID NO: 31848
  GFR-binding peptide
  MOD_RES (33), (33): Xaa is C or S
  MOD_RES (11), (12), (13), (14), (15): Xaa is A or G
  MOD_RES (16), (17), (18), (19): Xaa is A or G or is absent

SEQ ID NO: 34005 - protein, 38 aa, Artificial Sequence; identical to SEQ ID NO: 31849
  GFR-binding peptide
  MOD_RES (2), (34), (35): Xaa is C or S

SEQ ID NO: 34006 - protein, 37 aa, Artificial Sequence; identical to SEQ ID NO: 31850
  GFR-binding peptide
  MOD_RES (1), (35), (36): Xaa is C or S
  MOD_RES (13), (14), (15), (16), (17): Xaa is A or G
  MOD_RES (18), (19), (20), (21): Xaa is A or G or is absent

SEQ ID NO: 34007 - protein, 40 aa, Artificial Sequence; identical to SEQ ID NO: 31851
  GFR-binding peptide
  MOD_RES (2), (4), (38), (39): Xaa is C or S
  MOD_RES (16), (17), (18), (19), (20): Xaa is A or G
  MOD_RES (21), (22), (23), (24): Xaa is A or G or is absent

SEQ ID NO: 34008 - protein, 40 aa, Artificial Sequence; identical to SEQ ID NO: 31852
  GFR-binding peptide
  MOD_RES (2), (4), (35), (36): Xaa is C or S

SEQ ID NO: 34009 - protein, 41 aa, Artificial Sequence; identical to SEQ ID NO: 31853
  GFR-binding peptide
  MOD_RES (1), (3), (37), (38): Xaa is C or S
  MOD_RES (15), (16), (17), (18), (19): Xaa is A or G
  MOD_RES (20), (21), (22), (23): Xaa is A or G or is absent

SEQ ID NO: 34010 - protein, 39 aa, Artificial Sequence; identical to SEQ ID NO: 31854
  GFR-binding peptide
  MOD_RES (2), (34), (35): Xaa is C or S

SEQ ID NO: 34011 - protein, 35 aa, Artificial Sequence; identical to SEQ ID NO: 31855
  GFR-binding peptide
  MOD_RES (2), (34), (35): Xaa is C or S

SEQ ID NO: 34012 - protein, 31 aa, Artificial Sequence; identical to SEQ ID NO: 31856
  GFR-binding peptide

SEQ ID NO: 34013 - protein, 35 aa, Artificial Sequence; identical to SEQ ID NO: 31857
  GFR-binding peptide
  MOD_RES (31), (32): Xaa is C or S

SEQ ID NO: 34014 - protein, 37 aa, Artificial Sequence; identical to SEQ ID NO: 31858
  GFR-binding peptide
  MOD_RES (2), (4), (36), (37): Xaa is C or S

SEQ ID NO: 34015 - protein, 41 aa, Artificial Sequence; identical to SEQ ID NO: 31859
  GFR-binding peptide
  MOD_RES (2), (36), (37): Xaa is C or S
  MOD_RES (14), (15), (16), (17), (18): Xaa is A or G
  MOD_RES (19), (20), (21), (22): Xaa is A or G or is absent

SEQ ID NO: 34016 - protein, 36 aa, Artificial Sequence; identical to SEQ ID NO: 31860
  GFR-binding peptide
  MOD_RES (1), (3), (35), (36): Xaa is C or S

SEQ ID NO: 34017 - protein, 33 aa, Artificial Sequence; identical to SEQ ID NO: 31861
  GFR-binding peptide
  MOD_RES (31), (32): Xaa is C or S

SEQ ID NO: 34018 - protein, 43 aa, Artificial Sequence; identical to SEQ ID NO: 31862
  GFR-binding peptide
  MOD_RES (2), (4), (37), (38): Xaa is C or S
  MOD_RES (15), (16), (17), (18), (19): Xaa is A or G
  MOD_RES (20), (21), (22), (23): Xaa is A or G or is absent

SEQ ID NO: 34019 - protein, 34 aa, Artificial Sequence; identical to SEQ ID NO: 31863
  GFR-binding peptide
  MOD_RES (1), (33), (34): Xaa is C or S

SEQ ID NO: 34020 - protein, 36 aa, Artificial Sequence; identical to SEQ ID NO: 31864
  GFR-binding peptide
  MOD_RES (1), (3), (36): Xaa is C or S

SEQ ID NO: 34021 - protein, 31 aa, Artificial Sequence; identical to SEQ ID NO: 31865
  GFR-binding peptide
  MOD_RES (31), (31): Xaa is C or S

SEQ ID NO: 34022 - protein, 37 aa, Artificial Sequence; identical to SEQ ID NO: 31866
  GFR-binding peptide
  MOD_RES (33), (34): Xaa is C or S
  MOD_RES (11), (12), (13), (14), (15): Xaa is A or G
  MOD_RES (16), (17), (18), (19): Xaa is A or G or is absent

SEQ ID NO: 34023 - protein, 41 aa, Artificial Sequence; identical to SEQ ID NO: 31867
  GFR-binding peptide
  MOD_RES (2), (4), (38), (39): Xaa is C or S
  MOD_RES (16), (17), (18), (19), (20): Xaa is A or G
  MOD_RES (21), (22), (23), (24): Xaa is A or G or is absent

SEQ ID NO: 34024 - protein, 33 aa, Artificial Sequence; identical to SEQ ID NO: 31868
  GFR-binding peptide
  MOD_RES (31), (32): Xaa is C or S

SEQ ID NO: 34025 - protein, 36 aa, Artificial Sequence; identical to SEQ ID NO: 31869
  GFR-binding peptide
  MOD_RES (2), (4), (36): Xaa is C or S

SEQ ID NO: 34026 - protein, 36 aa, Artificial Sequence; identical to SEQ ID NO: 31870
  GFR-binding peptide
  MOD_RES (1), (3), (36): Xaa is C or S
  MOD_RES (14), (15), (16), (17), (18): Xaa is A or G
  MOD_RES (19), (20), (21), (22): Xaa is A or G or is absent

SEQ ID NO: 34027 - protein, 32 aa, Artificial Sequence; identical to SEQ ID NO: 31871
  GFR-binding peptide
  MOD_RES (11), (12), (13), (14), (15): Xaa is A or G
  MOD_RES (16), (17), (18), (19): Xaa is A or G or is absent

SEQ ID NO: 34028 - protein, 38 aa, Artificial Sequence; identical to SEQ ID NO: 31872
  GFR-binding peptide
  MOD_RES (2), (4), (38): Xaa is C or S
  MOD_RES (16), (17), (18), (19), (20): Xaa is A or G
  MOD_RES (21), (22), (23), (24): Xaa is A or G or is absent

SEQ ID NO: 34029 - protein, 44 aa, Artificial Sequence; identical to SEQ ID NO: 31873
  GFR-binding peptide
  MOD_RES (2), (4), (38), (39): Xaa is C or S
  MOD_RES (16), (17), (18), (19), (20): Xaa is A or G
  MOD_RES (21), (22), (23), (24): Xaa is A or G or is absent

SEQ ID NO: 34030 - protein, 41 aa, Artificial Sequence; identical to SEQ ID NO: 31874
  GFR-binding peptide
  MOD_RES (1), (35), (36): Xaa is C or S
  MOD_RES (13), (14), (15), (16), (17): Xaa is A or G
  MOD_RES (18), (19), (20), (21): Xaa is A or G or is absent

SEQ ID NO: 34031 - protein, 34 aa, Artificial Sequence; identical to SEQ ID NO: 31875
  GFR-binding peptide
  MOD_RES (34), (34): Xaa is C or S
  MOD_RES (12), (13), (14), (15), (16): Xaa is A or G
  MOD_RES (17), (18), (19), (20): Xaa is A or G or is absent

SEQ ID NO: 34032 - protein, 36 aa, Artificial Sequence; identical to SEQ ID NO: 31876
  GFR-binding peptide
  MOD_RES (1), (33), (34): Xaa is C or S

SEQ ID NO: 34033 - protein, 37 aa, Artificial Sequence; identical to SEQ ID NO: 31877
  GFR-binding peptide
  MOD_RES (2), (35), (36): Xaa is C or S
  MOD_RES (13), (14), (15), (16), (17): Xaa is A or G
  MOD_RES (18), (19), (20), (21): Xaa is A or G or is absent

SEQ ID NO: 34034 - protein, 35 aa, Artificial Sequence; identical to SEQ ID NO: 31878
  GFR-binding peptide
  MOD_RES (31), (31): Xaa is C or S

SEQ ID NO: 34035 - protein, 35 aa, Artificial Sequence; identical to SEQ ID NO: 31879
  GFR-binding peptide
  MOD_RES (33), (34): Xaa is C or S
  MOD_RES (11), (12), (13), (14), (15): Xaa is A or G
  MOD_RES (16), (17), (18), (19): Xaa is A or G or is absent

SEQ ID NO: 34036 - protein, 39 aa, Artificial Sequence; identical to SEQ ID NO: 31880
  GFR-binding peptide
  MOD_RES (34), (35): Xaa is C or S
  MOD_RES (12), (13), (14), (15), (16): Xaa is A or G
  MOD_RES (17), (18), (19), (20): Xaa is A or G or is absent

SEQ ID NO: 34037 - protein, 35 aa, Artificial Sequence; identical to SEQ ID NO: 31881
  GFR-binding peptide
  MOD_RES (2), (4): Xaa is C or S

SEQ ID NO: 34038 - protein, 38 aa, Artificial Sequence; identical to SEQ ID NO: 31882
  GFR-binding peptide
  MOD_RES (2), (4), (38): Xaa is C or S
  MOD_RES (16), (17), (18), (19), (20): Xaa is A or G
  MOD_RES (21), (22), (23), (24): Xaa is A or G or is absent

SEQ ID NO: 34039 - protein, 34 aa, Artificial Sequence; identical to SEQ ID NO: 31883
  GFR-binding peptide
  MOD_RES (32), (33): Xaa is C or S

SEQ ID NO: 34040 - protein, 36 aa, Artificial Sequence; identical to SEQ ID NO: 31884
  GFR-binding peptide
  MOD_RES (1), (35), (36): Xaa is C or S
  MOD_RES (13), (14), (15), (16), (17): Xaa is A or G
  MOD_RES (18), (19), (20), (21): Xaa is A or G or is absent

SEQ ID NO: 34041 - protein, 35 aa, Artificial Sequence; identical to SEQ ID NO: 31885
  GFR-binding peptide
  MOD_RES (1), (33), (34): Xaa is C or S

SEQ ID NO: 34042 - protein, 35 aa, Artificial Sequence; identical to SEQ ID NO: 31886
  GFR-binding peptide
  MOD_RES (2), (4): Xaa is C or S

SEQ ID NO: 34043 - protein, 39 aa, Artificial Sequence; identical to SEQ ID NO: 31887
  GFR-binding peptide
  MOD_RES (1), (3), (37), (38): Xaa is C or S
  MOD_RES (15), (16), (17), (18), (19): Xaa is A or G
  MOD_RES (20), (21), (22), (23): Xaa is A or G or is absent

SEQ ID NO: 34044 - protein, 39 aa, Artificial Sequence; identical to SEQ ID NO: 31888
  GFR-binding peptide
  MOD_RES (2), (36): Xaa is C or S
  MOD_RES (14), (15), (16), (17), (18): Xaa is A or G
  MOD_RES (19), (20), (21), (22): Xaa is A or G or is absent

SEQ ID NO: 34045 - protein, 40 aa, Artificial Sequence; identical to SEQ ID NO: 31889
  GFR-binding peptide
  MOD_RES (1), (3), (35), (36): Xaa is C or S

SEQ ID NO: 34046 - protein, 33 aa, Artificial Sequence; identical to SEQ ID NO: 31890
  GFR-binding peptide
  MOD_RES (1), (33): Xaa is C or S

SEQ ID NO: 34047 - protein, 40 aa, Artificial Sequence; identical to SEQ ID NO: 31891
  GFR-binding peptide
  MOD_RES (1), (35), (36): Xaa is C or S
  MOD_RES (13), (14), (15), (16), (17): Xaa is A or G
  MOD_RES (18), (19), (20), (21): Xaa is A or G or is absent

SEQ ID NO: 34048 - protein, 38 aa, Artificial Sequence; identical to SEQ ID NO: 31892
  GFR-binding peptide
  MOD_RES (2), (4): Xaa is C or S
  MOD_RES (17), (18), (19), (20), (21): Xaa is A or G
  MOD_RES (22), (23), (24), (25): Xaa is A or G or is absent

SEQ ID NO: 34049 - protein, 37 aa, Artificial Sequence; identical to SEQ ID NO: 31893
  GFR-binding peptide
  MOD_RES (1), (3), (35), (36): Xaa is C or S

SEQ ID NO: 34050 - protein, 38 aa, Artificial Sequence; identical to SEQ ID NO: 31894
  GFR-binding peptide
  MOD_RES (32), (33): Xaa is C or S

SEQ ID NO: 34051 - protein, 36 aa, Artificial Sequence; identical to SEQ ID NO: 31895
  GFR-binding peptide
  MOD_RES (2), (4), (36): Xaa is C or S

SEQ ID NO: 34052 - protein, 39 aa, Artificial Sequence; identical to SEQ ID NO: 31896
  GFR-binding peptide
  MOD_RES (2), (36), (37): Xaa is C or S
  MOD_RES (14), (15), (16), (17), (18): Xaa is A or G
  MOD_RES (19), (20), (21), (22): Xaa is A or G or is absent

SEQ ID NO: 34053 - protein, 38 aa, Artificial Sequence; identical to SEQ ID NO: 31897
  GFR-binding peptide
  MOD_RES (2), (4), (36), (37): Xaa is C or S

SEQ ID NO: 34054 - protein, 42 aa, Artificial Sequence; identical to SEQ ID NO: 31898
  GFR-binding peptide
  MOD_RES (2), (4), (38), (39): Xaa is C or S
  MOD_RES (16), (17), (18), (19), (20): Xaa is A or G
  MOD_RES (21), (22), (23), (24): Xaa is A or G or is absent

SEQ ID NO: 34055 - protein, 38 aa, Artificial Sequence; identical to SEQ ID NO: 31899
  GFR-binding peptide
  MOD_RES (1), (33), (34): Xaa is C or S

SEQ ID NO: 34056 - protein, 40 aa, Artificial Sequence; identical to SEQ ID NO: 31900
  GFR-binding peptide
  MOD_RES (1), (3), (37), (38): Xaa is C or S
  MOD_RES (15), (16), (17), (18), (19): Xaa is A or G
  MOD_RES (20), (21), (22), (23): Xaa is A or G or is absent

SEQ ID NO: 34057 - protein, 36 aa, Artificial Sequence; identical to SEQ ID NO: 31901
  GFR-binding peptide
  MOD_RES (1), (36): Xaa is C or S
  MOD_RES (14), (15), (16), (17), (18): Xaa is A or G
  MOD_RES (19), (20), (21), (22): Xaa is A or G or is absent

SEQ ID NO: 34058 - protein, 33 aa, Artificial Sequence; identical to SEQ ID NO: 31902
  GFR-binding peptide
  MOD_RES (32), (33): Xaa is C or S

SEQ ID NO: 34059 - protein, 42 aa, Artificial Sequence; identical to SEQ ID NO: 31903
  GFR-binding peptide
  MOD_RES (2), (4), (37), (38): Xaa is C or S
  MOD_RES (15), (16), (17), (18), (19): Xaa is A or G
  MOD_RES (20), (21), (22), (23): Xaa is A or G or is absent

SEQ ID NO: 34060 - protein, 38 aa, Artificial Sequence; identical to SEQ ID NO: 31904
  GFR-binding peptide
  MOD_RES (2), (4), (38): Xaa is C or S
  MOD_RES (16), (17), (18), (19), (20): Xaa is A or G
  MOD_RES (21), (22), (23), (24): Xaa is A or G or is absent

SEQ ID NO: 34061 - protein, 37 aa, Artificial Sequence; identical to SEQ ID NO: 31905
  GFR-binding peptide
  MOD_RES (2), (4): Xaa is C or S
  MOD_RES (16), (17), (18), (19), (20): Xaa is A or G
  MOD_RES (21), (22), (23), (24): Xaa is A or G or is absent

SEQ ID NO: 34062 - protein, 37 aa, Artificial Sequence; identical to SEQ ID NO: 31906
  GFR-binding peptide
  MOD_RES (1), (3), (35), (36): Xaa is C or S

SEQ ID NO: 34063 - protein, 36 aa, Artificial Sequence; identical to SEQ ID NO: 31907
  GFR-binding peptide
  MOD_RES (2), (34), (35): Xaa is C or S

SEQ ID NO: 34064 - protein, 35 aa, Artificial Sequence; identical to SEQ ID NO: 31908
  GFR-binding peptide
  MOD_RES (32), (33): Xaa is C or S

SEQ ID NO: 34065 - protein, 34 aa, Artificial Sequence; identical to SEQ ID NO: 31909
  GFR-binding peptide
  MOD_RES (1), (3): Xaa is C or S

SEQ ID NO: 34066 - protein, 37 aa, Artificial Sequence; identical to SEQ ID NO: 31910
  GFR-binding peptide
  MOD_RES (1), (3), (37): Xaa is C or S
  MOD_RES (15), (16), (17), (18), (19): Xaa is A or G
  MOD_RES (20), (21), (22), (23): Xaa is A or G or is absent

SEQ ID NO: 34067 - protein, 37 aa, Artificial Sequence; identical to SEQ ID NO: 31911
  GFR-binding peptide
  MOD_RES (1), (3), (37): Xaa is C or S
  MOD_RES (15), (16), (17), (18), (19): Xaa is A or G
  MOD_RES (20), (21), (22), (23): Xaa is A or G or is absent

SEQ ID NO: 34068 - protein, 35 aa, Artificial Sequence; identical to SEQ ID NO: 31912
  GFR-binding peptide
  MOD_RES (31), (32): Xaa is C or S

SEQ ID NO: 34069 - protein, 34 aa, Artificial Sequence; identical to SEQ ID NO: 31913
  GFR-binding peptide
  MOD_RES (1), (3): Xaa is C or S

SEQ ID NO: 34070 - protein, 32 aa, Artificial Sequence; identical to SEQ ID NO: 31914
  GFR-binding peptide
  MOD_RES (32), (32): Xaa is C or S

SEQ ID NO: 34071 - protein, 31 aa, Artificial Sequence; identical to SEQ ID NO: 31915
  GFR-binding peptide
  MOD_RES (31), (31): Xaa is C or S

SEQ ID NO: 34072 - protein, 35 aa, Artificial Sequence; identical to SEQ ID NO: 31916
  GFR-binding peptide
  MOD_RES (2), (2): Xaa is C or S
  MOD_RES (14), (15), (16), (17), (18): Xaa is A or G
  MOD_RES (19), (20), (21), (22): Xaa is A or G or is absent

SEQ ID NO: 34073 - protein, 37 aa, Artificial Sequence; identical to SEQ ID NO: 31917
  GFR-binding peptide
  MOD_RES (1), (35), (36): Xaa is C or S
  MOD_RES (13), (14), (15), (16), (17): Xaa is A or G
  MOD_RES (18), (19), (20), (21): Xaa is A or G or is absent

SEQ ID NO: 34074 - protein, 40 aa, Artificial Sequence; identical to SEQ ID NO: 31918
  GFR-binding peptide
  MOD_RES (2), (36): Xaa is C or S
  MOD_RES (14), (15), (16), (17), (18): Xaa is A or G
  MOD_RES (19), (20), (21), (22): Xaa is A or G or is absent

SEQ ID NO: 34075 - protein, 37 aa, Artificial Sequence; identical to SEQ ID NO: 31919
  GFR-binding peptide
  MOD_RES (33), (34): Xaa is C or S
  MOD_RES (11), (12), (13), (14), (15): Xaa is A or G
  MOD_RES (16), (17), (18), (19): Xaa is A or G or is absent

SEQ ID NO: 34076 - protein, 36 aa, Artificial Sequence; identical to SEQ ID NO: 31920
  GFR-binding peptide
  MOD_RES (32), (33): Xaa is C or S

SEQ ID NO: 34077 - protein, 37 aa, Artificial Sequence; identical to SEQ ID NO: 31921
  GFR-binding peptide
  MOD_RES (32), (33): Xaa is C or S

SEQ ID NO: 34078 - protein, 36 aa, Artificial Sequence; identical to SEQ ID NO: 31922
  GFR-binding peptide
  MOD_RES (31), (32): Xaa is C or S

SEQ ID NO: 34079 - protein, 34 aa, Artificial Sequence; identical to SEQ ID NO: 31923
  GFR-binding peptide
  MOD_RES (32), (33): Xaa is C or S

SEQ ID NO: 34080 - protein, 32 aa, Artificial Sequence; identical to SEQ ID NO: 31924
  GFR-binding peptide
  MOD_RES (1), (1): Xaa is C or S

SEQ ID NO: 34081 - protein, 36 aa, Artificial Sequence; identical to SEQ ID NO: 31925
  GFR-binding peptide
  MOD_RES (1), (35), (36): Xaa is C or S
  MOD_RES (13), (14), (15), (16), (17): Xaa is A or G
  MOD_RES (18), (19), (20), (21): Xaa is A or G or is absent

SEQ ID NO: 34082 - protein, 40 aa, Artificial Sequence; identical to SEQ ID NO: 31926
  GFR-binding peptide
  MOD_RES (1), (34), (35): Xaa is C or S
  MOD_RES (12), (13), (14), (15), (16): Xaa is A or G
  MOD_RES (17), (18), (19), (20): Xaa is A or G or is absent

SEQ ID NO: 34083 - protein, 40 aa, Artificial Sequence; identical to SEQ ID NO: 31927
  GFR-binding peptide
  MOD_RES (2), (4), (36), (37): Xaa is C or S

SEQ ID NO: 34084 - protein, 39 aa, Artificial Sequence; identical to SEQ ID NO: 31928
  GFR-binding peptide
  MOD_RES (2), (36), (37): Xaa is C or S
  MOD_RES (14), (15), (16), (17), (18): Xaa is A or G
  MOD_RES (19), (20), (21), (22): Xaa is A or G or is absent

SEQ ID NO: 34085 - protein, 38 aa, Artificial Sequence; identical to SEQ ID NO: 31929
  GFR-binding peptide
  MOD_RES (1), (33), (34): Xaa is C or S

SEQ ID NO: 34086 - protein, 38 aa, Artificial Sequence; identical to SEQ ID NO: 31930
  GFR-binding peptide
  MOD_RES (34), (35): Xaa is C or S
  MOD_RES (12), (13), (14), (15), (16): Xaa is A or G
  MOD_RES (17), (18), (19), (20): Xaa is A or G or is absent

SEQ ID NO: 34087 - protein, 41 aa, Artificial Sequence; identical to SEQ ID NO: 31931
  GFR-binding peptide
  MOD_RES (2), (36), (37): Xaa is C or S
  MOD_RES (14), (15), (16), (17), (18): Xaa is A or G
  MOD_RES (19), (20), (21), (22): Xaa is A or G or is absent

SEQ ID NO: 34088 - protein, 36 aa, Artificial Sequence; identical to SEQ ID NO: 31932
  GFR-binding peptide
  MOD_RES (1), (3), (34), (35): Xaa is C or S

SEQ ID NO: 34089 - protein, 36 aa, Artificial Sequence; identical to SEQ ID NO: 31933
  GFR-binding peptide
  MOD_RES (1), (3), (35), (36): Xaa is C or S

SEQ ID NO: 34090 - protein, 33 aa, Artificial Sequence; identical to SEQ ID NO: 31934
  GFR-binding peptide
  MOD_RES (31), (32): Xaa is C or S

SEQ ID NO: 34091 - protein, 39 aa, Artificial Sequence; identical to SEQ ID NO: 31935
  GFR-binding peptide
  MOD_RES (34), (34): Xaa is C or S
  MOD_RES (12), (13), (14), (15), (16): Xaa is A or G
  MOD_RES (17), (18), (19), (20): Xaa is A or G or is absent

SEQ ID NO: 34092 - protein, 34 aa, Artificial Sequence; identical to SEQ ID NO: 31936
  GFR-binding peptide
  MOD_RES (32), (33): Xaa is C or S

SEQ ID NO: 34093 - protein, 38 aa, Artificial Sequence; identical to SEQ ID NO: 31937
  GFR-binding peptide
  MOD_RES (2), (34): Xaa is C or S

SEQ ID NO: 34094 - protein, 35 aa, Artificial Sequence; identical to SEQ ID NO: 31938
  GFR-binding peptide
  MOD_RES (2), (4): Xaa is C or S

SEQ ID NO: 34095 - protein, 41 aa, Artificial Sequence; identical to SEQ ID NO: 31939
  GFR-binding peptide
  MOD_RES (2), (4), (38), (39): Xaa is C or S
  MOD_RES (16), (17), (18), (19), (20): Xaa is A or G
  MOD_RES (21), (22), (23), (24): Xaa is A or G or is absent

SEQ ID NO: 34096 - protein, 30 aa, Artificial Sequence; identical to SEQ ID NO: 31940
  GFR-binding peptide

SEQ ID NO: 34097 - protein, 38 aa, Artificial Sequence; identical to SEQ ID NO: 31941
  GFR-binding peptide
  MOD_RES (1), (33): Xaa is C or S

SEQ ID NO: 34098 - protein, 41 aa, Artificial Sequence; identical to SEQ ID NO: 31942
  GFR-binding peptide
  MOD_RES (1), (3), (35), (36): Xaa is C or S

SEQ ID NO: 34099 - protein, 42 aa, Artificial Sequence; identical to SEQ ID NO: 31943
  GFR-binding peptide
  MOD_RES (1), (3), (37): Xaa is C or S
  MOD_RES (15), (16), (17), (18), (19): Xaa is A or G
  MOD_RES (20), (21), (22), (23): Xaa is A or G or is absent

SEQ ID NO: 34100 - protein, 36 aa, Artificial Sequence; identical to SEQ ID NO: 31944
  GFR-binding peptide
  MOD_RES (32), (32): Xaa is C or S

SEQ ID NO: 34101 - protein, 36 aa, Artificial Sequence; identical to SEQ ID NO: 31945
  GFR-binding peptide
  MOD_RES (2), (36): Xaa is C or S
  MOD_RES (14), (15), (16), (17), (18): Xaa is A or G
  MOD_RES (19), (20), (21), (22): Xaa is A or G or is absent

SEQ ID NO: 34102 - protein, 35 aa, Artificial Sequence; identical to SEQ ID NO: 31946
  GFR-binding peptide
  MOD_RES (1), (35): Xaa is C or S
  MOD_RES (13), (14), (15), (16), (17): Xaa is A or G
  MOD_RES (18), (19), (20), (21): Xaa is A or G or is absent

SEQ ID NO: 34103 - protein, 37 aa, Artificial Sequence; identical to SEQ ID NO: 31947
  GFR-binding peptide
  MOD_RES (34), (35): Xaa is C or S
  MOD_RES (12), (13), (14), (15), (16): Xaa is A or G
  MOD_RES (17), (18), (19), (20): Xaa is A or G or is absent

SEQ ID NO: 34104 - protein, 34 aa, Artificial Sequence; identical to SEQ ID NO: 31948
  GFR-binding peptide
  MOD_RES (1), (33), (34): Xaa is C or S

SEQ ID NO: 34105 - protein, 40 aa, Artificial Sequence; identical to SEQ ID NO: 31949
  GFR-binding peptide
  MOD_RES (1), (34), (35): Xaa is C or S

SEQ ID NO: 34106 - protein, 39 aa, Artificial Sequence; identical to SEQ ID NO: 31950
  GFR-binding peptide
  MOD_RES (1), (3), (35), (36): Xaa is C or S

SEQ ID NO: 34107 - protein, 34 aa, Artificial Sequence; identical to SEQ ID NO: 31951
  GFR-binding peptide
  MOD_RES (2), (33), (34): Xaa is C or S

SEQ ID NO: 34108 - protein, 39 aa, Artificial Sequence; identical to SEQ ID NO: 31952
  GFR-binding peptide
  MOD_RES (2), (35), (36): Xaa is C or S

SEQ ID NO: 34109 - protein, 38 aa, Artificial Sequence; identical to SEQ ID NO: 31953
  GFR-binding peptide
  MOD_RES (1), (35), (36): Xaa is C or S
  MOD_RES (13), (14), (15), (16), (17): Xaa is A or G
  MOD_RES (18), (19), (20), (21): Xaa is A or G or is absent

SEQ ID NO: 34110 - protein, 41 aa, Artificial Sequence; identical to SEQ ID NO: 31954
  GFR-binding peptide
  MOD_RES (2), (4), (38), (39): Xaa is C or S
  MOD_RES (16), (17), (18), (19), (20): Xaa is A or G
  MOD_RES (21), (22), (23), (24): Xaa is A or G or is absent

SEQ ID NO: 34111 - protein, 35 aa, Artificial Sequence; identical to SEQ ID NO: 31955
  GFR-binding peptide
  MOD_RES (32), (33): Xaa is C or S

SEQ ID NO: 34112 - protein, 39 aa, Artificial Sequence; identical to SEQ ID NO: 31956
  GFR-binding peptide
  MOD_RES (34), (35): Xaa is C or S
  MOD_RES (12), (13), (14), (15), (16): Xaa is A or G
  MOD_RES (17), (18), (19), (20): Xaa is A or G or is absent

SEQ ID NO: 34113 - protein, 39 aa, Artificial Sequence; identical to SEQ ID NO: 31957
  GFR-binding peptide
  MOD_RES (2), (36), (37): Xaa is C or S
  MOD_RES (14), (15), (16), (17), (18): Xaa is A or G
  MOD_RES (19), (20), (21), (22): Xaa is A or G or is absent

SEQ ID NO: 34114 - protein, 32 aa, Artificial Sequence; identical to SEQ ID NO: 31958
  GFR-binding peptide
  MOD_RES (1), (1): Xaa is C or S

SEQ ID NO: 34115 - protein, 39 aa, Artificial Sequence; identical to SEQ ID NO: 31959
  GFR-binding peptide
  MOD_RES (1), (33), (34): Xaa is C or S

SEQ ID NO: 34116 - protein, 39 aa, Artificial Sequence; identical to SEQ ID NO: 31960
  GFR-binding peptide
  MOD_RES (34), (35): Xaa is C or S
  MOD_RES (12), (13), (14), (15), (16): Xaa is A or G
  MOD_RES (17), (18), (19), (20): Xaa is A or G or is absent

SEQ ID NO: 34117 - protein, 42 aa, Artificial Sequence; identical to SEQ ID NO: 31961
  GFR-binding peptide
  MOD_RES (2), (4), (38), (39): Xaa is C or S
  MOD_RES (16), (17), (18), (19), (20): Xaa is A or G
  MOD_RES (21), (22), (23), (24): Xaa is A or G or is absent

SEQ ID NO: 34118 - protein, 37 aa, Artificial Sequence; identical to SEQ ID NO: 31962
  GFR-binding peptide
  MOD_RES (33), (34): Xaa is C or S
  MOD_RES (11), (12), (13), (14), (15): Xaa is A or G
  MOD_RES (16), (17), (18), (19): Xaa is A or G or is absent

SEQ ID NO: 34119 - protein, 40 aa, Artificial Sequence; identical to SEQ ID NO: 31963
  GFR-binding peptide
  MOD_RES (1), (3), (37), (38): Xaa is C or S
  MOD_RES (15), (16), (17), (18), (19): Xaa is A or G
  MOD_RES (20), (21), (22), (23): Xaa is A or G or is absent

SEQ ID NO: 34120 - protein, 33 aa, Artificial Sequence; identical to SEQ ID NO: 31964
  GFR-binding peptide
  MOD_RES (1), (33): Xaa is C or S

SEQ ID NO: 34121 - protein, 39 aa, Artificial Sequence; identical to SEQ ID NO: 31965
  GFR-binding peptide
  MOD_RES (33), (34): Xaa is C or S
  MOD_RES (11), (12), (13), (14), (15): Xaa is A or G
  MOD_RES (16), (17), (18), (19): Xaa is A or G or is absent

SEQ ID NO: 34122 - protein, 37 aa, Artificial Sequence; identical to SEQ ID NO: 31966
  GFR-binding peptide
  MOD_RES (2), (34), (35): Xaa is C or S

SEQ ID NO: 34123 - protein, 31 aa, Artificial Sequence; identical to SEQ ID NO: 31967
  GFR-binding peptide

SEQ ID NO: 34124 - protein, 34 aa, Artificial Sequence; identical to SEQ ID NO: 31968
  GFR-binding peptide
  MOD_RES (33), (33): Xaa is C or S
  MOD_RES (11), (12), (13), (14), (15): Xaa is A or G
  MOD_RES (16), (17), (18), (19): Xaa is A or G or is absent

SEQ ID NO: 34125 - protein, 34 aa, Artificial Sequence; identical to SEQ ID NO: 31969
  GFR-binding peptide
  MOD_RES (1), (3): Xaa is C or S

SEQ ID NO: 34126 - protein, 38 aa, Artificial Sequence; identical to SEQ ID NO: 31970
  GFR-binding peptide
  MOD_RES (1), (33), (34): Xaa is C or S

SEQ ID NO: 34127 - protein, 37 aa, Artificial Sequence; identical to SEQ ID NO: 31971
  GFR-binding peptide
  MOD_RES (2), (4), (36), (37): Xaa is C or S

SEQ ID NO: 34128 - protein, 37 aa, Artificial Sequence; identical to SEQ ID NO: 31972
  GFR-binding peptide
  MOD_RES (2), (4): Xaa is C or S
  MOD_RES (16), (17), (18), (19), (20): Xaa is A or G
  MOD_RES (21), (22), (23), (24): Xaa is A or G or is absent

SEQ ID NO: 34129 - protein, 36 aa, Artificial Sequence; identical to SEQ ID NO: 31973
  GFR-binding peptide
  MOD_RES (2), (36): Xaa is C or S
  MOD_RES (14), (15), (16), (17), (18): Xaa is A or G
  MOD_RES (19), (20), (21), (22): Xaa is A or G or is absent

SEQ ID NO: 34130 - protein, 38 aa, Artificial Sequence; identical to SEQ ID NO: 31974
  GFR-binding peptide
  MOD_RES (1), (3), (37), (38): Xaa is C or S
  MOD_RES (15), (16), (17), (18), (19): Xaa is A or G
  MOD_RES (20), (21), (22), (23): Xaa is A or G or is absent

SEQ ID NO: 34131 - protein, 33 aa, Artificial Sequence; identical to SEQ ID NO: 31975
  GFR-binding peptide
  MOD_RES (12), (13), (14), (15), (16): Xaa is A or G
  MOD_RES (17), (18), (19), (20): Xaa is A or G or is absent

SEQ ID NO: 34132 - protein, 41 aa, Artificial Sequence; identical to SEQ ID NO: 31976
  GFR-binding peptide
  MOD_RES (1), (3), (35), (36): Xaa is C or S

SEQ ID NO: 34133 - protein, 39 aa, Artificial Sequence; identical to SEQ ID NO: 31977
  GFR-binding peptide
  MOD_RES (33), (34): Xaa is C or S
  MOD_RES (11), (12), (13), (14), (15): Xaa is A or G
  MOD_RES (16), (17), (18), (19): Xaa is A or G or is absent

SEQ ID NO: 34134 - protein, 41 aa, Artificial Sequence; identical to SEQ ID NO: 31978
  GFR-binding peptide
  MOD_RES (2), (36), (37): Xaa is C or S
  MOD_RES (14), (15), (16), (17), (18): Xaa is A or G
  MOD_RES (19), (20), (21), (22): Xaa is A or G or is absent

SEQ ID NO: 34135 - protein, 37 aa, Artificial Sequence; identical to SEQ ID NO: 31979
  GFR-binding peptide
  MOD_RES (2), (33), (34): Xaa is C or S

SEQ ID NO: 34136 - protein, 36 aa, Artificial Sequence; identical to SEQ ID NO: 31980
  GFR-binding peptide
  MOD_RES (1), (3), (35), (36): Xaa is C or S

SEQ ID NO: 34137 - protein, 37 aa, Artificial Sequence; identical to SEQ ID NO: 31981
  GFR-binding peptide
  MOD_RES (1), (32), (33): Xaa is C or S

SEQ ID NO: 34138 - protein, 37 aa, Artificial Sequence; identical to SEQ ID NO: 31982
  GFR-binding peptide
  MOD_RES (34), (35): Xaa is C or S
  MOD_RES (12), (13), (14), (15), (16): Xaa is A or G
  MOD_RES (17), (18), (19), (20): Xaa is A or G or is absent

SEQ ID NO: 34139 - protein, 37 aa, Artificial Sequence; identical to SEQ ID NO: 31983
  GFR-binding peptide
  MOD_RES (1), (3), (35), (36): Xaa is C or S

SEQ ID NO: 34140 - protein, 37 aa, Artificial Sequence; identical to SEQ ID NO: 31984
  GFR-binding peptide
  MOD_RES (2), (36), (37): Xaa is C or S
  MOD_RES (14), (15), (16), (17), (18): Xaa is A or G
  MOD_RES (19), (20), (21), (22): Xaa is A or G or is absent

SEQ ID NO: 34141 - protein, 38 aa, Artificial Sequence; identical to SEQ ID NO: 31985
  GFR-binding peptide
  MOD_RES (2), (35), (36): Xaa is C or S
  MOD_RES (13), (14), (15), (16), (17): Xaa is A or G
  MOD_RES (18), (19), (20), (21): Xaa is A or G or is absent

SEQ ID NO: 34142 - protein, 32 aa, Artificial Sequence; identical to SEQ ID NO: 31986
  GFR-binding peptide
  MOD_RES (1), (1): Xaa is C or S

SEQ ID NO: 34143 - protein, 40 aa, Artificial Sequence; identical to SEQ ID NO: 31987
  GFR-binding peptide
  MOD_RES (34), (35): Xaa is C or S
  MOD_RES (12), (13), (14), (15), (16): Xaa is A or G
  MOD_RES (17), (18), (19), (20): Xaa is A or G or is absent

SEQ ID NO: 34144 - protein, 38 aa, Artificial Sequence; identical to SEQ ID NO: 31988
  GFR-binding peptide
  MOD_RES (32), (33): Xaa is C or S

SEQ ID NO: 34145 - protein, 34 aa, Artificial Sequence; identical to SEQ ID NO: 31989
  GFR-binding peptide
  MOD_RES (1), (33), (34): Xaa is C or S

SEQ ID NO: 34146 - protein, 35 aa, Artificial Sequence; identical to SEQ ID NO: 31990
  GFR-binding peptide
  MOD_RES (1), (33), (34): Xaa is C or S

SEQ ID NO: 34147 - protein, 42 aa, Artificial Sequence; identical to SEQ ID NO: 31991
  GFR-binding peptide
  MOD_RES (2), (4), (36), (37): Xaa is C or S

SEQ ID NO: 34148 - protein, 35 aa, Artificial Sequence; identical to SEQ ID NO: 31992
  GFR-binding peptide
  MOD_RES (2), (4): Xaa is C or S

SEQ ID NO: 34149 - protein, 36 aa, Artificial Sequence; identical to SEQ ID NO: 31993
  GFR-binding peptide
  MOD_RES (1), (3), (35), (36): Xaa is C or S

SEQ ID NO: 34150 - protein, 32 aa, Artificial Sequence; identical to SEQ ID NO: 31994
  GFR-binding peptide
  MOD_RES (1), (32): Xaa is C or S

SEQ ID NO: 34151 - protein, 34 aa, Artificial Sequence; identical to SEQ ID NO: 31995
  GFR-binding peptide
  MOD_RES (32), (32): Xaa is C or S

SEQ ID NO: 34152 - protein, 37 aa, Artificial Sequence; identical to SEQ ID NO: 31996
  GFR-binding peptide
  MOD_RES (2), (34), (35): Xaa is C or S

SEQ ID NO: 34153 - protein, 37 aa, Artificial Sequence; identical to SEQ ID NO: 31997
  GFR-binding peptide
  MOD_RES (31), (32): Xaa is C or S

SEQ ID NO: 34154 - protein, 40 aa, Artificial Sequence; identical to SEQ ID NO: 31998
  GFR-binding peptide
  MOD_RES (1), (3), (37), (38): Xaa is C or S
  MOD_RES (15), (16), (17), (18), (19): Xaa is A or G
  MOD_RES (20), (21), (22), (23): Xaa is A or G or is absent

SEQ ID NO: 34155 - protein, 34 aa, Artificial Sequence; identical to SEQ ID NO: 31999
  GFR-binding peptide
  MOD_RES (34), (34): Xaa is C or S
  MOD_RES (12), (13), (14), (15), (16): Xaa is A or G
  MOD_RES (17), (18), (19), (20): Xaa is A or G or is absent

SEQ ID NO: 34156 - protein, 32 aa, Artificial Sequence; identical to SEQ ID NO: 32000
  GFR-binding peptide
  MOD_RES (31), (32): Xaa is C or S

SEQ ID NO: 34157 - protein, 36 aa, Artificial Sequence; identical to SEQ ID NO: 32001
  GFR-binding peptide
  MOD_RES (32), (33): Xaa is C or S

SEQ ID NO: 34158 - protein, 37 aa, Artificial Sequence; identical to SEQ ID NO: 32002
  GFR-binding peptide
  MOD_RES (1), (35), (36): Xaa is C or S
  MOD_RES (13), (14), (15), (16), (17): Xaa is A or G
  MOD_RES (18), (19), (20), (21): Xaa is A or G or is absent

SEQ ID NO: 34159 - protein, 44 aa, Artificial Sequence; identical to SEQ ID NO: 32003
  GFR-binding peptide
  MOD_RES (2), (4), (38): Xaa is C or S
  MOD_RES (16), (17), (18), (19), (20): Xaa is A or G
  MOD_RES (21), (22), (23), (24): Xaa is A or G or is absent

SEQ ID NO: 34160 - protein, 33 aa, Artificial Sequence; identical to SEQ ID NO: 32004
  GFR-binding peptide
  MOD_RES (32), (32): Xaa is C or S

SEQ ID NO: 34161 - protein, 36 aa, Artificial Sequence; identical to SEQ ID NO: 32005
  GFR-binding peptide
  MOD_RES (1), (35), (36): Xaa is C or S
  MOD_RES (13), (14), (15), (16), (17): Xaa is A or G
  MOD_RES (18), (19), (20), (21): Xaa is A or G or is absent

SEQ ID NO: 34162 - protein, 44 aa, Artificial Sequence; identical to SEQ ID NO: 32006
  GFR-binding peptide
  MOD_RES (2), (4), (38), (39): Xaa is C or S
  MOD_RES (16), (17), (18), (19), (20): Xaa is A or G
  MOD_RES (21), (22), (23), (24): Xaa is A or G or is absent

SEQ ID NO: 34163 - protein, 38 aa, Artificial Sequence; identical to SEQ ID NO: 32007
  GFR-binding peptide
  MOD_RES (1), (3), (37), (38): Xaa is C or S
  MOD_RES (15), (16), (17), (18), (19): Xaa is A or G
  MOD_RES (20), (21), (22), (23): Xaa is A or G or is absent

SEQ ID NO: 34164 - protein, 38 aa, Artificial Sequence; identical to SEQ ID NO: 32008
  GFR-binding peptide
  MOD_RES (32), (33): Xaa is C or S

SEQ ID NO: 34165 - protein, 36 aa, Artificial Sequence; identical to SEQ ID NO: 32009
  GFR-binding peptide
  MOD_RES (2), (34), (35): Xaa is C or S

SEQ ID NO: 34166 - protein, 38 aa, Artificial Sequence; identical to SEQ ID NO: 32010
  GFR-binding peptide
  MOD_RES (2), (36), (37): Xaa is C or S
  MOD_RES (14), (15), (16), (17), (18): Xaa is A or G
  MOD_RES (19), (20), (21), (22): Xaa is A or G or is absent

SEQ ID NO: 34167 - protein, 41 aa, Artificial Sequence; identical to SEQ ID NO: 32011
  GFR-binding peptide
  MOD_RES (1), (35), (36): Xaa is C or S
  MOD_RES (13), (14), (15), (16), (17): Xaa is A or G
  MOD_RES (18), (19), (20), (21): Xaa is A or G or is absent

SEQ ID NO: 34168 - protein, 35 aa, Artificial Sequence; identical to SEQ ID NO: 32012
  GFR-binding peptide
  MOD_RES (1), (35): Xaa is C or S
  MOD_RES (13), (14), (15), (16), (17): Xaa is A or G
  MOD_RES (18), (19), (20), (21): Xaa is A or G or is absent

SEQ ID NO: 34169 - protein, 31 aa, Artificial Sequence; identical to SEQ ID NO: 32013
  GFR-binding peptide
  MOD_RES (31), (31): Xaa is C or S

SEQ ID NO: 34170 - protein, 35 aa, Artificial Sequence; identical to SEQ ID NO: 32014
  GFR-binding peptide
  MOD_RES (31), (32): Xaa is C or S

SEQ ID NO: 34171 - protein, 43 aa, Artificial Sequence; identical to SEQ ID NO: 32015
  GFR-binding peptide
  MOD_RES (1), (3), (37), (38): Xaa is C or S
  MOD_RES (15), (16), (17), (18), (19): Xaa is A or G
  MOD_RES (20), (21), (22), (23): Xaa is A or G or is absent

SEQ ID NO: 34172 - protein, 37 aa, Artificial Sequence; identical to SEQ ID NO: 32016
  GFR-binding peptide
  MOD_RES (34), (35): Xaa is C or S
  MOD_RES (12), (13), (14), (15), (16): Xaa is A or G
  MOD_RES (17), (18), (19), (20): Xaa is A or G or is absent

SEQ ID NO: 34173 - protein, 33 aa, Artificial Sequence; identical to SEQ ID NO: 32017
  GFR-binding peptide
  MOD_RES (31), (32): Xaa is C or S

SEQ ID NO: 34174 - protein, 42 aa, Artificial Sequence; identical to SEQ ID NO: 32018
  GFR-binding peptide
  MOD_RES (1), (3), (37), (38): Xaa is C or S
  MOD_RES (15), (16), (17), (18), (19): Xaa is A or G
  MOD_RES (20), (21), (22), (23): Xaa is A or G or is absent

SEQ ID NO: 34175 - protein, 38 aa, Artificial Sequence; identical to SEQ ID NO: 32019
  GFR-binding peptide
  MOD_RES (2), (37), (38): Xaa is C or S
  MOD_RES (15), (16), (17), (18), (19): Xaa is A or G
  MOD_RES (20), (21), (22), (23): Xaa is A or G or is absent

SEQ ID NO: 34176 - protein, 35 aa, Artificial Sequence; identical to SEQ ID NO: 32020
  GFR-binding peptide
  MOD_RES (1), (33), (34): Xaa is C or S

SEQ ID NO: 34177 - protein, 39 aa, Artificial Sequence; identical to SEQ ID NO: 32021
  GFR-binding peptide
  MOD_RES (1), (35), (36): Xaa is C or S
  MOD_RES (13), (14), (15), (16), (17): Xaa is A or G
  MOD_RES (18), (19), (20), (21): Xaa is A or G or is absent

SEQ ID NO: 34178 - protein, 33 aa, Artificial Sequence; identical to SEQ ID NO: 32022
  GFR-binding peptide
  MOD_RES (32), (33): Xaa is C or S

SEQ ID NO: 34179 - protein, 34 aa, Artificial Sequence; identical to SEQ ID NO: 32023
  GFR-binding peptide
  MOD_RES (1), (33), (34): Xaa is C or S

SEQ ID NO: 34180 - protein, 39 aa, Artificial Sequence; identical to SEQ ID NO: 32024
  GFR-binding peptide
  MOD_RES (2), (4), (36), (37): Xaa is C or S

SEQ ID NO: 34181 - protein, 36 aa, Artificial Sequence; identical to SEQ ID NO: 32025
  GFR-binding peptide
  MOD_RES (2), (34), (35): Xaa is C or S

SEQ ID NO: 34182 - protein, 41 aa, Artificial Sequence; identical to SEQ ID NO: 32026
  GFR-binding peptide
  MOD_RES (2), (36), (37): Xaa is C or S
  MOD_RES (14), (15), (16), (17), (18): Xaa is A or G
  MOD_RES (19), (20), (21), (22): Xaa is A or G or is absent

SEQ ID NO: 34183 - protein, 39 aa, Artificial Sequence; identical to SEQ ID NO: 32027
  GFR-binding peptide
  MOD_RES (33), (34): Xaa is C or S
  MOD_RES (11), (12), (13), (14), (15): Xaa is A or G
  MOD_RES (16), (17), (18), (19): Xaa is A or G or is absent

SEQ ID NO: 34184 - protein, 39 aa, Artificial Sequence; identical to SEQ ID NO: 32028
  GFR-binding peptide
  MOD_RES (2), (34), (35): Xaa is C or S

SEQ ID NO: 34185 - protein, 36 aa, Artificial Sequence; identical to SEQ ID NO: 32029
  GFR-binding peptide
  MOD_RES (1), (35), (36): Xaa is C or S
  MOD_RES (13), (14), (15), (16), (17): Xaa is A or G
  MOD_RES (18), (19), (20), (21): Xaa is A or G or is absent

SEQ ID NO: 34186 - protein, 37 aa, Artificial Sequence; identical to SEQ ID NO: 32030
  GFR-binding peptide
  MOD_RES (2), (34), (35): Xaa is C or S

SEQ ID NO: 34187 - protein, 36 aa, Artificial Sequence; identical to SEQ ID NO: 32031
  GFR-binding peptide
  MOD_RES (2), (36): Xaa is C or S
  MOD_RES (14), (15), (16), (17), (18): Xaa is A or G
  MOD_RES (19), (20), (21), (22): Xaa is A or G or is absent

SEQ ID NO: 34188 - protein, 36 aa, Artificial Sequence; identical to SEQ ID NO: 32032
  GFR-binding peptide
  MOD_RES (1), (3), (35), (36): Xaa is C or S

SEQ ID NO: 34189 - protein, 37 aa, Artificial Sequence; identical to SEQ ID NO: 32033
  GFR-binding peptide
  MOD_RES (34), (35): Xaa is C or S
  MOD_RES (12), (13), (14), (15), (16): Xaa is A or G
  MOD_RES (17), (18), (19), (20): Xaa is A or G or is absent

SEQ ID NO: 34190 - protein, 36 aa, Artificial Sequence; identical to SEQ ID NO: 32034
  GFR-binding peptide
  MOD_RES (2), (4), (36): Xaa is C or S

SEQ ID NO: 34191 - protein, 37 aa, Artificial Sequence; identical to SEQ ID NO: 32035
  GFR-binding peptide
  MOD_RES (32), (33): Xaa is C or S

SEQ ID NO: 34192 - protein, 37 aa, Artificial Sequence; identical to SEQ ID NO: 32036
  GFR-binding peptide
  MOD_RES (2), (34), (35): Xaa is C or S

SEQ ID NO: 34193 - protein, 41 aa, Artificial Sequence; identical to SEQ ID NO: 32037
  GFR-binding peptide
  MOD_RES (1), (35): Xaa is C or S
  MOD_RES (13), (14), (15), (16), (17): Xaa is A or G
  MOD_RES (18), (19), (20), (21): Xaa is A or G or is absent

SEQ ID NO: 34194 - protein, 39 aa, Artificial Sequence; identical to SEQ ID NO: 32038
  GFR-binding peptide
  MOD_RES (2), (4), (36), (37): Xaa is C or S

SEQ ID NO: 34195 - protein, 39 aa, Artificial Sequence; identical to SEQ ID NO: 32039
  GFR-binding peptide
  MOD_RES (1), (33), (34): Xaa is C or S

SEQ ID NO: 34196 - protein, 42 aa, Artificial Sequence; identical to SEQ ID NO: 32040
  GFR-binding peptide
  MOD_RES (1), (3), (36), (37): Xaa is C or S

SEQ ID NO: 34197 - protein, 39 aa, Artificial Sequence; identical to SEQ ID NO: 32041
  GFR-binding peptide
  MOD_RES (1), (3), (35), (36): Xaa is C or S

SEQ ID NO: 34198 - protein, 35 aa, Artificial Sequence; identical to SEQ ID NO: 32042
  GFR-binding peptide
  MOD_RES (34), (35): Xaa is C or S
  MOD_RES (12), (13), (14), (15), (16): Xaa is A or G
  MOD_RES (17), (18), (19), (20): Xaa is A or G or is absent

SEQ ID NO: 34199 - protein, 40 aa, Artificial Sequence; identical to SEQ ID NO: 32043
  GFR-binding peptide
  MOD_RES (2), (34), (35): Xaa is C or S

SEQ ID NO: 34200 - protein, 35 aa, Artificial Sequence; identical to SEQ ID NO: 32044
  GFR-binding peptide
  MOD_RES (1), (3), (35): Xaa is C or S

SEQ ID NO: 34201 - protein, 38 aa, Artificial Sequence; identical to SEQ ID NO: 32045
  GFR-binding peptide
  MOD_RES (1), (35), (36): Xaa is C or S
  MOD_RES (13), (14), (15), (16), (17): Xaa is A or G
  MOD_RES (18), (19), (20), (21): Xaa is A or G or is absent

SEQ ID NO: 34202 - protein, 43 aa, Artificial Sequence; identical to SEQ ID NO: 32046
  GFR-binding peptide
  MOD_RES (2), (4), (38), (39): Xaa is C or S
  MOD_RES (16), (17), (18), (19), (20): Xaa is A or G
  MOD_RES (21), (22), (23), (24): Xaa is A or G or is absent

SEQ ID NO: 34203 - protein, 41 aa, Artificial Sequence; identical to SEQ ID NO: 32047
  GFR-binding peptide
  MOD_RES (1), (35), (36): Xaa is C or S
  MOD_RES (13), (14), (15), (16), (17): Xaa is A or G
  MOD_RES (18), (19), (20), (21): Xaa is A or G or is absent

SEQ ID NO: 34204 - protein, 39 aa, Artificial Sequence; identical to SEQ ID NO: 32048
  GFR-binding peptide
  MOD_RES (2), (34), (35): Xaa is C or S

SEQ ID NO: 34205 - protein, 37 aa, Artificial Sequence; identical to SEQ ID NO: 32049
  GFR-binding peptide
  MOD_RES (2), (36), (37): Xaa is C or S
  MOD_RES (14), (15), (16), (17), (18): Xaa is A or G
  MOD_RES (19), (20), (21), (22): Xaa is A or G or is absent

SEQ ID NO: 34206 - protein, 34 aa, Artificial Sequence; identical to SEQ ID NO: 32050
  GFR-binding peptide
  MOD_RES (1), (34): Xaa is C or S
  MOD_RES (12), (13), (14), (15), (16): Xaa is A or G
  MOD_RES (17), (18), (19), (20): Xaa is A or G or is absent

SEQ ID NO: 34207 - protein, 37 aa, Artificial Sequence; identical to SEQ ID NO: 32051
  GFR-binding peptide
  MOD_RES (1), (33), (34): Xaa is C or S

SEQ ID NO: 34208 - protein, 34 aa, Artificial Sequence; identical to SEQ ID NO: 32052
  GFR-binding peptide
  MOD_RES (1), (33), (34): Xaa is C or S

SEQ ID NO: 34209 - protein, 38 aa, Artificial Sequence; identical to SEQ ID NO: 32053
  GFR-binding peptide
  MOD_RES (2), (35), (36): Xaa is C or S

SEQ ID NO: 34210 - protein, 40 aa, Artificial Sequence; identical to SEQ ID NO: 32054
  GFR-binding peptide
  MOD_RES (1), (35), (36): Xaa is C or S
  MOD_RES (13), (14), (15), (16), (17): Xaa is A or G
  MOD_RES (18), (19), (20), (21): Xaa is A or G or is absent

SEQ ID NO: 34211 - protein, 39 aa, Artificial Sequence; identical to SEQ ID NO: 32055
  GFR-binding peptide
  MOD_RES (33), (33): Xaa is C or S
  MOD_RES (11), (12), (13), (14), (15): Xaa is A or G
  MOD_RES (16), (17), (18), (19): Xaa is A or G or is absent

SEQ ID NO: 34212 - protein, 39 aa, Artificial Sequence; identical to SEQ ID NO: 32056
  GFR-binding peptide
  MOD_RES (1), (35), (36): Xaa is C or S
  MOD_RES (13), (14), (15), (16), (17): Xaa is A or G
  MOD_RES (18), (19), (20), (21): Xaa is A or G or is absent

SEQ ID NO: 34213 - protein, 36 aa, Artificial Sequence; identical to SEQ ID NO: 32057
  GFR-binding peptide
  MOD_RES (1), (35), (36): Xaa is C or S
  MOD_RES (13), (14), (15), (16), (17): Xaa is A or G
  MOD_RES (18), (19), (20), (21): Xaa is A or G or is absent

SEQ ID NO: 34214 - protein, 38 aa, Artificial Sequence; identical to SEQ ID NO: 32058
  GFR-binding peptide
  MOD_RES (1), (3), (35), (36): Xaa is C or S

SEQ ID NO: 34215 - protein, 37 aa, Artificial Sequence; identical to SEQ ID NO: 32059
  GFR-binding peptide
  MOD_RES (2), (36), (37): Xaa is C or S
  MOD_RES (14), (15), (16), (17), (18): Xaa is A or G
  MOD_RES (19), (20), (21), (22): Xaa is A or G or is absent

SEQ ID NO: 34216 - protein, 38 aa, Artificial Sequence; identical to SEQ ID NO: 32060
  GFR-binding peptide
  MOD_RES (34), (34): Xaa is C or S
  MOD_RES (12), (13), (14), (15), (16): Xaa is A or G
  MOD_RES (17), (18), (19), (20): Xaa is A or G or is absent

SEQ ID NO: 34217 - protein, 43 aa, Artificial Sequence; identical to SEQ ID NO: 32061
  GFR-binding peptide
  MOD_RES (2), (4), (38), (39): Xaa is C or S
  MOD_RES (16), (17), (18), (19), (20): Xaa is A or G
  MOD_RES (21), (22), (23), (24): Xaa is A or G or is absent

SEQ ID NO: 34218 - protein, 34 aa, Artificial Sequence; identical to SEQ ID NO: 32062
  GFR-binding peptide
  MOD_RES (31), (32): Xaa is C or S

SEQ ID NO: 34219 - protein, 31 aa, Artificial Sequence; identical to SEQ ID NO: 32063
  GFR-binding peptide

SEQ ID NO: 34220 - protein, 38 aa, Artificial Sequence; identical to SEQ ID NO: 32064
  GFR-binding peptide
  MOD_RES (1), (35), (36): Xaa is C or S
  MOD_RES (13), (14), (15), (16), (17): Xaa is A or G
  MOD_RES (18), (19), (20), (21): Xaa is A or G or is absent

SEQ ID NO: 34221 - protein, 33 aa, Artificial Sequence; identical to SEQ ID NO: 32065
  GFR-binding peptide
  MOD_RES (33), (33): Xaa is C or S
  MOD_RES (11), (12), (13), (14), (15): Xaa is A or G
  MOD_RES (16), (17), (18), (19): Xaa is A or G or is absent

SEQ ID NO: 34222 - protein, 37 aa, Artificial Sequence; identical to SEQ ID NO: 32066
  GFR-binding peptide
  MOD_RES (34), (35): Xaa is C or S
  MOD_RES (12), (13), (14), (15), (16): Xaa is A or G
  MOD_RES (17), (18), (19), (20): Xaa is A or G or is absent

SEQ ID NO: 34223 - protein, 37 aa, Artificial Sequence; identical to SEQ ID NO: 32067
  GFR-binding peptide
  MOD_RES (1), (35), (36): Xaa is C or S
  MOD_RES (13), (14), (15), (16), (17): Xaa is A or G
  MOD_RES (18), (19), (20), (21): Xaa is A or G or is absent

SEQ ID NO: 34224 - protein, 34 aa, Artificial Sequence; identical to SEQ ID NO: 32068
  GFR-binding peptide
  MOD_RES (2), (34): Xaa is C or S

SEQ ID NO: 34225 - protein, 33 aa, Artificial Sequence; identical to SEQ ID NO: 32069
  GFR-binding peptide
  MOD_RES (1), (33): Xaa is C or S

SEQ ID NO: 34226 - protein, 35 aa, Artificial Sequence; identical to SEQ ID NO: 32070
  GFR-binding peptide
  MOD_RES (32), (32): Xaa is C or S

SEQ ID NO: 34227 - protein, 40 aa, Artificial Sequence; identical to SEQ ID NO: 32071
  GFR-binding peptide
  MOD_RES (2), (4), (36), (37): Xaa is C or S

SEQ ID NO: 34228 - protein, 42 aa, Artificial Sequence; identical to SEQ ID NO: 32072
  GFR-binding peptide
  MOD_RES (1), (3), (36), (37): Xaa is C or S
  MOD_RES (14), (15), (16), (17), (18): Xaa is A or G
  MOD_RES (19), (20), (21), (22): Xaa is A or G or is absent

SEQ ID NO: 34229 - protein, 41 aa, Artificial Sequence; identical to SEQ ID NO: 32073
  GFR-binding peptide
  MOD_RES (1), (3), (37), (38): Xaa is C or S
  MOD_RES (15), (16), (17), (18), (19): Xaa is A or G
  MOD_RES (20), (21), (22), (23): Xaa is A or G or is absent

SEQ ID NO: 34230 - protein, 40 aa, Artificial Sequence; identical to SEQ ID NO: 32074
  GFR-binding peptide
  MOD_RES (35), (36): Xaa is C or S
  MOD_RES (13), (14), (15), (16), (17): Xaa is A or G
  MOD_RES (18), (19), (20), (21): Xaa is A or G or is absent

SEQ ID NO: 34231 - protein, 37 aa, Artificial Sequence; identical to SEQ ID NO: 32075
  GFR-binding peptide
  MOD_RES (33), (34): Xaa is C or S
  MOD_RES (11), (12), (13), (14), (15): Xaa is A or G
  MOD_RES (16), (17), (18), (19): Xaa is A or G or is absent

SEQ ID NO: 34232 - protein, 35 aa, Artificial Sequence; identical to SEQ ID NO: 32076
  GFR-binding peptide
  MOD_RES (1), (35): Xaa is C or S
  MOD_RES (13), (14), (15), (16), (17): Xaa is A or G
  MOD_RES (18), (19), (20), (21): Xaa is A or G or is absent

SEQ ID NO: 34233 - protein, 36 aa, Artificial Sequence; identical to SEQ ID NO: 32077
  GFR-binding peptide
  MOD_RES (32), (33): Xaa is C or S

SEQ ID NO: 34234 - protein, 41 aa, Artificial Sequence; identical to SEQ ID NO: 32078
  GFR-binding peptide
  MOD_RES (2), (4), (39), (40): Xaa is C or S
  MOD_RES (17), (18), (19), (20), (21): Xaa is A or G
  MOD_RES (22), (23), (24), (25): Xaa is A or G or is absent

SEQ ID NO: 34235 - protein, 44 aa, Artificial Sequence; identical to SEQ ID NO: 32079
  GFR-binding peptide
  MOD_RES (2), (4), (38), (39): Xaa is C or S
  MOD_RES (16), (17), (18), (19), (20): Xaa is A or G
  MOD_RES (21), (22), (23), (24): Xaa is A or G or is absent

SEQ ID NO: 34236 - protein, 41 aa, Artificial Sequence; identical to SEQ ID NO: 32080
  GFR-binding peptide
  MOD_RES (1), (3), (37), (38): Xaa is C or S
  MOD_RES (15), (16), (17), (18), (19): Xaa is A or G
  MOD_RES (20), (21), (22), (23): Xaa is A or G or is absent

SEQ ID NO: 34237 - protein, 39 aa, Artificial Sequence; identical to SEQ ID NO: 32081
  GFR-binding peptide
  MOD_RES (1), (3), (37), (38): Xaa is C or S
  MOD_RES (15), (16), (17), (18), (19): Xaa is A or G
  MOD_RES (20), (21), (22), (23): Xaa is A or G or is absent

SEQ ID NO: 34238 - protein, 36 aa, Artificial Sequence; identical to SEQ ID NO: 32082
  GFR-binding peptide
  MOD_RES (2), (4), (36): Xaa is C or S

SEQ ID NO: 34239 - protein, 42 aa, Artificial Sequence; identical to SEQ ID NO: 32083
  GFR-binding peptide
  MOD_RES (2), (4), (36), (37): Xaa is C or S

SEQ ID NO: 34240 - protein, 42 aa, Artificial Sequence; identical to SEQ ID NO: 32084
  GFR-binding peptide
  MOD_RES (2), (36): Xaa is C or S
  MOD_RES (14), (15), (16), (17), (18): Xaa is A or G
  MOD_RES (19), (20), (21), (22): Xaa is A or G or is absent

SEQ ID NO: 34241 - protein, 35 aa, Artificial Sequence; identical to SEQ ID NO: 32085
  GFR-binding peptide
  MOD_RES (1), (3), (35): Xaa is C or S

SEQ ID NO: 34242 - protein, 36 aa, Artificial Sequence; identical to SEQ ID NO: 32086
  GFR-binding peptide
  MOD_RES (2), (35), (36): Xaa is C or S

SEQ ID NO: 34243 - protein, 36 aa, Artificial Sequence; identical to SEQ ID NO: 32087
  GFR-binding peptide
  MOD_RES (1), (34), (35): Xaa is C or S
  MOD_RES (12), (13), (14), (15), (16): Xaa is A or G
  MOD_RES (17), (18), (19), (20): Xaa is A or G or is absent

SEQ ID NO: 34244 - protein, 36 aa, Artificial Sequence; identical to SEQ ID NO: 32088
  GFR-binding peptide
  MOD_RES (2), (36): Xaa is C or S
  MOD_RES (14), (15), (16), (17), (18): Xaa is A or G
  MOD_RES (19), (20), (21), (22): Xaa is A or G or is absent

SEQ ID NO: 34245 - protein, 40 aa, Artificial Sequence; identical to SEQ ID NO: 32089
  GFR-binding peptide
  MOD_RES (2), (4), (38), (39): Xaa is C or S
  MOD_RES (16), (17), (18), (19), (20): Xaa is A or G
  MOD_RES (21), (22), (23), (24): Xaa is A or G or is absent

SEQ ID NO: 34246 - protein, 35 aa, Artificial Sequence; identical to SEQ ID NO: 32090
  GFR-binding peptide
  MOD_RES (33), (34): Xaa is C or S
  MOD_RES (11), (12), (13), (14), (15): Xaa is A or G
  MOD_RES (16), (17), (18), (19): Xaa is A or G or is absent

SEQ ID NO: 34247 - protein, 40 aa, Artificial Sequence; identical to SEQ ID NO: 32091
  GFR-binding peptide
  MOD_RES (2), (36), (37): Xaa is C or S
  MOD_RES (14), (15), (16), (17), (18): Xaa is A or G
  MOD_RES (19), (20), (21), (22): Xaa is A or G or is absent

SEQ ID NO: 34248 - protein, 39 aa, Artificial Sequence; identical to SEQ ID NO: 32092
  GFR-binding peptide
  MOD_RES (2), (36), (37): Xaa is C or S
  MOD_RES (14), (15), (16), (17), (18): Xaa is A or G
  MOD_RES (19), (20), (21), (22): Xaa is A or G or is absent

SEQ ID NO: 34249 - protein, 37 aa, Artificial Sequence; identical to SEQ ID NO: 32093
  GFR-binding peptide
  MOD_RES (1), (33), (34): Xaa is C or S

SEQ ID NO: 34250 - protein, 37 aa, Artificial Sequence; identical to SEQ ID NO: 32094
  GFR-binding peptide
  MOD_RES (1), (33), (34): Xaa is C or S

SEQ ID NO: 34251 - protein, 34 aa, Artificial Sequence; identical to SEQ ID NO: 32095
  GFR-binding peptide
  MOD_RES (1), (1): Xaa is C or S
  MOD_RES (13), (14), (15), (16), (17): Xaa is A or G
  MOD_RES (18), (19), (20), (21): Xaa is A or G or is absent

SEQ ID NO: 34252 - protein, 40 aa, Artificial Sequence; identical to SEQ ID NO: 32096
  GFR-binding peptide
  MOD_RES (34), (35): Xaa is C or S
  MOD_RES (12), (13), (14), (15), (16): Xaa is A or G
  MOD_RES (17), (18), (19), (20): Xaa is A or G or is absent

SEQ ID NO: 34253 - protein, 32 aa, Artificial Sequence; identical to SEQ ID NO: 32097
  GFR-binding peptide
  MOD_RES (1), (1): Xaa is C or S

SEQ ID NO: 34254 - protein, 33 aa, Artificial Sequence; identical to SEQ ID NO: 32098
  GFR-binding peptide
  MOD_RES (2), (2): Xaa is C or S

SEQ ID NO: 34255 - protein, 40 aa, Artificial Sequence; identical to SEQ ID NO: 32099
  GFR-binding peptide
  MOD_RES (1), (35): Xaa is C or S
  MOD_RES (13), (14), (15), (16), (17): Xaa is A or G
  MOD_RES (18), (19), (20), (21): Xaa is A or G or is absent

SEQ ID NO: 34256 - protein, 37 aa, Artificial Sequence; identical to SEQ ID NO: 32100
  GFR-binding peptide
  MOD_RES (2), (4): Xaa is C or S
  MOD_RES (16), (17), (18), (19), (20): Xaa is A or G
  MOD_RES (21), (22), (23), (24): Xaa is A or G or is absent

SEQ ID NO: 34257 - protein, 42 aa, Artificial Sequence; identical to SEQ ID NO: 32101
  GFR-binding peptide
  MOD_RES (2), (36), (37): Xaa is C or S
  MOD_RES (14), (15), (16), (17), (18): Xaa is A or G
  MOD_RES (19), (20), (21), (22): Xaa is A or G or is absent

SEQ ID NO: 34258 - protein, 31 aa, Artificial Sequence; identical to SEQ ID NO: 32102
  GFR-binding peptide
  MOD_RES (31), (31): Xaa is C or S

SEQ ID NO: 34259 - protein, 39 aa, Artificial Sequence; identical to SEQ ID NO: 32103
  GFR-binding peptide
  MOD_RES (2), (4), (38), (39): Xaa is C or S
  MOD_RES (16), (17), (18), (19), (20): Xaa is A or G
  MOD_RES (21), (22), (23), (24): Xaa is A or G or is absent

SEQ ID NO: 34260 - protein, 44 aa, Artificial Sequence; identical to SEQ ID NO: 32104
  GFR-binding peptide
  MOD_RES (2), (4), (38), (39): Xaa is C or S
  MOD_RES (16), (17), (18), (19), (20): Xaa is A or G
  MOD_RES (21), (22), (23), (24): Xaa is A or G or is absent

SEQ ID NO: 34261 - protein, 36 aa, Artificial Sequence; identical to SEQ ID NO: 32105
  GFR-binding peptide
  MOD_RES (1), (35): Xaa is C or S
  MOD_RES (13), (14), (15), (16), (17): Xaa is A or G
  MOD_RES (18), (19), (20), (21): Xaa is A or G or is absent

SEQ ID NO: 34262 - protein, 37 aa, Artificial Sequence; identical to SEQ ID NO: 32106
  GFR-binding peptide
  MOD_RES (2), (4): Xaa is C or S
  MOD_RES (16), (17), (18), (19), (20): Xaa is A or G
  MOD_RES (21), (22), (23), (24): Xaa is A or G or is absent

SEQ ID NO: 34263 - protein, 39 aa, Artificial Sequence; identical to SEQ ID NO: 32107
  GFR-binding peptide
  MOD_RES (2), (34), (35): Xaa is C or S

SEQ ID NO: 34264 - protein, 37 aa, Artificial Sequence; identical to SEQ ID NO: 32108
  GFR-binding peptide
  MOD_RES (1), (3), (37): Xaa is C or S
  MOD_RES (15), (16), (17), (18), (19): Xaa is A or G
  MOD_RES (20), (21), (22), (23): Xaa is A or G or is absent

SEQ ID NO: 34265 - protein, 44 aa, Artificial Sequence; identical to SEQ ID NO: 32109
  GFR-binding peptide
  MOD_RES (2), (4), (38), (39): Xaa is C or S
  MOD_RES (16), (17), (18), (19), (20): Xaa is A or G
  MOD_RES (21), (22), (23), (24): Xaa is A or G or is absent

SEQ ID NO: 34266 - protein, 33 aa, Artificial Sequence; identical to SEQ ID NO: 32110
  GFR-binding peptide
  MOD_RES (2), (2): Xaa is C or S

SEQ ID NO: 34267 - protein, 37 aa, Artificial Sequence; identical to SEQ ID NO: 32111
  GFR-binding peptide
  MOD_RES (1), (3): Xaa is C or S
  MOD_RES (16), (17), (18), (19), (20): Xaa is A or G
  MOD_RES (21), (22), (23), (24): Xaa is A or G or is absent

SEQ ID NO: 34268 - protein, 37 aa, Artificial Sequence; identical to SEQ ID NO: 32112
  GFR-binding peptide
  MOD_RES (33), (34): Xaa is C or S
  MOD_RES (11), (12), (13), (14), (15): Xaa is A or G
  MOD_RES (16), (17), (18), (19): Xaa is A or G or is absent

SEQ ID NO: 34269 - protein, 40 aa, Artificial Sequence; identical to SEQ ID NO: 32113
  GFR-binding peptide
  MOD_RES (34), (35): Xaa is C or S
  MOD_RES (12), (13), (14), (15), (16): Xaa is A or G
  MOD_RES (17), (18), (19), (20): Xaa is A or G or is absent

SEQ ID NO: 34270 - protein, 38 aa, Artificial Sequence; identical to SEQ ID NO: 32114
  GFR-binding peptide
  MOD_RES (1), (3), (37): Xaa is C or S
  MOD_RES (15), (16), (17), (18), (19): Xaa is A or G
  MOD_RES (20), (21), (22), (23): Xaa is A or G or is absent

SEQ ID NO: 34271 - protein, 35 aa, Artificial Sequence; identical to SEQ ID NO: 32115
  GFR-binding peptide
  MOD_RES (32), (33): Xaa is C or S

SEQ ID NO: 34272 - protein, 38 aa, Artificial Sequence; identical to SEQ ID NO: 32116
  GFR-binding peptide
  MOD_RES (1), (3), (35): Xaa is C or S

SEQ ID NO: 34273 - protein, 33 aa, Artificial Sequence; identical to SEQ ID NO: 32117
  GFR-binding peptide
  MOD_RES (32), (33): Xaa is C or S

SEQ ID NO: 34274 - protein, 38 aa, Artificial Sequence; identical to SEQ ID NO: 32118
  GFR-binding peptide
  MOD_RES (32), (33): Xaa is C or S

SEQ ID NO: 34275 - protein, 40 aa, Artificial Sequence; identical to SEQ ID NO: 32119
  GFR-binding peptide
  MOD_RES (1), (35), (36): Xaa is C or S
  MOD_RES (13), (14), (15), (16), (17): Xaa is A or G
  MOD_RES (18), (19), (20), (21): Xaa is A or G or is absent

SEQ ID NO: 34276 - protein, 39 aa, Artificial Sequence; identical to SEQ ID NO: 32120
  GFR-binding peptide
  MOD_RES (1), (3), (35), (36): Xaa is C or S

SEQ ID NO: 34277 - protein, 31 aa, Artificial Sequence; identical to SEQ ID NO: 32121
  GFR-binding peptide
  MOD_RES (31), (31): Xaa is C or S

SEQ ID NO: 34278 - protein, 39 aa, Artificial Sequence; identical to SEQ ID NO: 32122
  GFR-binding peptide
  MOD_RES (2), (4), (37), (38): Xaa is C or S
  MOD_RES (15), (16), (17), (18), (19): Xaa is A or G
  MOD_RES (20), (21), (22), (23): Xaa is A or G or is absent

SEQ ID NO: 34279 - protein, 38 aa, Artificial Sequence; identical to SEQ ID NO: 32123
  GFR-binding peptide
  MOD_RES (34), (35): Xaa is C or S
  MOD_RES (12), (13), (14), (15), (16): Xaa is A or G
  MOD_RES (17), (18), (19), (20): Xaa is A or G or is absent

SEQ ID NO: 34280 - protein, 38 aa, Artificial Sequence; identical to SEQ ID NO: 32124
  GFR-binding peptide
  MOD_RES (1), (33), (34): Xaa is C or S

SEQ ID NO: 34281 - protein, 37 aa, Artificial Sequence; identical to SEQ ID NO: 32125
  GFR-binding peptide
  MOD_RES (31), (32): Xaa is C or S

SEQ ID NO: 34282 - protein, 34 aa, Artificial Sequence; identical to SEQ ID NO: 32126
  GFR-binding peptide
  MOD_RES (1), (1): Xaa is C or S
  MOD_RES (13), (14), (15), (16), (17): Xaa is A or G
  MOD_RES (18), (19), (20), (21): Xaa is A or G or is absent

SEQ ID NO: 34283 - protein, 38 aa, Artificial Sequence; identical to SEQ ID NO: 32127
  GFR-binding peptide
  MOD_RES (33), (34): Xaa is C or S
  MOD_RES (11), (12), (13), (14), (15): Xaa is A or G
  MOD_RES (16), (17), (18), (19): Xaa is A or G or is absent

SEQ ID NO: 34284 - protein, 38 aa, Artificial Sequence; identical to SEQ ID NO: 32128
  GFR-binding peptide
  MOD_RES (2), (4), (37), (38): Xaa is C or S

SEQ ID NO: 34285 - protein, 37 aa, Artificial Sequence; identical to SEQ ID NO: 32129
  GFR-binding peptide
  MOD_RES (2), (34), (35): Xaa is C or S

SEQ ID NO: 34286 - protein, 40 aa, Artificial Sequence; identical to SEQ ID NO: 32130
  GFR-binding peptide
  MOD_RES (2), (36), (37): Xaa is C or S
  MOD_RES (14), (15), (16), (17), (18): Xaa is A or G
  MOD_RES (19), (20), (21), (22): Xaa is A or G or is absent

SEQ ID NO: 34287 - protein, 30 aa, Artificial Sequence; identical to SEQ ID NO: 32131
  GFR-binding peptide

SEQ ID NO: 34288 - protein, 41 aa, Artificial Sequence; identical to SEQ ID NO: 32132
  GFR-binding peptide
  MOD_RES (1), (3), (36), (37): Xaa is C or S
  MOD_RES (14), (15), (16), (17), (18): Xaa is A or G
  MOD_RES (19), (20), (21), (22): Xaa is A or G or is absent

SEQ ID NO: 34289 - protein, 31 aa, Artificial Sequence; identical to SEQ ID NO: 32133
  GFR-binding peptide
  MOD_RES (31), (31): Xaa is C or S

SEQ ID NO: 34290 - protein, 35 aa, Artificial Sequence; identical to SEQ ID NO: 32134
  GFR-binding peptide
  MOD_RES (33), (34): Xaa is C or S
  MOD_RES (11), (12), (13), (14), (15): Xaa is A or G
  MOD_RES (16), (17), (18), (19): Xaa is A or G or is absent

SEQ ID NO: 34291 - protein, 38 aa, Artificial Sequence; identical to SEQ ID NO: 32135
  GFR-binding peptide
  MOD_RES (1), (3), (37), (38): Xaa is C or S
  MOD_RES (15), (16), (17), (18), (19): Xaa is A or G
  MOD_RES (20), (21), (22), (23): Xaa is A or G or is absent

SEQ ID NO: 34292 - protein, 39 aa, Artificial Sequence; identical to SEQ ID NO: 32136
  GFR-binding peptide
  MOD_RES (2), (33), (34): Xaa is C or S

SEQ ID NO: 34293 - protein, 35 aa, Artificial Sequence; identical to SEQ ID NO: 32137
  GFR-binding peptide
  MOD_RES (1), (3), (35): Xaa is C or S

SEQ ID NO: 34294 - protein, 37 aa, Artificial Sequence; identical to SEQ ID NO: 32138
  GFR-binding peptide
  MOD_RES (1), (35), (36): Xaa is C or S
  MOD_RES (13), (14), (15), (16), (17): Xaa is A or G
  MOD_RES (18), (19), (20), (21): Xaa is A or G or is absent

SEQ ID NO: 34295 - protein, 33 aa, Artificial Sequence; identical to SEQ ID NO: 32139
  GFR-binding peptide
  MOD_RES (33), (33): Xaa is C or S
  MOD_RES (11), (12), (13), (14), (15): Xaa is A or G
  MOD_RES (16), (17), (18), (19): Xaa is A or G or is absent

SEQ ID NO: 34296 - protein, 34 aa, Artificial Sequence; identical to SEQ ID NO: 32140
  GFR-binding peptide
  MOD_RES (31), (32): Xaa is C or S

SEQ ID NO: 34297 - protein, 34 aa, Artificial Sequence; identical to SEQ ID NO: 32141
  GFR-binding peptide
  MOD_RES (31), (31): Xaa is C or S

SEQ ID NO: 34298 - protein, 40 aa, Artificial Sequence; identical to SEQ ID NO: 32142
  GFR-binding peptide
  MOD_RES (34), (35): Xaa is C or S
  MOD_RES (12), (13), (14), (15), (16): Xaa is A or G
  MOD_RES (17), (18), (19), (20): Xaa is A or G or is absent

SEQ ID NO: 34299 - protein, 38 aa, Artificial Sequence; identical to SEQ ID NO: 32143
  GFR-binding peptide
  MOD_RES (2), (4), (38): Xaa is C or S
  MOD_RES (16), (17), (18), (19), (20): Xaa is A or G
  MOD_RES (21), (22), (23), (24): Xaa is A or G or is absent

SEQ ID NO: 34300 - protein, 35 aa, Artificial Sequence; identical to SEQ ID NO: 32144
  GFR-binding peptide
  MOD_RES (34), (34): Xaa is C or S
  MOD_RES (12), (13), (14), (15), (16): Xaa is A or G
  MOD_RES (17), (18), (19), (20): Xaa is A or G or is absent

SEQ ID NO: 34301 - protein, 36 aa, Artificial Sequence; identical to SEQ ID NO: 32145
  GFR-binding peptide
  MOD_RES (1), (33), (34): Xaa is C or S

SEQ ID NO: 34302 - protein, 35 aa, Artificial Sequence; identical to SEQ ID NO: 32146
  GFR-binding peptide
  MOD_RES (33), (34): Xaa is C or S
  MOD_RES (11), (12), (13), (14), (15): Xaa is A or G
  MOD_RES (16), (17), (18), (19): Xaa is A or G or is absent

SEQ ID NO: 34303 - protein, 32 aa, Artificial Sequence; identical to SEQ ID NO: 32147
  GFR-binding peptide
  MOD_RES (11), (12), (13), (14), (15): Xaa is A or G
  MOD_RES (16), (17), (18), (19): Xaa is A or G or is absent

SEQ ID NO: 34304 - protein, 36 aa, Artificial Sequence; identical to SEQ ID NO: 32148
  GFR-binding peptide
  MOD_RES (32), (33): Xaa is C or S

SEQ ID NO: 34305 - protein, 36 aa, Artificial Sequence; identical to SEQ ID NO: 32149
  GFR-binding peptide
  MOD_RES (1), (33), (34): Xaa is C or S

SEQ ID NO: 34306 - protein, 36 aa, Artificial Sequence; identical to SEQ ID NO: 32150
  GFR-binding peptide
  MOD_RES (34), (35): Xaa is C or S
  MOD_RES (12), (13), (14), (15), (16): Xaa is A or G
  MOD_RES (17), (18), (19), (20): Xaa is A or G or is absent

SEQ ID NO: 34307 - protein, 40 aa, Artificial Sequence; identical to SEQ ID NO: 32151
  GFR-binding peptide
  MOD_RES (34), (35): Xaa is C or S
  MOD_RES (12), (13), (14), (15), (16): Xaa is A or G
  MOD_RES (17), (18), (19), (20): Xaa is A or G or is absent

SEQ ID NO: 34308 - protein, 37 aa, Artificial Sequence; identical to SEQ ID NO: 32152
  GFR-binding peptide
  MOD_RES (31), (31): Xaa is C or S

SEQ ID NO: 34309 - protein, 38 aa, Artificial Sequence; identical to SEQ ID NO: 32153
  GFR-binding peptide
  MOD_RES (1), (33), (34): Xaa is C or S

SEQ ID NO: 34310 - protein, 41 aa, Artificial Sequence; identical to SEQ ID NO: 32154
  GFR-binding peptide
  MOD_RES (1), (35), (36): Xaa is C or S
  MOD_RES (13), (14), (15), (16), (17): Xaa is A or G
  MOD_RES (18), (19), (20), (21): Xaa is A or G or is absent

SEQ ID NO: 34311 - protein, 42 aa, Artificial Sequence; identical to SEQ ID NO: 32155
  GFR-binding peptide
  MOD_RES (1), (3), (37), (38): Xaa is C or S
  MOD_RES (15), (16), (17), (18), (19): Xaa is A or G
  MOD_RES (20), (21), (22), (23): Xaa is A or G or is absent

SEQ ID NO: 34312 - protein, 34 aa, Artificial Sequence; identical to SEQ ID NO: 32156
  GFR-binding peptide
  MOD_RES (33), (34): Xaa is C or S
  MOD_RES (11), (12), (13), (14), (15): Xaa is A or G
  MOD_RES (16), (17), (18), (19): Xaa is A or G or is absent

SEQ ID NO: 34313 - protein, 39 aa, Artificial Sequence; identical to SEQ ID NO: 32157
  GFR-binding peptide
  MOD_RES (33), (34): Xaa is C or S
  MOD_RES (11), (12), (13), (14), (15): Xaa is A or G
  MOD_RES (16), (17), (18), (19): Xaa is A or G or is absent

SEQ ID NO: 34314 - protein, 38 aa, Artificial Sequence; identical to SEQ ID NO: 32158
  GFR-binding peptide
  MOD_RES (2), (4), (36), (37): Xaa is C or S

SEQ ID NO: 34315 - protein, 41 aa, Artificial Sequence; identical to SEQ ID NO: 32159
  GFR-binding peptide
  MOD_RES (2), (37), (38): Xaa is C or S
  MOD_RES (15), (16), (17), (18), (19): Xaa is A or G
  MOD_RES (20), (21), (22), (23): Xaa is A or G or is absent

SEQ ID NO: 34316 - protein, 41 aa, Artificial Sequence; identical to SEQ ID NO: 32160
  GFR-binding peptide
  MOD_RES (2), (4), (36), (37): Xaa is C or S

SEQ ID NO: 34317 - protein, 39 aa, Artificial Sequence; identical to SEQ ID NO: 32161
  GFR-binding peptide
  MOD_RES (1), (35), (36): Xaa is C or S
  MOD_RES (13), (14), (15), (16), (17): Xaa is A or G
  MOD_RES (18), (19), (20), (21): Xaa is A or G or is absent

SEQ ID NO: 34318 - protein, 41 aa, Artificial Sequence; identical to SEQ ID NO: 32162
  GFR-binding peptide
  MOD_RES (1), (35), (36): Xaa is C or S
  MOD_RES (13), (14), (15), (16), (17): Xaa is A or G
  MOD_RES (18), (19), (20), (21): Xaa is A or G or is absent

SEQ ID NO: 34319 - protein, 35 aa, Artificial Sequence; identical to SEQ ID NO: 32163
  GFR-binding peptide
  MOD_RES (2), (34), (35): Xaa is C or S

SEQ ID NO: 34320 - protein, 33 aa, Artificial Sequence; identical to SEQ ID NO: 32164
  GFR-binding peptide
  MOD_RES (1), (1): Xaa is C or S

SEQ ID NO: 34321 - protein, 40 aa, Artificial Sequence; identical to SEQ ID NO: 32165
  GFR-binding peptide
  MOD_RES (2), (4), (38), (39): Xaa is C or S
  MOD_RES (16), (17), (18), (19), (20): Xaa is A or G
  MOD_RES (21), (22), (23), (24): Xaa is A or G or is absent

SEQ ID NO: 34322 - protein, 36 aa, Artificial Sequence; identical to SEQ ID NO: 32166
  GFR-binding peptide
  MOD_RES (31), (32): Xaa is C or S

SEQ ID NO: 34323 - protein, 34 aa, Artificial Sequence; identical to SEQ ID NO: 32167
  GFR-binding peptide
  MOD_RES (1), (34): Xaa is C or S

SEQ ID NO: 34324 - protein, 39 aa, Artificial Sequence; identical to SEQ ID NO: 32168
  GFR-binding peptide
  MOD_RES (1), (33), (34): Xaa is C or S

SEQ ID NO: 34325 - protein, 33 aa, Artificial Sequence; identical to SEQ ID NO: 32169
  GFR-binding peptide
  MOD_RES (2), (2): Xaa is C or S

SEQ ID NO: 34326 - protein, 34 aa, Artificial Sequence; identical to SEQ ID NO: 32170
  GFR-binding peptide
  MOD_RES (2), (34): Xaa is C or S

SEQ ID NO: 34327 - protein, 38 aa, Artificial Sequence; identical to SEQ ID NO: 32171
  GFR-binding peptide
  MOD_RES (1), (34), (35): Xaa is C or S
  MOD_RES (12), (13), (14), (15), (16): Xaa is A or G
  MOD_RES (17), (18), (19), (20): Xaa is A or G or is absent

SEQ ID NO: 34328 - protein, 41 aa, Artificial Sequence; identical to SEQ ID NO: 32172
  GFR-binding peptide
  MOD_RES (1), (35), (36): Xaa is C or S
  MOD_RES (13), (14), (15), (16), (17): Xaa is A or G
  MOD_RES (18), (19), (20), (21): Xaa is A or G or is absent

SEQ ID NO: 34329 - protein, 35 aa, Artificial Sequence; identical to SEQ ID NO: 32173
  GFR-binding peptide
  MOD_RES (2), (34), (35): Xaa is C or S

SEQ ID NO: 34330 - protein, 41 aa, Artificial Sequence; identical to SEQ ID NO: 32174
  GFR-binding peptide
  MOD_RES (2), (4), (38), (39): Xaa is C or S
  MOD_RES (16), (17), (18), (19), (20): Xaa is A or G
  MOD_RES (21), (22), (23), (24): Xaa is A or G or is absent

SEQ ID NO: 34331 - protein, 39 aa, Artificial Sequence; identical to SEQ ID NO: 32175
  GFR-binding peptide
  MOD_RES (33), (34): Xaa is C or S
  MOD_RES (11), (12), (13), (14), (15): Xaa is A or G
  MOD_RES (16), (17), (18), (19): Xaa is A or G or is absent

SEQ ID NO: 34332 - protein, 37 aa, Artificial Sequence; identical to SEQ ID NO: 32176
  GFR-binding peptide
  MOD_RES (1), (33), (34): Xaa is C or S

SEQ ID NO: 34333 - protein, 40 aa, Artificial Sequence; identical to SEQ ID NO: 32177
  GFR-binding peptide
  MOD_RES (2), (34), (35): Xaa is C or S

SEQ ID NO: 34334 - protein, 34 aa, Artificial Sequence; identical to SEQ ID NO: 32178
  GFR-binding peptide
  MOD_RES (32), (33): Xaa is C or S

SEQ ID NO: 34335 - protein, 40 aa, Artificial Sequence; identical to SEQ ID NO: 32179
  GFR-binding peptide
  MOD_RES (2), (36), (37): Xaa is C or S
  MOD_RES (14), (15), (16), (17), (18): Xaa is A or G
  MOD_RES (19), (20), (21), (22): Xaa is A or G or is absent

SEQ ID NO: 34336 - protein, 37 aa, Artificial Sequence; identical to SEQ ID NO: 32180
  GFR-binding peptide
  MOD_RES (32), (32): Xaa is C or S

SEQ ID NO: 34337 - protein, 36 aa, Artificial Sequence; identical to SEQ ID NO: 32181
  GFR-binding peptide
  MOD_RES (33), (33): Xaa is C or S
  MOD_RES (11), (12), (13), (14), (15): Xaa is A or G
  MOD_RES (16), (17), (18), (19): Xaa is A or G or is absent

SEQ ID NO: 34338 - protein, 40 aa, Artificial Sequence; identical to SEQ ID NO: 32182
  GFR-binding peptide
  MOD_RES (2), (36), (37): Xaa is C or S
  MOD_RES (14), (15), (16), (17), (18): Xaa is A or G
  MOD_RES (19), (20), (21), (22): Xaa is A or G or is absent

SEQ ID NO: 34339 - protein, 40 aa, Artificial Sequence; identical to SEQ ID NO: 32183
  GFR-binding peptide
  MOD_RES (1), (35), (36): Xaa is C or S
  MOD_RES (13), (14), (15), (16), (17): Xaa is A or G
  MOD_RES (18), (19), (20), (21): Xaa is A or G or is absent

SEQ ID NO: 34340 - protein, 38 aa, Artificial Sequence; identical to SEQ ID NO: 32184
  GFR-binding peptide
  MOD_RES (2), (34), (35): Xaa is C or S

SEQ ID NO: 34341 - protein, 31 aa, Artificial Sequence; identical to SEQ ID NO: 32185
  GFR-binding peptide

SEQ ID NO: 34342 - protein, 39 aa, Artificial Sequence; identical to SEQ ID NO: 32186
  GFR-binding peptide
  MOD_RES (1), (33), (34): Xaa is C or S

SEQ ID NO: 34343 - protein, 38 aa, Artificial Sequence; identical to SEQ ID NO: 32187
  GFR-binding peptide
  MOD_RES (2), (4), (38): Xaa is C or S
  MOD_RES (16), (17), (18), (19), (20): Xaa is A or G
  MOD_RES (21), (22), (23), (24): Xaa is A or G or is absent

SEQ ID NO: 34344 - protein, 39 aa, Artificial Sequence; identical to SEQ ID NO: 32188
  GFR-binding peptide
  MOD_RES (2), (4), (36), (37): Xaa is C or S

SEQ ID NO: 34345 - protein, 37 aa, Artificial Sequence; identical to SEQ ID NO: 32189
  GFR-binding peptide
  MOD_RES (2), (37): Xaa is C or S
  MOD_RES (15), (16), (17), (18), (19): Xaa is A or G
  MOD_RES (20), (21), (22), (23): Xaa is A or G or is absent

SEQ ID NO: 34346 - protein, 41 aa, Artificial Sequence; identical to SEQ ID NO: 32190
  GFR-binding peptide
  MOD_RES (2), (36), (37): Xaa is C or S
  MOD_RES (14), (15), (16), (17), (18): Xaa is A or G
  MOD_RES (19), (20), (21), (22): Xaa is A or G or is absent

SEQ ID NO: 34347 - protein, 42 aa, Artificial Sequence; identical to SEQ ID NO: 32191
  GFR-binding peptide
  MOD_RES (1), (3), (37), (38): Xaa is C or S
  MOD_RES (15), (16), (17), (18), (19): Xaa is A or G
  MOD_RES (20), (21), (22), (23): Xaa is A or G or is absent

SEQ ID NO: 34348 - protein, 31 aa, Artificial Sequence; identical to SEQ ID NO: 32192
  GFR-binding peptide
  MOD_RES (31), (31): Xaa is C or S

SEQ ID NO: 34349 - protein, 36 aa, Artificial Sequence; identical to SEQ ID NO: 32193
  GFR-binding peptide
  MOD_RES (33), (34): Xaa is C or S
  MOD_RES (11), (12), (13), (14), (15): Xaa is A or G
  MOD_RES (16), (17), (18), (19): Xaa is A or G or is absent

SEQ ID NO: 34350 - protein, 41 aa, Artificial Sequence; identical to SEQ ID NO: 32194
  GFR-binding peptide
  MOD_RES (1), (35), (36): Xaa is C or S
  MOD_RES (13), (14), (15), (16), (17): Xaa is A or G
  MOD_RES (18), (19), (20), (21): Xaa is A or G or is absent

SEQ ID NO: 34351 - protein, 39 aa, Artificial Sequence; identical to SEQ ID NO: 32195
  GFR-binding peptide
  MOD_RES (2), (4), (38), (39): Xaa is C or S
  MOD_RES (16), (17), (18), (19), (20): Xaa is A or G
  MOD_RES (21), (22), (23), (24): Xaa is A or G or is absent

SEQ ID NO: 34352 - protein, 41 aa, Artificial Sequence; identical to SEQ ID NO: 32196
  GFR-binding peptide
  MOD_RES (1), (35), (36): Xaa is C or S
  MOD_RES (13), (14), (15), (16), (17): Xaa is A or G
  MOD_RES (18), (19), (20), (21): Xaa is A or G or is absent

SEQ ID NO: 34353 - protein, 33 aa, Artificial Sequence; identical to SEQ ID NO: 32197
  GFR-binding peptide
  MOD_RES (31), (32): Xaa is C or S

SEQ ID NO: 34354 - protein, 30 aa, Artificial Sequence; identical to SEQ ID NO: 32198
  GFR-binding peptide

SEQ ID NO: 34355 - protein, 33 aa, Artificial Sequence; identical to SEQ ID NO: 32199
  GFR-binding peptide
  MOD_RES (33), (33): Xaa is C or S
  MOD_RES (11), (12), (13), (14), (15): Xaa is A or G
  MOD_RES (16), (17), (18), (19): Xaa is A or G or is absent

SEQ ID NO: 34356 - protein, 34 aa, Artificial Sequence; identical to SEQ ID NO: 32200
  GFR-binding peptide
  MOD_RES (1), (1): Xaa is C or S
  MOD_RES (13), (14), (15), (16), (17): Xaa is A or G
  MOD_RES (18), (19), (20), (21): Xaa is A or G or is absent

SEQ ID NO: 34357 - protein, 42 aa, Artificial Sequence; identical to SEQ ID NO: 32201
  GFR-binding peptide
  MOD_RES (2), (36), (37): Xaa is C or S
  MOD_RES (14), (15), (16), (17), (18): Xaa is A or G
  MOD_RES (19), (20), (21), (22): Xaa is A or G or is absent

SEQ ID NO: 34358 - protein, 40 aa, Artificial Sequence; identical to SEQ ID NO: 32202
  GFR-binding peptide
  MOD_RES (2), (37), (38): Xaa is C or S
  MOD_RES (15), (16), (17), (18), (19): Xaa is A or G
  MOD_RES (20), (21), (22), (23): Xaa is A or G or is absent

SEQ ID NO: 34359 - protein, 36 aa, Artificial Sequence; identical to SEQ ID NO: 32203
  GFR-binding peptide
  MOD_RES (31), (32): Xaa is C or S

SEQ ID NO: 34360 - protein, 32 aa, Artificial Sequence; identical to SEQ ID NO: 32204
  GFR-binding peptide
  MOD_RES (31), (32): Xaa is C or S

SEQ ID NO: 34361 - protein, 36 aa, Artificial Sequence; identical to SEQ ID NO: 32205
  GFR-binding peptide
  MOD_RES (1), (32), (33): Xaa is C or S

SEQ ID NO: 34362 - protein, 35 aa, Artificial Sequence; identical to SEQ ID NO: 32206
  GFR-binding peptide
  MOD_RES (1), (33), (34): Xaa is C or S

SEQ ID NO: 34363 - protein, 36 aa, Artificial Sequence; identical to SEQ ID NO: 32207
  GFR-binding peptide
  MOD_RES (33), (34): Xaa is C or S
  MOD_RES (11), (12), (13), (14), (15): Xaa is A or G
  MOD_RES (16), (17), (18), (19): Xaa is A or G or is absent

SEQ ID NO: 34364 - protein, 31 aa, Artificial Sequence; identical to SEQ ID NO: 32208
  GFR-binding peptide
  MOD_RES (31), (31): Xaa is C or S

SEQ ID NO: 34365 - protein, 38 aa, Artificial Sequence; identical to SEQ ID NO: 32209
  GFR-binding peptide
  MOD_RES (1), (3), (37), (38): Xaa is C or S
  MOD_RES (15), (16), (17), (18), (19): Xaa is A or G
  MOD_RES (20), (21), (22), (23): Xaa is A or G or is absent

SEQ ID NO: 34366 - protein, 33 aa, Artificial Sequence; identical to SEQ ID NO: 32210
  GFR-binding peptide
  MOD_RES (32), (33): Xaa is C or S

SEQ ID NO: 34367 - protein, 33 aa, Artificial Sequence; identical to SEQ ID NO: 32211
  GFR-binding peptide
  MOD_RES (1), (33): Xaa is C or S

SEQ ID NO: 34368 - protein, 34 aa, Artificial Sequence; identical to SEQ ID NO: 32212
  GFR-binding peptide
  MOD_RES (34), (34): Xaa is C or S
  MOD_RES (12), (13), (14), (15), (16): Xaa is A or G
  MOD_RES (17), (18), (19), (20): Xaa is A or G or is absent

SEQ ID NO: 34369 - protein, 40 aa, Artificial Sequence; identical to SEQ ID NO: 32213
  GFR-binding peptide
  MOD_RES (2), (4), (38), (39): Xaa is C or S
  MOD_RES (16), (17), (18), (19), (20): Xaa is A or G
  MOD_RES (21), (22), (23), (24): Xaa is A or G or is absent

SEQ ID NO: 34370 - protein, 40 aa, Artificial Sequence; identical to SEQ ID NO: 32214
  GFR-binding peptide
  MOD_RES (2), (4), (36), (37): Xaa is C or S

SEQ ID NO: 34371 - protein, 34 aa, Artificial Sequence; identical to SEQ ID NO: 32215
  GFR-binding peptide
  MOD_RES (31), (32): Xaa is C or S

SEQ ID NO: 34372 - protein, 42 aa, Artificial Sequence; identical to SEQ ID NO: 32216
  GFR-binding peptide
  MOD_RES (2), (36), (37): Xaa is C or S
  MOD_RES (14), (15), (16), (17), (18): Xaa is A or G
  MOD_RES (19), (20), (21), (22): Xaa is A or G or is absent

SEQ ID NO: 34373 - protein, 38 aa, Artificial Sequence; identical to SEQ ID NO: 32217
  GFR-binding peptide
  MOD_RES (1), (3), (37), (38): Xaa is C or S
  MOD_RES (15), (16), (17), (18), (19): Xaa is A or G
  MOD_RES (20), (21), (22), (23): Xaa is A or G or is absent

SEQ ID NO: 34374 - protein, 36 aa, Artificial Sequence; identical to SEQ ID NO: 32218
  GFR-binding peptide
  MOD_RES (1), (33), (34): Xaa is C or S

SEQ ID NO: 34375 - protein, 39 aa, Artificial Sequence; identical to SEQ ID NO: 32219
  GFR-binding peptide
  MOD_RES (1), (3), (37), (38): Xaa is C or S
  MOD_RES (15), (16), (17), (18), (19): Xaa is A or G
  MOD_RES (20), (21), (22), (23): Xaa is A or G or is absent

SEQ ID NO: 34376 - protein, 35 aa, Artificial Sequence; identical to SEQ ID NO: 32220
  GFR-binding peptide
  MOD_RES (2), (4): Xaa is C or S

SEQ ID NO: 34377 - protein, 38 aa, Artificial Sequence; identical to SEQ ID NO: 32221
  GFR-binding peptide
  MOD_RES (1), (3), (35), (36): Xaa is C or S

SEQ ID NO: 34378 - protein, 37 aa, Artificial Sequence; identical to SEQ ID NO: 32222
  GFR-binding peptide
  MOD_RES (31), (32): Xaa is C or S

SEQ ID NO: 34379 - protein, 38 aa, Artificial Sequence; identical to SEQ ID NO: 32223
  GFR-binding peptide
  MOD_RES (2), (4), (36), (37): Xaa is C or S

SEQ ID NO: 34380 - protein, 39 aa, Artificial Sequence; identical to SEQ ID NO: 32224
  GFR-binding peptide
  MOD_RES (33), (34): Xaa is C or S
  MOD_RES (11), (12), (13), (14), (15): Xaa is A or G
  MOD_RES (16), (17), (18), (19): Xaa is A or G or is absent

SEQ ID NO: 34381 - protein, 38 aa, Artificial Sequence; identical to SEQ ID NO: 32225
  GFR-binding peptide
  MOD_RES (2), (4), (36), (37): Xaa is C or S

SEQ ID NO: 34382 - protein, 39 aa, Artificial Sequence; identical to SEQ ID NO: 32226
  GFR-binding peptide
  MOD_RES (2), (4), (36): Xaa is C or S

SEQ ID NO: 34383 - protein, 40 aa, Artificial Sequence; identical to SEQ ID NO: 32227
  GFR-binding peptide
  MOD_RES (2), (36), (37): Xaa is C or S
  MOD_RES (14), (15), (16), (17), (18): Xaa is A or G
  MOD_RES (19), (20), (21), (22): Xaa is A or G or is absent

SEQ ID NO: 34384 - protein, 38 aa, Artificial Sequence; identical to SEQ ID NO: 32228
  GFR-binding peptide
  MOD_RES (33), (34): Xaa is C or S
  MOD_RES (11), (12), (13), (14), (15): Xaa is A or G
  MOD_RES (16), (17), (18), (19): Xaa is A or G or is absent

SEQ ID NO: 34385 - protein, 35 aa, Artificial Sequence; identical to SEQ ID NO: 32229
  GFR-binding peptide
  MOD_RES (2), (2): Xaa is C or S
  MOD_RES (14), (15), (16), (17), (18): Xaa is A or G
  MOD_RES (19), (20), (21), (22): Xaa is A or G or is absent

SEQ ID NO: 34386 - protein, 41 aa, Artificial Sequence; identical to SEQ ID NO: 32230
  GFR-binding peptide
  MOD_RES (2), (35), (36): Xaa is C or S
  MOD_RES (13), (14), (15), (16), (17): Xaa is A or G
  MOD_RES (18), (19), (20), (21): Xaa is A or G or is absent

SEQ ID NO: 34387 - protein, 43 aa, Artificial Sequence; identical to SEQ ID NO: 32231
  GFR-binding peptide
  MOD_RES (2), (4), (38), (39): Xaa is C or S
  MOD_RES (16), (17), (18), (19), (20): Xaa is A or G
  MOD_RES (21), (22), (23), (24): Xaa is A or G or is absent

SEQ ID NO: 34388 - protein, 34 aa, Artificial Sequence; identical to SEQ ID NO: 32232
  GFR-binding peptide
  MOD_RES (33), (34): Xaa is C or S
  MOD_RES (11), (12), (13), (14), (15): Xaa is A or G
  MOD_RES (16), (17), (18), (19): Xaa is A or G or is absent

SEQ ID NO: 34389 - protein, 42 aa, Artificial Sequence; identical to SEQ ID NO: 32233
  GFR-binding peptide
  MOD_RES (2), (36), (37): Xaa is C or S
  MOD_RES (14), (15), (16), (17), (18): Xaa is A or G
  MOD_RES (19), (20), (21), (22): Xaa is A or G or is absent

SEQ ID NO: 34390 - protein, 39 aa, Artificial Sequence; identical to SEQ ID NO: 32234
  GFR-binding peptide
  MOD_RES (2), (34), (35): Xaa is C or S

SEQ ID NO: 34391 - protein, 39 aa, Artificial Sequence; identical to SEQ ID NO: 32235
  GFR-binding peptide
  MOD_RES (34), (35): Xaa is C or S
  MOD_RES (12), (13), (14), (15), (16): Xaa is A or G
  MOD_RES (17), (18), (19), (20): Xaa is A or G or is absent

SEQ ID NO: 34392 - protein, 39 aa, Artificial Sequence; identical to SEQ ID NO: 32236
  GFR-binding peptide
  MOD_RES (1), (33), (34): Xaa is C or S

SEQ ID NO: 34393 - protein, 38 aa, Artificial Sequence; identical to SEQ ID NO: 32237
  GFR-binding peptide
  MOD_RES (1), (35), (36): Xaa is C or S
  MOD_RES (13), (14), (15), (16), (17): Xaa is A or G
  MOD_RES (18), (19), (20), (21): Xaa is A or G or is absent

SEQ ID NO: 34394 - protein, 40 aa, Artificial Sequence; identical to SEQ ID NO: 32238
  GFR-binding peptide
  MOD_RES (1), (35), (36): Xaa is C or S
  MOD_RES (13), (14), (15), (16), (17): Xaa is A or G
  MOD_RES (18), (19), (20), (21): Xaa is A or G or is absent

SEQ ID NO: 34395 - protein, 40 aa, Artificial Sequence; identical to SEQ ID NO: 32239
  GFR-binding peptide
  MOD_RES (2), (4), (37), (38): Xaa is C or S

SEQ ID NO: 34396 - protein, 36 aa, Artificial Sequence; identical to SEQ ID NO: 32240
  GFR-binding peptide
  MOD_RES (1), (35), (36): Xaa is C or S
  MOD_RES (13), (14), (15), (16), (17): Xaa is A or G
  MOD_RES (18), (19), (20), (21): Xaa is A or G or is absent

SEQ ID NO: 34397 - protein, 38 aa, Artificial Sequence; identical to SEQ ID NO: 32241
  GFR-binding peptide
  MOD_RES (1), (3), (37), (38): Xaa is C or S
  MOD_RES (15), (16), (17), (18), (19): Xaa is A or G
  MOD_RES (20), (21), (22), (23): Xaa is A or G or is absent

SEQ ID NO: 34398 - protein, 37 aa, Artificial Sequence; identical to SEQ ID NO: 32242
  GFR-binding peptide
  MOD_RES (32), (33): Xaa is C or S

SEQ ID NO: 34399 - protein, 40 aa, Artificial Sequence; identical to SEQ ID NO: 32243
  GFR-binding peptide
  MOD_RES (2), (35), (36): Xaa is C or S
  MOD_RES (13), (14), (15), (16), (17): Xaa is A or G
  MOD_RES (18), (19), (20), (21): Xaa is A or G or is absent

SEQ ID NO: 34400 - protein, 37 aa, Artificial Sequence; identical to SEQ ID NO: 32244
  GFR-binding peptide
  MOD_RES (31), (32): Xaa is C or S

SEQ ID NO: 34401 - protein, 35 aa, Artificial Sequence; identical to SEQ ID NO: 32245
  GFR-binding peptide
  MOD_RES (1), (35): Xaa is C or S
  MOD_RES (13), (14), (15), (16), (17): Xaa is A or G
  MOD_RES (18), (19), (20), (21): Xaa is A or G or is absent

SEQ ID NO: 34402 - protein, 42 aa, Artificial Sequence; identical to SEQ ID NO: 32246
  GFR-binding peptide
  MOD_RES (2), (4), (38), (39): Xaa is C or S
  MOD_RES (16), (17), (18), (19), (20): Xaa is A or G
  MOD_RES (21), (22), (23), (24): Xaa is A or G or is absent

SEQ ID NO: 34403 - protein, 36 aa, Artificial Sequence; identical to SEQ ID NO: 32247
  GFR-binding peptide
  MOD_RES (34), (35): Xaa is C or S
  MOD_RES (12), (13), (14), (15), (16): Xaa is A or G
  MOD_RES (17), (18), (19), (20): Xaa is A or G or is absent

SEQ ID NO: 34404 - protein, 34 aa, Artificial Sequence; identical to SEQ ID NO: 32248
  GFR-binding peptide
  MOD_RES (31), (32): Xaa is C or S

SEQ ID NO: 34405 - protein, 31 aa, Artificial Sequence; identical to SEQ ID NO: 32249
  GFR-binding peptide

SEQ ID NO: 34406 - protein, 33 aa, Artificial Sequence; identical to SEQ ID NO: 32250
  GFR-binding peptide
  MOD_RES (32), (33): Xaa is C or S

SEQ ID NO: 34407 - protein, 37 aa, Artificial Sequence; identical to SEQ ID NO: 32251
  GFR-binding peptide
  MOD_RES (2), (4), (36), (37): Xaa is C or S

SEQ ID NO: 34408 - protein, 32 aa, Artificial Sequence; identical to SEQ ID NO: 32252
  GFR-binding peptide
  MOD_RES (31), (32): Xaa is C or S

SEQ ID NO: 34409 - protein, 35 aa, Artificial Sequence; identical to SEQ ID NO: 32253
  GFR-binding peptide
  MOD_RES (2), (4), (35): Xaa is C or S

SEQ ID NO: 34410 - protein, 34 aa, Artificial Sequence; identical to SEQ ID NO: 32254
  GFR-binding peptide
  MOD_RES (34), (34): Xaa is C or S
  MOD_RES (12), (13), (14), (15), (16): Xaa is A or G
  MOD_RES (17), (18), (19), (20): Xaa is A or G or is absent

SEQ ID NO: 34411 - protein, 38 aa, Artificial Sequence; identical to SEQ ID NO: 32255
  GFR-binding peptide
  MOD_RES (1), (34), (35): Xaa is C or S

SEQ ID NO: 34412 - protein, 33 aa, Artificial Sequence; identical to SEQ ID NO: 32256
  GFR-binding peptide
  MOD_RES (31), (31): Xaa is C or S

SEQ ID NO: 34413 - protein, 38 aa, Artificial Sequence; identical to SEQ ID NO: 32257
  GFR-binding peptide
  MOD_RES (2), (36), (37): Xaa is C or S
  MOD_RES (14), (15), (16), (17), (18): Xaa is A or G
  MOD_RES (19), (20), (21), (22): Xaa is A or G or is absent

SEQ ID NO: 34414 - protein, 44 aa, Artificial Sequence; identical to SEQ ID NO: 32258
  GFR-binding peptide
  MOD_RES (2), (4), (39), (40): Xaa is C or S
  MOD_RES (17), (18), (19), (20), (21): Xaa is A or G
  MOD_RES (22), (23), (24), (25): Xaa is A or G or is absent

SEQ ID NO: 34415 - protein, 35 aa, Artificial Sequence; identical to SEQ ID NO: 32259
  GFR-binding peptide
  MOD_RES (1), (3), (35): Xaa is C or S

SEQ ID NO: 34416 - protein, 39 aa, Artificial Sequence; identical to SEQ ID NO: 32260
  GFR-binding peptide
  MOD_RES (2), (34), (35): Xaa is C or S

SEQ ID NO: 34417 - protein, 42 aa, Artificial Sequence; identical to SEQ ID NO: 32261
  GFR-binding peptide
  MOD_RES (2), (4), (36), (37): Xaa is C or S

SEQ ID NO: 34418 - protein, 42 aa, Artificial Sequence; identical to SEQ ID NO: 32262
  GFR-binding peptide
  MOD_RES (2), (36), (37): Xaa is C or S
  MOD_RES (14), (15), (16), (17), (18): Xaa is A or G
  MOD_RES (19), (20), (21), (22): Xaa is A or G or is absent

SEQ ID NO: 34419 - protein, 32 aa, Artificial Sequence; identical to SEQ ID NO: 32263
  GFR-binding peptide
  MOD_RES (31), (32): Xaa is C or S

SEQ ID NO: 34420 - protein, 39 aa, Artificial Sequence; identical to SEQ ID NO: 32264
  GFR-binding peptide
  MOD_RES (1), (36), (37): Xaa is C or S
  MOD_RES (14), (15), (16), (17), (18): Xaa is A or G
  MOD_RES (19), (20), (21), (22): Xaa is A or G or is absent

SEQ ID NO: 34421 - protein, 36 aa, Artificial Sequence; identical to SEQ ID NO: 32265
  GFR-binding peptide
  MOD_RES (1), (3): Xaa is C or S
  MOD_RES (15), (16), (17), (18), (19): Xaa is A or G
  MOD_RES (20), (21), (22), (23): Xaa is A or G or is absent

SEQ ID NO: 34422 - protein, 35 aa, Artificial Sequence; identical to SEQ ID NO: 32266
  GFR-binding peptide
  MOD_RES (1), (33): Xaa is C or S

SEQ ID NO: 34423 - protein, 34 aa, Artificial Sequence; identical to SEQ ID NO: 32267
  GFR-binding peptide
  MOD_RES (34), (34): Xaa is C or S
  MOD_RES (12), (13), (14), (15), (16): Xaa is A or G
  MOD_RES (17), (18), (19), (20): Xaa is A or G or is absent

SEQ ID NO: 34424 - protein, 38 aa, Artificial Sequence; identical to SEQ ID NO: 32268
  GFR-binding peptide
  MOD_RES (2), (36), (37): Xaa is C or S
  MOD_RES (14), (15), (16), (17), (18): Xaa is A or G
  MOD_RES (19), (20), (21), (22): Xaa is A or G or is absent

SEQ ID NO: 34425 - protein, 34 aa, Artificial Sequence; identical to SEQ ID NO: 32269
  GFR-binding peptide
  MOD_RES (34), (34): Xaa is C or S
  MOD_RES (12), (13), (14), (15), (16): Xaa is A or G
  MOD_RES (17), (18), (19), (20): Xaa is A or G or is absent

SEQ ID NO: 34426 - protein, 40 aa, Artificial Sequence; identical to SEQ ID NO: 32270
  GFR-binding peptide
  MOD_RES (2), (34), (35): Xaa is C or S

SEQ ID NO: 34427 - protein, 40 aa, Artificial Sequence; identical to SEQ ID NO: 32271
  GFR-binding peptide
  MOD_RES (34), (35): Xaa is C or S
  MOD_RES (12), (13), (14), (15), (16): Xaa is A or G
  MOD_RES (17), (18), (19), (20): Xaa is A or G or is absent

SEQ ID NO: 34428 - protein, 39 aa, Artificial Sequence; identical to SEQ ID NO: 32272
  GFR-binding peptide
  MOD_RES (1), (35), (36): Xaa is C or S
  MOD_RES (13), (14), (15), (16), (17): Xaa is A or G
  MOD_RES (18), (19), (20), (21): Xaa is A or G or is absent

SEQ ID NO: 34429 - protein, 41 aa, Artificial Sequence; identical to SEQ ID NO: 32273
  GFR-binding peptide
  MOD_RES (2), (4), (37), (38): Xaa is C or S
  MOD_RES (15), (16), (17), (18), (19): Xaa is A or G
  MOD_RES (20), (21), (22), (23): Xaa is A or G or is absent

SEQ ID NO: 34430 - protein, 35 aa, Artificial Sequence; identical to SEQ ID NO: 32274
  GFR-binding peptide
  MOD_RES (33), (34): Xaa is C or S
  MOD_RES (11), (12), (13), (14), (15): Xaa is A or G
  MOD_RES (16), (17), (18), (19): Xaa is A or G or is absent

SEQ ID NO: 34431 - protein, 31 aa, Artificial Sequence; identical to SEQ ID NO: 32275
  GFR-binding peptide

SEQ ID NO: 34432 - protein, 39 aa, Artificial Sequence; identical to SEQ ID NO: 32276
  GFR-binding peptide
  MOD_RES (33), (34): Xaa is C or S
  MOD_RES (11), (12), (13), (14), (15): Xaa is A or G
  MOD_RES (16), (17), (18), (19): Xaa is A or G or is absent

SEQ ID NO: 34433 - protein, 42 aa, Artificial Sequence; identical to SEQ ID NO: 32277
  GFR-binding peptide
  MOD_RES (1), (3), (37), (38): Xaa is C or S
  MOD_RES (15), (16), (17), (18), (19): Xaa is A or G
  MOD_RES (20), (21), (22), (23): Xaa is A or G or is absent

SEQ ID NO: 34434 - protein, 34 aa, Artificial Sequence; identical to SEQ ID NO: 32278
  GFR-binding peptide
  MOD_RES (33), (34): Xaa is C or S
  MOD_RES (11), (12), (13), (14), (15): Xaa is A or G
  MOD_RES (16), (17), (18), (19): Xaa is A or G or is absent

SEQ ID NO: 34435 - protein, 36 aa, Artificial Sequence; identical to SEQ ID NO: 32279
  GFR-binding peptide
  MOD_RES (1), (3): Xaa is C or S
  MOD_RES (15), (16), (17), (18), (19): Xaa is A or G
  MOD_RES (20), (21), (22), (23): Xaa is A or G or is absent

SEQ ID NO: 34436 - protein, 39 aa, Artificial Sequence; identical to SEQ ID NO: 32280
  GFR-binding peptide
  MOD_RES (1), (3), (36), (37): Xaa is C or S
  MOD_RES (14), (15), (16), (17), (18): Xaa is A or G
  MOD_RES (19), (20), (21), (22): Xaa is A or G or is absent

SEQ ID NO: 34437 - protein, 38 aa, Artificial Sequence; identical to SEQ ID NO: 32281
  GFR-binding peptide
  MOD_RES (1), (3), (34), (35): Xaa is C or S

SEQ ID NO: 34438 - protein, 37 aa, Artificial Sequence; identical to SEQ ID NO: 32282
  GFR-binding peptide
  MOD_RES (2), (36), (37): Xaa is C or S
  MOD_RES (14), (15), (16), (17), (18): Xaa is A or G
  MOD_RES (19), (20), (21), (22): Xaa is A or G or is absent

SEQ ID NO: 34439 - protein, 36 aa, Artificial Sequence; identical to SEQ ID NO: 32283
  GFR-binding peptide
  MOD_RES (33), (34): Xaa is C or S
  MOD_RES (11), (12), (13), (14), (15): Xaa is A or G
  MOD_RES (16), (17), (18), (19): Xaa is A or G or is absent

SEQ ID NO: 34440 - protein, 37 aa, Artificial Sequence; identical to SEQ ID NO: 32284
  GFR-binding peptide
  MOD_RES (2), (4), (36), (37): Xaa is C or S

SEQ ID NO: 34441 - protein, 38 aa, Artificial Sequence; identical to SEQ ID NO: 32285
  GFR-binding peptide
  MOD_RES (1), (32), (33): Xaa is C or S

SEQ ID NO: 34442 - protein, 34 aa, Artificial Sequence; identical to SEQ ID NO: 32286
  GFR-binding peptide
  MOD_RES (2), (34): Xaa is C or S

SEQ ID NO: 34443 - protein, 39 aa, Artificial Sequence; identical to SEQ ID NO: 32287
  GFR-binding peptide
  MOD_RES (33), (34): Xaa is C or S
  MOD_RES (11), (12), (13), (14), (15): Xaa is A or G
  MOD_RES (16), (17), (18), (19): Xaa is A or G or is absent

SEQ ID NO: 34444 - protein, 39 aa, Artificial Sequence; identical to SEQ ID NO: 32288
  GFR-binding peptide
  MOD_RES (2), (36), (37): Xaa is C or S
  MOD_RES (14), (15), (16), (17), (18): Xaa is A or G
  MOD_RES (19), (20), (21), (22): Xaa is A or G or is absent

SEQ ID NO: 34445 - protein, 30 aa, Artificial Sequence; identical to SEQ ID NO: 32289
  GFR-binding peptide

SEQ ID NO: 34446 - protein, 35 aa, Artificial Sequence; identical to SEQ ID NO: 32290
  GFR-binding peptide
  MOD_RES (2), (2): Xaa is C or S
  MOD_RES (14), (15), (16), (17), (18): Xaa is A or G
  MOD_RES (19), (20), (21), (22): Xaa is A or G or is absent

SEQ ID NO: 34447 - protein, 39 aa, Artificial Sequence; identical to SEQ ID NO: 32291
  GFR-binding peptide
  MOD_RES (1), (33): Xaa is C or S

SEQ ID NO: 34448 - protein, 32 aa, Artificial Sequence; identical to SEQ ID NO: 32292
  GFR-binding peptide
  MOD_RES (32), (32): Xaa is C or S

SEQ ID NO: 34449 - protein, 36 aa, Artificial Sequence; identical to SEQ ID NO: 32293
  GFR-binding peptide
  MOD_RES (2), (34): Xaa is C or S

SEQ ID NO: 34450 - protein, 33 aa, Artificial Sequence; identical to SEQ ID NO: 32294
  GFR-binding peptide
  MOD_RES (12), (13), (14), (15), (16): Xaa is A or G
  MOD_RES (17), (18), (19), (20): Xaa is A or G or is absent

SEQ ID NO: 34451 - protein, 33 aa, Artificial Sequence; identical to SEQ ID NO: 32295
  GFR-binding peptide
  MOD_RES (31), (32): Xaa is C or S

SEQ ID NO: 34452 - protein, 37 aa, Artificial Sequence; identical to SEQ ID NO: 32296
  GFR-binding peptide
  MOD_RES (1), (3), (36), (37): Xaa is C or S

SEQ ID NO: 34453 - protein, 38 aa, Artificial Sequence; identical to SEQ ID NO: 32297
  GFR-binding peptide
  MOD_RES (2), (4), (37), (38): Xaa is C or S
  MOD_RES (15), (16), (17), (18), (19): Xaa is A or G
  MOD_RES (20), (21), (22), (23): Xaa is A or G or is absent

SEQ ID NO: 34454 - protein, 35 aa, Artificial Sequence; identical to SEQ ID NO: 32298
  GFR-binding peptide
  MOD_RES (34), (35): Xaa is C or S
  MOD_RES (12), (13), (14), (15), (16): Xaa is A or G
  MOD_RES (17), (18), (19), (20): Xaa is A or G or is absent

SEQ ID NO: 34455 - protein, 38 aa, Artificial Sequence; identical to SEQ ID NO: 32299
  GFR-binding peptide
  MOD_RES (33), (34): Xaa is C or S
  MOD_RES (11), (12), (13), (14), (15): Xaa is A or G
  MOD_RES (16), (17), (18), (19): Xaa is A or G or is absent

SEQ ID NO: 34456 - protein, 37 aa, Artificial Sequence; identical to SEQ ID NO: 32300
  GFR-binding peptide
  MOD_RES (1), (3), (36), (37): Xaa is C or S
  MOD_RES (14), (15), (16), (17), (18): Xaa is A or G
  MOD_RES (19), (20), (21), (22): Xaa is A or G or is absent

SEQ ID NO: 34457 - protein, 39 aa, Artificial Sequence; identical to SEQ ID NO: 32301
  GFR-binding peptide
  MOD_RES (6), (7), (39): Xaa is C or S

SEQ ID NO: 34458 - protein, 43 aa, Artificial Sequence; identical to SEQ ID NO: 32302
  GFR-binding peptide
  MOD_RES (6), (7), (41), (43): Xaa is C or S
  MOD_RES (21), (22), (23), (24), (25): Xaa is A or G
  MOD_RES (26), (27), (28), (29): Xaa is A or G or is absent

SEQ ID NO: 34459 - protein, 40 aa, Artificial Sequence; identical to SEQ ID NO: 32303
  GFR-binding peptide
  MOD_RES (6), (7): Xaa is C or S
  MOD_RES (21), (22), (23), (24), (25): Xaa is A or G
  MOD_RES (26), (27), (28), (29): Xaa is A or G or is absent

SEQ ID NO: 34460 - protein, 37 aa, Artificial Sequence; identical to SEQ ID NO: 32304
  GFR-binding peptide
  MOD_RES (5), (6): Xaa is C or S

SEQ ID NO: 34461 - protein, 40 aa, Artificial Sequence; identical to SEQ ID NO: 32305
  GFR-binding peptide
  MOD_RES (3), (4), (38), (40): Xaa is C or S
  MOD_RES (18), (19), (20), (21), (22): Xaa is A or G
  MOD_RES (23), (24), (25), (26): Xaa is A or G or is absent

SEQ ID NO: 34462 - protein, 32 aa, Artificial Sequence; identical to SEQ ID NO: 32306
  GFR-binding peptide
  MOD_RES (31), (31): Xaa is C or S

SEQ ID NO: 34463 - protein, 35 aa, Artificial Sequence; identical to SEQ ID NO: 32307
  GFR-binding peptide
  MOD_RES (3), (4): Xaa is C or S

SEQ ID NO: 34464 - protein, 42 aa, Artificial Sequence; identical to SEQ ID NO: 32308
  GFR-binding peptide
  MOD_RES (5), (6), (40), (42): Xaa is C or S
  MOD_RES (20), (21), (22), (23), (24): Xaa is A or G
  MOD_RES (25), (26), (27), (28): Xaa is A or G or is absent

SEQ ID NO: 34465 - protein, 39 aa, Artificial Sequence; identical to SEQ ID NO: 32309
  GFR-binding peptide
  MOD_RES (3), (4), (36), (38): Xaa is C or S

SEQ ID NO: 34466 - protein, 41 aa, Artificial Sequence; identical to SEQ ID NO: 32310
  GFR-binding peptide
  MOD_RES (4), (5), (39), (41): Xaa is C or S
  MOD_RES (19), (20), (21), (22), (23): Xaa is A or G
  MOD_RES (24), (25), (26), (27): Xaa is A or G or is absent

SEQ ID NO: 34467 - protein, 35 aa, Artificial Sequence; identical to SEQ ID NO: 32311
  GFR-binding peptide
  MOD_RES (2), (3), (35): Xaa is C or S

SEQ ID NO: 34468 - protein, 35 aa, Artificial Sequence; identical to SEQ ID NO: 32312
  GFR-binding peptide
  MOD_RES (1), (2): Xaa is C or S
  MOD_RES (16), (17), (18), (19), (20): Xaa is A or G
  MOD_RES (21), (22), (23), (24): Xaa is A or G or is absent

SEQ ID NO: 34469 - protein, 40 aa, Artificial Sequence; identical to SEQ ID NO: 32313
  GFR-binding peptide
  MOD_RES (5), (6), (38), (40): Xaa is C or S

SEQ ID NO: 34470 - protein, 37 aa, Artificial Sequence; identical to SEQ ID NO: 32314
  GFR-binding peptide
  MOD_RES (4), (36): Xaa is C or S

SEQ ID NO: 34471 - protein, 40 aa, Artificial Sequence; identical to SEQ ID NO: 32315
  GFR-binding peptide
  MOD_RES (7), (7): Xaa is C or S
  MOD_RES (21), (22), (23), (24), (25): Xaa is A or G
  MOD_RES (26), (27), (28), (29): Xaa is A or G or is absent

SEQ ID NO: 34472 - protein, 37 aa, Artificial Sequence; identical to SEQ ID NO: 32316
  GFR-binding peptide
  MOD_RES (3), (4): Xaa is C or S
  MOD_RES (18), (19), (20), (21), (22): Xaa is A or G
  MOD_RES (23), (24), (25), (26): Xaa is A or G or is absent

SEQ ID NO: 34473 - protein, 34 aa, Artificial Sequence; identical to SEQ ID NO: 32317
  GFR-binding peptide
  MOD_RES (1), (33): Xaa is C or S

SEQ ID NO: 34474 - protein, 41 aa, Artificial Sequence; identical to SEQ ID NO: 32318
  GFR-binding peptide
  MOD_RES (4), (5), (39), (41): Xaa is C or S
  MOD_RES (19), (20), (21), (22), (23): Xaa is A or G
  MOD_RES (24), (25), (26), (27): Xaa is A or G or is absent

SEQ ID NO: 34475 - protein, 40 aa, Artificial Sequence; identical to SEQ ID NO: 32319
  GFR-binding peptide
  MOD_RES (5), (6), (40): Xaa is C or S
  MOD_RES (20), (21), (22), (23), (24): Xaa is A or G
  MOD_RES (25), (26), (27), (28): Xaa is A or G or is absent

SEQ ID NO: 34476 - protein, 35 aa, Artificial Sequence; identical to SEQ ID NO: 32320
  GFR-binding peptide
  MOD_RES (3), (4): Xaa is C or S

SEQ ID NO: 34477 - protein, 36 aa, Artificial Sequence; identical to SEQ ID NO: 32321
  GFR-binding peptide
  MOD_RES (5), (6): Xaa is C or S

SEQ ID NO: 34478 - protein, 39 aa, Artificial Sequence; identical to SEQ ID NO: 32322
  GFR-binding peptide
  MOD_RES (1), (2), (36), (38): Xaa is C or S
  MOD_RES (16), (17), (18), (19), (20): Xaa is A or G
  MOD_RES (21), (22), (23), (24): Xaa is A or G or is absent

SEQ ID NO: 34479 - protein, 35 aa, Artificial Sequence; identical to SEQ ID NO: 32323
  GFR-binding peptide
  MOD_RES (2), (3): Xaa is C or S
  MOD_RES (17), (18), (19), (20), (21): Xaa is A or G
  MOD_RES (22), (23), (24), (25): Xaa is A or G or is absent

SEQ ID NO: 34480 - protein, 39 aa, Artificial Sequence; identical to SEQ ID NO: 32324
  GFR-binding peptide
  MOD_RES (2), (3), (36), (38): Xaa is C or S

SEQ ID NO: 34481 - protein, 39 aa, Artificial Sequence; identical to SEQ ID NO: 32325
  GFR-binding peptide
  MOD_RES (3), (37), (39): Xaa is C or S
  MOD_RES (17), (18), (19), (20), (21): Xaa is A or G
  MOD_RES (22), (23), (24), (25): Xaa is A or G or is absent

SEQ ID NO: 34482 - protein, 36 aa, Artificial Sequence; identical to SEQ ID NO: 32326
  GFR-binding peptide
  MOD_RES (4), (5): Xaa is C or S

SEQ ID NO: 34483 - protein, 37 aa, Artificial Sequence; identical to SEQ ID NO: 32327
  GFR-binding peptide
  MOD_RES (4), (5): Xaa is C or S
  MOD_RES (19), (20), (21), (22), (23): Xaa is A or G
  MOD_RES (24), (25), (26), (27): Xaa is A or G or is absent

SEQ ID NO: 34484 - protein, 36 aa, Artificial Sequence; identical to SEQ ID NO: 32328
  GFR-binding peptide
  MOD_RES (2), (3), (35): Xaa is C or S

SEQ ID NO: 34485 - protein, 42 aa, Artificial Sequence; identical to SEQ ID NO: 32329
  GFR-binding peptide
  MOD_RES (5), (6), (39), (41): Xaa is C or S

SEQ ID NO: 34486 - protein, 33 aa, Artificial Sequence; identical to SEQ ID NO: 32330
  GFR-binding peptide
  MOD_RES (1), (2): Xaa is C or S

SEQ ID NO: 34487 - protein, 35 aa, Artificial Sequence; identical to SEQ ID NO: 32331
  GFR-binding peptide
  MOD_RES (1), (33), (35): Xaa is C or S

SEQ ID NO: 34488 - protein, 39 aa, Artificial Sequence; identical to SEQ ID NO: 32332
  GFR-binding peptide
  MOD_RES (3), (4), (36), (38): Xaa is C or S

SEQ ID NO: 34489 - protein, 35 aa, Artificial Sequence; identical to SEQ ID NO: 32333
  GFR-binding peptide
  MOD_RES (1), (2), (35): Xaa is C or S

SEQ ID NO: 34490 - protein, 38 aa, Artificial Sequence; identical to SEQ ID NO: 32334
  GFR-binding peptide
  MOD_RES (5), (6), (37): Xaa is C or S

SEQ ID NO: 34491 - protein, 43 aa, Artificial Sequence; identical to SEQ ID NO: 32335
  GFR-binding peptide
  MOD_RES (5), (6), (40), (42): Xaa is C or S
  MOD_RES (20), (21), (22), (23), (24): Xaa is A or G
  MOD_RES (25), (26), (27), (28): Xaa is A or G or is absent

SEQ ID NO: 34492 - protein, 43 aa, Artificial Sequence; identical to SEQ ID NO: 32336
  GFR-binding peptide
  MOD_RES (6), (7), (41), (43): Xaa is C or S
  MOD_RES (21), (22), (23), (24), (25): Xaa is A or G
  MOD_RES (26), (27), (28), (29): Xaa is A or G or is absent

SEQ ID NO: 34493 - protein, 36 aa, Artificial Sequence; identical to SEQ ID NO: 32337
  GFR-binding peptide
  MOD_RES (34), (36): Xaa is C or S
  MOD_RES (14), (15), (16), (17), (18): Xaa is A or G
  MOD_RES (19), (20), (21), (22): Xaa is A or G or is absent

SEQ ID NO: 34494 - protein, 40 aa, Artificial Sequence; identical to SEQ ID NO: 32338
  GFR-binding peptide
  MOD_RES (4), (38), (40): Xaa is C or S
  MOD_RES (18), (19), (20), (21), (22): Xaa is A or G
  MOD_RES (23), (24), (25), (26): Xaa is A or G or is absent

SEQ ID NO: 34495 - protein, 44 aa, Artificial Sequence; identical to SEQ ID NO: 32339
  GFR-binding peptide
  MOD_RES (6), (7), (41), (43): Xaa is C or S
  MOD_RES (21), (22), (23), (24), (25): Xaa is A or G
  MOD_RES (26), (27), (28), (29): Xaa is A or G or is absent

SEQ ID NO: 34496 - protein, 44 aa, Artificial Sequence; identical to SEQ ID NO: 32340
  GFR-binding peptide
  MOD_RES (6), (7), (41), (43): Xaa is C or S
  MOD_RES (21), (22), (23), (24), (25): Xaa is A or G
  MOD_RES (26), (27), (28), (29): Xaa is A or G or is absent

SEQ ID NO: 34497 - protein, 39 aa, Artificial Sequence; identical to SEQ ID NO: 32341
  GFR-binding peptide
  MOD_RES (6), (7), (39): Xaa is C or S

SEQ ID NO: 34498 - protein, 43 aa, Artificial Sequence; identical to SEQ ID NO: 32342
  GFR-binding peptide
  MOD_RES (6), (7), (41), (43): Xaa is C or S
  MOD_RES (21), (22), (23), (24), (25): Xaa is A or G
  MOD_RES (26), (27), (28), (29): Xaa is A or G or is absent

SEQ ID NO: 34499 - protein, 34 aa, Artificial Sequence; identical to SEQ ID NO: 32343
  GFR-binding peptide
  MOD_RES (2), (3): Xaa is C or S

SEQ ID NO: 34500 - protein, 37 aa, Artificial Sequence; identical to SEQ ID NO: 32344
  GFR-binding peptide
  MOD_RES (2), (34), (36): Xaa is C or S

SEQ ID NO: 34501 - protein, 35 aa, Artificial Sequence; identical to SEQ ID NO: 32345
  GFR-binding peptide
  MOD_RES (35), (35): Xaa is C or S
  MOD_RES (14), (15), (16), (17), (18): Xaa is A or G
  MOD_RES (19), (20), (21), (22): Xaa is A or G or is absent

SEQ ID NO: 34502 - protein, 39 aa, Artificial Sequence; identical to SEQ ID NO: 32346
  GFR-binding peptide
  MOD_RES (3), (4), (36), (38): Xaa is C or S

SEQ ID NO: 34503 - protein, 37 aa, Artificial Sequence; identical to SEQ ID NO: 32347
  GFR-binding peptide
  MOD_RES (2), (3), (36): Xaa is C or S

SEQ ID NO: 34504 - protein, 42 aa, Artificial Sequence; identical to SEQ ID NO: 32348
  GFR-binding peptide
  MOD_RES (4), (5), (39), (41): Xaa is C or S
  MOD_RES (19), (20), (21), (22), (23): Xaa is A or G
  MOD_RES (24), (25), (26), (27): Xaa is A or G or is absent

SEQ ID NO: 34505 - protein, 34 aa, Artificial Sequence; identical to SEQ ID NO: 32349
  GFR-binding peptide
  MOD_RES (1), (32), (34): Xaa is C or S

SEQ ID NO: 34506 - protein, 42 aa, Artificial Sequence; identical to SEQ ID NO: 32350
  GFR-binding peptide
  MOD_RES (4), (5), (39), (41): Xaa is C or S
  MOD_RES (19), (20), (21), (22), (23): Xaa is A or G
  MOD_RES (24), (25), (26), (27): Xaa is A or G or is absent

SEQ ID NO: 34507 - protein, 36 aa, Artificial Sequence; identical to SEQ ID NO: 32351
  GFR-binding peptide
  MOD_RES (1), (33), (35): Xaa is C or S

SEQ ID NO: 34508 - protein, 37 aa, Artificial Sequence; identical to SEQ ID NO: 32352
  GFR-binding peptide
  MOD_RES (6), (7): Xaa is C or S

SEQ ID NO: 34509 - protein, 40 aa, Artificial Sequence; identical to SEQ ID NO: 32353
  GFR-binding peptide
  MOD_RES (3), (4), (38), (40): Xaa is C or S
  MOD_RES (18), (19), (20), (21), (22): Xaa is A or G
  MOD_RES (23), (24), (25), (26): Xaa is A or G or is absent

SEQ ID NO: 34510 - protein, 40 aa, Artificial Sequence; identical to SEQ ID NO: 32354
  GFR-binding peptide
  MOD_RES (6), (7), (39): Xaa is C or S

SEQ ID NO: 34511 - protein, 40 aa, Artificial Sequence; identical to SEQ ID NO: 32355
  GFR-binding peptide
  MOD_RES (4), (5), (39): Xaa is C or S
  MOD_RES (19), (20), (21), (22), (23): Xaa is A or G
  MOD_RES (24), (25), (26), (27): Xaa is A or G or is absent

SEQ ID NO: 34512 - protein, 35 aa, Artificial Sequence; identical to SEQ ID NO: 32356
  GFR-binding peptide
  MOD_RES (1), (2): Xaa is C or S
  MOD_RES (16), (17), (18), (19), (20): Xaa is A or G
  MOD_RES (21), (22), (23), (24): Xaa is A or G or is absent

SEQ ID NO: 34513 - protein, 39 aa, Artificial Sequence; identical to SEQ ID NO: 32357
  GFR-binding peptide
  MOD_RES (5), (6): Xaa is C or S
  MOD_RES (20), (21), (22), (23), (24): Xaa is A or G
  MOD_RES (25), (26), (27), (28): Xaa is A or G or is absent

SEQ ID NO: 34514 - protein, 35 aa, Artificial Sequence; identical to SEQ ID NO: 32358
  GFR-binding peptide
  MOD_RES (1), (33), (35): Xaa is C or S

SEQ ID NO: 34515 - protein, 35 aa, Artificial Sequence; identical to SEQ ID NO: 32359
  GFR-binding peptide
  MOD_RES (34), (34): Xaa is C or S
  MOD_RES (14), (15), (16), (17), (18): Xaa is A or G
  MOD_RES (19), (20), (21), (22): Xaa is A or G or is absent

SEQ ID NO: 34516 - protein, 36 aa, Artificial Sequence; identical to SEQ ID NO: 32360
  GFR-binding peptide
  MOD_RES (5), (6): Xaa is C or S

SEQ ID NO: 34517 - protein, 38 aa, Artificial Sequence; identical to SEQ ID NO: 32361
  GFR-binding peptide
  MOD_RES (3), (4), (36), (38): Xaa is C or S

SEQ ID NO: 34518 - protein, 42 aa, Artificial Sequence; identical to SEQ ID NO: 32362
  GFR-binding peptide
  MOD_RES (4), (5), (39), (41): Xaa is C or S
  MOD_RES (19), (20), (21), (22), (23): Xaa is A or G
  MOD_RES (24), (25), (26), (27): Xaa is A or G or is absent

SEQ ID NO: 34519 - protein, 41 aa, Artificial Sequence; identical to SEQ ID NO: 32363
  GFR-binding peptide
  MOD_RES (3), (4), (39), (41): Xaa is C or S
  MOD_RES (18), (19), (20), (21), (22): Xaa is A or G
  MOD_RES (23), (24), (25), (26): Xaa is A or G or is absent

SEQ ID NO: 34520 - protein, 39 aa, Artificial Sequence; identical to SEQ ID NO: 32364
  GFR-binding peptide
  MOD_RES (4), (5), (38): Xaa is C or S
  MOD_RES (19), (20), (21), (22), (23): Xaa is A or G
  MOD_RES (24), (25), (26), (27): Xaa is A or G or is absent

SEQ ID NO: 34521 - protein, 39 aa, Artificial Sequence; identical to SEQ ID NO: 32365
  GFR-binding peptide
  MOD_RES (6), (38): Xaa is C or S

SEQ ID NO: 34522 - protein, 42 aa, Artificial Sequence; identical to SEQ ID NO: 32366
  GFR-binding peptide
  MOD_RES (5), (6), (41): Xaa is C or S
  MOD_RES (20), (21), (22), (23), (24): Xaa is A or G
  MOD_RES (25), (26), (27), (28): Xaa is A or G or is absent

SEQ ID NO: 34523 - protein, 40 aa, Artificial Sequence; identical to SEQ ID NO: 32367
  GFR-binding peptide
  MOD_RES (6), (7), (39): Xaa is C or S

SEQ ID NO: 34524 - protein, 38 aa, Artificial Sequence; identical to SEQ ID NO: 32368
  GFR-binding peptide
  MOD_RES (3), (4), (38): Xaa is C or S
  MOD_RES (18), (19), (20), (21), (22): Xaa is A or G
  MOD_RES (23), (24), (25), (26): Xaa is A or G or is absent

SEQ ID NO: 34525 - protein, 34 aa, Artificial Sequence; identical to SEQ ID NO: 32369
  GFR-binding peptide
  MOD_RES (14), (15), (16), (17), (18): Xaa is A or G
  MOD_RES (19), (20), (21), (22): Xaa is A or G or is absent

SEQ ID NO: 34526 - protein, 32 aa, Artificial Sequence; identical to SEQ ID NO: 32370
  GFR-binding peptide
  MOD_RES (1), (1): Xaa is C or S

SEQ ID NO: 34527 - protein, 37 aa, Artificial Sequence; identical to SEQ ID NO: 32371
  GFR-binding peptide
  MOD_RES (3), (4), (36): Xaa is C or S

SEQ ID NO: 34528 - protein, 36 aa, Artificial Sequence; identical to SEQ ID NO: 32372
  GFR-binding peptide
  MOD_RES (3), (4): Xaa is C or S
  MOD_RES (18), (19), (20), (21), (22): Xaa is A or G
  MOD_RES (23), (24), (25), (26): Xaa is A or G or is absent

SEQ ID NO: 34529 - protein, 41 aa, Artificial Sequence; identical to SEQ ID NO: 32373
  GFR-binding peptide
  MOD_RES (4), (5), (39), (41): Xaa is C or S
  MOD_RES (19), (20), (21), (22), (23): Xaa is A or G
  MOD_RES (24), (25), (26), (27): Xaa is A or G or is absent

SEQ ID NO: 34530 - protein, 40 aa, Artificial Sequence; identical to SEQ ID NO: 32374
  GFR-binding peptide
  MOD_RES (5), (6), (38), (40): Xaa is C or S

SEQ ID NO: 34531 - protein, 36 aa, Artificial Sequence; identical to SEQ ID NO: 32375
  GFR-binding peptide
  MOD_RES (34), (36): Xaa is C or S
  MOD_RES (14), (15), (16), (17), (18): Xaa is A or G
  MOD_RES (19), (20), (21), (22): Xaa is A or G or is absent

SEQ ID NO: 34532 - protein, 34 aa, Artificial Sequence; identical to SEQ ID NO: 32376
  GFR-binding peptide
  MOD_RES (1), (33): Xaa is C or S

SEQ ID NO: 34533 - protein, 37 aa, Artificial Sequence; identical to SEQ ID NO: 32377
  GFR-binding peptide
  MOD_RES (5), (6): Xaa is C or S

SEQ ID NO: 34534 - protein, 35 aa, Artificial Sequence; identical to SEQ ID NO: 32378
  GFR-binding peptide
  MOD_RES (32), (34): Xaa is C or S

SEQ ID NO: 34535 - protein, 41 aa, Artificial Sequence; identical to SEQ ID NO: 32379
  GFR-binding peptide
  MOD_RES (5), (6), (38), (40): Xaa is C or S

SEQ ID NO: 34536 - protein, 34 aa, Artificial Sequence; identical to SEQ ID NO: 32380
  GFR-binding peptide
  MOD_RES (3), (4): Xaa is C or S

SEQ ID NO: 34537 - protein, 41 aa, Artificial Sequence; identical to SEQ ID NO: 32381
  GFR-binding peptide
  MOD_RES (7), (39), (41): Xaa is C or S

SEQ ID NO: 34538 - protein, 35 aa, Artificial Sequence; identical to SEQ ID NO: 32382
  GFR-binding peptide
  MOD_RES (4), (5): Xaa is C or S

SEQ ID NO: 34539 - protein, 41 aa, Artificial Sequence; identical to SEQ ID NO: 32383
  GFR-binding peptide
  MOD_RES (6), (7), (39), (41): Xaa is C or S

SEQ ID NO: 34540 - protein, 38 aa, Artificial Sequence; identical to SEQ ID NO: 32384
  GFR-binding peptide
  MOD_RES (2), (3), (37): Xaa is C or S
  MOD_RES (17), (18), (19), (20), (21): Xaa is A or G
  MOD_RES (22), (23), (24), (25): Xaa is A or G or is absent

SEQ ID NO: 34541 - protein, 38 aa, Artificial Sequence; identical to SEQ ID NO: 32385
  GFR-binding peptide
  MOD_RES (1), (2), (36), (38): Xaa is C or S
  MOD_RES (16), (17), (18), (19), (20): Xaa is A or G
  MOD_RES (21), (22), (23), (24): Xaa is A or G or is absent

SEQ ID NO: 34542 - protein, 38 aa, Artificial Sequence; identical to SEQ ID NO: 32386
  GFR-binding peptide
  MOD_RES (5), (6), (38): Xaa is C or S

SEQ ID NO: 34543 - protein, 37 aa, Artificial Sequence; identical to SEQ ID NO: 32387
  GFR-binding peptide
  MOD_RES (3), (4), (37): Xaa is C or S
  MOD_RES (18), (19), (20), (21), (22): Xaa is A or G
  MOD_RES (23), (24), (25), (26): Xaa is A or G or is absent

SEQ ID NO: 34544 - protein, 35 aa, Artificial Sequence; identical to SEQ ID NO: 32388
  GFR-binding peptide
  MOD_RES (4), (5): Xaa is C or S

SEQ ID NO: 34545 - protein, 41 aa, Artificial Sequence; identical to SEQ ID NO: 32389
  GFR-binding peptide
  MOD_RES (4), (38), (40): Xaa is C or S
  MOD_RES (18), (19), (20), (21), (22): Xaa is A or G
  MOD_RES (23), (24), (25), (26): Xaa is A or G or is absent

SEQ ID NO: 34546 - protein, 39 aa, Artificial Sequence; identical to SEQ ID NO: 32390
  GFR-binding peptide
  MOD_RES (6), (7): Xaa is C or S

SEQ ID NO: 34547 - protein, 31 aa, Artificial Sequence; identical to SEQ ID NO: 32391
  GFR-binding peptide

SEQ ID NO: 34548 - protein, 32 aa, Artificial Sequence; identical to SEQ ID NO: 32392
  GFR-binding peptide
  MOD_RES (14), (15), (16), (17), (18): Xaa is A or G
  MOD_RES (19), (20), (21), (22): Xaa is A or G or is absent

SEQ ID NO: 34549 - protein, 43 aa, Artificial Sequence; identical to SEQ ID NO: 32393
  GFR-binding peptide
  MOD_RES (5), (6), (40), (42): Xaa is C or S
  MOD_RES (20), (21), (22), (23), (24): Xaa is A or G
  MOD_RES (25), (26), (27), (28): Xaa is A or G or is absent

SEQ ID NO: 34550 - protein, 42 aa, Artificial Sequence; identical to SEQ ID NO: 32394
  GFR-binding peptide
  MOD_RES (6), (7), (41): Xaa is C or S
  MOD_RES (21), (22), (23), (24), (25): Xaa is A or G
  MOD_RES (26), (27), (28), (29): Xaa is A or G or is absent

SEQ ID NO: 34551 - protein, 32 aa, Artificial Sequence; identical to SEQ ID NO: 32395
  GFR-binding peptide
  MOD_RES (14), (15), (16), (17), (18): Xaa is A or G
  MOD_RES (19), (20), (21), (22): Xaa is A or G or is absent

SEQ ID NO: 34552 - protein, 38 aa, Artificial Sequence; identical to SEQ ID NO: 32396
  GFR-binding peptide
  MOD_RES (3), (4), (36), (38): Xaa is C or S

SEQ ID NO: 34553 - protein, 33 aa, Artificial Sequence; identical to SEQ ID NO: 32397
  GFR-binding peptide
  MOD_RES (1), (1): Xaa is C or S
  MOD_RES (15), (16), (17), (18), (19): Xaa is A or G
  MOD_RES (20), (21), (22), (23): Xaa is A or G or is absent

SEQ ID NO: 34554 - protein, 39 aa, Artificial Sequence; identical to SEQ ID NO: 32398
  GFR-binding peptide
  MOD_RES (1), (2), (36), (38): Xaa is C or S
  MOD_RES (16), (17), (18), (19), (20): Xaa is A or G
  MOD_RES (21), (22), (23), (24): Xaa is A or G or is absent

SEQ ID NO: 34555 - protein, 34 aa, Artificial Sequence; identical to SEQ ID NO: 32399
  GFR-binding peptide
  MOD_RES (1), (33): Xaa is C or S

SEQ ID NO: 34556 - protein, 35 aa, Artificial Sequence; identical to SEQ ID NO: 32400
  GFR-binding peptide
  MOD_RES (1), (2), (34): Xaa is C or S

SEQ ID NO: 34557 - protein, 31 aa, Artificial Sequence; identical to SEQ ID NO: 32401
  GFR-binding peptide

SEQ ID NO: 34558 - protein, 38 aa, Artificial Sequence; identical to SEQ ID NO: 32402
  GFR-binding peptide
  MOD_RES (2), (3), (35), (37): Xaa is C or S

SEQ ID NO: 34559 - protein, 40 aa, Artificial Sequence; identical to SEQ ID NO: 32403
  GFR-binding peptide
  MOD_RES (4), (5), (37), (39): Xaa is C or S

SEQ ID NO: 34560 - protein, 37 aa, Artificial Sequence; identical to SEQ ID NO: 32404
  GFR-binding peptide
  MOD_RES (34), (36): Xaa is C or S
  MOD_RES (14), (15), (16), (17), (18): Xaa is A or G
  MOD_RES (19), (20), (21), (22): Xaa is A or G or is absent

SEQ ID NO: 34561 - protein, 40 aa, Artificial Sequence; identical to SEQ ID NO: 32405
  GFR-binding peptide
  MOD_RES (6), (7), (39): Xaa is C or S

SEQ ID NO: 34562 - protein, 36 aa, Artificial Sequence; identical to SEQ ID NO: 32406
  GFR-binding peptide
  MOD_RES (2), (3), (35): Xaa is C or S

SEQ ID NO: 34563 - protein, 34 aa, Artificial Sequence; identical to SEQ ID NO: 32407
  GFR-binding peptide
  MOD_RES (32), (34): Xaa is C or S

SEQ ID NO: 34564 - protein, 37 aa, Artificial Sequence; identical to SEQ ID NO: 32408
  GFR-binding peptide
  MOD_RES (6), (7): Xaa is C or S

SEQ ID NO: 34565 - protein, 39 aa, Artificial Sequence; identical to SEQ ID NO: 32409
  GFR-binding peptide
  MOD_RES (5), (6), (38): Xaa is C or S

SEQ ID NO: 34566 - protein, 32 aa, Artificial Sequence; identical to SEQ ID NO: 32410
  GFR-binding peptide
  MOD_RES (1), (1): Xaa is C or S

SEQ ID NO: 34567 - protein, 35 aa, Artificial Sequence; identical to SEQ ID NO: 32411
  GFR-binding peptide
  MOD_RES (1), (33), (35): Xaa is C or S

SEQ ID NO: 34568 - protein, 36 aa, Artificial Sequence; identical to SEQ ID NO: 32412
  GFR-binding peptide
  MOD_RES (4), (5): Xaa is C or S

SEQ ID NO: 34569 - protein, 40 aa, Artificial Sequence; identical to SEQ ID NO: 32413
  GFR-binding peptide
  MOD_RES (4), (5), (39): Xaa is C or S
  MOD_RES (19), (20), (21), (22), (23): Xaa is A or G
  MOD_RES (24), (25), (26), (27): Xaa is A or G or is absent

SEQ ID NO: 34570 - protein, 35 aa, Artificial Sequence; identical to SEQ ID NO: 32414
  GFR-binding peptide
  MOD_RES (3), (4), (35): Xaa is C or S

SEQ ID NO: 34571 - protein, 36 aa, Artificial Sequence; identical to SEQ ID NO: 32415
  GFR-binding peptide
  MOD_RES (6), (6): Xaa is C or S

SEQ ID NO: 34572 - protein, 39 aa, Artificial Sequence; identical to SEQ ID NO: 32416
  GFR-binding peptide
  MOD_RES (6), (7), (39): Xaa is C or S

SEQ ID NO: 34573 - protein, 40 aa, Artificial Sequence; identical to SEQ ID NO: 32417
  GFR-binding peptide
  MOD_RES (6), (7), (38), (40): Xaa is C or S

SEQ ID NO: 34574 - protein, 38 aa, Artificial Sequence; identical to SEQ ID NO: 32418
  GFR-binding peptide
  MOD_RES (4), (5), (37): Xaa is C or S

SEQ ID NO: 34575 - protein, 36 aa, Artificial Sequence; identical to SEQ ID NO: 32419
  GFR-binding peptide
  MOD_RES (3), (4), (36): Xaa is C or S

SEQ ID NO: 34576 - protein, 36 aa, Artificial Sequence; identical to SEQ ID NO: 32420
  GFR-binding peptide
  MOD_RES (2), (3): Xaa is C or S
  MOD_RES (17), (18), (19), (20), (21): Xaa is A or G
  MOD_RES (22), (23), (24), (25): Xaa is A or G or is absent

SEQ ID NO: 34577 - protein, 36 aa, Artificial Sequence; identical to SEQ ID NO: 32421
  GFR-binding peptide
  MOD_RES (3), (4), (35): Xaa is C or S

SEQ ID NO: 34578 - protein, 40 aa, Artificial Sequence; identical to SEQ ID NO: 32422
  GFR-binding peptide
  MOD_RES (6), (7): Xaa is C or S
  MOD_RES (21), (22), (23), (24), (25): Xaa is A or G
  MOD_RES (26), (27), (28), (29): Xaa is A or G or is absent

SEQ ID NO: 34579 - protein, 32 aa, Artificial Sequence; identical to SEQ ID NO: 32423
  GFR-binding peptide
  MOD_RES (1), (2): Xaa is C or S

SEQ ID NO: 34580 - protein, 35 aa, Artificial Sequence; identical to SEQ ID NO: 32424
  GFR-binding peptide
  MOD_RES (1), (35): Xaa is C or S
  MOD_RES (15), (16), (17), (18), (19): Xaa is A or G
  MOD_RES (20), (21), (22), (23): Xaa is A or G or is absent

SEQ ID NO: 34581 - protein, 44 aa, Artificial Sequence; identical to SEQ ID NO: 32425
  GFR-binding peptide
  MOD_RES (6), (7), (41), (43): Xaa is C or S
  MOD_RES (21), (22), (23), (24), (25): Xaa is A or G
  MOD_RES (26), (27), (28), (29): Xaa is A or G or is absent

SEQ ID NO: 34582 - protein, 39 aa, Artificial Sequence; identical to SEQ ID NO: 32426
  GFR-binding peptide
  MOD_RES (6), (7): Xaa is C or S
  MOD_RES (21), (22), (23), (24), (25): Xaa is A or G
  MOD_RES (26), (27), (28), (29): Xaa is A or G or is absent

SEQ ID NO: 34583 - protein, 34 aa, Artificial Sequence; identical to SEQ ID NO: 32427
  GFR-binding peptide
  MOD_RES (34), (34): Xaa is C or S
  MOD_RES (14), (15), (16), (17), (18): Xaa is A or G
  MOD_RES (19), (20), (21), (22): Xaa is A or G or is absent

SEQ ID NO: 34584 - protein, 38 aa, Artificial Sequence; identical to SEQ ID NO: 32428
  GFR-binding peptide
  MOD_RES (5), (6): Xaa is C or S
  MOD_RES (20), (21), (22), (23), (24): Xaa is A or G
  MOD_RES (25), (26), (27), (28): Xaa is A or G or is absent

SEQ ID NO: 34585 - protein, 38 aa, Artificial Sequence; identical to SEQ ID NO: 32429
  GFR-binding peptide
  MOD_RES (4), (5): Xaa is C or S
  MOD_RES (19), (20), (21), (22), (23): Xaa is A or G
  MOD_RES (24), (25), (26), (27): Xaa is A or G or is absent

SEQ ID NO: 34586 - protein, 36 aa, Artificial Sequence; identical to SEQ ID NO: 32430
  GFR-binding peptide
  MOD_RES (33), (35): Xaa is C or S
  MOD_RES (14), (15), (16), (17), (18): Xaa is A or G
  MOD_RES (19), (20), (21), (22): Xaa is A or G or is absent

SEQ ID NO: 34587 - protein, 33 aa, Artificial Sequence; identical to SEQ ID NO: 32431
  GFR-binding peptide
  MOD_RES (1), (2): Xaa is C or S

SEQ ID NO: 34588 - protein, 35 aa, Artificial Sequence; identical to SEQ ID NO: 32432
  GFR-binding peptide
  MOD_RES (1), (33), (35): Xaa is C or S

SEQ ID NO: 34589 - protein, 37 aa, Artificial Sequence; identical to SEQ ID NO: 32433
  GFR-binding peptide
  MOD_RES (3), (4), (36): Xaa is C or S

SEQ ID NO: 34590 - protein, 37 aa, Artificial Sequence; identical to SEQ ID NO: 32434
  GFR-binding peptide
  MOD_RES (1), (2), (37): Xaa is C or S
  MOD_RES (16), (17), (18), (19), (20): Xaa is A or G
  MOD_RES (21), (22), (23), (24): Xaa is A or G or is absent

SEQ ID NO: 34591 - protein, 33 aa, Artificial Sequence; identical to SEQ ID NO: 32435
  GFR-binding peptide
  MOD_RES (1), (1): Xaa is C or S
  MOD_RES (15), (16), (17), (18), (19): Xaa is A or G
  MOD_RES (20), (21), (22), (23): Xaa is A or G or is absent

SEQ ID NO: 34592 - protein, 39 aa, Artificial Sequence; identical to SEQ ID NO: 32436
  GFR-binding peptide
  MOD_RES (5), (6), (37), (39): Xaa is C or S

SEQ ID NO: 34593 - protein, 34 aa, Artificial Sequence; identical to SEQ ID NO: 32437
  GFR-binding peptide
  MOD_RES (3), (4): Xaa is C or S

SEQ ID NO: 34594 - protein, 37 aa, Artificial Sequence; identical to SEQ ID NO: 32438
  GFR-binding peptide
  MOD_RES (1), (35), (37): Xaa is C or S
  MOD_RES (15), (16), (17), (18), (19): Xaa is A or G
  MOD_RES (20), (21), (22), (23): Xaa is A or G or is absent

SEQ ID NO: 34595 - protein, 42 aa, Artificial Sequence; identical to SEQ ID NO: 32439
  GFR-binding peptide
  MOD_RES (6), (7), (39), (41): Xaa is C or S

SEQ ID NO: 34596 - protein, 35 aa, Artificial Sequence; identical to SEQ ID NO: 32440
  GFR-binding peptide
  MOD_RES (1), (1): Xaa is C or S
  MOD_RES (15), (16), (17), (18), (19): Xaa is A or G
  MOD_RES (20), (21), (22), (23): Xaa is A or G or is absent

SEQ ID NO: 34597 - protein, 36 aa, Artificial Sequence; identical to SEQ ID NO: 32441
  GFR-binding peptide
  MOD_RES (2), (3), (35): Xaa is C or S

SEQ ID NO: 34598 - protein, 38 aa, Artificial Sequence; identical to SEQ ID NO: 32442
  GFR-binding peptide
  MOD_RES (6), (7): Xaa is C or S

SEQ ID NO: 34599 - protein, 38 aa, Artificial Sequence; identical to SEQ ID NO: 32443
  GFR-binding peptide
  MOD_RES (1), (2), (36), (38): Xaa is C or S
  MOD_RES (16), (17), (18), (19), (20): Xaa is A or G
  MOD_RES (21), (22), (23), (24): Xaa is A or G or is absent

SEQ ID NO: 34600 - protein, 36 aa, Artificial Sequence; identical to SEQ ID NO: 32444
  GFR-binding peptide
  MOD_RES (1), (2), (36): Xaa is C or S
  MOD_RES (16), (17), (18), (19), (20): Xaa is A or G
  MOD_RES (21), (22), (23), (24): Xaa is A or G or is absent

SEQ ID NO: 34601 - protein, 36 aa, Artificial Sequence; identical to SEQ ID NO: 32445
  GFR-binding peptide
  MOD_RES (5), (6): Xaa is C or S

SEQ ID NO: 34602 - protein, 43 aa, Artificial Sequence; identical to SEQ ID NO: 32446
  GFR-binding peptide
  MOD_RES (6), (7), (41), (43): Xaa is C or S
  MOD_RES (21), (22), (23), (24), (25): Xaa is A or G
  MOD_RES (26), (27), (28), (29): Xaa is A or G or is absent

SEQ ID NO: 34603 - protein, 37 aa, Artificial Sequence; identical to SEQ ID NO: 32447
  GFR-binding peptide
  MOD_RES (4), (5): Xaa is C or S
  MOD_RES (19), (20), (21), (22), (23): Xaa is A or G
  MOD_RES (24), (25), (26), (27): Xaa is A or G or is absent

SEQ ID NO: 34604 - protein, 35 aa, Artificial Sequence; identical to SEQ ID NO: 32448
  GFR-binding peptide
  MOD_RES (1), (2): Xaa is C or S
  MOD_RES (16), (17), (18), (19), (20): Xaa is A or G
  MOD_RES (21), (22), (23), (24): Xaa is A or G or is absent

SEQ ID NO: 34605 - protein, 31 aa, Artificial Sequence; identical to SEQ ID NO: 32449
  GFR-binding peptide

SEQ ID NO: 34606 - protein, 41 aa, Artificial Sequence; identical to SEQ ID NO: 32450
  GFR-binding peptide
  MOD_RES (3), (4), (38), (40): Xaa is C or S
  MOD_RES (18), (19), (20), (21), (22): Xaa is A or G
  MOD_RES (23), (24), (25), (26): Xaa is A or G or is absent

SEQ ID NO: 34607 - protein, 40 aa, Artificial Sequence; identical to SEQ ID NO: 32451
  GFR-binding peptide
  MOD_RES (5), (6), (38), (40): Xaa is C or S

SEQ ID NO: 34608 - protein, 37 aa, Artificial Sequence; identical to SEQ ID NO: 32452
  GFR-binding peptide
  MOD_RES (4), (5), (37): Xaa is C or S

SEQ ID NO: 34609 - protein, 37 aa, Artificial Sequence; identical to SEQ ID NO: 32453
  GFR-binding peptide
  MOD_RES (6), (7): Xaa is C or S

SEQ ID NO: 34610 - protein, 34 aa, Artificial Sequence; identical to SEQ ID NO: 32454
  GFR-binding peptide
  MOD_RES (2), (3), (34): Xaa is C or S

SEQ ID NO: 34611 - protein, 36 aa, Artificial Sequence; identical to SEQ ID NO: 32455
  GFR-binding peptide
  MOD_RES (2), (3): Xaa is C or S
  MOD_RES (17), (18), (19), (20), (21): Xaa is A or G
  MOD_RES (22), (23), (24), (25): Xaa is A or G or is absent

SEQ ID NO: 34612 - protein, 31 aa, Artificial Sequence; identical to SEQ ID NO: 32456
  GFR-binding peptide
  MOD_RES (1), (1): Xaa is C or S

SEQ ID NO: 34613 - protein, 41 aa, Artificial Sequence; identical to SEQ ID NO: 32457
  GFR-binding peptide
  MOD_RES (6), (7), (40): Xaa is C or S

SEQ ID NO: 34614 - protein, 37 aa, Artificial Sequence; identical to SEQ ID NO: 32458
  GFR-binding peptide
  MOD_RES (2), (3): Xaa is C or S
  MOD_RES (17), (18), (19), (20), (21): Xaa is A or G
  MOD_RES (22), (23), (24), (25): Xaa is A or G or is absent

SEQ ID NO: 34615 - protein, 37 aa, Artificial Sequence; identical to SEQ ID NO: 32459
  GFR-binding peptide
  MOD_RES (1), (2), (36): Xaa is C or S
  MOD_RES (16), (17), (18), (19), (20): Xaa is A or G
  MOD_RES (21), (22), (23), (24): Xaa is A or G or is absent

SEQ ID NO: 34616 - protein, 32 aa, Artificial Sequence; identical to SEQ ID NO: 32460
  GFR-binding peptide
  MOD_RES (1), (2): Xaa is C or S

SEQ ID NO: 34617 - protein, 34 aa, Artificial Sequence; identical to SEQ ID NO: 32461
  GFR-binding peptide
  MOD_RES (1), (2): Xaa is C or S
  MOD_RES (16), (17), (18), (19), (20): Xaa is A or G
  MOD_RES (21), (22), (23), (24): Xaa is A or G or is absent

SEQ ID NO: 34618 - protein, 38 aa, Artificial Sequence; identical to SEQ ID NO: 32462
  GFR-binding peptide
  MOD_RES (2), (3), (36), (38): Xaa is C or S

SEQ ID NO: 34619 - protein, 36 aa, Artificial Sequence; identical to SEQ ID NO: 32463
  GFR-binding peptide
  MOD_RES (2), (3), (35): Xaa is C or S

SEQ ID NO: 34620 - protein, 34 aa, Artificial Sequence; identical to SEQ ID NO: 32464
  GFR-binding peptide
  MOD_RES (3), (4): Xaa is C or S

SEQ ID NO: 34621 - protein, 43 aa, Artificial Sequence; identical to SEQ ID NO: 32465
  GFR-binding peptide
  MOD_RES (5), (6), (40), (42): Xaa is C or S
  MOD_RES (20), (21), (22), (23), (24): Xaa is A or G
  MOD_RES (25), (26), (27), (28): Xaa is A or G or is absent

SEQ ID NO: 34622 - protein, 32 aa, Artificial Sequence; identical to SEQ ID NO: 32466
  GFR-binding peptide
  MOD_RES (1), (2): Xaa is C or S

SEQ ID NO: 34623 - protein, 36 aa, Artificial Sequence; identical to SEQ ID NO: 32467
  GFR-binding peptide
  MOD_RES (1), (2), (34), (36): Xaa is C or S

SEQ ID NO: 34624 - protein, 37 aa, Artificial Sequence; identical to SEQ ID NO: 32468
  GFR-binding peptide
  MOD_RES (4), (4): Xaa is C or S
  MOD_RES (18), (19), (20), (21), (22): Xaa is A or G
  MOD_RES (23), (24), (25), (26): Xaa is A or G or is absent

SEQ ID NO: 34625 - protein, 38 aa, Artificial Sequence; identical to SEQ ID NO: 32469
  GFR-binding peptide
  MOD_RES (5), (6), (38): Xaa is C or S

SEQ ID NO: 34626 - protein, 38 aa, Artificial Sequence; identical to SEQ ID NO: 32470
  GFR-binding peptide
  MOD_RES (3), (4), (38): Xaa is C or S
  MOD_RES (18), (19), (20), (21), (22): Xaa is A or G
  MOD_RES (23), (24), (25), (26): Xaa is A or G or is absent

SEQ ID NO: 34627 - protein, 37 aa, Artificial Sequence; identical to SEQ ID NO: 32471
  GFR-binding peptide
  MOD_RES (2), (3), (35), (37): Xaa is C or S

SEQ ID NO: 34628 - protein, 38 aa, Artificial Sequence; identical to SEQ ID NO: 32472
  GFR-binding peptide
  MOD_RES (5), (6): Xaa is C or S
  MOD_RES (20), (21), (22), (23), (24): Xaa is A or G
  MOD_RES (25), (26), (27), (28): Xaa is A or G or is absent

SEQ ID NO: 34629 - protein, 35 aa, Artificial Sequence; identical to SEQ ID NO: 32473
  GFR-binding peptide
  MOD_RES (1), (2): Xaa is C or S
  MOD_RES (16), (17), (18), (19), (20): Xaa is A or G
  MOD_RES (21), (22), (23), (24): Xaa is A or G or is absent

SEQ ID NO: 34630 - protein, 33 aa, Artificial Sequence; identical to SEQ ID NO: 32474
  GFR-binding peptide
  MOD_RES (14), (15), (16), (17), (18): Xaa is A or G
  MOD_RES (19), (20), (21), (22): Xaa is A or G or is absent

SEQ ID NO: 34631 - protein, 34 aa, Artificial Sequence; identical to SEQ ID NO: 32475
  GFR-binding peptide
  MOD_RES (3), (4): Xaa is C or S

SEQ ID NO: 34632 - protein, 36 aa, Artificial Sequence; identical to SEQ ID NO: 32476
  GFR-binding peptide
  MOD_RES (3), (4): Xaa is C or S
  MOD_RES (18), (19), (20), (21), (22): Xaa is A or G
  MOD_RES (23), (24), (25), (26): Xaa is A or G or is absent

SEQ ID NO: 34633 - protein, 40 aa, Artificial Sequence; identical to SEQ ID NO: 32477
  GFR-binding peptide
  MOD_RES (5), (37), (39): Xaa is C or S

SEQ ID NO: 34634 - protein, 39 aa, Artificial Sequence; identical to SEQ ID NO: 32478
  GFR-binding peptide
  MOD_RES (4), (5), (37), (39): Xaa is C or S

SEQ ID NO: 34635 - protein, 42 aa, Artificial Sequence; identical to SEQ ID NO: 32479
  GFR-binding peptide
  MOD_RES (4), (5), (40), (42): Xaa is C or S
  MOD_RES (19), (20), (21), (22), (23): Xaa is A or G
  MOD_RES (24), (25), (26), (27): Xaa is A or G or is absent

SEQ ID NO: 34636 - protein, 39 aa, Artificial Sequence; identical to SEQ ID NO: 32480
  GFR-binding peptide
  MOD_RES (5), (6): Xaa is C or S
  MOD_RES (20), (21), (22), (23), (24): Xaa is A or G
  MOD_RES (25), (26), (27), (28): Xaa is A or G or is absent

SEQ ID NO: 34637 - protein, 34 aa, Artificial Sequence; identical to SEQ ID NO: 32481
  GFR-binding peptide
  MOD_RES (1), (2): Xaa is C or S
  MOD_RES (16), (17), (18), (19), (20): Xaa is A or G
  MOD_RES (21), (22), (23), (24): Xaa is A or G or is absent

SEQ ID NO: 34638 - protein, 37 aa, Artificial Sequence; identical to SEQ ID NO: 32482
  GFR-binding peptide
  MOD_RES (3), (4): Xaa is C or S
  MOD_RES (18), (19), (20), (21), (22): Xaa is A or G
  MOD_RES (23), (24), (25), (26): Xaa is A or G or is absent

SEQ ID NO: 34639 - protein, 34 aa, Artificial Sequence; identical to SEQ ID NO: 32483
  GFR-binding peptide
  MOD_RES (2), (3): Xaa is C or S

SEQ ID NO: 34640 - protein, 38 aa, Artificial Sequence; identical to SEQ ID NO: 32484
  GFR-binding peptide
  MOD_RES (2), (3), (35), (37): Xaa is C or S

SEQ ID NO: 34641 - protein, 33 aa, Artificial Sequence; identical to SEQ ID NO: 32485
  GFR-binding peptide
  MOD_RES (2), (3): Xaa is C or S

SEQ ID NO: 34642 - protein, 38 aa, Artificial Sequence; identical to SEQ ID NO: 32486
  GFR-binding peptide
  MOD_RES (1), (35), (37): Xaa is C or S
  MOD_RES (15), (16), (17), (18), (19): Xaa is A or G
  MOD_RES (20), (21), (22), (23): Xaa is A or G or is absent

SEQ ID NO: 34643 - protein, 33 aa, Artificial Sequence; identical to SEQ ID NO: 32487
  GFR-binding peptide
  MOD_RES (32), (32): Xaa is C or S

SEQ ID NO: 34644 - protein, 37 aa, Artificial Sequence; identical to SEQ ID NO: 32488
  GFR-binding peptide
  MOD_RES (2), (3), (37): Xaa is C or S
  MOD_RES (17), (18), (19), (20), (21): Xaa is A or G
  MOD_RES (22), (23), (24), (25): Xaa is A or G or is absent

SEQ ID NO: 34645 - protein, 39 aa, Artificial Sequence; identical to SEQ ID NO: 32489
  GFR-binding peptide
  MOD_RES (1), (2), (36), (38): Xaa is C or S
  MOD_RES (16), (17), (18), (19), (20): Xaa is A or G
  MOD_RES (21), (22), (23), (24): Xaa is A or G or is absent

SEQ ID NO: 34646 - protein, 41 aa, Artificial Sequence; identical to SEQ ID NO: 32490
  GFR-binding peptide
  MOD_RES (3), (4), (38), (40): Xaa is C or S
  MOD_RES (18), (19), (20), (21), (22): Xaa is A or G
  MOD_RES (23), (24), (25), (26): Xaa is A or G or is absent

SEQ ID NO: 34647 - protein, 40 aa, Artificial Sequence; identical to SEQ ID NO: 32491
  GFR-binding peptide
  MOD_RES (2), (3), (38), (40): Xaa is C or S
  MOD_RES (17), (18), (19), (20), (21): Xaa is A or G
  MOD_RES (22), (23), (24), (25): Xaa is A or G or is absent

SEQ ID NO: 34648 - protein, 39 aa, Artificial Sequence; identical to SEQ ID NO: 32492
  GFR-binding peptide
  MOD_RES (4), (5), (37), (39): Xaa is C or S

SEQ ID NO: 34649 - protein, 33 aa, Artificial Sequence; identical to SEQ ID NO: 32493
  GFR-binding peptide
  MOD_RES (32), (32): Xaa is C or S

SEQ ID NO: 34650 - protein, 35 aa, Artificial Sequence; identical to SEQ ID NO: 32494
  GFR-binding peptide
  MOD_RES (34), (34): Xaa is C or S
  MOD_RES (14), (15), (16), (17), (18): Xaa is A or G
  MOD_RES (19), (20), (21), (22): Xaa is A or G or is absent

SEQ ID NO: 34651 - protein, 33 aa, Artificial Sequence; identical to SEQ ID NO: 32495
  GFR-binding peptide
  MOD_RES (32), (32): Xaa is C or S

SEQ ID NO: 34652 - protein, 39 aa, Artificial Sequence; identical to SEQ ID NO: 32496
  GFR-binding peptide
  MOD_RES (2), (3), (37), (39): Xaa is C or S
  MOD_RES (17), (18), (19), (20), (21): Xaa is A or G
  MOD_RES (22), (23), (24), (25): Xaa is A or G or is absent

SEQ ID NO: 34653 - protein, 37 aa, Artificial Sequence; identical to SEQ ID NO: 32497
  GFR-binding peptide
  MOD_RES (2), (3), (37): Xaa is C or S
  MOD_RES (17), (18), (19), (20), (21): Xaa is A or G
  MOD_RES (22), (23), (24), (25): Xaa is A or G or is absent

SEQ ID NO: 34654 - protein, 33 aa, Artificial Sequence; identical to SEQ ID NO: 32498
  GFR-binding peptide
  MOD_RES (1), (33): Xaa is C or S

SEQ ID NO: 34655 - protein, 36 aa, Artificial Sequence; identical to SEQ ID NO: 32499
  GFR-binding peptide
  MOD_RES (1), (2), (36): Xaa is C or S
  MOD_RES (16), (17), (18), (19), (20): Xaa is A or G
  MOD_RES (21), (22), (23), (24): Xaa is A or G or is absent

SEQ ID NO: 34656 - protein, 35 aa, Artificial Sequence; identical to SEQ ID NO: 32500
  GFR-binding peptide
  MOD_RES (2), (3): Xaa is C or S

SEQ ID NO: 34657 - protein, 42 aa, Artificial Sequence; identical to SEQ ID NO: 32501
  GFR-binding peptide
  MOD_RES (6), (7), (42): Xaa is C or S
  MOD_RES (21), (22), (23), (24), (25): Xaa is A or G
  MOD_RES (26), (27), (28), (29): Xaa is A or G or is absent

SEQ ID NO: 34658 - protein, 39 aa, Artificial Sequence; identical to SEQ ID NO: 32502
  GFR-binding peptide
  MOD_RES (4), (5), (37), (39): Xaa is C or S

SEQ ID NO: 34659 - protein, 33 aa, Artificial Sequence; identical to SEQ ID NO: 32503
  GFR-binding peptide
  MOD_RES (14), (15), (16), (17), (18): Xaa is A or G
  MOD_RES (19), (20), (21), (22): Xaa is A or G or is absent

SEQ ID NO: 34660 - protein, 38 aa, Artificial Sequence; identical to SEQ ID NO: 32504
  GFR-binding peptide
  MOD_RES (5), (6): Xaa is C or S
  MOD_RES (20), (21), (22), (23), (24): Xaa is A or G
  MOD_RES (25), (26), (27), (28): Xaa is A or G or is absent

SEQ ID NO: 34661 - protein, 37 aa, Artificial Sequence; identical to SEQ ID NO: 32505
  GFR-binding peptide
  MOD_RES (1), (2), (36): Xaa is C or S
  MOD_RES (16), (17), (18), (19), (20): Xaa is A or G
  MOD_RES (21), (22), (23), (24): Xaa is A or G or is absent

SEQ ID NO: 34662 - protein, 38 aa, Artificial Sequence; identical to SEQ ID NO: 32506
  GFR-binding peptide
  MOD_RES (4), (5): Xaa is C or S
  MOD_RES (19), (20), (21), (22), (23): Xaa is A or G
  MOD_RES (24), (25), (26), (27): Xaa is A or G or is absent

SEQ ID NO: 34663 - protein, 33 aa, Artificial Sequence; identical to SEQ ID NO: 32507
  GFR-binding peptide
  MOD_RES (32), (32): Xaa is C or S

SEQ ID NO: 34664 - protein, 35 aa, Artificial Sequence; identical to SEQ ID NO: 32508
  GFR-binding peptide
  MOD_RES (3), (4): Xaa is C or S

SEQ ID NO: 34665 - protein, 35 aa, Artificial Sequence; identical to SEQ ID NO: 32509
  GFR-binding peptide
  MOD_RES (1), (2), (33), (35): Xaa is C or S

SEQ ID NO: 34666 - protein, 42 aa, Artificial Sequence; identical to SEQ ID NO: 32510
  GFR-binding peptide
  MOD_RES (6), (7), (39), (41): Xaa is C or S

SEQ ID NO: 34667 - protein, 35 aa, Artificial Sequence; identical to SEQ ID NO: 32511
  GFR-binding peptide
  MOD_RES (2), (3): Xaa is C or S
  MOD_RES (17), (18), (19), (20), (21): Xaa is A or G
  MOD_RES (22), (23), (24), (25): Xaa is A or G or is absent

SEQ ID NO: 34668 - protein, 39 aa, Artificial Sequence; identical to SEQ ID NO: 32512
  GFR-binding peptide
  MOD_RES (2), (3), (37), (39): Xaa is C or S
  MOD_RES (17), (18), (19), (20), (21): Xaa is A or G
  MOD_RES (22), (23), (24), (25): Xaa is A or G or is absent

SEQ ID NO: 34669 - protein, 33 aa, Artificial Sequence; identical to SEQ ID NO: 32513
  GFR-binding peptide
  MOD_RES (1), (2): Xaa is C or S

SEQ ID NO: 34670 - protein, 38 aa, Artificial Sequence; identical to SEQ ID NO: 32514
  GFR-binding peptide
  MOD_RES (4), (5): Xaa is C or S
  MOD_RES (19), (20), (21), (22), (23): Xaa is A or G
  MOD_RES (24), (25), (26), (27): Xaa is A or G or is absent

SEQ ID NO: 34671 - protein, 35 aa, Artificial Sequence; identical to SEQ ID NO: 32515
  GFR-binding peptide
  MOD_RES (1), (33), (35): Xaa is C or S

SEQ ID NO: 34672 - protein, 40 aa, Artificial Sequence; identical to SEQ ID NO: 32516
  GFR-binding peptide
  MOD_RES (4), (5), (37), (39): Xaa is C or S

SEQ ID NO: 34673 - protein, 41 aa, Artificial Sequence; identical to SEQ ID NO: 32517
  GFR-binding peptide
  MOD_RES (6), (7), (39), (41): Xaa is C or S

SEQ ID NO: 34674 - protein, 32 aa, Artificial Sequence; identical to SEQ ID NO: 32518
  GFR-binding peptide
  MOD_RES (1), (2): Xaa is C or S

SEQ ID NO: 34675 - protein, 43 aa, Artificial Sequence; identical to SEQ ID NO: 32519
  GFR-binding peptide
  MOD_RES (6), (7), (41), (43): Xaa is C or S
  MOD_RES (21), (22), (23), (24), (25): Xaa is A or G
  MOD_RES (26), (27), (28), (29): Xaa is A or G or is absent

SEQ ID NO: 34676 - protein, 38 aa, Artificial Sequence; identical to SEQ ID NO: 32520
  GFR-binding peptide
  MOD_RES (3), (4), (36), (38): Xaa is C or S

SEQ ID NO: 34677 - protein, 38 aa, Artificial Sequence; identical to SEQ ID NO: 32521
  GFR-binding peptide
  MOD_RES (6), (7): Xaa is C or S

SEQ ID NO: 34678 - protein, 44 aa, Artificial Sequence; identical to SEQ ID NO: 32522
  GFR-binding peptide
  MOD_RES (6), (7), (41), (43): Xaa is C or S
  MOD_RES (21), (22), (23), (24), (25): Xaa is A or G
  MOD_RES (26), (27), (28), (29): Xaa is A or G or is absent

SEQ ID NO: 34679 - protein, 41 aa, Artificial Sequence; identical to SEQ ID NO: 32523
  GFR-binding peptide
  MOD_RES (5), (6), (38), (40): Xaa is C or S

SEQ ID NO: 34680 - protein, 36 aa, Artificial Sequence; identical to SEQ ID NO: 32524
  GFR-binding peptide
  MOD_RES (33), (35): Xaa is C or S

SEQ ID NO: 34681 - protein, 41 aa, Artificial Sequence; identical to SEQ ID NO: 32525
  GFR-binding peptide
  MOD_RES (6), (7), (39), (41): Xaa is C or S

SEQ ID NO: 34682 - protein, 33 aa, Artificial Sequence; identical to SEQ ID NO: 32526
  GFR-binding peptide
  MOD_RES (1), (1): Xaa is C or S
  MOD_RES (15), (16), (17), (18), (19): Xaa is A or G
  MOD_RES (20), (21), (22), (23): Xaa is A or G or is absent

SEQ ID NO: 34683 - protein, 35 aa, Artificial Sequence; identical to SEQ ID NO: 32527
  GFR-binding peptide
  MOD_RES (2), (3), (34): Xaa is C or S

SEQ ID NO: 34684 - protein, 34 aa, Artificial Sequence; identical to SEQ ID NO: 32528
  GFR-binding peptide
  MOD_RES (1), (2), (34): Xaa is C or S

SEQ ID NO: 34685 - protein, 35 aa, Artificial Sequence; identical to SEQ ID NO: 32529
  GFR-binding peptide
  MOD_RES (3), (4): Xaa is C or S

SEQ ID NO: 34686 - protein, 43 aa, Artificial Sequence; identical to SEQ ID NO: 32530
  GFR-binding peptide
  MOD_RES (6), (7), (42): Xaa is C or S
  MOD_RES (21), (22), (23), (24), (25): Xaa is A or G
  MOD_RES (26), (27), (28), (29): Xaa is A or G or is absent

SEQ ID NO: 34687 - protein, 43 aa, Artificial Sequence; identical to SEQ ID NO: 32531
  GFR-binding peptide
  MOD_RES (5), (6), (40), (42): Xaa is C or S
  MOD_RES (20), (21), (22), (23), (24): Xaa is A or G
  MOD_RES (25), (26), (27), (28): Xaa is A or G or is absent

SEQ ID NO: 34688 - protein, 40 aa, Artificial Sequence; identical to SEQ ID NO: 32532
  GFR-binding peptide
  MOD_RES (5), (6), (38), (40): Xaa is C or S

SEQ ID NO: 34689 - protein, 36 aa, Artificial Sequence; identical to SEQ ID NO: 32533
  GFR-binding peptide
  MOD_RES (34), (36): Xaa is C or S
  MOD_RES (14), (15), (16), (17), (18): Xaa is A or G
  MOD_RES (19), (20), (21), (22): Xaa is A or G or is absent

SEQ ID NO: 34690 - protein, 33 aa, Artificial Sequence; identical to SEQ ID NO: 32534
  GFR-binding peptide
  MOD_RES (1), (1): Xaa is C or S

SEQ ID NO: 34691 - protein, 38 aa, Artificial Sequence; identical to SEQ ID NO: 32535
  GFR-binding peptide
  MOD_RES (6), (6): Xaa is C or S
  MOD_RES (20), (21), (22), (23), (24): Xaa is A or G
  MOD_RES (25), (26), (27), (28): Xaa is A or G or is absent

SEQ ID NO: 34692 - protein, 44 aa, Artificial Sequence; identical to SEQ ID NO: 32536
  GFR-binding peptide
  MOD_RES (6), (7), (42), (44): Xaa is C or S
  MOD_RES (21), (22), (23), (24), (25): Xaa is A or G
  MOD_RES (26), (27), (28), (29): Xaa is A or G or is absent

SEQ ID NO: 34693 - protein, 38 aa, Artificial Sequence; identical to SEQ ID NO: 32537
  GFR-binding peptide
  MOD_RES (4), (5), (37): Xaa is C or S

SEQ ID NO: 34694 - protein, 39 aa, Artificial Sequence; identical to SEQ ID NO: 32538
  GFR-binding peptide
  MOD_RES (4), (5): Xaa is C or S
  MOD_RES (19), (20), (21), (22), (23): Xaa is A or G
  MOD_RES (24), (25), (26), (27): Xaa is A or G or is absent

SEQ ID NO: 34695 - protein, 41 aa, Artificial Sequence; identical to SEQ ID NO: 32539
  GFR-binding peptide
  MOD_RES (6), (7), (41): Xaa is C or S
  MOD_RES (21), (22), (23), (24), (25): Xaa is A or G
  MOD_RES (26), (27), (28), (29): Xaa is A or G or is absent

SEQ ID NO: 34696 - protein, 41 aa, Artificial Sequence; identical to SEQ ID NO: 32540
  GFR-binding peptide
  MOD_RES (6), (7), (41): Xaa is C or S
  MOD_RES (21), (22), (23), (24), (25): Xaa is A or G
  MOD_RES (26), (27), (28), (29): Xaa is A or G or is absent

SEQ ID NO: 34697 - protein, 33 aa, Artificial Sequence; identical to SEQ ID NO: 32541
  GFR-binding peptide
  MOD_RES (1), (33): Xaa is C or S

SEQ ID NO: 34698 - protein, 34 aa, Artificial Sequence; identical to SEQ ID NO: 32542
  GFR-binding peptide
  MOD_RES (34), (34): Xaa is C or S
  MOD_RES (14), (15), (16), (17), (18): Xaa is A or G
  MOD_RES (19), (20), (21), (22): Xaa is A or G or is absent

SEQ ID NO: 34699 - protein, 33 aa, Artificial Sequence; identical to SEQ ID NO: 32543
  GFR-binding peptide
  MOD_RES (33), (33): Xaa is C or S
  MOD_RES (14), (15), (16), (17), (18): Xaa is A or G
  MOD_RES (19), (20), (21), (22): Xaa is A or G or is absent

SEQ ID NO: 34700 - protein, 35 aa, Artificial Sequence; identical to SEQ ID NO: 32544
  GFR-binding peptide
  MOD_RES (32), (34): Xaa is C or S

SEQ ID NO: 34701 - protein, 39 aa, Artificial Sequence; identical to SEQ ID NO: 32545
  GFR-binding peptide
  MOD_RES (3), (4), (37), (39): Xaa is C or S

SEQ ID NO: 34702 - protein, 34 aa, Artificial Sequence; identical to SEQ ID NO: 32546
  GFR-binding peptide
  MOD_RES (2), (3): Xaa is C or S

SEQ ID NO: 34703 - protein, 32 aa, Artificial Sequence; identical to SEQ ID NO: 32547
  GFR-binding peptide
  MOD_RES (1), (1): Xaa is C or S

SEQ ID NO: 34704 - protein, 39 aa, Artificial Sequence; identical to SEQ ID NO: 32548
  GFR-binding peptide
  MOD_RES (4), (5), (37), (39): Xaa is C or S

SEQ ID NO: 34705 - protein, 38 aa, Artificial Sequence; identical to SEQ ID NO: 32549
  GFR-binding peptide
  MOD_RES (5), (6): Xaa is C or S
  MOD_RES (20), (21), (22), (23), (24): Xaa is A or G
  MOD_RES (25), (26), (27), (28): Xaa is A or G or is absent

SEQ ID NO: 34706 - protein, 42 aa, Artificial Sequence; identical to SEQ ID NO: 32550
  GFR-binding peptide
  MOD_RES (5), (6), (40), (42): Xaa is C or S
  MOD_RES (20), (21), (22), (23), (24): Xaa is A or G
  MOD_RES (25), (26), (27), (28): Xaa is A or G or is absent

SEQ ID NO: 34707 - protein, 36 aa, Artificial Sequence; identical to SEQ ID NO: 32551
  GFR-binding peptide
  MOD_RES (3), (4), (36): Xaa is C or S

SEQ ID NO: 34708 - protein, 41 aa, Artificial Sequence; identical to SEQ ID NO: 32552
  GFR-binding peptide
  MOD_RES (5), (6), (40): Xaa is C or S
  MOD_RES (20), (21), (22), (23), (24): Xaa is A or G
  MOD_RES (25), (26), (27), (28): Xaa is A or G or is absent

SEQ ID NO: 34709 - protein, 41 aa, Artificial Sequence; identical to SEQ ID NO: 32553
  GFR-binding peptide
  MOD_RES (5), (6), (41): Xaa is C or S
  MOD_RES (20), (21), (22), (23), (24): Xaa is A or G
  MOD_RES (25), (26), (27), (28): Xaa is A or G or is absent

SEQ ID NO: 34710 - protein, 34 aa, Artificial Sequence; identical to SEQ ID NO: 32554
  GFR-binding peptide
  MOD_RES (1), (2): Xaa is C or S
  MOD_RES (16), (17), (18), (19), (20): Xaa is A or G
  MOD_RES (21), (22), (23), (24): Xaa is A or G or is absent

SEQ ID NO: 34711 - protein, 36 aa, Artificial Sequence; identical to SEQ ID NO: 32555
  GFR-binding peptide
  MOD_RES (1), (35): Xaa is C or S
  MOD_RES (15), (16), (17), (18), (19): Xaa is A or G
  MOD_RES (20), (21), (22), (23): Xaa is A or G or is absent

SEQ ID NO: 34712 - protein, 37 aa, Artificial Sequence; identical to SEQ ID NO: 32556
  GFR-binding peptide
  MOD_RES (4), (5): Xaa is C or S
  MOD_RES (19), (20), (21), (22), (23): Xaa is A or G
  MOD_RES (24), (25), (26), (27): Xaa is A or G or is absent

SEQ ID NO: 34713 - protein, 32 aa, Artificial Sequence; identical to SEQ ID NO: 32557
  GFR-binding peptide
  MOD_RES (1), (2): Xaa is C or S

SEQ ID NO: 34714 - protein, 38 aa, Artificial Sequence; identical to SEQ ID NO: 32558
  GFR-binding peptide
  MOD_RES (2), (3), (35), (37): Xaa is C or S

SEQ ID NO: 34715 - protein, 37 aa, Artificial Sequence; identical to SEQ ID NO: 32559
  GFR-binding peptide
  MOD_RES (1), (2), (36): Xaa is C or S
  MOD_RES (16), (17), (18), (19), (20): Xaa is A or G
  MOD_RES (21), (22), (23), (24): Xaa is A or G or is absent

SEQ ID NO: 34716 - protein, 36 aa, Artificial Sequence; identical to SEQ ID NO: 32560
  GFR-binding peptide
  MOD_RES (4), (5): Xaa is C or S

SEQ ID NO: 34717 - protein, 31 aa, Artificial Sequence; identical to SEQ ID NO: 32561
  GFR-binding peptide
  MOD_RES (31), (31): Xaa is C or S

SEQ ID NO: 34718 - protein, 34 aa, Artificial Sequence; identical to SEQ ID NO: 32562
  GFR-binding peptide
  MOD_RES (31), (33): Xaa is C or S

SEQ ID NO: 34719 - protein, 40 aa, Artificial Sequence; identical to SEQ ID NO: 32563
  GFR-binding peptide
  MOD_RES (3), (4), (38), (40): Xaa is C or S
  MOD_RES (18), (19), (20), (21), (22): Xaa is A or G
  MOD_RES (23), (24), (25), (26): Xaa is A or G or is absent

SEQ ID NO: 34720 - protein, 39 aa, Artificial Sequence; identical to SEQ ID NO: 32564
  GFR-binding peptide
  MOD_RES (6), (7), (39): Xaa is C or S

SEQ ID NO: 34721 - protein, 35 aa, Artificial Sequence; identical to SEQ ID NO: 32565
  GFR-binding peptide
  MOD_RES (2), (3): Xaa is C or S
  MOD_RES (17), (18), (19), (20), (21): Xaa is A or G
  MOD_RES (22), (23), (24), (25): Xaa is A or G or is absent

SEQ ID NO: 34722 - protein, 42 aa, Artificial Sequence; identical to SEQ ID NO: 32566
  GFR-binding peptide
  MOD_RES (6), (7), (39), (41): Xaa is C or S

SEQ ID NO: 34723 - protein, 41 aa, Artificial Sequence; identical to SEQ ID NO: 32567
  GFR-binding peptide
  MOD_RES (5), (6), (38), (40): Xaa is C or S

SEQ ID NO: 34724 - protein, 39 aa, Artificial Sequence; identical to SEQ ID NO: 32568
  GFR-binding peptide
  MOD_RES (1), (2), (36), (38): Xaa is C or S
  MOD_RES (16), (17), (18), (19), (20): Xaa is A or G
  MOD_RES (21), (22), (23), (24): Xaa is A or G or is absent

SEQ ID NO: 34725 - protein, 42 aa, Artificial Sequence; identical to SEQ ID NO: 32569
  GFR-binding peptide
  MOD_RES (6), (7), (41): Xaa is C or S
  MOD_RES (21), (22), (23), (24), (25): Xaa is A or G
  MOD_RES (26), (27), (28), (29): Xaa is A or G or is absent

SEQ ID NO: 34726 - protein, 37 aa, Artificial Sequence; identical to SEQ ID NO: 32570
  GFR-binding peptide
  MOD_RES (1), (2), (36): Xaa is C or S
  MOD_RES (16), (17), (18), (19), (20): Xaa is A or G
  MOD_RES (21), (22), (23), (24): Xaa is A or G or is absent

SEQ ID NO: 34727 - protein, 39 aa, Artificial Sequence; identical to SEQ ID NO: 32571
  GFR-binding peptide
  MOD_RES (3), (4), (38): Xaa is C or S
  MOD_RES (18), (19), (20), (21), (22): Xaa is A or G
  MOD_RES (23), (24), (25), (26): Xaa is A or G or is absent

SEQ ID NO: 34728 - protein, 37 aa, Artificial Sequence; identical to SEQ ID NO: 32572
  GFR-binding peptide
  MOD_RES (4), (5), (37): Xaa is C or S

SEQ ID NO: 34729 - protein, 41 aa, Artificial Sequence; identical to SEQ ID NO: 32573
  GFR-binding peptide
  MOD_RES (5), (6), (38), (40): Xaa is C or S

SEQ ID NO: 34730 - protein, 39 aa, Artificial Sequence; identical to SEQ ID NO: 32574
  GFR-binding peptide
  MOD_RES (5), (6): Xaa is C or S
  MOD_RES (20), (21), (22), (23), (24): Xaa is A or G
  MOD_RES (25), (26), (27), (28): Xaa is A or G or is absent

SEQ ID NO: 34731 - protein, 36 aa, Artificial Sequence; identical to SEQ ID NO: 32575
  GFR-binding peptide
  MOD_RES (34), (36): Xaa is C or S
  MOD_RES (14), (15), (16), (17), (18): Xaa is A or G
  MOD_RES (19), (20), (21), (22): Xaa is A or G or is absent

SEQ ID NO: 34732 - protein, 37 aa, Artificial Sequence; identical to SEQ ID NO: 32576
  GFR-binding peptide
  MOD_RES (2), (3), (35), (37): Xaa is C or S

SEQ ID NO: 34733 - protein, 33 aa, Artificial Sequence; identical to SEQ ID NO: 32577
  GFR-binding peptide
  MOD_RES (1), (32): Xaa is C or S

SEQ ID NO: 34734 - protein, 36 aa, Artificial Sequence; identical to SEQ ID NO: 32578
  GFR-binding peptide
  MOD_RES (1), (2), (35): Xaa is C or S
  MOD_RES (16), (17), (18), (19), (20): Xaa is A or G
  MOD_RES (21), (22), (23), (24): Xaa is A or G or is absent

SEQ ID NO: 34735 - protein, 34 aa, Artificial Sequence; identical to SEQ ID NO: 32579
  GFR-binding peptide
  MOD_RES (34), (34): Xaa is C or S
  MOD_RES (14), (15), (16), (17), (18): Xaa is A or G
  MOD_RES (19), (20), (21), (22): Xaa is A or G or is absent

SEQ ID NO: 34736 - protein, 35 aa, Artificial Sequence; identical to SEQ ID NO: 32580
  GFR-binding peptide
  MOD_RES (1), (2), (34): Xaa is C or S

SEQ ID NO: 34737 - protein, 41 aa, Artificial Sequence; identical to SEQ ID NO: 32581
  GFR-binding peptide
  MOD_RES (3), (4), (38), (40): Xaa is C or S
  MOD_RES (18), (19), (20), (21), (22): Xaa is A or G
  MOD_RES (23), (24), (25), (26): Xaa is A or G or is absent

SEQ ID NO: 34738 - protein, 43 aa, Artificial Sequence; identical to SEQ ID NO: 32582
  GFR-binding peptide
  MOD_RES (6), (7), (41), (43): Xaa is C or S
  MOD_RES (21), (22), (23), (24), (25): Xaa is A or G
  MOD_RES (26), (27), (28), (29): Xaa is A or G or is absent

SEQ ID NO: 34739 - protein, 36 aa, Artificial Sequence; identical to SEQ ID NO: 32583
  GFR-binding peptide
  MOD_RES (4), (36): Xaa is C or S

SEQ ID NO: 34740 - protein, 35 aa, Artificial Sequence; identical to SEQ ID NO: 32584
  GFR-binding peptide
  MOD_RES (2), (3): Xaa is C or S
  MOD_RES (17), (18), (19), (20), (21): Xaa is A or G
  MOD_RES (22), (23), (24), (25): Xaa is A or G or is absent

SEQ ID NO: 34741 - protein, 36 aa, Artificial Sequence; identical to SEQ ID NO: 32585
  GFR-binding peptide
  MOD_RES (1), (35): Xaa is C or S
  MOD_RES (15), (16), (17), (18), (19): Xaa is A or G
  MOD_RES (20), (21), (22), (23): Xaa is A or G or is absent

SEQ ID NO: 34742 - protein, 35 aa, Artificial Sequence; identical to SEQ ID NO: 32586
  GFR-binding peptide
  MOD_RES (1), (2), (35): Xaa is C or S
  MOD_RES (16), (17), (18), (19), (20): Xaa is A or G
  MOD_RES (21), (22), (23), (24): Xaa is A or G or is absent

SEQ ID NO: 34743 - protein, 32 aa, Artificial Sequence; identical to SEQ ID NO: 32587
  GFR-binding peptide
  MOD_RES (14), (15), (16), (17), (18): Xaa is A or G
  MOD_RES (19), (20), (21), (22): Xaa is A or G or is absent

SEQ ID NO: 34744 - protein, 32 aa, Artificial Sequence; identical to SEQ ID NO: 32588
  GFR-binding peptide
  MOD_RES (1), (2): Xaa is C or S

SEQ ID NO: 34745 - protein, 40 aa, Artificial Sequence; identical to SEQ ID NO: 32589
  GFR-binding peptide
  MOD_RES (4), (5), (40): Xaa is C or S
  MOD_RES (19), (20), (21), (22), (23): Xaa is A or G
  MOD_RES (24), (25), (26), (27): Xaa is A or G or is absent

SEQ ID NO: 34746 - protein, 32 aa, Artificial Sequence; identical to SEQ ID NO: 32590
  GFR-binding peptide
  MOD_RES (14), (15), (16), (17), (18): Xaa is A or G
  MOD_RES (19), (20), (21), (22): Xaa is A or G or is absent

SEQ ID NO: 34747 - protein, 36 aa, Artificial Sequence; identical to SEQ ID NO: 32591
  GFR-binding peptide
  MOD_RES (1), (33), (35): Xaa is C or S

SEQ ID NO: 34748 - protein, 38 aa, Artificial Sequence; identical to SEQ ID NO: 32592
  GFR-binding peptide
  MOD_RES (4), (5): Xaa is C or S
  MOD_RES (19), (20), (21), (22), (23): Xaa is A or G
  MOD_RES (24), (25), (26), (27): Xaa is A or G or is absent

SEQ ID NO: 34749 - protein, 42 aa, Artificial Sequence; identical to SEQ ID NO: 32593
  GFR-binding peptide
  MOD_RES (5), (6), (40), (42): Xaa is C or S
  MOD_RES (20), (21), (22), (23), (24): Xaa is A or G
  MOD_RES (25), (26), (27), (28): Xaa is A or G or is absent

SEQ ID NO: 34750 - protein, 39 aa, Artificial Sequence; identical to SEQ ID NO: 32594
  GFR-binding peptide
  MOD_RES (5), (6), (39): Xaa is C or S
  MOD_RES (20), (21), (22), (23), (24): Xaa is A or G
  MOD_RES (25), (26), (27), (28): Xaa is A or G or is absent

SEQ ID NO: 34751 - protein, 43 aa, Artificial Sequence; identical to SEQ ID NO: 32595
  GFR-binding peptide
  MOD_RES (6), (7), (41), (43): Xaa is C or S
  MOD_RES (21), (22), (23), (24), (25): Xaa is A or G
  MOD_RES (26), (27), (28), (29): Xaa is A or G or is absent

SEQ ID NO: 34752 - protein, 43 aa, Artificial Sequence; identical to SEQ ID NO: 32596
  GFR-binding peptide
  MOD_RES (5), (6), (40), (42): Xaa is C or S
  MOD_RES (20), (21), (22), (23), (24): Xaa is A or G
  MOD_RES (25), (26), (27), (28): Xaa is A or G or is absent

SEQ ID NO: 34753 - protein, 42 aa, Artificial Sequence; identical to SEQ ID NO: 32597
  GFR-binding peptide
  MOD_RES (6), (7), (39), (41): Xaa is C or S

SEQ ID NO: 34754 - protein, 35 aa, Artificial Sequence; identical to SEQ ID NO: 32598
  GFR-binding peptide
  MOD_RES (1), (2): Xaa is C or S
  MOD_RES (16), (17), (18), (19), (20): Xaa is A or G
  MOD_RES (21), (22), (23), (24): Xaa is A or G or is absent

SEQ ID NO: 34755 - protein, 37 aa, Artificial Sequence; identical to SEQ ID NO: 32599
  GFR-binding peptide
  MOD_RES (1), (35), (37): Xaa is C or S
  MOD_RES (15), (16), (17), (18), (19): Xaa is A or G
  MOD_RES (20), (21), (22), (23): Xaa is A or G or is absent

SEQ ID NO: 34756 - protein, 33 aa, Artificial Sequence; identical to SEQ ID NO: 32600
  GFR-binding peptide
  MOD_RES (1), (1): Xaa is C or S
  MOD_RES (15), (16), (17), (18), (19): Xaa is A or G
  MOD_RES (20), (21), (22), (23): Xaa is A or G or is absent

SEQ ID NO: 34757 - protein, 37 aa, Artificial Sequence; identical to SEQ ID NO: 32601
  GFR-binding peptide
  MOD_RES (6), (7): Xaa is C or S

SEQ ID NO: 34758 - protein, 41 aa, Artificial Sequence; identical to SEQ ID NO: 32602
  GFR-binding peptide
  MOD_RES (6), (40): Xaa is C or S
  MOD_RES (20), (21), (22), (23), (24): Xaa is A or G
  MOD_RES (25), (26), (27), (28): Xaa is A or G or is absent

SEQ ID NO: 34759 - protein, 37 aa, Artificial Sequence; identical to SEQ ID NO: 32603
  GFR-binding peptide
  MOD_RES (1), (34), (36): Xaa is C or S

SEQ ID NO: 34760 - protein, 40 aa, Artificial Sequence; identical to SEQ ID NO: 32604
  GFR-binding peptide
  MOD_RES (3), (4), (38), (40): Xaa is C or S
  MOD_RES (18), (19), (20), (21), (22): Xaa is A or G
  MOD_RES (23), (24), (25), (26): Xaa is A or G or is absent

SEQ ID NO: 34761 - protein, 38 aa, Artificial Sequence; identical to SEQ ID NO: 32605
  GFR-binding peptide
  MOD_RES (4), (5), (37): Xaa is C or S

SEQ ID NO: 34762 - protein, 33 aa, Artificial Sequence; identical to SEQ ID NO: 32606
  GFR-binding peptide
  MOD_RES (2), (3): Xaa is C or S

SEQ ID NO: 34763 - protein, 36 aa, Artificial Sequence; identical to SEQ ID NO: 32607
  GFR-binding peptide
  MOD_RES (3), (4): Xaa is C or S
  MOD_RES (18), (19), (20), (21), (22): Xaa is A or G
  MOD_RES (23), (24), (25), (26): Xaa is A or G or is absent

SEQ ID NO: 34764 - protein, 39 aa, Artificial Sequence; identical to SEQ ID NO: 32608
  GFR-binding peptide
  MOD_RES (3), (4), (38): Xaa is C or S
  MOD_RES (18), (19), (20), (21), (22): Xaa is A or G
  MOD_RES (23), (24), (25), (26): Xaa is A or G or is absent

SEQ ID NO: 34765 - protein, 38 aa, Artificial Sequence; identical to SEQ ID NO: 32609
  GFR-binding peptide
  MOD_RES (4), (38): Xaa is C or S
  MOD_RES (18), (19), (20), (21), (22): Xaa is A or G
  MOD_RES (23), (24), (25), (26): Xaa is A or G or is absent

SEQ ID NO: 34766 - protein, 38 aa, Artificial Sequence; identical to SEQ ID NO: 32610
  GFR-binding peptide
  MOD_RES (3), (35), (37): Xaa is C or S

SEQ ID NO: 34767 - protein, 42 aa, Artificial Sequence; identical to SEQ ID NO: 32611
  GFR-binding peptide
  MOD_RES (6), (7), (41): Xaa is C or S
  MOD_RES (21), (22), (23), (24), (25): Xaa is A or G
  MOD_RES (26), (27), (28), (29): Xaa is A or G or is absent

SEQ ID NO: 34768 - protein, 41 aa, Artificial Sequence; identical to SEQ ID NO: 32612
  GFR-binding peptide
  MOD_RES (5), (39), (41): Xaa is C or S
  MOD_RES (19), (20), (21), (22), (23): Xaa is A or G
  MOD_RES (24), (25), (26), (27): Xaa is A or G or is absent

SEQ ID NO: 34769 - protein, 40 aa, Artificial Sequence; identical to SEQ ID NO: 32613
  GFR-binding peptide
  MOD_RES (6), (7), (39): Xaa is C or S

SEQ ID NO: 34770 - protein, 37 aa, Artificial Sequence; identical to SEQ ID NO: 32614
  GFR-binding peptide
  MOD_RES (2), (3), (34), (36): Xaa is C or S

SEQ ID NO: 34771 - protein, 39 aa, Artificial Sequence; identical to SEQ ID NO: 32615
  GFR-binding peptide
  MOD_RES (3), (4), (36), (38): Xaa is C or S

SEQ ID NO: 34772 - protein, 40 aa, Artificial Sequence; identical to SEQ ID NO: 32616
  GFR-binding peptide
  MOD_RES (1), (2), (37), (39): Xaa is C or S
  MOD_RES (16), (17), (18), (19), (20): Xaa is A or G
  MOD_RES (21), (22), (23), (24): Xaa is A or G or is absent

SEQ ID NO: 34773 - protein, 43 aa, Artificial Sequence; identical to SEQ ID NO: 32617
  GFR-binding peptide
  MOD_RES (6), (40), (42): Xaa is C or S
  MOD_RES (20), (21), (22), (23), (24): Xaa is A or G
  MOD_RES (25), (26), (27), (28): Xaa is A or G or is absent

SEQ ID NO: 34774 - protein, 33 aa, Artificial Sequence; identical to SEQ ID NO: 32618
  GFR-binding peptide
  MOD_RES (1), (33): Xaa is C or S

SEQ ID NO: 34775 - protein, 33 aa, Artificial Sequence; identical to SEQ ID NO: 32619
  GFR-binding peptide
  MOD_RES (1), (1): Xaa is C or S
  MOD_RES (15), (16), (17), (18), (19): Xaa is A or G
  MOD_RES (20), (21), (22), (23): Xaa is A or G or is absent

SEQ ID NO: 34776 - protein, 36 aa, Artificial Sequence; identical to SEQ ID NO: 32620
  GFR-binding peptide
  MOD_RES (2), (3), (35): Xaa is C or S

SEQ ID NO: 34777 - protein, 38 aa, Artificial Sequence; identical to SEQ ID NO: 32621
  GFR-binding peptide
  MOD_RES (3), (37): Xaa is C or S
  MOD_RES (17), (18), (19), (20), (21): Xaa is A or G
  MOD_RES (22), (23), (24), (25): Xaa is A or G or is absent

SEQ ID NO: 34778 - protein, 37 aa, Artificial Sequence; identical to SEQ ID NO: 32622
  GFR-binding peptide
  MOD_RES (4), (5): Xaa is C or S

SEQ ID NO: 34779 - protein, 33 aa, Artificial Sequence; identical to SEQ ID NO: 32623
  GFR-binding peptide
  MOD_RES (1), (1): Xaa is C or S
  MOD_RES (15), (16), (17), (18), (19): Xaa is A or G
  MOD_RES (20), (21), (22), (23): Xaa is A or G or is absent

SEQ ID NO: 34780 - protein, 34 aa, Artificial Sequence; identical to SEQ ID NO: 32624
  GFR-binding peptide
  MOD_RES (1), (1): Xaa is C or S
  MOD_RES (15), (16), (17), (18), (19): Xaa is A or G
  MOD_RES (20), (21), (22), (23): Xaa is A or G or is absent

SEQ ID NO: 34781 - protein, 38 aa, Artificial Sequence; identical to SEQ ID NO: 32625
  GFR-binding peptide
  MOD_RES (2), (3), (37): Xaa is C or S
  MOD_RES (17), (18), (19), (20), (21): Xaa is A or G
  MOD_RES (22), (23), (24), (25): Xaa is A or G or is absent

SEQ ID NO: 34782 - protein, 41 aa, Artificial Sequence; identical to SEQ ID NO: 32626
  GFR-binding peptide
  MOD_RES (5), (6), (40): Xaa is C or S
  MOD_RES (20), (21), (22), (23), (24): Xaa is A or G
  MOD_RES (25), (26), (27), (28): Xaa is A or G or is absent

SEQ ID NO: 34783 - protein, 37 aa, Artificial Sequence; identical to SEQ ID NO: 32627
  GFR-binding peptide
  MOD_RES (3), (4): Xaa is C or S
  MOD_RES (18), (19), (20), (21), (22): Xaa is A or G
  MOD_RES (23), (24), (25), (26): Xaa is A or G or is absent

SEQ ID NO: 34784 - protein, 37 aa, Artificial Sequence; identical to SEQ ID NO: 32628
  GFR-binding peptide
  MOD_RES (2), (3), (37): Xaa is C or S
  MOD_RES (17), (18), (19), (20), (21): Xaa is A or G
  MOD_RES (22), (23), (24), (25): Xaa is A or G or is absent

SEQ ID NO: 34785 - protein, 38 aa, Artificial Sequence; identical to SEQ ID NO: 32629
  GFR-binding peptide
  MOD_RES (5), (6), (38): Xaa is C or S

SEQ ID NO: 34786 - protein, 38 aa, Artificial Sequence; identical to SEQ ID NO: 32630
  GFR-binding peptide
  MOD_RES (1), (35), (37): Xaa is C or S
  MOD_RES (15), (16), (17), (18), (19): Xaa is A or G
  MOD_RES (20), (21), (22), (23): Xaa is A or G or is absent

SEQ ID NO: 34787 - protein, 42 aa, Artificial Sequence; identical to SEQ ID NO: 32631
  GFR-binding peptide
  MOD_RES (5), (6), (40), (42): Xaa is C or S
  MOD_RES (20), (21), (22), (23), (24): Xaa is A or G
  MOD_RES (25), (26), (27), (28): Xaa is A or G or is absent

SEQ ID NO: 34788 - protein, 36 aa, Artificial Sequence; identical to SEQ ID NO: 32632
  GFR-binding peptide
  MOD_RES (1), (35): Xaa is C or S
  MOD_RES (15), (16), (17), (18), (19): Xaa is A or G
  MOD_RES (20), (21), (22), (23): Xaa is A or G or is absent

SEQ ID NO: 34789 - protein, 30 aa, Artificial Sequence; identical to SEQ ID NO: 32633
  GFR-binding peptide

SEQ ID NO: 34790 - protein, 36 aa, Artificial Sequence; identical to SEQ ID NO: 32634
  GFR-binding peptide
  MOD_RES (1), (2), (33), (35): Xaa is C or S

SEQ ID NO: 34791 - protein, 37 aa, Artificial Sequence; identical to SEQ ID NO: 32635
  GFR-binding peptide
  MOD_RES (3), (4), (37): Xaa is C or S

SEQ ID NO: 34792 - protein, 38 aa, Artificial Sequence; identical to SEQ ID NO: 32636
  GFR-binding peptide
  MOD_RES (2), (3), (35), (37): Xaa is C or S

SEQ ID NO: 34793 - protein, 33 aa, Artificial Sequence; identical to SEQ ID NO: 32637
  GFR-binding peptide
  MOD_RES (1), (33): Xaa is C or S

SEQ ID NO: 34794 - protein, 37 aa, Artificial Sequence; identical to SEQ ID NO: 32638
  GFR-binding peptide
  MOD_RES (5), (5): Xaa is C or S
  MOD_RES (19), (20), (21), (22), (23): Xaa is A or G
  MOD_RES (24), (25), (26), (27): Xaa is A or G or is absent

SEQ ID NO: 34795 - protein, 35 aa, Artificial Sequence; identical to SEQ ID NO: 32639
  GFR-binding peptide
  MOD_RES (2), (3), (35): Xaa is C or S

SEQ ID NO: 34796 - protein, 43 aa, Artificial Sequence; identical to SEQ ID NO: 32640
  GFR-binding peptide
  MOD_RES (5), (6), (41), (43): Xaa is C or S
  MOD_RES (20), (21), (22), (23), (24): Xaa is A or G
  MOD_RES (25), (26), (27), (28): Xaa is A or G or is absent

SEQ ID NO: 34797 - protein, 34 aa, Artificial Sequence; identical to SEQ ID NO: 32641
  GFR-binding peptide
  MOD_RES (1), (1): Xaa is C or S
  MOD_RES (15), (16), (17), (18), (19): Xaa is A or G
  MOD_RES (20), (21), (22), (23): Xaa is A or G or is absent

SEQ ID NO: 34798 - protein, 37 aa, Artificial Sequence; identical to SEQ ID NO: 32642
  GFR-binding peptide
  MOD_RES (5), (6): Xaa is C or S

SEQ ID NO: 34799 - protein, 39 aa, Artificial Sequence; identical to SEQ ID NO: 32643
  GFR-binding peptide
  MOD_RES (1), (2), (37), (39): Xaa is C or S
  MOD_RES (16), (17), (18), (19), (20): Xaa is A or G
  MOD_RES (21), (22), (23), (24): Xaa is A or G or is absent

SEQ ID NO: 34800 - protein, 35 aa, Artificial Sequence; identical to SEQ ID NO: 32644
  GFR-binding peptide
  MOD_RES (1), (34): Xaa is C or S

SEQ ID NO: 34801 - protein, 38 aa, Artificial Sequence; identical to SEQ ID NO: 32645
  GFR-binding peptide
  MOD_RES (2), (3), (37): Xaa is C or S
  MOD_RES (17), (18), (19), (20), (21): Xaa is A or G
  MOD_RES (22), (23), (24), (25): Xaa is A or G or is absent

SEQ ID NO: 34802 - protein, 43 aa, Artificial Sequence; identical to SEQ ID NO: 32646
  GFR-binding peptide
  MOD_RES (6), (7), (40), (42): Xaa is C or S

SEQ ID NO: 34803 - protein, 36 aa, Artificial Sequence; identical to SEQ ID NO: 32647
  GFR-binding peptide
  MOD_RES (2), (3), (36): Xaa is C or S

SEQ ID NO: 34804 - protein, 41 aa, Artificial Sequence; identical to SEQ ID NO: 32648
  GFR-binding peptide
  MOD_RES (6), (7): Xaa is C or S
  MOD_RES (21), (22), (23), (24), (25): Xaa is A or G
  MOD_RES (26), (27), (28), (29): Xaa is A or G or is absent

SEQ ID NO: 34805 - protein, 39 aa, Artificial Sequence; identical to SEQ ID NO: 32649
  GFR-binding peptide
  MOD_RES (1), (2), (36), (38): Xaa is C or S
  MOD_RES (16), (17), (18), (19), (20): Xaa is A or G
  MOD_RES (21), (22), (23), (24): Xaa is A or G or is absent

SEQ ID NO: 34806 - protein, 39 aa, Artificial Sequence; identical to SEQ ID NO: 32650
  GFR-binding peptide
  MOD_RES (2), (3), (37), (39): Xaa is C or S
  MOD_RES (17), (18), (19), (20), (21): Xaa is A or G
  MOD_RES (22), (23), (24), (25): Xaa is A or G or is absent

SEQ ID NO: 34807 - protein, 33 aa, Artificial Sequence; identical to SEQ ID NO: 32651
  GFR-binding peptide
  MOD_RES (2), (3): Xaa is C or S

SEQ ID NO: 34808 - protein, 34 aa, Artificial Sequence; identical to SEQ ID NO: 32652
  GFR-binding peptide
  MOD_RES (1), (33): Xaa is C or S

SEQ ID NO: 34809 - protein, 36 aa, Artificial Sequence; identical to SEQ ID NO: 32653
  GFR-binding peptide
  MOD_RES (3), (4), (36): Xaa is C or S

SEQ ID NO: 34810 - protein, 38 aa, Artificial Sequence; identical to SEQ ID NO: 32654
  GFR-binding peptide
  MOD_RES (4), (5): Xaa is C or S
  MOD_RES (19), (20), (21), (22), (23): Xaa is A or G
  MOD_RES (24), (25), (26), (27): Xaa is A or G or is absent

SEQ ID NO: 34811 - protein, 41 aa, Artificial Sequence; identical to SEQ ID NO: 32655
  GFR-binding peptide
  MOD_RES (5), (6), (39), (41): Xaa is C or S

SEQ ID NO: 34812 - protein, 40 aa, Artificial Sequence; identical to SEQ ID NO: 32656
  GFR-binding peptide
  MOD_RES (4), (5), (37), (39): Xaa is C or S

SEQ ID NO: 34813 - protein, 35 aa, Artificial Sequence; identical to SEQ ID NO: 32657
  GFR-binding peptide
  MOD_RES (1), (2), (34): Xaa is C or S

SEQ ID NO: 34814 - protein, 41 aa, Artificial Sequence; identical to SEQ ID NO: 32658
  GFR-binding peptide
  MOD_RES (5), (6), (40): Xaa is C or S
  MOD_RES (20), (21), (22), (23), (24): Xaa is A or G
  MOD_RES (25), (26), (27), (28): Xaa is A or G or is absent

SEQ ID NO: 34815 - protein, 38 aa, Artificial Sequence; identical to SEQ ID NO: 32659
  GFR-binding peptide
  MOD_RES (3), (4), (36), (38): Xaa is C or S

SEQ ID NO: 34816 - protein, 34 aa, Artificial Sequence; identical to SEQ ID NO: 32660
  GFR-binding peptide
  MOD_RES (1), (2): Xaa is C or S
  MOD_RES (16), (17), (18), (19), (20): Xaa is A or G
  MOD_RES (21), (22), (23), (24): Xaa is A or G or is absent

SEQ ID NO: 34817 - protein, 40 aa, Artificial Sequence; identical to SEQ ID NO: 32661
  GFR-binding peptide
  MOD_RES (6), (7): Xaa is C or S
  MOD_RES (21), (22), (23), (24), (25): Xaa is A or G
  MOD_RES (26), (27), (28), (29): Xaa is A or G or is absent

SEQ ID NO: 34818 - protein, 40 aa, Artificial Sequence; identical to SEQ ID NO: 32662
  GFR-binding peptide
  MOD_RES (3), (4), (38), (40): Xaa is C or S
  MOD_RES (18), (19), (20), (21), (22): Xaa is A or G
  MOD_RES (23), (24), (25), (26): Xaa is A or G or is absent

SEQ ID NO: 34819 - protein, 40 aa, Artificial Sequence; identical to SEQ ID NO: 32663
  GFR-binding peptide
  MOD_RES (5), (6), (39): Xaa is C or S

SEQ ID NO: 34820 - protein, 36 aa, Artificial Sequence; identical to SEQ ID NO: 32664
  GFR-binding peptide
  MOD_RES (3), (4): Xaa is C or S

SEQ ID NO: 34821 - protein, 39 aa, Artificial Sequence; identical to SEQ ID NO: 32665
  GFR-binding peptide
  MOD_RES (1), (2), (36), (38): Xaa is C or S
  MOD_RES (16), (17), (18), (19), (20): Xaa is A or G
  MOD_RES (21), (22), (23), (24): Xaa is A or G or is absent

SEQ ID NO: 34822 - protein, 39 aa, Artificial Sequence; identical to SEQ ID NO: 32666
  GFR-binding peptide
  MOD_RES (5), (37), (39): Xaa is C or S

SEQ ID NO: 34823 - protein, 38 aa, Artificial Sequence; identical to SEQ ID NO: 32667
  GFR-binding peptide
  MOD_RES (4), (5): Xaa is C or S
  MOD_RES (19), (20), (21), (22), (23): Xaa is A or G
  MOD_RES (24), (25), (26), (27): Xaa is A or G or is absent

SEQ ID NO: 34824 - protein, 36 aa, Artificial Sequence; identical to SEQ ID NO: 32668
  GFR-binding peptide
  MOD_RES (2), (3): Xaa is C or S
  MOD_RES (17), (18), (19), (20), (21): Xaa is A or G
  MOD_RES (22), (23), (24), (25): Xaa is A or G or is absent

SEQ ID NO: 34825 - protein, 34 aa, Artificial Sequence; identical to SEQ ID NO: 32669
  GFR-binding peptide
  MOD_RES (1), (2): Xaa is C or S
  MOD_RES (16), (17), (18), (19), (20): Xaa is A or G
  MOD_RES (21), (22), (23), (24): Xaa is A or G or is absent

SEQ ID NO: 34826 - protein, 33 aa, Artificial Sequence; identical to SEQ ID NO: 32670
  GFR-binding peptide
  MOD_RES (2), (3): Xaa is C or S

SEQ ID NO: 34827 - protein, 38 aa, Artificial Sequence; identical to SEQ ID NO: 32671
  GFR-binding peptide
  MOD_RES (1), (36), (38): Xaa is C or S
  MOD_RES (15), (16), (17), (18), (19): Xaa is A or G
  MOD_RES (20), (21), (22), (23): Xaa is A or G or is absent

SEQ ID NO: 34828 - protein, 35 aa, Artificial Sequence; identical to SEQ ID NO: 32672
  GFR-binding peptide
  MOD_RES (34), (34): Xaa is C or S
  MOD_RES (14), (15), (16), (17), (18): Xaa is A or G
  MOD_RES (19), (20), (21), (22): Xaa is A or G or is absent

SEQ ID NO: 34829 - protein, 32 aa, Artificial Sequence; identical to SEQ ID NO: 32673
  GFR-binding peptide
  MOD_RES (1), (1): Xaa is C or S

SEQ ID NO: 34830 - protein, 34 aa, Artificial Sequence; identical to SEQ ID NO: 32674
  GFR-binding peptide
  MOD_RES (1), (33): Xaa is C or S

SEQ ID NO: 34831 - protein, 40 aa, Artificial Sequence; identical to SEQ ID NO: 32675
  GFR-binding peptide
  MOD_RES (3), (4), (37), (39): Xaa is C or S
  MOD_RES (18), (19), (20), (21), (22): Xaa is A or G
  MOD_RES (23), (24), (25), (26): Xaa is A or G or is absent

SEQ ID NO: 34832 - protein, 37 aa, Artificial Sequence; identical to SEQ ID NO: 32676
  GFR-binding peptide
  MOD_RES (1), (2), (36): Xaa is C or S
  MOD_RES (16), (17), (18), (19), (20): Xaa is A or G
  MOD_RES (21), (22), (23), (24): Xaa is A or G or is absent

SEQ ID NO: 34833 - protein, 35 aa, Artificial Sequence; identical to SEQ ID NO: 32677
  GFR-binding peptide
  MOD_RES (1), (2): Xaa is C or S
  MOD_RES (16), (17), (18), (19), (20): Xaa is A or G
  MOD_RES (21), (22), (23), (24): Xaa is A or G or is absent

SEQ ID NO: 34834 - protein, 34 aa, Artificial Sequence; identical to SEQ ID NO: 32678
  GFR-binding peptide
  MOD_RES (1), (2), (34): Xaa is C or S

SEQ ID NO: 34835 - protein, 38 aa, Artificial Sequence; identical to SEQ ID NO: 32679
  GFR-binding peptide
  MOD_RES (6), (7): Xaa is C or S

SEQ ID NO: 34836 - protein, 38 aa, Artificial Sequence; identical to SEQ ID NO: 32680
  GFR-binding peptide
  MOD_RES (1), (2), (36), (38): Xaa is C or S
  MOD_RES (16), (17), (18), (19), (20): Xaa is A or G
  MOD_RES (21), (22), (23), (24): Xaa is A or G or is absent

SEQ ID NO: 34837 - protein, 34 aa, Artificial Sequence; identical to SEQ ID NO: 32681
  GFR-binding peptide
  MOD_RES (1), (2): Xaa is C or S
  MOD_RES (16), (17), (18), (19), (20): Xaa is A or G
  MOD_RES (21), (22), (23), (24): Xaa is A or G or is absent

SEQ ID NO: 34838 - protein, 34 aa, Artificial Sequence; identical to SEQ ID NO: 32682
  GFR-binding peptide
  MOD_RES (1), (2): Xaa is C or S
  MOD_RES (16), (17), (18), (19), (20): Xaa is A or G
  MOD_RES (21), (22), (23), (24): Xaa is A or G or is absent

SEQ ID NO: 34839 - protein, 36 aa, Artificial Sequence; identical to SEQ ID NO: 32683
  GFR-binding peptide
  MOD_RES (35), (35): Xaa is C or S
  MOD_RES (14), (15), (16), (17), (18): Xaa is A or G
  MOD_RES (19), (20), (21), (22): Xaa is A or G or is absent

SEQ ID NO: 34840 - protein, 38 aa, Artificial Sequence; identical to SEQ ID NO: 32684
  GFR-binding peptide
  MOD_RES (4), (5), (37): Xaa is C or S

SEQ ID NO: 34841 - protein, 36 aa, Artificial Sequence; identical to SEQ ID NO: 32685
  GFR-binding peptide
  MOD_RES (1), (35): Xaa is C or S
  MOD_RES (15), (16), (17), (18), (19): Xaa is A or G
  MOD_RES (20), (21), (22), (23): Xaa is A or G or is absent

SEQ ID NO: 34842 - protein, 43 aa, Artificial Sequence; identical to SEQ ID NO: 32686
  GFR-binding peptide
  MOD_RES (7), (41), (43): Xaa is C or S
  MOD_RES (21), (22), (23), (24), (25): Xaa is A or G
  MOD_RES (26), (27), (28), (29): Xaa is A or G or is absent

SEQ ID NO: 34843 - protein, 36 aa, Artificial Sequence; identical to SEQ ID NO: 32687
  GFR-binding peptide
  MOD_RES (1), (2): Xaa is C or S
  MOD_RES (16), (17), (18), (19), (20): Xaa is A or G
  MOD_RES (21), (22), (23), (24): Xaa is A or G or is absent

SEQ ID NO: 34844 - protein, 32 aa, Artificial Sequence; identical to SEQ ID NO: 32688
  GFR-binding peptide
  MOD_RES (32), (32): Xaa is C or S

SEQ ID NO: 34845 - protein, 40 aa, Artificial Sequence; identical to SEQ ID NO: 32689
  GFR-binding peptide
  MOD_RES (2), (3), (37), (39): Xaa is C or S
  MOD_RES (17), (18), (19), (20), (21): Xaa is A or G
  MOD_RES (22), (23), (24), (25): Xaa is A or G or is absent

SEQ ID NO: 34846 - protein, 39 aa, Artificial Sequence; identical to SEQ ID NO: 32690
  GFR-binding peptide
  MOD_RES (6), (7): Xaa is C or S
  MOD_RES (21), (22), (23), (24), (25): Xaa is A or G
  MOD_RES (26), (27), (28), (29): Xaa is A or G or is absent

SEQ ID NO: 34847 - protein, 39 aa, Artificial Sequence; identical to SEQ ID NO: 32691
  GFR-binding peptide
  MOD_RES (4), (5), (39): Xaa is C or S
  MOD_RES (19), (20), (21), (22), (23): Xaa is A or G
  MOD_RES (24), (25), (26), (27): Xaa is A or G or is absent

SEQ ID NO: 34848 - protein, 38 aa, Artificial Sequence; identical to SEQ ID NO: 32692
  GFR-binding peptide
  MOD_RES (4), (5): Xaa is C or S
  MOD_RES (19), (20), (21), (22), (23): Xaa is A or G
  MOD_RES (24), (25), (26), (27): Xaa is A or G or is absent

SEQ ID NO: 34849 - protein, 38 aa, Artificial Sequence; identical to SEQ ID NO: 32693
  GFR-binding peptide
  MOD_RES (3), (4), (35), (37): Xaa is C or S

SEQ ID NO: 34850 - protein, 36 aa, Artificial Sequence; identical to SEQ ID NO: 32694
  GFR-binding peptide
  MOD_RES (3), (4): Xaa is C or S
  MOD_RES (18), (19), (20), (21), (22): Xaa is A or G
  MOD_RES (23), (24), (25), (26): Xaa is A or G or is absent

SEQ ID NO: 34851 - protein, 34 aa, Artificial Sequence; identical to SEQ ID NO: 32695
  GFR-binding peptide
  MOD_RES (32), (34): Xaa is C or S

SEQ ID NO: 34852 - protein, 39 aa, Artificial Sequence; identical to SEQ ID NO: 32696
  GFR-binding peptide
  MOD_RES (4), (5), (39): Xaa is C or S
  MOD_RES (19), (20), (21), (22), (23): Xaa is A or G
  MOD_RES (24), (25), (26), (27): Xaa is A or G or is absent

SEQ ID NO: 34853 - protein, 40 aa, Artificial Sequence; identical to SEQ ID NO: 32697
  GFR-binding peptide
  MOD_RES (5), (6), (38), (40): Xaa is C or S

SEQ ID NO: 34854 - protein, 34 aa, Artificial Sequence; identical to SEQ ID NO: 32698
  GFR-binding peptide
  MOD_RES (1), (2), (34): Xaa is C or S

SEQ ID NO: 34855 - protein, 33 aa, Artificial Sequence; identical to SEQ ID NO: 32699
  GFR-binding peptide
  MOD_RES (14), (15), (16), (17), (18): Xaa is A or G
  MOD_RES (19), (20), (21), (22): Xaa is A or G or is absent

SEQ ID NO: 34856 - protein, 40 aa, Artificial Sequence; identical to SEQ ID NO: 32700
  GFR-binding peptide
  MOD_RES (2), (3), (37), (39): Xaa is C or S
  MOD_RES (17), (18), (19), (20), (21): Xaa is A or G
  MOD_RES (22), (23), (24), (25): Xaa is A or G or is absent

SEQ ID NO: 34857 - protein, 36 aa, Artificial Sequence; identical to SEQ ID NO: 32701
  GFR-binding peptide
  MOD_RES (34), (36): Xaa is C or S
  MOD_RES (14), (15), (16), (17), (18): Xaa is A or G
  MOD_RES (19), (20), (21), (22): Xaa is A or G or is absent

SEQ ID NO: 34858 - protein, 39 aa, Artificial Sequence; identical to SEQ ID NO: 32702
  GFR-binding peptide
  MOD_RES (4), (5), (39): Xaa is C or S
  MOD_RES (19), (20), (21), (22), (23): Xaa is A or G
  MOD_RES (24), (25), (26), (27): Xaa is A or G or is absent

SEQ ID NO: 34859 - protein, 37 aa, Artificial Sequence; identical to SEQ ID NO: 32703
  GFR-binding peptide
  MOD_RES (1), (2), (34), (36): Xaa is C or S

SEQ ID NO: 34860 - protein, 39 aa, Artificial Sequence; identical to SEQ ID NO: 32704
  GFR-binding peptide
  MOD_RES (5), (6): Xaa is C or S
  MOD_RES (20), (21), (22), (23), (24): Xaa is A or G
  MOD_RES (25), (26), (27), (28): Xaa is A or G or is absent

SEQ ID NO: 34861 - protein, 37 aa, Artificial Sequence; identical to SEQ ID NO: 32705
  GFR-binding peptide
  MOD_RES (1), (2), (34), (36): Xaa is C or S

SEQ ID NO: 34862 - protein, 37 aa, Artificial Sequence; identical to SEQ ID NO: 32706
  GFR-binding peptide
  MOD_RES (3), (4), (36): Xaa is C or S

SEQ ID NO: 34863 - protein, 36 aa, Artificial Sequence; identical to SEQ ID NO: 32707
  GFR-binding peptide
  MOD_RES (2), (3): Xaa is C or S
  MOD_RES (17), (18), (19), (20), (21): Xaa is A or G
  MOD_RES (22), (23), (24), (25): Xaa is A or G or is absent

SEQ ID NO: 34864 - protein, 38 aa, Artificial Sequence; identical to SEQ ID NO: 32708
  GFR-binding peptide
  MOD_RES (3), (4), (36), (38): Xaa is C or S

SEQ ID NO: 34865 - protein, 36 aa, Artificial Sequence; identical to SEQ ID NO: 32709
  GFR-binding peptide
  MOD_RES (4), (5): Xaa is C or S

SEQ ID NO: 34866 - protein, 38 aa, Artificial Sequence; identical to SEQ ID NO: 32710
  GFR-binding peptide
  MOD_RES (2), (3), (38): Xaa is C or S
  MOD_RES (17), (18), (19), (20), (21): Xaa is A or G
  MOD_RES (22), (23), (24), (25): Xaa is A or G or is absent

SEQ ID NO: 34867 - protein, 35 aa, Artificial Sequence; identical to SEQ ID NO: 32711
  GFR-binding peptide
  MOD_RES (1), (2), (34): Xaa is C or S

SEQ ID NO: 34868 - protein, 41 aa, Artificial Sequence; identical to SEQ ID NO: 32712
  GFR-binding peptide
  MOD_RES (3), (4), (38), (40): Xaa is C or S
  MOD_RES (18), (19), (20), (21), (22): Xaa is A or G
  MOD_RES (23), (24), (25), (26): Xaa is A or G or is absent

SEQ ID NO: 34869 - protein, 42 aa, Artificial Sequence; identical to SEQ ID NO: 32713
  GFR-binding peptide
  MOD_RES (5), (39), (41): Xaa is C or S
  MOD_RES (19), (20), (21), (22), (23): Xaa is A or G
  MOD_RES (24), (25), (26), (27): Xaa is A or G or is absent

SEQ ID NO: 34870 - protein, 38 aa, Artificial Sequence; identical to SEQ ID NO: 32714
  GFR-binding peptide
  MOD_RES (3), (4), (36), (38): Xaa is C or S

SEQ ID NO: 34871 - protein, 38 aa, Artificial Sequence; identical to SEQ ID NO: 32715
  GFR-binding peptide
  MOD_RES (7), (7): Xaa is C or S

SEQ ID NO: 34872 - protein, 37 aa, Artificial Sequence; identical to SEQ ID NO: 32716
  GFR-binding peptide
  MOD_RES (1), (35), (37): Xaa is C or S
  MOD_RES (15), (16), (17), (18), (19): Xaa is A or G
  MOD_RES (20), (21), (22), (23): Xaa is A or G or is absent

SEQ ID NO: 34873 - protein, 34 aa, Artificial Sequence; identical to SEQ ID NO: 32717
  GFR-binding peptide
  MOD_RES (32), (34): Xaa is C or S

SEQ ID NO: 34874 - protein, 40 aa, Artificial Sequence; identical to SEQ ID NO: 32718
  GFR-binding peptide
  MOD_RES (5), (6), (38), (40): Xaa is C or S

SEQ ID NO: 34875 - protein, 42 aa, Artificial Sequence; identical to SEQ ID NO: 32719
  GFR-binding peptide
  MOD_RES (6), (7), (41): Xaa is C or S
  MOD_RES (21), (22), (23), (24), (25): Xaa is A or G
  MOD_RES (26), (27), (28), (29): Xaa is A or G or is absent

SEQ ID NO: 34876 - protein, 40 aa, Artificial Sequence; identical to SEQ ID NO: 32720
  GFR-binding peptide
  MOD_RES (6), (7): Xaa is C or S
  MOD_RES (21), (22), (23), (24), (25): Xaa is A or G
  MOD_RES (26), (27), (28), (29): Xaa is A or G or is absent

SEQ ID NO: 34877 - protein, 33 aa, Artificial Sequence; identical to SEQ ID NO: 32721
  GFR-binding peptide
  MOD_RES (31), (33): Xaa is C or S

SEQ ID NO: 34878 - protein, 35 aa, Artificial Sequence; identical to SEQ ID NO: 32722
  GFR-binding peptide
  MOD_RES (1), (35): Xaa is C or S
  MOD_RES (15), (16), (17), (18), (19): Xaa is A or G
  MOD_RES (20), (21), (22), (23): Xaa is A or G or is absent

SEQ ID NO: 34879 - protein, 37 aa, Artificial Sequence; identical to SEQ ID NO: 32723
  GFR-binding peptide
  MOD_RES (6), (7): Xaa is C or S

SEQ ID NO: 34880 - protein, 37 aa, Artificial Sequence; identical to SEQ ID NO: 32724
  GFR-binding peptide
  MOD_RES (5), (6): Xaa is C or S

SEQ ID NO: 34881 - protein, 43 aa, Artificial Sequence; identical to SEQ ID NO: 32725
  GFR-binding peptide
  MOD_RES (5), (6), (40), (42): Xaa is C or S
  MOD_RES (20), (21), (22), (23), (24): Xaa is A or G
  MOD_RES (25), (26), (27), (28): Xaa is A or G or is absent

SEQ ID NO: 34882 - protein, 37 aa, Artificial Sequence; identical to SEQ ID NO: 32726
  GFR-binding peptide
  MOD_RES (1), (35), (37): Xaa is C or S
  MOD_RES (15), (16), (17), (18), (19): Xaa is A or G
  MOD_RES (20), (21), (22), (23): Xaa is A or G or is absent

SEQ ID NO: 34883 - protein, 36 aa, Artificial Sequence; identical to SEQ ID NO: 32727
  GFR-binding peptide
  MOD_RES (1), (2), (34), (36): Xaa is C or S

SEQ ID NO: 34884 - protein, 39 aa, Artificial Sequence; identical to SEQ ID NO: 32728
  GFR-binding peptide
  MOD_RES (1), (36), (38): Xaa is C or S
  MOD_RES (15), (16), (17), (18), (19): Xaa is A or G
  MOD_RES (20), (21), (22), (23): Xaa is A or G or is absent

SEQ ID NO: 34885 - protein, 33 aa, Artificial Sequence; identical to SEQ ID NO: 32729
  GFR-binding peptide
  MOD_RES (1), (1): Xaa is C or S
  MOD_RES (15), (16), (17), (18), (19): Xaa is A or G
  MOD_RES (20), (21), (22), (23): Xaa is A or G or is absent

SEQ ID NO: 34886 - protein, 40 aa, Artificial Sequence; identical to SEQ ID NO: 32730
  GFR-binding peptide
  MOD_RES (4), (5), (38), (40): Xaa is C or S

SEQ ID NO: 34887 - protein, 37 aa, Artificial Sequence; identical to SEQ ID NO: 32731
  GFR-binding peptide
  MOD_RES (6), (7): Xaa is C or S

SEQ ID NO: 34888 - protein, 35 aa, Artificial Sequence; identical to SEQ ID NO: 32732
  GFR-binding peptide
  MOD_RES (34), (34): Xaa is C or S
  MOD_RES (14), (15), (16), (17), (18): Xaa is A or G
  MOD_RES (19), (20), (21), (22): Xaa is A or G or is absent

SEQ ID NO: 34889 - protein, 36 aa, Artificial Sequence; identical to SEQ ID NO: 32733
  GFR-binding peptide
  MOD_RES (3), (4), (36): Xaa is C or S

SEQ ID NO: 34890 - protein, 37 aa, Artificial Sequence; identical to SEQ ID NO: 32734
  GFR-binding peptide
  MOD_RES (1), (35), (37): Xaa is C or S
  MOD_RES (15), (16), (17), (18), (19): Xaa is A or G
  MOD_RES (20), (21), (22), (23): Xaa is A or G or is absent

SEQ ID NO: 34891 - protein, 39 aa, Artificial Sequence; identical to SEQ ID NO: 32735
  GFR-binding peptide
  MOD_RES (3), (4), (38): Xaa is C or S
  MOD_RES (18), (19), (20), (21), (22): Xaa is A or G
  MOD_RES (23), (24), (25), (26): Xaa is A or G or is absent

SEQ ID NO: 34892 - protein, 38 aa, Artificial Sequence; identical to SEQ ID NO: 32736
  GFR-binding peptide
  MOD_RES (1), (35), (37): Xaa is C or S
  MOD_RES (15), (16), (17), (18), (19): Xaa is A or G
  MOD_RES (20), (21), (22), (23): Xaa is A or G or is absent

SEQ ID NO: 34893 - protein, 40 aa, Artificial Sequence; identical to SEQ ID NO: 32737
  GFR-binding peptide
  MOD_RES (4), (5), (39): Xaa is C or S
  MOD_RES (19), (20), (21), (22), (23): Xaa is A or G
  MOD_RES (24), (25), (26), (27): Xaa is A or G or is absent

SEQ ID NO: 34894 - protein, 36 aa, Artificial Sequence; identical to SEQ ID NO: 32738
  GFR-binding peptide
  MOD_RES (2), (34), (36): Xaa is C or S

SEQ ID NO: 34895 - protein, 34 aa, Artificial Sequence; identical to SEQ ID NO: 32739
  GFR-binding peptide
  MOD_RES (1), (1): Xaa is C or S
  MOD_RES (15), (16), (17), (18), (19): Xaa is A or G
  MOD_RES (20), (21), (22), (23): Xaa is A or G or is absent

SEQ ID NO: 34896 - protein, 36 aa, Artificial Sequence; identical to SEQ ID NO: 32740
  GFR-binding peptide
  MOD_RES (1), (33), (35): Xaa is C or S

SEQ ID NO: 34897 - protein, 41 aa, Artificial Sequence; identical to SEQ ID NO: 32741
  GFR-binding peptide
  MOD_RES (4), (5), (39), (41): Xaa is C or S
  MOD_RES (19), (20), (21), (22), (23): Xaa is A or G
  MOD_RES (24), (25), (26), (27): Xaa is A or G or is absent

SEQ ID NO: 34898 - protein, 37 aa, Artificial Sequence; identical to SEQ ID NO: 32742
  GFR-binding peptide
  MOD_RES (2), (3), (37): Xaa is C or S
  MOD_RES (17), (18), (19), (20), (21): Xaa is A or G
  MOD_RES (22), (23), (24), (25): Xaa is A or G or is absent

SEQ ID NO: 34899 - protein, 37 aa, Artificial Sequence; identical to SEQ ID NO: 32743
  GFR-binding peptide
  MOD_RES (3), (35), (37): Xaa is C or S

SEQ ID NO: 34900 - protein, 39 aa, Artificial Sequence; identical to SEQ ID NO: 32744
  GFR-binding peptide
  MOD_RES (5), (6): Xaa is C or S
  MOD_RES (20), (21), (22), (23), (24): Xaa is A or G
  MOD_RES (25), (26), (27), (28): Xaa is A or G or is absent

SEQ ID NO: 34901 - protein, 37 aa, Artificial Sequence; identical to SEQ ID NO: 32745
  GFR-binding peptide
  MOD_RES (4), (5), (37): Xaa is C or S

SEQ ID NO: 34902 - protein, 37 aa, Artificial Sequence; identical to SEQ ID NO: 32746
  GFR-binding peptide
  MOD_RES (1), (35), (37): Xaa is C or S
  MOD_RES (15), (16), (17), (18), (19): Xaa is A or G
  MOD_RES (20), (21), (22), (23): Xaa is A or G or is absent

SEQ ID NO: 34903 - protein, 39 aa, Artificial Sequence; identical to SEQ ID NO: 32747
  GFR-binding peptide
  MOD_RES (5), (6), (39): Xaa is C or S

SEQ ID NO: 34904 - protein, 37 aa, Artificial Sequence; identical to SEQ ID NO: 32748
  GFR-binding peptide
  MOD_RES (4), (5): Xaa is C or S
  MOD_RES (19), (20), (21), (22), (23): Xaa is A or G
  MOD_RES (24), (25), (26), (27): Xaa is A or G or is absent

SEQ ID NO: 34905 - protein, 35 aa, Artificial Sequence; identical to SEQ ID NO: 32749
  GFR-binding peptide
  MOD_RES (1), (35): Xaa is C or S
  MOD_RES (15), (16), (17), (18), (19): Xaa is A or G
  MOD_RES (20), (21), (22), (23): Xaa is A or G or is absent

SEQ ID NO: 34906 - protein, 34 aa, Artificial Sequence; identical to SEQ ID NO: 32750
  GFR-binding peptide
  MOD_RES (34), (34): Xaa is C or S
  MOD_RES (14), (15), (16), (17), (18): Xaa is A or G
  MOD_RES (19), (20), (21), (22): Xaa is A or G or is absent

SEQ ID NO: 34907 - protein, 38 aa, Artificial Sequence; identical to SEQ ID NO: 32751
  GFR-binding peptide
  MOD_RES (2), (3), (35), (37): Xaa is C or S

SEQ ID NO: 34908 - protein, 38 aa, Artificial Sequence; identical to SEQ ID NO: 32752
  GFR-binding peptide
  MOD_RES (5), (6): Xaa is C or S
  MOD_RES (20), (21), (22), (23), (24): Xaa is A or G
  MOD_RES (25), (26), (27), (28): Xaa is A or G or is absent

SEQ ID NO: 34909 - protein, 32 aa, Artificial Sequence; identical to SEQ ID NO: 32753
  GFR-binding peptide
  MOD_RES (14), (15), (16), (17), (18): Xaa is A or G
  MOD_RES (19), (20), (21), (22): Xaa is A or G or is absent

SEQ ID NO: 34910 - protein, 36 aa, Artificial Sequence; identical to SEQ ID NO: 32754
  GFR-binding peptide
  MOD_RES (3), (4): Xaa is C or S
  MOD_RES (18), (19), (20), (21), (22): Xaa is A or G
  MOD_RES (23), (24), (25), (26): Xaa is A or G or is absent

SEQ ID NO: 34911 - protein, 44 aa, Artificial Sequence; identical to SEQ ID NO: 32755
  GFR-binding peptide
  MOD_RES (6), (7), (41), (43): Xaa is C or S
  MOD_RES (21), (22), (23), (24), (25): Xaa is A or G
  MOD_RES (26), (27), (28), (29): Xaa is A or G or is absent

SEQ ID NO: 34912 - protein, 32 aa, Artificial Sequence; identical to SEQ ID NO: 32756
  GFR-binding peptide
  MOD_RES (1), (1): Xaa is C or S

SEQ ID NO: 34913 - protein, 40 aa, Artificial Sequence; identical to SEQ ID NO: 32757
  GFR-binding peptide
  MOD_RES (2), (3), (37), (39): Xaa is C or S
  MOD_RES (17), (18), (19), (20), (21): Xaa is A or G
  MOD_RES (22), (23), (24), (25): Xaa is A or G or is absent

SEQ ID NO: 34914 - protein, 38 aa, Artificial Sequence; identical to SEQ ID NO: 32758
  GFR-binding peptide
  MOD_RES (5), (6): Xaa is C or S

SEQ ID NO: 34915 - protein, 43 aa, Artificial Sequence; identical to SEQ ID NO: 32759
  GFR-binding peptide
  MOD_RES (6), (7), (41), (43): Xaa is C or S
  MOD_RES (21), (22), (23), (24), (25): Xaa is A or G
  MOD_RES (26), (27), (28), (29): Xaa is A or G or is absent

SEQ ID NO: 34916 - protein, 32 aa, Artificial Sequence; identical to SEQ ID NO: 32760
  GFR-binding peptide
  MOD_RES (2), (2): Xaa is C or S

SEQ ID NO: 34917 - protein, 37 aa, Artificial Sequence; identical to SEQ ID NO: 32761
  GFR-binding peptide
  MOD_RES (4), (5): Xaa is C or S
  MOD_RES (19), (20), (21), (22), (23): Xaa is A or G
  MOD_RES (24), (25), (26), (27): Xaa is A or G or is absent

SEQ ID NO: 34918 - protein, 37 aa, Artificial Sequence; identical to SEQ ID NO: 32762
  GFR-binding peptide
  MOD_RES (1), (2), (34), (36): Xaa is C or S

SEQ ID NO: 34919 - protein, 37 aa, Artificial Sequence; identical to SEQ ID NO: 32763
  GFR-binding peptide
  MOD_RES (2), (3), (35), (37): Xaa is C or S

SEQ ID NO: 34920 - protein, 37 aa, Artificial Sequence; identical to SEQ ID NO: 32764
  GFR-binding peptide
  MOD_RES (2), (3), (35), (37): Xaa is C or S

SEQ ID NO: 34921 - protein, 41 aa, Artificial Sequence; identical to SEQ ID NO: 32765
  GFR-binding peptide
  MOD_RES (5), (6), (38), (40): Xaa is C or S

SEQ ID NO: 34922 - protein, 39 aa, Artificial Sequence; identical to SEQ ID NO: 32766
  GFR-binding peptide
  MOD_RES (1), (2), (36), (38): Xaa is C or S
  MOD_RES (16), (17), (18), (19), (20): Xaa is A or G
  MOD_RES (21), (22), (23), (24): Xaa is A or G or is absent

SEQ ID NO: 34923 - protein, 35 aa, Artificial Sequence; identical to SEQ ID NO: 32767
  GFR-binding peptide
  MOD_RES (2), (34): Xaa is C or S

SEQ ID NO: 34924 - protein, 34 aa, Artificial Sequence; identical to SEQ ID NO: 32768
  GFR-binding peptide
  MOD_RES (1), (33): Xaa is C or S

SEQ ID NO: 34925 - protein, 35 aa, Artificial Sequence; identical to SEQ ID NO: 32769
  GFR-binding peptide
  MOD_RES (4), (5): Xaa is C or S

SEQ ID NO: 34926 - protein, 34 aa, Artificial Sequence; identical to SEQ ID NO: 32770
  GFR-binding peptide
  MOD_RES (1), (2), (34): Xaa is C or S

SEQ ID NO: 34927 - protein, 40 aa, Artificial Sequence; identical to SEQ ID NO: 32771
  GFR-binding peptide
  MOD_RES (6), (7), (39): Xaa is C or S

SEQ ID NO: 34928 - protein, 36 aa, Artificial Sequence; identical to SEQ ID NO: 32772
  GFR-binding peptide
  MOD_RES (3), (3): Xaa is C or S
  MOD_RES (17), (18), (19), (20), (21): Xaa is A or G
  MOD_RES (22), (23), (24), (25): Xaa is A or G or is absent

SEQ ID NO: 34929 - protein, 39 aa, Artificial Sequence; identical to SEQ ID NO: 32773
  GFR-binding peptide
  MOD_RES (5), (6), (38): Xaa is C or S

SEQ ID NO: 34930 - protein, 37 aa, Artificial Sequence; identical to SEQ ID NO: 32774
  GFR-binding peptide
  MOD_RES (34), (36): Xaa is C or S
  MOD_RES (14), (15), (16), (17), (18): Xaa is A or G
  MOD_RES (19), (20), (21), (22): Xaa is A or G or is absent

SEQ ID NO: 34931 - protein, 38 aa, Artificial Sequence; identical to SEQ ID NO: 32775
  GFR-binding peptide
  MOD_RES (4), (5), (37): Xaa is C or S

SEQ ID NO: 34932 - protein, 32 aa, Artificial Sequence; identical to SEQ ID NO: 32776
  GFR-binding peptide
  MOD_RES (32), (32): Xaa is C or S

SEQ ID NO: 34933 - protein, 39 aa, Artificial Sequence; identical to SEQ ID NO: 32777
  GFR-binding peptide
  MOD_RES (2), (3), (38): Xaa is C or S
  MOD_RES (17), (18), (19), (20), (21): Xaa is A or G
  MOD_RES (22), (23), (24), (25): Xaa is A or G or is absent

SEQ ID NO: 34934 - protein, 35 aa, Artificial Sequence; identical to SEQ ID NO: 32778
  GFR-binding peptide
  MOD_RES (4), (5): Xaa is C or S

SEQ ID NO: 34935 - protein, 34 aa, Artificial Sequence; identical to SEQ ID NO: 32779
  GFR-binding peptide
  MOD_RES (33), (33): Xaa is C or S
  MOD_RES (14), (15), (16), (17), (18): Xaa is A or G
  MOD_RES (19), (20), (21), (22): Xaa is A or G or is absent

SEQ ID NO: 34936 - protein, 34 aa, Artificial Sequence; identical to SEQ ID NO: 32780
  GFR-binding peptide
  MOD_RES (3), (4): Xaa is C or S

SEQ ID NO: 34937 - protein, 39 aa, Artificial Sequence; identical to SEQ ID NO: 32781
  GFR-binding peptide
  MOD_RES (4), (5), (39): Xaa is C or S
  MOD_RES (19), (20), (21), (22), (23): Xaa is A or G
  MOD_RES (24), (25), (26), (27): Xaa is A or G or is absent

SEQ ID NO: 34938 - protein, 41 aa, Artificial Sequence; identical to SEQ ID NO: 32782
  GFR-binding peptide
  MOD_RES (6), (7), (39), (41): Xaa is C or S

SEQ ID NO: 34939 - protein, 37 aa, Artificial Sequence; identical to SEQ ID NO: 32783
  GFR-binding peptide
  MOD_RES (2), (36): Xaa is C or S
  MOD_RES (16), (17), (18), (19), (20): Xaa is A or G
  MOD_RES (21), (22), (23), (24): Xaa is A or G or is absent

SEQ ID NO: 34940 - protein, 35 aa, Artificial Sequence; identical to SEQ ID NO: 32784
  GFR-binding peptide
  MOD_RES (4), (5): Xaa is C or S

SEQ ID NO: 34941 - protein, 36 aa, Artificial Sequence; identical to SEQ ID NO: 32785
  GFR-binding peptide
  MOD_RES (3), (4): Xaa is C or S
  MOD_RES (18), (19), (20), (21), (22): Xaa is A or G
  MOD_RES (23), (24), (25), (26): Xaa is A or G or is absent

SEQ ID NO: 34942 - protein, 39 aa, Artificial Sequence; identical to SEQ ID NO: 32786
  GFR-binding peptide
  MOD_RES (2), (3), (37), (39): Xaa is C or S
  MOD_RES (17), (18), (19), (20), (21): Xaa is A or G
  MOD_RES (22), (23), (24), (25): Xaa is A or G or is absent

SEQ ID NO: 34943 - protein, 38 aa, Artificial Sequence; identical to SEQ ID NO: 32787
  GFR-binding peptide
  MOD_RES (4), (5), (37): Xaa is C or S

SEQ ID NO: 34944 - protein, 39 aa, Artificial Sequence; identical to SEQ ID NO: 32788
  GFR-binding peptide
  MOD_RES (4), (5), (37), (39): Xaa is C or S

SEQ ID NO: 34945 - protein, 35 aa, Artificial Sequence; identical to SEQ ID NO: 32789
  GFR-binding peptide
  MOD_RES (34), (34): Xaa is C or S
  MOD_RES (14), (15), (16), (17), (18): Xaa is A or G
  MOD_RES (19), (20), (21), (22): Xaa is A or G or is absent

SEQ ID NO: 34946 - protein, 40 aa, Artificial Sequence; identical to SEQ ID NO: 32790
  GFR-binding peptide
  MOD_RES (5), (6), (40): Xaa is C or S
  MOD_RES (20), (21), (22), (23), (24): Xaa is A or G
  MOD_RES (25), (26), (27), (28): Xaa is A or G or is absent

SEQ ID NO: 34947 - protein, 37 aa, Artificial Sequence; identical to SEQ ID NO: 32791
  GFR-binding peptide
  MOD_RES (3), (37): Xaa is C or S
  MOD_RES (17), (18), (19), (20), (21): Xaa is A or G
  MOD_RES (22), (23), (24), (25): Xaa is A or G or is absent

SEQ ID NO: 34948 - protein, 35 aa, Artificial Sequence; identical to SEQ ID NO: 32792
  GFR-binding peptide
  MOD_RES (34), (34): Xaa is C or S
  MOD_RES (14), (15), (16), (17), (18): Xaa is A or G
  MOD_RES (19), (20), (21), (22): Xaa is A or G or is absent

SEQ ID NO: 34949 - protein, 38 aa, Artificial Sequence; identical to SEQ ID NO: 32793
  GFR-binding peptide
  MOD_RES (5), (6): Xaa is C or S
  MOD_RES (20), (21), (22), (23), (24): Xaa is A or G
  MOD_RES (25), (26), (27), (28): Xaa is A or G or is absent

SEQ ID NO: 34950 - protein, 32 aa, Artificial Sequence; identical to SEQ ID NO: 32794
  GFR-binding peptide
  MOD_RES (1), (1): Xaa is C or S

SEQ ID NO: 34951 - protein, 38 aa, Artificial Sequence; identical to SEQ ID NO: 32795
  GFR-binding peptide
  MOD_RES (6), (7): Xaa is C or S

SEQ ID NO: 34952 - protein, 34 aa, Artificial Sequence; identical to SEQ ID NO: 32796
  GFR-binding peptide
  MOD_RES (33), (33): Xaa is C or S

SEQ ID NO: 34953 - protein, 40 aa, Artificial Sequence; identical to SEQ ID NO: 32797
  GFR-binding peptide
  MOD_RES (6), (38), (40): Xaa is C or S

SEQ ID NO: 34954 - protein, 37 aa, Artificial Sequence; identical to SEQ ID NO: 32798
  GFR-binding peptide
  MOD_RES (5), (6): Xaa is C or S

SEQ ID NO: 34955 - protein, 37 aa, Artificial Sequence; identical to SEQ ID NO: 32799
  GFR-binding peptide
  MOD_RES (6), (7): Xaa is C or S

SEQ ID NO: 34956 - protein, 35 aa, Artificial Sequence; identical to SEQ ID NO: 32800
  GFR-binding peptide
  MOD_RES (3), (4): Xaa is C or S

SEQ ID NO: 34957 - protein, 40 aa, Artificial Sequence; identical to SEQ ID NO: 32801
  GFR-binding peptide
  MOD_RES (2), (3), (37), (39): Xaa is C or S
  MOD_RES (17), (18), (19), (20), (21): Xaa is A or G
  MOD_RES (22), (23), (24), (25): Xaa is A or G or is absent

SEQ ID NO: 34958 - protein, 36 aa, Artificial Sequence; identical to SEQ ID NO: 32802
  GFR-binding peptide
  MOD_RES (5), (6): Xaa is C or S

SEQ ID NO: 34959 - protein, 39 aa, Artificial Sequence; identical to SEQ ID NO: 32803
  GFR-binding peptide
  MOD_RES (3), (4), (38): Xaa is C or S
  MOD_RES (18), (19), (20), (21), (22): Xaa is A or G
  MOD_RES (23), (24), (25), (26): Xaa is A or G or is absent

SEQ ID NO: 34960 - protein, 32 aa, Artificial Sequence; identical to SEQ ID NO: 32804
  GFR-binding peptide
  MOD_RES (14), (15), (16), (17), (18): Xaa is A or G
  MOD_RES (19), (20), (21), (22): Xaa is A or G or is absent

SEQ ID NO: 34961 - protein, 40 aa, Artificial Sequence; identical to SEQ ID NO: 32805
  GFR-binding peptide
  MOD_RES (2), (3), (37), (39): Xaa is C or S
  MOD_RES (17), (18), (19), (20), (21): Xaa is A or G
  MOD_RES (22), (23), (24), (25): Xaa is A or G or is absent

SEQ ID NO: 34962 - protein, 40 aa, Artificial Sequence; identical to SEQ ID NO: 32806
  GFR-binding peptide
  MOD_RES (4), (5), (39): Xaa is C or S
  MOD_RES (19), (20), (21), (22), (23): Xaa is A or G
  MOD_RES (24), (25), (26), (27): Xaa is A or G or is absent

SEQ ID NO: 34963 - protein, 42 aa, Artificial Sequence; identical to SEQ ID NO: 32807
  GFR-binding peptide
  MOD_RES (4), (5), (39), (41): Xaa is C or S
  MOD_RES (19), (20), (21), (22), (23): Xaa is A or G
  MOD_RES (24), (25), (26), (27): Xaa is A or G or is absent

SEQ ID NO: 34964 - protein, 42 aa, Artificial Sequence; identical to SEQ ID NO: 32808
  GFR-binding peptide
  MOD_RES (7), (39), (41): Xaa is C or S

SEQ ID NO: 34965 - protein, 38 aa, Artificial Sequence; identical to SEQ ID NO: 32809
  GFR-binding peptide
  MOD_RES (1), (35), (37): Xaa is C or S
  MOD_RES (15), (16), (17), (18), (19): Xaa is A or G
  MOD_RES (20), (21), (22), (23): Xaa is A or G or is absent

SEQ ID NO: 34966 - protein, 33 aa, Artificial Sequence; identical to SEQ ID NO: 32810
  GFR-binding peptide
  MOD_RES (1), (2), (33): Xaa is C or S

SEQ ID NO: 34967 - protein, 36 aa, Artificial Sequence; identical to SEQ ID NO: 32811
  GFR-binding peptide
  MOD_RES (1), (2), (36): Xaa is C or S
  MOD_RES (16), (17), (18), (19), (20): Xaa is A or G
  MOD_RES (21), (22), (23), (24): Xaa is A or G or is absent

SEQ ID NO: 34968 - protein, 42 aa, Artificial Sequence; identical to SEQ ID NO: 32812
  GFR-binding peptide
  MOD_RES (4), (5), (39), (41): Xaa is C or S
  MOD_RES (19), (20), (21), (22), (23): Xaa is A or G
  MOD_RES (24), (25), (26), (27): Xaa is A or G or is absent

SEQ ID NO: 34969 - protein, 39 aa, Artificial Sequence; identical to SEQ ID NO: 32813
  GFR-binding peptide
  MOD_RES (5), (39): Xaa is C or S
  MOD_RES (19), (20), (21), (22), (23): Xaa is A or G
  MOD_RES (24), (25), (26), (27): Xaa is A or G or is absent

SEQ ID NO: 34970 - protein, 35 aa, Artificial Sequence; identical to SEQ ID NO: 32814
  GFR-binding peptide
  MOD_RES (32), (34): Xaa is C or S

SEQ ID NO: 34971 - protein, 41 aa, Artificial Sequence; identical to SEQ ID NO: 32815
  GFR-binding peptide
  MOD_RES (4), (5), (38), (40): Xaa is C or S

SEQ ID NO: 34972 - protein, 32 aa, Artificial Sequence; identical to SEQ ID NO: 32816
  GFR-binding peptide
  MOD_RES (32), (32): Xaa is C or S

SEQ ID NO: 34973 - protein, 41 aa, Artificial Sequence; identical to SEQ ID NO: 32817
  GFR-binding peptide
  MOD_RES (5), (6), (38), (40): Xaa is C or S

SEQ ID NO: 34974 - protein, 39 aa, Artificial Sequence; identical to SEQ ID NO: 32818
  GFR-binding peptide
  MOD_RES (4), (5), (36), (38): Xaa is C or S

SEQ ID NO: 34975 - protein, 34 aa, Artificial Sequence; identical to SEQ ID NO: 32819
  GFR-binding peptide
  MOD_RES (34), (34): Xaa is C or S
  MOD_RES (14), (15), (16), (17), (18): Xaa is A or G
  MOD_RES (19), (20), (21), (22): Xaa is A or G or is absent

SEQ ID NO: 34976 - protein, 38 aa, Artificial Sequence; identical to SEQ ID NO: 32820
  GFR-binding peptide
  MOD_RES (5), (6), (38): Xaa is C or S

SEQ ID NO: 34977 - protein, 38 aa, Artificial Sequence; identical to SEQ ID NO: 32821
  GFR-binding peptide
  MOD_RES (2), (3), (37): Xaa is C or S
  MOD_RES (17), (18), (19), (20), (21): Xaa is A or G
  MOD_RES (22), (23), (24), (25): Xaa is A or G or is absent

SEQ ID NO: 34978 - protein, 39 aa, Artificial Sequence; identical to SEQ ID NO: 32822
  GFR-binding peptide
  MOD_RES (2), (3), (37), (39): Xaa is C or S
  MOD_RES (17), (18), (19), (20), (21): Xaa is A or G
  MOD_RES (22), (23), (24), (25): Xaa is A or G or is absent

SEQ ID NO: 34979 - protein, 35 aa, Artificial Sequence; identical to SEQ ID NO: 32823
  GFR-binding peptide
  MOD_RES (4), (5): Xaa is C or S

SEQ ID NO: 34980 - protein, 42 aa, Artificial Sequence; identical to SEQ ID NO: 32824
  GFR-binding peptide
  MOD_RES (4), (5), (39), (41): Xaa is C or S
  MOD_RES (19), (20), (21), (22), (23): Xaa is A or G
  MOD_RES (24), (25), (26), (27): Xaa is A or G or is absent

SEQ ID NO: 34981 - protein, 42 aa, Artificial Sequence; identical to SEQ ID NO: 32825
  GFR-binding peptide
  MOD_RES (3), (4), (39), (41): Xaa is C or S
  MOD_RES (18), (19), (20), (21), (22): Xaa is A or G
  MOD_RES (23), (24), (25), (26): Xaa is A or G or is absent

SEQ ID NO: 34982 - protein, 36 aa, Artificial Sequence; identical to SEQ ID NO: 32826
  GFR-binding peptide
  MOD_RES (2), (3): Xaa is C or S
  MOD_RES (17), (18), (19), (20), (21): Xaa is A or G
  MOD_RES (22), (23), (24), (25): Xaa is A or G or is absent

SEQ ID NO: 34983 - protein, 37 aa, Artificial Sequence; identical to SEQ ID NO: 32827
  GFR-binding peptide
  MOD_RES (3), (4): Xaa is C or S
  MOD_RES (18), (19), (20), (21), (22): Xaa is A or G
  MOD_RES (23), (24), (25), (26): Xaa is A or G or is absent

SEQ ID NO: 34984 - protein, 35 aa, Artificial Sequence; identical to SEQ ID NO: 32828
  GFR-binding peptide
  MOD_RES (2), (3), (35): Xaa is C or S

SEQ ID NO: 34985 - protein, 38 aa, Artificial Sequence; identical to SEQ ID NO: 32829
  GFR-binding peptide
  MOD_RES (2), (3), (37): Xaa is C or S
  MOD_RES (17), (18), (19), (20), (21): Xaa is A or G
  MOD_RES (22), (23), (24), (25): Xaa is A or G or is absent

SEQ ID NO: 34986 - protein, 34 aa, Artificial Sequence; identical to SEQ ID NO: 32830
  GFR-binding peptide
  MOD_RES (34), (34): Xaa is C or S
  MOD_RES (14), (15), (16), (17), (18): Xaa is A or G
  MOD_RES (19), (20), (21), (22): Xaa is A or G or is absent

SEQ ID NO: 34987 - protein, 35 aa, Artificial Sequence; identical to SEQ ID NO: 32831
  GFR-binding peptide
  MOD_RES (2), (3), (35): Xaa is C or S

SEQ ID NO: 34988 - protein, 43 aa, Artificial Sequence; identical to SEQ ID NO: 32832
  GFR-binding peptide
  MOD_RES (6), (7), (41), (43): Xaa is C or S
  MOD_RES (21), (22), (23), (24), (25): Xaa is A or G
  MOD_RES (26), (27), (28), (29): Xaa is A or G or is absent

SEQ ID NO: 34989 - protein, 41 aa, Artificial Sequence; identical to SEQ ID NO: 32833
  GFR-binding peptide
  MOD_RES (4), (5), (39), (41): Xaa is C or S
  MOD_RES (19), (20), (21), (22), (23): Xaa is A or G
  MOD_RES (24), (25), (26), (27): Xaa is A or G or is absent

SEQ ID NO: 34990 - protein, 35 aa, Artificial Sequence; identical to SEQ ID NO: 32834
  GFR-binding peptide
  MOD_RES (1), (34): Xaa is C or S
  MOD_RES (15), (16), (17), (18), (19): Xaa is A or G
  MOD_RES (20), (21), (22), (23): Xaa is A or G or is absent

SEQ ID NO: 34991 - protein, 37 aa, Artificial Sequence; identical to SEQ ID NO: 32835
  GFR-binding peptide
  MOD_RES (4), (5), (37): Xaa is C or S

SEQ ID NO: 34992 - protein, 39 aa, Artificial Sequence; identical to SEQ ID NO: 32836
  GFR-binding peptide
  MOD_RES (2), (3), (37), (39): Xaa is C or S
  MOD_RES (17), (18), (19), (20), (21): Xaa is A or G
  MOD_RES (22), (23), (24), (25): Xaa is A or G or is absent

SEQ ID NO: 34993 - protein, 41 aa, Artificial Sequence; identical to SEQ ID NO: 32837
  GFR-binding peptide
  MOD_RES (4), (5), (39), (41): Xaa is C or S
  MOD_RES (19), (20), (21), (22), (23): Xaa is A or G
  MOD_RES (24), (25), (26), (27): Xaa is A or G or is absent

SEQ ID NO: 34994 - protein, 34 aa, Artificial Sequence; identical to SEQ ID NO: 32838
  GFR-binding peptide
  MOD_RES (1), (2): Xaa is C or S

SEQ ID NO: 34995 - protein, 35 aa, Artificial Sequence; identical to SEQ ID NO: 32839
  GFR-binding peptide
  MOD_RES (1), (35): Xaa is C or S
  MOD_RES (15), (16), (17), (18), (19): Xaa is A or G
  MOD_RES (20), (21), (22), (23): Xaa is A or G or is absent

SEQ ID NO: 34996 - protein, 35 aa, Artificial Sequence; identical to SEQ ID NO: 32840
  GFR-binding peptide
  MOD_RES (2), (3), (35): Xaa is C or S

SEQ ID NO: 34997 - protein, 39 aa, Artificial Sequence; identical to SEQ ID NO: 32841
  GFR-binding peptide
  MOD_RES (2), (36), (38): Xaa is C or S
  MOD_RES (16), (17), (18), (19), (20): Xaa is A or G
  MOD_RES (21), (22), (23), (24): Xaa is A or G or is absent

SEQ ID NO: 34998 - protein, 40 aa, Artificial Sequence; identical to SEQ ID NO: 32842
  GFR-binding peptide
  MOD_RES (4), (5), (37), (39): Xaa is C or S

SEQ ID NO: 34999 - protein, 36 aa, Artificial Sequence; identical to SEQ ID NO: 32843
  GFR-binding peptide
  MOD_RES (1), (2), (34), (36): Xaa is C or S

SEQ ID NO: 35000 - protein, 40 aa, Artificial Sequence; identical to SEQ ID NO: 32844
  GFR-binding peptide
  MOD_RES (4), (5), (37), (39): Xaa is C or S

SEQ ID NO: 35001 - protein, 37 aa, Artificial Sequence; identical to SEQ ID NO: 32845
  GFR-binding peptide
  MOD_RES (5), (37): Xaa is C or S

SEQ ID NO: 35002 - protein, 41 aa, Artificial Sequence; identical to SEQ ID NO: 32846
  GFR-binding peptide
  MOD_RES (5), (6), (38), (40): Xaa is C or S

SEQ ID NO: 35003 - protein, 42 aa, Artificial Sequence; identical to SEQ ID NO: 32847
  GFR-binding peptide
  MOD_RES (5), (6), (40), (42): Xaa is C or S
  MOD_RES (20), (21), (22), (23), (24): Xaa is A or G
  MOD_RES (25), (26), (27), (28): Xaa is A or G or is absent

SEQ ID NO: 35004 - protein, 35 aa, Artificial Sequence; identical to SEQ ID NO: 32848
  GFR-binding peptide
  MOD_RES (1), (35): Xaa is C or S
  MOD_RES (15), (16), (17), (18), (19): Xaa is A or G
  MOD_RES (20), (21), (22), (23): Xaa is A or G or is absent

SEQ ID NO: 35005 - protein, 36 aa, Artificial Sequence; identical to SEQ ID NO: 32849
  GFR-binding peptide
  MOD_RES (2), (3), (35): Xaa is C or S

SEQ ID NO: 35006 - protein, 37 aa, Artificial Sequence; identical to SEQ ID NO: 32850
  GFR-binding peptide
  MOD_RES (34), (36): Xaa is C or S
  MOD_RES (14), (15), (16), (17), (18): Xaa is A or G
  MOD_RES (19), (20), (21), (22): Xaa is A or G or is absent

SEQ ID NO: 35007 - protein, 32 aa, Artificial Sequence; identical to SEQ ID NO: 32851
  GFR-binding peptide

SEQ ID NO: 35008 - protein, 38 aa, Artificial Sequence; identical to SEQ ID NO: 32852
  GFR-binding peptide
  MOD_RES (2), (3), (36), (38): Xaa is C or S
  MOD_RES (17), (18), (19), (20), (21): Xaa is A or G
  MOD_RES (22), (23), (24), (25): Xaa is A or G or is absent

SEQ ID NO: 35009 - protein, 38 aa, Artificial Sequence; identical to SEQ ID NO: 32853
  GFR-binding peptide
  MOD_RES (3), (4), (38): Xaa is C or S
  MOD_RES (18), (19), (20), (21), (22): Xaa is A or G
  MOD_RES (23), (24), (25), (26): Xaa is A or G or is absent

SEQ ID NO: 35010 - protein, 40 aa, Artificial Sequence; identical to SEQ ID NO: 32854
  GFR-binding peptide
  MOD_RES (4), (5), (38), (40): Xaa is C or S
  MOD_RES (19), (20), (21), (22), (23): Xaa is A or G
  MOD_RES (24), (25), (26), (27): Xaa is A or G or is absent

SEQ ID NO: 35011 - protein, 35 aa, Artificial Sequence; identical to SEQ ID NO: 32855
  GFR-binding peptide
  MOD_RES (1), (2), (34): Xaa is C or S

SEQ ID NO: 35012 - protein, 36 aa, Artificial Sequence; identical to SEQ ID NO: 32856
  GFR-binding peptide
  MOD_RES (5), (6): Xaa is C or S

SEQ ID NO: 35013 - protein, 40 aa, Artificial Sequence; identical to SEQ ID NO: 32857
  GFR-binding peptide
  MOD_RES (7), (39): Xaa is C or S

SEQ ID NO: 35014 - protein, 39 aa, Artificial Sequence; identical to SEQ ID NO: 32858
  GFR-binding peptide
  MOD_RES (3), (4), (36), (38): Xaa is C or S

SEQ ID NO: 35015 - protein, 35 aa, Artificial Sequence; identical to SEQ ID NO: 32859
  GFR-binding peptide
  MOD_RES (33), (35): Xaa is C or S

SEQ ID NO: 35016 - protein, 36 aa, Artificial Sequence; identical to SEQ ID NO: 32860
  GFR-binding peptide
  MOD_RES (5), (6): Xaa is C or S

SEQ ID NO: 35017 - protein, 37 aa, Artificial Sequence; identical to SEQ ID NO: 32861
  GFR-binding peptide
  MOD_RES (3), (4), (35), (37): Xaa is C or S

SEQ ID NO: 35018 - protein, 41 aa, Artificial Sequence; identical to SEQ ID NO: 32862
  GFR-binding peptide
  MOD_RES (6), (7), (39), (41): Xaa is C or S

SEQ ID NO: 35019 - protein, 36 aa, Artificial Sequence; identical to SEQ ID NO: 32863
  GFR-binding peptide
  MOD_RES (2), (3): Xaa is C or S
  MOD_RES (17), (18), (19), (20), (21): Xaa is A or G
  MOD_RES (22), (23), (24), (25): Xaa is A or G or is absent

SEQ ID NO: 35020 - protein, 36 aa, Artificial Sequence; identical to SEQ ID NO: 32864
  GFR-binding peptide
  MOD_RES (3), (4): Xaa is C or S
  MOD_RES (18), (19), (20), (21), (22): Xaa is A or G
  MOD_RES (23), (24), (25), (26): Xaa is A or G or is absent

SEQ ID NO: 35021 - protein, 36 aa, Artificial Sequence; identical to SEQ ID NO: 32865
  GFR-binding peptide
  MOD_RES (1), (35): Xaa is C or S
  MOD_RES (15), (16), (17), (18), (19): Xaa is A or G
  MOD_RES (20), (21), (22), (23): Xaa is A or G or is absent

SEQ ID NO: 35022 - protein, 32 aa, Artificial Sequence; identical to SEQ ID NO: 32866
  GFR-binding peptide
  MOD_RES (14), (15), (16), (17), (18): Xaa is A or G
  MOD_RES (19), (20), (21), (22): Xaa is A or G or is absent

SEQ ID NO: 35023 - protein, 40 aa, Artificial Sequence; identical to SEQ ID NO: 32867
  GFR-binding peptide
  MOD_RES (5), (6), (40): Xaa is C or S
  MOD_RES (20), (21), (22), (23), (24): Xaa is A or G
  MOD_RES (25), (26), (27), (28): Xaa is A or G or is absent

SEQ ID NO: 35024 - protein, 39 aa, Artificial Sequence; identical to SEQ ID NO: 32868
  GFR-binding peptide
  MOD_RES (5), (6), (38): Xaa is C or S

SEQ ID NO: 35025 - protein, 35 aa, Artificial Sequence; identical to SEQ ID NO: 32869
  GFR-binding peptide
  MOD_RES (33), (35): Xaa is C or S
  MOD_RES (14), (15), (16), (17), (18): Xaa is A or G
  MOD_RES (19), (20), (21), (22): Xaa is A or G or is absent

SEQ ID NO: 35026 - protein, 36 aa, Artificial Sequence; identical to SEQ ID NO: 32870
  GFR-binding peptide
  MOD_RES (5), (6): Xaa is C or S

SEQ ID NO: 35027 - protein, 37 aa, Artificial Sequence; identical to SEQ ID NO: 32871
  GFR-binding peptide
  MOD_RES (2), (3), (35), (37): Xaa is C or S

SEQ ID NO: 35028 - protein, 40 aa, Artificial Sequence; identical to SEQ ID NO: 32872
  GFR-binding peptide
  MOD_RES (3), (4), (38), (40): Xaa is C or S
  MOD_RES (18), (19), (20), (21), (22): Xaa is A or G
  MOD_RES (23), (24), (25), (26): Xaa is A or G or is absent

SEQ ID NO: 35029 - protein, 37 aa, Artificial Sequence; identical to SEQ ID NO: 32873
  GFR-binding peptide
  MOD_RES (1), (34), (36): Xaa is C or S
  MOD_RES (15), (16), (17), (18), (19): Xaa is A or G
  MOD_RES (20), (21), (22), (23): Xaa is A or G or is absent

SEQ ID NO: 35030 - protein, 41 aa, Artificial Sequence; identical to SEQ ID NO: 32874
  GFR-binding peptide
  MOD_RES (6), (38), (40): Xaa is C or S

SEQ ID NO: 35031 - protein, 37 aa, Artificial Sequence; identical to SEQ ID NO: 32875
  GFR-binding peptide
  MOD_RES (34), (36): Xaa is C or S
  MOD_RES (14), (15), (16), (17), (18): Xaa is A or G
  MOD_RES (19), (20), (21), (22): Xaa is A or G or is absent

SEQ ID NO: 35032 - protein, 35 aa, Artificial Sequence; identical to SEQ ID NO: 32876
  GFR-binding peptide
  MOD_RES (1), (2): Xaa is C or S
  MOD_RES (16), (17), (18), (19), (20): Xaa is A or G
  MOD_RES (21), (22), (23), (24): Xaa is A or G or is absent

SEQ ID NO: 35033 - protein, 45 aa, Artificial Sequence; identical to SEQ ID NO: 32877
  GFR-binding peptide
  MOD_RES (6), (7), (42), (44): Xaa is C or S
  MOD_RES (21), (22), (23), (24), (25): Xaa is A or G
  MOD_RES (26), (27), (28), (29): Xaa is A or G or is absent

SEQ ID NO: 35034 - protein, 33 aa, Artificial Sequence; identical to SEQ ID NO: 32878
  GFR-binding peptide
  MOD_RES (1), (2): Xaa is C or S

SEQ ID NO: 35035 - protein, 36 aa, Artificial Sequence; identical to SEQ ID NO: 32879
  GFR-binding peptide
  MOD_RES (1), (33), (35): Xaa is C or S

SEQ ID NO: 35036 - protein, 39 aa, Artificial Sequence; identical to SEQ ID NO: 32880
  GFR-binding peptide
  MOD_RES (6), (7): Xaa is C or S
  MOD_RES (21), (22), (23), (24), (25): Xaa is A or G
  MOD_RES (26), (27), (28), (29): Xaa is A or G or is absent

SEQ ID NO: 35037 - protein, 32 aa, Artificial Sequence; identical to SEQ ID NO: 32881
  GFR-binding peptide
  MOD_RES (32), (32): Xaa is C or S

SEQ ID NO: 35038 - protein, 35 aa, Artificial Sequence; identical to SEQ ID NO: 32882
  GFR-binding peptide
  MOD_RES (2), (3): Xaa is C or S
  MOD_RES (17), (18), (19), (20), (21): Xaa is A or G
  MOD_RES (22), (23), (24), (25): Xaa is A or G or is absent

SEQ ID NO: 35039 - protein, 39 aa, Artificial Sequence; identical to SEQ ID NO: 32883
  GFR-binding peptide
  MOD_RES (4), (5), (39): Xaa is C or S
  MOD_RES (19), (20), (21), (22), (23): Xaa is A or G
  MOD_RES (24), (25), (26), (27): Xaa is A or G or is absent

SEQ ID NO: 35040 - protein, 38 aa, Artificial Sequence; identical to SEQ ID NO: 32884
  GFR-binding peptide
  MOD_RES (5), (6): Xaa is C or S
  MOD_RES (20), (21), (22), (23), (24): Xaa is A or G
  MOD_RES (25), (26), (27), (28): Xaa is A or G or is absent

SEQ ID NO: 35041 - protein, 32 aa, Artificial Sequence; identical to SEQ ID NO: 32885
  GFR-binding peptide
  MOD_RES (14), (15), (16), (17), (18): Xaa is A or G
  MOD_RES (19), (20), (21), (22): Xaa is A or G or is absent

SEQ ID NO: 35042 - protein, 36 aa, Artificial Sequence; identical to SEQ ID NO: 32886
  GFR-binding peptide
  MOD_RES (1), (33), (35): Xaa is C or S

SEQ ID NO: 35043 - protein, 31 aa, Artificial Sequence; identical to SEQ ID NO: 32887
  GFR-binding peptide
  MOD_RES (1), (1): Xaa is C or S

SEQ ID NO: 35044 - protein, 41 aa, Artificial Sequence; identical to SEQ ID NO: 32888
  GFR-binding peptide
  MOD_RES (5), (6), (40): Xaa is C or S
  MOD_RES (20), (21), (22), (23), (24): Xaa is A or G
  MOD_RES (25), (26), (27), (28): Xaa is A or G or is absent

SEQ ID NO: 35045 - protein, 34 aa, Artificial Sequence; identical to SEQ ID NO: 32889
  GFR-binding peptide
  MOD_RES (2), (3): Xaa is C or S

SEQ ID NO: 35046 - protein, 34 aa, Artificial Sequence; identical to SEQ ID NO: 32890
  GFR-binding peptide
  MOD_RES (32), (34): Xaa is C or S

SEQ ID NO: 35047 - protein, 34 aa, Artificial Sequence; identical to SEQ ID NO: 32891
  GFR-binding peptide
  MOD_RES (2), (3): Xaa is C or S

SEQ ID NO: 35048 - protein, 41 aa, Artificial Sequence; identical to SEQ ID NO: 32892
  GFR-binding peptide
  MOD_RES (3), (4), (38), (40): Xaa is C or S
  MOD_RES (18), (19), (20), (21), (22): Xaa is A or G
  MOD_RES (23), (24), (25), (26): Xaa is A or G or is absent

SEQ ID NO: 35049 - protein, 40 aa, Artificial Sequence; identical to SEQ ID NO: 32893
  GFR-binding peptide
  MOD_RES (6), (7), (39): Xaa is C or S

SEQ ID NO: 35050 - protein, 40 aa, Artificial Sequence; identical to SEQ ID NO: 32894
  GFR-binding peptide
  MOD_RES (3), (37), (39): Xaa is C or S
  MOD_RES (17), (18), (19), (20), (21): Xaa is A or G
  MOD_RES (22), (23), (24), (25): Xaa is A or G or is absent

SEQ ID NO: 35051 - protein, 33 aa, Artificial Sequence; identical to SEQ ID NO: 32895
  GFR-binding peptide
  MOD_RES (14), (15), (16), (17), (18): Xaa is A or G
  MOD_RES (19), (20), (21), (22): Xaa is A or G or is absent

SEQ ID NO: 35052 - protein, 40 aa, Artificial Sequence; identical to SEQ ID NO: 32896
  GFR-binding peptide
  MOD_RES (6), (7), (39): Xaa is C or S

SEQ ID NO: 35053 - protein, 33 aa, Artificial Sequence; identical to SEQ ID NO: 32897
  GFR-binding peptide
  MOD_RES (14), (15), (16), (17), (18): Xaa is A or G
  MOD_RES (19), (20), (21), (22): Xaa is A or G or is absent

SEQ ID NO: 35054 - protein, 38 aa, Artificial Sequence; identical to SEQ ID NO: 32898
  GFR-binding peptide
  MOD_RES (6), (7): Xaa is C or S

SEQ ID NO: 35055 - protein, 36 aa, Artificial Sequence; identical to SEQ ID NO: 32899
  GFR-binding peptide
  MOD_RES (2), (3): Xaa is C or S
  MOD_RES (17), (18), (19), (20), (21): Xaa is A or G
  MOD_RES (22), (23), (24), (25): Xaa is A or G or is absent

SEQ ID NO: 35056 - protein, 36 aa, Artificial Sequence; identical to SEQ ID NO: 32900
  GFR-binding peptide
  MOD_RES (34), (36): Xaa is C or S
  MOD_RES (14), (15), (16), (17), (18): Xaa is A or G
  MOD_RES (19), (20), (21), (22): Xaa is A or G or is absent

SEQ ID NO: 35057 - protein, 37 aa, Artificial Sequence; identical to SEQ ID NO: 32901
  GFR-binding peptide
  MOD_RES (34), (36): Xaa is C or S
  MOD_RES (14), (15), (16), (17), (18): Xaa is A or G
  MOD_RES (19), (20), (21), (22): Xaa is A or G or is absent

SEQ ID NO: 35058 - protein, 42 aa, Artificial Sequence; identical to SEQ ID NO: 32902
  GFR-binding peptide
  MOD_RES (6), (7), (41): Xaa is C or S
  MOD_RES (21), (22), (23), (24), (25): Xaa is A or G
  MOD_RES (26), (27), (28), (29): Xaa is A or G or is absent

SEQ ID NO: 35059 - protein, 38 aa, Artificial Sequence; identical to SEQ ID NO: 32903
  GFR-binding peptide
  MOD_RES (3), (4), (38): Xaa is C or S
  MOD_RES (18), (19), (20), (21), (22): Xaa is A or G
  MOD_RES (23), (24), (25), (26): Xaa is A or G or is absent

SEQ ID NO: 35060 - protein, 38 aa, Artificial Sequence; identical to SEQ ID NO: 32904
  GFR-binding peptide
  MOD_RES (2), (3), (37): Xaa is C or S
  MOD_RES (17), (18), (19), (20), (21): Xaa is A or G
  MOD_RES (22), (23), (24), (25): Xaa is A or G or is absent

SEQ ID NO: 35061 - protein, 34 aa, Artificial Sequence; identical to SEQ ID NO: 32905
  GFR-binding peptide
  MOD_RES (2), (34): Xaa is C or S

SEQ ID NO: 35062 - protein, 38 aa, Artificial Sequence; identical to SEQ ID NO: 32906
  GFR-binding peptide
  MOD_RES (3), (4), (38): Xaa is C or S
  MOD_RES (18), (19), (20), (21), (22): Xaa is A or G
  MOD_RES (23), (24), (25), (26): Xaa is A or G or is absent

SEQ ID NO: 35063 - protein, 33 aa, Artificial Sequence; identical to SEQ ID NO: 32907
  GFR-binding peptide
  MOD_RES (14), (15), (16), (17), (18): Xaa is A or G
  MOD_RES (19), (20), (21), (22): Xaa is A or G or is absent

SEQ ID NO: 35064 - protein, 43 aa, Artificial Sequence; identical to SEQ ID NO: 32908
  GFR-binding peptide
  MOD_RES (4), (5), (40), (42): Xaa is C or S
  MOD_RES (19), (20), (21), (22), (23): Xaa is A or G
  MOD_RES (24), (25), (26), (27): Xaa is A or G or is absent

SEQ ID NO: 35065 - protein, 40 aa, Artificial Sequence; identical to SEQ ID NO: 32909
  GFR-binding peptide
  MOD_RES (5), (6), (38), (40): Xaa is C or S

SEQ ID NO: 35066 - protein, 36 aa, Artificial Sequence; identical to SEQ ID NO: 32910
  GFR-binding peptide
  MOD_RES (1), (2), (34), (36): Xaa is C or S

SEQ ID NO: 35067 - protein, 36 aa, Artificial Sequence; identical to SEQ ID NO: 32911
  GFR-binding peptide
  MOD_RES (34), (36): Xaa is C or S
  MOD_RES (14), (15), (16), (17), (18): Xaa is A or G
  MOD_RES (19), (20), (21), (22): Xaa is A or G or is absent

SEQ ID NO: 35068 - protein, 30 aa, Artificial Sequence; identical to SEQ ID NO: 32912
  GFR-binding peptide

SEQ ID NO: 35069 - protein, 35 aa, Artificial Sequence; identical to SEQ ID NO: 32913
  GFR-binding peptide
  MOD_RES (1), (2), (34): Xaa is C or S

SEQ ID NO: 35070 - protein, 38 aa, Artificial Sequence; identical to SEQ ID NO: 32914
  GFR-binding peptide
  MOD_RES (3), (4): Xaa is C or S
  MOD_RES (18), (19), (20), (21), (22): Xaa is A or G
  MOD_RES (23), (24), (25), (26): Xaa is A or G or is absent

SEQ ID NO: 35071 - protein, 34 aa, Artificial Sequence; identical to SEQ ID NO: 32915
  GFR-binding peptide
  MOD_RES (32), (34): Xaa is C or S

SEQ ID NO: 35072 - protein, 33 aa, Artificial Sequence; identical to SEQ ID NO: 32916
  GFR-binding peptide
  MOD_RES (32), (32): Xaa is C or S

SEQ ID NO: 35073 - protein, 34 aa, Artificial Sequence; identical to SEQ ID NO: 32917
  GFR-binding peptide
  MOD_RES (3), (4): Xaa is C or S

SEQ ID NO: 35074 - protein, 40 aa, Artificial Sequence; identical to SEQ ID NO: 32918
  GFR-binding peptide
  MOD_RES (5), (6), (40): Xaa is C or S
  MOD_RES (20), (21), (22), (23), (24): Xaa is A or G
  MOD_RES (25), (26), (27), (28): Xaa is A or G or is absent

SEQ ID NO: 35075 - protein, 33 aa, Artificial Sequence; identical to SEQ ID NO: 32919
  GFR-binding peptide
  MOD_RES (14), (15), (16), (17), (18): Xaa is A or G
  MOD_RES (19), (20), (21), (22): Xaa is A or G or is absent

SEQ ID NO: 35076 - protein, 37 aa, Artificial Sequence; identical to SEQ ID NO: 32920
  GFR-binding peptide
  MOD_RES (1), (2), (34), (36): Xaa is C or S

SEQ ID NO: 35077 - protein, 41 aa, Artificial Sequence; identical to SEQ ID NO: 32921
  GFR-binding peptide
  MOD_RES (6), (7), (39), (41): Xaa is C or S

SEQ ID NO: 35078 - protein, 41 aa, Artificial Sequence; identical to SEQ ID NO: 32922
  GFR-binding peptide
  MOD_RES (6), (7), (39), (41): Xaa is C or S

SEQ ID NO: 35079 - protein, 35 aa, Artificial Sequence; identical to SEQ ID NO: 32923
  GFR-binding peptide
  MOD_RES (3), (3): Xaa is C or S
  MOD_RES (17), (18), (19), (20), (21): Xaa is A or G
  MOD_RES (22), (23), (24), (25): Xaa is A or G or is absent

SEQ ID NO: 35080 - protein, 38 aa, Artificial Sequence; identical to SEQ ID NO: 32924
  GFR-binding peptide
  MOD_RES (4), (5), (37): Xaa is C or S

SEQ ID NO: 35081 - protein, 37 aa, Artificial Sequence; identical to SEQ ID NO: 32925
  GFR-binding peptide
  MOD_RES (2), (3), (37): Xaa is C or S
  MOD_RES (17), (18), (19), (20), (21): Xaa is A or G
  MOD_RES (22), (23), (24), (25): Xaa is A or G or is absent

SEQ ID NO: 35082 - protein, 40 aa, Artificial Sequence; identical to SEQ ID NO: 32926
  GFR-binding peptide
  MOD_RES (2), (3), (37), (39): Xaa is C or S
  MOD_RES (17), (18), (19), (20), (21): Xaa is A or G
  MOD_RES (22), (23), (24), (25): Xaa is A or G or is absent

SEQ ID NO: 35083 - protein, 40 aa, Artificial Sequence; identical to SEQ ID NO: 32927
  GFR-binding peptide
  MOD_RES (5), (6), (37), (39): Xaa is C or S

SEQ ID NO: 35084 - protein, 41 aa, Artificial Sequence; identical to SEQ ID NO: 32928
  GFR-binding peptide
  MOD_RES (4), (5), (39), (41): Xaa is C or S
  MOD_RES (19), (20), (21), (22), (23): Xaa is A or G
  MOD_RES (24), (25), (26), (27): Xaa is A or G or is absent

SEQ ID NO: 35085 - protein, 35 aa, Artificial Sequence; identical to SEQ ID NO: 32929
  GFR-binding peptide
  MOD_RES (1), (2), (34): Xaa is C or S

SEQ ID NO: 35086 - protein, 31 aa, Artificial Sequence; identical to SEQ ID NO: 32930
  GFR-binding peptide

SEQ ID NO: 35087 - protein, 35 aa, Artificial Sequence; identical to SEQ ID NO: 32931
  GFR-binding peptide
  MOD_RES (4), (5): Xaa is C or S

SEQ ID NO: 35088 - protein, 37 aa, Artificial Sequence; identical to SEQ ID NO: 32932
  GFR-binding peptide
  MOD_RES (1), (2), (34), (36): Xaa is C or S

SEQ ID NO: 35089 - protein, 41 aa, Artificial Sequence; identical to SEQ ID NO: 32933
  GFR-binding peptide
  MOD_RES (5), (6), (40): Xaa is C or S
  MOD_RES (20), (21), (22), (23), (24): Xaa is A or G
  MOD_RES (25), (26), (27), (28): Xaa is A or G or is absent

SEQ ID NO: 35090 - protein, 36 aa, Artificial Sequence; identical to SEQ ID NO: 32934
  GFR-binding peptide
  MOD_RES (1), (2), (34), (36): Xaa is C or S

SEQ ID NO: 35091 - protein, 33 aa, Artificial Sequence; identical to SEQ ID NO: 32935
  GFR-binding peptide
  MOD_RES (2), (3): Xaa is C or S

SEQ ID NO: 35092 - protein, 43 aa, Artificial Sequence; identical to SEQ ID NO: 32936
  GFR-binding peptide
  MOD_RES (6), (7), (40), (42): Xaa is C or S
  MOD_RES (21), (22), (23), (24), (25): Xaa is A or G
  MOD_RES (26), (27), (28), (29): Xaa is A or G or is absent

SEQ ID NO: 35093 - protein, 36 aa, Artificial Sequence; identical to SEQ ID NO: 32937
  GFR-binding peptide
  MOD_RES (1), (34), (36): Xaa is C or S

SEQ ID NO: 35094 - protein, 31 aa, Artificial Sequence; identical to SEQ ID NO: 32938
  GFR-binding peptide
  MOD_RES (1), (1): Xaa is C or S

SEQ ID NO: 35095 - protein, 37 aa, Artificial Sequence; identical to SEQ ID NO: 32939
  GFR-binding peptide
  MOD_RES (4), (5): Xaa is C or S
  MOD_RES (19), (20), (21), (22), (23): Xaa is A or G
  MOD_RES (24), (25), (26), (27): Xaa is A or G or is absent

SEQ ID NO: 35096 - protein, 41 aa, Artificial Sequence; identical to SEQ ID NO: 32940
  GFR-binding peptide
  MOD_RES (3), (4), (38), (40): Xaa is C or S
  MOD_RES (18), (19), (20), (21), (22): Xaa is A or G
  MOD_RES (23), (24), (25), (26): Xaa is A or G or is absent

SEQ ID NO: 35097 - protein, 33 aa, Artificial Sequence; identical to SEQ ID NO: 32941
  GFR-binding peptide
  MOD_RES (2), (3): Xaa is C or S

SEQ ID NO: 35098 - protein, 36 aa, Artificial Sequence; identical to SEQ ID NO: 32942
  GFR-binding peptide
  MOD_RES (1), (33), (35): Xaa is C or S

SEQ ID NO: 35099 - protein, 36 aa, Artificial Sequence; identical to SEQ ID NO: 32943
  GFR-binding peptide
  MOD_RES (1), (34), (36): Xaa is C or S
  MOD_RES (15), (16), (17), (18), (19): Xaa is A or G
  MOD_RES (20), (21), (22), (23): Xaa is A or G or is absent

SEQ ID NO: 35100 - protein, 32 aa, Artificial Sequence; identical to SEQ ID NO: 32944
  GFR-binding peptide
  MOD_RES (14), (15), (16), (17), (18): Xaa is A or G
  MOD_RES (19), (20), (21), (22): Xaa is A or G or is absent

SEQ ID NO: 35101 - protein, 38 aa, Artificial Sequence; identical to SEQ ID NO: 32945
  GFR-binding peptide
  MOD_RES (1), (35), (37): Xaa is C or S
  MOD_RES (15), (16), (17), (18), (19): Xaa is A or G
  MOD_RES (20), (21), (22), (23): Xaa is A or G or is absent

SEQ ID NO: 35102 - protein, 44 aa, Artificial Sequence; identical to SEQ ID NO: 32946
  GFR-binding peptide
  MOD_RES (6), (7), (41), (43): Xaa is C or S
  MOD_RES (21), (22), (23), (24), (25): Xaa is A or G
  MOD_RES (26), (27), (28), (29): Xaa is A or G or is absent

SEQ ID NO: 35103 - protein, 41 aa, Artificial Sequence; identical to SEQ ID NO: 32947
  GFR-binding peptide
  MOD_RES (6), (7), (41): Xaa is C or S
  MOD_RES (21), (22), (23), (24), (25): Xaa is A or G
  MOD_RES (26), (27), (28), (29): Xaa is A or G or is absent

SEQ ID NO: 35104 - protein, 34 aa, Artificial Sequence; identical to SEQ ID NO: 32948
  GFR-binding peptide
  MOD_RES (1), (1): Xaa is C or S
  MOD_RES (15), (16), (17), (18), (19): Xaa is A or G
  MOD_RES (20), (21), (22), (23): Xaa is A or G or is absent

SEQ ID NO: 35105 - protein, 36 aa, Artificial Sequence; identical to SEQ ID NO: 32949
  GFR-binding peptide
  MOD_RES (3), (4), (36): Xaa is C or S

SEQ ID NO: 35106 - protein, 37 aa, Artificial Sequence; identical to SEQ ID NO: 32950
  GFR-binding peptide
  MOD_RES (2), (3), (36): Xaa is C or S
  MOD_RES (17), (18), (19), (20), (21): Xaa is A or G
  MOD_RES (22), (23), (24), (25): Xaa is A or G or is absent

SEQ ID NO: 35107 - protein, 35 aa, Artificial Sequence; identical to SEQ ID NO: 32951
  GFR-binding peptide
  MOD_RES (5), (5): Xaa is C or S

SEQ ID NO: 35108 - protein, 35 aa, Artificial Sequence; identical to SEQ ID NO: 32952
  GFR-binding peptide
  MOD_RES (2), (3): Xaa is C or S
  MOD_RES (17), (18), (19), (20), (21): Xaa is A or G
  MOD_RES (22), (23), (24), (25): Xaa is A or G or is absent

SEQ ID NO: 35109 - protein, 39 aa, Artificial Sequence; identical to SEQ ID NO: 32953
  GFR-binding peptide
  MOD_RES (5), (6): Xaa is C or S
  MOD_RES (20), (21), (22), (23), (24): Xaa is A or G
  MOD_RES (25), (26), (27), (28): Xaa is A or G or is absent

SEQ ID NO: 35110 - protein, 35 aa, Artificial Sequence; identical to SEQ ID NO: 32954
  GFR-binding peptide
  MOD_RES (32), (34): Xaa is C or S

SEQ ID NO: 35111 - protein, 38 aa, Artificial Sequence; identical to SEQ ID NO: 32955
  GFR-binding peptide
  MOD_RES (1), (35), (37): Xaa is C or S
  MOD_RES (15), (16), (17), (18), (19): Xaa is A or G
  MOD_RES (20), (21), (22), (23): Xaa is A or G or is absent

SEQ ID NO: 35112 - protein, 36 aa, Artificial Sequence; identical to SEQ ID NO: 32956
  GFR-binding peptide
  MOD_RES (1), (2), (36): Xaa is C or S
  MOD_RES (16), (17), (18), (19), (20): Xaa is A or G
  MOD_RES (21), (22), (23), (24): Xaa is A or G or is absent

SEQ ID NO: 35113 - protein, 35 aa, Artificial Sequence; identical to SEQ ID NO: 32957
  GFR-binding peptide
  MOD_RES (2), (3), (35): Xaa is C or S

SEQ ID NO: 35114 - protein, 35 aa, Artificial Sequence; identical to SEQ ID NO: 32958
  GFR-binding peptide
  MOD_RES (32), (34): Xaa is C or S

SEQ ID NO: 35115 - protein, 39 aa, Artificial Sequence; identical to SEQ ID NO: 32959
  GFR-binding peptide
  MOD_RES (2), (3), (37), (39): Xaa is C or S
  MOD_RES (17), (18), (19), (20), (21): Xaa is A or G
  MOD_RES (22), (23), (24), (25): Xaa is A or G or is absent

SEQ ID NO: 35116 - protein, 39 aa, Artificial Sequence; identical to SEQ ID NO: 32960
  GFR-binding peptide
  MOD_RES (4), (38): Xaa is C or S
  MOD_RES (18), (19), (20), (21), (22): Xaa is A or G
  MOD_RES (23), (24), (25), (26): Xaa is A or G or is absent

SEQ ID NO: 35117 - protein, 40 aa, Artificial Sequence; identical to SEQ ID NO: 32961
  GFR-binding peptide
  MOD_RES (5), (6), (38), (40): Xaa is C or S

SEQ ID NO: 35118 - protein, 33 aa, Artificial Sequence; identical to SEQ ID NO: 32962
  GFR-binding peptide
  MOD_RES (1), (33): Xaa is C or S

SEQ ID NO: 35119 - protein, 40 aa, Artificial Sequence; identical to SEQ ID NO: 32963
  GFR-binding peptide
  MOD_RES (5), (6), (40): Xaa is C or S
  MOD_RES (20), (21), (22), (23), (24): Xaa is A or G
  MOD_RES (25), (26), (27), (28): Xaa is A or G or is absent

SEQ ID NO: 35120 - protein, 38 aa, Artificial Sequence; identical to SEQ ID NO: 32964
  GFR-binding peptide
  MOD_RES (35), (37): Xaa is C or S
  MOD_RES (14), (15), (16), (17), (18): Xaa is A or G
  MOD_RES (19), (20), (21), (22): Xaa is A or G or is absent

SEQ ID NO: 35121 - protein, 37 aa, Artificial Sequence; identical to SEQ ID NO: 32965
  GFR-binding peptide
  MOD_RES (2), (3), (35), (37): Xaa is C or S

SEQ ID NO: 35122 - protein, 38 aa, Artificial Sequence; identical to SEQ ID NO: 32966
  GFR-binding peptide
  MOD_RES (6), (7): Xaa is C or S

SEQ ID NO: 35123 - protein, 36 aa, Artificial Sequence; identical to SEQ ID NO: 32967
  GFR-binding peptide
  MOD_RES (1), (33), (35): Xaa is C or S

SEQ ID NO: 35124 - protein, 39 aa, Artificial Sequence; identical to SEQ ID NO: 32968
  GFR-binding peptide
  MOD_RES (3), (4), (38): Xaa is C or S
  MOD_RES (18), (19), (20), (21), (22): Xaa is A or G
  MOD_RES (23), (24), (25), (26): Xaa is A or G or is absent

SEQ ID NO: 35125 - protein, 38 aa, Artificial Sequence; identical to SEQ ID NO: 32969
  GFR-binding peptide
  MOD_RES (2), (3), (35), (37): Xaa is C or S

SEQ ID NO: 35126 - protein, 42 aa, Artificial Sequence; identical to SEQ ID NO: 32970
  GFR-binding peptide
  MOD_RES (4), (5), (39), (41): Xaa is C or S
  MOD_RES (19), (20), (21), (22), (23): Xaa is A or G
  MOD_RES (24), (25), (26), (27): Xaa is A or G or is absent

SEQ ID NO: 35127 - protein, 40 aa, Artificial Sequence; identical to SEQ ID NO: 32971
  GFR-binding peptide
  MOD_RES (3), (4), (38), (40): Xaa is C or S
  MOD_RES (18), (19), (20), (21), (22): Xaa is A or G
  MOD_RES (23), (24), (25), (26): Xaa is A or G or is absent

SEQ ID NO: 35128 - protein, 36 aa, Artificial Sequence; identical to SEQ ID NO: 32972
  GFR-binding peptide
  MOD_RES (1), (36): Xaa is C or S
  MOD_RES (15), (16), (17), (18), (19): Xaa is A or G
  MOD_RES (20), (21), (22), (23): Xaa is A or G or is absent

SEQ ID NO: 35129 - protein, 33 aa, Artificial Sequence; identical to SEQ ID NO: 32973
  GFR-binding peptide
  MOD_RES (1), (2): Xaa is C or S

SEQ ID NO: 35130 - protein, 42 aa, Artificial Sequence; identical to SEQ ID NO: 32974
  GFR-binding peptide
  MOD_RES (5), (6), (39), (41): Xaa is C or S
  MOD_RES (20), (21), (22), (23), (24): Xaa is A or G
  MOD_RES (25), (26), (27), (28): Xaa is A or G or is absent

SEQ ID NO: 35131 - protein, 38 aa, Artificial Sequence; identical to SEQ ID NO: 32975
  GFR-binding peptide
  MOD_RES (1), (35), (37): Xaa is C or S
  MOD_RES (15), (16), (17), (18), (19): Xaa is A or G
  MOD_RES (20), (21), (22), (23): Xaa is A or G or is absent

SEQ ID NO: 35132 - protein, 37 aa, Artificial Sequence; identical to SEQ ID NO: 32976
  GFR-binding peptide
  MOD_RES (34), (36): Xaa is C or S
  MOD_RES (14), (15), (16), (17), (18): Xaa is A or G
  MOD_RES (19), (20), (21), (22): Xaa is A or G or is absent

SEQ ID NO: 35133 - protein, 37 aa, Artificial Sequence; identical to SEQ ID NO: 32977
  GFR-binding peptide
  MOD_RES (2), (3), (35), (37): Xaa is C or S

SEQ ID NO: 35134 - protein, 35 aa, Artificial Sequence; identical to SEQ ID NO: 32978
  GFR-binding peptide
  MOD_RES (3), (4): Xaa is C or S

SEQ ID NO: 35135 - protein, 34 aa, Artificial Sequence; identical to SEQ ID NO: 32979
  GFR-binding peptide
  MOD_RES (32), (34): Xaa is C or S

SEQ ID NO: 35136 - protein, 37 aa, Artificial Sequence; identical to SEQ ID NO: 32980
  GFR-binding peptide
  MOD_RES (1), (35), (37): Xaa is C or S
  MOD_RES (15), (16), (17), (18), (19): Xaa is A or G
  MOD_RES (20), (21), (22), (23): Xaa is A or G or is absent

SEQ ID NO: 35137 - protein, 37 aa, Artificial Sequence; identical to SEQ ID NO: 32981
  GFR-binding peptide
  MOD_RES (1), (35), (37): Xaa is C or S
  MOD_RES (15), (16), (17), (18), (19): Xaa is A or G
  MOD_RES (20), (21), (22), (23): Xaa is A or G or is absent

SEQ ID NO: 35138 - protein, 35 aa, Artificial Sequence; identical to SEQ ID NO: 32982
  GFR-binding peptide
  MOD_RES (4), (5): Xaa is C or S

SEQ ID NO: 35139 - protein, 34 aa, Artificial Sequence; identical to SEQ ID NO: 32983
  GFR-binding peptide
  MOD_RES (32), (34): Xaa is C or S

SEQ ID NO: 35140 - protein, 32 aa, Artificial Sequence; identical to SEQ ID NO: 32984
  GFR-binding peptide
  MOD_RES (1), (1): Xaa is C or S

SEQ ID NO: 35141 - protein, 31 aa, Artificial Sequence; identical to SEQ ID NO: 32985
  GFR-binding peptide
  MOD_RES (1), (1): Xaa is C or S

SEQ ID NO: 35142 - protein, 35 aa, Artificial Sequence; identical to SEQ ID NO: 32986
  GFR-binding peptide
  MOD_RES (34), (34): Xaa is C or S
  MOD_RES (14), (15), (16), (17), (18): Xaa is A or G
  MOD_RES (19), (20), (21), (22): Xaa is A or G or is absent

SEQ ID NO: 35143 - protein, 37 aa, Artificial Sequence; identical to SEQ ID NO: 32987
  GFR-binding peptide
  MOD_RES (2), (3), (37): Xaa is C or S
  MOD_RES (17), (18), (19), (20), (21): Xaa is A or G
  MOD_RES (22), (23), (24), (25): Xaa is A or G or is absent

SEQ ID NO: 35144 - protein, 40 aa, Artificial Sequence; identical to SEQ ID NO: 32988
  GFR-binding peptide
  MOD_RES (5), (39): Xaa is C or S
  MOD_RES (19), (20), (21), (22), (23): Xaa is A or G
  MOD_RES (24), (25), (26), (27): Xaa is A or G or is absent

SEQ ID NO: 35145 - protein, 37 aa, Artificial Sequence; identical to SEQ ID NO: 32989
  GFR-binding peptide
  MOD_RES (4), (5): Xaa is C or S
  MOD_RES (19), (20), (21), (22), (23): Xaa is A or G
  MOD_RES (24), (25), (26), (27): Xaa is A or G or is absent

SEQ ID NO: 35146 - protein, 36 aa, Artificial Sequence; identical to SEQ ID NO: 32990
  GFR-binding peptide
  MOD_RES (4), (5): Xaa is C or S

SEQ ID NO: 35147 - protein, 37 aa, Artificial Sequence; identical to SEQ ID NO: 32991
  GFR-binding peptide
  MOD_RES (5), (6): Xaa is C or S

SEQ ID NO: 35148 - protein, 36 aa, Artificial Sequence; identical to SEQ ID NO: 32992
  GFR-binding peptide
  MOD_RES (5), (6): Xaa is C or S

SEQ ID NO: 35149 - protein, 34 aa, Artificial Sequence; identical to SEQ ID NO: 32993
  GFR-binding peptide
  MOD_RES (2), (3): Xaa is C or S

SEQ ID NO: 35150 - protein, 32 aa, Artificial Sequence; identical to SEQ ID NO: 32994
  GFR-binding peptide
  MOD_RES (32), (32): Xaa is C or S

SEQ ID NO: 35151 - protein, 36 aa, Artificial Sequence; identical to SEQ ID NO: 32995
  GFR-binding peptide
  MOD_RES (1), (2), (36): Xaa is C or S
  MOD_RES (16), (17), (18), (19), (20): Xaa is A or G
  MOD_RES (21), (22), (23), (24): Xaa is A or G or is absent

SEQ ID NO: 35152 - protein, 40 aa, Artificial Sequence; identical to SEQ ID NO: 32996
  GFR-binding peptide
  MOD_RES (6), (7), (40): Xaa is C or S
  MOD_RES (21), (22), (23), (24), (25): Xaa is A or G
  MOD_RES (26), (27), (28), (29): Xaa is A or G or is absent

SEQ ID NO: 35153 - protein, 40 aa, Artificial Sequence; identical to SEQ ID NO: 32997
  GFR-binding peptide
  MOD_RES (4), (5), (37), (39): Xaa is C or S

SEQ ID NO: 35154 - protein, 39 aa, Artificial Sequence; identical to SEQ ID NO: 32998
  GFR-binding peptide
  MOD_RES (3), (4), (38): Xaa is C or S
  MOD_RES (18), (19), (20), (21), (22): Xaa is A or G
  MOD_RES (23), (24), (25), (26): Xaa is A or G or is absent

SEQ ID NO: 35155 - protein, 38 aa, Artificial Sequence; identical to SEQ ID NO: 32999
  GFR-binding peptide
  MOD_RES (5), (6), (38): Xaa is C or S

SEQ ID NO: 35156 - protein, 38 aa, Artificial Sequence; identical to SEQ ID NO: 33000
  GFR-binding peptide
  MOD_RES (4), (5): Xaa is C or S
  MOD_RES (19), (20), (21), (22), (23): Xaa is A or G
  MOD_RES (24), (25), (26), (27): Xaa is A or G or is absent

SEQ ID NO: 35157 - protein, 41 aa, Artificial Sequence; identical to SEQ ID NO: 33001
  GFR-binding peptide
  MOD_RES (5), (6), (40): Xaa is C or S
  MOD_RES (20), (21), (22), (23), (24): Xaa is A or G
  MOD_RES (25), (26), (27), (28): Xaa is A or G or is absent

SEQ ID NO: 35158 - protein, 36 aa, Artificial Sequence; identical to SEQ ID NO: 33002
  GFR-binding peptide
  MOD_RES (2), (3), (34), (36): Xaa is C or S

SEQ ID NO: 35159 - protein, 36 aa, Artificial Sequence; identical to SEQ ID NO: 33003
  GFR-binding peptide
  MOD_RES (1), (2), (34), (36): Xaa is C or S

SEQ ID NO: 35160 - protein, 33 aa, Artificial Sequence; identical to SEQ ID NO: 33004
  GFR-binding peptide
  MOD_RES (2), (3): Xaa is C or S

SEQ ID NO: 35161 - protein, 39 aa, Artificial Sequence; identical to SEQ ID NO: 33005
  GFR-binding peptide
  MOD_RES (6), (6): Xaa is C or S
  MOD_RES (20), (21), (22), (23), (24): Xaa is A or G
  MOD_RES (25), (26), (27), (28): Xaa is A or G or is absent

SEQ ID NO: 35162 - protein, 34 aa, Artificial Sequence; identical to SEQ ID NO: 33006
  GFR-binding peptide
  MOD_RES (2), (3): Xaa is C or S

SEQ ID NO: 35163 - protein, 38 aa, Artificial Sequence; identical to SEQ ID NO: 33007
  GFR-binding peptide
  MOD_RES (5), (37): Xaa is C or S

SEQ ID NO: 35164 - protein, 35 aa, Artificial Sequence; identical to SEQ ID NO: 33008
  GFR-binding peptide
  MOD_RES (32), (34): Xaa is C or S

SEQ ID NO: 35165 - protein, 41 aa, Artificial Sequence; identical to SEQ ID NO: 33009
  GFR-binding peptide
  MOD_RES (3), (4), (38), (40): Xaa is C or S
  MOD_RES (18), (19), (20), (21), (22): Xaa is A or G
  MOD_RES (23), (24), (25), (26): Xaa is A or G or is absent

SEQ ID NO: 35166 - protein, 30 aa, Artificial Sequence; identical to SEQ ID NO: 33010
  GFR-binding peptide

SEQ ID NO: 35167 - protein, 38 aa, Artificial Sequence; identical to SEQ ID NO: 33011
  GFR-binding peptide
  MOD_RES (6), (38): Xaa is C or S

SEQ ID NO: 35168 - protein, 41 aa, Artificial Sequence; identical to SEQ ID NO: 33012
  GFR-binding peptide
  MOD_RES (6), (7), (39), (41): Xaa is C or S

SEQ ID NO: 35169 - protein, 42 aa, Artificial Sequence; identical to SEQ ID NO: 33013
  GFR-binding peptide
  MOD_RES (6), (40), (42): Xaa is C or S
  MOD_RES (20), (21), (22), (23), (24): Xaa is A or G
  MOD_RES (25), (26), (27), (28): Xaa is A or G or is absent

SEQ ID NO: 35170 - protein, 36 aa, Artificial Sequence; identical to SEQ ID NO: 33014
  GFR-binding peptide
  MOD_RES (5), (5): Xaa is C or S

SEQ ID NO: 35171 - protein, 36 aa, Artificial Sequence; identical to SEQ ID NO: 33015
  GFR-binding peptide
  MOD_RES (1), (35): Xaa is C or S
  MOD_RES (15), (16), (17), (18), (19): Xaa is A or G
  MOD_RES (20), (21), (22), (23): Xaa is A or G or is absent

SEQ ID NO: 35172 - protein, 35 aa, Artificial Sequence; identical to SEQ ID NO: 33016
  GFR-binding peptide
  MOD_RES (1), (35): Xaa is C or S
  MOD_RES (15), (16), (17), (18), (19): Xaa is A or G
  MOD_RES (20), (21), (22), (23): Xaa is A or G or is absent

SEQ ID NO: 35173 - protein, 37 aa, Artificial Sequence; identical to SEQ ID NO: 33017
  GFR-binding peptide
  MOD_RES (3), (4): Xaa is C or S
  MOD_RES (18), (19), (20), (21), (22): Xaa is A or G
  MOD_RES (23), (24), (25), (26): Xaa is A or G or is absent

SEQ ID NO: 35174 - protein, 34 aa, Artificial Sequence; identical to SEQ ID NO: 33018
  GFR-binding peptide
  MOD_RES (1), (2), (34): Xaa is C or S

SEQ ID NO: 35175 - protein, 40 aa, Artificial Sequence; identical to SEQ ID NO: 33019
  GFR-binding peptide
  MOD_RES (6), (7), (40): Xaa is C or S

SEQ ID NO: 35176 - protein, 39 aa, Artificial Sequence; identical to SEQ ID NO: 33020
  GFR-binding peptide
  MOD_RES (4), (5), (37), (39): Xaa is C or S

SEQ ID NO: 35177 - protein, 34 aa, Artificial Sequence; identical to SEQ ID NO: 33021
  GFR-binding peptide
  MOD_RES (1), (2), (33): Xaa is C or S

SEQ ID NO: 35178 - protein, 39 aa, Artificial Sequence; identical to SEQ ID NO: 33022
  GFR-binding peptide
  MOD_RES (4), (5), (38): Xaa is C or S

SEQ ID NO: 35179 - protein, 38 aa, Artificial Sequence; identical to SEQ ID NO: 33023
  GFR-binding peptide
  MOD_RES (3), (4), (38): Xaa is C or S
  MOD_RES (18), (19), (20), (21), (22): Xaa is A or G
  MOD_RES (23), (24), (25), (26): Xaa is A or G or is absent

SEQ ID NO: 35180 - protein, 41 aa, Artificial Sequence; identical to SEQ ID NO: 33024
  GFR-binding peptide
  MOD_RES (3), (4), (38), (40): Xaa is C or S
  MOD_RES (18), (19), (20), (21), (22): Xaa is A or G
  MOD_RES (23), (24), (25), (26): Xaa is A or G or is absent

SEQ ID NO: 35181 - protein, 35 aa, Artificial Sequence; identical to SEQ ID NO: 33025
  GFR-binding peptide
  MOD_RES (3), (4): Xaa is C or S

SEQ ID NO: 35182 - protein, 39 aa, Artificial Sequence; identical to SEQ ID NO: 33026
  GFR-binding peptide
  MOD_RES (5), (6): Xaa is C or S
  MOD_RES (20), (21), (22), (23), (24): Xaa is A or G
  MOD_RES (25), (26), (27), (28): Xaa is A or G or is absent

SEQ ID NO: 35183 - protein, 39 aa, Artificial Sequence; identical to SEQ ID NO: 33027
  GFR-binding peptide
  MOD_RES (3), (4), (38): Xaa is C or S
  MOD_RES (18), (19), (20), (21), (22): Xaa is A or G
  MOD_RES (23), (24), (25), (26): Xaa is A or G or is absent

SEQ ID NO: 35184 - protein, 32 aa, Artificial Sequence; identical to SEQ ID NO: 33028
  GFR-binding peptide
  MOD_RES (32), (32): Xaa is C or S

SEQ ID NO: 35185 - protein, 39 aa, Artificial Sequence; identical to SEQ ID NO: 33029
  GFR-binding peptide
  MOD_RES (6), (7), (39): Xaa is C or S

SEQ ID NO: 35186 - protein, 39 aa, Artificial Sequence; identical to SEQ ID NO: 33030
  GFR-binding peptide
  MOD_RES (5), (6): Xaa is C or S
  MOD_RES (20), (21), (22), (23), (24): Xaa is A or G
  MOD_RES (25), (26), (27), (28): Xaa is A or G or is absent

SEQ ID NO: 35187 - protein, 42 aa, Artificial Sequence; identical to SEQ ID NO: 33031
  GFR-binding peptide
  MOD_RES (4), (5), (39), (41): Xaa is C or S
  MOD_RES (19), (20), (21), (22), (23): Xaa is A or G
  MOD_RES (24), (25), (26), (27): Xaa is A or G or is absent

SEQ ID NO: 35188 - protein, 37 aa, Artificial Sequence; identical to SEQ ID NO: 33032
  GFR-binding peptide
  MOD_RES (4), (5): Xaa is C or S
  MOD_RES (19), (20), (21), (22), (23): Xaa is A or G
  MOD_RES (24), (25), (26), (27): Xaa is A or G or is absent

SEQ ID NO: 35189 - protein, 40 aa, Artificial Sequence; identical to SEQ ID NO: 33033
  GFR-binding peptide
  MOD_RES (3), (4), (38), (40): Xaa is C or S
  MOD_RES (18), (19), (20), (21), (22): Xaa is A or G
  MOD_RES (23), (24), (25), (26): Xaa is A or G or is absent

SEQ ID NO: 35190 - protein, 33 aa, Artificial Sequence; identical to SEQ ID NO: 33034
  GFR-binding peptide
  MOD_RES (1), (33): Xaa is C or S

SEQ ID NO: 35191 - protein, 39 aa, Artificial Sequence; identical to SEQ ID NO: 33035
  GFR-binding peptide
  MOD_RES (6), (7): Xaa is C or S
  MOD_RES (21), (22), (23), (24), (25): Xaa is A or G
  MOD_RES (26), (27), (28), (29): Xaa is A or G or is absent

SEQ ID NO: 35192 - protein, 37 aa, Artificial Sequence; identical to SEQ ID NO: 33036
  GFR-binding peptide
  MOD_RES (3), (4), (36): Xaa is C or S

SEQ ID NO: 35193 - protein, 31 aa, Artificial Sequence; identical to SEQ ID NO: 33037
  GFR-binding peptide

SEQ ID NO: 35194 - protein, 34 aa, Artificial Sequence; identical to SEQ ID NO: 33038
  GFR-binding peptide
  MOD_RES (2), (2): Xaa is C or S
  MOD_RES (16), (17), (18), (19), (20): Xaa is A or G
  MOD_RES (21), (22), (23), (24): Xaa is A or G or is absent

SEQ ID NO: 35195 - protein, 34 aa, Artificial Sequence; identical to SEQ ID NO: 33039
  GFR-binding peptide
  MOD_RES (32), (34): Xaa is C or S

SEQ ID NO: 35196 - protein, 38 aa, Artificial Sequence; identical to SEQ ID NO: 33040
  GFR-binding peptide
  MOD_RES (5), (6), (38): Xaa is C or S

SEQ ID NO: 35197 - protein, 37 aa, Artificial Sequence; identical to SEQ ID NO: 33041
  GFR-binding peptide
  MOD_RES (1), (2), (34), (36): Xaa is C or S

SEQ ID NO: 35198 - protein, 37 aa, Artificial Sequence; identical to SEQ ID NO: 33042
  GFR-binding peptide
  MOD_RES (34), (36): Xaa is C or S
  MOD_RES (14), (15), (16), (17), (18): Xaa is A or G
  MOD_RES (19), (20), (21), (22): Xaa is A or G or is absent

SEQ ID NO: 35199 - protein, 36 aa, Artificial Sequence; identical to SEQ ID NO: 33043
  GFR-binding peptide
  MOD_RES (1), (35): Xaa is C or S
  MOD_RES (15), (16), (17), (18), (19): Xaa is A or G
  MOD_RES (20), (21), (22), (23): Xaa is A or G or is absent

SEQ ID NO: 35200 - protein, 38 aa, Artificial Sequence; identical to SEQ ID NO: 33044
  GFR-binding peptide
  MOD_RES (1), (2), (36), (38): Xaa is C or S
  MOD_RES (16), (17), (18), (19), (20): Xaa is A or G
  MOD_RES (21), (22), (23), (24): Xaa is A or G or is absent

SEQ ID NO: 35201 - protein, 33 aa, Artificial Sequence; identical to SEQ ID NO: 33045
  GFR-binding peptide
  MOD_RES (14), (15), (16), (17), (18): Xaa is A or G
  MOD_RES (19), (20), (21), (22): Xaa is A or G or is absent

SEQ ID NO: 35202 - protein, 41 aa, Artificial Sequence; identical to SEQ ID NO: 33046
  GFR-binding peptide
  MOD_RES (6), (7), (39), (41): Xaa is C or S

SEQ ID NO: 35203 - protein, 39 aa, Artificial Sequence; identical to SEQ ID NO: 33047
  GFR-binding peptide
  MOD_RES (6), (7): Xaa is C or S
  MOD_RES (21), (22), (23), (24), (25): Xaa is A or G
  MOD_RES (26), (27), (28), (29): Xaa is A or G or is absent

SEQ ID NO: 35204 - protein, 41 aa, Artificial Sequence; identical to SEQ ID NO: 33048
  GFR-binding peptide
  MOD_RES (5), (6), (40): Xaa is C or S
  MOD_RES (20), (21), (22), (23), (24): Xaa is A or G
  MOD_RES (25), (26), (27), (28): Xaa is A or G or is absent

SEQ ID NO: 35205 - protein, 37 aa, Artificial Sequence; identical to SEQ ID NO: 33049
  GFR-binding peptide
  MOD_RES (4), (5), (36): Xaa is C or S

SEQ ID NO: 35206 - protein, 36 aa, Artificial Sequence; identical to SEQ ID NO: 33050
  GFR-binding peptide
  MOD_RES (1), (2), (34), (36): Xaa is C or S

SEQ ID NO: 35207 - protein, 37 aa, Artificial Sequence; identical to SEQ ID NO: 33051
  GFR-binding peptide
  MOD_RES (5), (6), (37): Xaa is C or S

SEQ ID NO: 35208 - protein, 37 aa, Artificial Sequence; identical to SEQ ID NO: 33052
  GFR-binding peptide
  MOD_RES (3), (4): Xaa is C or S
  MOD_RES (18), (19), (20), (21), (22): Xaa is A or G
  MOD_RES (23), (24), (25), (26): Xaa is A or G or is absent

SEQ ID NO: 35209 - protein, 37 aa, Artificial Sequence; identical to SEQ ID NO: 33053
  GFR-binding peptide
  MOD_RES (2), (3), (35), (37): Xaa is C or S

SEQ ID NO: 35210 - protein, 37 aa, Artificial Sequence; identical to SEQ ID NO: 33054
  GFR-binding peptide
  MOD_RES (1), (2), (36): Xaa is C or S
  MOD_RES (16), (17), (18), (19), (20): Xaa is A or G
  MOD_RES (21), (22), (23), (24): Xaa is A or G or is absent

SEQ ID NO: 35211 - protein, 38 aa, Artificial Sequence; identical to SEQ ID NO: 33055
  GFR-binding peptide
  MOD_RES (3), (4), (37): Xaa is C or S
  MOD_RES (18), (19), (20), (21), (22): Xaa is A or G
  MOD_RES (23), (24), (25), (26): Xaa is A or G or is absent

SEQ ID NO: 35212 - protein, 32 aa, Artificial Sequence; identical to SEQ ID NO: 33056
  GFR-binding peptide
  MOD_RES (32), (32): Xaa is C or S

SEQ ID NO: 35213 - protein, 40 aa, Artificial Sequence; identical to SEQ ID NO: 33057
  GFR-binding peptide
  MOD_RES (6), (7): Xaa is C or S
  MOD_RES (21), (22), (23), (24), (25): Xaa is A or G
  MOD_RES (26), (27), (28), (29): Xaa is A or G or is absent

SEQ ID NO: 35214 - protein, 38 aa, Artificial Sequence; identical to SEQ ID NO: 33058
  GFR-binding peptide
  MOD_RES (6), (7): Xaa is C or S

SEQ ID NO: 35215 - protein, 34 aa, Artificial Sequence; identical to SEQ ID NO: 33059
  GFR-binding peptide
  MOD_RES (1), (2), (34): Xaa is C or S

SEQ ID NO: 35216 - protein, 42 aa, Artificial Sequence; identical to SEQ ID NO: 33060
  GFR-binding peptide
  MOD_RES (6), (7), (39), (41): Xaa is C or S

SEQ ID NO: 35217 - protein, 35 aa, Artificial Sequence; identical to SEQ ID NO: 33061
  GFR-binding peptide
  MOD_RES (32), (34): Xaa is C or S

SEQ ID NO: 35218 - protein, 32 aa, Artificial Sequence; identical to SEQ ID NO: 33062
  GFR-binding peptide
  MOD_RES (1), (32): Xaa is C or S

SEQ ID NO: 35219 - protein, 34 aa, Artificial Sequence; identical to SEQ ID NO: 33063
  GFR-binding peptide
  MOD_RES (3), (3): Xaa is C or S

SEQ ID NO: 35220 - protein, 37 aa, Artificial Sequence; identical to SEQ ID NO: 33064
  GFR-binding peptide
  MOD_RES (3), (4), (36): Xaa is C or S

SEQ ID NO: 35221 - protein, 37 aa, Artificial Sequence; identical to SEQ ID NO: 33065
  GFR-binding peptide
  MOD_RES (6), (7): Xaa is C or S

SEQ ID NO: 35222 - protein, 40 aa, Artificial Sequence; identical to SEQ ID NO: 33066
  GFR-binding peptide
  MOD_RES (3), (4), (38), (40): Xaa is C or S
  MOD_RES (18), (19), (20), (21), (22): Xaa is A or G
  MOD_RES (23), (24), (25), (26): Xaa is A or G or is absent

SEQ ID NO: 35223 - protein, 34 aa, Artificial Sequence; identical to SEQ ID NO: 33067
  GFR-binding peptide
  MOD_RES (1), (1): Xaa is C or S
  MOD_RES (15), (16), (17), (18), (19): Xaa is A or G
  MOD_RES (20), (21), (22), (23): Xaa is A or G or is absent

SEQ ID NO: 35224 - protein, 32 aa, Artificial Sequence; identical to SEQ ID NO: 33068
  GFR-binding peptide
  MOD_RES (1), (2): Xaa is C or S

SEQ ID NO: 35225 - protein, 36 aa, Artificial Sequence; identical to SEQ ID NO: 33069
  GFR-binding peptide
  MOD_RES (4), (5): Xaa is C or S

SEQ ID NO: 35226 - protein, 37 aa, Artificial Sequence; identical to SEQ ID NO: 33070
  GFR-binding peptide
  MOD_RES (2), (3), (37): Xaa is C or S
  MOD_RES (17), (18), (19), (20), (21): Xaa is A or G
  MOD_RES (22), (23), (24), (25): Xaa is A or G or is absent

SEQ ID NO: 35227 - protein, 44 aa, Artificial Sequence; identical to SEQ ID NO: 33071
  GFR-binding peptide
  MOD_RES (7), (41), (43): Xaa is C or S
  MOD_RES (21), (22), (23), (24), (25): Xaa is A or G
  MOD_RES (26), (27), (28), (29): Xaa is A or G or is absent

SEQ ID NO: 35228 - protein, 33 aa, Artificial Sequence; identical to SEQ ID NO: 33072
  GFR-binding peptide
  MOD_RES (2), (2): Xaa is C or S

SEQ ID NO: 35229 - protein, 36 aa, Artificial Sequence; identical to SEQ ID NO: 33073
  GFR-binding peptide
  MOD_RES (1), (2), (36): Xaa is C or S
  MOD_RES (16), (17), (18), (19), (20): Xaa is A or G
  MOD_RES (21), (22), (23), (24): Xaa is A or G or is absent

SEQ ID NO: 35230 - protein, 44 aa, Artificial Sequence; identical to SEQ ID NO: 33074
  GFR-binding peptide
  MOD_RES (6), (7), (41), (43): Xaa is C or S
  MOD_RES (21), (22), (23), (24), (25): Xaa is A or G
  MOD_RES (26), (27), (28), (29): Xaa is A or G or is absent

SEQ ID NO: 35231 - protein, 38 aa, Artificial Sequence; identical to SEQ ID NO: 33075
  GFR-binding peptide
  MOD_RES (1), (2), (36), (38): Xaa is C or S
  MOD_RES (16), (17), (18), (19), (20): Xaa is A or G
  MOD_RES (21), (22), (23), (24): Xaa is A or G or is absent

SEQ ID NO: 35232 - protein, 38 aa, Artificial Sequence; identical to SEQ ID NO: 33076
  GFR-binding peptide
  MOD_RES (6), (7): Xaa is C or S

SEQ ID NO: 35233 - protein, 36 aa, Artificial Sequence; identical to SEQ ID NO: 33077
  GFR-binding peptide
  MOD_RES (2), (3), (35): Xaa is C or S

SEQ ID NO: 35234 - protein, 38 aa, Artificial Sequence; identical to SEQ ID NO: 33078
  GFR-binding peptide
  MOD_RES (2), (3), (37): Xaa is C or S
  MOD_RES (17), (18), (19), (20), (21): Xaa is A or G
  MOD_RES (22), (23), (24), (25): Xaa is A or G or is absent

SEQ ID NO: 35235 - protein, 41 aa, Artificial Sequence; identical to SEQ ID NO: 33079
  GFR-binding peptide
  MOD_RES (6), (7), (41): Xaa is C or S
  MOD_RES (21), (22), (23), (24), (25): Xaa is A or G
  MOD_RES (26), (27), (28), (29): Xaa is A or G or is absent

SEQ ID NO: 35236 - protein, 35 aa, Artificial Sequence; identical to SEQ ID NO: 33080
  GFR-binding peptide
  MOD_RES (1), (35): Xaa is C or S
  MOD_RES (15), (16), (17), (18), (19): Xaa is A or G
  MOD_RES (20), (21), (22), (23): Xaa is A or G or is absent

SEQ ID NO: 35237 - protein, 31 aa, Artificial Sequence; identical to SEQ ID NO: 33081
  GFR-binding peptide
  MOD_RES (1), (1): Xaa is C or S

SEQ ID NO: 35238 - protein, 35 aa, Artificial Sequence; identical to SEQ ID NO: 33082
  GFR-binding peptide
  MOD_RES (4), (5): Xaa is C or S

SEQ ID NO: 35239 - protein, 43 aa, Artificial Sequence; identical to SEQ ID NO: 33083
  GFR-binding peptide
  MOD_RES (6), (7), (41), (43): Xaa is C or S
  MOD_RES (21), (22), (23), (24), (25): Xaa is A or G
  MOD_RES (26), (27), (28), (29): Xaa is A or G or is absent

SEQ ID NO: 35240 - protein, 37 aa, Artificial Sequence; identical to SEQ ID NO: 33084
  GFR-binding peptide
  MOD_RES (3), (4): Xaa is C or S
  MOD_RES (18), (19), (20), (21), (22): Xaa is A or G
  MOD_RES (23), (24), (25), (26): Xaa is A or G or is absent

SEQ ID NO: 35241 - protein, 33 aa, Artificial Sequence; identical to SEQ ID NO: 33085
  GFR-binding peptide
  MOD_RES (2), (3): Xaa is C or S

SEQ ID NO: 35242 - protein, 42 aa, Artificial Sequence; identical to SEQ ID NO: 33086
  GFR-binding peptide
  MOD_RES (5), (6), (40), (42): Xaa is C or S
  MOD_RES (20), (21), (22), (23), (24): Xaa is A or G
  MOD_RES (25), (26), (27), (28): Xaa is A or G or is absent

SEQ ID NO: 35243 - protein, 38 aa, Artificial Sequence; identical to SEQ ID NO: 33087
  GFR-binding peptide
  MOD_RES (1), (2), (37): Xaa is C or S
  MOD_RES (16), (17), (18), (19), (20): Xaa is A or G
  MOD_RES (21), (22), (23), (24): Xaa is A or G or is absent

SEQ ID NO: 35244 - protein, 35 aa, Artificial Sequence; identical to SEQ ID NO: 33088
  GFR-binding peptide
  MOD_RES (2), (3), (35): Xaa is C or S

SEQ ID NO: 35245 - protein, 39 aa, Artificial Sequence; identical to SEQ ID NO: 33089
  GFR-binding peptide
  MOD_RES (4), (5), (39): Xaa is C or S
  MOD_RES (19), (20), (21), (22), (23): Xaa is A or G
  MOD_RES (24), (25), (26), (27): Xaa is A or G or is absent

SEQ ID NO: 35246 - protein, 33 aa, Artificial Sequence; identical to SEQ ID NO: 33090
  GFR-binding peptide
  MOD_RES (1), (2): Xaa is C or S

SEQ ID NO: 35247 - protein, 34 aa, Artificial Sequence; identical to SEQ ID NO: 33091
  GFR-binding peptide
  MOD_RES (1), (2), (34): Xaa is C or S

SEQ ID NO: 35248 - protein, 39 aa, Artificial Sequence; identical to SEQ ID NO: 33092
  GFR-binding peptide
  MOD_RES (3), (4), (36), (38): Xaa is C or S

SEQ ID NO: 35249 - protein, 36 aa, Artificial Sequence; identical to SEQ ID NO: 33093
  GFR-binding peptide
  MOD_RES (2), (3), (35): Xaa is C or S

SEQ ID NO: 35250 - protein, 41 aa, Artificial Sequence; identical to SEQ ID NO: 33094
  GFR-binding peptide
  MOD_RES (5), (6), (40): Xaa is C or S
  MOD_RES (20), (21), (22), (23), (24): Xaa is A or G
  MOD_RES (25), (26), (27), (28): Xaa is A or G or is absent

SEQ ID NO: 35251 - protein, 39 aa, Artificial Sequence; identical to SEQ ID NO: 33095
  GFR-binding peptide
  MOD_RES (6), (7): Xaa is C or S
  MOD_RES (21), (22), (23), (24), (25): Xaa is A or G
  MOD_RES (26), (27), (28), (29): Xaa is A or G or is absent

SEQ ID NO: 35252 - protein, 39 aa, Artificial Sequence; identical to SEQ ID NO: 33096
  GFR-binding peptide
  MOD_RES (5), (6), (38): Xaa is C or S

SEQ ID NO: 35253 - protein, 36 aa, Artificial Sequence; identical to SEQ ID NO: 33097
  GFR-binding peptide
  MOD_RES (1), (2), (36): Xaa is C or S
  MOD_RES (16), (17), (18), (19), (20): Xaa is A or G
  MOD_RES (21), (22), (23), (24): Xaa is A or G or is absent

SEQ ID NO: 35254 - protein, 37 aa, Artificial Sequence; identical to SEQ ID NO: 33098
  GFR-binding peptide
  MOD_RES (3), (4), (36): Xaa is C or S

SEQ ID NO: 35255 - protein, 36 aa, Artificial Sequence; identical to SEQ ID NO: 33099
  GFR-binding peptide
  MOD_RES (1), (35): Xaa is C or S
  MOD_RES (15), (16), (17), (18), (19): Xaa is A or G
  MOD_RES (20), (21), (22), (23): Xaa is A or G or is absent

SEQ ID NO: 35256 - protein, 36 aa, Artificial Sequence; identical to SEQ ID NO: 33100
  GFR-binding peptide
  MOD_RES (1), (2), (34), (36): Xaa is C or S

SEQ ID NO: 35257 - protein, 37 aa, Artificial Sequence; identical to SEQ ID NO: 33101
  GFR-binding peptide
  MOD_RES (3), (4): Xaa is C or S
  MOD_RES (18), (19), (20), (21), (22): Xaa is A or G
  MOD_RES (23), (24), (25), (26): Xaa is A or G or is absent

SEQ ID NO: 35258 - protein, 36 aa, Artificial Sequence; identical to SEQ ID NO: 33102
  GFR-binding peptide
  MOD_RES (1), (33), (35): Xaa is C or S

SEQ ID NO: 35259 - protein, 37 aa, Artificial Sequence; identical to SEQ ID NO: 33103
  GFR-binding peptide
  MOD_RES (5), (6): Xaa is C or S

SEQ ID NO: 35260 - protein, 37 aa, Artificial Sequence; identical to SEQ ID NO: 33104
  GFR-binding peptide
  MOD_RES (3), (4), (36): Xaa is C or S

SEQ ID NO: 35261 - protein, 41 aa, Artificial Sequence; identical to SEQ ID NO: 33105
  GFR-binding peptide
  MOD_RES (7), (41): Xaa is C or S
  MOD_RES (21), (22), (23), (24), (25): Xaa is A or G
  MOD_RES (26), (27), (28), (29): Xaa is A or G or is absent

SEQ ID NO: 35262 - protein, 39 aa, Artificial Sequence; identical to SEQ ID NO: 33106
  GFR-binding peptide
  MOD_RES (3), (4), (36), (38): Xaa is C or S

SEQ ID NO: 35263 - protein, 39 aa, Artificial Sequence; identical to SEQ ID NO: 33107
  GFR-binding peptide
  MOD_RES (6), (7), (39): Xaa is C or S

SEQ ID NO: 35264 - protein, 42 aa, Artificial Sequence; identical to SEQ ID NO: 33108
  GFR-binding peptide
  MOD_RES (6), (7), (40), (42): Xaa is C or S

SEQ ID NO: 35265 - protein, 39 aa, Artificial Sequence; identical to SEQ ID NO: 33109
  GFR-binding peptide
  MOD_RES (4), (5), (37), (39): Xaa is C or S

SEQ ID NO: 35266 - protein, 35 aa, Artificial Sequence; identical to SEQ ID NO: 33110
  GFR-binding peptide
  MOD_RES (1), (2): Xaa is C or S
  MOD_RES (16), (17), (18), (19), (20): Xaa is A or G
  MOD_RES (21), (22), (23), (24): Xaa is A or G or is absent

SEQ ID NO: 35267 - protein, 40 aa, Artificial Sequence; identical to SEQ ID NO: 33111
  GFR-binding peptide
  MOD_RES (6), (7), (39): Xaa is C or S

SEQ ID NO: 35268 - protein, 38 aa, Artificial Sequence; identical to SEQ ID NO: 33112
  GFR-binding peptide
  MOD_RES (3), (4), (38): Xaa is C or S
  MOD_RES (18), (19), (20), (21), (22): Xaa is A or G
  MOD_RES (23), (24), (25), (26): Xaa is A or G or is absent

SEQ ID NO: 35269 - protein, 43 aa, Artificial Sequence; identical to SEQ ID NO: 33113
  GFR-binding peptide
  MOD_RES (5), (6), (40), (42): Xaa is C or S
  MOD_RES (20), (21), (22), (23), (24): Xaa is A or G
  MOD_RES (25), (26), (27), (28): Xaa is A or G or is absent

SEQ ID NO: 35270 - protein, 41 aa, Artificial Sequence; identical to SEQ ID NO: 33114
  GFR-binding peptide
  MOD_RES (6), (7), (41): Xaa is C or S
  MOD_RES (21), (22), (23), (24), (25): Xaa is A or G
  MOD_RES (26), (27), (28), (29): Xaa is A or G or is absent

SEQ ID NO: 35271 - protein, 39 aa, Artificial Sequence; identical to SEQ ID NO: 33115
  GFR-binding peptide
  MOD_RES (5), (6), (38): Xaa is C or S

SEQ ID NO: 35272 - protein, 37 aa, Artificial Sequence; identical to SEQ ID NO: 33116
  GFR-binding peptide
  MOD_RES (1), (2), (36): Xaa is C or S
  MOD_RES (16), (17), (18), (19), (20): Xaa is A or G
  MOD_RES (21), (22), (23), (24): Xaa is A or G or is absent

SEQ ID NO: 35273 - protein, 34 aa, Artificial Sequence; identical to SEQ ID NO: 33117
  GFR-binding peptide
  MOD_RES (1), (34): Xaa is C or S
  MOD_RES (15), (16), (17), (18), (19): Xaa is A or G
  MOD_RES (20), (21), (22), (23): Xaa is A or G or is absent

SEQ ID NO: 35274 - protein, 37 aa, Artificial Sequence; identical to SEQ ID NO: 33118
  GFR-binding peptide
  MOD_RES (4), (5), (37): Xaa is C or S

SEQ ID NO: 35275 - protein, 34 aa, Artificial Sequence; identical to SEQ ID NO: 33119
  GFR-binding peptide
  MOD_RES (1), (2), (34): Xaa is C or S

SEQ ID NO: 35276 - protein, 38 aa, Artificial Sequence; identical to SEQ ID NO: 33120
  GFR-binding peptide
  MOD_RES (3), (4), (37): Xaa is C or S

SEQ ID NO: 35277 - protein, 40 aa, Artificial Sequence; identical to SEQ ID NO: 33121
  GFR-binding peptide
  MOD_RES (5), (6), (40): Xaa is C or S
  MOD_RES (20), (21), (22), (23), (24): Xaa is A or G
  MOD_RES (25), (26), (27), (28): Xaa is A or G or is absent

SEQ ID NO: 35278 - protein, 39 aa, Artificial Sequence; identical to SEQ ID NO: 33122
  GFR-binding peptide
  MOD_RES (7), (7): Xaa is C or S
  MOD_RES (21), (22), (23), (24), (25): Xaa is A or G
  MOD_RES (26), (27), (28), (29): Xaa is A or G or is absent

SEQ ID NO: 35279 - protein, 39 aa, Artificial Sequence; identical to SEQ ID NO: 33123
  GFR-binding peptide
  MOD_RES (4), (5), (39): Xaa is C or S
  MOD_RES (19), (20), (21), (22), (23): Xaa is A or G
  MOD_RES (24), (25), (26), (27): Xaa is A or G or is absent

SEQ ID NO: 35280 - protein, 36 aa, Artificial Sequence; identical to SEQ ID NO: 33124
  GFR-binding peptide
  MOD_RES (1), (2), (36): Xaa is C or S
  MOD_RES (16), (17), (18), (19), (20): Xaa is A or G
  MOD_RES (21), (22), (23), (24): Xaa is A or G or is absent

SEQ ID NO: 35281 - protein, 38 aa, Artificial Sequence; identical to SEQ ID NO: 33125
  GFR-binding peptide
  MOD_RES (3), (4), (36), (38): Xaa is C or S

SEQ ID NO: 35282 - protein, 37 aa, Artificial Sequence; identical to SEQ ID NO: 33126
  GFR-binding peptide
  MOD_RES (1), (2), (36): Xaa is C or S
  MOD_RES (16), (17), (18), (19), (20): Xaa is A or G
  MOD_RES (21), (22), (23), (24): Xaa is A or G or is absent

SEQ ID NO: 35283 - protein, 38 aa, Artificial Sequence; identical to SEQ ID NO: 33127
  GFR-binding peptide
  MOD_RES (5), (5): Xaa is C or S
  MOD_RES (19), (20), (21), (22), (23): Xaa is A or G
  MOD_RES (24), (25), (26), (27): Xaa is A or G or is absent

SEQ ID NO: 35284 - protein, 43 aa, Artificial Sequence; identical to SEQ ID NO: 33128
  GFR-binding peptide
  MOD_RES (5), (6), (40), (42): Xaa is C or S
  MOD_RES (20), (21), (22), (23), (24): Xaa is A or G
  MOD_RES (25), (26), (27), (28): Xaa is A or G or is absent

SEQ ID NO: 35285 - protein, 31 aa, Artificial Sequence; identical to SEQ ID NO: 33129
  GFR-binding peptide

SEQ ID NO: 35286 - protein, 38 aa, Artificial Sequence; identical to SEQ ID NO: 33130
  GFR-binding peptide
  MOD_RES (3), (4), (38): Xaa is C or S
  MOD_RES (18), (19), (20), (21), (22): Xaa is A or G
  MOD_RES (23), (24), (25), (26): Xaa is A or G or is absent

SEQ ID NO: 35287 - protein, 33 aa, Artificial Sequence; identical to SEQ ID NO: 33131
  GFR-binding peptide
  MOD_RES (1), (1): Xaa is C or S
  MOD_RES (15), (16), (17), (18), (19): Xaa is A or G
  MOD_RES (20), (21), (22), (23): Xaa is A or G or is absent

SEQ ID NO: 35288 - protein, 37 aa, Artificial Sequence; identical to SEQ ID NO: 33132
  GFR-binding peptide
  MOD_RES (3), (4): Xaa is C or S
  MOD_RES (18), (19), (20), (21), (22): Xaa is A or G
  MOD_RES (23), (24), (25), (26): Xaa is A or G or is absent

SEQ ID NO: 35289 - protein, 37 aa, Artificial Sequence; identical to SEQ ID NO: 33133
  GFR-binding peptide
  MOD_RES (2), (3), (37): Xaa is C or S
  MOD_RES (17), (18), (19), (20), (21): Xaa is A or G
  MOD_RES (22), (23), (24), (25): Xaa is A or G or is absent

SEQ ID NO: 35290 - protein, 33 aa, Artificial Sequence; identical to SEQ ID NO: 33134
  GFR-binding peptide
  MOD_RES (1), (33): Xaa is C or S

SEQ ID NO: 35291 - protein, 35 aa, Artificial Sequence; identical to SEQ ID NO: 33135
  GFR-binding peptide
  MOD_RES (4), (4): Xaa is C or S

SEQ ID NO: 35292 - protein, 40 aa, Artificial Sequence; identical to SEQ ID NO: 33136
  GFR-binding peptide
  MOD_RES (4), (5), (37), (39): Xaa is C or S

SEQ ID NO: 35293 - protein, 42 aa, Artificial Sequence; identical to SEQ ID NO: 33137
  GFR-binding peptide
  MOD_RES (6), (7), (40), (42): Xaa is C or S
  MOD_RES (21), (22), (23), (24), (25): Xaa is A or G
  MOD_RES (26), (27), (28), (29): Xaa is A or G or is absent

SEQ ID NO: 35294 - protein, 41 aa, Artificial Sequence; identical to SEQ ID NO: 33138
  GFR-binding peptide
  MOD_RES (4), (5), (39), (41): Xaa is C or S
  MOD_RES (19), (20), (21), (22), (23): Xaa is A or G
  MOD_RES (24), (25), (26), (27): Xaa is A or G or is absent

SEQ ID NO: 35295 - protein, 40 aa, Artificial Sequence; identical to SEQ ID NO: 33139
  GFR-binding peptide
  MOD_RES (5), (6): Xaa is C or S
  MOD_RES (20), (21), (22), (23), (24): Xaa is A or G
  MOD_RES (25), (26), (27), (28): Xaa is A or G or is absent

SEQ ID NO: 35296 - protein, 37 aa, Artificial Sequence; identical to SEQ ID NO: 33140
  GFR-binding peptide
  MOD_RES (4), (5): Xaa is C or S
  MOD_RES (19), (20), (21), (22), (23): Xaa is A or G
  MOD_RES (24), (25), (26), (27): Xaa is A or G or is absent

SEQ ID NO: 35297 - protein, 35 aa, Artificial Sequence; identical to SEQ ID NO: 33141
  GFR-binding peptide
  MOD_RES (1), (35): Xaa is C or S
  MOD_RES (15), (16), (17), (18), (19): Xaa is A or G
  MOD_RES (20), (21), (22), (23): Xaa is A or G or is absent

SEQ ID NO: 35298 - protein, 36 aa, Artificial Sequence; identical to SEQ ID NO: 33142
  GFR-binding peptide
  MOD_RES (4), (5): Xaa is C or S

SEQ ID NO: 35299 - protein, 41 aa, Artificial Sequence; identical to SEQ ID NO: 33143
  GFR-binding peptide
  MOD_RES (2), (3), (38), (40): Xaa is C or S
  MOD_RES (17), (18), (19), (20), (21): Xaa is A or G
  MOD_RES (22), (23), (24), (25): Xaa is A or G or is absent

SEQ ID NO: 35300 - protein, 44 aa, Artificial Sequence; identical to SEQ ID NO: 33144
  GFR-binding peptide
  MOD_RES (6), (7), (41), (43): Xaa is C or S
  MOD_RES (21), (22), (23), (24), (25): Xaa is A or G
  MOD_RES (26), (27), (28), (29): Xaa is A or G or is absent

SEQ ID NO: 35301 - protein, 41 aa, Artificial Sequence; identical to SEQ ID NO: 33145
  GFR-binding peptide
  MOD_RES (4), (5), (39), (41): Xaa is C or S
  MOD_RES (19), (20), (21), (22), (23): Xaa is A or G
  MOD_RES (24), (25), (26), (27): Xaa is A or G or is absent

SEQ ID NO: 35302 - protein, 39 aa, Artificial Sequence; identical to SEQ ID NO: 33146
  GFR-binding peptide
  MOD_RES (2), (3), (37), (39): Xaa is C or S
  MOD_RES (17), (18), (19), (20), (21): Xaa is A or G
  MOD_RES (22), (23), (24), (25): Xaa is A or G or is absent

SEQ ID NO: 35303 - protein, 42 aa, Artificial Sequence; identical to SEQ ID NO: 33147
  GFR-binding peptide
  MOD_RES (6), (7), (39), (41): Xaa is C or S

SEQ ID NO: 35304 - protein, 42 aa, Artificial Sequence; identical to SEQ ID NO: 33148
  GFR-binding peptide
  MOD_RES (7), (41): Xaa is C or S
  MOD_RES (21), (22), (23), (24), (25): Xaa is A or G
  MOD_RES (26), (27), (28), (29): Xaa is A or G or is absent

SEQ ID NO: 35305 - protein, 35 aa, Artificial Sequence; identical to SEQ ID NO: 33149
  GFR-binding peptide
  MOD_RES (1), (33), (35): Xaa is C or S

SEQ ID NO: 35306 - protein, 36 aa, Artificial Sequence; identical to SEQ ID NO: 33150
  GFR-binding peptide
  MOD_RES (1), (2), (35): Xaa is C or S

SEQ ID NO: 35307 - protein, 36 aa, Artificial Sequence; identical to SEQ ID NO: 33151
  GFR-binding peptide
  MOD_RES (2), (3), (36): Xaa is C or S
  MOD_RES (17), (18), (19), (20), (21): Xaa is A or G
  MOD_RES (22), (23), (24), (25): Xaa is A or G or is absent

SEQ ID NO: 35308 - protein, 36 aa, Artificial Sequence; identical to SEQ ID NO: 33152
  GFR-binding peptide
  MOD_RES (1), (35): Xaa is C or S
  MOD_RES (15), (16), (17), (18), (19): Xaa is A or G
  MOD_RES (20), (21), (22), (23): Xaa is A or G or is absent

SEQ ID NO: 35309 - protein, 40 aa, Artificial Sequence; identical to SEQ ID NO: 33153
  GFR-binding peptide
  MOD_RES (2), (3), (37), (39): Xaa is C or S
  MOD_RES (17), (18), (19), (20), (21): Xaa is A or G
  MOD_RES (22), (23), (24), (25): Xaa is A or G or is absent

SEQ ID NO: 35310 - protein, 35 aa, Artificial Sequence; identical to SEQ ID NO: 33154
  GFR-binding peptide
  MOD_RES (2), (3): Xaa is C or S
  MOD_RES (17), (18), (19), (20), (21): Xaa is A or G
  MOD_RES (22), (23), (24), (25): Xaa is A or G or is absent

SEQ ID NO: 35311 - protein, 40 aa, Artificial Sequence; identical to SEQ ID NO: 33155
  GFR-binding peptide
  MOD_RES (4), (5), (39): Xaa is C or S
  MOD_RES (19), (20), (21), (22), (23): Xaa is A or G
  MOD_RES (24), (25), (26), (27): Xaa is A or G or is absent

SEQ ID NO: 35312 - protein, 39 aa, Artificial Sequence; identical to SEQ ID NO: 33156
  GFR-binding peptide
  MOD_RES (3), (4), (38): Xaa is C or S
  MOD_RES (18), (19), (20), (21), (22): Xaa is A or G
  MOD_RES (23), (24), (25), (26): Xaa is A or G or is absent

SEQ ID NO: 35313 - protein, 37 aa, Artificial Sequence; identical to SEQ ID NO: 33157
  GFR-binding peptide
  MOD_RES (4), (5), (37): Xaa is C or S

SEQ ID NO: 35314 - protein, 37 aa, Artificial Sequence; identical to SEQ ID NO: 33158
  GFR-binding peptide
  MOD_RES (4), (5), (37): Xaa is C or S

SEQ ID NO: 35315 - protein, 34 aa, Artificial Sequence; identical to SEQ ID NO: 33159
  GFR-binding peptide
  MOD_RES (34), (34): Xaa is C or S
  MOD_RES (14), (15), (16), (17), (18): Xaa is A or G
  MOD_RES (19), (20), (21), (22): Xaa is A or G or is absent

SEQ ID NO: 35316 - protein, 40 aa, Artificial Sequence; identical to SEQ ID NO: 33160
  GFR-binding peptide
  MOD_RES (6), (7): Xaa is C or S
  MOD_RES (21), (22), (23), (24), (25): Xaa is A or G
  MOD_RES (26), (27), (28), (29): Xaa is A or G or is absent

SEQ ID NO: 35317 - protein, 32 aa, Artificial Sequence; identical to SEQ ID NO: 33161
  GFR-binding peptide
  MOD_RES (32), (32): Xaa is C or S

SEQ ID NO: 35318 - protein, 33 aa, Artificial Sequence; identical to SEQ ID NO: 33162
  GFR-binding peptide
  MOD_RES (32), (32): Xaa is C or S

SEQ ID NO: 35319 - protein, 40 aa, Artificial Sequence; identical to SEQ ID NO: 33163
  GFR-binding peptide
  MOD_RES (6), (40): Xaa is C or S
  MOD_RES (20), (21), (22), (23), (24): Xaa is A or G
  MOD_RES (25), (26), (27), (28): Xaa is A or G or is absent

SEQ ID NO: 35320 - protein, 37 aa, Artificial Sequence; identical to SEQ ID NO: 33164
  GFR-binding peptide
  MOD_RES (34), (36): Xaa is C or S
  MOD_RES (14), (15), (16), (17), (18): Xaa is A or G
  MOD_RES (19), (20), (21), (22): Xaa is A or G or is absent

SEQ ID NO: 35321 - protein, 42 aa, Artificial Sequence; identical to SEQ ID NO: 33165
  GFR-binding peptide
  MOD_RES (6), (7), (41): Xaa is C or S
  MOD_RES (21), (22), (23), (24), (25): Xaa is A or G
  MOD_RES (26), (27), (28), (29): Xaa is A or G or is absent

SEQ ID NO: 35322 - protein, 31 aa, Artificial Sequence; identical to SEQ ID NO: 33166
  GFR-binding peptide
  MOD_RES (1), (1): Xaa is C or S

SEQ ID NO: 35323 - protein, 39 aa, Artificial Sequence; identical to SEQ ID NO: 33167
  GFR-binding peptide
  MOD_RES (1), (2), (36), (38): Xaa is C or S
  MOD_RES (16), (17), (18), (19), (20): Xaa is A or G
  MOD_RES (21), (22), (23), (24): Xaa is A or G or is absent

SEQ ID NO: 35324 - protein, 44 aa, Artificial Sequence; identical to SEQ ID NO: 33168
  GFR-binding peptide
  MOD_RES (6), (7), (41), (43): Xaa is C or S
  MOD_RES (21), (22), (23), (24), (25): Xaa is A or G
  MOD_RES (26), (27), (28), (29): Xaa is A or G or is absent

SEQ ID NO: 35325 - protein, 36 aa, Artificial Sequence; identical to SEQ ID NO: 33169
  GFR-binding peptide
  MOD_RES (2), (36): Xaa is C or S
  MOD_RES (16), (17), (18), (19), (20): Xaa is A or G
  MOD_RES (21), (22), (23), (24): Xaa is A or G or is absent

SEQ ID NO: 35326 - protein, 37 aa, Artificial Sequence; identical to SEQ ID NO: 33170
  GFR-binding peptide
  MOD_RES (34), (36): Xaa is C or S
  MOD_RES (14), (15), (16), (17), (18): Xaa is A or G
  MOD_RES (19), (20), (21), (22): Xaa is A or G or is absent

SEQ ID NO: 35327 - protein, 39 aa, Artificial Sequence; identical to SEQ ID NO: 33171
  GFR-binding peptide
  MOD_RES (5), (6), (38): Xaa is C or S

SEQ ID NO: 35328 - protein, 37 aa, Artificial Sequence; identical to SEQ ID NO: 33172
  GFR-binding peptide
  MOD_RES (1), (35), (37): Xaa is C or S
  MOD_RES (15), (16), (17), (18), (19): Xaa is A or G
  MOD_RES (20), (21), (22), (23): Xaa is A or G or is absent

SEQ ID NO: 35329 - protein, 44 aa, Artificial Sequence; identical to SEQ ID NO: 33173
  GFR-binding peptide
  MOD_RES (6), (7), (41), (43): Xaa is C or S
  MOD_RES (21), (22), (23), (24), (25): Xaa is A or G
  MOD_RES (26), (27), (28), (29): Xaa is A or G or is absent

SEQ ID NO: 35330 - protein, 33 aa, Artificial Sequence; identical to SEQ ID NO: 33174
  GFR-binding peptide
  MOD_RES (32), (32): Xaa is C or S

SEQ ID NO: 35331 - protein, 37 aa, Artificial Sequence; identical to SEQ ID NO: 33175
  GFR-binding peptide
  MOD_RES (35), (37): Xaa is C or S
  MOD_RES (14), (15), (16), (17), (18): Xaa is A or G
  MOD_RES (19), (20), (21), (22): Xaa is A or G or is absent

SEQ ID NO: 35332 - protein, 37 aa, Artificial Sequence; identical to SEQ ID NO: 33176
  GFR-binding peptide
  MOD_RES (4), (5): Xaa is C or S
  MOD_RES (19), (20), (21), (22), (23): Xaa is A or G
  MOD_RES (24), (25), (26), (27): Xaa is A or G or is absent

SEQ ID NO: 35333 - protein, 40 aa, Artificial Sequence; identical to SEQ ID NO: 33177
  GFR-binding peptide
  MOD_RES (6), (7): Xaa is C or S
  MOD_RES (21), (22), (23), (24), (25): Xaa is A or G
  MOD_RES (26), (27), (28), (29): Xaa is A or G or is absent

SEQ ID NO: 35334 - protein, 38 aa, Artificial Sequence; identical to SEQ ID NO: 33178
  GFR-binding peptide
  MOD_RES (2), (36), (38): Xaa is C or S
  MOD_RES (16), (17), (18), (19), (20): Xaa is A or G
  MOD_RES (21), (22), (23), (24): Xaa is A or G or is absent

SEQ ID NO: 35335 - protein, 35 aa, Artificial Sequence; identical to SEQ ID NO: 33179
  GFR-binding peptide
  MOD_RES (3), (4): Xaa is C or S

SEQ ID NO: 35336 - protein, 38 aa, Artificial Sequence; identical to SEQ ID NO: 33180
  GFR-binding peptide
  MOD_RES (4), (36), (38): Xaa is C or S

SEQ ID NO: 35337 - protein, 33 aa, Artificial Sequence; identical to SEQ ID NO: 33181
  GFR-binding peptide
  MOD_RES (1), (2): Xaa is C or S

SEQ ID NO: 35338 - protein, 38 aa, Artificial Sequence; identical to SEQ ID NO: 33182
  GFR-binding peptide
  MOD_RES (6), (7): Xaa is C or S

SEQ ID NO: 35339 - protein, 40 aa, Artificial Sequence; identical to SEQ ID NO: 33183
  GFR-binding peptide
  MOD_RES (5), (6), (40): Xaa is C or S
  MOD_RES (20), (21), (22), (23), (24): Xaa is A or G
  MOD_RES (25), (26), (27), (28): Xaa is A or G or is absent

SEQ ID NO: 35340 - protein, 39 aa, Artificial Sequence; identical to SEQ ID NO: 33184
  GFR-binding peptide
  MOD_RES (4), (5), (37), (39): Xaa is C or S

SEQ ID NO: 35341 - protein, 31 aa, Artificial Sequence; identical to SEQ ID NO: 33185
  GFR-binding peptide
  MOD_RES (1), (1): Xaa is C or S

SEQ ID NO: 35342 - protein, 39 aa, Artificial Sequence; identical to SEQ ID NO: 33186
  GFR-binding peptide
  MOD_RES (2), (3), (36), (38): Xaa is C or S
  MOD_RES (17), (18), (19), (20), (21): Xaa is A or G
  MOD_RES (22), (23), (24), (25): Xaa is A or G or is absent

SEQ ID NO: 35343 - protein, 38 aa, Artificial Sequence; identical to SEQ ID NO: 33187
  GFR-binding peptide
  MOD_RES (4), (5): Xaa is C or S
  MOD_RES (19), (20), (21), (22), (23): Xaa is A or G
  MOD_RES (24), (25), (26), (27): Xaa is A or G or is absent

SEQ ID NO: 35344 - protein, 38 aa, Artificial Sequence; identical to SEQ ID NO: 33188
  GFR-binding peptide
  MOD_RES (5), (6), (38): Xaa is C or S

SEQ ID NO: 35345 - protein, 34 aa, Artificial Sequence; identical to SEQ ID NO: 33189
  GFR-binding peptide
  MOD_RES (34), (34): Xaa is C or S
  MOD_RES (14), (15), (16), (17), (18): Xaa is A or G
  MOD_RES (19), (20), (21), (22): Xaa is A or G or is absent

SEQ ID NO: 35346 - protein, 38 aa, Artificial Sequence; identical to SEQ ID NO: 33190
  GFR-binding peptide
  MOD_RES (5), (6): Xaa is C or S
  MOD_RES (20), (21), (22), (23), (24): Xaa is A or G
  MOD_RES (25), (26), (27), (28): Xaa is A or G or is absent

SEQ ID NO: 35347 - protein, 38 aa, Artificial Sequence; identical to SEQ ID NO: 33191
  GFR-binding peptide
  MOD_RES (1), (2), (35), (37): Xaa is C or S

SEQ ID NO: 35348 - protein, 37 aa, Artificial Sequence; identical to SEQ ID NO: 33192
  GFR-binding peptide
  MOD_RES (3), (4), (36): Xaa is C or S

SEQ ID NO: 35349 - protein, 40 aa, Artificial Sequence; identical to SEQ ID NO: 33193
  GFR-binding peptide
  MOD_RES (4), (5), (39): Xaa is C or S
  MOD_RES (19), (20), (21), (22), (23): Xaa is A or G
  MOD_RES (24), (25), (26), (27): Xaa is A or G or is absent

SEQ ID NO: 35350 - protein, 30 aa, Artificial Sequence; identical to SEQ ID NO: 33194
  GFR-binding peptide

SEQ ID NO: 35351 - protein, 41 aa, Artificial Sequence; identical to SEQ ID NO: 33195
  GFR-binding peptide
  MOD_RES (5), (6), (39), (41): Xaa is C or S
  MOD_RES (20), (21), (22), (23), (24): Xaa is A or G
  MOD_RES (25), (26), (27), (28): Xaa is A or G or is absent

SEQ ID NO: 35352 - protein, 31 aa, Artificial Sequence; identical to SEQ ID NO: 33196
  GFR-binding peptide
  MOD_RES (1), (1): Xaa is C or S

SEQ ID NO: 35353 - protein, 35 aa, Artificial Sequence; identical to SEQ ID NO: 33197
  GFR-binding peptide
  MOD_RES (2), (3): Xaa is C or S
  MOD_RES (17), (18), (19), (20), (21): Xaa is A or G
  MOD_RES (22), (23), (24), (25): Xaa is A or G or is absent

SEQ ID NO: 35354 - protein, 38 aa, Artificial Sequence; identical to SEQ ID NO: 33198
  GFR-binding peptide
  MOD_RES (1), (2), (36), (38): Xaa is C or S
  MOD_RES (16), (17), (18), (19), (20): Xaa is A or G
  MOD_RES (21), (22), (23), (24): Xaa is A or G or is absent

SEQ ID NO: 35355 - protein, 39 aa, Artificial Sequence; identical to SEQ ID NO: 33199
  GFR-binding peptide
  MOD_RES (6), (7), (38): Xaa is C or S

SEQ ID NO: 35356 - protein, 35 aa, Artificial Sequence; identical to SEQ ID NO: 33200
  GFR-binding peptide
  MOD_RES (1), (33), (35): Xaa is C or S

SEQ ID NO: 35357 - protein, 37 aa, Artificial Sequence; identical to SEQ ID NO: 33201
  GFR-binding peptide
  MOD_RES (2), (3), (37): Xaa is C or S
  MOD_RES (17), (18), (19), (20), (21): Xaa is A or G
  MOD_RES (22), (23), (24), (25): Xaa is A or G or is absent

SEQ ID NO: 35358 - protein, 33 aa, Artificial Sequence; identical to SEQ ID NO: 33202
  GFR-binding peptide
  MOD_RES (1), (1): Xaa is C or S
  MOD_RES (15), (16), (17), (18), (19): Xaa is A or G
  MOD_RES (20), (21), (22), (23): Xaa is A or G or is absent

SEQ ID NO: 35359 - protein, 34 aa, Artificial Sequence; identical to SEQ ID NO: 33203
  GFR-binding peptide
  MOD_RES (3), (4): Xaa is C or S

SEQ ID NO: 35360 - protein, 34 aa, Artificial Sequence; identical to SEQ ID NO: 33204
  GFR-binding peptide
  MOD_RES (4), (4): Xaa is C or S

SEQ ID NO: 35361 - protein, 40 aa, Artificial Sequence; identical to SEQ ID NO: 33205
  GFR-binding peptide
  MOD_RES (6), (7): Xaa is C or S
  MOD_RES (21), (22), (23), (24), (25): Xaa is A or G
  MOD_RES (26), (27), (28), (29): Xaa is A or G or is absent

SEQ ID NO: 35362 - protein, 38 aa, Artificial Sequence; identical to SEQ ID NO: 33206
  GFR-binding peptide
  MOD_RES (1), (35), (37): Xaa is C or S
  MOD_RES (15), (16), (17), (18), (19): Xaa is A or G
  MOD_RES (20), (21), (22), (23): Xaa is A or G or is absent

SEQ ID NO: 35363 - protein, 35 aa, Artificial Sequence; identical to SEQ ID NO: 33207
  GFR-binding peptide
  MOD_RES (2), (2): Xaa is C or S
  MOD_RES (16), (17), (18), (19), (20): Xaa is A or G
  MOD_RES (21), (22), (23), (24): Xaa is A or G or is absent

SEQ ID NO: 35364 - protein, 36 aa, Artificial Sequence; identical to SEQ ID NO: 33208
  GFR-binding peptide
  MOD_RES (3), (4), (36): Xaa is C or S

SEQ ID NO: 35365 - protein, 35 aa, Artificial Sequence; identical to SEQ ID NO: 33209
  GFR-binding peptide
  MOD_RES (2), (3): Xaa is C or S
  MOD_RES (17), (18), (19), (20), (21): Xaa is A or G
  MOD_RES (22), (23), (24), (25): Xaa is A or G or is absent

SEQ ID NO: 35366 - protein, 32 aa, Artificial Sequence; identical to SEQ ID NO: 33210
  GFR-binding peptide
  MOD_RES (14), (15), (16), (17), (18): Xaa is A or G
  MOD_RES (19), (20), (21), (22): Xaa is A or G or is absent

SEQ ID NO: 35367 - protein, 36 aa, Artificial Sequence; identical to SEQ ID NO: 33211
  GFR-binding peptide
  MOD_RES (4), (5): Xaa is C or S

SEQ ID NO: 35368 - protein, 36 aa, Artificial Sequence; identical to SEQ ID NO: 33212
  GFR-binding peptide
  MOD_RES (3), (4), (36): Xaa is C or S

SEQ ID NO: 35369 - protein, 36 aa, Artificial Sequence; identical to SEQ ID NO: 33213
  GFR-binding peptide
  MOD_RES (2), (3): Xaa is C or S
  MOD_RES (17), (18), (19), (20), (21): Xaa is A or G
  MOD_RES (22), (23), (24), (25): Xaa is A or G or is absent

SEQ ID NO: 35370 - protein, 40 aa, Artificial Sequence; identical to SEQ ID NO: 33214
  GFR-binding peptide
  MOD_RES (6), (7): Xaa is C or S
  MOD_RES (21), (22), (23), (24), (25): Xaa is A or G
  MOD_RES (26), (27), (28), (29): Xaa is A or G or is absent

SEQ ID NO: 35371 - protein, 37 aa, Artificial Sequence; identical to SEQ ID NO: 33215
  GFR-binding peptide
  MOD_RES (7), (7): Xaa is C or S

SEQ ID NO: 35372 - protein, 38 aa, Artificial Sequence; identical to SEQ ID NO: 33216
  GFR-binding peptide
  MOD_RES (5), (6), (38): Xaa is C or S

SEQ ID NO: 35373 - protein, 41 aa, Artificial Sequence; identical to SEQ ID NO: 33217
  GFR-binding peptide
  MOD_RES (6), (7), (41): Xaa is C or S
  MOD_RES (21), (22), (23), (24), (25): Xaa is A or G
  MOD_RES (26), (27), (28), (29): Xaa is A or G or is absent

SEQ ID NO: 35374 - protein, 42 aa, Artificial Sequence; identical to SEQ ID NO: 33218
  GFR-binding peptide
  MOD_RES (5), (6), (40), (42): Xaa is C or S
  MOD_RES (20), (21), (22), (23), (24): Xaa is A or G
  MOD_RES (25), (26), (27), (28): Xaa is A or G or is absent

SEQ ID NO: 35375 - protein, 34 aa, Artificial Sequence; identical to SEQ ID NO: 33219
  GFR-binding peptide
  MOD_RES (1), (2): Xaa is C or S
  MOD_RES (16), (17), (18), (19), (20): Xaa is A or G
  MOD_RES (21), (22), (23), (24): Xaa is A or G or is absent

SEQ ID NO: 35376 - protein, 39 aa, Artificial Sequence; identical to SEQ ID NO: 33220
  GFR-binding peptide
  MOD_RES (6), (7): Xaa is C or S
  MOD_RES (21), (22), (23), (24), (25): Xaa is A or G
  MOD_RES (26), (27), (28), (29): Xaa is A or G or is absent

SEQ ID NO: 35377 - protein, 38 aa, Artificial Sequence; identical to SEQ ID NO: 33221
  GFR-binding peptide
  MOD_RES (2), (3), (35), (37): Xaa is C or S

SEQ ID NO: 35378 - protein, 41 aa, Artificial Sequence; identical to SEQ ID NO: 33222
  GFR-binding peptide
  MOD_RES (4), (5), (40): Xaa is C or S
  MOD_RES (19), (20), (21), (22), (23): Xaa is A or G
  MOD_RES (24), (25), (26), (27): Xaa is A or G or is absent

SEQ ID NO: 35379 - protein, 41 aa, Artificial Sequence; identical to SEQ ID NO: 33223
  GFR-binding peptide
  MOD_RES (5), (6), (38), (40): Xaa is C or S

SEQ ID NO: 35380 - protein, 39 aa, Artificial Sequence; identical to SEQ ID NO: 33224
  GFR-binding peptide
  MOD_RES (4), (5), (39): Xaa is C or S
  MOD_RES (19), (20), (21), (22), (23): Xaa is A or G
  MOD_RES (24), (25), (26), (27): Xaa is A or G or is absent

SEQ ID NO: 35381 - protein, 41 aa, Artificial Sequence; identical to SEQ ID NO: 33225
  GFR-binding peptide
  MOD_RES (6), (7), (41): Xaa is C or S
  MOD_RES (21), (22), (23), (24), (25): Xaa is A or G
  MOD_RES (26), (27), (28), (29): Xaa is A or G or is absent

SEQ ID NO: 35382 - protein, 35 aa, Artificial Sequence; identical to SEQ ID NO: 33226
  GFR-binding peptide
  MOD_RES (1), (2), (34): Xaa is C or S

SEQ ID NO: 35383 - protein, 33 aa, Artificial Sequence; identical to SEQ ID NO: 33227
  GFR-binding peptide
  MOD_RES (33), (33): Xaa is C or S

SEQ ID NO: 35384 - protein, 40 aa, Artificial Sequence; identical to SEQ ID NO: 33228
  GFR-binding peptide
  MOD_RES (2), (3), (37), (39): Xaa is C or S
  MOD_RES (17), (18), (19), (20), (21): Xaa is A or G
  MOD_RES (22), (23), (24), (25): Xaa is A or G or is absent

SEQ ID NO: 35385 - protein, 34 aa, Artificial Sequence; identical to SEQ ID NO: 33229
  GFR-binding peptide
  MOD_RES (1), (34): Xaa is C or S

SEQ ID NO: 35386 - protein, 39 aa, Artificial Sequence; identical to SEQ ID NO: 33230
  GFR-binding peptide
  MOD_RES (6), (7), (39): Xaa is C or S

SEQ ID NO: 35387 - protein, 33 aa, Artificial Sequence; identical to SEQ ID NO: 33231
  GFR-binding peptide
  MOD_RES (32), (32): Xaa is C or S

SEQ ID NO: 35388 - protein, 34 aa, Artificial Sequence; identical to SEQ ID NO: 33232
  GFR-binding peptide
  MOD_RES (1), (33): Xaa is C or S

SEQ ID NO: 35389 - protein, 38 aa, Artificial Sequence; identical to SEQ ID NO: 33233
  GFR-binding peptide
  MOD_RES (4), (5), (38): Xaa is C or S
  MOD_RES (19), (20), (21), (22), (23): Xaa is A or G
  MOD_RES (24), (25), (26), (27): Xaa is A or G or is absent

SEQ ID NO: 35390 - protein, 41 aa, Artificial Sequence; identical to SEQ ID NO: 33234
  GFR-binding peptide
  MOD_RES (6), (7), (41): Xaa is C or S
  MOD_RES (21), (22), (23), (24), (25): Xaa is A or G
  MOD_RES (26), (27), (28), (29): Xaa is A or G or is absent

SEQ ID NO: 35391 - protein, 41 aa, Artificial Sequence; identical to SEQ ID NO: 33235
  GFR-binding peptide
  MOD_RES (3), (4), (38), (40): Xaa is C or S
  MOD_RES (18), (19), (20), (21), (22): Xaa is A or G
  MOD_RES (23), (24), (25), (26): Xaa is A or G or is absent

SEQ ID NO: 35392 - protein, 39 aa, Artificial Sequence; identical to SEQ ID NO: 33236
  GFR-binding peptide
  MOD_RES (6), (7): Xaa is C or S
  MOD_RES (21), (22), (23), (24), (25): Xaa is A or G
  MOD_RES (26), (27), (28), (29): Xaa is A or G or is absent

SEQ ID NO: 35393 - protein, 37 aa, Artificial Sequence; identical to SEQ ID NO: 33237
  GFR-binding peptide
  MOD_RES (4), (5), (37): Xaa is C or S

SEQ ID NO: 35394 - protein, 40 aa, Artificial Sequence; identical to SEQ ID NO: 33238
  GFR-binding peptide
  MOD_RES (6), (7), (39): Xaa is C or S

SEQ ID NO: 35395 - protein, 34 aa, Artificial Sequence; identical to SEQ ID NO: 33239
  GFR-binding peptide
  MOD_RES (2), (3): Xaa is C or S

SEQ ID NO: 35396 - protein, 40 aa, Artificial Sequence; identical to SEQ ID NO: 33240
  GFR-binding peptide
  MOD_RES (4), (5), (39): Xaa is C or S
  MOD_RES (19), (20), (21), (22), (23): Xaa is A or G
  MOD_RES (24), (25), (26), (27): Xaa is A or G or is absent

SEQ ID NO: 35397 - protein, 37 aa, Artificial Sequence; identical to SEQ ID NO: 33241
  GFR-binding peptide
  MOD_RES (6), (6): Xaa is C or S

SEQ ID NO: 35398 - protein, 36 aa, Artificial Sequence; identical to SEQ ID NO: 33242
  GFR-binding peptide
  MOD_RES (4), (4): Xaa is C or S
  MOD_RES (18), (19), (20), (21), (22): Xaa is A or G
  MOD_RES (23), (24), (25), (26): Xaa is A or G or is absent

SEQ ID NO: 35399 - protein, 40 aa, Artificial Sequence; identical to SEQ ID NO: 33243
  GFR-binding peptide
  MOD_RES (4), (5), (39): Xaa is C or S
  MOD_RES (19), (20), (21), (22), (23): Xaa is A or G
  MOD_RES (24), (25), (26), (27): Xaa is A or G or is absent

SEQ ID NO: 35400 - protein, 40 aa, Artificial Sequence; identical to SEQ ID NO: 33244
  GFR-binding peptide
  MOD_RES (5), (6), (40): Xaa is C or S
  MOD_RES (20), (21), (22), (23), (24): Xaa is A or G
  MOD_RES (25), (26), (27), (28): Xaa is A or G or is absent

SEQ ID NO: 35401 - protein, 38 aa, Artificial Sequence; identical to SEQ ID NO: 33245
  GFR-binding peptide
  MOD_RES (4), (5), (37): Xaa is C or S

SEQ ID NO: 35402 - protein, 31 aa, Artificial Sequence; identical to SEQ ID NO: 33246
  GFR-binding peptide

SEQ ID NO: 35403 - protein, 39 aa, Artificial Sequence; identical to SEQ ID NO: 33247
  GFR-binding peptide
  MOD_RES (6), (7), (39): Xaa is C or S

SEQ ID NO: 35404 - protein, 38 aa, Artificial Sequence; identical to SEQ ID NO: 33248
  GFR-binding peptide
  MOD_RES (1), (35), (37): Xaa is C or S
  MOD_RES (15), (16), (17), (18), (19): Xaa is A or G
  MOD_RES (20), (21), (22), (23): Xaa is A or G or is absent

SEQ ID NO: 35405 - protein, 39 aa, Artificial Sequence; identical to SEQ ID NO: 33249
  GFR-binding peptide
  MOD_RES (3), (4), (36), (38): Xaa is C or S

SEQ ID NO: 35406 - protein, 37 aa, Artificial Sequence; identical to SEQ ID NO: 33250
  GFR-binding peptide
  MOD_RES (1), (36): Xaa is C or S
  MOD_RES (15), (16), (17), (18), (19): Xaa is A or G
  MOD_RES (20), (21), (22), (23): Xaa is A or G or is absent

SEQ ID NO: 35407 - protein, 41 aa, Artificial Sequence; identical to SEQ ID NO: 33251
  GFR-binding peptide
  MOD_RES (5), (6), (40): Xaa is C or S
  MOD_RES (20), (21), (22), (23), (24): Xaa is A or G
  MOD_RES (25), (26), (27), (28): Xaa is A or G or is absent

SEQ ID NO: 35408 - protein, 42 aa, Artificial Sequence; identical to SEQ ID NO: 33252
  GFR-binding peptide
  MOD_RES (5), (6), (40), (42): Xaa is C or S
  MOD_RES (20), (21), (22), (23), (24): Xaa is A or G
  MOD_RES (25), (26), (27), (28): Xaa is A or G or is absent

SEQ ID NO: 35409 - protein, 36 aa, Artificial Sequence; identical to SEQ ID NO: 33253
  GFR-binding peptide
  MOD_RES (3), (4): Xaa is C or S
  MOD_RES (18), (19), (20), (21), (22): Xaa is A or G
  MOD_RES (23), (24), (25), (26): Xaa is A or G or is absent

SEQ ID NO: 35410 - protein, 41 aa, Artificial Sequence; identical to SEQ ID NO: 33254
  GFR-binding peptide
  MOD_RES (6), (7), (41): Xaa is C or S
  MOD_RES (21), (22), (23), (24), (25): Xaa is A or G
  MOD_RES (26), (27), (28), (29): Xaa is A or G or is absent

SEQ ID NO: 35411 - protein, 39 aa, Artificial Sequence; identical to SEQ ID NO: 33255
  GFR-binding peptide
  MOD_RES (1), (2), (36), (38): Xaa is C or S
  MOD_RES (16), (17), (18), (19), (20): Xaa is A or G
  MOD_RES (21), (22), (23), (24): Xaa is A or G or is absent

SEQ ID NO: 35412 - protein, 41 aa, Artificial Sequence; identical to SEQ ID NO: 33256
  GFR-binding peptide
  MOD_RES (6), (7), (41): Xaa is C or S
  MOD_RES (21), (22), (23), (24), (25): Xaa is A or G
  MOD_RES (26), (27), (28), (29): Xaa is A or G or is absent

SEQ ID NO: 35413 - protein, 30 aa, Artificial Sequence; identical to SEQ ID NO: 33257
  GFR-binding peptide

SEQ ID NO: 35414 - protein, 33 aa, Artificial Sequence; identical to SEQ ID NO: 33258
  GFR-binding peptide
  MOD_RES (1), (1): Xaa is C or S
  MOD_RES (15), (16), (17), (18), (19): Xaa is A or G
  MOD_RES (20), (21), (22), (23): Xaa is A or G or is absent

SEQ ID NO: 35415 - protein, 34 aa, Artificial Sequence; identical to SEQ ID NO: 33259
  GFR-binding peptide
  MOD_RES (34), (34): Xaa is C or S
  MOD_RES (14), (15), (16), (17), (18): Xaa is A or G
  MOD_RES (19), (20), (21), (22): Xaa is A or G or is absent

SEQ ID NO: 35416 - protein, 42 aa, Artificial Sequence; identical to SEQ ID NO: 33260
  GFR-binding peptide
  MOD_RES (6), (7), (41): Xaa is C or S
  MOD_RES (21), (22), (23), (24), (25): Xaa is A or G
  MOD_RES (26), (27), (28), (29): Xaa is A or G or is absent

SEQ ID NO: 35417 - protein, 40 aa, Artificial Sequence; identical to SEQ ID NO: 33261
  GFR-binding peptide
  MOD_RES (3), (4), (39): Xaa is C or S
  MOD_RES (18), (19), (20), (21), (22): Xaa is A or G
  MOD_RES (23), (24), (25), (26): Xaa is A or G or is absent

SEQ ID NO: 35418 - protein, 36 aa, Artificial Sequence; identical to SEQ ID NO: 33262
  GFR-binding peptide
  MOD_RES (5), (6): Xaa is C or S

SEQ ID NO: 35419 - protein, 32 aa, Artificial Sequence; identical to SEQ ID NO: 33263
  GFR-binding peptide
  MOD_RES (1), (2): Xaa is C or S

SEQ ID NO: 35420 - protein, 36 aa, Artificial Sequence; identical to SEQ ID NO: 33264
  GFR-binding peptide
  MOD_RES (4), (5), (36): Xaa is C or S

SEQ ID NO: 35421 - protein, 35 aa, Artificial Sequence; identical to SEQ ID NO: 33265
  GFR-binding peptide
  MOD_RES (2), (3), (35): Xaa is C or S

SEQ ID NO: 35422 - protein, 36 aa, Artificial Sequence; identical to SEQ ID NO: 33266
  GFR-binding peptide
  MOD_RES (3), (4): Xaa is C or S
  MOD_RES (18), (19), (20), (21), (22): Xaa is A or G
  MOD_RES (23), (24), (25), (26): Xaa is A or G or is absent

SEQ ID NO: 35423 - protein, 31 aa, Artificial Sequence; identical to SEQ ID NO: 33267
  GFR-binding peptide
  MOD_RES (1), (1): Xaa is C or S

SEQ ID NO: 35424 - protein, 38 aa, Artificial Sequence; identical to SEQ ID NO: 33268
  GFR-binding peptide
  MOD_RES (1), (2), (36), (38): Xaa is C or S
  MOD_RES (16), (17), (18), (19), (20): Xaa is A or G
  MOD_RES (21), (22), (23), (24): Xaa is A or G or is absent

SEQ ID NO: 35425 - protein, 33 aa, Artificial Sequence; identical to SEQ ID NO: 33269
  GFR-binding peptide
  MOD_RES (1), (33): Xaa is C or S

SEQ ID NO: 35426 - protein, 34 aa, Artificial Sequence; identical to SEQ ID NO: 33270
  GFR-binding peptide
  MOD_RES (1), (1): Xaa is C or S
  MOD_RES (15), (16), (17), (18), (19): Xaa is A or G
  MOD_RES (20), (21), (22), (23): Xaa is A or G or is absent

SEQ ID NO: 35427 - protein, 40 aa, Artificial Sequence; identical to SEQ ID NO: 33271
  GFR-binding peptide
  MOD_RES (2), (3), (37), (39): Xaa is C or S
  MOD_RES (17), (18), (19), (20), (21): Xaa is A or G
  MOD_RES (22), (23), (24), (25): Xaa is A or G or is absent

SEQ ID NO: 35428 - protein, 40 aa, Artificial Sequence; identical to SEQ ID NO: 33272
  GFR-binding peptide
  MOD_RES (4), (5), (37), (39): Xaa is C or S

SEQ ID NO: 35429 - protein, 34 aa, Artificial Sequence; identical to SEQ ID NO: 33273
  GFR-binding peptide
  MOD_RES (3), (4): Xaa is C or S

SEQ ID NO: 35430 - protein, 42 aa, Artificial Sequence; identical to SEQ ID NO: 33274
  GFR-binding peptide
  MOD_RES (6), (7), (41): Xaa is C or S
  MOD_RES (21), (22), (23), (24), (25): Xaa is A or G
  MOD_RES (26), (27), (28), (29): Xaa is A or G or is absent

SEQ ID NO: 35431 - protein, 38 aa, Artificial Sequence; identical to SEQ ID NO: 33275
  GFR-binding peptide
  MOD_RES (1), (2), (36), (38): Xaa is C or S
  MOD_RES (16), (17), (18), (19), (20): Xaa is A or G
  MOD_RES (21), (22), (23), (24): Xaa is A or G or is absent

SEQ ID NO: 35432 - protein, 36 aa, Artificial Sequence; identical to SEQ ID NO: 33276
  GFR-binding peptide
  MOD_RES (3), (4), (36): Xaa is C or S

SEQ ID NO: 35433 - protein, 39 aa, Artificial Sequence; identical to SEQ ID NO: 33277
  GFR-binding peptide
  MOD_RES (2), (3), (37), (39): Xaa is C or S
  MOD_RES (17), (18), (19), (20), (21): Xaa is A or G
  MOD_RES (22), (23), (24), (25): Xaa is A or G or is absent

SEQ ID NO: 35434 - protein, 35 aa, Artificial Sequence; identical to SEQ ID NO: 33278
  GFR-binding peptide
  MOD_RES (32), (34): Xaa is C or S

SEQ ID NO: 35435 - protein, 38 aa, Artificial Sequence; identical to SEQ ID NO: 33279
  GFR-binding peptide
  MOD_RES (3), (4), (36), (38): Xaa is C or S

SEQ ID NO: 35436 - protein, 37 aa, Artificial Sequence; identical to SEQ ID NO: 33280
  GFR-binding peptide
  MOD_RES (6), (7): Xaa is C or S

SEQ ID NO: 35437 - protein, 38 aa, Artificial Sequence; identical to SEQ ID NO: 33281
  GFR-binding peptide
  MOD_RES (2), (3), (35), (37): Xaa is C or S

SEQ ID NO: 35438 - protein, 39 aa, Artificial Sequence; identical to SEQ ID NO: 33282
  GFR-binding peptide
  MOD_RES (6), (7): Xaa is C or S
  MOD_RES (21), (22), (23), (24), (25): Xaa is A or G
  MOD_RES (26), (27), (28), (29): Xaa is A or G or is absent

SEQ ID NO: 35439 - protein, 39 aa, Artificial Sequence; identical to SEQ ID NO: 33283
  GFR-binding peptide
  MOD_RES (4), (36), (38): Xaa is C or S

SEQ ID NO: 35440 - protein, 40 aa, Artificial Sequence; identical to SEQ ID NO: 33284
  GFR-binding peptide
  MOD_RES (4), (5), (39): Xaa is C or S
  MOD_RES (19), (20), (21), (22), (23): Xaa is A or G
  MOD_RES (24), (25), (26), (27): Xaa is A or G or is absent

SEQ ID NO: 35441 - protein, 38 aa, Artificial Sequence; identical to SEQ ID NO: 33285
  GFR-binding peptide
  MOD_RES (5), (6): Xaa is C or S
  MOD_RES (20), (21), (22), (23), (24): Xaa is A or G
  MOD_RES (25), (26), (27), (28): Xaa is A or G or is absent

SEQ ID NO: 35442 - protein, 35 aa, Artificial Sequence; identical to SEQ ID NO: 33286
  GFR-binding peptide
  MOD_RES (34), (34): Xaa is C or S
  MOD_RES (14), (15), (16), (17), (18): Xaa is A or G
  MOD_RES (19), (20), (21), (22): Xaa is A or G or is absent

SEQ ID NO: 35443 - protein, 41 aa, Artificial Sequence; identical to SEQ ID NO: 33287
  GFR-binding peptide
  MOD_RES (6), (7), (40): Xaa is C or S
  MOD_RES (21), (22), (23), (24), (25): Xaa is A or G
  MOD_RES (26), (27), (28), (29): Xaa is A or G or is absent

SEQ ID NO: 35444 - protein, 43 aa, Artificial Sequence; identical to SEQ ID NO: 33288
  GFR-binding peptide
  MOD_RES (5), (6), (40), (42): Xaa is C or S
  MOD_RES (20), (21), (22), (23), (24): Xaa is A or G
  MOD_RES (25), (26), (27), (28): Xaa is A or G or is absent

SEQ ID NO: 35445 - protein, 34 aa, Artificial Sequence; identical to SEQ ID NO: 33289
  GFR-binding peptide
  MOD_RES (1), (2): Xaa is C or S
  MOD_RES (16), (17), (18), (19), (20): Xaa is A or G
  MOD_RES (21), (22), (23), (24): Xaa is A or G or is absent

SEQ ID NO: 35446 - protein, 42 aa, Artificial Sequence; identical to SEQ ID NO: 33290
  GFR-binding peptide
  MOD_RES (6), (7), (41): Xaa is C or S
  MOD_RES (21), (22), (23), (24), (25): Xaa is A or G
  MOD_RES (26), (27), (28), (29): Xaa is A or G or is absent

SEQ ID NO: 35447 - protein, 39 aa, Artificial Sequence; identical to SEQ ID NO: 33291
  GFR-binding peptide
  MOD_RES (5), (6), (38): Xaa is C or S

SEQ ID NO: 35448 - protein, 39 aa, Artificial Sequence; identical to SEQ ID NO: 33292
  GFR-binding peptide
  MOD_RES (5), (6): Xaa is C or S
  MOD_RES (20), (21), (22), (23), (24): Xaa is A or G
  MOD_RES (25), (26), (27), (28): Xaa is A or G or is absent

SEQ ID NO: 35449 - protein, 39 aa, Artificial Sequence; identical to SEQ ID NO: 33293
  GFR-binding peptide
  MOD_RES (6), (7), (39): Xaa is C or S

SEQ ID NO: 35450 - protein, 38 aa, Artificial Sequence; identical to SEQ ID NO: 33294
  GFR-binding peptide
  MOD_RES (3), (4), (38): Xaa is C or S
  MOD_RES (18), (19), (20), (21), (22): Xaa is A or G
  MOD_RES (23), (24), (25), (26): Xaa is A or G or is absent

SEQ ID NO: 35451 - protein, 40 aa, Artificial Sequence; identical to SEQ ID NO: 33295
  GFR-binding peptide
  MOD_RES (5), (6), (40): Xaa is C or S
  MOD_RES (20), (21), (22), (23), (24): Xaa is A or G
  MOD_RES (25), (26), (27), (28): Xaa is A or G or is absent

SEQ ID NO: 35452 - protein, 40 aa, Artificial Sequence; identical to SEQ ID NO: 33296
  GFR-binding peptide
  MOD_RES (3), (4), (37), (39): Xaa is C or S

SEQ ID NO: 35453 - protein, 36 aa, Artificial Sequence; identical to SEQ ID NO: 33297
  GFR-binding peptide
  MOD_RES (1), (2), (36): Xaa is C or S
  MOD_RES (16), (17), (18), (19), (20): Xaa is A or G
  MOD_RES (21), (22), (23), (24): Xaa is A or G or is absent

SEQ ID NO: 35454 - protein, 38 aa, Artificial Sequence; identical to SEQ ID NO: 33298
  GFR-binding peptide
  MOD_RES (1), (2), (36), (38): Xaa is C or S
  MOD_RES (16), (17), (18), (19), (20): Xaa is A or G
  MOD_RES (21), (22), (23), (24): Xaa is A or G or is absent

SEQ ID NO: 35455 - protein, 37 aa, Artificial Sequence; identical to SEQ ID NO: 33299
  GFR-binding peptide
  MOD_RES (5), (6): Xaa is C or S

SEQ ID NO: 35456 - protein, 40 aa, Artificial Sequence; identical to SEQ ID NO: 33300
  GFR-binding peptide
  MOD_RES (5), (6), (39): Xaa is C or S
  MOD_RES (20), (21), (22), (23), (24): Xaa is A or G
  MOD_RES (25), (26), (27), (28): Xaa is A or G or is absent

SEQ ID NO: 35457 - protein, 37 aa, Artificial Sequence; identical to SEQ ID NO: 33301
  GFR-binding peptide
  MOD_RES (6), (7): Xaa is C or S

SEQ ID NO: 35458 - protein, 35 aa, Artificial Sequence; identical to SEQ ID NO: 33302
  GFR-binding peptide
  MOD_RES (1), (35): Xaa is C or S
  MOD_RES (15), (16), (17), (18), (19): Xaa is A or G
  MOD_RES (20), (21), (22), (23): Xaa is A or G or is absent

SEQ ID NO: 35459 - protein, 42 aa, Artificial Sequence; identical to SEQ ID NO: 33303
  GFR-binding peptide
  MOD_RES (4), (5), (39), (41): Xaa is C or S
  MOD_RES (19), (20), (21), (22), (23): Xaa is A or G
  MOD_RES (24), (25), (26), (27): Xaa is A or G or is absent

SEQ ID NO: 35460 - protein, 36 aa, Artificial Sequence; identical to SEQ ID NO: 33304
  GFR-binding peptide
  MOD_RES (2), (3): Xaa is C or S
  MOD_RES (17), (18), (19), (20), (21): Xaa is A or G
  MOD_RES (22), (23), (24), (25): Xaa is A or G or is absent

SEQ ID NO: 35461 - protein, 34 aa, Artificial Sequence; identical to SEQ ID NO: 33305
  GFR-binding peptide
  MOD_RES (3), (4): Xaa is C or S

SEQ ID NO: 35462 - protein, 33 aa, Artificial Sequence; identical to SEQ ID NO: 33306
  GFR-binding peptide
  MOD_RES (1), (2): Xaa is C or S

SEQ ID NO: 35463 - protein, 37 aa, Artificial Sequence; identical to SEQ ID NO: 33307
  GFR-binding peptide
  MOD_RES (1), (2), (34), (36): Xaa is C or S

SEQ ID NO: 35464 - protein, 32 aa, Artificial Sequence; identical to SEQ ID NO: 33308
  GFR-binding peptide
  MOD_RES (1), (2): Xaa is C or S

SEQ ID NO: 35465 - protein, 35 aa, Artificial Sequence; identical to SEQ ID NO: 33309
  GFR-binding peptide
  MOD_RES (1), (32), (34): Xaa is C or S

SEQ ID NO: 35466 - protein, 34 aa, Artificial Sequence; identical to SEQ ID NO: 33310
  GFR-binding peptide
  MOD_RES (1), (1): Xaa is C or S
  MOD_RES (15), (16), (17), (18), (19): Xaa is A or G
  MOD_RES (20), (21), (22), (23): Xaa is A or G or is absent

SEQ ID NO: 35467 - protein, 38 aa, Artificial Sequence; identical to SEQ ID NO: 33311
  GFR-binding peptide
  MOD_RES (4), (5), (38): Xaa is C or S

SEQ ID NO: 35468 - protein, 33 aa, Artificial Sequence; identical to SEQ ID NO: 33312
  GFR-binding peptide
  MOD_RES (3), (3): Xaa is C or S

SEQ ID NO: 35469 - protein, 38 aa, Artificial Sequence; identical to SEQ ID NO: 33313
  GFR-binding peptide
  MOD_RES (2), (3), (37): Xaa is C or S
  MOD_RES (17), (18), (19), (20), (21): Xaa is A or G
  MOD_RES (22), (23), (24), (25): Xaa is A or G or is absent

SEQ ID NO: 35470 - protein, 44 aa, Artificial Sequence; identical to SEQ ID NO: 33314
  GFR-binding peptide
  MOD_RES (5), (6), (41), (43): Xaa is C or S
  MOD_RES (20), (21), (22), (23), (24): Xaa is A or G
  MOD_RES (25), (26), (27), (28): Xaa is A or G or is absent

SEQ ID NO: 35471 - protein, 35 aa, Artificial Sequence; identical to SEQ ID NO: 33315
  GFR-binding peptide
  MOD_RES (1), (33), (35): Xaa is C or S

SEQ ID NO: 35472 - protein, 39 aa, Artificial Sequence; identical to SEQ ID NO: 33316
  GFR-binding peptide
  MOD_RES (5), (6), (38): Xaa is C or S

SEQ ID NO: 35473 - protein, 42 aa, Artificial Sequence; identical to SEQ ID NO: 33317
  GFR-binding peptide
  MOD_RES (6), (7), (39), (41): Xaa is C or S

SEQ ID NO: 35474 - protein, 42 aa, Artificial Sequence; identical to SEQ ID NO: 33318
  GFR-binding peptide
  MOD_RES (6), (7), (41): Xaa is C or S
  MOD_RES (21), (22), (23), (24), (25): Xaa is A or G
  MOD_RES (26), (27), (28), (29): Xaa is A or G or is absent

SEQ ID NO: 35475 - protein, 39 aa, Artificial Sequence; identical to SEQ ID NO: 33319
  GFR-binding peptide
  MOD_RES (3), (4), (39): Xaa is C or S
  MOD_RES (18), (19), (20), (21), (22): Xaa is A or G
  MOD_RES (23), (24), (25), (26): Xaa is A or G or is absent

SEQ ID NO: 35476 - protein, 36 aa, Artificial Sequence; identical to SEQ ID NO: 33320
  GFR-binding peptide
  MOD_RES (34), (36): Xaa is C or S
  MOD_RES (14), (15), (16), (17), (18): Xaa is A or G
  MOD_RES (19), (20), (21), (22): Xaa is A or G or is absent

SEQ ID NO: 35477 - protein, 35 aa, Artificial Sequence; identical to SEQ ID NO: 33321
  GFR-binding peptide
  MOD_RES (3), (35): Xaa is C or S

SEQ ID NO: 35478 - protein, 34 aa, Artificial Sequence; identical to SEQ ID NO: 33322
  GFR-binding peptide
  MOD_RES (1), (1): Xaa is C or S
  MOD_RES (15), (16), (17), (18), (19): Xaa is A or G
  MOD_RES (20), (21), (22), (23): Xaa is A or G or is absent

SEQ ID NO: 35479 - protein, 38 aa, Artificial Sequence; identical to SEQ ID NO: 33323
  GFR-binding peptide
  MOD_RES (2), (3), (37): Xaa is C or S
  MOD_RES (17), (18), (19), (20), (21): Xaa is A or G
  MOD_RES (22), (23), (24), (25): Xaa is A or G or is absent

SEQ ID NO: 35480 - protein, 34 aa, Artificial Sequence; identical to SEQ ID NO: 33324
  GFR-binding peptide
  MOD_RES (1), (1): Xaa is C or S
  MOD_RES (15), (16), (17), (18), (19): Xaa is A or G
  MOD_RES (20), (21), (22), (23): Xaa is A or G or is absent

SEQ ID NO: 35481 - protein, 40 aa, Artificial Sequence; identical to SEQ ID NO: 33325
  GFR-binding peptide
  MOD_RES (6), (7): Xaa is C or S
  MOD_RES (21), (22), (23), (24), (25): Xaa is A or G
  MOD_RES (26), (27), (28), (29): Xaa is A or G or is absent

SEQ ID NO: 35482 - protein, 39 aa, Artificial Sequence; identical to SEQ ID NO: 33326
  GFR-binding peptide
  MOD_RES (4), (5), (39): Xaa is C or S
  MOD_RES (19), (20), (21), (22), (23): Xaa is A or G
  MOD_RES (24), (25), (26), (27): Xaa is A or G or is absent

SEQ ID NO: 35483 - protein, 41 aa, Artificial Sequence; identical to SEQ ID NO: 33327
  GFR-binding peptide
  MOD_RES (4), (5), (38), (40): Xaa is C or S
  MOD_RES (19), (20), (21), (22), (23): Xaa is A or G
  MOD_RES (24), (25), (26), (27): Xaa is A or G or is absent

SEQ ID NO: 35484 - protein, 35 aa, Artificial Sequence; identical to SEQ ID NO: 33328
  GFR-binding peptide
  MOD_RES (2), (3): Xaa is C or S
  MOD_RES (17), (18), (19), (20), (21): Xaa is A or G
  MOD_RES (22), (23), (24), (25): Xaa is A or G or is absent

SEQ ID NO: 35485 - protein, 31 aa, Artificial Sequence; identical to SEQ ID NO: 33329
  GFR-binding peptide

SEQ ID NO: 35486 - protein, 39 aa, Artificial Sequence; identical to SEQ ID NO: 33330
  GFR-binding peptide
  MOD_RES (6), (7): Xaa is C or S
  MOD_RES (21), (22), (23), (24), (25): Xaa is A or G
  MOD_RES (26), (27), (28), (29): Xaa is A or G or is absent

SEQ ID NO: 35487 - protein, 42 aa, Artificial Sequence; identical to SEQ ID NO: 33331
  GFR-binding peptide
  MOD_RES (5), (6), (40), (42): Xaa is C or S
  MOD_RES (20), (21), (22), (23), (24): Xaa is A or G
  MOD_RES (25), (26), (27), (28): Xaa is A or G or is absent

SEQ ID NO: 35488 - protein, 34 aa, Artificial Sequence; identical to SEQ ID NO: 33332
  GFR-binding peptide
  MOD_RES (1), (2): Xaa is C or S
  MOD_RES (16), (17), (18), (19), (20): Xaa is A or G
  MOD_RES (21), (22), (23), (24): Xaa is A or G or is absent

SEQ ID NO: 35489 - protein, 36 aa, Artificial Sequence; identical to SEQ ID NO: 33333
  GFR-binding peptide
  MOD_RES (34), (36): Xaa is C or S
  MOD_RES (14), (15), (16), (17), (18): Xaa is A or G
  MOD_RES (19), (20), (21), (22): Xaa is A or G or is absent

SEQ ID NO: 35490 - protein, 39 aa, Artificial Sequence; identical to SEQ ID NO: 33334
  GFR-binding peptide
  MOD_RES (3), (4), (37), (39): Xaa is C or S
  MOD_RES (18), (19), (20), (21), (22): Xaa is A or G
  MOD_RES (23), (24), (25), (26): Xaa is A or G or is absent

SEQ ID NO: 35491 - protein, 38 aa, Artificial Sequence; identical to SEQ ID NO: 33335
  GFR-binding peptide
  MOD_RES (4), (5), (36), (38): Xaa is C or S

SEQ ID NO: 35492 - protein, 37 aa, Artificial Sequence; identical to SEQ ID NO: 33336
  GFR-binding peptide
  MOD_RES (1), (2), (36): Xaa is C or S
  MOD_RES (16), (17), (18), (19), (20): Xaa is A or G
  MOD_RES (21), (22), (23), (24): Xaa is A or G or is absent

SEQ ID NO: 35493 - protein, 36 aa, Artificial Sequence; identical to SEQ ID NO: 33337
  GFR-binding peptide
  MOD_RES (3), (4): Xaa is C or S
  MOD_RES (18), (19), (20), (21), (22): Xaa is A or G
  MOD_RES (23), (24), (25), (26): Xaa is A or G or is absent

SEQ ID NO: 35494 - protein, 37 aa, Artificial Sequence; identical to SEQ ID NO: 33338
  GFR-binding peptide
  MOD_RES (1), (2), (34), (36): Xaa is C or S

SEQ ID NO: 35495 - protein, 38 aa, Artificial Sequence; identical to SEQ ID NO: 33339
  GFR-binding peptide
  MOD_RES (6), (7), (38): Xaa is C or S

SEQ ID NO: 35496 - protein, 34 aa, Artificial Sequence; identical to SEQ ID NO: 33340
  GFR-binding peptide
  MOD_RES (1), (33): Xaa is C or S

SEQ ID NO: 35497 - protein, 39 aa, Artificial Sequence; identical to SEQ ID NO: 33341
  GFR-binding peptide
  MOD_RES (6), (7): Xaa is C or S
  MOD_RES (21), (22), (23), (24), (25): Xaa is A or G
  MOD_RES (26), (27), (28), (29): Xaa is A or G or is absent

SEQ ID NO: 35498 - protein, 39 aa, Artificial Sequence; identical to SEQ ID NO: 33342
  GFR-binding peptide
  MOD_RES (3), (4), (38): Xaa is C or S
  MOD_RES (18), (19), (20), (21), (22): Xaa is A or G
  MOD_RES (23), (24), (25), (26): Xaa is A or G or is absent

SEQ ID NO: 35499 - protein, 30 aa, Artificial Sequence; identical to SEQ ID NO: 33343
  GFR-binding peptide

SEQ ID NO: 35500 - protein, 35 aa, Artificial Sequence; identical to SEQ ID NO: 33344
  GFR-binding peptide
  MOD_RES (34), (34): Xaa is C or S
  MOD_RES (14), (15), (16), (17), (18): Xaa is A or G
  MOD_RES (19), (20), (21), (22): Xaa is A or G or is absent

SEQ ID NO: 35501 - protein, 39 aa, Artificial Sequence; identical to SEQ ID NO: 33345
  GFR-binding peptide
  MOD_RES (7), (39): Xaa is C or S

SEQ ID NO: 35502 - protein, 32 aa, Artificial Sequence; identical to SEQ ID NO: 33346
  GFR-binding peptide
  MOD_RES (1), (1): Xaa is C or S

SEQ ID NO: 35503 - protein, 36 aa, Artificial Sequence; identical to SEQ ID NO: 33347
  GFR-binding peptide
  MOD_RES (3), (35): Xaa is C or S

SEQ ID NO: 35504 - protein, 33 aa, Artificial Sequence; identical to SEQ ID NO: 33348
  GFR-binding peptide
  MOD_RES (14), (15), (16), (17), (18): Xaa is A or G
  MOD_RES (19), (20), (21), (22): Xaa is A or G or is absent

SEQ ID NO: 35505 - protein, 33 aa, Artificial Sequence; identical to SEQ ID NO: 33349
  GFR-binding peptide
  MOD_RES (2), (3): Xaa is C or S

SEQ ID NO: 35506 - protein, 37 aa, Artificial Sequence; identical to SEQ ID NO: 33350
  GFR-binding peptide
  MOD_RES (1), (2), (35), (37): Xaa is C or S

SEQ ID NO: 35507 - protein, 38 aa, Artificial Sequence; identical to SEQ ID NO: 33351
  GFR-binding peptide
  MOD_RES (1), (2), (35), (37): Xaa is C or S
  MOD_RES (16), (17), (18), (19), (20): Xaa is A or G
  MOD_RES (21), (22), (23), (24): Xaa is A or G or is absent

SEQ ID NO: 35508 - protein, 35 aa, Artificial Sequence; identical to SEQ ID NO: 33352
  GFR-binding peptide
  MOD_RES (1), (2): Xaa is C or S
  MOD_RES (16), (17), (18), (19), (20): Xaa is A or G
  MOD_RES (21), (22), (23), (24): Xaa is A or G or is absent

SEQ ID NO: 35509 - protein, 38 aa, Artificial Sequence; identical to SEQ ID NO: 33353
  GFR-binding peptide
  MOD_RES (5), (6): Xaa is C or S
  MOD_RES (20), (21), (22), (23), (24): Xaa is A or G
  MOD_RES (25), (26), (27), (28): Xaa is A or G or is absent

SEQ ID NO: 35510 - protein, 37 aa, Artificial Sequence; identical to SEQ ID NO: 33354
  GFR-binding peptide
  MOD_RES (1), (2), (35), (37): Xaa is C or S
  MOD_RES (16), (17), (18), (19), (20): Xaa is A or G
  MOD_RES (21), (22), (23), (24): Xaa is A or G or is absent

SEQ ID NO: 35511 - protein, 38 aa, Artificial Sequence; identical to SEQ ID NO: 2269
  GFR-binding peptide
  MOD_RES (32), (33): Xaa is C or S

SEQ ID NO: 35512 - protein, 42 aa, Artificial Sequence; identical to SEQ ID NO: 11638
  GFR-binding peptide
  MOD_RES (2), (4), (37), (38): Xaa is C or S
  MOD_RES (15), (16), (17), (18), (19): Xaa is A or G
  MOD_RES (20), (21), (22), (23): Xaa is A or G or is absent

SEQ ID NO: 35513 - protein, 38 aa, Artificial Sequence; identical to SEQ ID NO: 4227
  GFR-binding peptide
  MOD_RES (1), (34), (35): Xaa is C or S
  MOD_RES (12), (13), (14), (15), (16): Xaa is A or G
  MOD_RES (17), (18), (19), (20): Xaa is A or G or is absent

SEQ ID NO: 35514 - protein, 36 aa, Artificial Sequence; identical to SEQ ID NO: 9780
  GFR-binding peptide
  MOD_RES (2), (4), (36): Xaa is C or S

SEQ ID NO: 35515 - protein, 42 aa, Artificial Sequence; identical to SEQ ID NO: 11640
  GFR-binding peptide
  MOD_RES (2), (36), (37): Xaa is C or S
  MOD_RES (14), (15), (16), (17), (18): Xaa is A or G
  MOD_RES (19), (20), (21), (22): Xaa is A or G or is absent

SEQ ID NO: 35516 - protein, 40 aa, Artificial Sequence; identical to SEQ ID NO: 11642
  GFR-binding peptide
  MOD_RES (2), (4), (37), (38): Xaa is C or S
  MOD_RES (15), (16), (17), (18), (19): Xaa is A or G
  MOD_RES (20), (21), (22), (23): Xaa is A or G or is absent

SEQ ID NO: 35517 - protein, 39 aa, Artificial Sequence; identical to SEQ ID NO: 4229
  GFR-binding peptide
  MOD_RES (1), (33), (34): Xaa is C or S

SEQ ID NO: 35518 - protein, 33 aa, Artificial Sequence; identical to SEQ ID NO: 2277
  GFR-binding peptide
  MOD_RES (2), (2): Xaa is C or S

SEQ ID NO: 35519 - protein, 39 aa, Artificial Sequence; identical to SEQ ID NO: 11644
  GFR-binding peptide
  MOD_RES (33), (34): Xaa is C or S
  MOD_RES (11), (12), (13), (14), (15): Xaa is A or G
  MOD_RES (16), (17), (18), (19): Xaa is A or G or is absent

SEQ ID NO: 35520 - protein, 37 aa, Artificial Sequence; identical to SEQ ID NO: 4230
  GFR-binding peptide
  MOD_RES (2), (4), (35), (36): Xaa is C or S

SEQ ID NO: 35521 - protein, 35 aa, Artificial Sequence; identical to SEQ ID NO: 9784
  GFR-binding peptide
  MOD_RES (1), (33), (34): Xaa is C or S

SEQ ID NO: 35522 - protein, 34 aa, Artificial Sequence; identical to SEQ ID NO: 9785
  GFR-binding peptide
  MOD_RES (2), (34): Xaa is C or S

SEQ ID NO: 35523 - protein, 35 aa, Artificial Sequence; identical to SEQ ID NO: 11647
  GFR-binding peptide
  MOD_RES (2), (2): Xaa is C or S
  MOD_RES (14), (15), (16), (17), (18): Xaa is A or G
  MOD_RES (19), (20), (21), (22): Xaa is A or G or is absent

SEQ ID NO: 35524 - protein, 34 aa, Artificial Sequence; identical to SEQ ID NO: 11648
  GFR-binding peptide
  MOD_RES (1), (32), (33): Xaa is C or S

SEQ ID NO: 35525 - protein, 35 aa, Artificial Sequence; identical to SEQ ID NO: 11649
  GFR-binding peptide
  MOD_RES (1), (3): Xaa is C or S
  MOD_RES (14), (15), (16), (17), (18): Xaa is A or G
  MOD_RES (19), (20), (21), (22): Xaa is A or G or is absent

SEQ ID NO: 35526 - protein, 34 aa, Artificial Sequence
  GFR-binding peptide
  MOD_RES (1), (34): Xaa is C or S
  MOD_RES (12), (13), (14), (15), (16): Xaa is A or G
  MOD_RES (17), (18), (19), (20): Xaa is A or G or is absent
XSKVIMNSLQEXXXXXXXXXYYLITLPELDQSVX

SEQ ID NO: 35527 - protein, 40 aa, Artificial Sequence; identical to SEQ ID NO: 9786
  GFR-binding peptide
  MOD_RES (2), (34), (35): Xaa is C or S

SEQ ID NO: 35528 - protein, 39 aa, Artificial Sequence; identical to SEQ ID NO: 9788
  GFR-binding peptide
  MOD_RES (1), (3), (37), (38): Xaa is C or S
  MOD_RES (15), (16), (17), (18), (19): Xaa is A or G
  MOD_RES (20), (21), (22), (23): Xaa is A or G or is absent

SEQ ID NO: 35529 - protein, 39 aa, Artificial Sequence; identical to SEQ ID NO: 11650
  GFR-binding peptide
  MOD_RES (2), (33), (34): Xaa is C or S

SEQ ID NO: 35530 - protein, 42 aa, Artificial Sequence; identical to SEQ ID NO: 4234
  GFR-binding peptide
  MOD_RES (2), (4), (37), (38): Xaa is C or S
  MOD_RES (15), (16), (17), (18), (19): Xaa is A or G
  MOD_RES (20), (21), (22), (23): Xaa is A or G or is absent

SEQ ID NO: 35531 - protein, 36 aa, Artificial Sequence; identical to SEQ ID NO: 11652
  GFR-binding peptide
  MOD_RES (31), (31): Xaa is C or S

SEQ ID NO: 35532 - protein, 35 aa, Artificial Sequence; identical to SEQ ID NO: 11653
  GFR-binding peptide
  MOD_RES (2), (35): Xaa is C or S
  MOD_RES (13), (14), (15), (16), (17): Xaa is A or G
  MOD_RES (18), (19), (20), (21): Xaa is A or G or is absent

SEQ ID NO: 35533 - protein, 35 aa, Artificial Sequence; identical to SEQ ID NO: 9789
  GFR-binding peptide
  MOD_RES (1), (33), (34): Xaa is C or S

SEQ ID NO: 35534 - protein, 36 aa, Artificial Sequence; identical to SEQ ID NO: 9790
  GFR-binding peptide
  MOD_RES (1), (35), (36): Xaa is C or S
  MOD_RES (13), (14), (15), (16), (17): Xaa is A or G
  MOD_RES (18), (19), (20), (21): Xaa is A or G or is absent

SEQ ID NO: 35535 - protein, 41 aa, Artificial Sequence; identical to SEQ ID NO: 9791
  GFR-binding peptide
  MOD_RES (1), (3), (37), (38): Xaa is C or S
  MOD_RES (15), (16), (17), (18), (19): Xaa is A or G
  MOD_RES (20), (21), (22), (23): Xaa is A or G or is absent

SEQ ID NO: 35536 - protein, 41 aa, Artificial Sequence; identical to SEQ ID NO: 11655
  GFR-binding peptide
  MOD_RES (2), (4), (37), (38): Xaa is C or S
  MOD_RES (15), (16), (17), (18), (19): Xaa is A or G
  MOD_RES (20), (21), (22), (23): Xaa is A or G or is absent

SEQ ID NO: 35537 - protein, 35 aa, Artificial Sequence; identical to SEQ ID NO: 2288
  GFR-binding peptide
  MOD_RES (31), (32): Xaa is C or S

SEQ ID NO: 35538 - protein, 42 aa, Artificial Sequence; identical to SEQ ID NO: 9793
  GFR-binding peptide
  MOD_RES (1), (3), (36), (37): Xaa is C or S
  MOD_RES (14), (15), (16), (17), (18): Xaa is A or G
  MOD_RES (19), (20), (21), (22): Xaa is A or G or is absent

SEQ ID NO: 35539 - protein, 42 aa, Artificial Sequence; identical to SEQ ID NO: 2293
  GFR-binding peptide
  MOD_RES (2), (4), (36), (37): Xaa is C or S

SEQ ID NO: 35540 - protein, 35 aa, Artificial Sequence; identical to SEQ ID NO: 11657
  GFR-binding peptide
  MOD_RES (1), (3), (35): Xaa is C or S

SEQ ID NO: 35541 - protein, 34 aa, Artificial Sequence; identical to SEQ ID NO: 11658
  GFR-binding peptide
  MOD_RES (32), (33): Xaa is C or S

SEQ ID NO: 35542 - protein, 35 aa, Artificial Sequence; identical to SEQ ID NO: 9796
  GFR-binding peptide
  MOD_RES (1), (33), (34): Xaa is C or S

SEQ ID NO: 35543 - protein, 33 aa, Artificial Sequence; identical to SEQ ID NO: 11659
  GFR-binding peptide
  MOD_RES (31), (32): Xaa is C or S

SEQ ID NO: 35544 - protein, 35 aa, Artificial Sequence; identical to SEQ ID NO: 9797
  GFR-binding peptide
  MOD_RES (2), (34), (35): Xaa is C or S

SEQ ID NO: 35545 - protein, 34 aa, Artificial Sequence; identical to SEQ ID NO: 11660
  GFR-binding peptide
  MOD_RES (1), (32), (33): Xaa is C or S

SEQ ID NO: 35546 - protein, 33 aa, Artificial Sequence; identical to SEQ ID NO: 9800
  GFR-binding peptide
  MOD_RES (12), (13), (14), (15), (16): Xaa is A or G
  MOD_RES (17), (18), (19), (20): Xaa is A or G or is absent

SEQ ID NO: 35547 - protein, 39 aa, Artificial Sequence; identical to SEQ ID NO: 2299
  GFR-binding peptide
  MOD_RES (1), (3), (35), (36): Xaa is C or S

SEQ ID NO: 35548 - protein, 35 aa, Artificial Sequence; identical to SEQ ID NO: 4251
  GFR-binding peptide
  MOD_RES (2), (4), (35): Xaa is C or S

SEQ ID NO: 35549 - protein, 39 aa, Artificial Sequence; identical to SEQ ID NO: 9803
  GFR-binding peptide
  MOD_RES (1), (3), (34), (35): Xaa is C or S

SEQ ID NO: 35550 - protein, 39 aa, Artificial Sequence; identical to SEQ ID NO: 9805
  GFR-binding peptide
  MOD_RES (1), (3), (37): Xaa is C or S
  MOD_RES (15), (16), (17), (18), (19): Xaa is A or G
  MOD_RES (20), (21), (22), (23): Xaa is A or G or is absent

SEQ ID NO: 35551 - protein, 40 aa, Artificial Sequence; identical to SEQ ID NO: 11662
  GFR-binding peptide
  MOD_RES (1), (35), (36): Xaa is C or S
  MOD_RES (13), (14), (15), (16), (17): Xaa is A or G
  MOD_RES (18), (19), (20), (21): Xaa is A or G or is absent

SEQ ID NO: 35552 - protein, 32 aa, Artificial Sequence; identical to SEQ ID NO: 11663
  GFR-binding peptide
  MOD_RES (1), (1): Xaa is C or S

SEQ ID NO: 35553 - protein, 37 aa, Artificial Sequence; identical to SEQ ID NO: 9807
  GFR-binding peptide
  MOD_RES (1), (34), (35): Xaa is C or S
  MOD_RES (12), (13), (14), (15), (16): Xaa is A or G
  MOD_RES (17), (18), (19), (20): Xaa is A or G or is absent

SEQ ID NO: 35554 - protein, 36 aa, Artificial Sequence; identical to SEQ ID NO: 9808
  GFR-binding peptide
  MOD_RES (2), (36): Xaa is C or S
  MOD_RES (14), (15), (16), (17), (18): Xaa is A or G
  MOD_RES (19), (20), (21), (22): Xaa is A or G or is absent

SEQ ID NO: 35555 - protein, 39 aa, Artificial Sequence; identical to SEQ ID NO: 11664
  GFR-binding peptide
  MOD_RES (2), (4), (36), (37): Xaa is C or S

SEQ ID NO: 35556 - protein, 36 aa, Artificial Sequence
  GFR-binding peptide
  MOD_RES (1), (32), (33): Xaa is C or S
XSKVIMNSLQEIKPTKGIYYLITLPELDQSVXXPSA

SEQ ID NO: 35557 - protein, 37 aa, Artificial Sequence; identical to SEQ ID NO: 9809
  GFR-binding peptide
  MOD_RES (32), (33): Xaa is C or S

SEQ ID NO: 35558 - protein, 38 aa, Artificial Sequence; identical to SEQ ID NO: 11665
  GFR-binding peptide
  MOD_RES (2), (34), (35): Xaa is C or S

SEQ ID NO: 35559 - protein, 33 aa, Artificial Sequence; identical to SEQ ID NO: 9811
  GFR-binding peptide
  MOD_RES (2), (2): Xaa is C or S

SEQ ID NO: 35560 - protein, 33 aa, Artificial Sequence; identical to SEQ ID NO: 11666
  GFR-binding peptide
  MOD_RES (33), (33): Xaa is C or S
  MOD_RES (11), (12), (13), (14), (15): Xaa is A or G
  MOD_RES (16), (17), (18), (19): Xaa is A or G or is absent

SEQ ID NO: 35561 - protein, 41 aa, Artificial Sequence; identical to SEQ ID NO: 4256
  GFR-binding peptide
  MOD_RES (2), (4), (36), (37): Xaa is C or S

SEQ ID NO: 35562 - protein, 36 aa, Artificial Sequence; identical to SEQ ID NO: 9813
  GFR-binding peptide
  MOD_RES (33), (34): Xaa is C or S
  MOD_RES (11), (12), (13), (14), (15): Xaa is A or G
  MOD_RES (16), (17), (18), (19): Xaa is A or G or is absent

SEQ ID NO: 35563 - protein, 38 aa, Artificial Sequence; identical to SEQ ID NO: 11668
  GFR-binding peptide
  MOD_RES (1), (35), (36): Xaa is C or S
  MOD_RES (13), (14), (15), (16), (17): Xaa is A or G
  MOD_RES (18), (19), (20), (21): Xaa is A or G or is absent

SEQ ID NO: 35564 - protein, 37 aa, Artificial Sequence; identical to SEQ ID NO: 11669
  GFR-binding peptide
  MOD_RES (2), (4), (36), (37): Xaa is C or S

SEQ ID NO: 35565 - protein, 35 aa, Artificial Sequence; identical to SEQ ID NO: 9814
  GFR-binding peptide
  MOD_RES (31), (32): Xaa is C or S

SEQ ID NO: 35566 - protein, 36 aa, Artificial Sequence; identical to SEQ ID NO: 11670
  GFR-binding peptide
  MOD_RES (1), (3), (34), (35): Xaa is C or S

SEQ ID NO: 35567 - protein, 41 aa, Artificial Sequence; identical to SEQ ID NO: 9815
  GFR-binding peptide
  MOD_RES (1), (3), (36), (37): Xaa is C or S
  MOD_RES (14), (15), (16), (17), (18): Xaa is A or G
  MOD_RES (19), (20), (21), (22): Xaa is A or G or is absent

SEQ ID NO: 35568 - protein, 43 aa, Artificial Sequence; identical to SEQ ID NO: 11671
  GFR-binding peptide
  MOD_RES (2), (4), (38), (39): Xaa is C or S
  MOD_RES (16), (17), (18), (19), (20): Xaa is A or G
  MOD_RES (21), (22), (23), (24): Xaa is A or G or is absent

SEQ ID NO: 35569 - protein, 37 aa, Artificial Sequence; identical to SEQ ID NO: 11672
  GFR-binding peptide
  MOD_RES (32), (32): Xaa is C or S

SEQ ID NO: 35570 - protein, 39 aa, Artificial Sequence; identical to SEQ ID NO: 9817
  GFR-binding peptide
  MOD_RES (1), (3), (36), (37): Xaa is C or S
  MOD_RES (14), (15), (16), (17), (18): Xaa is A or G
  MOD_RES (19), (20), (21), (22): Xaa is A or G or is absent

SEQ ID NO: 35571 - protein, 32 aa, Artificial Sequence; identical to SEQ ID NO: 11673
  GFR-binding peptide
  MOD_RES (32), (32): Xaa is C or S

SEQ ID NO: 35572 - protein, 33 aa, Artificial Sequence; identical to SEQ ID NO: 9818
  GFR-binding peptide
  MOD_RES (2), (2): Xaa is C or S

SEQ ID NO: 35573 - protein, 37 aa, Artificial Sequence; identical to SEQ ID NO: 9819
  GFR-binding peptide
  MOD_RES (1), (33), (34): Xaa is C or S

SEQ ID NO: 35574 - protein, 36 aa, Artificial Sequence; identical to SEQ ID NO: 11674
  GFR-binding peptide
  MOD_RES (1), (3), (35), (36): Xaa is C or S

SEQ ID NO: 35575 - protein, 33 aa, Artificial Sequence; identical to SEQ ID NO: 11675
  GFR-binding peptide
  MOD_RES (1), (33): Xaa is C or S

SEQ ID NO: 35576 - protein, 35 aa, Artificial Sequence; identical to SEQ ID NO: 11676
  GFR-binding peptide
  MOD_RES (34), (35): Xaa is C or S
  MOD_RES (12), (13), (14), (15), (16): Xaa is A or G
  MOD_RES (17), (18), (19), (20): Xaa is A or G or is absent

SEQ ID NO: 35577 - protein, 35 aa, Artificial Sequence; identical to SEQ ID NO: 11677
  GFR-binding peptide
  MOD_RES (1), (33), (34): Xaa is C or S

SEQ ID NO: 35578 - protein, 39 aa, Artificial Sequence; identical to SEQ ID NO: 11679
  GFR-binding peptide
  MOD_RES (2), (4), (37), (38): Xaa is C or S
  MOD_RES (15), (16), (17), (18), (19): Xaa is A or G
  MOD_RES (20), (21), (22), (23): Xaa is A or G or is absent

SEQ ID NO: 35579 - protein, 37 aa, Artificial Sequence
  GFR-binding peptide
  MOD_RES (31), (32): Xaa is C or S
SKVIMNSLQEIKPTKGIYYLITLPELDQSVXXPSASA

SEQ ID NO: 35580 - protein, 37 aa, Artificial Sequence; identical to SEQ ID NO: 11680
  GFR-binding peptide
  MOD_RES (2), (4), (37): Xaa is C or S
  MOD_RES (15), (16), (17), (18), (19): Xaa is A or G
  MOD_RES (20), (21), (22), (23): Xaa is A or G or is absent

SEQ ID NO: 35581 - protein, 40 aa, Artificial Sequence; identical to SEQ ID NO: 11682
  GFR-binding peptide
  MOD_RES (2), (4), (36), (37): Xaa is C or S

SEQ ID NO: 35582 - protein, 37 aa, Artificial Sequence; identical to SEQ ID NO: 11683
  GFR-binding peptide
  MOD_RES (1), (34), (35): Xaa is C or S
  MOD_RES (12), (13), (14), (15), (16): Xaa is A or G
  MOD_RES (17), (18), (19), (20): Xaa is A or G or is absent

SEQ ID NO: 35583 - protein, 32 aa, Artificial Sequence; identical to SEQ ID NO: 2327
  GFR-binding peptide
  MOD_RES (31), (32): Xaa is C or S

SEQ ID NO: 35584 - protein, 36 aa, Artificial Sequence; identical to SEQ ID NO: 11684
  GFR-binding peptide
  MOD_RES (1), (3), (35), (36): Xaa is C or S

SEQ ID NO: 35585 - protein, 36 aa, Artificial Sequence; identical to SEQ ID NO: 11685
  GFR-binding peptide
  MOD_RES (2), (35), (36): Xaa is C or S
  MOD_RES (13), (14), (15), (16), (17): Xaa is A or G
  MOD_RES (18), (19), (20), (21): Xaa is A or G or is absent

SEQ ID NO: 35586 - protein, 35 aa, Artificial Sequence; identical to SEQ ID NO: 11686
  GFR-binding peptide
  MOD_RES (33), (34): Xaa is C or S
  MOD_RES (11), (12), (13), (14), (15): Xaa is A or G
  MOD_RES (16), (17), (18), (19): Xaa is A or G or is absent

SEQ ID NO: 35587 - protein, 36 aa, Artificial Sequence; identical to SEQ ID NO: 9823
  GFR-binding peptide
  MOD_RES (1), (3): Xaa is C or S
  MOD_RES (15), (16), (17), (18), (19): Xaa is A or G
  MOD_RES (20), (21), (22), (23): Xaa is A or G or is absent

SEQ ID NO: 35588 - protein, 38 aa, Artificial Sequence; identical to SEQ ID NO: 11687
  GFR-binding peptide
  MOD_RES (2), (34), (35): Xaa is C or S

SEQ ID NO: 35589 - protein, 39 aa, Artificial Sequence; identical to SEQ ID NO: 11688
  GFR-binding peptide
  MOD_RES (2), (33), (34): Xaa is C or S

SEQ ID NO: 35590 - protein, 41 aa, Artificial Sequence; identical to SEQ ID NO: 11689
  GFR-binding peptide
  MOD_RES (2), (4), (38), (39): Xaa is C or S
  MOD_RES (16), (17), (18), (19), (20): Xaa is A or G
  MOD_RES (21), (22), (23), (24): Xaa is A or G or is absent

SEQ ID NO: 35591 - protein, 34 aa, Artificial Sequence; identical to SEQ ID NO: 11691
  GFR-binding peptide
  MOD_RES (2), (34): Xaa is C or S

SEQ ID NO: 35592 - protein, 38 aa, Artificial Sequence; identical to SEQ ID NO: 9824
  GFR-binding peptide
  MOD_RES (2), (4), (38): Xaa is C or S
  MOD_RES (16), (17), (18), (19), (20): Xaa is A or G
  MOD_RES (21), (22), (23), (24): Xaa is A or G or is absent

SEQ ID NO: 35593 - protein, 40 aa, Artificial Sequence; identical to SEQ ID NO: 9825
  GFR-binding peptide
  MOD_RES (1), (3), (34), (35): Xaa is C or S

SEQ ID NO: 35594 - protein, 36 aa, Artificial Sequence; identical to SEQ ID NO: 11693
  GFR-binding peptide
  MOD_RES (2), (33), (34): Xaa is C or S

SEQ ID NO: 35595 - protein, 35 aa, Artificial Sequence; identical to SEQ ID NO: 9827
  GFR-binding peptide
  MOD_RES (2), (4): Xaa is C or S

SEQ ID NO: 35596 - protein, 40 aa, Artificial Sequence
  GFR-binding peptide
  MOD_RES (1), (3), (34), (35): Xaa is C or S
XKXSKVIMNSLQEIKPTKGIYYLITLPELDQSVXXPSASA

SEQ ID NO: 35597 - protein, 36 aa, Artificial Sequence; identical to SEQ ID NO: 11694
  GFR-binding peptide
  MOD_RES (1), (33), (34): Xaa is C or S

SEQ ID NO: 35598 - protein, 34 aa, Artificial Sequence; identical to SEQ ID NO: 9829
  GFR-binding peptide
  MOD_RES (1), (1): Xaa is C or S
  MOD_RES (13), (14), (15), (16), (17): Xaa is A or G
  MOD_RES (18), (19), (20), (21): Xaa is A or G or is absent

SEQ ID NO: 35599 - protein, 38 aa, Artificial Sequence; identical to SEQ ID NO: 9830
  GFR-binding peptide
  MOD_RES (33), (34): Xaa is C or S
  MOD_RES (11), (12), (13), (14), (15): Xaa is A or G
  MOD_RES (16), (17), (18), (19): Xaa is A or G or is absent

SEQ ID NO: 35600 - protein, 34 aa, Artificial Sequence; identical to SEQ ID NO: 4277
  GFR-binding peptide
  MOD_RES (1), (1): Xaa is C or S
  MOD_RES (13), (14), (15), (16), (17): Xaa is A or G
  MOD_RES (18), (19), (20), (21): Xaa is A or G or is absent

SEQ ID NO: 35601 - protein, 31 aa, Artificial Sequence; identical to SEQ ID NO: 11698
  GFR-binding peptide
  MOD_RES (31), (31): Xaa is C or S

SEQ ID NO: 35602 - protein, 31 aa, Artificial Sequence; identical to SEQ ID NO: 9831
  GFR-binding peptide

SEQ ID NO: 35603 - protein, 36 aa, Artificial Sequence; identical to SEQ ID NO: 11699
  GFR-binding peptide
  MOD_RES (2), (33), (34): Xaa is C or S

SEQ ID NO: 35604 - protein, 40 aa, Artificial Sequence; identical to SEQ ID NO: 9832
  GFR-binding peptide
  MOD_RES (2), (36), (37): Xaa is C or S
  MOD_RES (14), (15), (16), (17), (18): Xaa is A or G
  MOD_RES (19), (20), (21), (22): Xaa is A or G or is absent

SEQ ID NO: 35605 - protein, 40 aa, Artificial Sequence; identical to SEQ ID NO: 11701
  GFR-binding peptide
  MOD_RES (2), (4), (36), (37): Xaa is C or S

SEQ ID NO: 35606 - protein, 32 aa, Artificial Sequence; identical to SEQ ID NO: 9834
  GFR-binding peptide
  MOD_RES (1), (1): Xaa is C or S

SEQ ID NO: 35607 - protein, 37 aa, Artificial Sequence; identical to SEQ ID NO: 11702
  GFR-binding peptide
  MOD_RES (1), (35), (36): Xaa is C or S
  MOD_RES (13), (14), (15), (16), (17): Xaa is A or G
  MOD_RES (18), (19), (20), (21): Xaa is A or G or is absent

SEQ ID NO: 35608 - protein, 41 aa, Artificial Sequence; identical to SEQ ID NO: 9835
  GFR-binding peptide
  MOD_RES (2), (4), (38), (39): Xaa is C or S
  MOD_RES (16), (17), (18), (19), (20): Xaa is A or G
  MOD_RES (21), (22), (23), (24): Xaa is A or G or is absent

SEQ ID NO: 35609 - protein, 39 aa, Artificial Sequence; identical to SEQ ID NO: 11703
  GFR-binding peptide
  MOD_RES (1), (3), (37), (38): Xaa is C or S
  MOD_RES (15), (16), (17), (18), (19): Xaa is A or G
  MOD_RES (20), (21), (22), (23): Xaa is A or G or is absent

SEQ ID NO: 35610 - protein, 33 aa, Artificial Sequence
  GFR-binding peptide
  MOD_RES (1), (1): Xaa is C or S
  MOD_RES (12), (13), (14), (15), (16): Xaa is A or G
  MOD_RES (17), (18), (19), (20): Xaa is A or G or is absent
XSKVIMNSLQEXXXXXXXXXYYLITLPELDQSV

SEQ ID NO: 35611 - protein, 40 aa, Artificial Sequence; identical to SEQ ID NO: 11704
  GFR-binding peptide
  MOD_RES (1), (3), (34), (35): Xaa is C or S

SEQ ID NO: 35612 - protein, 35 aa, Artificial Sequence; identical to SEQ ID NO: 9836
  GFR-binding peptide
  MOD_RES (31), (32): Xaa is C or S

SEQ ID NO: 35613 - protein, 42 aa, Artificial Sequence; identical to SEQ ID NO: 9838
  GFR-binding peptide
  MOD_RES (2), (4), (37), (38): Xaa is C or S
  MOD_RES (15), (16), (17), (18), (19): Xaa is A or G
  MOD_RES (20), (21), (22), (23): Xaa is A or G or is absent

SEQ ID NO: 35614 - protein, 36 aa, Artificial Sequence; identical to SEQ ID NO: 9839
  GFR-binding peptide
  MOD_RES (1), (3), (36): Xaa is C or S
  MOD_RES (14), (15), (16), (17), (18): Xaa is A or G
  MOD_RES (19), (20), (21), (22): Xaa is A or G or is absent

SEQ ID NO: 35615 - protein, 35 aa, Artificial Sequence; identical to SEQ ID NO: 11705
  GFR-binding peptide
  MOD_RES (1), (3), (35): Xaa is C or S

SEQ ID NO: 35616 - protein, 37 aa, Artificial Sequence; identical to SEQ ID NO: 9841
  GFR-binding peptide
  MOD_RES (1), (3), (37): Xaa is C or S
  MOD_RES (15), (16), (17), (18), (19): Xaa is A or G
  MOD_RES (20), (21), (22), (23): Xaa is A or G or is absent

SEQ ID NO: 35617 - protein, 33 aa, Artificial Sequence; identical to SEQ ID NO: 11706
  GFR-binding peptide
  MOD_RES (1), (32), (33): Xaa is C or S

SEQ ID NO: 35618 - protein, 37 aa, Artificial Sequence; identical to SEQ ID NO: 11708
  GFR-binding peptide
  MOD_RES (2), (34), (35): Xaa is C or S

SEQ ID NO: 35619 - protein, 35 aa, Artificial Sequence; identical to SEQ ID NO: 11709
  GFR-binding peptide
  MOD_RES (2), (34), (35): Xaa is C or S

SEQ ID NO: 35620 - protein, 36 aa, Artificial Sequence; identical to SEQ ID NO: 9842
  GFR-binding peptide
  MOD_RES (1), (33), (34): Xaa is C or S

SEQ ID NO: 35621 - protein, 35 aa, Artificial Sequence
  GFR-binding peptide
  MOD_RES (2), (33), (34): Xaa is C or S
KXSKVIMNSLQEIKPTKGIYYLITLPELDQSVXXP

SEQ ID NO: 35622 - protein, 37 aa, Artificial Sequence; identical to SEQ ID NO: 9843
  GFR-binding peptide
  MOD_RES (2), (36), (37): Xaa is C or S
  MOD_RES (14), (15), (16), (17), (18): Xaa is A or G
  MOD_RES (19), (20), (21), (22): Xaa is A or G or is absent

SEQ ID NO: 35623 - protein, 42 aa, Artificial Sequence; identical to SEQ ID NO: 11710
  GFR-binding peptide
  MOD_RES (2), (4), (36), (37): Xaa is C or S

SEQ ID NO: 35624 - protein, 38 aa, Artificial Sequence; identical to SEQ ID NO: 2351
  GFR-binding peptide
  MOD_RES (1), (3), (35), (36): Xaa is C or S

SEQ ID NO: 35625 - protein, 39 aa, Artificial Sequence; identical to SEQ ID NO: 9847
  GFR-binding peptide
  MOD_RES (2), (4), (38): Xaa is C or S
  MOD_RES (16), (17), (18), (19), (20): Xaa is A or G
  MOD_RES (21), (22), (23), (24): Xaa is A or G or is absent

SEQ ID NO: 35626 - protein, 34 aa, Artificial Sequence; identical to SEQ ID NO: 11711
  GFR-binding peptide
  MOD_RES (1), (1): Xaa is C or S
  MOD_RES (13), (14), (15), (16), (17): Xaa is A or G
  MOD_RES (18), (19), (20), (21): Xaa is A or G or is absent

SEQ ID NO: 35627 - protein, 34 aa, Artificial Sequence; identical to SEQ ID NO: 2356
  GFR-binding peptide
  MOD_RES (1), (34): Xaa is C or S
  MOD_RES (12), (13), (14), (15), (16): Xaa is A or G
  MOD_RES (17), (18), (19), (20): Xaa is A or G or is absent

SEQ ID NO: 35628 - protein, 40 aa, Artificial Sequence; identical to SEQ ID NO: 11713
  GFR-binding peptide
  MOD_RES (2), (4), (35), (36): Xaa is C or S

SEQ ID NO: 35629 - protein, 40 aa, Artificial Sequence; identical to SEQ ID NO: 11714
  GFR-binding peptide
  MOD_RES (1), (3), (37), (38): Xaa is C or S
  MOD_RES (15), (16), (17), (18), (19): Xaa is A or G
  MOD_RES (20), (21), (22), (23): Xaa is A or G or is absent

SEQ ID NO: 35630 - protein, 37 aa, Artificial Sequence; identical to SEQ ID NO: 11715
  GFR-binding peptide
  MOD_RES (34), (35): Xaa is C or S
  MOD_RES (12), (13), (14), (15), (16): Xaa is A or G
  MOD_RES (17), (18), (19), (20): Xaa is A or G or is absent

SEQ ID NO: 35631 - protein, 43 aa, Artificial Sequence; identical to SEQ ID NO: 2357
  GFR-binding peptide
  MOD_RES (2), (4), (38), (39): Xaa is C or S
  MOD_RES (16), (17), (18), (19), (20): Xaa is A or G
  MOD_RES (21), (22), (23), (24): Xaa is A or G or is absent

SEQ ID NO: 35632 - protein, 37 aa, Artificial Sequence; identical to SEQ ID NO: 9850
  GFR-binding peptide
  MOD_RES (2), (4): Xaa is C or S
  MOD_RES (16), (17), (18), (19), (20): Xaa is A or G
  MOD_RES (21), (22), (23), (24): Xaa is A or G or is absent

SEQ ID NO: 35633 - protein, 33 aa, Artificial Sequence; identical to SEQ ID NO: 2358
  GFR-binding peptide
  MOD_RES (33), (33): Xaa is C or S
  MOD_RES (11), (12), (13), (14), (15): Xaa is A or G
  MOD_RES (16), (17), (18), (19): Xaa is A or G or is absent

SEQ ID NO: 35634 - protein, 38 aa, Artificial Sequence; identical to SEQ ID NO: 2359
  GFR-binding peptide
  MOD_RES (1), (34), (35): Xaa is C or S
  MOD_RES (12), (13), (14), (15), (16): Xaa is A or G
  MOD_RES (17), (18), (19), (20): Xaa is A or G or is absent

SEQ ID NO: 35635 - protein, 41 aa, Artificial Sequence; identical to SEQ ID NO: 9853
  GFR-binding peptide
  MOD_RES (2), (4), (36), (37): Xaa is C or S

SEQ ID NO: 35636 - protein, 39 aa, Artificial Sequence; identical to SEQ ID NO: 11716
  GFR-binding peptide
  MOD_RES (2), (4), (36), (37): Xaa is C or S

SEQ ID NO: 35637 - protein, 37 aa, Artificial Sequence; identical to SEQ ID NO: 2360
  GFR-binding peptide
  MOD_RES (1), (3), (37): Xaa is C or S
  MOD_RES (15), (16), (17), (18), (19): Xaa is A or G
  MOD_RES (20), (21), (22), (23): Xaa is A or G or is absent

SEQ ID NO: 35638 - protein, 35 aa, Artificial Sequence; identical to SEQ ID NO: 11717
  GFR-binding peptide
  MOD_RES (34), (35): Xaa is C or S
  MOD_RES (12), (13), (14), (15), (16): Xaa is A or G
  MOD_RES (17), (18), (19), (20): Xaa is A or G or is absent

SEQ ID NO: 35639 - protein, 38 aa, Artificial Sequence; identical to SEQ ID NO: 9855
  GFR-binding peptide
  MOD_RES (2), (33), (34): Xaa is C or S

SEQ ID NO: 35640 - protein, 36 aa, Artificial Sequence; identical to SEQ ID NO: 11718
  GFR-binding peptide
  MOD_RES (1), (3), (36): Xaa is C or S
  MOD_RES (14), (15), (16), (17), (18): Xaa is A or G
  MOD_RES (19), (20), (21), (22): Xaa is A or G or is absent

SEQ ID NO: 35641 - protein, 39 aa, Artificial Sequence; identical to SEQ ID NO: 2363
  GFR-binding peptide
  MOD_RES (33), (34): Xaa is C or S
  MOD_RES (11), (12), (13), (14), (15): Xaa is A or G
  MOD_RES (16), (17), (18), (19): Xaa is A or G or is absent

SEQ ID NO: 35642 - protein, 40 aa, Artificial Sequence; identical to SEQ ID NO: 9858
  GFR-binding peptide
  MOD_RES (1), (35), (36): Xaa is C or S
  MOD_RES (13), (14), (15), (16), (17): Xaa is A or G
  MOD_RES (18), (19), (20), (21): Xaa is A or G or is absent

SEQ ID NO: 35643 - protein, 38 aa, Artificial Sequence; identical to SEQ ID NO: 4294
  GFR-binding peptide
  MOD_RES (33), (34): Xaa is C or S
  MOD_RES (11), (12), (13), (14), (15): Xaa is A or G
  MOD_RES (16), (17), (18), (19): Xaa is A or G or is absent

SEQ ID NO: 35644 - protein, 33 aa, Artificial Sequence; identical to SEQ ID NO: 4295
  GFR-binding peptide
  MOD_RES (2), (33): Xaa is C or S

SEQ ID NO: 35645 - protein, 32 aa, Artificial Sequence; identical to SEQ ID NO: 9860
  GFR-binding peptide
  MOD_RES (31), (32): Xaa is C or S

SEQ ID NO: 35646 - protein, 39 aa, Artificial Sequence; identical to SEQ ID NO: 11721
  GFR-binding peptide
  MOD_RES (2), (36), (37): Xaa is C or S
  MOD_RES (14), (15), (16), (17), (18): Xaa is A or G
  MOD_RES (19), (20), (21), (22): Xaa is A or G or is absent

SEQ ID NO: 35647 - protein, 40 aa, Artificial Sequence; identical to SEQ ID NO: 9862
  GFR-binding peptide
  MOD_RES (2), (4), (35), (36): Xaa is C or S

SEQ ID NO: 35648 - protein, 39 aa, Artificial Sequence; identical to SEQ ID NO: 4297
  GFR-binding peptide
  MOD_RES (2), (4), (38), (39): Xaa is C or S
  MOD_RES (16), (17), (18), (19), (20): Xaa is A or G
  MOD_RES (21), (22), (23), (24): Xaa is A or G or is absent

SEQ ID NO: 35649 - protein, 41 aa, Artificial Sequence; identical to SEQ ID NO: 11723
  GFR-binding peptide
  MOD_RES (1), (3), (36), (37): Xaa is C or S
  MOD_RES (14), (15), (16), (17), (18): Xaa is A or G
  MOD_RES (19), (20), (21), (22): Xaa is A or G or is absent

SEQ ID NO: 35650 - protein, 33 aa, Artificial Sequence; identical to SEQ ID NO: 4298
  GFR-binding peptide
  MOD_RES (2), (33): Xaa is C or S

SEQ ID NO: 35651 - protein, 37 aa, Artificial Sequence; identical to SEQ ID NO: 4299
  GFR-binding peptide
  MOD_RES (2), (36), (37): Xaa is C or S
  MOD_RES (14), (15), (16), (17), (18): Xaa is A or G
  MOD_RES (19), (20), (21), (22): Xaa is A or G or is absent

SEQ ID NO: 35652 - protein, 42 aa, Artificial Sequence; identical to SEQ ID NO: 9864
  GFR-binding peptide
  MOD_RES (2), (4), (38): Xaa is C or S
  MOD_RES (16), (17), (18), (19), (20): Xaa is A or G
  MOD_RES (21), (22), (23), (24): Xaa is A or G or is absent

SEQ ID NO: 35653 - protein, 36 aa, Artificial Sequence; identical to SEQ ID NO: 9865
  GFR-binding peptide
  MOD_RES (1), (34), (35): Xaa is C or S
  MOD_RES (12), (13), (14), (15), (16): Xaa is A or G
  MOD_RES (17), (18), (19), (20): Xaa is A or G or is absent

SEQ ID NO: 35654 - protein, 32 aa, Artificial Sequence; identical to SEQ ID NO: 9866
  GFR-binding peptide
  MOD_RES (32), (32): Xaa is C or S

SEQ ID NO: 35655 - protein, 39 aa, Artificial Sequence; identical to SEQ ID NO: 9867
  GFR-binding peptide
  MOD_RES (1), (3), (35), (36): Xaa is C or S

SEQ ID NO: 35656 - protein, 39 aa, Artificial Sequence; identical to SEQ ID NO: 11728
  GFR-binding peptide
  MOD_RES (2), (34), (35): Xaa is C or S

SEQ ID NO: 35657 - protein, 33 aa, Artificial Sequence; identical to SEQ ID NO: 11729
  GFR-binding peptide
  MOD_RES (12), (13), (14), (15), (16): Xaa is A or G
  MOD_RES (17), (18), (19), (20): Xaa is A or G or is absent

SEQ ID NO: 35658 - protein, 40 aa, Artificial Sequence; identical to SEQ ID NO: 4305
  GFR-binding peptide
  MOD_RES (2), (4), (36), (37): Xaa is C or S

SEQ ID NO: 35659 - protein, 36 aa, Artificial Sequence; identical to SEQ ID NO: 11732
  GFR-binding peptide
  MOD_RES (1), (3), (35), (36): Xaa is C or S

SEQ ID NO: 35660 - protein, 37 aa, Artificial Sequence; identical to SEQ ID NO: 11733
  GFR-binding peptide
  MOD_RES (1), (3), (37): Xaa is C or S
  MOD_RES (15), (16), (17), (18), (19): Xaa is A or G
  MOD_RES (20), (21), (22), (23): Xaa is A or G or is absent

SEQ ID NO: 35661 - protein, 32 aa, Artificial Sequence; identical to SEQ ID NO: 4308
  GFR-binding peptide
  MOD_RES (31), (32): Xaa is C or S

SEQ ID NO: 35662 - protein, 38 aa, Artificial Sequence; identical to SEQ ID NO: 9871
  GFR-binding peptide
  MOD_RES (1), (35): Xaa is C or S
  MOD_RES (13), (14), (15), (16), (17): Xaa is A or G
  MOD_RES (18), (19), (20), (21): Xaa is A or G or is absent

SEQ ID NO: 35663 - protein, 37 aa, Artificial Sequence; identical to SEQ ID NO: 11736
  GFR-binding peptide
  MOD_RES (33), (34): Xaa is C or S
  MOD_RES (11), (12), (13), (14), (15): Xaa is A or G
  MOD_RES (16), (17), (18), (19): Xaa is A or G or is absent

SEQ ID NO: 35664 - protein, 41 aa, Artificial Sequence; identical to SEQ ID NO: 11737
  GFR-binding peptide
  MOD_RES (2), (4), (38), (39): Xaa is C or S
  MOD_RES (16), (17), (18), (19), (20): Xaa is A or G
  MOD_RES (21), (22), (23), (24): Xaa is A or G or is absent

SEQ ID NO: 35665 - protein, 32 aa, Artificial Sequence; identical to SEQ ID NO: 4313
  GFR-binding peptide
  MOD_RES (1), (1): Xaa is C or S

SEQ ID NO: 35666 - protein, 43 aa, Artificial Sequence; identical to SEQ ID NO: 9872
  GFR-binding peptide
  MOD_RES (2), (4), (37), (38): Xaa is C or S
  MOD_RES (15), (16), (17), (18), (19): Xaa is A or G
  MOD_RES (20), (21), (22), (23): Xaa is A or G or is absent

SEQ ID NO: 35667 - protein, 31 aa, Artificial Sequence; identical to SEQ ID NO: 9874
  GFR-binding peptide
  MOD_RES (31), (31): Xaa is C or S

SEQ ID NO: 35668 - protein, 37 aa, Artificial Sequence; identical to SEQ ID NO: 11740
  GFR-binding peptide
  MOD_RES (1), (34), (35): Xaa is C or S
  MOD_RES (12), (13), (14), (15), (16): Xaa is A or G
  MOD_RES (17), (18), (19), (20): Xaa is A or G or is absent

SEQ ID NO: 35669 - protein, 31 aa, Artificial Sequence; identical to SEQ ID NO: 9875
  GFR-binding peptide
  MOD_RES (31), (31): Xaa is C or S

SEQ ID NO: 35670 - protein, 41 aa, Artificial Sequence; identical to SEQ ID NO: 9876
  GFR-binding peptide
  MOD_RES (1), (3), (37), (38): Xaa is C or S
  MOD_RES (15), (16), (17), (18), (19): Xaa is A or G
  MOD_RES (20), (21), (22), (23): Xaa is A or G or is absent

SEQ ID NO: 35671 - protein, 36 aa, Artificial Sequence; identical to SEQ ID NO: 11741
  GFR-binding peptide
  MOD_RES (2), (33), (34): Xaa is C or S

SEQ ID NO: 35672 - protein, 35 aa, Artificial Sequence; identical to SEQ ID NO: 2390
  GFR-binding peptide
  MOD_RES (1), (32), (33): Xaa is C or S

SEQ ID NO: 35673 - protein, 32 aa, Artificial Sequence; identical to SEQ ID NO: 9879
  GFR-binding peptide
  MOD_RES (31), (32): Xaa is C or S

SEQ ID NO: 35674 - protein, 41 aa, Artificial Sequence; identical to SEQ ID NO: 2394
  GFR-binding peptide
  MOD_RES (2), (36), (37): Xaa is C or S
  MOD_RES (14), (15), (16), (17), (18): Xaa is A or G
  MOD_RES (19), (20), (21), (22): Xaa is A or G or is absent

SEQ ID NO: 35675 - protein, 38 aa, Artificial Sequence; identical to SEQ ID NO: 9881
  GFR-binding peptide
  MOD_RES (2), (4), (37), (38): Xaa is C or S
  MOD_RES (15), (16), (17), (18), (19): Xaa is A or G
  MOD_RES (20), (21), (22), (23): Xaa is A or G or is absent

SEQ ID NO: 35676 - protein, 39 aa, Artificial Sequence; identical to SEQ ID NO: 9882
  GFR-binding peptide
  MOD_RES (33), (33): Xaa is C or S
  MOD_RES (11), (12), (13), (14), (15): Xaa is A or G
  MOD_RES (16), (17), (18), (19): Xaa is A or G or is absent

SEQ ID NO: 35677 - protein, 39 aa, Artificial Sequence; identical to SEQ ID NO: 9883
  GFR-binding peptide
  MOD_RES (1), (3), (36), (37): Xaa is C or S
  MOD_RES (14), (15), (16), (17), (18): Xaa is A or G
  MOD_RES (19), (20), (21), (22): Xaa is A or G or is absent

SEQ ID NO: 35678 - protein, 35 aa, Artificial Sequence; identical to SEQ ID NO: 9884
  GFR-binding peptide
  MOD_RES (33), (34): Xaa is C or S
  MOD_RES (11), (12), (13), (14), (15): Xaa is A or G
  MOD_RES (16), (17), (18), (19): Xaa is A or G or is absent

SEQ ID NO: 35679 - protein, 37 aa, Artificial Sequence; identical to SEQ ID NO: 9885
  GFR-binding peptide
  MOD_RES (34), (35): Xaa is C or S
  MOD_RES (12), (13), (14), (15), (16): Xaa is A or G
  MOD_RES (17), (18), (19), (20): Xaa is A or G or is absent

SEQ ID NO: 35680 - protein, 34 aa, Artificial Sequence; identical to SEQ ID NO: 9886
  GFR-binding peptide
  MOD_RES (31), (31): Xaa is C or S

SEQ ID NO: 35681 - protein, 44 aa, Artificial Sequence; identical to SEQ ID NO: 11742
  GFR-binding peptide
  MOD_RES (2), (4), (38), (39): Xaa is C or S
  MOD_RES (16), (17), (18), (19), (20): Xaa is A or G
  MOD_RES (21), (22), (23), (24): Xaa is A or G or is absent

SEQ ID NO: 35682 - protein, 44 aa, Artificial Sequence; identical to SEQ ID NO: 9887
  GFR-binding peptide
  MOD_RES (2), (4), (38), (39): Xaa is C or S
  MOD_RES (16), (17), (18), (19), (20): Xaa is A or G
  MOD_RES (21), (22), (23), (24): Xaa is A or G or is absent

SEQ ID NO: 35683 - protein, 36 aa, Artificial Sequence; identical to SEQ ID NO: 2398
  GFR-binding peptide
  MOD_RES (1), (34), (35): Xaa is C or S
  MOD_RES (12), (13), (14), (15), (16): Xaa is A or G
  MOD_RES (17), (18), (19), (20): Xaa is A or G or is absent

SEQ ID NO: 35684 - protein, 39 aa, Artificial Sequence; identical to SEQ ID NO: 9890
  GFR-binding peptide
  MOD_RES (34), (35): Xaa is C or S
  MOD_RES (12), (13), (14), (15), (16): Xaa is A or G
  MOD_RES (17), (18), (19), (20): Xaa is A or G or is absent

SEQ ID NO: 35685 - protein, 42 aa, Artificial Sequence; identical to SEQ ID NO: 9891
  GFR-binding peptide
  MOD_RES (1), (3), (37): Xaa is C or S
  MOD_RES (15), (16), (17), (18), (19): Xaa is A or G
  MOD_RES (20), (21), (22), (23): Xaa is A or G or is absent

SEQ ID NO: 35686 - protein, 33 aa, Artificial Sequence; identical to SEQ ID NO: 11744
  GFR-binding peptide
  MOD_RES (2), (2): Xaa is C or S

SEQ ID NO: 35687 - protein, 39 aa, Artificial Sequence; identical to SEQ ID NO: 9892
  GFR-binding peptide
  MOD_RES (2), (4), (37), (38): Xaa is C or S
  MOD_RES (15), (16), (17), (18), (19): Xaa is A or G
  MOD_RES (20), (21), (22), (23): Xaa is A or G or is absent

SEQ ID NO: 35688 - protein, 41 aa, Artificial Sequence; identical to SEQ ID NO: 9893
  GFR-binding peptide
  MOD_RES (1), (3), (37), (38): Xaa is C or S
  MOD_RES (15), (16), (17), (18), (19): Xaa is A or G
  MOD_RES (20), (21), (22), (23): Xaa is A or G or is absent

SEQ ID NO: 35689 - protein, 37 aa, Artificial Sequence; identical to SEQ ID NO: 9894
  GFR-binding peptide
  MOD_RES (2), (4), (37): Xaa is C or S
  MOD_RES (15), (16), (17), (18), (19): Xaa is A or G
  MOD_RES (20), (21), (22), (23): Xaa is A or G or is absent

SEQ ID NO: 35690 - protein, 38 aa, Artificial Sequence; identical to SEQ ID NO: 11745
  GFR-binding peptide
  MOD_RES (2), (4), (38): Xaa is C or S
  MOD_RES (16), (17), (18), (19), (20): Xaa is A or G
  MOD_RES (21), (22), (23), (24): Xaa is A or G or is absent

SEQ ID NO: 35691 - protein, 39 aa, Artificial Sequence; identical to SEQ ID NO: 9896
  GFR-binding peptide
  MOD_RES (1), (35), (36): Xaa is C or S
  MOD_RES (13), (14), (15), (16), (17): Xaa is A or G
  MOD_RES (18), (19), (20), (21): Xaa is A or G or is absent

SEQ ID NO: 35692 - protein, 38 aa, Artificial Sequence; identical to SEQ ID NO: 11746
  GFR-binding peptide
  MOD_RES (1), (35), (36): Xaa is C or S
  MOD_RES (13), (14), (15), (16), (17): Xaa is A or G
  MOD_RES (18), (19), (20), (21): Xaa is A or G or is absent

SEQ ID NO: 35693 - protein, 38 aa, Artificial Sequence; identical to SEQ ID NO: 4329
  GFR-binding peptide
  MOD_RES (1), (33), (34): Xaa is C or S

SEQ ID NO: 35694 - protein, 35 aa, Artificial Sequence; identical to SEQ ID NO: 4331
  GFR-binding peptide
  MOD_RES (34), (35): Xaa is C or S
  MOD_RES (12), (13), (14), (15), (16): Xaa is A or G
  MOD_RES (17), (18), (19), (20): Xaa is A or G or is absent

SEQ ID NO: 35695 - protein, 36 aa, Artificial Sequence; identical to SEQ ID NO: 9897
  GFR-binding peptide
  MOD_RES (33), (34): Xaa is C or S
  MOD_RES (11), (12), (13), (14), (15): Xaa is A or G
  MOD_RES (16), (17), (18), (19): Xaa is A or G or is absent

SEQ ID NO: 35696 - protein, 38 aa, Artificial Sequence; identical to SEQ ID NO: 11750
  GFR-binding peptide
  MOD_RES (33), (34): Xaa is C or S
  MOD_RES (11), (12), (13), (14), (15): Xaa is A or G
  MOD_RES (16), (17), (18), (19): Xaa is A or G or is absent

SEQ ID NO: 35697 - protein, 38 aa, Artificial Sequence; identical to SEQ ID NO: 9898
  GFR-binding peptide
  MOD_RES (1), (3), (37), (38): Xaa is C or S
  MOD_RES (15), (16), (17), (18), (19): Xaa is A or G
  MOD_RES (20), (21), (22), (23): Xaa is A or G or is absent

SEQ ID NO: 35698 - protein, 39 aa, Artificial Sequence; identical to SEQ ID NO: 9899
  GFR-binding peptide
  MOD_RES (2), (34): Xaa is C or S

SEQ ID NO: 35699 - protein, 33 aa, Artificial Sequence; identical to SEQ ID NO: 4335
  GFR-binding peptide
  MOD_RES (1), (1): Xaa is C or S
  MOD_RES (12), (13), (14), (15), (16): Xaa is A or G
  MOD_RES (17), (18), (19), (20): Xaa is A or G or is absent

SEQ ID NO: 35700 - protein, 37 aa, Artificial Sequence; identical to SEQ ID NO: 11752
  GFR-binding peptide
  MOD_RES (2), (34), (35): Xaa is C or S

SEQ ID NO: 35701 - protein, 39 aa, Artificial Sequence; identical to SEQ ID NO: 2406
  GFR-binding peptide
  MOD_RES (2), (4), (38), (39): Xaa is C or S
  MOD_RES (16), (17), (18), (19), (20): Xaa is A or G
  MOD_RES (21), (22), (23), (24): Xaa is A or G or is absent

SEQ ID NO: 35702 - protein, 34 aa, Artificial Sequence; identical to SEQ ID NO: 4338
  GFR-binding peptide
  MOD_RES (1), (34): Xaa is C or S
  MOD_RES (12), (13), (14), (15), (16): Xaa is A or G
  MOD_RES (17), (18), (19), (20): Xaa is A or G or is absent

SEQ ID NO: 35703 - protein, 40 aa, Artificial Sequence; identical to SEQ ID NO: 11755
  GFR-binding peptide
  MOD_RES (2), (35), (36): Xaa is C or S
  MOD_RES (13), (14), (15), (16), (17): Xaa is A or G
  MOD_RES (18), (19), (20), (21): Xaa is A or G or is absent

SEQ ID NO: 35704 - protein, 37 aa, Artificial Sequence; identical to SEQ ID NO: 9901
  GFR-binding peptide
  MOD_RES (33), (34): Xaa is C or S
  MOD_RES (11), (12), (13), (14), (15): Xaa is A or G
  MOD_RES (16), (17), (18), (19): Xaa is A or G or is absent

SEQ ID NO: 35705 - protein, 38 aa, Artificial Sequence; identical to SEQ ID NO: 2407
  GFR-binding peptide
  MOD_RES (33), (34): Xaa is C or S
  MOD_RES (11), (12), (13), (14), (15): Xaa is A or G
  MOD_RES (16), (17), (18), (19): Xaa is A or G or is absent

SEQ ID NO: 35706 - protein, 41 aa, Artificial Sequence; identical to SEQ ID NO: 9904
  GFR-binding peptide
  MOD_RES (2), (35), (36): Xaa is C or S
  MOD_RES (13), (14), (15), (16), (17): Xaa is A or G
  MOD_RES (18), (19), (20), (21): Xaa is A or G or is absent

SEQ ID NO: 35707 - protein, 35 aa, Artificial Sequence; identical to SEQ ID NO: 9907
  GFR-binding peptide
  MOD_RES (1), (3), (34), (35): Xaa is C or S

SEQ ID NO: 35708 - protein, 38 aa, Artificial Sequence; identical to SEQ ID NO: 9908
  GFR-binding peptide
  MOD_RES (2), (4), (36), (37): Xaa is C or S

SEQ ID NO: 35709 - protein, 37 aa, Artificial Sequence; identical to SEQ ID NO: 11756
  GFR-binding peptide
  MOD_RES (1), (35), (36): Xaa is C or S
  MOD_RES (13), (14), (15), (16), (17): Xaa is A or G
  MOD_RES (18), (19), (20), (21): Xaa is A or G or is absent

SEQ ID NO: 35710 - protein, 42 aa, Artificial Sequence; identical to SEQ ID NO: 11757
  GFR-binding peptide
  MOD_RES (1), (3), (36), (37): Xaa is C or S
  MOD_RES (14), (15), (16), (17), (18): Xaa is A or G
  MOD_RES (19), (20), (21), (22): Xaa is A or G or is absent

SEQ ID NO: 35711 - protein, 35 aa, Artificial Sequence; identical to SEQ ID NO: 9909
  GFR-binding peptide
  MOD_RES (1), (3): Xaa is C or S
  MOD_RES (14), (15), (16), (17), (18): Xaa is A or G
  MOD_RES (19), (20), (21), (22): Xaa is A or G or is absent

SEQ ID NO: 35712 - protein, 43 aa, Artificial Sequence; identical to SEQ ID NO: 11758
  GFR-binding peptide
  MOD_RES (2), (4), (37), (38): Xaa is C or S
  MOD_RES (15), (16), (17), (18), (19): Xaa is A or G
  MOD_RES (20), (21), (22), (23): Xaa is A or G or is absent

SEQ ID NO: 35713 - protein, 34 aa, Artificial Sequence; identical to SEQ ID NO: 9910
  GFR-binding peptide
  MOD_RES (32), (33): Xaa is C or S

SEQ ID NO: 35714 - protein, 40 aa, Artificial Sequence; identical to SEQ ID NO: 9911
  GFR-binding peptide
  MOD_RES (2), (34), (35): Xaa is C or S

SEQ ID NO: 35715 - protein, 38 aa, Artificial Sequence; identical to SEQ ID NO: 11760
  GFR-binding peptide
  MOD_RES (2), (36), (37): Xaa is C or S
  MOD_RES (14), (15), (16), (17), (18): Xaa is A or G
  MOD_RES (19), (20), (21), (22): Xaa is A or G or is absent

SEQ ID NO: 35716 - protein, 38 aa, Artificial Sequence; identical to SEQ ID NO: 9912
  GFR-binding peptide
  MOD_RES (2), (4), (37), (38): Xaa is C or S
  MOD_RES (15), (16), (17), (18), (19): Xaa is A or G
  MOD_RES (20), (21), (22), (23): Xaa is A or G or is absent

SEQ ID NO: 35717 - protein, 36 aa, Artificial Sequence; identical to SEQ ID NO: 2418
  GFR-binding peptide
  MOD_RES (1), (32), (33): Xaa is C or S

SEQ ID NO: 35718 - protein, 32 aa, Artificial Sequence; identical to SEQ ID NO: 11761
  GFR-binding peptide
  MOD_RES (31), (32): Xaa is C or S

SEQ ID NO: 35719 - protein, 33 aa, Artificial Sequence; identical to SEQ ID NO: 4350
  GFR-binding peptide
  MOD_RES (33), (33): Xaa is C or S
  MOD_RES (11), (12), (13), (14), (15): Xaa is A or G
  MOD_RES (16), (17), (18), (19): Xaa is A or G or is absent

SEQ ID NO: 35720 - protein, 36 aa, Artificial Sequence; identical to SEQ ID NO: 11764
  GFR-binding peptide
  MOD_RES (2), (34), (35): Xaa is C or S

SEQ ID NO: 35721 - protein, 34 aa, Artificial Sequence; identical to SEQ ID NO: 4351
  GFR-binding peptide
  MOD_RES (1), (32), (33): Xaa is C or S

SEQ ID NO: 35722 - protein, 34 aa, Artificial Sequence; identical to SEQ ID NO: 9914
  GFR-binding peptide
  MOD_RES (1), (3): Xaa is C or S

SEQ ID NO: 35723 - protein, 37 aa, Artificial Sequence; identical to SEQ ID NO: 11766
  GFR-binding peptide
  MOD_RES (1), (35), (36): Xaa is C or S
  MOD_RES (13), (14), (15), (16), (17): Xaa is A or G
  MOD_RES (18), (19), (20), (21): Xaa is A or G or is absent

SEQ ID NO: 35724 - protein, 34 aa, Artificial Sequence; identical to SEQ ID NO: 11767
  GFR-binding peptide
  MOD_RES (1), (3): Xaa is C or S

SEQ ID NO: 35725 - protein, 41 aa, Artificial Sequence; identical to SEQ ID NO: 9916
  GFR-binding peptide
  MOD_RES (1), (35): Xaa is C or S
  MOD_RES (13), (14), (15), (16), (17): Xaa is A or G
  MOD_RES (18), (19), (20), (21): Xaa is A or G or is absent

SEQ ID NO: 35726 - protein, 39 aa, Artificial Sequence; identical to SEQ ID NO: 11768
  GFR-binding peptide
  MOD_RES (1), (3), (36), (37): Xaa is C or S
  MOD_RES (14), (15), (16), (17), (18): Xaa is A or G
  MOD_RES (19), (20), (21), (22): Xaa is A or G or is absent

SEQ ID NO: 35727 - protein, 37 aa, Artificial Sequence; identical to SEQ ID NO: 11769
  GFR-binding peptide
  MOD_RES (31), (32): Xaa is C or S

SEQ ID NO: 35728 - protein, 36 aa, Artificial Sequence; identical to SEQ ID NO: 11770
  GFR-binding peptide
  MOD_RES (1), (3): Xaa is C or S
  MOD_RES (15), (16), (17), (18), (19): Xaa is A or G
  MOD_RES (20), (21), (22), (23): Xaa is A or G or is absent

SEQ ID NO: 35729 - protein, 33 aa, Artificial Sequence; identical to SEQ ID NO: 11772
  GFR-binding peptide
  MOD_RES (31), (32): Xaa is C or S

SEQ ID NO: 35730 - protein, 41 aa, Artificial Sequence; identical to SEQ ID NO: 11773
  GFR-binding peptide
  MOD_RES (2), (36), (37): Xaa is C or S
  MOD_RES (14), (15), (16), (17), (18): Xaa is A or G
  MOD_RES (19), (20), (21), (22): Xaa is A or G or is absent

SEQ ID NO: 35731 - protein, 35 aa, Artificial Sequence; identical to SEQ ID NO: 2426
  GFR-binding peptide
  MOD_RES (2), (2): Xaa is C or S
  MOD_RES (14), (15), (16), (17), (18): Xaa is A or G
  MOD_RES (19), (20), (21), (22): Xaa is A or G or is absent

SEQ ID NO: 35732 - protein, 30 aa, Artificial Sequence; identical to SEQ ID NO: 9919
  GFR-binding peptide

SEQ ID NO: 35733 - protein, 40 aa, Artificial Sequence; identical to SEQ ID NO: 9920
  GFR-binding peptide
  MOD_RES (34), (35): Xaa is C or S
  MOD_RES (12), (13), (14), (15), (16): Xaa is A or G
  MOD_RES (17), (18), (19), (20): Xaa is A or G or is absent

SEQ ID NO: 35734 - protein, 37 aa, Artificial Sequence; identical to SEQ ID NO: 4357
  GFR-binding peptide
  MOD_RES (2), (4): Xaa is C or S
  MOD_RES (16), (17), (18), (19), (20): Xaa is A or G
  MOD_RES (21), (22), (23), (24): Xaa is A or G or is absent

SEQ ID NO: 35735 - protein, 38 aa, Artificial Sequence; identical to SEQ ID NO: 11776
  GFR-binding peptide
  MOD_RES (2), (4), (35), (36): Xaa is C or S

SEQ ID NO: 35736 - protein, 37 aa, Artificial Sequence; identical to SEQ ID NO: 9921
  GFR-binding peptide
  MOD_RES (1), (3), (34), (35): Xaa is C or S

SEQ ID NO: 35737 - protein, 42 aa, Artificial Sequence; identical to SEQ ID NO: 4359
  GFR-binding peptide
  MOD_RES (2), (4), (38), (39): Xaa is C or S
  MOD_RES (16), (17), (18), (19), (20): Xaa is A or G
  MOD_RES (21), (22), (23), (24): Xaa is A or G or is absent

SEQ ID NO: 35738 - protein, 42 aa, Artificial Sequence; identical to SEQ ID NO: 4360
  GFR-binding peptide
  MOD_RES (2), (36), (37): Xaa is C or S
  MOD_RES (14), (15), (16), (17), (18): Xaa is A or G
  MOD_RES (19), (20), (21), (22): Xaa is A or G or is absent

SEQ ID NO: 35739 - protein, 40 aa, Artificial Sequence
  GFR-binding peptide
  MOD_RES (2), (4), (37), (38): Xaa is C or S
  MOD_RES (15), (16), (17), (18), (19): Xaa is A or G
  MOD_RES (20), (21), (22), (23): Xaa is A or G or is absent
SXKXSKVIMNSLQEXXXXXXXXXYYLITLPELDQSVXXPS

SEQ ID NO: 35740 - protein, 40 aa, Artificial Sequence; identical to SEQ ID NO: 11779
  GFR-binding peptide
  MOD_RES (34), (35): Xaa is C or S
  MOD_RES (12), (13), (14), (15), (16): Xaa is A or G
  MOD_RES (17), (18), (19), (20): Xaa is A or G or is absent

SEQ ID NO: 35741 - protein, 32 aa, Artificial Sequence; identical to SEQ ID NO: 9922
  GFR-binding peptide
  MOD_RES (11), (12), (13), (14), (15): Xaa is A or G
  MOD_RES (16), (17), (18), (19): Xaa is A or G or is absent

SEQ ID NO: 35742 - protein, 38 aa, Artificial Sequence; identical to SEQ ID NO: 9923
  GFR-binding peptide
  MOD_RES (1), (35), (36): Xaa is C or S
  MOD_RES (13), (14), (15), (16), (17): Xaa is A or G
  MOD_RES (18), (19), (20), (21): Xaa is A or G or is absent

SEQ ID NO: 35743 - protein, 39 aa, Artificial Sequence
  GFR-binding peptide
  MOD_RES (2), (35), (36): Xaa is C or S
  MOD_RES (13), (14), (15), (16), (17): Xaa is A or G
  MOD_RES (18), (19), (20), (21): Xaa is A or G or is absent
KXSKVIMNSLQEXXXXXXXXXYYLITLPELDQSVXXPSA

SEQ ID NO: 35744 - protein, 38 aa, Artificial Sequence; identical to SEQ ID NO: 9924
  GFR-binding peptide
  MOD_RES (2), (4), (36), (37): Xaa is C or S

SEQ ID NO: 35745 - protein, 37 aa, Artificial Sequence; identical to SEQ ID NO: 9925
  GFR-binding peptide
  MOD_RES (1), (3), (37): Xaa is C or S
  MOD_RES (15), (16), (17), (18), (19): Xaa is A or G
  MOD_RES (20), (21), (22), (23): Xaa is A or G or is absent

SEQ ID NO: 35746 - protein, 38 aa, Artificial Sequence; identical to SEQ ID NO: 11781
  GFR-binding peptide
  MOD_RES (34), (35): Xaa is C or S
  MOD_RES (12), (13), (14), (15), (16): Xaa is A or G
  MOD_RES (17), (18), (19), (20): Xaa is A or G or is absent

SEQ ID NO: 35747 - protein, 38 aa, Artificial Sequence; identical to SEQ ID NO: 9926
  GFR-binding peptide
  MOD_RES (33), (34): Xaa is C or S
  MOD_RES (11), (12), (13), (14), (15): Xaa is A or G
  MOD_RES (16), (17), (18), (19): Xaa is A or G or is absent

SEQ ID NO: 35748 - protein, 36 aa, Artificial Sequence
  GFR-binding peptide
  MOD_RES (1), (34), (35): Xaa is C or S
  MOD_RES (12), (13), (14), (15), (16): Xaa is A or G
  MOD_RES (17), (18), (19), (20): Xaa is A or G or is absent
XSKVIMNSLQEXXXXXXXXXYYLITLPELDQSVXXP

SEQ ID NO: 35749 - protein, 32 aa, Artificial Sequence; identical to SEQ ID NO: 11782
  GFR-binding peptide
  MOD_RES (11), (12), (13), (14), (15): Xaa is A or G
  MOD_RES (16), (17), (18), (19): Xaa is A or G or is absent

SEQ ID NO: 35750 - protein, 31 aa, Artificial Sequence; identical to SEQ ID NO: 9927
  GFR-binding peptide
  MOD_RES (31), (31): Xaa is C or S

SEQ ID NO: 35751 - protein, 34 aa, Artificial Sequence; identical to SEQ ID NO: 11783
  GFR-binding peptide
  MOD_RES (31), (32): Xaa is C or S

SEQ ID NO: 35752 - protein, 36 aa, Artificial Sequence; identical to SEQ ID NO: 9928
  GFR-binding peptide
  MOD_RES (2), (36): Xaa is C or S
  MOD_RES (14), (15), (16), (17), (18): Xaa is A or G
  MOD_RES (19), (20), (21), (22): Xaa is A or G or is absent

SEQ ID NO: 35753 - protein, 39 aa, Artificial Sequence; identical to SEQ ID NO: 9929
  GFR-binding peptide
  MOD_RES (33), (34): Xaa is C or S
  MOD_RES (11), (12), (13), (14), (15): Xaa is A or G
  MOD_RES (16), (17), (18), (19): Xaa is A or G or is absent

SEQ ID NO: 35754 - protein, 36 aa, Artificial Sequence; identical to SEQ ID NO: 11785
  GFR-binding peptide
  MOD_RES (1), (3), (36): Xaa is C or S
  MOD_RES (14), (15), (16), (17), (18): Xaa is A or G
  MOD_RES (19), (20), (21), (22): Xaa is A or G or is absent

SEQ ID NO: 35755 - protein, 32 aa, Artificial Sequence; identical to SEQ ID NO: 11786
  GFR-binding peptide
  MOD_RES (1), (32): Xaa is C or S

SEQ ID NO: 35756 - protein, 39 aa, Artificial Sequence; identical to SEQ ID NO: 11787
  GFR-binding peptide
  MOD_RES (1), (35), (36): Xaa is C or S
  MOD_RES (13), (14), (15), (16), (17): Xaa is A or G
  MOD_RES (18), (19), (20), (21): Xaa is A or G or is absent

SEQ ID NO: 35757 - protein, 36 aa, Artificial Sequence; identical to SEQ ID NO: 9931
  GFR-binding peptide
  MOD_RES (2), (36): Xaa is C or S
  MOD_RES (14), (15), (16), (17), (18): Xaa is A or G
  MOD_RES (19), (20), (21), (22): Xaa is A or G or is absent

SEQ ID NO: 35758 - protein, 32 aa, Artificial Sequence; identical to SEQ ID NO: 9932
  GFR-binding peptide
  MOD_RES (1), (32): Xaa is C or S

SEQ ID NO: 35759 - protein, 36 aa, Artificial Sequence; identical to SEQ ID NO: 11788
  GFR-binding peptide
  MOD_RES (31), (32): Xaa is C or S

SEQ ID NO: 35760 - protein, 37 aa, Artificial Sequence; identical to SEQ ID NO: 11789
  GFR-binding peptide
  MOD_RES (2), (34), (35): Xaa is C or S

SEQ ID NO: 35761 - protein, 33 aa, Artificial Sequence; identical to SEQ ID NO: 2439
  GFR-binding peptide
  MOD_RES (31), (32): Xaa is C or S

SEQ ID NO: 35762 - protein, 37 aa, Artificial Sequence; identical to SEQ ID NO: 9935
  GFR-binding peptide
  MOD_RES (31), (32): Xaa is C or S

SEQ ID NO: 35763 - protein, 34 aa, Artificial Sequence
  GFR-binding peptide
  MOD_RES (2), (2): Xaa is C or S
  MOD_RES (13), (14), (15), (16), (17): Xaa is A or G
  MOD_RES (18), (19), (20), (21): Xaa is A or G or is absent
KXSKVIMNSLQEXXXXXXXXXYYLITLPELDQSV

SEQ ID NO: 35764 - protein, 36 aa, Artificial Sequence; identical to SEQ ID NO: 9936
  GFR-binding peptide
  MOD_RES (32), (33): Xaa is C or S

SEQ ID NO: 35765 - protein, 40 aa, Artificial Sequence; identical to SEQ ID NO: 9937
  GFR-binding peptide
  MOD_RES (2), (4), (35), (36): Xaa is C or S

SEQ ID NO: 35766 - protein, 41 aa, Artificial Sequence; identical to SEQ ID NO: 11791
  GFR-binding peptide
  MOD_RES (1), (3), (37), (38): Xaa is C or S
  MOD_RES (15), (16), (17), (18), (19): Xaa is A or G
  MOD_RES (20), (21), (22), (23): Xaa is A or G or is absent

SEQ ID NO: 35767 - protein, 37 aa, Artificial Sequence; identical to SEQ ID NO: 9938
  GFR-binding peptide
  MOD_RES (1), (3), (37): Xaa is C or S
  MOD_RES (15), (16), (17), (18), (19): Xaa is A or G
  MOD_RES (20), (21), (22), (23): Xaa is A or G or is absent

SEQ ID NO: 35768 - protein, 34 aa, Artificial Sequence; identical to SEQ ID NO: 11792
  GFR-binding peptide
  MOD_RES (1), (3): Xaa is C or S

SEQ ID NO: 35769 - protein, 38 aa, Artificial Sequence; identical to SEQ ID NO: 9939
  GFR-binding peptide
  MOD_RES (33), (34): Xaa is C or S
  MOD_RES (11), (12), (13), (14), (15): Xaa is A or G
  MOD_RES (16), (17), (18), (19): Xaa is A or G or is absent

SEQ ID NO: 35770 - protein, 37 aa, Artificial Sequence; identical to SEQ ID NO: 11793
  GFR-binding peptide
  MOD_RES (31), (32): Xaa is C or S

SEQ ID NO: 35771 - protein, 31 aa, Artificial Sequence; identical to SEQ ID NO: 9940
  GFR-binding peptide
  MOD_RES (1), (1): Xaa is C or S

SEQ ID NO: 35772 - protein, 37 aa, Artificial Sequence; identical to SEQ ID NO: 11795
  GFR-binding peptide
  MOD_RES (1), (3), (36), (37): Xaa is C or S
  MOD_RES (14), (15), (16), (17), (18): Xaa is A or G
  MOD_RES (19), (20), (21), (22): Xaa is A or G or is absent

SEQ ID NO: 35773 - protein, 32 aa, Artificial Sequence; identical to SEQ ID NO: 9941
  GFR-binding peptide
  MOD_RES (11), (12), (13), (14), (15): Xaa is A or G
  MOD_RES (16), (17), (18), (19): Xaa is A or G or is absent

SEQ ID NO: 35774 - protein, 34 aa, Artificial Sequence; identical to SEQ ID NO: 9942
  GFR-binding peptide
  MOD_RES (1), (3): Xaa is C or S

SEQ ID NO: 35775 - protein, 40 aa, Artificial Sequence; identical to SEQ ID NO: 11796
  GFR-binding peptide
  MOD_RES (2), (4), (38), (39): Xaa is C or S
  MOD_RES (16), (17), (18), (19), (20): Xaa is A or G
  MOD_RES (21), (22), (23), (24): Xaa is A or G or is absent

SEQ ID NO: 35776 - protein, 35 aa, Artificial Sequence; identical to SEQ ID NO: 11797
  GFR-binding peptide
  MOD_RES (31), (31): Xaa is C or S

SEQ ID NO: 35777 - protein, 41 aa, Artificial Sequence; identical to SEQ ID NO: 9943
  GFR-binding peptide
  MOD_RES (2), (36), (37): Xaa is C or S
  MOD_RES (14), (15), (16), (17), (18): Xaa is A or G
  MOD_RES (19), (20), (21), (22): Xaa is A or G or is absent

SEQ ID NO: 35778 - protein, 40 aa, Artificial Sequence; identical to SEQ ID NO: 9944
  GFR-binding peptide
  MOD_RES (34), (35): Xaa is C or S
  MOD_RES (12), (13), (14), (15), (16): Xaa is A or G
  MOD_RES (17), (18), (19), (20): Xaa is A or G or is absent

SEQ ID NO: 35779 - protein, 34 aa, Artificial Sequence; identical to SEQ ID NO: 9945
  GFR-binding peptide
  MOD_RES (2), (2): Xaa is C or S
  MOD_RES (13), (14), (15), (16), (17): Xaa is A or G
  MOD_RES (18), (19), (20), (21): Xaa is A or G or is absent

SEQ ID NO: 35780 - protein, 34 aa, Artificial Sequence; identical to SEQ ID NO: 9946
  GFR-binding peptide
  MOD_RES (34), (34): Xaa is C or S
  MOD_RES (12), (13), (14), (15), (16): Xaa is A or G
  MOD_RES (17), (18), (19), (20): Xaa is A or G or is absent

SEQ ID NO: 35781 - protein, 35 aa, Artificial Sequence; identical to SEQ ID NO: 11800
  GFR-binding peptide
  MOD_RES (2), (4): Xaa is C or S

SEQ ID NO: 35782 - protein, 39 aa, Artificial Sequence; identical to SEQ ID NO: 9947
  GFR-binding peptide
  MOD_RES (1), (3), (37), (38): Xaa is C or S
  MOD_RES (15), (16), (17), (18), (19): Xaa is A or G
  MOD_RES (20), (21), (22), (23): Xaa is A or G or is absent

SEQ ID NO: 35783 - protein, 34 aa, Artificial Sequence; identical to SEQ ID NO: 9948
  GFR-binding peptide
  MOD_RES (1), (1): Xaa is C or S
  MOD_RES (13), (14), (15), (16), (17): Xaa is A or G
  MOD_RES (18), (19), (20), (21): Xaa is A or G or is absent

SEQ ID NO: 35784 - protein, 44 aa, Artificial Sequence; identical to SEQ ID NO: 11802
  GFR-binding peptide
  MOD_RES (2), (4), (38), (39): Xaa is C or S
  MOD_RES (16), (17), (18), (19), (20): Xaa is A or G
  MOD_RES (21), (22), (23), (24): Xaa is A or G or is absent

SEQ ID NO: 35785 - protein, 31 aa, Artificial Sequence; identical to SEQ ID NO: 2448
  GFR-binding peptide
  MOD_RES (31), (31): Xaa is C or S

SEQ ID NO: 35786 - protein, 34 aa, Artificial Sequence; identical to SEQ ID NO: 9950
  GFR-binding peptide
  MOD_RES (32), (33): Xaa is C or S

SEQ ID NO: 35787 - protein, 34 aa, Artificial Sequence; identical to SEQ ID NO: 11803
  GFR-binding peptide
  MOD_RES (32), (33): Xaa is C or S

SEQ ID NO: 35788 - protein, 40 aa, Artificial Sequence; identical to SEQ ID NO: 4376
  GFR-binding peptide
  MOD_RES (2), (34), (35): Xaa is C or S

SEQ ID NO: 35789 - protein, 38 aa, Artificial Sequence; identical to SEQ ID NO: 11805
  GFR-binding peptide
  MOD_RES (34), (35): Xaa is C or S
  MOD_RES (12), (13), (14), (15), (16): Xaa is A or G
  MOD_RES (17), (18), (19), (20): Xaa is A or G or is absent

SEQ ID NO: 35790 - protein, 39 aa, Artificial Sequence; identical to SEQ ID NO: 9951
  GFR-binding peptide
  MOD_RES (34), (35): Xaa is C or S
  MOD_RES (12), (13), (14), (15), (16): Xaa is A or G
  MOD_RES (17), (18), (19), (20): Xaa is A or G or is absent

SEQ ID NO: 35791 - protein, 43 aa, Artificial Sequence; identical to SEQ ID NO: 11806
  GFR-binding peptide
  MOD_RES (2), (4), (38), (39): Xaa is C or S
  MOD_RES (16), (17), (18), (19), (20): Xaa is A or G
  MOD_RES (21), (22), (23), (24): Xaa is A or G or is absent

SEQ ID NO: 35792 - protein, 37 aa, Artificial Sequence; identical to SEQ ID NO: 11808
  GFR-binding peptide
  MOD_RES (34), (35): Xaa is C or S
  MOD_RES (12), (13), (14), (15), (16): Xaa is A or G
  MOD_RES (17), (18), (19), (20): Xaa is A or G or is absent

SEQ ID NO: 35793 - protein, 41 aa, Artificial Sequence; identical to SEQ ID NO: 9952
  GFR-binding peptide
  MOD_RES (2), (4), (36), (37): Xaa is C or S

SEQ ID NO: 35794 - protein, 36 aa, Artificial Sequence; identical to SEQ ID NO: 11810
  GFR-binding peptide
  MOD_RES (1), (35), (36): Xaa is C or S
  MOD_RES (13), (14), (15), (16), (17): Xaa is A or G
  MOD_RES (18), (19), (20), (21): Xaa is A or G or is absent

SEQ ID NO: 35795 - protein, 40 aa, Artificial Sequence; identical to SEQ ID NO: 2454
  GFR-binding peptide
  MOD_RES (2), (4), (36), (37): Xaa is C or S

SEQ ID NO: 35796 - protein, 36 aa, Artificial Sequence; identical to SEQ ID NO: 11811
  GFR-binding peptide
  MOD_RES (2), (4), (36): Xaa is C or S

SEQ ID NO: 35797 - protein, 36 aa, Artificial Sequence; identical to SEQ ID NO: 4386
  GFR-binding peptide
  MOD_RES (2), (4): Xaa is C or S
  MOD_RES (15), (16), (17), (18), (19): Xaa is A or G
  MOD_RES (20), (21), (22), (23): Xaa is A or G or is absent

SEQ ID NO: 35798 - protein, 34 aa, Artificial Sequence; identical to SEQ ID NO: 11814
  GFR-binding peptide
  MOD_RES (1), (34): Xaa is C or S
  MOD_RES (12), (13), (14), (15), (16): Xaa is A or G
  MOD_RES (17), (18), (19), (20): Xaa is A or G or is absent

SEQ ID NO: 35799 - protein, 42 aa, Artificial Sequence; identical to SEQ ID NO: 9955
  GFR-binding peptide
  MOD_RES (2), (4), (37), (38): Xaa is C or S
  MOD_RES (15), (16), (17), (18), (19): Xaa is A or G
  MOD_RES (20), (21), (22), (23): Xaa is A or G or is absent

SEQ ID NO: 35800 - protein, 44 aa, Artificial Sequence; identical to SEQ ID NO: 11815
  GFR-binding peptide
  MOD_RES (2), (4), (38): Xaa is C or S
  MOD_RES (16), (17), (18), (19), (20): Xaa is A or G
  MOD_RES (21), (22), (23), (24): Xaa is A or G or is absent

SEQ ID NO: 35801 - protein, 39 aa, Artificial Sequence; identical to SEQ ID NO: 11816
  GFR-binding peptide
  MOD_RES (2), (33), (34): Xaa is C or S

SEQ ID NO: 35802 - protein, 33 aa, Artificial Sequence; identical to SEQ ID NO: 9957
  GFR-binding peptide
  MOD_RES (1), (33): Xaa is C or S

SEQ ID NO: 35803 - protein, 40 aa, Artificial Sequence; identical to SEQ ID NO: 9958
  GFR-binding peptide
  MOD_RES (1), (35), (36): Xaa is C or S
  MOD_RES (13), (14), (15), (16), (17): Xaa is A or G
  MOD_RES (18), (19), (20), (21): Xaa is A or G or is absent

SEQ ID NO: 35804 - protein, 35 aa, Artificial Sequence; identical to SEQ ID NO: 9959
  GFR-binding peptide
  MOD_RES (1), (33), (34): Xaa is C or S

SEQ ID NO: 35805 - protein, 37 aa, Artificial Sequence; identical to SEQ ID NO: 9960
  GFR-binding peptide
  MOD_RES (32), (33): Xaa is C or S

SEQ ID NO: 35806 - protein, 42 aa, Artificial Sequence; identical to SEQ ID NO: 4388
  GFR-binding peptide
  MOD_RES (2), (4), (38), (39): Xaa is C or S
  MOD_RES (16), (17), (18), (19), (20): Xaa is A or G
  MOD_RES (21), (22), (23), (24): Xaa is A or G or is absent

SEQ ID NO: 35807 - protein, 37 aa, Artificial Sequence; identical to SEQ ID NO: 11818
  GFR-binding peptide
  MOD_RES (2), (33), (34): Xaa is C or S

SEQ ID NO: 35808 - protein, 36 aa, Artificial Sequence; identical to SEQ ID NO: 11819
  GFR-binding peptide
  MOD_RES (34), (35): Xaa is C or S
  MOD_RES (12), (13), (14), (15), (16): Xaa is A or G
  MOD_RES (17), (18), (19), (20): Xaa is A or G or is absent

SEQ ID NO: 35809 - protein, 33 aa, Artificial Sequence; identical to SEQ ID NO: 2458
  GFR-binding peptide
  MOD_RES (33), (33): Xaa is C or S
  MOD_RES (11), (12), (13), (14), (15): Xaa is A or G
  MOD_RES (16), (17), (18), (19): Xaa is A or G or is absent

SEQ ID NO: 35810 - protein, 38 aa, Artificial Sequence; identical to SEQ ID NO: 9962
  GFR-binding peptide
  MOD_RES (2), (4), (37), (38): Xaa is C or S
  MOD_RES (15), (16), (17), (18), (19): Xaa is A or G
  MOD_RES (20), (21), (22), (23): Xaa is A or G or is absent

SEQ ID NO: 35811 - protein, 38 aa, Artificial Sequence; identical to SEQ ID NO: 9963
  GFR-binding peptide
  MOD_RES (1), (33), (34): Xaa is C or S

SEQ ID NO: 35812 - protein, 40 aa, Artificial Sequence; identical to SEQ ID NO: 11823
  GFR-binding peptide
  MOD_RES (2), (36), (37): Xaa is C or S
  MOD_RES (14), (15), (16), (17), (18): Xaa is A or G
  MOD_RES (19), (20), (21), (22): Xaa is A or G or is absent

SEQ ID NO: 35813 - protein, 37 aa, Artificial Sequence; identical to SEQ ID NO: 9965
  GFR-binding peptide
  MOD_RES (1), (3), (34), (35): Xaa is C or S

SEQ ID NO: 35814 - protein, 35 aa, Artificial Sequence; identical to SEQ ID NO: 9966
  GFR-binding peptide
  MOD_RES (1), (32), (33): Xaa is C or S

SEQ ID NO: 35815 - protein, 40 aa, Artificial Sequence; identical to SEQ ID NO: 9967
  GFR-binding peptide
  MOD_RES (2), (4), (38), (39): Xaa is C or S
  MOD_RES (16), (17), (18), (19), (20): Xaa is A or G
  MOD_RES (21), (22), (23), (24): Xaa is A or G or is absent

SEQ ID NO: 35816 - protein, 38 aa, Artificial Sequence; identical to SEQ ID NO: 11824
  GFR-binding peptide
  MOD_RES (2), (35), (36): Xaa is C or S
  MOD_RES (13), (14), (15), (16), (17): Xaa is A or G
  MOD_RES (18), (19), (20), (21): Xaa is A or G or is absent

SEQ ID NO: 35817 - protein, 40 aa, Artificial Sequence; identical to SEQ ID NO: 9969
  GFR-binding peptide
  MOD_RES (2), (4), (38), (39): Xaa is C or S
  MOD_RES (16), (17), (18), (19), (20): Xaa is A or G
  MOD_RES (21), (22), (23), (24): Xaa is A or G or is absent

SEQ ID NO: 35818 - protein, 34 aa, Artificial Sequence; identical to SEQ ID NO: 9970
  GFR-binding peptide
  MOD_RES (31), (32): Xaa is C or S

SEQ ID NO: 35819 - protein, 35 aa, Artificial Sequence; identical to SEQ ID NO: 11826
  GFR-binding peptide
  MOD_RES (34), (35): Xaa is C or S
  MOD_RES (12), (13), (14), (15), (16): Xaa is A or G
  MOD_RES (17), (18), (19), (20): Xaa is A or G or is absent

SEQ ID NO: 35820 - protein, 35 aa, Artificial Sequence; identical to SEQ ID NO: 11827
  GFR-binding peptide
  MOD_RES (32), (33): Xaa is C or S

SEQ ID NO: 35821 - protein, 36 aa, Artificial Sequence; identical to SEQ ID NO: 11828
  GFR-binding peptide
  MOD_RES (31), (32): Xaa is C or S

SEQ ID NO: 35822 - protein, 32 aa, Artificial Sequence; identical to SEQ ID NO: 2470
  GFR-binding peptide
  MOD_RES (11), (12), (13), (14), (15): Xaa is A or G
  MOD_RES (16), (17), (18), (19): Xaa is A or G or is absent

SEQ ID NO: 35823 - protein, 40 aa, Artificial Sequence; identical to SEQ ID NO: 9973
  GFR-binding peptide
  MOD_RES (1), (35), (36): Xaa is C or S
  MOD_RES (13), (14), (15), (16), (17): Xaa is A or G
  MOD_RES (18), (19), (20), (21): Xaa is A or G or is absent

SEQ ID NO: 35824 - protein, 38 aa, Artificial Sequence; identical to SEQ ID NO: 11830
  GFR-binding peptide
  MOD_RES (32), (33): Xaa is C or S

SEQ ID NO: 35825 - protein, 39 aa, Artificial Sequence; identical to SEQ ID NO: 2476
  GFR-binding peptide
  MOD_RES (2), (36), (37): Xaa is C or S
  MOD_RES (14), (15), (16), (17), (18): Xaa is A or G
  MOD_RES (19), (20), (21), (22): Xaa is A or G or is absent

SEQ ID NO: 35826 - protein, 35 aa, Artificial Sequence; identical to SEQ ID NO: 9976
  GFR-binding peptide
  MOD_RES (33), (34): Xaa is C or S
  MOD_RES (11), (12), (13), (14), (15): Xaa is A or G
  MOD_RES (16), (17), (18), (19): Xaa is A or G or is absent

SEQ ID NO: 35827 - protein, 34 aa, Artificial Sequence; identical to SEQ ID NO: 9977
  GFR-binding peptide
  MOD_RES (1), (33), (34): Xaa is C or S

SEQ ID NO: 35828 - protein, 34 aa, Artificial Sequence; identical to SEQ ID NO: 9978
  GFR-binding peptide
  MOD_RES (1), (34): Xaa is C or S
  MOD_RES (12), (13), (14), (15), (16): Xaa is A or G
  MOD_RES (17), (18), (19), (20): Xaa is A or G or is absent

SEQ ID NO: 35829 - protein, 40 aa, Artificial Sequence; identical to SEQ ID NO: 4406
  GFR-binding peptide
  MOD_RES (2), (4), (36), (37): Xaa is C or S

SEQ ID NO: 35830 - protein, 34 aa, Artificial Sequence; identical to SEQ ID NO: 4409
  GFR-binding peptide
  MOD_RES (2), (34): Xaa is C or S

SEQ ID NO: 35831 - protein, 41 aa, Artificial Sequence; identical to SEQ ID NO: 11833
  GFR-binding peptide
  MOD_RES (2), (36), (37): Xaa is C or S
  MOD_RES (14), (15), (16), (17), (18): Xaa is A or G
  MOD_RES (19), (20), (21), (22): Xaa is A or G or is absent

SEQ ID NO: 35832 - protein, 39 aa, Artificial Sequence; identical to SEQ ID NO: 9980
  GFR-binding peptide
  MOD_RES (2), (4), (35), (36): Xaa is C or S

SEQ ID NO: 35833 - protein, 34 aa, Artificial Sequence; identical to SEQ ID NO: 9981
  GFR-binding peptide
  MOD_RES (1), (3): Xaa is C or S

SEQ ID NO: 35834 - protein, 31 aa, Artificial Sequence; identical to SEQ ID NO: 9982
  GFR-binding peptide
  MOD_RES (1), (1): Xaa is C or S

SEQ ID NO: 35835 - protein, 32 aa, Artificial Sequence; identical to SEQ ID NO: 11834
  GFR-binding peptide
  MOD_RES (1), (1): Xaa is C or S

SEQ ID NO: 35836 - protein, 35 aa, Artificial Sequence; identical to SEQ ID NO: 4414
  GFR-binding peptide
  MOD_RES (1), (3), (34), (35): Xaa is C or S

SEQ ID NO: 35837 - protein, 32 aa, Artificial Sequence; identical to SEQ ID NO: 11837
  GFR-binding peptide
  MOD_RES (32), (32): Xaa is C or S

SEQ ID NO: 35838 - protein, 34 aa, Artificial Sequence; identical to SEQ ID NO: 9986
  GFR-binding peptide
  MOD_RES (32), (32): Xaa is C or S

SEQ ID NO: 35839 - protein, 39 aa, Artificial Sequence; identical to SEQ ID NO: 2487
  GFR-binding peptide
  MOD_RES (2), (4), (35), (36): Xaa is C or S

SEQ ID NO: 35840 - protein, 38 aa, Artificial Sequence; identical to SEQ ID NO: 11838
  GFR-binding peptide
  MOD_RES (33), (34): Xaa is C or S
  MOD_RES (11), (12), (13), (14), (15): Xaa is A or G
  MOD_RES (16), (17), (18), (19): Xaa is A or G or is absent

SEQ ID NO: 35841 - protein, 37 aa, Artificial Sequence; identical to SEQ ID NO: 9989
  GFR-binding peptide
  MOD_RES (1), (34), (35): Xaa is C or S
  MOD_RES (12), (13), (14), (15), (16): Xaa is A or G
  MOD_RES (17), (18), (19), (20): Xaa is A or G or is absent

SEQ ID NO: 35842 - protein, 39 aa, Artificial Sequence; identical to SEQ ID NO: 11839
  GFR-binding peptide
  MOD_RES (2), (4), (36), (37): Xaa is C or S

SEQ ID NO: 35843 - protein, 38 aa, Artificial Sequence
  GFR-binding peptide
  MOD_RES (1), (32), (33): Xaa is C or S
XSKVIMNSLQEIKPTKGIYYLITLPELDQSVXXPSASA

SEQ ID NO: 35844 - protein, 39 aa, Artificial Sequence; identical to SEQ ID NO: 2489
  GFR-binding peptide
  MOD_RES (34), (35): Xaa is C or S
  MOD_RES (12), (13), (14), (15), (16): Xaa is A or G
  MOD_RES (17), (18), (19), (20): Xaa is A or G or is absent

SEQ ID NO: 35845 - protein, 33 aa, Artificial Sequence; identical to SEQ ID NO: 4417
  GFR-binding peptide
  MOD_RES (31), (32): Xaa is C or S

SEQ ID NO: 35846 - protein, 36 aa, Artificial Sequence; identical to SEQ ID NO: 4418
  GFR-binding peptide
  MOD_RES (2), (35), (36): Xaa is C or S
  MOD_RES (13), (14), (15), (16), (17): Xaa is A or G
  MOD_RES (18), (19), (20), (21): Xaa is A or G or is absent

SEQ ID NO: 35847 - protein, 34 aa, Artificial Sequence; identical to SEQ ID NO: 9992
  GFR-binding peptide
  MOD_RES (2), (33), (34): Xaa is C or S

SEQ ID NO: 35848 - protein, 38 aa, Artificial Sequence; identical to SEQ ID NO: 11843
  GFR-binding peptide
  MOD_RES (2), (4), (36), (37): Xaa is C or S

SEQ ID NO: 35849 - protein, 40 aa, Artificial Sequence; identical to SEQ ID NO: 9993
  GFR-binding peptide
  MOD_RES (34), (34): Xaa is C or S
  MOD_RES (12), (13), (14), (15), (16): Xaa is A or G
  MOD_RES (17), (18), (19), (20): Xaa is A or G or is absent

SEQ ID NO: 35850 - protein, 42 aa, Artificial Sequence; identical to SEQ ID NO: 11846
  GFR-binding peptide
  MOD_RES (2), (36), (37): Xaa is C or S
  MOD_RES (14), (15), (16), (17), (18): Xaa is A or G
  MOD_RES (19), (20), (21), (22): Xaa is A or G or is absent

SEQ ID NO: 35851 - protein, 39 aa, Artificial Sequence; identical to SEQ ID NO: 9995
  GFR-binding peptide
  MOD_RES (34), (35): Xaa is C or S
  MOD_RES (12), (13), (14), (15), (16): Xaa is A or G
  MOD_RES (17), (18), (19), (20): Xaa is A or G or is absent

SEQ ID NO: 35852 - protein, 35 aa, Artificial Sequence; identical to SEQ ID NO: 9996
  GFR-binding peptide
  MOD_RES (1), (35): Xaa is C or S
  MOD_RES (13), (14), (15), (16), (17): Xaa is A or G
  MOD_RES (18), (19), (20), (21): Xaa is A or G or is absent

SEQ ID NO: 35853 - protein, 43 aa, Artificial Sequence; identical to SEQ ID NO: 11847
  GFR-binding peptide
  MOD_RES (1), (3), (37), (38): Xaa is C or S
  MOD_RES (15), (16), (17), (18), (19): Xaa is A or G
  MOD_RES (20), (21), (22), (23): Xaa is A or G or is absent

SEQ ID NO: 35854 - protein, 34 aa, Artificial Sequence; identical to SEQ ID NO: 11848
  GFR-binding peptide
  MOD_RES (1), (3): Xaa is C or S

SEQ ID NO: 35855 - protein, 34 aa, Artificial Sequence; identical to SEQ ID NO: 11849
  GFR-binding peptide
  MOD_RES (1), (32), (33): Xaa is C or S

SEQ ID NO: 35856 - protein, 36 aa, Artificial Sequence; identical to SEQ ID NO: 9997
  GFR-binding peptide
  MOD_RES (31), (31): Xaa is C or S

SEQ ID NO: 35857 - protein, 36 aa, Artificial Sequence; identical to SEQ ID NO: 11852
  GFR-binding peptide
  MOD_RES (1), (3), (34), (35): Xaa is C or S

SEQ ID NO: 35858 - protein, 38 aa, Artificial Sequence; identical to SEQ ID NO: 4428
  GFR-binding peptide
  MOD_RES (2), (33), (34): Xaa is C or S

SEQ ID NO: 35859 - protein, 36 aa, Artificial Sequence; identical to SEQ ID NO: 4429
  GFR-binding peptide
  MOD_RES (1), (34), (35): Xaa is C or S
  MOD_RES (12), (13), (14), (15), (16): Xaa is A or G
  MOD_RES (17), (18), (19), (20): Xaa is A or G or is absent

SEQ ID NO: 35860 - protein, 42 aa, Artificial Sequence; identical to SEQ ID NO: 11855
  GFR-binding peptide
  MOD_RES (2), (4), (36), (37): Xaa is C or S

SEQ ID NO: 35861 - protein, 41 aa, Artificial Sequence; identical to SEQ ID NO: 10000
  GFR-binding peptide
  MOD_RES (2), (4), (36), (37): Xaa is C or S

SEQ ID NO: 35862 - protein, 39 aa, Artificial Sequence; identical to SEQ ID NO: 10002
  GFR-binding peptide
  MOD_RES (2), (4), (38), (39): Xaa is C or S
  MOD_RES (16), (17), (18), (19), (20): Xaa is A or G
  MOD_RES (21), (22), (23), (24): Xaa is A or G or is absent

SEQ ID NO: 35863 - protein, 33 aa, Artificial Sequence; identical to SEQ ID NO: 11856
  GFR-binding peptide
  MOD_RES (33), (33): Xaa is C or S
  MOD_RES (11), (12), (13), (14), (15): Xaa is A or G
  MOD_RES (16), (17), (18), (19): Xaa is A or G or is absent

SEQ ID NO: 35864 - protein, 37 aa, Artificial Sequence; identical to SEQ ID NO: 10003
  GFR-binding peptide
  MOD_RES (2), (35), (36): Xaa is C or S
  MOD_RES (13), (14), (15), (16), (17): Xaa is A or G
  MOD_RES (18), (19), (20), (21): Xaa is A or G or is absent

SEQ ID NO: 35865 - protein, 36 aa, Artificial Sequence; identical to SEQ ID NO: 11857
  GFR-binding peptide
  MOD_RES (1), (35), (36): Xaa is C or S
  MOD_RES (13), (14), (15), (16), (17): Xaa is A or G
  MOD_RES (18), (19), (20), (21): Xaa is A or G or is absent

SEQ ID NO: 35866 - protein, 36 aa, Artificial Sequence; identical to SEQ ID NO: 4430
  GFR-binding peptide
  MOD_RES (33), (34): Xaa is C or S
  MOD_RES (11), (12), (13), (14), (15): Xaa is A or G
  MOD_RES (16), (17), (18), (19): Xaa is A or G or is absent

SEQ ID NO: 35867 - protein, 34 aa, Artificial Sequence; identical to SEQ ID NO: 4432
  GFR-binding peptide
  MOD_RES (2), (2): Xaa is C or S
  MOD_RES (13), (14), (15), (16), (17): Xaa is A or G
  MOD_RES (18), (19), (20), (21): Xaa is A or G or is absent

SEQ ID NO: 35868 - protein, 37 aa, Artificial Sequence; identical to SEQ ID NO: 11860
  GFR-binding peptide
  MOD_RES (31), (31): Xaa is C or S

SEQ ID NO: 35869 - protein, 38 aa, Artificial Sequence; identical to SEQ ID NO: 10004
  GFR-binding peptide
  MOD_RES (1), (32), (33): Xaa is C or S

SEQ ID NO: 35870 - protein, 34 aa, Artificial Sequence; identical to SEQ ID NO: 10005
  GFR-binding peptide
  MOD_RES (1), (33), (34): Xaa is C or S

SEQ ID NO: 35871 - protein, 38 aa, Artificial Sequence; identical to SEQ ID NO: 11861
  GFR-binding peptide
  MOD_RES (2), (4), (36), (37): Xaa is C or S

SEQ ID NO: 35872 - protein, 30 aa, Artificial Sequence; identical to SEQ ID NO: 10007
  GFR-binding peptide

SEQ ID NO: 35873 - protein, 38 aa, Artificial Sequence; identical to SEQ ID NO: 11862
  GFR-binding peptide
  MOD_RES (32), (33): Xaa is C or S

SEQ ID NO: 35874 - protein, 33 aa, Artificial Sequence; identical to SEQ ID NO: 4435
  GFR-binding peptide
  MOD_RES (1), (32), (33): Xaa is C or S

SEQ ID NO: 35875 - protein, 31 aa, Artificial Sequence; identical to SEQ ID NO: 11864
  GFR-binding peptide

SEQ ID NO: 35876 - protein, 35 aa, Artificial Sequence; identical to SEQ ID NO: 11865
  GFR-binding peptide
  MOD_RES (33), (34): Xaa is C or S
  MOD_RES (11), (12), (13), (14), (15): Xaa is A or G
  MOD_RES (16), (17), (18), (19): Xaa is A or G or is absent

SEQ ID NO: 35877 - protein, 37 aa, Artificial Sequence; identical to SEQ ID NO: 10008
  GFR-binding peptide
  MOD_RES (1), (3), (36), (37): Xaa is C or S
  MOD_RES (14), (15), (16), (17), (18): Xaa is A or G
  MOD_RES (19), (20), (21), (22): Xaa is A or G or is absent

SEQ ID NO: 35878 - protein, 36 aa, Artificial Sequence; identical to SEQ ID NO: 11866
  GFR-binding peptide
  MOD_RES (1), (33), (34): Xaa is C or S

SEQ ID NO: 35879 - protein, 40 aa, Artificial Sequence; identical to SEQ ID NO: 11867
  GFR-binding peptide
  MOD_RES (2), (4), (38), (39): Xaa is C or S
  MOD_RES (16), (17), (18), (19), (20): Xaa is A or G
  MOD_RES (21), (22), (23), (24): Xaa is A or G or is absent

SEQ ID NO: 35880 - protein, 35 aa, Artificial Sequence; identical to SEQ ID NO: 11868
  GFR-binding peptide
  MOD_RES (33), (34): Xaa is C or S
  MOD_RES (11), (12), (13), (14), (15): Xaa is A or G
  MOD_RES (16), (17), (18), (19): Xaa is A or G or is absent

SEQ ID NO: 35881 - protein, 34 aa, Artificial Sequence; identical to SEQ ID NO: 11869
  GFR-binding peptide
  MOD_RES (34), (34): Xaa is C or S
  MOD_RES (12), (13), (14), (15), (16): Xaa is A or G
  MOD_RES (17), (18), (19), (20): Xaa is A or G or is absent

SEQ ID NO: 35882 - protein, 35 aa, Artificial Sequence; identical to SEQ ID NO: 11870
  GFR-binding peptide
  MOD_RES (33), (34): Xaa is C or S
  MOD_RES (11), (12), (13), (14), (15): Xaa is A or G
  MOD_RES (16), (17), (18), (19): Xaa is A or G or is absent

SEQ ID NO: 35883 - protein, 36 aa, Artificial Sequence; identical to SEQ ID NO: 10011
  GFR-binding peptide
  MOD_RES (34), (34): Xaa is C or S
  MOD_RES (12), (13), (14), (15), (16): Xaa is A or G
  MOD_RES (17), (18), (19), (20): Xaa is A or G or is absent

SEQ ID NO: 35884 - protein, 39 aa, Artificial Sequence; identical to SEQ ID NO: 10012
  GFR-binding peptide
  MOD_RES (2), (34), (35): Xaa is C or S

SEQ ID NO: 35885 - protein, 42 aa, Artificial Sequence
  GFR-binding peptide
  MOD_RES (1), (3), (36), (37): Xaa is C or S
  MOD_RES (14), (15), (16), (17), (18): Xaa is A or G
  MOD_RES (19), (20), (21), (22): Xaa is A or G or is absent
XKXSKVIMNSLQEXXXXXXXXXYYLITLPELDQSVXXPSASA

SEQ ID NO: 35886 - protein, 35 aa, Artificial Sequence; identical to SEQ ID NO: 10014
  GFR-binding peptide
  MOD_RES (34), (35): Xaa is C or S
  MOD_RES (12), (13), (14), (15), (16): Xaa is A or G
  MOD_RES (17), (18), (19), (20): Xaa is A or G or is absent

SEQ ID NO: 35887 - protein, 41 aa, Artificial Sequence; identical to SEQ ID NO: 11873
  GFR-binding peptide
  MOD_RES (1), (3), (36), (37): Xaa is C or S
  MOD_RES (14), (15), (16), (17), (18): Xaa is A or G
  MOD_RES (19), (20), (21), (22): Xaa is A or G or is absent

SEQ ID NO: 35888 - protein, 35 aa, Artificial Sequence; identical to SEQ ID NO: 10015
  GFR-binding peptide
  MOD_RES (31), (32): Xaa is C or S

SEQ ID NO: 35889 - protein, 36 aa, Artificial Sequence; identical to SEQ ID NO: 11875
  GFR-binding peptide
  MOD_RES (1), (3), (35): Xaa is C or S

SEQ ID NO: 35890 - protein, 35 aa, Artificial Sequence; identical to SEQ ID NO: 10016
  GFR-binding peptide
  MOD_RES (1), (33), (34): Xaa is C or S

SEQ ID NO: 35891 - protein, 33 aa, Artificial Sequence; identical to SEQ ID NO: 11877
  GFR-binding peptide
  MOD_RES (1), (1): Xaa is C or S
  MOD_RES (12), (13), (14), (15), (16): Xaa is A or G
  MOD_RES (17), (18), (19), (20): Xaa is A or G or is absent

SEQ ID NO: 35892 - protein, 36 aa, Artificial Sequence; identical to SEQ ID NO: 10017
  GFR-binding peptide
  MOD_RES (2), (34), (35): Xaa is C or S

SEQ ID NO: 35893 - protein, 36 aa, Artificial Sequence; identical to SEQ ID NO: 10018
  GFR-binding peptide
  MOD_RES (2), (34), (35): Xaa is C or S

SEQ ID NO: 35894 - protein, 36 aa, Artificial Sequence; identical to SEQ ID NO: 11878
  GFR-binding peptide
  MOD_RES (34), (35): Xaa is C or S
  MOD_RES (12), (13), (14), (15), (16): Xaa is A or G
  MOD_RES (17), (18), (19), (20): Xaa is A or G or is absent

SEQ ID NO: 35895 - protein, 34 aa, Artificial Sequence; identical to SEQ ID NO: 10019
  GFR-binding peptide
  MOD_RES (1), (3): Xaa is C or S

SEQ ID NO: 35896 - protein, 32 aa, Artificial Sequence; identical to SEQ ID NO: 10020
  GFR-binding peptide
  MOD_RES (11), (12), (13), (14), (15): Xaa is A or G
  MOD_RES (16), (17), (18), (19): Xaa is A or G or is absent

SEQ ID NO: 35897 - protein, 32 aa, Artificial Sequence; identical to SEQ ID NO: 4453
  GFR-binding peptide
  MOD_RES (11), (12), (13), (14), (15): Xaa is A or G
  MOD_RES (16), (17), (18), (19): Xaa is A or G or is absent

SEQ ID NO: 35898 - protein, 34 aa, Artificial Sequence; identical to SEQ ID NO: 10022
  GFR-binding peptide
  MOD_RES (31), (32): Xaa is C or S

SEQ ID NO: 35899 - protein, 43 aa, Artificial Sequence; identical to SEQ ID NO: 4454
  GFR-binding peptide
  MOD_RES (2), (4), (37), (38): Xaa is C or S
  MOD_RES (15), (16), (17), (18), (19): Xaa is A or G
  MOD_RES (20), (21), (22), (23): Xaa is A or G or is absent

SEQ ID NO: 35900 - protein, 31 aa, Artificial Sequence; identical to SEQ ID NO: 11882
  GFR-binding peptide
  MOD_RES (31), (31): Xaa is C or S

SEQ ID NO: 35901 - protein, 39 aa, Artificial Sequence; identical to SEQ ID NO: 10024
  GFR-binding peptide
  MOD_RES (1), (3), (35), (36): Xaa is C or S

SEQ ID NO: 35902 - protein, 38 aa, Artificial Sequence; identical to SEQ ID NO: 11883
  GFR-binding peptide
  MOD_RES (34), (35): Xaa is C or S
  MOD_RES (12), (13), (14), (15), (16): Xaa is A or G
  MOD_RES (17), (18), (19), (20): Xaa is A or G or is absent

SEQ ID NO: 35903 - protein, 35 aa, Artificial Sequence
  GFR-binding peptide
  MOD_RES (1), (32), (33): Xaa is C or S
XSKVIMNSLQEIKPTKGIYYLITLPELDQSVXXPS

SEQ ID NO: 35904 - protein, 36 aa, Artificial Sequence; identical to SEQ ID NO: 4459
  GFR-binding peptide
  MOD_RES (2), (4): Xaa is C or S
  MOD_RES (15), (16), (17), (18), (19): Xaa is A or G
  MOD_RES (20), (21), (22), (23): Xaa is A or G or is absent

SEQ ID NO: 35905 - protein, 37 aa, Artificial Sequence; identical to SEQ ID NO: 11887
  GFR-binding peptide
  MOD_RES (2), (4), (35), (36): Xaa is C or S

SEQ ID NO: 35906 - protein, 37 aa, Artificial Sequence; identical to SEQ ID NO: 11888
  GFR-binding peptide
  MOD_RES (2), (34), (35): Xaa is C or S

SEQ ID NO: 35907 - protein, 35 aa, Artificial Sequence; identical to SEQ ID NO: 10025
  GFR-binding peptide
  MOD_RES (1), (33), (34): Xaa is C or S

SEQ ID NO: 35908 - protein, 35 aa, Artificial Sequence; identical to SEQ ID NO: 10026
  GFR-binding peptide
  MOD_RES (1), (33), (34): Xaa is C or S

SEQ ID NO: 35909 - protein, 34 aa, Artificial Sequence; identical to SEQ ID NO: 10028
  GFR-binding peptide
  MOD_RES (2), (34): Xaa is C or S

SEQ ID NO: 35910 - protein, 32 aa, Artificial Sequence; identical to SEQ ID NO: 10029
  GFR-binding peptide
  MOD_RES (1), (1): Xaa is C or S

SEQ ID NO: 35911 - protein, 37 aa, Artificial Sequence; identical to SEQ ID NO: 11890
  GFR-binding peptide
  MOD_RES (33), (34): Xaa is C or S
  MOD_RES (11), (12), (13), (14), (15): Xaa is A or G
  MOD_RES (16), (17), (18), (19): Xaa is A or G or is absent

SEQ ID NO: 35912 - protein, 33 aa, Artificial Sequence; identical to SEQ ID NO: 10030
  GFR-binding peptide
  MOD_RES (1), (1): Xaa is C or S
  MOD_RES (12), (13), (14), (15), (16): Xaa is A or G
  MOD_RES (17), (18), (19), (20): Xaa is A or G or is absent

SEQ ID NO: 35913 - protein, 36 aa, Artificial Sequence; identical to SEQ ID NO: 11891
  GFR-binding peptide
  MOD_RES (1), (3), (35), (36): Xaa is C or S

SEQ ID NO: 35914 - protein, 36 aa, Artificial Sequence; identical to SEQ ID NO: 11892
  GFR-binding peptide
  MOD_RES (34), (34): Xaa is C or S
  MOD_RES (12), (13), (14), (15), (16): Xaa is A or G
  MOD_RES (17), (18), (19), (20): Xaa is A or G or is absent

SEQ ID NO: 35915 - protein, 37 aa, Artificial Sequence; identical to SEQ ID NO: 11893
  GFR-binding peptide
  MOD_RES (2), (34), (35): Xaa is C or S

SEQ ID NO: 35916 - protein, 34 aa, Artificial Sequence; identical to SEQ ID NO: 4461
  GFR-binding peptide
  MOD_RES (1), (3), (34): Xaa is C or S

SEQ ID NO: 35917 - protein, 32 aa, Artificial Sequence; identical to SEQ ID NO: 10032
  GFR-binding peptide
  MOD_RES (2), (2): Xaa is C or S

SEQ ID NO: 35918 - protein, 38 aa, Artificial Sequence; identical to SEQ ID NO: 11895
  GFR-binding peptide
  MOD_RES (1), (3), (36), (37): Xaa is C or S
  MOD_RES (14), (15), (16), (17), (18): Xaa is A or G
  MOD_RES (19), (20), (21), (22): Xaa is A or G or is absent

SEQ ID NO: 35919 - protein, 36 aa, Artificial Sequence; identical to SEQ ID NO: 10033
  GFR-binding peptide
  MOD_RES (2), (4), (36): Xaa is C or S

SEQ ID NO: 35920 - protein, 37 aa, Artificial Sequence; identical to SEQ ID NO: 11896
  GFR-binding peptide
  MOD_RES (2), (4): Xaa is C or S
  MOD_RES (16), (17), (18), (19), (20): Xaa is A or G
  MOD_RES (21), (22), (23), (24): Xaa is A or G or is absent

SEQ ID NO: 35921 - protein, 38 aa, Artificial Sequence; identical to SEQ ID NO: 11898
  GFR-binding peptide
  MOD_RES (1), (32), (33): Xaa is C or S

SEQ ID NO: 35922 - protein, 42 aa, Artificial Sequence; identical to SEQ ID NO: 10034
  GFR-binding peptide
  MOD_RES (2), (36), (37): Xaa is C or S
  MOD_RES (14), (15), (16), (17), (18): Xaa is A or G
  MOD_RES (19), (20), (21), (22): Xaa is A or G or is absent

SEQ ID NO: 35923 - protein, 41 aa, Artificial Sequence; identical to SEQ ID NO: 11899
  GFR-binding peptide
  MOD_RES (2), (4), (37), (38): Xaa is C or S
  MOD_RES (15), (16), (17), (18), (19): Xaa is A or G
  MOD_RES (20), (21), (22), (23): Xaa is A or G or is absent

SEQ ID NO: 35924 - protein, 40 aa, Artificial Sequence; identical to SEQ ID NO: 10035
  GFR-binding peptide
  MOD_RES (1), (3), (37): Xaa is C or S
  MOD_RES (15), (16), (17), (18), (19): Xaa is A or G
  MOD_RES (20), (21), (22), (23): Xaa is A or G or is absent

SEQ ID NO: 35925 - protein, 43 aa, Artificial Sequence; identical to SEQ ID NO: 10036
  GFR-binding peptide
  MOD_RES (2), (4), (37), (38): Xaa is C or S
  MOD_RES (15), (16), (17), (18), (19): Xaa is A or G
  MOD_RES (20), (21), (22), (23): Xaa is A or G or is absent

SEQ ID NO: 35926 - protein, 37 aa, Artificial Sequence; identical to SEQ ID NO: 2539
  GFR-binding peptide
  MOD_RES (2), (33), (34): Xaa is C or S

SEQ ID NO: 35927 - protein, 32 aa, Artificial Sequence; identical to SEQ ID NO: 10038
  GFR-binding peptide
  MOD_RES (31), (32): Xaa is C or S

SEQ ID NO: 35928 - protein, 31 aa, Artificial Sequence; identical to SEQ ID NO: 11901
  GFR-binding peptide
  MOD_RES (31), (31): Xaa is C or S

SEQ ID NO: 35929 - protein, 35 aa, Artificial Sequence; identical to SEQ ID NO: 11903
  GFR-binding peptide
  MOD_RES (2), (4), (35): Xaa is C or S

SEQ ID NO: 35930 - protein, 38 aa, Artificial Sequence; identical to SEQ ID NO: 11904
  GFR-binding peptide
  MOD_RES (32), (33): Xaa is C or S

SEQ ID NO: 35931 - protein, 41 aa, Artificial Sequence; identical to SEQ ID NO: 2544
  GFR-binding peptide
  MOD_RES (2), (4), (36), (37): Xaa is C or S

SEQ ID NO: 35932 - protein, 36 aa, Artificial Sequence; identical to SEQ ID NO: 10042
  GFR-binding peptide
  MOD_RES (2), (4): Xaa is C or S
  MOD_RES (15), (16), (17), (18), (19): Xaa is A or G
  MOD_RES (20), (21), (22), (23): Xaa is A or G or is absent

SEQ ID NO: 35933 - protein, 38 aa, Artificial Sequence; identical to SEQ ID NO: 4470
  GFR-binding peptide
  MOD_RES (2), (35), (36): Xaa is C or S
  MOD_RES (13), (14), (15), (16), (17): Xaa is A or G
  MOD_RES (18), (19), (20), (21): Xaa is A or G or is absent

SEQ ID NO: 35934 - protein, 39 aa, Artificial Sequence
  GFR-binding peptide
  MOD_RES (2), (33), (34): Xaa is C or S
KXSKVIMNSLQEIKPTKGIYYLITLPELDQSVXXPSASA

SEQ ID NO: 35935 - protein, 43 aa, Artificial Sequence; identical to SEQ ID NO: 11907
  GFR-binding peptide
  MOD_RES (1), (3), (37), (38): Xaa is C or S
  MOD_RES (15), (16), (17), (18), (19): Xaa is A or G
  MOD_RES (20), (21), (22), (23): Xaa is A or G or is absent

SEQ ID NO: 35936 - protein, 31 aa, Artificial Sequence; identical to SEQ ID NO: 10044
  GFR-binding peptide
  MOD_RES (31), (31): Xaa is C or S

SEQ ID NO: 35937 - protein, 36 aa, Artificial Sequence; identical to SEQ ID NO: 11908
  GFR-binding peptide
  MOD_RES (1), (33), (34): Xaa is C or S

SEQ ID NO: 35938 - protein, 38 aa, Artificial Sequence; identical to SEQ ID NO: 10046
  GFR-binding peptide
  MOD_RES (1), (3), (37), (38): Xaa is C or S
  MOD_RES (15), (16), (17), (18), (19): Xaa is A or G
  MOD_RES (20), (21), (22), (23): Xaa is A or G or is absent

SEQ ID NO: 35939 - protein, 35 aa, Artificial Sequence; identical to SEQ ID NO: 10047
  GFR-binding peptide
  MOD_RES (1), (33), (34): Xaa is C or S

SEQ ID NO: 35940 - protein, 39 aa, Artificial Sequence; identical to SEQ ID NO: 10048
  GFR-binding peptide
  MOD_RES (1), (3), (35): Xaa is C or S

SEQ ID NO: 35941 - protein, 41 aa, Artificial Sequence; identical to SEQ ID NO: 10049
  GFR-binding peptide
  MOD_RES (2), (4), (36): Xaa is C or S

SEQ ID NO: 35942 - protein, 36 aa, Artificial Sequence; identical to SEQ ID NO: 10050
  GFR-binding peptide
  MOD_RES (2), (34), (35): Xaa is C or S

SEQ ID NO: 35943 - protein, 41 aa, Artificial Sequence; identical to SEQ ID NO: 2551
  GFR-binding peptide
  MOD_RES (2), (4), (38), (39): Xaa is C or S
  MOD_RES (16), (17), (18), (19), (20): Xaa is A or G
  MOD_RES (21), (22), (23), (24): Xaa is A or G or is absent

SEQ ID NO: 35944 - protein, 41 aa, Artificial Sequence; identical to SEQ ID NO: 11909
  GFR-binding peptide
  MOD_RES (2), (35), (36): Xaa is C or S
  MOD_RES (13), (14), (15), (16), (17): Xaa is A or G
  MOD_RES (18), (19), (20), (21): Xaa is A or G or is absent

SEQ ID NO: 35945 - protein, 36 aa, Artificial Sequence; identical to SEQ ID NO: 10052
  GFR-binding peptide
  MOD_RES (31), (32): Xaa is C or S

SEQ ID NO: 35946 - protein, 37 aa, Artificial Sequence; identical to SEQ ID NO: 11910
  GFR-binding peptide
  MOD_RES (33), (34): Xaa is C or S
  MOD_RES (11), (12), (13), (14), (15): Xaa is A or G
  MOD_RES (16), (17), (18), (19): Xaa is A or G or is absent

SEQ ID NO: 35947 - protein, 37 aa, Artificial Sequence; identical to SEQ ID NO: 10053
  GFR-binding peptide
  MOD_RES (1), (3), (37): Xaa is C or S
  MOD_RES (15), (16), (17), (18), (19): Xaa is A or G
  MOD_RES (20), (21), (22), (23): Xaa is A or G or is absent

SEQ ID NO: 35948 - protein, 36 aa, Artificial Sequence; identical to SEQ ID NO: 2554
  GFR-binding peptide
  MOD_RES (32), (33): Xaa is C or S

SEQ ID NO: 35949 - protein, 39 aa, Artificial Sequence; identical to SEQ ID NO: 11912
  GFR-binding peptide
  MOD_RES (34), (35): Xaa is C or S
  MOD_RES (12), (13), (14), (15), (16): Xaa is A or G
  MOD_RES (17), (18), (19), (20): Xaa is A or G or is absent

SEQ ID NO: 35950 - protein, 38 aa, Artificial Sequence; identical to SEQ ID NO: 11913
  GFR-binding peptide
  MOD_RES (1), (3), (35), (36): Xaa is C or S

SEQ ID NO: 35951 - protein, 35 aa, Artificial Sequence; identical to SEQ ID NO: 11914
  GFR-binding peptide
  MOD_RES (2), (33), (34): Xaa is C or S

SEQ ID NO: 35952 - protein, 34 aa, Artificial Sequence; identical to SEQ ID NO: 2558
  GFR-binding peptide
  MOD_RES (2), (4): Xaa is C or S

SEQ ID NO: 35953 - protein, 39 aa, Artificial Sequence; identical to SEQ ID NO: 4483
  GFR-binding peptide
  MOD_RES (1), (34), (35): Xaa is C or S
  MOD_RES (12), (13), (14), (15), (16): Xaa is A or G
  MOD_RES (17), (18), (19), (20): Xaa is A or G or is absent

SEQ ID NO: 35954 - protein, 36 aa, Artificial Sequence; identical to SEQ ID NO: 11916
  GFR-binding peptide
  MOD_RES (2), (4), (36): Xaa is C or S

SEQ ID NO: 35955 - protein, 35 aa, Artificial Sequence; identical to SEQ ID NO: 11918
  GFR-binding peptide
  MOD_RES (1), (33), (34): Xaa is C or S

SEQ ID NO: 35956 - protein, 36 aa, Artificial Sequence; identical to SEQ ID NO: 11919
  GFR-binding peptide
  MOD_RES (2), (4): Xaa is C or S
  MOD_RES (15), (16), (17), (18), (19): Xaa is A or G
  MOD_RES (20), (21), (22), (23): Xaa is A or G or is absent

SEQ ID NO: 35957 - protein, 33 aa, Artificial Sequence; identical to SEQ ID NO: 11920
  GFR-binding peptide
  MOD_RES (12), (13), (14), (15), (16): Xaa is A or G
  MOD_RES (17), (18), (19), (20): Xaa is A or G or is absent

SEQ ID NO: 35958 - protein, 38 aa, Artificial Sequence
  GFR-binding peptide
  MOD_RES (1), (3), (36), (37): Xaa is C or S
  MOD_RES (14), (15), (16), (17), (18): Xaa is A or G
  MOD_RES (19), (20), (21), (22): Xaa is A or G or is absent
XKXSKVIMNSLQEXXXXXXXXXYYLITLPELDQSVXXP

SEQ ID NO: 35959 - protein, 40 aa, Artificial Sequence; identical to SEQ ID NO: 2563
  GFR-binding peptide
  MOD_RES (1), (3), (35), (36): Xaa is C or S

SEQ ID NO: 35960 - protein, 39 aa, Artificial Sequence; identical to SEQ ID NO: 11921
  GFR-binding peptide
  MOD_RES (2), (4), (38): Xaa is C or S
  MOD_RES (16), (17), (18), (19), (20): Xaa is A or G
  MOD_RES (21), (22), (23), (24): Xaa is A or G or is absent

SEQ ID NO: 35961 - protein, 34 aa, Artificial Sequence; identical to SEQ ID NO: 11924
  GFR-binding peptide
  MOD_RES (34), (34): Xaa is C or S
  MOD_RES (12), (13), (14), (15), (16): Xaa is A or G
  MOD_RES (17), (18), (19), (20): Xaa is A or G or is absent

SEQ ID NO: 35962 - protein, 37 aa, Artificial Sequence; identical to SEQ ID NO: 10058
  GFR-binding peptide
  MOD_RES (34), (35): Xaa is C or S
  MOD_RES (12), (13), (14), (15), (16): Xaa is A or G
  MOD_RES (17), (18), (19), (20): Xaa is A or G or is absent

SEQ ID NO: 35963 - protein, 36 aa, Artificial Sequence; identical to SEQ ID NO: 10059
  GFR-binding peptide
  MOD_RES (1), (3): Xaa is C or S
  MOD_RES (15), (16), (17), (18), (19): Xaa is A or G
  MOD_RES (20), (21), (22), (23): Xaa is A or G or is absent

SEQ ID NO: 35964 - protein, 33 aa, Artificial Sequence; identical to SEQ ID NO: 11926
  GFR-binding peptide
  MOD_RES (32), (33): Xaa is C or S

SEQ ID NO: 35965 - protein, 35 aa, Artificial Sequence; identical to SEQ ID NO: 2569
  GFR-binding peptide
  MOD_RES (1), (33), (34): Xaa is C or S

SEQ ID NO: 35966 - protein, 35 aa, Artificial Sequence; identical to SEQ ID NO: 11927
  GFR-binding peptide
  MOD_RES (1), (34), (35): Xaa is C or S
  MOD_RES (12), (13), (14), (15), (16): Xaa is A or G
  MOD_RES (17), (18), (19), (20): Xaa is A or G or is absent

SEQ ID NO: 35967 - protein, 39 aa, Artificial Sequence; identical to SEQ ID NO: 10061
  GFR-binding peptide
  MOD_RES (2), (4), (38), (39): Xaa is C or S
  MOD_RES (16), (17), (18), (19), (20): Xaa is A or G
  MOD_RES (21), (22), (23), (24): Xaa is A or G or is absent

SEQ ID NO: 35968 - protein, 40 aa, Artificial Sequence; identical to SEQ ID NO: 10063
  GFR-binding peptide
  MOD_RES (1), (3), (35): Xaa is C or S

SEQ ID NO: 35969 - protein, 35 aa, Artificial Sequence; identical to SEQ ID NO: 10064
  GFR-binding peptide
  MOD_RES (2), (33), (34): Xaa is C or S

SEQ ID NO: 35970 - protein, 37 aa, Artificial Sequence; identical to SEQ ID NO: 11929
  GFR-binding peptide
  MOD_RES (33), (34): Xaa is C or S
  MOD_RES (11), (12), (13), (14), (15): Xaa is A or G
  MOD_RES (16), (17), (18), (19): Xaa is A or G or is absent

SEQ ID NO: 35971 - protein, 35 aa, Artificial Sequence; identical to SEQ ID NO: 11930
  GFR-binding peptide
  MOD_RES (1), (3): Xaa is C or S
  MOD_RES (14), (15), (16), (17), (18): Xaa is A or G
  MOD_RES (19), (20), (21), (22): Xaa is A or G or is absent

SEQ ID NO: 35972 - protein, 31 aa, Artificial Sequence; identical to SEQ ID NO: 10065
  GFR-binding peptide
  MOD_RES (1), (1): Xaa is C or S

SEQ ID NO: 35973 - protein, 36 aa, Artificial Sequence; identical to SEQ ID NO: 11932
  GFR-binding peptide
  MOD_RES (2), (33), (34): Xaa is C or S

SEQ ID NO: 35974 - protein, 36 aa, Artificial Sequence; identical to SEQ ID NO: 11934
  GFR-binding peptide
  MOD_RES (32), (33): Xaa is C or S

SEQ ID NO: 35975 - protein, 42 aa, Artificial Sequence; identical to SEQ ID NO: 10066
  GFR-binding peptide
  MOD_RES (2), (4), (36), (37): Xaa is C or S

SEQ ID NO: 35976 - protein, 37 aa, Artificial Sequence; identical to SEQ ID NO: 10067
  GFR-binding peptide
  MOD_RES (2), (36), (37): Xaa is C or S
  MOD_RES (14), (15), (16), (17), (18): Xaa is A or G
  MOD_RES (19), (20), (21), (22): Xaa is A or G or is absent

SEQ ID NO: 35977 - protein, 42 aa, Artificial Sequence; identical to SEQ ID NO: 10068
  GFR-binding peptide
  MOD_RES (1), (3), (36), (37): Xaa is C or S
  MOD_RES (14), (15), (16), (17), (18): Xaa is A or G
  MOD_RES (19), (20), (21), (22): Xaa is A or G or is absent

SEQ ID NO: 35978 - protein, 38 aa, Artificial Sequence; identical to SEQ ID NO: 11936
  GFR-binding peptide
  MOD_RES (2), (36), (37): Xaa is C or S
  MOD_RES (14), (15), (16), (17), (18): Xaa is A or G
  MOD_RES (19), (20), (21), (22): Xaa is A or G or is absent

SEQ ID NO: 35979 - protein, 36 aa, Artificial Sequence; identical to SEQ ID NO: 10069
  GFR-binding peptide
  MOD_RES (2), (4), (35), (36): Xaa is C or S

SEQ ID NO: 35980 - protein, 37 aa, Artificial Sequence; identical to SEQ ID NO: 4499
  GFR-binding peptide
  MOD_RES (2), (34), (35): Xaa is C or S

SEQ ID NO: 35981 - protein, 39 aa, Artificial Sequence
  GFR-binding peptide
  MOD_RES (1), (34), (35): Xaa is C or S
  MOD_RES (12), (13), (14), (15), (16): Xaa is A or G
  MOD_RES (17), (18), (19), (20): Xaa is A or G or is absent
XSKVIMNSLQEXXXXXXXXXYYLITLPELDQSVXXPSAS

SEQ ID NO: 35982 - protein, 38 aa, Artificial Sequence; identical to SEQ ID NO: 10070
  GFR-binding peptide
  MOD_RES (2), (34), (35): Xaa is C or S

SEQ ID NO: 35983 - protein, 38 aa, Artificial Sequence; identical to SEQ ID NO: 2579
  GFR-binding peptide
  MOD_RES (1), (3), (36), (37): Xaa is C or S
  MOD_RES (14), (15), (16), (17), (18): Xaa is A or G
  MOD_RES (19), (20), (21), (22): Xaa is A or G or is absent

SEQ ID NO: 35984 - protein, 33 aa, Artificial Sequence; identical to SEQ ID NO: 10072
  GFR-binding peptide
  MOD_RES (1), (3): Xaa is C or S

SEQ ID NO: 35985 - protein, 38 aa, Artificial Sequence; identical to SEQ ID NO: 10073
  GFR-binding peptide
  MOD_RES (34), (35): Xaa is C or S
  MOD_RES (12), (13), (14), (15), (16): Xaa is A or G
  MOD_RES (17), (18), (19), (20): Xaa is A or G or is absent

SEQ ID NO: 35986 - protein, 34 aa, Artificial Sequence; identical to SEQ ID NO: 4501
  GFR-binding peptide
  MOD_RES (2), (2): Xaa is C or S
  MOD_RES (13), (14), (15), (16), (17): Xaa is A or G
  MOD_RES (18), (19), (20), (21): Xaa is A or G or is absent

SEQ ID NO: 35987 - protein, 39 aa, Artificial Sequence; identical to SEQ ID NO: 10074
  GFR-binding peptide
  MOD_RES (2), (4), (38), (39): Xaa is C or S
  MOD_RES (16), (17), (18), (19), (20): Xaa is A or G
  MOD_RES (21), (22), (23), (24): Xaa is A or G or is absent

SEQ ID NO: 35988 - protein, 34 aa, Artificial Sequence; identical to SEQ ID NO: 11940
  GFR-binding peptide
  MOD_RES (33), (34): Xaa is C or S
  MOD_RES (11), (12), (13), (14), (15): Xaa is A or G
  MOD_RES (16), (17), (18), (19): Xaa is A or G or is absent

SEQ ID NO: 35989 - protein, 36 aa, Artificial Sequence; identical to SEQ ID NO: 10075
  GFR-binding peptide
  MOD_RES (31), (32): Xaa is C or S

SEQ ID NO: 35990 - protein, 32 aa, Artificial Sequence; identical to SEQ ID NO: 11941
  GFR-binding peptide
  MOD_RES (11), (12), (13), (14), (15): Xaa is A or G
  MOD_RES (16), (17), (18), (19): Xaa is A or G or is absent

SEQ ID NO: 35991 - protein, 34 aa, Artificial Sequence; identical to SEQ ID NO: 11942
  GFR-binding peptide
  MOD_RES (1), (33), (34): Xaa is C or S

SEQ ID NO: 35992 - protein, 35 aa, Artificial Sequence; identical to SEQ ID NO: 10077
  GFR-binding peptide
  MOD_RES (32), (33): Xaa is C or S

SEQ ID NO: 35993 - protein, 41 aa, Artificial Sequence; identical to SEQ ID NO: 11943
  GFR-binding peptide
  MOD_RES (2), (4), (36), (37): Xaa is C or S

SEQ ID NO: 35994 - protein, 33 aa, Artificial Sequence; identical to SEQ ID NO: 10080
  GFR-binding peptide
  MOD_RES (31), (32): Xaa is C or S

SEQ ID NO: 35995 - protein, 42 aa, Artificial Sequence; identical to SEQ ID NO: 11945
  GFR-binding peptide
  MOD_RES (1), (3), (36), (37): Xaa is C or S
  MOD_RES (14), (15), (16), (17), (18): Xaa is A or G
  MOD_RES (19), (20), (21), (22): Xaa is A or G or is absent

SEQ ID NO: 35996 - protein, 37 aa, Artificial Sequence; identical to SEQ ID NO: 11946
  GFR-binding peptide
  MOD_RES (2), (4), (36), (37): Xaa is C or S

SEQ ID NO: 35997 - protein, 34 aa, Artificial Sequence; identical to SEQ ID NO: 10083
  GFR-binding peptide
  MOD_RES (31), (32): Xaa is C or S

SEQ ID NO: 35998 - protein, 38 aa, Artificial Sequence; identical to SEQ ID NO: 10084
  GFR-binding peptide
  MOD_RES (1), (32), (33): Xaa is C or S

SEQ ID NO: 35999 - protein, 36 aa, Artificial Sequence; identical to SEQ ID NO: 11948
  GFR-binding peptide
  MOD_RES (32), (33): Xaa is C or S

SEQ ID NO: 36000 - protein, 42 aa, Artificial Sequence; identical to SEQ ID NO: 11949
  GFR-binding peptide
  MOD_RES (2), (4), (37), (38): Xaa is C or S
  MOD_RES (15), (16), (17), (18), (19): Xaa is A or G
  MOD_RES (20), (21), (22), (23): Xaa is A or G or is absent

SEQ ID NO: 36001 - protein, 37 aa, Artificial Sequence; identical to SEQ ID NO: 10087
  GFR-binding peptide
  MOD_RES (31), (32): Xaa is C or S

SEQ ID NO: 36002 - protein, 41 aa, Artificial Sequence; identical to SEQ ID NO: 11950
  GFR-binding peptide
  MOD_RES (1), (3), (37), (38): Xaa is C or S
  MOD_RES (15), (16), (17), (18), (19): Xaa is A or G
  MOD_RES (20), (21), (22), (23): Xaa is A or G or is absent

SEQ ID NO: 36003 - protein, 35 aa, Artificial Sequence; identical to SEQ ID NO: 4513
  GFR-binding peptide
  MOD_RES (34), (35): Xaa is C or S
  MOD_RES (12), (13), (14), (15), (16): Xaa is A or G
  MOD_RES (17), (18), (19), (20): Xaa is A or G or is absent

SEQ ID NO: 36004 - protein, 38 aa, Artificial Sequence; identical to SEQ ID NO: 11952
  GFR-binding peptide
  MOD_RES (32), (33): Xaa is C or S

SEQ ID NO: 36005 - protein, 39 aa, Artificial Sequence; identical to SEQ ID NO: 4514
  GFR-binding peptide
  MOD_RES (2), (36), (37): Xaa is C or S
  MOD_RES (14), (15), (16), (17), (18): Xaa is A or G
  MOD_RES (19), (20), (21), (22): Xaa is A or G or is absent

SEQ ID NO: 36006 - protein, 32 aa, Artificial Sequence; identical to SEQ ID NO: 11954
  GFR-binding peptide
  MOD_RES (32), (32): Xaa is C or S

SEQ ID NO: 36007 - protein, 39 aa, Artificial Sequence; identical to SEQ ID NO: 11955
  GFR-binding peptide
  MOD_RES (1), (35), (36): Xaa is C or S
  MOD_RES (13), (14), (15), (16), (17): Xaa is A or G
  MOD_RES (18), (19), (20), (21): Xaa is A or G or is absent

SEQ ID NO: 36008 - protein, 38 aa, Artificial Sequence; identical to SEQ ID NO: 11956
  GFR-binding peptide
  MOD_RES (2), (4), (36): Xaa is C or S

SEQ ID NO: 36009 - protein, 41 aa, Artificial Sequence; identical to SEQ ID NO: 11957
  GFR-binding peptide
  MOD_RES (1), (35), (36): Xaa is C or S
  MOD_RES (13), (14), (15), (16), (17): Xaa is A or G
  MOD_RES (18), (19), (20), (21): Xaa is A or G or is absent

SEQ ID NO: 36010 - protein, 42 aa, Artificial Sequence; identical to SEQ ID NO: 11958
  GFR-binding peptide
  MOD_RES (2), (4), (38): Xaa is C or S
  MOD_RES (16), (17), (18), (19), (20): Xaa is A or G
  MOD_RES (21), (22), (23), (24): Xaa is A or G or is absent

SEQ ID NO: 36011 - protein, 40 aa, Artificial Sequence; identical to SEQ ID NO: 11959
  GFR-binding peptide
  MOD_RES (1), (34), (35): Xaa is C or S
  MOD_RES (12), (13), (14), (15), (16): Xaa is A or G
  MOD_RES (17), (18), (19), (20): Xaa is A or G or is absent

SEQ ID NO: 36012 - protein, 39 aa, Artificial Sequence; identical to SEQ ID NO: 11960
  GFR-binding peptide
  MOD_RES (1), (3), (37): Xaa is C or S
  MOD_RES (15), (16), (17), (18), (19): Xaa is A or G
  MOD_RES (20), (21), (22), (23): Xaa is A or G or is absent

SEQ ID NO: 36013 - protein, 42 aa, Artificial Sequence; identical to SEQ ID NO: 11964
  GFR-binding peptide
  MOD_RES (1), (3), (36), (37): Xaa is C or S
  MOD_RES (14), (15), (16), (17), (18): Xaa is A or G
  MOD_RES (19), (20), (21), (22): Xaa is A or G or is absent

SEQ ID NO: 36014 - protein, 35 aa, Artificial Sequence; identical to SEQ ID NO: 4523
  GFR-binding peptide
  MOD_RES (33), (34): Xaa is C or S
  MOD_RES (11), (12), (13), (14), (15): Xaa is A or G
  MOD_RES (16), (17), (18), (19): Xaa is A or G or is absent

SEQ ID NO: 36015 - protein, 37 aa, Artificial Sequence; identical to SEQ ID NO: 10090
  GFR-binding peptide
  MOD_RES (2), (4), (36), (37): Xaa is C or S

SEQ ID NO: 36016 - protein, 38 aa, Artificial Sequence; identical to SEQ ID NO: 10091
  GFR-binding peptide
  MOD_RES (2), (35), (36): Xaa is C or S
  MOD_RES (13), (14), (15), (16), (17): Xaa is A or G
  MOD_RES (18), (19), (20), (21): Xaa is A or G or is absent

SEQ ID NO: 36017 - protein, 38 aa, Artificial Sequence; identical to SEQ ID NO: 11966
  GFR-binding peptide
  MOD_RES (1), (35), (36): Xaa is C or S
  MOD_RES (13), (14), (15), (16), (17): Xaa is A or G
  MOD_RES (18), (19), (20), (21): Xaa is A or G or is absent

SEQ ID NO: 36018 - protein, 38 aa, Artificial Sequence; identical to SEQ ID NO: 10092
  GFR-binding peptide
  MOD_RES (1), (33), (34): Xaa is C or S

SEQ ID NO: 36019 - protein, 33 aa, Artificial Sequence; identical to SEQ ID NO: 10095
  GFR-binding peptide
  MOD_RES (31), (32): Xaa is C or S

SEQ ID NO: 36020 - protein, 40 aa, Artificial Sequence; identical to SEQ ID NO: 11967
  GFR-binding peptide
  MOD_RES (1), (3), (34), (35): Xaa is C or S

SEQ ID NO: 36021 - protein, 38 aa, Artificial Sequence; identical to SEQ ID NO: 10096
  GFR-binding peptide
  MOD_RES (1), (34), (35): Xaa is C or S
  MOD_RES (12), (13), (14), (15), (16): Xaa is A or G
  MOD_RES (17), (18), (19), (20): Xaa is A or G or is absent

SEQ ID NO: 36022 - protein, 38 aa, Artificial Sequence; identical to SEQ ID NO: 10097
  GFR-binding peptide
  MOD_RES (1), (3), (34), (35): Xaa is C or S

SEQ ID NO: 36023 - protein, 36 aa, Artificial Sequence; identical to SEQ ID NO: 10098
  GFR-binding peptide
  MOD_RES (33), (34): Xaa is C or S
  MOD_RES (11), (12), (13), (14), (15): Xaa is A or G
  MOD_RES (16), (17), (18), (19): Xaa is A or G or is absent

SEQ ID NO: 36024 - protein, 33 aa, Artificial Sequence; identical to SEQ ID NO: 2612
  GFR-binding peptide
  MOD_RES (1), (1): Xaa is C or S
  MOD_RES (12), (13), (14), (15), (16): Xaa is A or G
  MOD_RES (17), (18), (19), (20): Xaa is A or G or is absent

SEQ ID NO: 36025 - protein, 35 aa, Artificial Sequence; identical to SEQ ID NO: 2614
  GFR-binding peptide
  MOD_RES (33), (34): Xaa is C or S
  MOD_RES (11), (12), (13), (14), (15): Xaa is A or G
  MOD_RES (16), (17), (18), (19): Xaa is A or G or is absent

SEQ ID NO: 36026 - protein, 33 aa, Artificial Sequence; identical to SEQ ID NO: 11970
  GFR-binding peptide
  MOD_RES (2), (33): Xaa is C or S

SEQ ID NO: 36027 - protein, 34 aa, Artificial Sequence; identical to SEQ ID NO: 10101
  GFR-binding peptide
  MOD_RES (1), (3): Xaa is C or S

SEQ ID NO: 36028 - protein, 37 aa, Artificial Sequence; identical to SEQ ID NO: 11972
  GFR-binding peptide
  MOD_RES (34), (35): Xaa is C or S
  MOD_RES (12), (13), (14), (15), (16): Xaa is A or G
  MOD_RES (17), (18), (19), (20): Xaa is A or G or is absent

SEQ ID NO: 36029 - protein, 36 aa, Artificial Sequence; identical to SEQ ID NO: 11973
  GFR-binding peptide
  MOD_RES (1), (3), (35): Xaa is C or S

SEQ ID NO: 36030 - protein, 36 aa, Artificial Sequence; identical to SEQ ID NO: 4534
  GFR-binding peptide
  MOD_RES (32), (33): Xaa is C or S

SEQ ID NO: 36031 - protein, 35 aa, Artificial Sequence; identical to SEQ ID NO: 10103
  GFR-binding peptide
  MOD_RES (2), (4), (35): Xaa is C or S

SEQ ID NO: 36032 - protein, 39 aa, Artificial Sequence; identical to SEQ ID NO: 11975
  GFR-binding peptide
  MOD_RES (2), (36), (37): Xaa is C or S
  MOD_RES (14), (15), (16), (17), (18): Xaa is A or G
  MOD_RES (19), (20), (21), (22): Xaa is A or G or is absent

SEQ ID NO: 36033 - protein, 39 aa, Artificial Sequence; identical to SEQ ID NO: 10104
  GFR-binding peptide
  MOD_RES (2), (4), (37), (38): Xaa is C or S
  MOD_RES (15), (16), (17), (18), (19): Xaa is A or G
  MOD_RES (20), (21), (22), (23): Xaa is A or G or is absent

SEQ ID NO: 36034 - protein, 38 aa, Artificial Sequence
  GFR-binding peptide
  MOD_RES (33), (34): Xaa is C or S
  MOD_RES (11), (12), (13), (14), (15): Xaa is A or G
  MOD_RES (16), (17), (18), (19): Xaa is A or G or is absent
SKVIMNSLQEXXXXXXXXXYYLITLPELDQSVXXPSAS

SEQ ID NO: 36035 - protein, 38 aa, Artificial Sequence; identical to SEQ ID NO: 11976
  GFR-binding peptide
  MOD_RES (1), (3), (35), (36): Xaa is C or S

SEQ ID NO: 36036 - protein, 34 aa, Artificial Sequence; identical to SEQ ID NO: 4538
  GFR-binding peptide
  MOD_RES (2), (33), (34): Xaa is C or S

SEQ ID NO: 36037 - protein, 40 aa, Artificial Sequence; identical to SEQ ID NO: 10105
  GFR-binding peptide
  MOD_RES (1), (3), (36), (37): Xaa is C or S
  MOD_RES (14), (15), (16), (17), (18): Xaa is A or G
  MOD_RES (19), (20), (21), (22): Xaa is A or G or is absent

SEQ ID NO: 36038 - protein, 36 aa, Artificial Sequence; identical to SEQ ID NO: 10106
  GFR-binding peptide
  MOD_RES (1), (32), (33): Xaa is C or S

SEQ ID NO: 36039 - protein, 34 aa, Artificial Sequence; identical to SEQ ID NO: 2621
  GFR-binding peptide
  MOD_RES (31), (32): Xaa is C or S

SEQ ID NO: 36040 - protein, 32 aa, Artificial Sequence; identical to SEQ ID NO: 11979
  GFR-binding peptide
  MOD_RES (31), (32): Xaa is C or S

SEQ ID NO: 36041 - protein, 40 aa, Artificial Sequence; identical to SEQ ID NO: 10109
  GFR-binding peptide
  MOD_RES (1), (3), (35), (36): Xaa is C or S

SEQ ID NO: 36042 - protein, 40 aa, Artificial Sequence; identical to SEQ ID NO: 10112
  GFR-binding peptide
  MOD_RES (2), (4), (36), (37): Xaa is C or S

SEQ ID NO: 36043 - protein, 36 aa, Artificial Sequence; identical to SEQ ID NO: 10113
  GFR-binding peptide
  MOD_RES (34), (35): Xaa is C or S
  MOD_RES (12), (13), (14), (15), (16): Xaa is A or G
  MOD_RES (17), (18), (19), (20): Xaa is A or G or is absent

SEQ ID NO: 36044 - protein, 38 aa, Artificial Sequence; identical to SEQ ID NO: 11982
  GFR-binding peptide
  MOD_RES (2), (4), (35), (36): Xaa is C or S

SEQ ID NO: 36045 - protein, 38 aa, Artificial Sequence; identical to SEQ ID NO: 11983
  GFR-binding peptide
  MOD_RES (32), (33): Xaa is C or S

SEQ ID NO: 36046 - protein, 35 aa, Artificial Sequence; identical to SEQ ID NO: 11984
  GFR-binding peptide
  MOD_RES (2), (33), (34): Xaa is C or S

SEQ ID NO: 36047 - protein, 31 aa, Artificial Sequence; identical to SEQ ID NO: 2628
  GFR-binding peptide
  MOD_RES (31), (31): Xaa is C or S

SEQ ID NO: 36048 - protein, 40 aa, Artificial Sequence; identical to SEQ ID NO: 4553
  GFR-binding peptide
  MOD_RES (34), (35): Xaa is C or S
  MOD_RES (12), (13), (14), (15), (16): Xaa is A or G
  MOD_RES (17), (18), (19), (20): Xaa is A or G or is absent

SEQ ID NO: 36049 - protein, 39 aa, Artificial Sequence; identical to SEQ ID NO: 11987
  GFR-binding peptide
  MOD_RES (1), (3), (36), (37): Xaa is C or S
  MOD_RES (14), (15), (16), (17), (18): Xaa is A or G
  MOD_RES (19), (20), (21), (22): Xaa is A or G or is absent

SEQ ID NO: 36050 - protein, 37 aa, Artificial Sequence; identical to SEQ ID NO: 11988
  GFR-binding peptide
  MOD_RES (2), (33), (34): Xaa is C or S

SEQ ID NO: 36051 - protein, 37 aa, Artificial Sequence; identical to SEQ ID NO: 11990
  GFR-binding peptide
  MOD_RES (32), (32): Xaa is C or S

SEQ ID NO: 36052 - protein, 35 aa, Artificial Sequence; identical to SEQ ID NO: 10118
  GFR-binding peptide
  MOD_RES (33), (34): Xaa is C or S
  MOD_RES (11), (12), (13), (14), (15): Xaa is A or G
  MOD_RES (16), (17), (18), (19): Xaa is A or G or is absent

SEQ ID NO: 36053 - protein, 36 aa, Artificial Sequence; identical to SEQ ID NO: 4556
  GFR-binding peptide
  MOD_RES (1), (33), (34): Xaa is C or S

SEQ ID NO: 36054 - protein, 40 aa, Artificial Sequence; identical to SEQ ID NO: 10120
  GFR-binding peptide
  MOD_RES (1), (3), (34), (35): Xaa is C or S

SEQ ID NO: 36055 - protein, 35 aa, Artificial Sequence; identical to SEQ ID NO: 4558
  GFR-binding peptide
  MOD_RES (2), (2): Xaa is C or S
  MOD_RES (14), (15), (16), (17), (18): Xaa is A or G
  MOD_RES (19), (20), (21), (22): Xaa is A or G or is absent

SEQ ID NO: 36056 - protein, 35 aa, Artificial Sequence; identical to SEQ ID NO: 11993
  GFR-binding peptide
  MOD_RES (31), (32): Xaa is C or S

SEQ ID NO: 36057 - protein, 39 aa, Artificial Sequence; identical to SEQ ID NO: 2637
  GFR-binding peptide
  MOD_RES (2), (4), (37), (38): Xaa is C or S
  MOD_RES (15), (16), (17), (18), (19): Xaa is A or G
  MOD_RES (20), (21), (22), (23): Xaa is A or G or is absent

SEQ ID NO: 36058 - protein, 32 aa, Artificial Sequence; identical to SEQ ID NO: 11994
  GFR-binding peptide
  MOD_RES (31), (32): Xaa is C or S

SEQ ID NO: 36059 - protein, 35 aa, Artificial Sequence; identical to SEQ ID NO: 10124
  GFR-binding peptide
  MOD_RES (1), (3), (35): Xaa is C or S

SEQ ID NO: 36060 - protein, 41 aa, Artificial Sequence; identical to SEQ ID NO: 11995
  GFR-binding peptide
  MOD_RES (2), (4), (36), (37): Xaa is C or S

SEQ ID NO: 36061 - protein, 37 aa, Artificial Sequence; identical to SEQ ID NO: 11996
  GFR-binding peptide
  MOD_RES (34), (35): Xaa is C or S
  MOD_RES (12), (13), (14), (15), (16): Xaa is A or G
  MOD_RES (17), (18), (19), (20): Xaa is A or G or is absent

SEQ ID NO: 36062 - protein, 35 aa, Artificial Sequence; identical to SEQ ID NO: 11997
  GFR-binding peptide
  MOD_RES (2), (4), (35): Xaa is C or S

SEQ ID NO: 36063 - protein, 38 aa, Artificial Sequence; identical to SEQ ID NO: 10125
  GFR-binding peptide
  MOD_RES (2), (4), (38): Xaa is C or S
  MOD_RES (16), (17), (18), (19), (20): Xaa is A or G
  MOD_RES (21), (22), (23), (24): Xaa is A or G or is absent

SEQ ID NO: 36064 - protein, 37 aa, Artificial Sequence; identical to SEQ ID NO: 10126
  GFR-binding peptide
  MOD_RES (2), (4): Xaa is C or S
  MOD_RES (16), (17), (18), (19), (20): Xaa is A or G
  MOD_RES (21), (22), (23), (24): Xaa is A or G or is absent

SEQ ID NO: 36065 - protein, 37 aa, Artificial Sequence; identical to SEQ ID NO: 2642
  GFR-binding peptide
  MOD_RES (31), (32): Xaa is C or S

SEQ ID NO: 36066 - protein, 36 aa, Artificial Sequence; identical to SEQ ID NO: 11998
  GFR-binding peptide
  MOD_RES (1), (33), (34): Xaa is C or S

SEQ ID NO: 36067 - protein, 38 aa, Artificial Sequence; identical to SEQ ID NO: 4566
  GFR-binding peptide
  MOD_RES (1), (3), (36), (37): Xaa is C or S
  MOD_RES (14), (15), (16), (17), (18): Xaa is A or G
  MOD_RES (19), (20), (21), (22): Xaa is A or G or is absent

SEQ ID NO: 36068 - protein, 36 aa, Artificial Sequence; identical to SEQ ID NO: 10128
  GFR-binding peptide
  MOD_RES (1), (3), (35): Xaa is C or S

SEQ ID NO: 36069 - protein, 40 aa, Artificial Sequence; identical to SEQ ID NO: 12000
  GFR-binding peptide
  MOD_RES (2), (34), (35): Xaa is C or S

SEQ ID NO: 36070 - protein, 35 aa, Artificial Sequence; identical to SEQ ID NO: 12001
  GFR-binding peptide
  MOD_RES (2), (2): Xaa is C or S
  MOD_RES (14), (15), (16), (17), (18): Xaa is A or G
  MOD_RES (19), (20), (21), (22): Xaa is A or G or is absent

SEQ ID NO: 36071 - protein, 32 aa, Artificial Sequence; identical to SEQ ID NO: 12002
  GFR-binding peptide
  MOD_RES (11), (12), (13), (14), (15): Xaa is A or G
  MOD_RES (16), (17), (18), (19): Xaa is A or G or is absent

SEQ ID NO: 36072 - protein, 39 aa, Artificial Sequence; identical to SEQ ID NO: 10131
  GFR-binding peptide
  MOD_RES (33), (34): Xaa is C or S
  MOD_RES (11), (12), (13), (14), (15): Xaa is A or G
  MOD_RES (16), (17), (18), (19): Xaa is A or G or is absent

SEQ ID NO: 36073 - protein, 39 aa, Artificial Sequence; identical to SEQ ID NO: 4570
  GFR-binding peptide
  MOD_RES (1), (3), (35), (36): Xaa is C or S

SEQ ID NO: 36074 - protein, 40 aa, Artificial Sequence; identical to SEQ ID NO: 12004
  GFR-binding peptide
  MOD_RES (2), (34), (35): Xaa is C or S

SEQ ID NO: 36075 - protein, 33 aa, Artificial Sequence; identical to SEQ ID NO: 12005
  GFR-binding peptide
  MOD_RES (32), (33): Xaa is C or S

SEQ ID NO: 36076 - protein, 38 aa, Artificial Sequence; identical to SEQ ID NO: 10133
  GFR-binding peptide
  MOD_RES (33), (34): Xaa is C or S
  MOD_RES (11), (12), (13), (14), (15): Xaa is A or G
  MOD_RES (16), (17), (18), (19): Xaa is A or G or is absent

SEQ ID NO: 36077 - protein, 41 aa, Artificial Sequence
  GFR-binding peptide
  MOD_RES (2), (4), (37), (38): Xaa is C or S
  MOD_RES (15), (16), (17), (18), (19): Xaa is A or G
  MOD_RES (20), (21), (22), (23): Xaa is A or G or is absent
SXKXSKVIMNSLQEXXXXXXXXXYYLITLPELDQSVXXPSA

SEQ ID NO: 36078 - protein, 33 aa, Artificial Sequence; identical to SEQ ID NO: 10134
  GFR-binding peptide
  MOD_RES (33), (33): Xaa is C or S
  MOD_RES (11), (12), (13), (14), (15): Xaa is A or G
  MOD_RES (16), (17), (18), (19): Xaa is A or G or is absent

SEQ ID NO: 36079 - protein, 36 aa, Artificial Sequence; identical to SEQ ID NO: 10135
  GFR-binding peptide
  MOD_RES (2), (34), (35): Xaa is C or S

SEQ ID NO: 36080 - protein, 37 aa, Artificial Sequence; identical to SEQ ID NO: 10136
  GFR-binding peptide
  MOD_RES (2), (4): Xaa is C or S
  MOD_RES (16), (17), (18), (19), (20): Xaa is A or G
  MOD_RES (21), (22), (23), (24): Xaa is A or G or is absent

SEQ ID NO: 36081 - protein, 38 aa, Artificial Sequence; identical to SEQ ID NO: 2658
  GFR-binding peptide
  MOD_RES (1), (3), (37), (38): Xaa is C or S
  MOD_RES (15), (16), (17), (18), (19): Xaa is A or G
  MOD_RES (20), (21), (22), (23): Xaa is A or G or is absent

SEQ ID NO: 36082 - protein, 38 aa, Artificial Sequence; identical to SEQ ID NO: 10139
  GFR-binding peptide
  MOD_RES (2), (36), (37): Xaa is C or S
  MOD_RES (14), (15), (16), (17), (18): Xaa is A or G
  MOD_RES (19), (20), (21), (22): Xaa is A or G or is absent

SEQ ID NO: 36083 - protein, 40 aa, Artificial Sequence; identical to SEQ ID NO: 10140
  GFR-binding peptide
  MOD_RES (1), (3), (36), (37): Xaa is C or S
  MOD_RES (14), (15), (16), (17), (18): Xaa is A or G
  MOD_RES (19), (20), (21), (22): Xaa is A or G or is absent

SEQ ID NO: 36084 - protein, 35 aa, Artificial Sequence; identical to SEQ ID NO: 2659
  GFR-binding peptide
  MOD_RES (2), (4), (35): Xaa is C or S

SEQ ID NO: 36085 - protein, 35 aa, Artificial Sequence; identical to SEQ ID NO: 12008
  GFR-binding peptide
  MOD_RES (1), (35): Xaa is C or S
  MOD_RES (13), (14), (15), (16), (17): Xaa is A or G
  MOD_RES (18), (19), (20), (21): Xaa is A or G or is absent

SEQ ID NO: 36086 - protein, 39 aa, Artificial Sequence; identical to SEQ ID NO: 12009
  GFR-binding peptide
  MOD_RES (2), (33), (34): Xaa is C or S

SEQ ID NO: 36087 - protein, 41 aa, Artificial Sequence; identical to SEQ ID NO: 12010
  GFR-binding peptide
  MOD_RES (2), (36), (37): Xaa is C or S
  MOD_RES (14), (15), (16), (17), (18): Xaa is A or G
  MOD_RES (19), (20), (21), (22): Xaa is A or G or is absent

SEQ ID NO: 36088 - protein, 37 aa, Artificial Sequence; identical to SEQ ID NO: 2663
  GFR-binding peptide
  MOD_RES (33), (34): Xaa is C or S
  MOD_RES (11), (12), (13), (14), (15): Xaa is A or G
  MOD_RES (16), (17), (18), (19): Xaa is A or G or is absent

SEQ ID NO: 36089 - protein, 37 aa, Artificial Sequence; identical to SEQ ID NO: 10145
  GFR-binding peptide
  MOD_RES (31), (32): Xaa is C or S

SEQ ID NO: 36090 - protein, 36 aa, Artificial Sequence; identical to SEQ ID NO: 2664
  GFR-binding peptide
  MOD_RES (2), (36): Xaa is C or S
  MOD_RES (14), (15), (16), (17), (18): Xaa is A or G
  MOD_RES (19), (20), (21), (22): Xaa is A or G or is absent

SEQ ID NO: 36091 - protein, 35 aa, Artificial Sequence; identical to SEQ ID NO: 12012
  GFR-binding peptide
  MOD_RES (1), (35): Xaa is C or S
  MOD_RES (13), (14), (15), (16), (17): Xaa is A or G
  MOD_RES (18), (19), (20), (21): Xaa is A or G or is absent

SEQ ID NO: 36092 - protein, 35 aa, Artificial Sequence; identical to SEQ ID NO: 10147
  GFR-binding peptide
  MOD_RES (2), (4), (35): Xaa is C or S

SEQ ID NO: 36093 - protein, 35 aa, Artificial Sequence; identical to SEQ ID NO: 10148
  GFR-binding peptide
  MOD_RES (31), (32): Xaa is C or S

SEQ ID NO: 36094 - protein, 40 aa, Artificial Sequence; identical to SEQ ID NO: 10149
  GFR-binding peptide
  MOD_RES (2), (36), (37): Xaa is C or S
  MOD_RES (14), (15), (16), (17), (18): Xaa is A or G
  MOD_RES (19), (20), (21), (22): Xaa is A or G or is absent

SEQ ID NO: 36095 - protein, 35 aa, Artificial Sequence; identical to SEQ ID NO: 10150
  GFR-binding peptide
  MOD_RES (1), (35): Xaa is C or S
  MOD_RES (13), (14), (15), (16), (17): Xaa is A or G
  MOD_RES (18), (19), (20), (21): Xaa is A or G or is absent

SEQ ID NO: 36096 - protein, 35 aa, Artificial Sequence; identical to SEQ ID NO: 4588
  GFR-binding peptide
  MOD_RES (2), (35): Xaa is C or S
  MOD_RES (13), (14), (15), (16), (17): Xaa is A or G
  MOD_RES (18), (19), (20), (21): Xaa is A or G or is absent

SEQ ID NO: 36097 - protein, 42 aa, Artificial Sequence; identical to SEQ ID NO: 10152
  GFR-binding peptide
  MOD_RES (2), (4), (38), (39): Xaa is C or S
  MOD_RES (16), (17), (18), (19), (20): Xaa is A or G
  MOD_RES (21), (22), (23), (24): Xaa is A or G or is absent

SEQ ID NO: 36098 - protein, 41 aa, Artificial Sequence; identical to SEQ ID NO: 10153
  GFR-binding peptide
  MOD_RES (1), (35), (36): Xaa is C or S
  MOD_RES (13), (14), (15), (16), (17): Xaa is A or G
  MOD_RES (18), (19), (20), (21): Xaa is A or G or is absent

SEQ ID NO: 36099 - protein, 39 aa, Artificial Sequence; identical to SEQ ID NO: 12015
  GFR-binding peptide
  MOD_RES (1), (3), (37), (38): Xaa is C or S
  MOD_RES (15), (16), (17), (18), (19): Xaa is A or G
  MOD_RES (20), (21), (22), (23): Xaa is A or G or is absent

SEQ ID NO: 36100 - protein, 39 aa, Artificial Sequence; identical to SEQ ID NO: 12016
  GFR-binding peptide
  MOD_RES (33), (34): Xaa is C or S
  MOD_RES (11), (12), (13), (14), (15): Xaa is A or G
  MOD_RES (16), (17), (18), (19): Xaa is A or G or is absent

SEQ ID NO: 36101 - protein, 35 aa, Artificial Sequence; identical to SEQ ID NO: 12017
  GFR-binding peptide
  MOD_RES (32), (33): Xaa is C or S

SEQ ID NO: 36102 - protein, 35 aa, Artificial Sequence; identical to SEQ ID NO: 10154
  GFR-binding peptide
  MOD_RES (1), (35): Xaa is C or S
  MOD_RES (13), (14), (15), (16), (17): Xaa is A or G
  MOD_RES (18), (19), (20), (21): Xaa is A or G or is absent

SEQ ID NO: 36103 - protein, 36 aa, Artificial Sequence; identical to SEQ ID NO: 10156
  GFR-binding peptide
  MOD_RES (33), (33): Xaa is C or S
  MOD_RES (11), (12), (13), (14), (15): Xaa is A or G
  MOD_RES (16), (17), (18), (19): Xaa is A or G or is absent

SEQ ID NO: 36104 - protein, 42 aa, Artificial Sequence; identical to SEQ ID NO: 12018
  GFR-binding peptide
  MOD_RES (2), (36), (37): Xaa is C or S
  MOD_RES (14), (15), (16), (17), (18): Xaa is A or G
  MOD_RES (19), (20), (21), (22): Xaa is A or G or is absent

SEQ ID NO: 36105 - protein, 36 aa, Artificial Sequence; identical to SEQ ID NO: 12019
  GFR-binding peptide
  MOD_RES (2), (4), (36): Xaa is C or S

SEQ ID NO: 36106 - protein, 37 aa, Artificial Sequence; identical to SEQ ID NO: 4589
  GFR-binding peptide
  MOD_RES (1), (35), (36): Xaa is C or S
  MOD_RES (13), (14), (15), (16), (17): Xaa is A or G
  MOD_RES (18), (19), (20), (21): Xaa is A or G or is absent

SEQ ID NO: 36107 - protein, 38 aa, Artificial Sequence; identical to SEQ ID NO: 10158
  GFR-binding peptide
  MOD_RES (1), (3), (34), (35): Xaa is C or S

SEQ ID NO: 36108 - protein, 33 aa, Artificial Sequence; identical to SEQ ID NO: 10160
  GFR-binding peptide
  MOD_RES (31), (32): Xaa is C or S

SEQ ID NO: 36109 - protein, 38 aa, Artificial Sequence; identical to SEQ ID NO: 10161
  GFR-binding peptide
  MOD_RES (34), (35): Xaa is C or S
  MOD_RES (12), (13), (14), (15), (16): Xaa is A or G
  MOD_RES (17), (18), (19), (20): Xaa is A or G or is absent

SEQ ID NO: 36110 - protein, 34 aa, Artificial Sequence; identical to SEQ ID NO: 10163
  GFR-binding peptide
  MOD_RES (1), (3), (34): Xaa is C or S

SEQ ID NO: 36111 - protein, 39 aa, Artificial Sequence; identical to SEQ ID NO: 10164
  GFR-binding peptide
  MOD_RES (2), (4), (36), (37): Xaa is C or S

SEQ ID NO: 36112 - protein, 39 aa, Artificial Sequence; identical to SEQ ID NO: 10166
  GFR-binding peptide
  MOD_RES (2), (36), (37): Xaa is C or S
  MOD_RES (14), (15), (16), (17), (18): Xaa is A or G
  MOD_RES (19), (20), (21), (22): Xaa is A or G or is absent

SEQ ID NO: 36113 - protein, 38 aa, Artificial Sequence; identical to SEQ ID NO: 10168
  GFR-binding peptide
  MOD_RES (32), (33): Xaa is C or S

SEQ ID NO: 36114 - protein, 34 aa, Artificial Sequence; identical to SEQ ID NO: 4601
  GFR-binding peptide
  MOD_RES (1), (3), (34): Xaa is C or S

SEQ ID NO: 36115 - protein, 35 aa, Artificial Sequence; identical to SEQ ID NO: 12029
  GFR-binding peptide
  MOD_RES (32), (32): Xaa is C or S

SEQ ID NO: 36116 - protein, 39 aa, Artificial Sequence; identical to SEQ ID NO: 12030
  GFR-binding peptide
  MOD_RES (1), (3), (36), (37): Xaa is C or S
  MOD_RES (14), (15), (16), (17), (18): Xaa is A or G
  MOD_RES (19), (20), (21), (22): Xaa is A or G or is absent

SEQ ID NO: 36117 - protein, 36 aa, Artificial Sequence; identical to SEQ ID NO: 12032
  GFR-binding peptide
  MOD_RES (1), (32), (33): Xaa is C or S

SEQ ID NO: 36118 - protein, 33 aa, Artificial Sequence; identical to SEQ ID NO: 12033
  GFR-binding peptide
  MOD_RES (1), (33): Xaa is C or S

SEQ ID NO: 36119 - protein, 31 aa, Artificial Sequence; identical to SEQ ID NO: 10169
  GFR-binding peptide

SEQ ID NO: 36120 - protein, 41 aa, Artificial Sequence; identical to SEQ ID NO: 10170
  GFR-binding peptide
  MOD_RES (2), (4), (36), (37): Xaa is C or S

SEQ ID NO: 36121 - protein, 35 aa, Artificial Sequence; identical to SEQ ID NO: 10171
  GFR-binding peptide
  MOD_RES (32), (33): Xaa is C or S

SEQ ID NO: 36122 - protein, 39 aa, Artificial Sequence; identical to SEQ ID NO: 4606
  GFR-binding peptide
  MOD_RES (2), (34), (35): Xaa is C or S

SEQ ID NO: 36123 - protein, 41 aa, Artificial Sequence; identical to SEQ ID NO: 12035
  GFR-binding peptide
  MOD_RES (2), (35), (36): Xaa is C or S
  MOD_RES (13), (14), (15), (16), (17): Xaa is A or G
  MOD_RES (18), (19), (20), (21): Xaa is A or G or is absent

SEQ ID NO: 36124 - protein, 31 aa, Artificial Sequence; identical to SEQ ID NO: 10173
  GFR-binding peptide
  MOD_RES (31), (31): Xaa is C or S

SEQ ID NO: 36125 - protein, 37 aa, Artificial Sequence; identical to SEQ ID NO: 12036
  GFR-binding peptide
  MOD_RES (2), (4), (37): Xaa is C or S
  MOD_RES (15), (16), (17), (18), (19): Xaa is A or G
  MOD_RES (20), (21), (22), (23): Xaa is A or G or is absent

SEQ ID NO: 36126 - protein, 38 aa, Artificial Sequence; identical to SEQ ID NO: 10175
  GFR-binding peptide
  MOD_RES (33), (34): Xaa is C or S
  MOD_RES (11), (12), (13), (14), (15): Xaa is A or G
  MOD_RES (16), (17), (18), (19): Xaa is A or G or is absent

SEQ ID NO: 36127 - protein, 39 aa, Artificial Sequence; identical to SEQ ID NO: 10176
  GFR-binding peptide
  MOD_RES (33), (34): Xaa is C or S
  MOD_RES (11), (12), (13), (14), (15): Xaa is A or G
  MOD_RES (16), (17), (18), (19): Xaa is A or G or is absent

SEQ ID NO: 36128 - protein, 42 aa, Artificial Sequence; identical to SEQ ID NO: 10177
  GFR-binding peptide
  MOD_RES (1), (3), (37), (38): Xaa is C or S
  MOD_RES (15), (16), (17), (18), (19): Xaa is A or G
  MOD_RES (20), (21), (22), (23): Xaa is A or G or is absent

SEQ ID NO: 36129 - protein, 34 aa, Artificial Sequence; identical to SEQ ID NO: 10178
  GFR-binding peptide
  MOD_RES (1), (3), (34): Xaa is C or S

SEQ ID NO: 36130 - protein, 36 aa, Artificial Sequence; identical to SEQ ID NO: 10179
  GFR-binding peptide
  MOD_RES (33), (34): Xaa is C or S
  MOD_RES (11), (12), (13), (14), (15): Xaa is A or G
  MOD_RES (16), (17), (18), (19): Xaa is A or G or is absent

SEQ ID NO: 36131 - protein, 33 aa, Artificial Sequence; identical to SEQ ID NO: 12037
  GFR-binding peptide
  MOD_RES (33), (33): Xaa is C or S
  MOD_RES (11), (12), (13), (14), (15): Xaa is A or G
  MOD_RES (16), (17), (18), (19): Xaa is A or G or is absent

SEQ ID NO: 36132 - protein, 38 aa, Artificial Sequence; identical to SEQ ID NO: 10180
  GFR-binding peptide
  MOD_RES (34), (35): Xaa is C or S
  MOD_RES (12), (13), (14), (15), (16): Xaa is A or G
  MOD_RES (17), (18), (19), (20): Xaa is A or G or is absent

SEQ ID NO: 36133 - protein, 36 aa, Artificial Sequence; identical to SEQ ID NO: 12039
  GFR-binding peptide
  MOD_RES (2), (34): Xaa is C or S

SEQ ID NO: 36134 - protein, 40 aa, Artificial Sequence; identical to SEQ ID NO: 10181
  GFR-binding peptide
  MOD_RES (2), (4), (38), (39): Xaa is C or S
  MOD_RES (16), (17), (18), (19), (20): Xaa is A or G
  MOD_RES (21), (22), (23), (24): Xaa is A or G or is absent

SEQ ID NO: 36135 - protein, 37 aa, Artificial Sequence; identical to SEQ ID NO: 12040
  GFR-binding peptide
  MOD_RES (1), (3), (34), (35): Xaa is C or S

SEQ ID NO: 36136 - protein, 39 aa, Artificial Sequence; identical to SEQ ID NO: 12041
  GFR-binding peptide
  MOD_RES (1), (3), (35): Xaa is C or S

SEQ ID NO: 36137 - protein, 39 aa, Artificial Sequence; identical to SEQ ID NO: 10184
  GFR-binding peptide
  MOD_RES (1), (35), (36): Xaa is C or S
  MOD_RES (13), (14), (15), (16), (17): Xaa is A or G
  MOD_RES (18), (19), (20), (21): Xaa is A or G or is absent

SEQ ID NO: 36138 - protein, 34 aa, Artificial Sequence; identical to SEQ ID NO: 12042
  GFR-binding peptide
  MOD_RES (31), (32): Xaa is C or S

SEQ ID NO: 36139 - protein, 41 aa, Artificial Sequence; identical to SEQ ID NO: 10185
  GFR-binding peptide
  MOD_RES (2), (4), (36), (37): Xaa is C or S

SEQ ID NO: 36140 - protein, 35 aa, Artificial Sequence; identical to SEQ ID NO: 10186
  GFR-binding peptide
  MOD_RES (1), (32), (33): Xaa is C or S

SEQ ID NO: 36141 - protein, 32 aa, Artificial Sequence; identical to SEQ ID NO: 12043
  GFR-binding peptide
  MOD_RES (11), (12), (13), (14), (15): Xaa is A or G
  MOD_RES (16), (17), (18), (19): Xaa is A or G or is absent

SEQ ID NO: 36142 - protein, 30 aa, Artificial Sequence; identical to SEQ ID NO: 2703
  GFR-binding peptide

SEQ ID NO: 36143 - protein, 39 aa, Artificial Sequence; identical to SEQ ID NO: 10189
  GFR-binding peptide
  MOD_RES (34), (35): Xaa is C or S
  MOD_RES (12), (13), (14), (15), (16): Xaa is A or G
  MOD_RES (17), (18), (19), (20): Xaa is A or G or is absent

SEQ ID NO: 36144 - protein, 35 aa, Artificial Sequence; identical to SEQ ID NO: 12046
  GFR-binding peptide
  MOD_RES (2), (4): Xaa is C or S

SEQ ID NO: 36145 - protein, 33 aa, Artificial Sequence; identical to SEQ ID NO: 4627
  GFR-binding peptide
  MOD_RES (1), (3): Xaa is C or S

SEQ ID NO: 36146 - protein, 37 aa, Artificial Sequence; identical to SEQ ID NO: 12048
  GFR-binding peptide
  MOD_RES (33), (34): Xaa is C or S
  MOD_RES (11), (12), (13), (14), (15): Xaa is A or G
  MOD_RES (16), (17), (18), (19): Xaa is A or G or is absent

SEQ ID NO: 36147 - protein, 41 aa, Artificial Sequence; identical to SEQ ID NO: 10190
  GFR-binding peptide
  MOD_RES (1), (35), (36): Xaa is C or S
  MOD_RES (13), (14), (15), (16), (17): Xaa is A or G
  MOD_RES (18), (19), (20), (21): Xaa is A or G or is absent

SEQ ID NO: 36148 - protein, 38 aa, Artificial Sequence
  GFR-binding peptide
  MOD_RES (1), (34), (35): Xaa is C or S
  MOD_RES (12), (13), (14), (15), (16): Xaa is A or G
  MOD_RES (17), (18), (19), (20): Xaa is A or G or is absent
XSKVIMNSLQEXXXXXXXXXYYLITLPELDQSVXXPSA

SEQ ID NO: 36149 - protein, 42 aa, Artificial Sequence; identical to SEQ ID NO: 12049
  GFR-binding peptide
  MOD_RES (2), (36), (37): Xaa is C or S
  MOD_RES (14), (15), (16), (17), (18): Xaa is A or G
  MOD_RES (19), (20), (21), (22): Xaa is A or G or is absent

SEQ ID NO: 36150 - protein, 39 aa, Artificial Sequence; identical to SEQ ID NO: 4630
  GFR-binding peptide
  MOD_RES (1), (34), (35): Xaa is C or S
  MOD_RES (12), (13), (14), (15), (16): Xaa is A or G
  MOD_RES (17), (18), (19), (20): Xaa is A or G or is absent

SEQ ID NO: 36151 - protein, 33 aa, Artificial Sequence; identical to SEQ ID NO: 12052
  GFR-binding peptide
  MOD_RES (1), (32), (33): Xaa is C or S

SEQ ID NO: 36152 - protein, 37 aa, Artificial Sequence; identical to SEQ ID NO: 10192
  GFR-binding peptide
  MOD_RES (34), (35): Xaa is C or S
  MOD_RES (12), (13), (14), (15), (16): Xaa is A or G
  MOD_RES (17), (18), (19), (20): Xaa is A or G or is absent

SEQ ID NO: 36153 - protein, 33 aa, Artificial Sequence; identical to SEQ ID NO: 12053
  GFR-binding peptide
  MOD_RES (31), (32): Xaa is C or S

SEQ ID NO: 36154 - protein, 42 aa, Artificial Sequence; identical to SEQ ID NO: 4632
  GFR-binding peptide
  MOD_RES (1), (3), (37), (38): Xaa is C or S
  MOD_RES (15), (16), (17), (18), (19): Xaa is A or G
  MOD_RES (20), (21), (22), (23): Xaa is A or G or is absent

SEQ ID NO: 36155 - protein, 42 aa, Artificial Sequence; identical to SEQ ID NO: 12055
  GFR-binding peptide
  MOD_RES (2), (36), (37): Xaa is C or S
  MOD_RES (14), (15), (16), (17), (18): Xaa is A or G
  MOD_RES (19), (20), (21), (22): Xaa is A or G or is absent

SEQ ID NO: 36156 - protein, 41 aa, Artificial Sequence; identical to SEQ ID NO: 10194
  GFR-binding peptide
  MOD_RES (2), (4), (35), (36): Xaa is C or S

SEQ ID NO: 36157 - protein, 36 aa, Artificial Sequence; identical to SEQ ID NO: 10196
  GFR-binding peptide
  MOD_RES (1), (3), (35), (36): Xaa is C or S

SEQ ID NO: 36158 - protein, 38 aa, Artificial Sequence; identical to SEQ ID NO: 12057
  GFR-binding peptide
  MOD_RES (2), (35), (36): Xaa is C or S
  MOD_RES (13), (14), (15), (16), (17): Xaa is A or G
  MOD_RES (18), (19), (20), (21): Xaa is A or G or is absent

SEQ ID NO: 36159 - protein, 40 aa, Artificial Sequence; identical to SEQ ID NO: 12058
  GFR-binding peptide
  MOD_RES (1), (3), (35): Xaa is C or S

SEQ ID NO: 36160 - protein, 38 aa, Artificial Sequence; identical to SEQ ID NO: 12059
  GFR-binding peptide
  MOD_RES (1), (33), (34): Xaa is C or S

SEQ ID NO: 36161 - protein, 34 aa, Artificial Sequence; identical to SEQ ID NO: 10198
  GFR-binding peptide
  MOD_RES (31), (31): Xaa is C or S

SEQ ID NO: 36162 - protein, 35 aa, Artificial Sequence; identical to SEQ ID NO: 10199
  GFR-binding peptide
  MOD_RES (34), (35): Xaa is C or S
  MOD_RES (12), (13), (14), (15), (16): Xaa is A or G
  MOD_RES (17), (18), (19), (20): Xaa is A or G or is absent

SEQ ID NO: 36163 - protein, 37 aa, Artificial Sequence; identical to SEQ ID NO: 10200
  GFR-binding peptide
  MOD_RES (34), (34): Xaa is C or S
  MOD_RES (12), (13), (14), (15), (16): Xaa is A or G
  MOD_RES (17), (18), (19), (20): Xaa is A or G or is absent

SEQ ID NO: 36164 - protein, 37 aa, Artificial Sequence; identical to SEQ ID NO: 12061
  GFR-binding peptide
  MOD_RES (1), (3), (36), (37): Xaa is C or S
  MOD_RES (14), (15), (16), (17), (18): Xaa is A or G
  MOD_RES (19), (20), (21), (22): Xaa is A or G or is absent

SEQ ID NO: 36165 - protein, 36 aa, Artificial Sequence; identical to SEQ ID NO: 12062
  GFR-binding peptide
  MOD_RES (32), (33): Xaa is C or S

SEQ ID NO: 36166 - protein, 37 aa, Artificial Sequence; identical to SEQ ID NO: 10201
  GFR-binding peptide
  MOD_RES (31), (31): Xaa is C or S

SEQ ID NO: 36167 - protein, 32 aa, Artificial Sequence; identical to SEQ ID NO: 10203
  GFR-binding peptide
  MOD_RES (32), (32): Xaa is C or S

SEQ ID NO: 36168 - protein, 38 aa, Artificial Sequence; identical to SEQ ID NO: 12063
  GFR-binding peptide
  MOD_RES (34), (35): Xaa is C or S
  MOD_RES (12), (13), (14), (15), (16): Xaa is A or G
  MOD_RES (17), (18), (19), (20): Xaa is A or G or is absent

SEQ ID NO: 36169 - protein, 34 aa, Artificial Sequence; identical to SEQ ID NO: 12064
  GFR-binding peptide
  MOD_RES (1), (32), (33): Xaa is C or S

SEQ ID NO: 36170 - protein, 40 aa, Artificial Sequence; identical to SEQ ID NO: 12065
  GFR-binding peptide
  MOD_RES (34), (34): Xaa is C or S
  MOD_RES (12), (13), (14), (15), (16): Xaa is A or G
  MOD_RES (17), (18), (19), (20): Xaa is A or G or is absent

SEQ ID NO: 36171 - protein, 38 aa, Artificial Sequence; identical to SEQ ID NO: 12066
  GFR-binding peptide
  MOD_RES (2), (34), (35): Xaa is C or S

SEQ ID NO: 36172 - protein, 38 aa, Artificial Sequence; identical to SEQ ID NO: 4641
  GFR-binding peptide
  MOD_RES (1), (3), (34), (35): Xaa is C or S

SEQ ID NO: 36173 - protein, 41 aa, Artificial Sequence; identical to SEQ ID NO: 10204
  GFR-binding peptide
  MOD_RES (2), (35), (36): Xaa is C or S
  MOD_RES (13), (14), (15), (16), (17): Xaa is A or G
  MOD_RES (18), (19), (20), (21): Xaa is A or G or is absent

SEQ ID NO: 36174 - protein, 34 aa, Artificial Sequence; identical to SEQ ID NO: 12068
  GFR-binding peptide
  MOD_RES (2), (2): Xaa is C or S
  MOD_RES (13), (14), (15), (16), (17): Xaa is A or G
  MOD_RES (18), (19), (20), (21): Xaa is A or G or is absent

SEQ ID NO: 36175 - protein, 39 aa, Artificial Sequence; identical to SEQ ID NO: 12069
  GFR-binding peptide
  MOD_RES (1), (34), (35): Xaa is C or S
  MOD_RES (12), (13), (14), (15), (16): Xaa is A or G
  MOD_RES (17), (18), (19), (20): Xaa is A or G or is absent

SEQ ID NO: 36176 - protein, 39 aa, Artificial Sequence; identical to SEQ ID NO: 12070
  GFR-binding peptide
  MOD_RES (1), (3), (34), (35): Xaa is C or S

SEQ ID NO: 36177 - protein, 39 aa, Artificial Sequence; identical to SEQ ID NO: 4643
  GFR-binding peptide
  MOD_RES (2), (35), (36): Xaa is C or S
  MOD_RES (13), (14), (15), (16), (17): Xaa is A or G
  MOD_RES (18), (19), (20), (21): Xaa is A or G or is absent

SEQ ID NO: 36178 - protein, 33 aa, Artificial Sequence; identical to SEQ ID NO: 12072
  GFR-binding peptide
  MOD_RES (2), (33): Xaa is C or S

SEQ ID NO: 36179 - protein, 38 aa, Artificial Sequence; identical to SEQ ID NO: 12073
  GFR-binding peptide
  MOD_RES (2), (36), (37): Xaa is C or S
  MOD_RES (14), (15), (16), (17), (18): Xaa is A or G
  MOD_RES (19), (20), (21), (22): Xaa is A or G or is absent

SEQ ID NO: 36180 - protein, 34 aa, Artificial Sequence; identical to SEQ ID NO: 10206
  GFR-binding peptide
  MOD_RES (33), (34): Xaa is C or S
  MOD_RES (11), (12), (13), (14), (15): Xaa is A or G
  MOD_RES (16), (17), (18), (19): Xaa is A or G or is absent

SEQ ID NO: 36181 - protein, 30 aa, Artificial Sequence; identical to SEQ ID NO: 12075
  GFR-binding peptide

SEQ ID NO: 36182 - protein, 39 aa, Artificial Sequence; identical to SEQ ID NO: 12076
  GFR-binding peptide
  MOD_RES (1), (3), (34), (35): Xaa is C or S

SEQ ID NO: 36183 - protein, 34 aa, Artificial Sequence; identical to SEQ ID NO: 10208
  GFR-binding peptide
  MOD_RES (1), (33): Xaa is C or S

SEQ ID NO: 36184 - protein, 34 aa, Artificial Sequence; identical to SEQ ID NO: 12077
  GFR-binding peptide
  MOD_RES (1), (1): Xaa is C or S
  MOD_RES (13), (14), (15), (16), (17): Xaa is A or G
  MOD_RES (18), (19), (20), (21): Xaa is A or G or is absent

SEQ ID NO: 36185 - protein, 41 aa, Artificial Sequence; identical to SEQ ID NO: 12078
  GFR-binding peptide
  MOD_RES (2), (4), (36), (37): Xaa is C or S

SEQ ID NO: 36186 - protein, 42 aa, Artificial Sequence; identical to SEQ ID NO: 10209
  GFR-binding peptide
  MOD_RES (2), (36), (37): Xaa is C or S
  MOD_RES (14), (15), (16), (17), (18): Xaa is A or G
  MOD_RES (19), (20), (21), (22): Xaa is A or G or is absent

SEQ ID NO: 36187 - protein, 40 aa, Artificial Sequence; identical to SEQ ID NO: 12080
  GFR-binding peptide
  MOD_RES (34), (35): Xaa is C or S
  MOD_RES (12), (13), (14), (15), (16): Xaa is A or G
  MOD_RES (17), (18), (19), (20): Xaa is A or G or is absent

SEQ ID NO: 36188 - protein, 42 aa, Artificial Sequence; identical to SEQ ID NO: 10210
  GFR-binding peptide
  MOD_RES (2), (36), (37): Xaa is C or S
  MOD_RES (14), (15), (16), (17), (18): Xaa is A or G
  MOD_RES (19), (20), (21), (22): Xaa is A or G or is absent

SEQ ID NO: 36189 - protein, 36 aa, Artificial Sequence; identical to SEQ ID NO: 10211
  GFR-binding peptide
  MOD_RES (1), (33), (34): Xaa is C or S

SEQ ID NO: 36190 - protein, 33 aa, Artificial Sequence; identical to SEQ ID NO: 10212
  GFR-binding peptide
  MOD_RES (31), (32): Xaa is C or S

SEQ ID NO: 36191 - protein, 36 aa, Artificial Sequence; identical to SEQ ID NO: 12081
  GFR-binding peptide
  MOD_RES (34), (35): Xaa is C or S
  MOD_RES (12), (13), (14), (15), (16): Xaa is A or G
  MOD_RES (17), (18), (19), (20): Xaa is A or G or is absent

SEQ ID NO: 36192 - protein, 38 aa, Artificial Sequence; identical to SEQ ID NO: 4649
  GFR-binding peptide
  MOD_RES (1), (3), (34), (35): Xaa is C or S

SEQ ID NO: 36193 - protein, 36 aa, Artificial Sequence; identical to SEQ ID NO: 12083
  GFR-binding peptide
  MOD_RES (1), (3), (35), (36): Xaa is C or S

SEQ ID NO: 36194 - protein, 36 aa, Artificial Sequence; identical to SEQ ID NO: 12084
  GFR-binding peptide
  MOD_RES (31), (32): Xaa is C or S

SEQ ID NO: 36195 - protein, 35 aa, Artificial Sequence; identical to SEQ ID NO: 4652
  GFR-binding peptide
  MOD_RES (33), (34): Xaa is C or S
  MOD_RES (11), (12), (13), (14), (15): Xaa is A or G
  MOD_RES (16), (17), (18), (19): Xaa is A or G or is absent

SEQ ID NO: 36196 - protein, 37 aa, Artificial Sequence; identical to SEQ ID NO: 10213
  GFR-binding peptide
  MOD_RES (1), (32), (33): Xaa is C or S

SEQ ID NO: 36197 - protein, 36 aa, Artificial Sequence; identical to SEQ ID NO: 12086
  GFR-binding peptide
  MOD_RES (31), (32): Xaa is C or S

SEQ ID NO: 36198 - protein, 37 aa, Artificial Sequence; identical to SEQ ID NO: 12087
  GFR-binding peptide
  MOD_RES (2), (4): Xaa is C or S
  MOD_RES (16), (17), (18), (19), (20): Xaa is A or G
  MOD_RES (21), (22), (23), (24): Xaa is A or G or is absent

SEQ ID NO: 36199 - protein, 38 aa, Artificial Sequence; identical to SEQ ID NO: 10221
  GFR-binding peptide
  MOD_RES (1), (3), (37), (38): Xaa is C or S
  MOD_RES (15), (16), (17), (18), (19): Xaa is A or G
  MOD_RES (20), (21), (22), (23): Xaa is A or G or is absent

SEQ ID NO: 36200 - protein, 34 aa, Artificial Sequence; identical to SEQ ID NO: 12088
  GFR-binding peptide
  MOD_RES (2), (34): Xaa is C or S

SEQ ID NO: 36201 - protein, 34 aa, Artificial Sequence; identical to SEQ ID NO: 4658
  GFR-binding peptide
  MOD_RES (34), (34): Xaa is C or S
  MOD_RES (12), (13), (14), (15), (16): Xaa is A or G
  MOD_RES (17), (18), (19), (20): Xaa is A or G or is absent

SEQ ID NO: 36202 - protein, 32 aa, Artificial Sequence; identical to SEQ ID NO: 10224
  GFR-binding peptide
  MOD_RES (11), (12), (13), (14), (15): Xaa is A or G
  MOD_RES (16), (17), (18), (19): Xaa is A or G or is absent

SEQ ID NO: 36203 - protein, 34 aa, Artificial Sequence; identical to SEQ ID NO: 12090
  GFR-binding peptide
  MOD_RES (2), (34): Xaa is C or S

SEQ ID NO: 36204 - protein, 36 aa, Artificial Sequence; identical to SEQ ID NO: 12091
  GFR-binding peptide
  MOD_RES (1), (32), (33): Xaa is C or S

SEQ ID NO: 36205 - protein, 31 aa, Artificial Sequence; identical to SEQ ID NO: 4662
  GFR-binding peptide

SEQ ID NO: 36206 - protein, 41 aa, Artificial Sequence; identical to SEQ ID NO: 12093
  GFR-binding peptide
  MOD_RES (1), (35), (36): Xaa is C or S
  MOD_RES (13), (14), (15), (16), (17): Xaa is A or G
  MOD_RES (18), (19), (20), (21): Xaa is A or G or is absent

SEQ ID NO: 36207 - protein, 40 aa, Artificial Sequence; identical to SEQ ID NO: 12095
  GFR-binding peptide
  MOD_RES (2), (4), (38), (39): Xaa is C or S
  MOD_RES (16), (17), (18), (19), (20): Xaa is A or G
  MOD_RES (21), (22), (23), (24): Xaa is A or G or is absent

SEQ ID NO: 36208 - protein, 35 aa, Artificial Sequence; identical to SEQ ID NO: 12096
  GFR-binding peptide
  MOD_RES (2), (4), (35): Xaa is C or S

SEQ ID NO: 36209 - protein, 39 aa, Artificial Sequence; identical to SEQ ID NO: 12098
  GFR-binding peptide
  MOD_RES (1), (3), (36), (37): Xaa is C or S
  MOD_RES (14), (15), (16), (17), (18): Xaa is A or G
  MOD_RES (19), (20), (21), (22): Xaa is A or G or is absent

SEQ ID NO: 36210 - protein, 34 aa, Artificial Sequence; identical to SEQ ID NO: 10225
  GFR-binding peptide
  MOD_RES (34), (34): Xaa is C or S
  MOD_RES (12), (13), (14), (15), (16): Xaa is A or G
  MOD_RES (17), (18), (19), (20): Xaa is A or G or is absent

SEQ ID NO: 36211 - protein, 31 aa, Artificial Sequence; identical to SEQ ID NO: 2746
  GFR-binding peptide
  MOD_RES (1), (1): Xaa is C or S

SEQ ID NO: 36212 - protein, 38 aa, Artificial Sequence; identical to SEQ ID NO: 4667
  GFR-binding peptide
  MOD_RES (33), (34): Xaa is C or S
  MOD_RES (11), (12), (13), (14), (15): Xaa is A or G
  MOD_RES (16), (17), (18), (19): Xaa is A or G or is absent

SEQ ID NO: 36213 - protein, 40 aa, Artificial Sequence; identical to SEQ ID NO: 10227
  GFR-binding peptide
  MOD_RES (2), (34): Xaa is C or S

SEQ ID NO: 36214 - protein, 40 aa, Artificial Sequence; identical to SEQ ID NO: 10229
  GFR-binding peptide
  MOD_RES (1), (35), (36): Xaa is C or S
  MOD_RES (13), (14), (15), (16), (17): Xaa is A or G
  MOD_RES (18), (19), (20), (21): Xaa is A or G or is absent

SEQ ID NO: 36215 - protein, 31 aa, Artificial Sequence; identical to SEQ ID NO: 10230
  GFR-binding peptide

SEQ ID NO: 36216 - protein, 35 aa, Artificial Sequence; identical to SEQ ID NO: 10231
  GFR-binding peptide
  MOD_RES (2), (2): Xaa is C or S
  MOD_RES (14), (15), (16), (17), (18): Xaa is A or G
  MOD_RES (19), (20), (21), (22): Xaa is A or G or is absent

SEQ ID NO: 36217 - protein, 37 aa, Artificial Sequence; identical to SEQ ID NO: 10232
  GFR-binding peptide
  MOD_RES (34), (35): Xaa is C or S
  MOD_RES (12), (13), (14), (15), (16): Xaa is A or G
  MOD_RES (17), (18), (19), (20): Xaa is A or G or is absent

SEQ ID NO: 36218 - protein, 37 aa, Artificial Sequence; identical to SEQ ID NO: 10233
  GFR-binding peptide
  MOD_RES (34), (35): Xaa is C or S
  MOD_RES (12), (13), (14), (15), (16): Xaa is A or G
  MOD_RES (17), (18), (19), (20): Xaa is A or G or is absent

SEQ ID NO: 36219 - protein, 34 aa, Artificial Sequence; identical to SEQ ID NO: 12100
  GFR-binding peptide
  MOD_RES (31), (32): Xaa is C or S

SEQ ID NO: 36220 - protein, 38 aa, Artificial Sequence; identical to SEQ ID NO: 10234
  GFR-binding peptide
  MOD_RES (2), (4), (38): Xaa is C or S
  MOD_RES (16), (17), (18), (19), (20): Xaa is A or G
  MOD_RES (21), (22), (23), (24): Xaa is A or G or is absent

SEQ ID NO: 36221 - protein, 37 aa, Artificial Sequence; identical to SEQ ID NO: 12101
  GFR-binding peptide
  MOD_RES (33), (34): Xaa is C or S
  MOD_RES (11), (12), (13), (14), (15): Xaa is A or G
  MOD_RES (16), (17), (18), (19): Xaa is A or G or is absent

SEQ ID NO: 36222 - protein, 41 aa, Artificial Sequence; identical to SEQ ID NO: 2751
  GFR-binding peptide
  MOD_RES (2), (4), (37), (38): Xaa is C or S
  MOD_RES (15), (16), (17), (18), (19): Xaa is A or G
  MOD_RES (20), (21), (22), (23): Xaa is A or G or is absent

SEQ ID NO: 36223 - protein, 38 aa, Artificial Sequence; identical to SEQ ID NO: 12103
  GFR-binding peptide
  MOD_RES (2), (35), (36): Xaa is C or S
  MOD_RES (13), (14), (15), (16), (17): Xaa is A or G
  MOD_RES (18), (19), (20), (21): Xaa is A or G or is absent

SEQ ID NO: 36224 - protein, 36 aa, Artificial Sequence; identical to SEQ ID NO: 10237
  GFR-binding peptide
  MOD_RES (1), (3), (35), (36): Xaa is C or S

SEQ ID NO: 36225 - protein, 39 aa, Artificial Sequence; identical to SEQ ID NO: 10238
  GFR-binding peptide
  MOD_RES (34), (35): Xaa is C or S
  MOD_RES (12), (13), (14), (15), (16): Xaa is A or G
  MOD_RES (17), (18), (19), (20): Xaa is A or G or is absent

SEQ ID NO: 36226 - protein, 34 aa, Artificial Sequence; identical to SEQ ID NO: 10240
  GFR-binding peptide
  MOD_RES (33), (34): Xaa is C or S
  MOD_RES (11), (12), (13), (14), (15): Xaa is A or G
  MOD_RES (16), (17), (18), (19): Xaa is A or G or is absent

SEQ ID NO: 36227 - protein, 39 aa, Artificial Sequence; identical to SEQ ID NO: 12105
  GFR-binding peptide
  MOD_RES (2), (34), (35): Xaa is C or S

SEQ ID NO: 36228 - protein, 33 aa, Artificial Sequence; identical to SEQ ID NO: 2757
  GFR-binding peptide
  MOD_RES (1), (33): Xaa is C or S

SEQ ID NO: 36229 - protein, 38 aa, Artificial Sequence; identical to SEQ ID NO: 10242
  GFR-binding peptide
  MOD_RES (1), (34), (35): Xaa is C or S
  MOD_RES (12), (13), (14), (15), (16): Xaa is A or G
  MOD_RES (17), (18), (19), (20): Xaa is A or G or is absent

SEQ ID NO: 36230 - protein, 40 aa, Artificial Sequence; identical to SEQ ID NO: 12107
  GFR-binding peptide
  MOD_RES (1), (35): Xaa is C or S
  MOD_RES (13), (14), (15), (16), (17): Xaa is A or G
  MOD_RES (18), (19), (20), (21): Xaa is A or G or is absent

SEQ ID NO: 36231 - protein, 42 aa, Artificial Sequence; identical to SEQ ID NO: 10243
  GFR-binding peptide
  MOD_RES (1), (3), (37), (38): Xaa is C or S
  MOD_RES (15), (16), (17), (18), (19): Xaa is A or G
  MOD_RES (20), (21), (22), (23): Xaa is A or G or is absent

SEQ ID NO: 36232 - protein, 30 aa, Artificial Sequence; identical to SEQ ID NO: 10244
  GFR-binding peptide

SEQ ID NO: 36233 - protein, 34 aa, Artificial Sequence; identical to SEQ ID NO: 12108
  GFR-binding peptide
  MOD_RES (2), (33), (34): Xaa is C or S

SEQ ID NO: 36234 - protein, 36 aa, Artificial Sequence; identical to SEQ ID NO: 4682
  GFR-binding peptide
  MOD_RES (2), (33), (34): Xaa is C or S

SEQ ID NO: 36235 - protein, 32 aa, Artificial Sequence; identical to SEQ ID NO: 4685
  GFR-binding peptide
  MOD_RES (1), (32): Xaa is C or S

SEQ ID NO: 36236 - protein, 39 aa, Artificial Sequence; identical to SEQ ID NO: 12111
  GFR-binding peptide
  MOD_RES (34), (35): Xaa is C or S
  MOD_RES (12), (13), (14), (15), (16): Xaa is A or G
  MOD_RES (17), (18), (19), (20): Xaa is A or G or is absent

SEQ ID NO: 36237 - protein, 36 aa, Artificial Sequence; identical to SEQ ID NO: 4686
  GFR-binding peptide
  MOD_RES (2), (35), (36): Xaa is C or S
  MOD_RES (13), (14), (15), (16), (17): Xaa is A or G
  MOD_RES (18), (19), (20), (21): Xaa is A or G or is absent

SEQ ID NO: 36238 - protein, 37 aa, Artificial Sequence; identical to SEQ ID NO: 10245
  GFR-binding peptide
  MOD_RES (31), (32): Xaa is C or S

SEQ ID NO: 36239 - protein, 34 aa, Artificial Sequence; identical to SEQ ID NO: 12113
  GFR-binding peptide
  MOD_RES (31), (32): Xaa is C or S

SEQ ID NO: 36240 - protein, 33 aa, Artificial Sequence; identical to SEQ ID NO: 12114
  GFR-binding peptide
  MOD_RES (32), (33): Xaa is C or S

SEQ ID NO: 36241 - protein, 39 aa, Artificial Sequence; identical to SEQ ID NO: 12115
  GFR-binding peptide
  MOD_RES (2), (35), (36): Xaa is C or S
  MOD_RES (13), (14), (15), (16), (17): Xaa is A or G
  MOD_RES (18), (19), (20), (21): Xaa is A or G or is absent

SEQ ID NO: 36242 - protein, 37 aa, Artificial Sequence; identical to SEQ ID NO: 12116
  GFR-binding peptide
  MOD_RES (1), (3), (37): Xaa is C or S
  MOD_RES (15), (16), (17), (18), (19): Xaa is A or G
  MOD_RES (20), (21), (22), (23): Xaa is A or G or is absent

SEQ ID NO: 36243 - protein, 36 aa, Artificial Sequence; identical to SEQ ID NO: 10247
  GFR-binding peptide
  MOD_RES (2), (4), (36): Xaa is C or S

SEQ ID NO: 36244 - protein, 40 aa, Artificial Sequence; identical to SEQ ID NO: 10248
  GFR-binding peptide
  MOD_RES (2), (34), (35): Xaa is C or S

SEQ ID NO: 36245 - protein, 43 aa, Artificial Sequence; identical to SEQ ID NO: 10249
  GFR-binding peptide
  MOD_RES (2), (4), (37), (38): Xaa is C or S
  MOD_RES (15), (16), (17), (18), (19): Xaa is A or G
  MOD_RES (20), (21), (22), (23): Xaa is A or G or is absent

SEQ ID NO: 36246 - protein, 37 aa, Artificial Sequence; identical to SEQ ID NO: 10250
  GFR-binding peptide
  MOD_RES (1), (33), (34): Xaa is C or S

SEQ ID NO: 36247 - protein, 37 aa, Artificial Sequence; identical to SEQ ID NO: 12118
  GFR-binding peptide
  MOD_RES (1), (3), (37): Xaa is C or S
  MOD_RES (15), (16), (17), (18), (19): Xaa is A or G
  MOD_RES (20), (21), (22), (23): Xaa is A or G or is absent

SEQ ID NO: 36248 - protein, 35 aa, Artificial Sequence; identical to SEQ ID NO: 10252
  GFR-binding peptide
  MOD_RES (1), (3), (34), (35): Xaa is C or S

SEQ ID NO: 36249 - protein, 37 aa, Artificial Sequence; identical to SEQ ID NO: 2766
  GFR-binding peptide
  MOD_RES (1), (35), (36): Xaa is C or S
  MOD_RES (13), (14), (15), (16), (17): Xaa is A or G
  MOD_RES (18), (19), (20), (21): Xaa is A or G or is absent

SEQ ID NO: 36250 - protein, 33 aa, Artificial Sequence; identical to SEQ ID NO: 12121
  GFR-binding peptide
  MOD_RES (2), (33): Xaa is C or S

SEQ ID NO: 36251 - protein, 36 aa, Artificial Sequence; identical to SEQ ID NO: 12122
  GFR-binding peptide
  MOD_RES (1), (3): Xaa is C or S
  MOD_RES (15), (16), (17), (18), (19): Xaa is A or G
  MOD_RES (20), (21), (22), (23): Xaa is A or G or is absent

SEQ ID NO: 36252 - protein, 38 aa, Artificial Sequence; identical to SEQ ID NO: 12123
  GFR-binding peptide
  MOD_RES (2), (4), (36): Xaa is C or S

SEQ ID NO: 36253 - protein, 35 aa, Artificial Sequence; identical to SEQ ID NO: 12124
  GFR-binding peptide
  MOD_RES (32), (32): Xaa is C or S

SEQ ID NO: 36254 - protein, 41 aa, Artificial Sequence; identical to SEQ ID NO: 10254
  GFR-binding peptide
  MOD_RES (1), (3), (36), (37): Xaa is C or S
  MOD_RES (14), (15), (16), (17), (18): Xaa is A or G
  MOD_RES (19), (20), (21), (22): Xaa is A or G or is absent

SEQ ID NO: 36255 - protein, 36 aa, Artificial Sequence; identical to SEQ ID NO: 10255
  GFR-binding peptide
  MOD_RES (32), (32): Xaa is C or S

SEQ ID NO: 36256 - protein, 35 aa, Artificial Sequence; identical to SEQ ID NO: 12126
  GFR-binding peptide
  MOD_RES (1), (3), (35): Xaa is C or S

SEQ ID NO: 36257 - protein, 40 aa, Artificial Sequence; identical to SEQ ID NO: 2769
  GFR-binding peptide
  MOD_RES (1), (34), (35): Xaa is C or S
  MOD_RES (12), (13), (14), (15), (16): Xaa is A or G
  MOD_RES (17), (18), (19), (20): Xaa is A or G or is absent

SEQ ID NO: 36258 - protein, 35 aa, Artificial Sequence; identical to SEQ ID NO: 10257
  GFR-binding peptide
  MOD_RES (1), (3), (34), (35): Xaa is C or S

SEQ ID NO: 36259 - protein, 36 aa, Artificial Sequence; identical to SEQ ID NO: 10258
  GFR-binding peptide
  MOD_RES (33), (34): Xaa is C or S
  MOD_RES (11), (12), (13), (14), (15): Xaa is A or G
  MOD_RES (16), (17), (18), (19): Xaa is A or G or is absent

SEQ ID NO: 36260 - protein, 34 aa, Artificial Sequence; identical to SEQ ID NO: 4699
  GFR-binding peptide
  MOD_RES (2), (33), (34): Xaa is C or S

SEQ ID NO: 36261 - protein, 38 aa, Artificial Sequence; identical to SEQ ID NO: 12130
  GFR-binding peptide
  MOD_RES (2), (33), (34): Xaa is C or S

SEQ ID NO: 36262 - protein, 37 aa, Artificial Sequence; identical to SEQ ID NO: 12132
  GFR-binding peptide
  MOD_RES (2), (35), (36): Xaa is C or S
  MOD_RES (13), (14), (15), (16), (17): Xaa is A or G
  MOD_RES (18), (19), (20), (21): Xaa is A or G or is absent

SEQ ID NO: 36263 - protein, 34 aa, Artificial Sequence; identical to SEQ ID NO: 12135
  GFR-binding peptide
  MOD_RES (33), (34): Xaa is C or S
  MOD_RES (11), (12), (13), (14), (15): Xaa is A or G
  MOD_RES (16), (17), (18), (19): Xaa is A or G or is absent

SEQ ID NO: 36264 - protein, 37 aa, Artificial Sequence; identical to SEQ ID NO: 2780
  GFR-binding peptide
  MOD_RES (1), (34), (35): Xaa is C or S
  MOD_RES (12), (13), (14), (15), (16): Xaa is A or G
  MOD_RES (17), (18), (19), (20): Xaa is A or G or is absent

SEQ ID NO: 36265 - protein, 38 aa, Artificial Sequence; identical to SEQ ID NO: 12136
  GFR-binding peptide
  MOD_RES (2), (33), (34): Xaa is C or S

SEQ ID NO: 36266 - protein, 39 aa, Artificial Sequence; identical to SEQ ID NO: 10262
  GFR-binding peptide
  MOD_RES (2), (4), (38), (39): Xaa is C or S
  MOD_RES (16), (17), (18), (19), (20): Xaa is A or G
  MOD_RES (21), (22), (23), (24): Xaa is A or G or is absent

SEQ ID NO: 36267 - protein, 36 aa, Artificial Sequence; identical to SEQ ID NO: 4708
  GFR-binding peptide
  MOD_RES (1), (35), (36): Xaa is C or S
  MOD_RES (13), (14), (15), (16), (17): Xaa is A or G
  MOD_RES (18), (19), (20), (21): Xaa is A or G or is absent

SEQ ID NO: 36268 - protein, 38 aa, Artificial Sequence; identical to SEQ ID NO: 4711
  GFR-binding peptide
  MOD_RES (2), (4), (35), (36): Xaa is C or S

SEQ ID NO: 36269 - protein, 41 aa, Artificial Sequence; identical to SEQ ID NO: 10263
  GFR-binding peptide
  MOD_RES (1), (3), (36), (37): Xaa is C or S
  MOD_RES (14), (15), (16), (17), (18): Xaa is A or G
  MOD_RES (19), (20), (21), (22): Xaa is A or G or is absent

SEQ ID NO: 36270 - protein, 37 aa, Artificial Sequence; identical to SEQ ID NO: 10264
  GFR-binding peptide
  MOD_RES (1), (3), (34), (35): Xaa is C or S

SEQ ID NO: 36271 - protein, 32 aa, Artificial Sequence; identical to SEQ ID NO: 2782
  GFR-binding peptide
  MOD_RES (32), (32): Xaa is C or S

SEQ ID NO: 36272 - protein, 37 aa, Artificial Sequence; identical to SEQ ID NO: 12142
  GFR-binding peptide
  MOD_RES (1), (3), (35), (36): Xaa is C or S

SEQ ID NO: 36273 - protein, 40 aa, Artificial Sequence; identical to SEQ ID NO: 10266
  GFR-binding peptide
  MOD_RES (2), (36), (37): Xaa is C or S
  MOD_RES (14), (15), (16), (17), (18): Xaa is A or G
  MOD_RES (19), (20), (21), (22): Xaa is A or G or is absent

SEQ ID NO: 36274 - protein, 43 aa, Artificial Sequence; identical to SEQ ID NO: 12143
  GFR-binding peptide
  MOD_RES (1), (3), (37): Xaa is C or S
  MOD_RES (15), (16), (17), (18), (19): Xaa is A or G
  MOD_RES (20), (21), (22), (23): Xaa is A or G or is absent

SEQ ID NO: 36275 - protein, 36 aa, Artificial Sequence; identical to SEQ ID NO: 12145
  GFR-binding peptide
  MOD_RES (33), (34): Xaa is C or S
  MOD_RES (11), (12), (13), (14), (15): Xaa is A or G
  MOD_RES (16), (17), (18), (19): Xaa is A or G or is absent

SEQ ID NO: 36276 - protein, 35 aa, Artificial Sequence; identical to SEQ ID NO: 2789
  GFR-binding peptide
  MOD_RES (33), (34): Xaa is C or S
  MOD_RES (11), (12), (13), (14), (15): Xaa is A or G
  MOD_RES (16), (17), (18), (19): Xaa is A or G or is absent

SEQ ID NO: 36277 - protein, 41 aa, Artificial Sequence; identical to SEQ ID NO: 12146
  GFR-binding peptide
  MOD_RES (2), (36), (37): Xaa is C or S
  MOD_RES (14), (15), (16), (17), (18): Xaa is A or G
  MOD_RES (19), (20), (21), (22): Xaa is A or G or is absent

SEQ ID NO: 36278 - protein, 36 aa, Artificial Sequence; identical to SEQ ID NO: 4719
  GFR-binding peptide
  MOD_RES (1), (3), (35), (36): Xaa is C or S

SEQ ID NO: 36279 - protein, 38 aa, Artificial Sequence; identical to SEQ ID NO: 12148
  GFR-binding peptide
  MOD_RES (2), (36), (37): Xaa is C or S
  MOD_RES (14), (15), (16), (17), (18): Xaa is A or G
  MOD_RES (19), (20), (21), (22): Xaa is A or G or is absent

SEQ ID NO: 36280 - protein, 35 aa, Artificial Sequence; identical to SEQ ID NO: 12149
  GFR-binding peptide
  MOD_RES (1), (35): Xaa is C or S
  MOD_RES (13), (14), (15), (16), (17): Xaa is A or G
  MOD_RES (18), (19), (20), (21): Xaa is A or G or is absent

SEQ ID NO: 36281 - protein, 36 aa, Artificial Sequence; identical to SEQ ID NO: 2792
  GFR-binding peptide
  MOD_RES (32), (33): Xaa is C or S

SEQ ID NO: 36282 - protein, 41 aa, Artificial Sequence; identical to SEQ ID NO: 4720
  GFR-binding peptide
  MOD_RES (1), (3), (37), (38): Xaa is C or S
  MOD_RES (15), (16), (17), (18), (19): Xaa is A or G
  MOD_RES (20), (21), (22), (23): Xaa is A or G or is absent

SEQ ID NO: 36283 - protein, 37 aa, Artificial Sequence; identical to SEQ ID NO: 4723
  GFR-binding peptide
  MOD_RES (1), (32), (33): Xaa is C or S

SEQ ID NO: 36284 - protein, 37 aa, Artificial Sequence; identical to SEQ ID NO: 12153
  GFR-binding peptide
  MOD_RES (1), (32), (33): Xaa is C or S

SEQ ID NO: 36285 - protein, 37 aa, Artificial Sequence; identical to SEQ ID NO: 12154
  GFR-binding peptide
  MOD_RES (31), (32): Xaa is C or S

SEQ ID NO: 36286 - protein, 41 aa, Artificial Sequence; identical to SEQ ID NO: 10273
  GFR-binding peptide
  MOD_RES (2), (4), (38): Xaa is C or S
  MOD_RES (16), (17), (18), (19), (20): Xaa is A or G
  MOD_RES (21), (22), (23), (24): Xaa is A or G or is absent

SEQ ID NO: 36287 - protein, 35 aa, Artificial Sequence; identical to SEQ ID NO: 12155
  GFR-binding peptide
  MOD_RES (31), (32): Xaa is C or S

SEQ ID NO: 36288 - protein, 35 aa, Artificial Sequence; identical to SEQ ID NO: 10274
  GFR-binding peptide
  MOD_RES (1), (3), (34), (35): Xaa is C or S

SEQ ID NO: 36289 - protein, 37 aa, Artificial Sequence; identical to SEQ ID NO: 12157
  GFR-binding peptide
  MOD_RES (33), (34): Xaa is C or S
  MOD_RES (11), (12), (13), (14), (15): Xaa is A or G
  MOD_RES (16), (17), (18), (19): Xaa is A or G or is absent

SEQ ID NO: 36290 - protein, 38 aa, Artificial Sequence; identical to SEQ ID NO: 12158
  GFR-binding peptide
  MOD_RES (1), (3), (35), (36): Xaa is C or S

SEQ ID NO: 36291 - protein, 37 aa, Artificial Sequence; identical to SEQ ID NO: 10275
  GFR-binding peptide
  MOD_RES (1), (3), (35), (36): Xaa is C or S

SEQ ID NO: 36292 - protein, 36 aa, Artificial Sequence; identical to SEQ ID NO: 10276
  GFR-binding peptide
  MOD_RES (34), (35): Xaa is C or S
  MOD_RES (12), (13), (14), (15), (16): Xaa is A or G
  MOD_RES (17), (18), (19), (20): Xaa is A or G or is absent

SEQ ID NO: 36293 - protein, 38 aa, Artificial Sequence; identical to SEQ ID NO: 10277
  GFR-binding peptide
  MOD_RES (1), (3), (37), (38): Xaa is C or S
  MOD_RES (15), (16), (17), (18), (19): Xaa is A or G
  MOD_RES (20), (21), (22), (23): Xaa is A or G or is absent

SEQ ID NO: 36294 - protein, 38 aa, Artificial Sequence; identical to SEQ ID NO: 10278
  GFR-binding peptide
  MOD_RES (34), (35): Xaa is C or S
  MOD_RES (12), (13), (14), (15), (16): Xaa is A or G
  MOD_RES (17), (18), (19), (20): Xaa is A or G or is absent

SEQ ID NO: 36295 - protein, 34 aa, Artificial Sequence; identical to SEQ ID NO: 2801
  GFR-binding peptide
  MOD_RES (2), (34): Xaa is C or S

SEQ ID NO: 36296 - protein, 38 aa, Artificial Sequence; identical to SEQ ID NO: 4733
  GFR-binding peptide
  MOD_RES (2), (4), (37), (38): Xaa is C or S
  MOD_RES (15), (16), (17), (18), (19): Xaa is A or G
  MOD_RES (20), (21), (22), (23): Xaa is A or G or is absent

SEQ ID NO: 36297 - protein, 38 aa, Artificial Sequence; identical to SEQ ID NO: 12161
  GFR-binding peptide
  MOD_RES (32), (33): Xaa is C or S

SEQ ID NO: 36298 - protein, 35 aa, Artificial Sequence; identical to SEQ ID NO: 12162
  GFR-binding peptide
  MOD_RES (34), (34): Xaa is C or S
  MOD_RES (12), (13), (14), (15), (16): Xaa is A or G
  MOD_RES (17), (18), (19), (20): Xaa is A or G or is absent

SEQ ID NO: 36299 - protein, 32 aa, Artificial Sequence
  GFR-binding peptide
  MOD_RES (2), (2): Xaa is C or S
KXSKVIMNSLQEIKPTKGIYYLITLPELDQSV

SEQ ID NO: 36300 - protein, 40 aa, Artificial Sequence; identical to SEQ ID NO: 12163
  GFR-binding peptide
  MOD_RES (34), (35): Xaa is C or S
  MOD_RES (12), (13), (14), (15), (16): Xaa is A or G
  MOD_RES (17), (18), (19), (20): Xaa is A or G or is absent

SEQ ID NO: 36301 - protein, 41 aa, Artificial Sequence; identical to SEQ ID NO: 12164
  GFR-binding peptide
  MOD_RES (1), (3), (37), (38): Xaa is C or S
  MOD_RES (15), (16), (17), (18), (19): Xaa is A or G
  MOD_RES (20), (21), (22), (23): Xaa is A or G or is absent

SEQ ID NO: 36302 - protein, 38 aa, Artificial Sequence; identical to SEQ ID NO: 10280
  GFR-binding peptide
  MOD_RES (2), (36): Xaa is C or S
  MOD_RES (14), (15), (16), (17), (18): Xaa is A or G
  MOD_RES (19), (20), (21), (22): Xaa is A or G or is absent

SEQ ID NO: 36303 - protein, 31 aa, Artificial Sequence; identical to SEQ ID NO: 10281
  GFR-binding peptide

SEQ ID NO: 36304 - protein, 39 aa, Artificial Sequence; identical to SEQ ID NO: 10282
  GFR-binding peptide
  MOD_RES (1), (3), (35): Xaa is C or S

SEQ ID NO: 36305 - protein, 32 aa, Artificial Sequence; identical to SEQ ID NO: 4735
  GFR-binding peptide
  MOD_RES (31), (32): Xaa is C or S

SEQ ID NO: 36306 - protein, 34 aa, Artificial Sequence; identical to SEQ ID NO: 4737
  GFR-binding peptide
  MOD_RES (1), (3): Xaa is C or S

SEQ ID NO: 36307 - protein, 37 aa, Artificial Sequence; identical to SEQ ID NO: 10283
  GFR-binding peptide
  MOD_RES (1), (33): Xaa is C or S

SEQ ID NO: 36308 - protein, 40 aa, Artificial Sequence; identical to SEQ ID NO: 2809
  GFR-binding peptide
  MOD_RES (1), (35), (36): Xaa is C or S
  MOD_RES (13), (14), (15), (16), (17): Xaa is A or G
  MOD_RES (18), (19), (20), (21): Xaa is A or G or is absent

SEQ ID NO: 36309 - protein, 36 aa, Artificial Sequence; identical to SEQ ID NO: 12167
  GFR-binding peptide
  MOD_RES (32), (33): Xaa is C or S

SEQ ID NO: 36310 - protein, 33 aa, Artificial Sequence; identical to SEQ ID NO: 10285
  GFR-binding peptide
  MOD_RES (31), (32): Xaa is C or S

SEQ ID NO: 36311 - protein, 34 aa, Artificial Sequence; identical to SEQ ID NO: 4738
  GFR-binding peptide
  MOD_RES (34), (34): Xaa is C or S
  MOD_RES (12), (13), (14), (15), (16): Xaa is A or G
  MOD_RES (17), (18), (19), (20): Xaa is A or G or is absent

SEQ ID NO: 36312 - protein, 35 aa, Artificial Sequence; identical to SEQ ID NO: 2810
  GFR-binding peptide
  MOD_RES (32), (33): Xaa is C or S

SEQ ID NO: 36313 - protein, 38 aa, Artificial Sequence; identical to SEQ ID NO: 12169
  GFR-binding peptide
  MOD_RES (1), (35), (36): Xaa is C or S
  MOD_RES (13), (14), (15), (16), (17): Xaa is A or G
  MOD_RES (18), (19), (20), (21): Xaa is A or G or is absent

SEQ ID NO: 36314 - protein, 36 aa, Artificial Sequence; identical to SEQ ID NO: 2811
  GFR-binding peptide
  MOD_RES (2), (36): Xaa is C or S
  MOD_RES (14), (15), (16), (17), (18): Xaa is A or G
  MOD_RES (19), (20), (21), (22): Xaa is A or G or is absent

SEQ ID NO: 36315 - protein, 33 aa, Artificial Sequence; identical to SEQ ID NO: 2812
  GFR-binding peptide
  MOD_RES (1), (1): Xaa is C or S
  MOD_RES (12), (13), (14), (15), (16): Xaa is A or G
  MOD_RES (17), (18), (19), (20): Xaa is A or G or is absent

SEQ ID NO: 36316 - protein, 36 aa, Artificial Sequence; identical to SEQ ID NO: 12170
  GFR-binding peptide
  MOD_RES (1), (33), (34): Xaa is C or S

SEQ ID NO: 36317 - protein, 38 aa, Artificial Sequence; identical to SEQ ID NO: 12172
  GFR-binding peptide
  MOD_RES (2), (36), (37): Xaa is C or S
  MOD_RES (14), (15), (16), (17), (18): Xaa is A or G
  MOD_RES (19), (20), (21), (22): Xaa is A or G or is absent

SEQ ID NO: 36318 - protein, 38 aa, Artificial Sequence; identical to SEQ ID NO: 12173
  GFR-binding peptide
  MOD_RES (1), (33), (34): Xaa is C or S

SEQ ID NO: 36319 - protein, 32 aa, Artificial Sequence; identical to SEQ ID NO: 10291
  GFR-binding peptide
  MOD_RES (1), (32): Xaa is C or S

SEQ ID NO: 36320 - protein, 34 aa, Artificial Sequence; identical to SEQ ID NO: 10292
  GFR-binding peptide
  MOD_RES (1), (3), (34): Xaa is C or S

SEQ ID NO: 36321 - protein, 39 aa, Artificial Sequence; identical to SEQ ID NO: 12174
  GFR-binding peptide
  MOD_RES (2), (36), (37): Xaa is C or S
  MOD_RES (14), (15), (16), (17), (18): Xaa is A or G
  MOD_RES (19), (20), (21), (22): Xaa is A or G or is absent

SEQ ID NO: 36322 - protein, 39 aa, Artificial Sequence; identical to SEQ ID NO: 12175
  GFR-binding peptide
  MOD_RES (34), (35): Xaa is C or S
  MOD_RES (12), (13), (14), (15), (16): Xaa is A or G
  MOD_RES (17), (18), (19), (20): Xaa is A or G or is absent

SEQ ID NO: 36323 - protein, 41 aa, Artificial Sequence; identical to SEQ ID NO: 12176
  GFR-binding peptide
  MOD_RES (2), (35), (36): Xaa is C or S
  MOD_RES (13), (14), (15), (16), (17): Xaa is A or G
  MOD_RES (18), (19), (20), (21): Xaa is A or G or is absent

SEQ ID NO: 36324 - protein, 37 aa, Artificial Sequence; identical to SEQ ID NO: 10293
  GFR-binding peptide
  MOD_RES (1), (32), (33): Xaa is C or S

SEQ ID NO: 36325 - protein, 35 aa, Artificial Sequence; identical to SEQ ID NO: 12177
  GFR-binding peptide
  MOD_RES (1), (34), (35): Xaa is C or S
  MOD_RES (12), (13), (14), (15), (16): Xaa is A or G
  MOD_RES (17), (18), (19), (20): Xaa is A or G or is absent

SEQ ID NO: 36326 - protein, 32 aa, Artificial Sequence; identical to SEQ ID NO: 10294
  GFR-binding peptide
  MOD_RES (31), (31): Xaa is C or S

SEQ ID NO: 36327 - protein, 37 aa, Artificial Sequence; identical to SEQ ID NO: 10295
  GFR-binding peptide
  MOD_RES (2), (36), (37): Xaa is C or S
  MOD_RES (14), (15), (16), (17), (18): Xaa is A or G
  MOD_RES (19), (20), (21), (22): Xaa is A or G or is absent

SEQ ID NO: 36328 - protein, 34 aa, Artificial Sequence; identical to SEQ ID NO: 10296
  GFR-binding peptide
  MOD_RES (1), (3), (34): Xaa is C or S

SEQ ID NO: 36329 - protein, 32 aa, Artificial Sequence; identical to SEQ ID NO: 12179
  GFR-binding peptide
  MOD_RES (1), (1): Xaa is C or S

SEQ ID NO: 36330 - protein, 35 aa, Artificial Sequence; identical to SEQ ID NO: 10298
  GFR-binding peptide
  MOD_RES (1), (34), (35): Xaa is C or S
  MOD_RES (12), (13), (14), (15), (16): Xaa is A or G
  MOD_RES (17), (18), (19), (20): Xaa is A or G or is absent

SEQ ID NO: 36331 - protein, 33 aa, Artificial Sequence; identical to SEQ ID NO: 2819
  GFR-binding peptide
  MOD_RES (32), (33): Xaa is C or S

SEQ ID NO: 36332 - protein, 38 aa, Artificial Sequence; identical to SEQ ID NO: 10300
  GFR-binding peptide
  MOD_RES (1), (35), (36): Xaa is C or S
  MOD_RES (13), (14), (15), (16), (17): Xaa is A or G
  MOD_RES (18), (19), (20), (21): Xaa is A or G or is absent

SEQ ID NO: 36333 - protein, 35 aa, Artificial Sequence; identical to SEQ ID NO: 10301
  GFR-binding peptide
  MOD_RES (2), (2): Xaa is C or S
  MOD_RES (14), (15), (16), (17), (18): Xaa is A or G
  MOD_RES (19), (20), (21), (22): Xaa is A or G or is absent

SEQ ID NO: 36334 - protein, 40 aa, Artificial Sequence; identical to SEQ ID NO: 12181
  GFR-binding peptide
  MOD_RES (2), (4), (38), (39): Xaa is C or S
  MOD_RES (16), (17), (18), (19), (20): Xaa is A or G
  MOD_RES (21), (22), (23), (24): Xaa is A or G or is absent

SEQ ID NO: 36335 - protein, 41 aa, Artificial Sequence; identical to SEQ ID NO: 12182
  GFR-binding peptide
  MOD_RES (1), (35), (36): Xaa is C or S
  MOD_RES (13), (14), (15), (16), (17): Xaa is A or G
  MOD_RES (18), (19), (20), (21): Xaa is A or G or is absent

SEQ ID NO: 36336 - protein, 33 aa, Artificial Sequence; identical to SEQ ID NO: 12183
  GFR-binding peptide
  MOD_RES (31), (32): Xaa is C or S

SEQ ID NO: 36337 - protein, 39 aa, Artificial Sequence; identical to SEQ ID NO: 12184
  GFR-binding peptide
  MOD_RES (33), (34): Xaa is C or S
  MOD_RES (11), (12), (13), (14), (15): Xaa is A or G
  MOD_RES (16), (17), (18), (19): Xaa is A or G or is absent

SEQ ID NO: 36338 - protein, 39 aa, Artificial Sequence; identical to SEQ ID NO: 12185
  GFR-binding peptide
  MOD_RES (2), (4), (36), (37): Xaa is C or S

SEQ ID NO: 36339 - protein, 34 aa, Artificial Sequence; identical to SEQ ID NO: 10302
  GFR-binding peptide
  MOD_RES (33), (34): Xaa is C or S
  MOD_RES (11), (12), (13), (14), (15): Xaa is A or G
  MOD_RES (16), (17), (18), (19): Xaa is A or G or is absent

SEQ ID NO: 36340 - protein, 34 aa, Artificial Sequence; identical to SEQ ID NO: 12186
  GFR-binding peptide
  MOD_RES (31), (32): Xaa is C or S

SEQ ID NO: 36341 - protein, 44 aa, Artificial Sequence; identical to SEQ ID NO: 10304
  GFR-binding peptide
  MOD_RES (2), (4), (38), (39): Xaa is C or S
  MOD_RES (16), (17), (18), (19), (20): Xaa is A or G
  MOD_RES (21), (22), (23), (24): Xaa is A or G or is absent

SEQ ID NO: 36342 - protein, 38 aa, Artificial Sequence; identical to SEQ ID NO: 10305
  GFR-binding peptide
  MOD_RES (32), (33): Xaa is C or S

SEQ ID NO: 36343 - protein, 36 aa, Artificial Sequence; identical to SEQ ID NO: 12187
  GFR-binding peptide
  MOD_RES (1), (33), (34): Xaa is C or S

SEQ ID NO: 36344 - protein, 35 aa, Artificial Sequence; identical to SEQ ID NO: 12188
  GFR-binding peptide
  MOD_RES (2), (4): Xaa is C or S

SEQ ID NO: 36345 - protein, 32 aa, Artificial Sequence; identical to SEQ ID NO: 12189
  GFR-binding peptide
  MOD_RES (31), (32): Xaa is C or S

SEQ ID NO: 36346 - protein, 39 aa, Artificial Sequence; identical to SEQ ID NO: 4751
  GFR-binding peptide
  MOD_RES (1), (3), (37), (38): Xaa is C or S
  MOD_RES (15), (16), (17), (18), (19): Xaa is A or G
  MOD_RES (20), (21), (22), (23): Xaa is A or G or is absent

SEQ ID NO: 36347 - protein, 37 aa, Artificial Sequence; identical to SEQ ID NO: 10306
  GFR-binding peptide
  MOD_RES (1), (33), (34): Xaa is C or S

SEQ ID NO: 36348 - protein, 37 aa, Artificial Sequence; identical to SEQ ID NO: 4752
  GFR-binding peptide
  MOD_RES (31), (32): Xaa is C or S

SEQ ID NO: 36349 - protein, 31 aa, Artificial Sequence; identical to SEQ ID NO: 12193
  GFR-binding peptide
  MOD_RES (1), (1): Xaa is C or S

SEQ ID NO: 36350 - protein, 34 aa, Artificial Sequence; identical to SEQ ID NO: 12194
  GFR-binding peptide
  MOD_RES (1), (33), (34): Xaa is C or S

SEQ ID NO: 36351 - protein, 31 aa, Artificial Sequence; identical to SEQ ID NO: 12195
  GFR-binding peptide
  MOD_RES (31), (31): Xaa is C or S

SEQ ID NO: 36352 - protein, 37 aa, Artificial Sequence; identical to SEQ ID NO: 10307
  GFR-binding peptide
  MOD_RES (1), (3), (35), (36): Xaa is C or S

SEQ ID NO: 36353 - protein, 35 aa, Artificial Sequence; identical to SEQ ID NO: 10308
  GFR-binding peptide
  MOD_RES (1), (3), (35): Xaa is C or S

SEQ ID NO: 36354 - protein, 33 aa, Artificial Sequence; identical to SEQ ID NO: 4755
  GFR-binding peptide
  MOD_RES (31), (32): Xaa is C or S

SEQ ID NO: 36355 - protein, 34 aa, Artificial Sequence; identical to SEQ ID NO: 12197
  GFR-binding peptide
  MOD_RES (31), (31): Xaa is C or S

SEQ ID NO: 36356 - protein, 35 aa, Artificial Sequence; identical to SEQ ID NO: 12198
  GFR-binding peptide
  MOD_RES (1), (33), (34): Xaa is C or S

SEQ ID NO: 36357 - protein, 38 aa, Artificial Sequence; identical to SEQ ID NO: 12199
  GFR-binding peptide
  MOD_RES (2), (36), (37): Xaa is C or S
  MOD_RES (14), (15), (16), (17), (18): Xaa is A or G
  MOD_RES (19), (20), (21), (22): Xaa is A or G or is absent

SEQ ID NO: 36358 - protein, 37 aa, Artificial Sequence; identical to SEQ ID NO: 4757
  GFR-binding peptide
  MOD_RES (1), (3), (35), (36): Xaa is C or S

SEQ ID NO: 36359 - protein, 39 aa, Artificial Sequence; identical to SEQ ID NO: 12202
  GFR-binding peptide
  MOD_RES (1), (3), (35), (36): Xaa is C or S

SEQ ID NO: 36360 - protein, 37 aa, Artificial Sequence; identical to SEQ ID NO: 10310
  GFR-binding peptide
  MOD_RES (1), (3), (35), (36): Xaa is C or S

SEQ ID NO: 36361 - protein, 37 aa, Artificial Sequence; identical to SEQ ID NO: 12204
  GFR-binding peptide
  MOD_RES (33), (34): Xaa is C or S
  MOD_RES (11), (12), (13), (14), (15): Xaa is A or G
  MOD_RES (16), (17), (18), (19): Xaa is A or G or is absent

SEQ ID NO: 36362 - protein, 34 aa, Artificial Sequence; identical to SEQ ID NO: 10311
  GFR-binding peptide
  MOD_RES (32), (32): Xaa is C or S

SEQ ID NO: 36363 - protein, 34 aa, Artificial Sequence; identical to SEQ ID NO: 4761
  GFR-binding peptide
  MOD_RES (31), (32): Xaa is C or S

SEQ ID NO: 36364 - protein, 33 aa, Artificial Sequence; identical to SEQ ID NO: 10312
  GFR-binding peptide
  MOD_RES (31), (32): Xaa is C or S

SEQ ID NO: 36365 - protein, 33 aa, Artificial Sequence; identical to SEQ ID NO: 10314
  GFR-binding peptide
  MOD_RES (2), (2): Xaa is C or S

SEQ ID NO: 36366 - protein, 38 aa, Artificial Sequence
  GFR-binding peptide
  MOD_RES (2), (4), (35), (36): Xaa is C or S
SXKXSKVIMNSLQEIKPTKGIYYLITLPELDQSVXXPS

SEQ ID NO: 36367 - protein, 40 aa, Artificial Sequence; identical to SEQ ID NO: 12206
  GFR-binding peptide
  MOD_RES (2), (4), (38), (39): Xaa is C or S
  MOD_RES (16), (17), (18), (19), (20): Xaa is A or G
  MOD_RES (21), (22), (23), (24): Xaa is A or G or is absent

SEQ ID NO: 36368 - protein, 40 aa, Artificial Sequence; identical to SEQ ID NO: 12207
  GFR-binding peptide
  MOD_RES (34), (35): Xaa is C or S
  MOD_RES (12), (13), (14), (15), (16): Xaa is A or G
  MOD_RES (17), (18), (19), (20): Xaa is A or G or is absent

SEQ ID NO: 36369 - protein, 40 aa, Artificial Sequence; identical to SEQ ID NO: 2850
  GFR-binding peptide
  MOD_RES (1), (3), (37), (38): Xaa is C or S
  MOD_RES (15), (16), (17), (18), (19): Xaa is A or G
  MOD_RES (20), (21), (22), (23): Xaa is A or G or is absent

SEQ ID NO: 36370 - protein, 38 aa, Artificial Sequence; identical to SEQ ID NO: 10316
  GFR-binding peptide
  MOD_RES (33), (33): Xaa is C or S
  MOD_RES (11), (12), (13), (14), (15): Xaa is A or G
  MOD_RES (16), (17), (18), (19): Xaa is A or G or is absent

SEQ ID NO: 36371 - protein, 35 aa, Artificial Sequence; identical to SEQ ID NO: 10317
  GFR-binding peptide
  MOD_RES (31), (32): Xaa is C or S

SEQ ID NO: 36372 - protein, 38 aa, Artificial Sequence; identical to SEQ ID NO: 12208
  GFR-binding peptide
  MOD_RES (1), (3), (37): Xaa is C or S
  MOD_RES (15), (16), (17), (18), (19): Xaa is A or G
  MOD_RES (20), (21), (22), (23): Xaa is A or G or is absent

SEQ ID NO: 36373 - protein, 36 aa, Artificial Sequence; identical to SEQ ID NO: 10318
  GFR-binding peptide
  MOD_RES (2), (4): Xaa is C or S
  MOD_RES (15), (16), (17), (18), (19): Xaa is A or G
  MOD_RES (20), (21), (22), (23): Xaa is A or G or is absent

SEQ ID NO: 36374 - protein, 43 aa, Artificial Sequence; identical to SEQ ID NO: 2853
  GFR-binding peptide
  MOD_RES (1), (3), (37), (38): Xaa is C or S
  MOD_RES (15), (16), (17), (18), (19): Xaa is A or G
  MOD_RES (20), (21), (22), (23): Xaa is A or G or is absent

SEQ ID NO: 36375 - protein, 34 aa, Artificial Sequence; identical to SEQ ID NO: 10320
  GFR-binding peptide
  MOD_RES (33), (34): Xaa is C or S
  MOD_RES (11), (12), (13), (14), (15): Xaa is A or G
  MOD_RES (16), (17), (18), (19): Xaa is A or G or is absent

SEQ ID NO: 36376 - protein, 36 aa, Artificial Sequence; identical to SEQ ID NO: 10321
  GFR-binding peptide
  MOD_RES (1), (35): Xaa is C or S
  MOD_RES (13), (14), (15), (16), (17): Xaa is A or G
  MOD_RES (18), (19), (20), (21): Xaa is A or G or is absent

SEQ ID NO: 36377 - protein, 37 aa, Artificial Sequence; identical to SEQ ID NO: 12211
  GFR-binding peptide
  MOD_RES (2), (4), (36), (37): Xaa is C or S

SEQ ID NO: 36378 - protein, 38 aa, Artificial Sequence; identical to SEQ ID NO: 10322
  GFR-binding peptide
  MOD_RES (2), (4), (38): Xaa is C or S
  MOD_RES (16), (17), (18), (19), (20): Xaa is A or G
  MOD_RES (21), (22), (23), (24): Xaa is A or G or is absent

SEQ ID NO: 36379 - protein, 38 aa, Artificial Sequence; identical to SEQ ID NO: 2855
  GFR-binding peptide
  MOD_RES (2), (4), (36), (37): Xaa is C or S

SEQ ID NO: 36380 - protein, 37 aa, Artificial Sequence; identical to SEQ ID NO: 12213
  GFR-binding peptide
  MOD_RES (2), (34), (35): Xaa is C or S

SEQ ID NO: 36381 - protein, 40 aa, Artificial Sequence; identical to SEQ ID NO: 4777
  GFR-binding peptide
  MOD_RES (2), (4), (35), (36): Xaa is C or S

SEQ ID NO: 36382 - protein, 36 aa, Artificial Sequence; identical to SEQ ID NO: 12215
  GFR-binding peptide
  MOD_RES (1), (32), (33): Xaa is C or S

SEQ ID NO: 36383 - protein, 38 aa, Artificial Sequence; identical to SEQ ID NO: 10324
  GFR-binding peptide
  MOD_RES (1), (33), (34): Xaa is C or S

SEQ ID NO: 36384 - protein, 36 aa, Artificial Sequence
  GFR-binding peptide
  MOD_RES (1), (3), (36): Xaa is C or S
  MOD_RES (14), (15), (16), (17), (18): Xaa is A or G
  MOD_RES (19), (20), (21), (22): Xaa is A or G or is absent
XKXSKVIMNSLQEXXXXXXXXXYYLITLPELDQSVX

SEQ ID NO: 36385 - protein, 35 aa, Artificial Sequence; identical to SEQ ID NO: 10328
  GFR-binding peptide
  MOD_RES (31), (32): Xaa is C or S

SEQ ID NO: 36386 - protein, 44 aa, Artificial Sequence; identical to SEQ ID NO: 2864
  GFR-binding peptide
  MOD_RES (2), (4), (38): Xaa is C or S
  MOD_RES (16), (17), (18), (19), (20): Xaa is A or G
  MOD_RES (21), (22), (23), (24): Xaa is A or G or is absent

SEQ ID NO: 36387 - protein, 36 aa, Artificial Sequence; identical to SEQ ID NO: 12218
  GFR-binding peptide
  MOD_RES (2), (35), (36): Xaa is C or S
  MOD_RES (13), (14), (15), (16), (17): Xaa is A or G
  MOD_RES (18), (19), (20), (21): Xaa is A or G or is absent

SEQ ID NO: 36388 - protein, 34 aa, Artificial Sequence; identical to SEQ ID NO: 12219
  GFR-binding peptide
  MOD_RES (2), (2): Xaa is C or S
  MOD_RES (13), (14), (15), (16), (17): Xaa is A or G
  MOD_RES (18), (19), (20), (21): Xaa is A or G or is absent

SEQ ID NO: 36389 - protein, 36 aa, Artificial Sequence; identical to SEQ ID NO: 12220
  GFR-binding peptide
  MOD_RES (32), (33): Xaa is C or S

SEQ ID NO: 36390 - protein, 34 aa, Artificial Sequence; identical to SEQ ID NO: 12221
  GFR-binding peptide
  MOD_RES (31), (32): Xaa is C or S

SEQ ID NO: 36391 - protein, 35 aa, Artificial Sequence; identical to SEQ ID NO: 12222
  GFR-binding peptide
  MOD_RES (2), (35): Xaa is C or S
  MOD_RES (13), (14), (15), (16), (17): Xaa is A or G
  MOD_RES (18), (19), (20), (21): Xaa is A or G or is absent

SEQ ID NO: 36392 - protein, 35 aa, Artificial Sequence; identical to SEQ ID NO: 4789
  GFR-binding peptide
  MOD_RES (1), (35): Xaa is C or S
  MOD_RES (13), (14), (15), (16), (17): Xaa is A or G
  MOD_RES (18), (19), (20), (21): Xaa is A or G or is absent

SEQ ID NO: 36393 - protein, 34 aa, Artificial Sequence; identical to SEQ ID NO: 12224
  GFR-binding peptide
  MOD_RES (31), (32): Xaa is C or S

SEQ ID NO: 36394 - protein, 39 aa, Artificial Sequence; identical to SEQ ID NO: 12225
  GFR-binding peptide
  MOD_RES (2), (4), (38), (39): Xaa is C or S
  MOD_RES (16), (17), (18), (19), (20): Xaa is A or G
  MOD_RES (21), (22), (23), (24): Xaa is A or G or is absent

SEQ ID NO: 36395 - protein, 39 aa, Artificial Sequence; identical to SEQ ID NO: 2870
  GFR-binding peptide
  MOD_RES (1), (34), (35): Xaa is C or S
  MOD_RES (12), (13), (14), (15), (16): Xaa is A or G
  MOD_RES (17), (18), (19), (20): Xaa is A or G or is absent

SEQ ID NO: 36396 - protein, 35 aa, Artificial Sequence; identical to SEQ ID NO: 2871
  GFR-binding peptide
  MOD_RES (1), (34), (35): Xaa is C or S
  MOD_RES (12), (13), (14), (15), (16): Xaa is A or G
  MOD_RES (17), (18), (19), (20): Xaa is A or G or is absent

SEQ ID NO: 36397 - protein, 40 aa, Artificial Sequence; identical to SEQ ID NO: 10334
  GFR-binding peptide
  MOD_RES (1), (3), (37), (38): Xaa is C or S
  MOD_RES (15), (16), (17), (18), (19): Xaa is A or G
  MOD_RES (20), (21), (22), (23): Xaa is A or G or is absent

SEQ ID NO: 36398 - protein, 36 aa, Artificial Sequence; identical to SEQ ID NO: 10335
  GFR-binding peptide
  MOD_RES (2), (4): Xaa is C or S
  MOD_RES (15), (16), (17), (18), (19): Xaa is A or G
  MOD_RES (20), (21), (22), (23): Xaa is A or G or is absent

SEQ ID NO: 36399 - protein, 34 aa, Artificial Sequence; identical to SEQ ID NO: 10336
  GFR-binding peptide
  MOD_RES (1), (3), (34): Xaa is C or S

SEQ ID NO: 36400 - protein, 33 aa, Artificial Sequence; identical to SEQ ID NO: 12228
  GFR-binding peptide
  MOD_RES (1), (33): Xaa is C or S

SEQ ID NO: 36401 - protein, 43 aa, Artificial Sequence; identical to SEQ ID NO: 12229
  GFR-binding peptide
  MOD_RES (2), (4), (37), (38): Xaa is C or S
  MOD_RES (15), (16), (17), (18), (19): Xaa is A or G
  MOD_RES (20), (21), (22), (23): Xaa is A or G or is absent

SEQ ID NO: 36402 - protein, 36 aa, Artificial Sequence; identical to SEQ ID NO: 12230
  GFR-binding peptide
  MOD_RES (1), (33), (34): Xaa is C or S

SEQ ID NO: 36403 - protein, 34 aa, Artificial Sequence; identical to SEQ ID NO: 12231
  GFR-binding peptide
  MOD_RES (31), (32): Xaa is C or S

SEQ ID NO: 36404 - protein, 38 aa, Artificial Sequence; identical to SEQ ID NO: 10337
  GFR-binding peptide
  MOD_RES (2), (4), (36), (37): Xaa is C or S

SEQ ID NO: 36405 - protein, 40 aa, Artificial Sequence; identical to SEQ ID NO: 10338
  GFR-binding peptide
  MOD_RES (2), (4), (38), (39): Xaa is C or S
  MOD_RES (16), (17), (18), (19), (20): Xaa is A or G
  MOD_RES (21), (22), (23), (24): Xaa is A or G or is absent

SEQ ID NO: 36406 - protein, 38 aa, Artificial Sequence; identical to SEQ ID NO: 10339
  GFR-binding peptide
  MOD_RES (1), (35): Xaa is C or S
  MOD_RES (13), (14), (15), (16), (17): Xaa is A or G
  MOD_RES (18), (19), (20), (21): Xaa is A or G or is absent

SEQ ID NO: 36407 - protein, 36 aa, Artificial Sequence; identical to SEQ ID NO: 12233
  GFR-binding peptide
  MOD_RES (31), (32): Xaa is C or S

SEQ ID NO: 36408 - protein, 39 aa, Artificial Sequence; identical to SEQ ID NO: 12234
  GFR-binding peptide
  MOD_RES (2), (4), (38), (39): Xaa is C or S
  MOD_RES (16), (17), (18), (19), (20): Xaa is A or G
  MOD_RES (21), (22), (23), (24): Xaa is A or G or is absent

SEQ ID NO: 36409 - protein, 36 aa, Artificial Sequence; identical to SEQ ID NO: 12236
  GFR-binding peptide
  MOD_RES (2), (34), (35): Xaa is C or S

SEQ ID NO: 36410 - protein, 40 aa, Artificial Sequence; identical to SEQ ID NO: 12237
  GFR-binding peptide
  MOD_RES (1), (35), (36): Xaa is C or S
  MOD_RES (13), (14), (15), (16), (17): Xaa is A or G
  MOD_RES (18), (19), (20), (21): Xaa is A or G or is absent

SEQ ID NO: 36411 - protein, 40 aa, Artificial Sequence; identical to SEQ ID NO: 12238
  GFR-binding peptide
  MOD_RES (2), (36), (37): Xaa is C or S
  MOD_RES (14), (15), (16), (17), (18): Xaa is A or G
  MOD_RES (19), (20), (21), (22): Xaa is A or G or is absent

SEQ ID NO: 36412 - protein, 38 aa, Artificial Sequence; identical to SEQ ID NO: 12239
  GFR-binding peptide
  MOD_RES (1), (3), (36), (37): Xaa is C or S
  MOD_RES (14), (15), (16), (17), (18): Xaa is A or G
  MOD_RES (19), (20), (21), (22): Xaa is A or G or is absent

SEQ ID NO: 36413 - protein, 39 aa, Artificial Sequence; identical to SEQ ID NO: 12240
  GFR-binding peptide
  MOD_RES (1), (33), (34): Xaa is C or S

SEQ ID NO: 36414 - protein, 35 aa, Artificial Sequence; identical to SEQ ID NO: 12241
  GFR-binding peptide
  MOD_RES (34), (35): Xaa is C or S
  MOD_RES (12), (13), (14), (15), (16): Xaa is A or G
  MOD_RES (17), (18), (19), (20): Xaa is A or G or is absent

SEQ ID NO: 36415 - protein, 33 aa, Artificial Sequence; identical to SEQ ID NO: 10343
  GFR-binding peptide
  MOD_RES (12), (13), (14), (15), (16): Xaa is A or G
  MOD_RES (17), (18), (19), (20): Xaa is A or G or is absent

SEQ ID NO: 36416 - protein, 41 aa, Artificial Sequence; identical to SEQ ID NO: 10344
  GFR-binding peptide
  MOD_RES (2), (4), (36), (37): Xaa is C or S

SEQ ID NO: 36417 - protein, 39 aa, Artificial Sequence; identical to SEQ ID NO: 12242
  GFR-binding peptide
  MOD_RES (2), (4), (35), (36): Xaa is C or S

SEQ ID NO: 36418 - protein, 39 aa, Artificial Sequence; identical to SEQ ID NO: 12243
  GFR-binding peptide
  MOD_RES (1), (33), (34): Xaa is C or S

SEQ ID NO: 36419 - protein, 44 aa, Artificial Sequence; identical to SEQ ID NO: 12244
  GFR-binding peptide
  MOD_RES (2), (4), (38), (39): Xaa is C or S
  MOD_RES (16), (17), (18), (19), (20): Xaa is A or G
  MOD_RES (21), (22), (23), (24): Xaa is A or G or is absent

SEQ ID NO: 36420 - protein, 38 aa, Artificial Sequence; identical to SEQ ID NO: 12245
  GFR-binding peptide
  MOD_RES (1), (3), (34), (35): Xaa is C or S

SEQ ID NO: 36421 - protein, 37 aa, Artificial Sequence; identical to SEQ ID NO: 12246
  GFR-binding peptide
  MOD_RES (1), (3), (36), (37): Xaa is C or S
  MOD_RES (14), (15), (16), (17), (18): Xaa is A or G
  MOD_RES (19), (20), (21), (22): Xaa is A or G or is absent

SEQ ID NO: 36422 - protein, 37 aa, Artificial Sequence; identical to SEQ ID NO: 10347
  GFR-binding peptide
  MOD_RES (2), (4), (35), (36): Xaa is C or S

SEQ ID NO: 36423 - protein, 37 aa, Artificial Sequence; identical to SEQ ID NO: 10349
  GFR-binding peptide
  MOD_RES (32), (33): Xaa is C or S

SEQ ID NO: 36424 - protein, 37 aa, Artificial Sequence; identical to SEQ ID NO: 12247
  GFR-binding peptide
  MOD_RES (2), (34), (35): Xaa is C or S

SEQ ID NO: 36425 - protein, 37 aa, Artificial Sequence; identical to SEQ ID NO: 12248
  GFR-binding peptide
  MOD_RES (31), (32): Xaa is C or S

SEQ ID NO: 36426 - protein, 38 aa, Artificial Sequence; identical to SEQ ID NO: 12250
  GFR-binding peptide
  MOD_RES (34), (35): Xaa is C or S
  MOD_RES (12), (13), (14), (15), (16): Xaa is A or G
  MOD_RES (17), (18), (19), (20): Xaa is A or G or is absent

SEQ ID NO: 36427 - protein, 32 aa, Artificial Sequence; identical to SEQ ID NO: 12251
  GFR-binding peptide
  MOD_RES (32), (32): Xaa is C or S

SEQ ID NO: 36428 - protein, 39 aa, Artificial Sequence; identical to SEQ ID NO: 12252
  GFR-binding peptide
  MOD_RES (1), (3), (35), (36): Xaa is C or S

SEQ ID NO: 36429 - protein, 41 aa, Artificial Sequence; identical to SEQ ID NO: 10351
  GFR-binding peptide
  MOD_RES (2), (4), (38), (39): Xaa is C or S
  MOD_RES (16), (17), (18), (19), (20): Xaa is A or G
  MOD_RES (21), (22), (23), (24): Xaa is A or G or is absent

SEQ ID NO: 36430 - protein, 39 aa, Artificial Sequence; identical to SEQ ID NO: 10352
  GFR-binding peptide
  MOD_RES (1), (3), (35), (36): Xaa is C or S

SEQ ID NO: 36431 - protein, 32 aa, Artificial Sequence; identical to SEQ ID NO: 10354
  GFR-binding peptide
  MOD_RES (31), (32): Xaa is C or S

SEQ ID NO: 36432 - protein, 37 aa, Artificial Sequence
  GFR-binding peptide
  MOD_RES (1), (3), (34), (35): Xaa is C or S
XKXSKVIMNSLQEIKPTKGIYYLITLPELDQSVXXPS

SEQ ID NO: 36433 - protein, 41 aa, Artificial Sequence; identical to SEQ ID NO: 12255
  GFR-binding peptide
  MOD_RES (2), (36), (37): Xaa is C or S
  MOD_RES (14), (15), (16), (17), (18): Xaa is A or G
  MOD_RES (19), (20), (21), (22): Xaa is A or G or is absent

SEQ ID NO: 36434 - protein, 37 aa, Artificial Sequence; identical to SEQ ID NO: 4825
  GFR-binding peptide
  MOD_RES (32), (33): Xaa is C or S

SEQ ID NO: 36435 - protein, 35 aa, Artificial Sequence; identical to SEQ ID NO: 10355
  GFR-binding peptide
  MOD_RES (1), (3): Xaa is C or S
  MOD_RES (14), (15), (16), (17), (18): Xaa is A or G
  MOD_RES (19), (20), (21), (22): Xaa is A or G or is absent

SEQ ID NO: 36436 - protein, 33 aa, Artificial Sequence; identical to SEQ ID NO: 4827
  GFR-binding peptide
  MOD_RES (1), (32), (33): Xaa is C or S

SEQ ID NO: 36437 - protein, 36 aa, Artificial Sequence; identical to SEQ ID NO: 4829
  GFR-binding peptide
  MOD_RES (2), (34), (35): Xaa is C or S

SEQ ID NO: 36438 - protein, 37 aa, Artificial Sequence; identical to SEQ ID NO: 2894
  GFR-binding peptide
  MOD_RES (2), (35), (36): Xaa is C or S
  MOD_RES (13), (14), (15), (16), (17): Xaa is A or G
  MOD_RES (18), (19), (20), (21): Xaa is A or G or is absent

SEQ ID NO: 36439 - protein, 39 aa, Artificial Sequence; identical to SEQ ID NO: 10357
  GFR-binding peptide
  MOD_RES (1), (35), (36): Xaa is C or S
  MOD_RES (13), (14), (15), (16), (17): Xaa is A or G
  MOD_RES (18), (19), (20), (21): Xaa is A or G or is absent

SEQ ID NO: 36440 - protein, 32 aa, Artificial Sequence; identical to SEQ ID NO: 12263
  GFR-binding peptide
  MOD_RES (1), (1): Xaa is C or S

SEQ ID NO: 36441 - protein, 39 aa, Artificial Sequence; identical to SEQ ID NO: 12265
  GFR-binding peptide
  MOD_RES (2), (4), (38), (39): Xaa is C or S
  MOD_RES (16), (17), (18), (19), (20): Xaa is A or G
  MOD_RES (21), (22), (23), (24): Xaa is A or G or is absent

SEQ ID NO: 36442 - protein, 41 aa, Artificial Sequence; identical to SEQ ID NO: 12266
  GFR-binding peptide
  MOD_RES (1), (3), (37), (38): Xaa is C or S
  MOD_RES (15), (16), (17), (18), (19): Xaa is A or G
  MOD_RES (20), (21), (22), (23): Xaa is A or G or is absent

SEQ ID NO: 36443 - protein, 37 aa, Artificial Sequence; identical to SEQ ID NO: 10358
  GFR-binding peptide
  MOD_RES (1), (35), (36): Xaa is C or S
  MOD_RES (13), (14), (15), (16), (17): Xaa is A or G
  MOD_RES (18), (19), (20), (21): Xaa is A or G or is absent

SEQ ID NO: 36444 - protein, 34 aa, Artificial Sequence; identical to SEQ ID NO: 10359
  GFR-binding peptide
  MOD_RES (33), (33): Xaa is C or S
  MOD_RES (11), (12), (13), (14), (15): Xaa is A or G
  MOD_RES (16), (17), (18), (19): Xaa is A or G or is absent

SEQ ID NO: 36445 - protein, 37 aa, Artificial Sequence; identical to SEQ ID NO: 2896
  GFR-binding peptide
  MOD_RES (2), (4), (35), (36): Xaa is C or S

SEQ ID NO: 36446 - protein, 38 aa, Artificial Sequence; identical to SEQ ID NO: 4837
  GFR-binding peptide
  MOD_RES (2), (4), (37), (38): Xaa is C or S
  MOD_RES (15), (16), (17), (18), (19): Xaa is A or G
  MOD_RES (20), (21), (22), (23): Xaa is A or G or is absent

SEQ ID NO: 36447 - protein, 38 aa, Artificial Sequence; identical to SEQ ID NO: 10361
  GFR-binding peptide
  MOD_RES (32), (33): Xaa is C or S

SEQ ID NO: 36448 - protein, 43 aa, Artificial Sequence; identical to SEQ ID NO: 12270
  GFR-binding peptide
  MOD_RES (1), (3), (37), (38): Xaa is C or S
  MOD_RES (15), (16), (17), (18), (19): Xaa is A or G
  MOD_RES (20), (21), (22), (23): Xaa is A or G or is absent

SEQ ID NO: 36449 - protein, 34 aa, Artificial Sequence; identical to SEQ ID NO: 12271
  GFR-binding peptide
  MOD_RES (33), (34): Xaa is C or S
  MOD_RES (11), (12), (13), (14), (15): Xaa is A or G
  MOD_RES (16), (17), (18), (19): Xaa is A or G or is absent

SEQ ID NO: 36450 - protein, 36 aa, Artificial Sequence; identical to SEQ ID NO: 10362
  GFR-binding peptide
  MOD_RES (2), (34), (35): Xaa is C or S

SEQ ID NO: 36451 - protein, 34 aa, Artificial Sequence; identical to SEQ ID NO: 10364
  GFR-binding peptide
  MOD_RES (2), (34): Xaa is C or S

SEQ ID NO: 36452 - protein, 36 aa, Artificial Sequence; identical to SEQ ID NO: 10365
  GFR-binding peptide
  MOD_RES (1), (35), (36): Xaa is C or S
  MOD_RES (13), (14), (15), (16), (17): Xaa is A or G
  MOD_RES (18), (19), (20), (21): Xaa is A or G or is absent

SEQ ID NO: 36453 - protein, 35 aa, Artificial Sequence; identical to SEQ ID NO: 12273
  GFR-binding peptide
  MOD_RES (2), (34), (35): Xaa is C or S

SEQ ID NO: 36454 - protein, 44 aa, Artificial Sequence; identical to SEQ ID NO: 10366
  GFR-binding peptide
  MOD_RES (2), (4), (38), (39): Xaa is C or S
  MOD_RES (16), (17), (18), (19), (20): Xaa is A or G
  MOD_RES (21), (22), (23), (24): Xaa is A or G or is absent

SEQ ID NO: 36455 - protein, 41 aa, Artificial Sequence; identical to SEQ ID NO: 10368
  GFR-binding peptide
  MOD_RES (2), (36), (37): Xaa is C or S
  MOD_RES (14), (15), (16), (17), (18): Xaa is A or G
  MOD_RES (19), (20), (21), (22): Xaa is A or G or is absent

SEQ ID NO: 36456 - protein, 32 aa, Artificial Sequence
  GFR-binding peptide
  MOD_RES (1), (32): Xaa is C or S
XSKVIMNSLQEIKPTKGIYYLITLPELDQSVX

SEQ ID NO: 36457 - protein, 33 aa, Artificial Sequence; identical to SEQ ID NO: 12276
  GFR-binding peptide
  MOD_RES (32), (32): Xaa is C or S

SEQ ID NO: 36458 - protein, 37 aa, Artificial Sequence; identical to SEQ ID NO: 12277
  GFR-binding peptide
  MOD_RES (1), (3), (36), (37): Xaa is C or S
  MOD_RES (14), (15), (16), (17), (18): Xaa is A or G
  MOD_RES (19), (20), (21), (22): Xaa is A or G or is absent

SEQ ID NO: 36459 - protein, 33 aa, Artificial Sequence; identical to SEQ ID NO: 10369
  GFR-binding peptide
  MOD_RES (1), (32), (33): Xaa is C or S

SEQ ID NO: 36460 - protein, 39 aa, Artificial Sequence; identical to SEQ ID NO: 12279
  GFR-binding peptide
  MOD_RES (2), (33), (34): Xaa is C or S

SEQ ID NO: 36461 - protein, 34 aa, Artificial Sequence; identical to SEQ ID NO: 12280
  GFR-binding peptide
  MOD_RES (2), (4): Xaa is C or S

SEQ ID NO: 36462 - protein, 38 aa, Artificial Sequence; identical to SEQ ID NO: 10372
  GFR-binding peptide
  MOD_RES (1), (3), (34), (35): Xaa is C or S

SEQ ID NO: 36463 - protein, 41 aa, Artificial Sequence
  GFR-binding peptide
  MOD_RES (1), (3), (36), (37): Xaa is C or S
  MOD_RES (14), (15), (16), (17), (18): Xaa is A or G
  MOD_RES (19), (20), (21), (22): Xaa is A or G or is absent
XKXSKVIMNSLQEXXXXXXXXXYYLITLPELDQSVXXPSAS

SEQ ID NO: 36464 - protein, 37 aa, Artificial Sequence; identical to SEQ ID NO: 10373
  GFR-binding peptide
  MOD_RES (1), (33), (34): Xaa is C or S

SEQ ID NO: 36465 - protein, 32 aa, Artificial Sequence; identical to SEQ ID NO: 4852
  GFR-binding peptide
  MOD_RES (32), (32): Xaa is C or S

SEQ ID NO: 36466 - protein, 35 aa, Artificial Sequence; identical to SEQ ID NO: 12285
  GFR-binding peptide
  MOD_RES (31), (32): Xaa is C or S

SEQ ID NO: 36467 - protein, 36 aa, Artificial Sequence; identical to SEQ ID NO: 10376
  GFR-binding peptide
  MOD_RES (31), (32): Xaa is C or S

SEQ ID NO: 36468 - protein, 38 aa, Artificial Sequence; identical to SEQ ID NO: 10377
  GFR-binding peptide
  MOD_RES (1), (3), (35): Xaa is C or S

SEQ ID NO: 36469 - protein, 39 aa, Artificial Sequence; identical to SEQ ID NO: 10378
  GFR-binding peptide
  MOD_RES (2), (4), (36), (37): Xaa is C or S

SEQ ID NO: 36470 - protein, 39 aa, Artificial Sequence; identical to SEQ ID NO: 12286
  GFR-binding peptide
  MOD_RES (1), (3), (37), (38): Xaa is C or S
  MOD_RES (15), (16), (17), (18), (19): Xaa is A or G
  MOD_RES (20), (21), (22), (23): Xaa is A or G or is absent

SEQ ID NO: 36471 - protein, 42 aa, Artificial Sequence; identical to SEQ ID NO: 2913
  GFR-binding peptide
  MOD_RES (2), (4), (37), (38): Xaa is C or S
  MOD_RES (15), (16), (17), (18), (19): Xaa is A or G
  MOD_RES (20), (21), (22), (23): Xaa is A or G or is absent

SEQ ID NO: 36472 - protein, 42 aa, Artificial Sequence; identical to SEQ ID NO: 10380
  GFR-binding peptide
  MOD_RES (2), (4), (36), (37): Xaa is C or S

SEQ ID NO: 36473 - protein, 38 aa, Artificial Sequence; identical to SEQ ID NO: 10381
  GFR-binding peptide
  MOD_RES (1), (3), (35), (36): Xaa is C or S

SEQ ID NO: 36474 - protein, 41 aa, Artificial Sequence; identical to SEQ ID NO: 4860
  GFR-binding peptide
  MOD_RES (1), (35), (36): Xaa is C or S
  MOD_RES (13), (14), (15), (16), (17): Xaa is A or G
  MOD_RES (18), (19), (20), (21): Xaa is A or G or is absent

SEQ ID NO: 36475 - protein, 36 aa, Artificial Sequence; identical to SEQ ID NO: 12289
  GFR-binding peptide
  MOD_RES (1), (3), (34), (35): Xaa is C or S

SEQ ID NO: 36476 - protein, 35 aa, Artificial Sequence; identical to SEQ ID NO: 10383
  GFR-binding peptide
  MOD_RES (2), (2): Xaa is C or S
  MOD_RES (14), (15), (16), (17), (18): Xaa is A or G
  MOD_RES (19), (20), (21), (22): Xaa is A or G or is absent

SEQ ID NO: 36477 - protein, 32 aa, Artificial Sequence; identical to SEQ ID NO: 4862
  GFR-binding peptide
  MOD_RES (32), (32): Xaa is C or S

SEQ ID NO: 36478 - protein, 35 aa, Artificial Sequence; identical to SEQ ID NO: 2918
  GFR-binding peptide
  MOD_RES (33), (34): Xaa is C or S
  MOD_RES (11), (12), (13), (14), (15): Xaa is A or G
  MOD_RES (16), (17), (18), (19): Xaa is A or G or is absent

SEQ ID NO: 36479 - protein, 37 aa, Artificial Sequence; identical to SEQ ID NO: 2920
  GFR-binding peptide
  MOD_RES (32), (33): Xaa is C or S

SEQ ID NO: 36480 - protein, 42 aa, Artificial Sequence; identical to SEQ ID NO: 10387
  GFR-binding peptide
  MOD_RES (2), (4), (36): Xaa is C or S

SEQ ID NO: 36481 - protein, 37 aa, Artificial Sequence; identical to SEQ ID NO: 4867
  GFR-binding peptide
  MOD_RES (2), (4): Xaa is C or S
  MOD_RES (16), (17), (18), (19), (20): Xaa is A or G
  MOD_RES (21), (22), (23), (24): Xaa is A or G or is absent

SEQ ID NO: 36482 - protein, 40 aa, Artificial Sequence; identical to SEQ ID NO: 10388
  GFR-binding peptide
  MOD_RES (2), (34), (35): Xaa is C or S

SEQ ID NO: 36483 - protein, 40 aa, Artificial Sequence; identical to SEQ ID NO: 4870
  GFR-binding peptide
  MOD_RES (2), (34), (35): Xaa is C or S

SEQ ID NO: 36484 - protein, 34 aa, Artificial Sequence; identical to SEQ ID NO: 12298
  GFR-binding peptide
  MOD_RES (2), (2): Xaa is C or S
  MOD_RES (13), (14), (15), (16), (17): Xaa is A or G
  MOD_RES (18), (19), (20), (21): Xaa is A or G or is absent

SEQ ID NO: 36485 - protein, 38 aa, Artificial Sequence; identical to SEQ ID NO: 12299
  GFR-binding peptide
  MOD_RES (1), (33), (34): Xaa is C or S

SEQ ID NO: 36486 - protein, 38 aa, Artificial Sequence; identical to SEQ ID NO: 12300
  GFR-binding peptide
  MOD_RES (2), (4), (37), (38): Xaa is C or S
  MOD_RES (15), (16), (17), (18), (19): Xaa is A or G
  MOD_RES (20), (21), (22), (23): Xaa is A or G or is absent

SEQ ID NO: 36487 - protein, 40 aa, Artificial Sequence; identical to SEQ ID NO: 2924
  GFR-binding peptide
  MOD_RES (2), (4), (37), (38): Xaa is C or S
  MOD_RES (15), (16), (17), (18), (19): Xaa is A or G
  MOD_RES (20), (21), (22), (23): Xaa is A or G or is absent

SEQ ID NO: 36488 - protein, 38 aa, Artificial Sequence; identical to SEQ ID NO: 10390
  GFR-binding peptide
  MOD_RES (1), (32), (33): Xaa is C or S

SEQ ID NO: 36489 - protein, 37 aa, Artificial Sequence; identical to SEQ ID NO: 12301
  GFR-binding peptide
  MOD_RES (1), (33), (34): Xaa is C or S

SEQ ID NO: 36490 - protein, 35 aa, Artificial Sequence; identical to SEQ ID NO: 12302
  GFR-binding peptide
  MOD_RES (1), (32), (33): Xaa is C or S

SEQ ID NO: 36491 - protein, 35 aa, Artificial Sequence; identical to SEQ ID NO: 12303
  GFR-binding peptide
  MOD_RES (31), (32): Xaa is C or S

SEQ ID NO: 36492 - protein, 33 aa, Artificial Sequence; identical to SEQ ID NO: 10393
  GFR-binding peptide
  MOD_RES (2), (2): Xaa is C or S

SEQ ID NO: 36493 - protein, 32 aa, Artificial Sequence; identical to SEQ ID NO: 12304
  GFR-binding peptide
  MOD_RES (1), (32): Xaa is C or S

SEQ ID NO: 36494 - protein, 37 aa, Artificial Sequence; identical to SEQ ID NO: 2931
  GFR-binding peptide
  MOD_RES (2), (4): Xaa is C or S
  MOD_RES (16), (17), (18), (19), (20): Xaa is A or G
  MOD_RES (21), (22), (23), (24): Xaa is A or G or is absent

SEQ ID NO: 36495 - protein, 39 aa, Artificial Sequence
  GFR-binding peptide
  MOD_RES (1), (3), (34), (35): Xaa is C or S
XKXSKVIMNSLQEIKPTKGIYYLITLPELDQSVXXPSAS

SEQ ID NO: 36496 - protein, 39 aa, Artificial Sequence; identical to SEQ ID NO: 10395
  GFR-binding peptide
  MOD_RES (2), (4), (38): Xaa is C or S
  MOD_RES (16), (17), (18), (19), (20): Xaa is A or G
  MOD_RES (21), (22), (23), (24): Xaa is A or G or is absent

SEQ ID NO: 36497 - protein, 38 aa, Artificial Sequence; identical to SEQ ID NO: 10396
  GFR-binding peptide
  MOD_RES (1), (3), (37), (38): Xaa is C or S
  MOD_RES (15), (16), (17), (18), (19): Xaa is A or G
  MOD_RES (20), (21), (22), (23): Xaa is A or G or is absent

SEQ ID NO: 36498 - protein, 36 aa, Artificial Sequence; identical to SEQ ID NO: 10397
  GFR-binding peptide
  MOD_RES (1), (3), (34), (35): Xaa is C or S

SEQ ID NO: 36499 - protein, 39 aa, Artificial Sequence; identical to SEQ ID NO: 10398
  GFR-binding peptide
  MOD_RES (1), (3), (34), (35): Xaa is C or S

SEQ ID NO: 36500 - protein, 35 aa, Artificial Sequence
  GFR-binding peptide
  MOD_RES (1), (3): Xaa is C or S
  MOD_RES (14), (15), (16), (17), (18): Xaa is A or G
  MOD_RES (19), (20), (21), (22): Xaa is A or G or is absent
XKXSKVIMNSLQEXXXXXXXXXYYLITLPELDQSV

SEQ ID NO: 36501 - protein, 36 aa, Artificial Sequence; identical to SEQ ID NO: 12305
  GFR-binding peptide
  MOD_RES (1), (3), (34), (35): Xaa is C or S

SEQ ID NO: 36502 - protein, 38 aa, Artificial Sequence; identical to SEQ ID NO: 10399
  GFR-binding peptide
  MOD_RES (1), (3), (35), (36): Xaa is C or S

SEQ ID NO: 36503 - protein, 35 aa, Artificial Sequence; identical to SEQ ID NO: 10401
  GFR-binding peptide
  MOD_RES (31), (32): Xaa is C or S

SEQ ID NO: 36504 - protein, 35 aa, Artificial Sequence; identical to SEQ ID NO: 4875
  GFR-binding peptide
  MOD_RES (1), (3): Xaa is C or S
  MOD_RES (14), (15), (16), (17), (18): Xaa is A or G
  MOD_RES (19), (20), (21), (22): Xaa is A or G or is absent

SEQ ID NO: 36505 - protein, 31 aa, Artificial Sequence; identical to SEQ ID NO: 12307
  GFR-binding peptide
  MOD_RES (1), (1): Xaa is C or S

SEQ ID NO: 36506 - protein, 37 aa, Artificial Sequence; identical to SEQ ID NO: 12308
  GFR-binding peptide
  MOD_RES (1), (3), (35), (36): Xaa is C or S

SEQ ID NO: 36507 - protein, 40 aa, Artificial Sequence; identical to SEQ ID NO: 12309
  GFR-binding peptide
  MOD_RES (2), (4), (36), (37): Xaa is C or S

SEQ ID NO: 36508 - protein, 34 aa, Artificial Sequence; identical to SEQ ID NO: 10402
  GFR-binding peptide
  MOD_RES (2), (34): Xaa is C or S

SEQ ID NO: 36509 - protein, 38 aa, Artificial Sequence; identical to SEQ ID NO: 10404
  GFR-binding peptide
  MOD_RES (1), (3), (37): Xaa is C or S
  MOD_RES (15), (16), (17), (18), (19): Xaa is A or G
  MOD_RES (20), (21), (22), (23): Xaa is A or G or is absent

SEQ ID NO: 36510 - protein, 38 aa, Artificial Sequence; identical to SEQ ID NO: 10405
  GFR-binding peptide
  MOD_RES (1), (33), (34): Xaa is C or S

SEQ ID NO: 36511 - protein, 41 aa, Artificial Sequence; identical to SEQ ID NO: 12310
  GFR-binding peptide
  MOD_RES (2), (4), (36), (37): Xaa is C or S

SEQ ID NO: 36512 - protein, 38 aa, Artificial Sequence; identical to SEQ ID NO: 10406
  GFR-binding peptide
  MOD_RES (1), (35), (36): Xaa is C or S
  MOD_RES (13), (14), (15), (16), (17): Xaa is A or G
  MOD_RES (18), (19), (20), (21): Xaa is A or G or is absent

SEQ ID NO: 36513 - protein, 41 aa, Artificial Sequence; identical to SEQ ID NO: 4876
  GFR-binding peptide
  MOD_RES (1), (3), (35), (36): Xaa is C or S

SEQ ID NO: 36514 - protein, 40 aa, Artificial Sequence
  GFR-binding peptide
  MOD_RES (2), (35), (36): Xaa is C or S
  MOD_RES (13), (14), (15), (16), (17): Xaa is A or G
  MOD_RES (18), (19), (20), (21): Xaa is A or G or is absent
KXSKVIMNSLQEXXXXXXXXXYYLITLPELDQSVXXPSAS

SEQ ID NO: 36515 - protein, 34 aa, Artificial Sequence; identical to SEQ ID NO: 2947
  GFR-binding peptide
  MOD_RES (1), (1): Xaa is C or S
  MOD_RES (13), (14), (15), (16), (17): Xaa is A or G
  MOD_RES (18), (19), (20), (21): Xaa is A or G or is absent

SEQ ID NO: 36516 - protein, 41 aa, Artificial Sequence; identical to SEQ ID NO: 12315
  GFR-binding peptide
  MOD_RES (2), (4), (38), (39): Xaa is C or S
  MOD_RES (16), (17), (18), (19), (20): Xaa is A or G
  MOD_RES (21), (22), (23), (24): Xaa is A or G or is absent

SEQ ID NO: 36517 - protein, 41 aa, Artificial Sequence; identical to SEQ ID NO: 12316
  GFR-binding peptide
  MOD_RES (1), (3), (36), (37): Xaa is C or S
  MOD_RES (14), (15), (16), (17), (18): Xaa is A or G
  MOD_RES (19), (20), (21), (22): Xaa is A or G or is absent

SEQ ID NO: 36518 - protein, 35 aa, Artificial Sequence; identical to SEQ ID NO: 12317
  GFR-binding peptide
  MOD_RES (32), (33): Xaa is C or S

SEQ ID NO: 36519 - protein, 37 aa, Artificial Sequence; identical to SEQ ID NO: 12318
  GFR-binding peptide
  MOD_RES (2), (36), (37): Xaa is C or S
  MOD_RES (14), (15), (16), (17), (18): Xaa is A or G
  MOD_RES (19), (20), (21), (22): Xaa is A or G or is absent

SEQ ID NO: 36520 - protein, 38 aa, Artificial Sequence; identical to SEQ ID NO: 10410
  GFR-binding peptide
  MOD_RES (1), (3), (35), (36): Xaa is C or S

SEQ ID NO: 36521 - protein, 39 aa, Artificial Sequence; identical to SEQ ID NO: 4885
  GFR-binding peptide
  MOD_RES (2), (4), (36), (37): Xaa is C or S

SEQ ID NO: 36522 - protein, 35 aa, Artificial Sequence; identical to SEQ ID NO: 12320
  GFR-binding peptide
  MOD_RES (1), (32), (33): Xaa is C or S

SEQ ID NO: 36523 - protein, 40 aa, Artificial Sequence; identical to SEQ ID NO: 12321
  GFR-binding peptide
  MOD_RES (2), (4), (36), (37): Xaa is C or S

SEQ ID NO: 36524 - protein, 38 aa, Artificial Sequence; identical to SEQ ID NO: 2952
  GFR-binding peptide
  MOD_RES (1), (34), (35): Xaa is C or S
  MOD_RES (12), (13), (14), (15), (16): Xaa is A or G
  MOD_RES (17), (18), (19), (20): Xaa is A or G or is absent

SEQ ID NO: 36525 - protein, 33 aa, Artificial Sequence; identical to SEQ ID NO: 10414
  GFR-binding peptide
  MOD_RES (33), (33): Xaa is C or S
  MOD_RES (11), (12), (13), (14), (15): Xaa is A or G
  MOD_RES (16), (17), (18), (19): Xaa is A or G or is absent

SEQ ID NO: 36526 - protein, 36 aa, Artificial Sequence; identical to SEQ ID NO: 10415
  GFR-binding peptide
  MOD_RES (1), (35), (36): Xaa is C or S
  MOD_RES (13), (14), (15), (16), (17): Xaa is A or G
  MOD_RES (18), (19), (20), (21): Xaa is A or G or is absent

SEQ ID NO: 36527 - protein, 38 aa, Artificial Sequence; identical to SEQ ID NO: 12324
  GFR-binding peptide
  MOD_RES (2), (4), (36), (37): Xaa is C or S

SEQ ID NO: 36528 - protein, 40 aa, Artificial Sequence; identical to SEQ ID NO: 12325
  GFR-binding peptide
  MOD_RES (1), (34), (35): Xaa is C or S
  MOD_RES (12), (13), (14), (15), (16): Xaa is A or G
  MOD_RES (17), (18), (19), (20): Xaa is A or G or is absent

SEQ ID NO: 36529 - protein, 39 aa, Artificial Sequence; identical to SEQ ID NO: 12326
  GFR-binding peptide
  MOD_RES (33), (34): Xaa is C or S
  MOD_RES (11), (12), (13), (14), (15): Xaa is A or G
  MOD_RES (16), (17), (18), (19): Xaa is A or G or is absent

SEQ ID NO: 36530 - protein, 37 aa, Artificial Sequence; identical to SEQ ID NO: 12329
  GFR-binding peptide
  MOD_RES (1), (35), (36): Xaa is C or S
  MOD_RES (13), (14), (15), (16), (17): Xaa is A or G
  MOD_RES (18), (19), (20), (21): Xaa is A or G or is absent

SEQ ID NO: 36531 - protein, 32 aa, Artificial Sequence; identical to SEQ ID NO: 10417
  GFR-binding peptide
  MOD_RES (11), (12), (13), (14), (15): Xaa is A or G
  MOD_RES (16), (17), (18), (19): Xaa is A or G or is absent

SEQ ID NO: 36532 - protein, 36 aa, Artificial Sequence; identical to SEQ ID NO: 12331
  GFR-binding peptide
  MOD_RES (1), (33), (34): Xaa is C or S

SEQ ID NO: 36533 - protein, 37 aa, Artificial Sequence; identical to SEQ ID NO: 12332
  GFR-binding peptide
  MOD_RES (34), (34): Xaa is C or S
  MOD_RES (12), (13), (14), (15), (16): Xaa is A or G
  MOD_RES (17), (18), (19), (20): Xaa is A or G or is absent

SEQ ID NO: 36534 - protein, 37 aa, Artificial Sequence; identical to SEQ ID NO: 4895
  GFR-binding peptide
  MOD_RES (1), (3), (34), (35): Xaa is C or S

SEQ ID NO: 36535 - protein, 33 aa, Artificial Sequence; identical to SEQ ID NO: 10419
  GFR-binding peptide
  MOD_RES (1), (33): Xaa is C or S

SEQ ID NO: 36536 - protein, 40 aa, Artificial Sequence; identical to SEQ ID NO: 12334
  GFR-binding peptide
  MOD_RES (2), (4), (36), (37): Xaa is C or S

SEQ ID NO: 36537 - protein, 40 aa, Artificial Sequence; identical to SEQ ID NO: 10421
  GFR-binding peptide
  MOD_RES (2), (4), (37), (38): Xaa is C or S
  MOD_RES (15), (16), (17), (18), (19): Xaa is A or G
  MOD_RES (20), (21), (22), (23): Xaa is A or G or is absent

SEQ ID NO: 36538 - protein, 38 aa, Artificial Sequence; identical to SEQ ID NO: 10422
  GFR-binding peptide
  MOD_RES (33), (33): Xaa is C or S
  MOD_RES (11), (12), (13), (14), (15): Xaa is A or G
  MOD_RES (16), (17), (18), (19): Xaa is A or G or is absent

SEQ ID NO: 36539 - protein, 39 aa, Artificial Sequence; identical to SEQ ID NO: 10423
  GFR-binding peptide
  MOD_RES (1), (33), (34): Xaa is C or S

SEQ ID NO: 36540 - protein, 36 aa, Artificial Sequence; identical to SEQ ID NO: 12335
  GFR-binding peptide
  MOD_RES (31), (32): Xaa is C or S

SEQ ID NO: 36541 - protein, 36 aa, Artificial Sequence; identical to SEQ ID NO: 10424
  GFR-binding peptide
  MOD_RES (32), (33): Xaa is C or S

SEQ ID NO: 36542 - protein, 35 aa, Artificial Sequence; identical to SEQ ID NO: 12336
  GFR-binding peptide
  MOD_RES (2), (34), (35): Xaa is C or S

SEQ ID NO: 36543 - protein, 42 aa, Artificial Sequence; identical to SEQ ID NO: 10425
  GFR-binding peptide
  MOD_RES (2), (4), (38), (39): Xaa is C or S
  MOD_RES (16), (17), (18), (19), (20): Xaa is A or G
  MOD_RES (21), (22), (23), (24): Xaa is A or G or is absent

SEQ ID NO: 36544 - protein, 39 aa, Artificial Sequence; identical to SEQ ID NO: 4897
  GFR-binding peptide
  MOD_RES (2), (4), (37), (38): Xaa is C or S
  MOD_RES (15), (16), (17), (18), (19): Xaa is A or G
  MOD_RES (20), (21), (22), (23): Xaa is A or G or is absent

SEQ ID NO: 36545 - protein, 34 aa, Artificial Sequence; identical to SEQ ID NO: 10426
  GFR-binding peptide
  MOD_RES (2), (33), (34): Xaa is C or S

SEQ ID NO: 36546 - protein, 35 aa, Artificial Sequence; identical to SEQ ID NO: 4899
  GFR-binding peptide
  MOD_RES (2), (35): Xaa is C or S
  MOD_RES (13), (14), (15), (16), (17): Xaa is A or G
  MOD_RES (18), (19), (20), (21): Xaa is A or G or is absent

SEQ ID NO: 36547 - protein, 39 aa, Artificial Sequence; identical to SEQ ID NO: 12339
  GFR-binding peptide
  MOD_RES (1), (3), (35), (36): Xaa is C or S

SEQ ID NO: 36548 - protein, 32 aa, Artificial Sequence; identical to SEQ ID NO: 10427
  GFR-binding peptide
  MOD_RES (11), (12), (13), (14), (15): Xaa is A or G
  MOD_RES (16), (17), (18), (19): Xaa is A or G or is absent

SEQ ID NO: 36549 - protein, 37 aa, Artificial Sequence; identical to SEQ ID NO: 12341
  GFR-binding peptide
  MOD_RES (32), (33): Xaa is C or S

SEQ ID NO: 36550 - protein, 35 aa, Artificial Sequence; identical to SEQ ID NO: 12342
  GFR-binding peptide
  MOD_RES (34), (35): Xaa is C or S
  MOD_RES (12), (13), (14), (15), (16): Xaa is A or G
  MOD_RES (17), (18), (19), (20): Xaa is A or G or is absent

SEQ ID NO: 36551 - protein, 40 aa, Artificial Sequence; identical to SEQ ID NO: 10428
  GFR-binding peptide
  MOD_RES (2), (4), (36), (37): Xaa is C or S

SEQ ID NO: 36552 - protein, 39 aa, Artificial Sequence; identical to SEQ ID NO: 10429
  GFR-binding peptide
  MOD_RES (2), (4), (37), (38): Xaa is C or S
  MOD_RES (15), (16), (17), (18), (19): Xaa is A or G
  MOD_RES (20), (21), (22), (23): Xaa is A or G or is absent

SEQ ID NO: 36553 - protein, 41 aa, Artificial Sequence; identical to SEQ ID NO: 12343
  GFR-binding peptide
  MOD_RES (2), (36), (37): Xaa is C or S
  MOD_RES (14), (15), (16), (17), (18): Xaa is A or G
  MOD_RES (19), (20), (21), (22): Xaa is A or G or is absent

SEQ ID NO: 36554 - protein, 35 aa, Artificial Sequence; identical to SEQ ID NO: 10430
  GFR-binding peptide
  MOD_RES (2), (4), (35): Xaa is C or S

SEQ ID NO: 36555 - protein, 37 aa, Artificial Sequence; identical to SEQ ID NO: 12344
  GFR-binding peptide
  MOD_RES (2), (36), (37): Xaa is C or S
  MOD_RES (14), (15), (16), (17), (18): Xaa is A or G
  MOD_RES (19), (20), (21), (22): Xaa is A or G or is absent

SEQ ID NO: 36556 - protein, 38 aa, Artificial Sequence; identical to SEQ ID NO: 10431
  GFR-binding peptide
  MOD_RES (33), (34): Xaa is C or S
  MOD_RES (11), (12), (13), (14), (15): Xaa is A or G
  MOD_RES (16), (17), (18), (19): Xaa is A or G or is absent

SEQ ID NO: 36557 - protein, 34 aa, Artificial Sequence; identical to SEQ ID NO: 12346
  GFR-binding peptide
  MOD_RES (34), (34): Xaa is C or S
  MOD_RES (12), (13), (14), (15), (16): Xaa is A or G
  MOD_RES (17), (18), (19), (20): Xaa is A or G or is absent

SEQ ID NO: 36558 - protein, 36 aa, Artificial Sequence; identical to SEQ ID NO: 10433
  GFR-binding peptide
  MOD_RES (32), (33): Xaa is C or S

SEQ ID NO: 36559 - protein, 32 aa, Artificial Sequence; identical to SEQ ID NO: 12347
  GFR-binding peptide
  MOD_RES (31), (32): Xaa is C or S

SEQ ID NO: 36560 - protein, 32 aa, Artificial Sequence; identical to SEQ ID NO: 12348
  GFR-binding peptide
  MOD_RES (2), (2): Xaa is C or S

SEQ ID NO: 36561 - protein, 34 aa, Artificial Sequence; identical to SEQ ID NO: 10434
  GFR-binding peptide
  MOD_RES (2), (4): Xaa is C or S

SEQ ID NO: 36562 - protein, 40 aa, Artificial Sequence; identical to SEQ ID NO: 2983
  GFR-binding peptide
  MOD_RES (1), (3), (34), (35): Xaa is C or S

SEQ ID NO: 36563 - protein, 36 aa, Artificial Sequence; identical to SEQ ID NO: 12349
  GFR-binding peptide
  MOD_RES (1), (3), (34), (35): Xaa is C or S

SEQ ID NO: 36564 - protein, 37 aa, Artificial Sequence; identical to SEQ ID NO: 10436
  GFR-binding peptide
  MOD_RES (2), (4), (37): Xaa is C or S
  MOD_RES (15), (16), (17), (18), (19): Xaa is A or G
  MOD_RES (20), (21), (22), (23): Xaa is A or G or is absent

SEQ ID NO: 36565 - protein, 30 aa, Artificial Sequence; identical to SEQ ID NO: 2986
  GFR-binding peptide

SEQ ID NO: 36566 - protein, 39 aa, Artificial Sequence; identical to SEQ ID NO: 12351
  GFR-binding peptide
  MOD_RES (1), (33), (34): Xaa is C or S

SEQ ID NO: 36567 - protein, 36 aa, Artificial Sequence; identical to SEQ ID NO: 12352
  GFR-binding peptide
  MOD_RES (2), (36): Xaa is C or S
  MOD_RES (14), (15), (16), (17), (18): Xaa is A or G
  MOD_RES (19), (20), (21), (22): Xaa is A or G or is absent

SEQ ID NO: 36568 - protein, 40 aa, Artificial Sequence; identical to SEQ ID NO: 12353
  GFR-binding peptide
  MOD_RES (2), (4), (35), (36): Xaa is C or S

SEQ ID NO: 36569 - protein, 37 aa, Artificial Sequence; identical to SEQ ID NO: 10438
  GFR-binding peptide
  MOD_RES (2), (4): Xaa is C or S
  MOD_RES (16), (17), (18), (19), (20): Xaa is A or G
  MOD_RES (21), (22), (23), (24): Xaa is A or G or is absent

SEQ ID NO: 36570 - protein, 39 aa, Artificial Sequence; identical to SEQ ID NO: 12355
  GFR-binding peptide
  MOD_RES (2), (4), (35), (36): Xaa is C or S

SEQ ID NO: 36571 - protein, 39 aa, Artificial Sequence; identical to SEQ ID NO: 4915
  GFR-binding peptide
  MOD_RES (2), (33), (34): Xaa is C or S

SEQ ID NO: 36572 - protein, 40 aa, Artificial Sequence; identical to SEQ ID NO: 2989
  GFR-binding peptide
  MOD_RES (1), (35), (36): Xaa is C or S
  MOD_RES (13), (14), (15), (16), (17): Xaa is A or G
  MOD_RES (18), (19), (20), (21): Xaa is A or G or is absent

SEQ ID NO: 36573 - protein, 33 aa, Artificial Sequence; identical to SEQ ID NO: 10441
  GFR-binding peptide
  MOD_RES (2), (2): Xaa is C or S

SEQ ID NO: 36574 - protein, 38 aa, Artificial Sequence; identical to SEQ ID NO: 4918
  GFR-binding peptide
  MOD_RES (2), (35), (36): Xaa is C or S
  MOD_RES (13), (14), (15), (16), (17): Xaa is A or G
  MOD_RES (18), (19), (20), (21): Xaa is A or G or is absent

SEQ ID NO: 36575 - protein, 35 aa, Artificial Sequence; identical to SEQ ID NO: 10442
  GFR-binding peptide
  MOD_RES (1), (33), (34): Xaa is C or S

SEQ ID NO: 36576 - protein, 36 aa, Artificial Sequence; identical to SEQ ID NO: 12358
  GFR-binding peptide
  MOD_RES (33), (34): Xaa is C or S
  MOD_RES (11), (12), (13), (14), (15): Xaa is A or G
  MOD_RES (16), (17), (18), (19): Xaa is A or G or is absent

SEQ ID NO: 36577 - protein, 40 aa, Artificial Sequence; identical to SEQ ID NO: 10443
  GFR-binding peptide
  MOD_RES (2), (4), (36), (37): Xaa is C or S

SEQ ID NO: 36578 - protein, 38 aa, Artificial Sequence; identical to SEQ ID NO: 12359
  GFR-binding peptide
  MOD_RES (2), (4), (38): Xaa is C or S
  MOD_RES (16), (17), (18), (19), (20): Xaa is A or G
  MOD_RES (21), (22), (23), (24): Xaa is A or G or is absent

SEQ ID NO: 36579 - protein, 35 aa, Artificial Sequence; identical to SEQ ID NO: 12360
  GFR-binding peptide
  MOD_RES (1), (3): Xaa is C or S
  MOD_RES (14), (15), (16), (17), (18): Xaa is A or G
  MOD_RES (19), (20), (21), (22): Xaa is A or G or is absent

SEQ ID NO: 36580 - protein, 32 aa, Artificial Sequence; identical to SEQ ID NO: 10444
  GFR-binding peptide
  MOD_RES (2), (2): Xaa is C or S

SEQ ID NO: 36581 - protein, 36 aa, Artificial Sequence; identical to SEQ ID NO: 10445
  GFR-binding peptide
  MOD_RES (2), (35), (36): Xaa is C or S
  MOD_RES (13), (14), (15), (16), (17): Xaa is A or G
  MOD_RES (18), (19), (20), (21): Xaa is A or G or is absent

SEQ ID NO: 36582 - protein, 38 aa, Artificial Sequence; identical to SEQ ID NO: 12361
  GFR-binding peptide
  MOD_RES (1), (35), (36): Xaa is C or S
  MOD_RES (13), (14), (15), (16), (17): Xaa is A or G
  MOD_RES (18), (19), (20), (21): Xaa is A or G or is absent

SEQ ID NO: 36583 - protein, 39 aa, Artificial Sequence; identical to SEQ ID NO: 4920
  GFR-binding peptide
  MOD_RES (2), (4), (38), (39): Xaa is C or S
  MOD_RES (16), (17), (18), (19), (20): Xaa is A or G
  MOD_RES (21), (22), (23), (24): Xaa is A or G or is absent

SEQ ID NO: 36584 - protein, 36 aa, Artificial Sequence; identical to SEQ ID NO: 10446
  GFR-binding peptide
  MOD_RES (1), (35), (36): Xaa is C or S
  MOD_RES (13), (14), (15), (16), (17): Xaa is A or G
  MOD_RES (18), (19), (20), (21): Xaa is A or G or is absent

SEQ ID NO: 36585 - protein, 34 aa, Artificial Sequence
  GFR-binding peptide
  MOD_RES (31), (32): Xaa is C or S
SKVIMNSLQEIKPTKGIYYLITLPELDQSVXXPS

SEQ ID NO: 36586 - protein, 37 aa, Artificial Sequence; identical to SEQ ID NO: 10447
  GFR-binding peptide
  MOD_RES (2), (34), (35): Xaa is C or S

SEQ ID NO: 36587 - protein, 34 aa, Artificial Sequence; identical to SEQ ID NO: 10448
  GFR-binding peptide
  MOD_RES (33), (34): Xaa is C or S
  MOD_RES (11), (12), (13), (14), (15): Xaa is A or G
  MOD_RES (16), (17), (18), (19): Xaa is A or G or is absent

SEQ ID NO: 36588 - protein, 36 aa, Artificial Sequence; identical to SEQ ID NO: 12363
  GFR-binding peptide
  MOD_RES (2), (35), (36): Xaa is C or S
  MOD_RES (13), (14), (15), (16), (17): Xaa is A or G
  MOD_RES (18), (19), (20), (21): Xaa is A or G or is absent

SEQ ID NO: 36589 - protein, 44 aa, Artificial Sequence; identical to SEQ ID NO: 12364
  GFR-binding peptide
  MOD_RES (2), (4), (38), (39): Xaa is C or S
  MOD_RES (16), (17), (18), (19), (20): Xaa is A or G
  MOD_RES (21), (22), (23), (24): Xaa is A or G or is absent

SEQ ID NO: 36590 - protein, 33 aa, Artificial Sequence; identical to SEQ ID NO: 2995
  GFR-binding peptide
  MOD_RES (1), (32), (33): Xaa is C or S

SEQ ID NO: 36591 - protein, 39 aa, Artificial Sequence; identical to SEQ ID NO: 10450
  GFR-binding peptide
  MOD_RES (1), (34), (35): Xaa is C or S
  MOD_RES (12), (13), (14), (15), (16): Xaa is A or G
  MOD_RES (17), (18), (19), (20): Xaa is A or G or is absent

SEQ ID NO: 36592 - protein, 36 aa, Artificial Sequence; identical to SEQ ID NO: 12365
  GFR-binding peptide
  MOD_RES (1), (35), (36): Xaa is C or S
  MOD_RES (13), (14), (15), (16), (17): Xaa is A or G
  MOD_RES (18), (19), (20), (21): Xaa is A or G or is absent

SEQ ID NO: 36593 - protein, 35 aa, Artificial Sequence
  GFR-binding peptide
  MOD_RES (33), (34): Xaa is C or S
  MOD_RES (11), (12), (13), (14), (15): Xaa is A or G
  MOD_RES (16), (17), (18), (19): Xaa is A or G or is absent
SKVIMNSLQEXXXXXXXXXYYLITLPELDQSVXXP

SEQ ID NO: 36594 - protein, 40 aa, Artificial Sequence
  GFR-binding peptide
  MOD_RES (2), (4), (35), (36): Xaa is C or S
SXKXSKVIMNSLQEIKPTKGIYYLITLPELDQSVXXPSAS

SEQ ID NO: 36595 - protein, 37 aa, Artificial Sequence; identical to SEQ ID NO: 12367
  GFR-binding peptide
  MOD_RES (31), (32): Xaa is C or S

SEQ ID NO: 36596 - protein, 35 aa, Artificial Sequence; identical to SEQ ID NO: 3004
  GFR-binding peptide
  MOD_RES (1), (34), (35): Xaa is C or S
  MOD_RES (12), (13), (14), (15), (16): Xaa is A or G
  MOD_RES (17), (18), (19), (20): Xaa is A or G or is absent

SEQ ID NO: 36597 - protein, 36 aa, Artificial Sequence; identical to SEQ ID NO: 10454
  GFR-binding peptide
  MOD_RES (34), (35): Xaa is C or S
  MOD_RES (12), (13), (14), (15), (16): Xaa is A or G
  MOD_RES (17), (18), (19), (20): Xaa is A or G or is absent

SEQ ID NO: 36598 - protein, 36 aa, Artificial Sequence; identical to SEQ ID NO: 4935
  GFR-binding peptide
  MOD_RES (1), (3): Xaa is C or S
  MOD_RES (15), (16), (17), (18), (19): Xaa is A or G
  MOD_RES (20), (21), (22), (23): Xaa is A or G or is absent

SEQ ID NO: 36599 - protein, 37 aa, Artificial Sequence; identical to SEQ ID NO: 4938
  GFR-binding peptide
  MOD_RES (2), (4), (37): Xaa is C or S
  MOD_RES (15), (16), (17), (18), (19): Xaa is A or G
  MOD_RES (20), (21), (22), (23): Xaa is A or G or is absent

SEQ ID NO: 36600 - protein, 33 aa, Artificial Sequence; identical to SEQ ID NO: 10457
  GFR-binding peptide
  MOD_RES (2), (33): Xaa is C or S

SEQ ID NO: 36601 - protein, 35 aa, Artificial Sequence
  GFR-binding peptide
  MOD_RES (2), (35): Xaa is C or S
  MOD_RES (13), (14), (15), (16), (17): Xaa is A or G
  MOD_RES (18), (19), (20), (21): Xaa is A or G or is absent
KXSKVIMNSLQEXXXXXXXXXYYLITLPELDQSVX

SEQ ID NO: 36602 - protein, 37 aa, Artificial Sequence; identical to SEQ ID NO: 12373
  GFR-binding peptide
  MOD_RES (2), (36), (37): Xaa is C or S
  MOD_RES (14), (15), (16), (17), (18): Xaa is A or G
  MOD_RES (19), (20), (21), (22): Xaa is A or G or is absent

SEQ ID NO: 36603 - protein, 36 aa, Artificial Sequence; identical to SEQ ID NO: 10459
  GFR-binding peptide
  MOD_RES (32), (33): Xaa is C or S

SEQ ID NO: 36604 - protein, 35 aa, Artificial Sequence; identical to SEQ ID NO: 12374
  GFR-binding peptide
  MOD_RES (33), (34): Xaa is C or S
  MOD_RES (11), (12), (13), (14), (15): Xaa is A or G
  MOD_RES (16), (17), (18), (19): Xaa is A or G or is absent

SEQ ID NO: 36605 - protein, 38 aa, Artificial Sequence; identical to SEQ ID NO: 12375
  GFR-binding peptide
  MOD_RES (2), (4), (36), (37): Xaa is C or S

SEQ ID NO: 36606 - protein, 36 aa, Artificial Sequence; identical to SEQ ID NO: 10460
  GFR-binding peptide
  MOD_RES (2), (34), (35): Xaa is C or S

SEQ ID NO: 36607 - protein, 35 aa, Artificial Sequence; identical to SEQ ID NO: 10461
  GFR-binding peptide
  MOD_RES (33), (34): Xaa is C or S
  MOD_RES (11), (12), (13), (14), (15): Xaa is A or G
  MOD_RES (16), (17), (18), (19): Xaa is A or G or is absent

SEQ ID NO: 36608 - protein, 38 aa, Artificial Sequence; identical to SEQ ID NO: 12376
  GFR-binding peptide
  MOD_RES (1), (3), (37), (38): Xaa is C or S
  MOD_RES (15), (16), (17), (18), (19): Xaa is A or G
  MOD_RES (20), (21), (22), (23): Xaa is A or G or is absent

SEQ ID NO: 36609 - protein, 35 aa, Artificial Sequence; identical to SEQ ID NO: 12377
  GFR-binding peptide
  MOD_RES (1), (33), (34): Xaa is C or S

SEQ ID NO: 36610 - protein, 33 aa, Artificial Sequence; identical to SEQ ID NO: 3013
  GFR-binding peptide
  MOD_RES (2), (2): Xaa is C or S

SEQ ID NO: 36611 - protein, 42 aa, Artificial Sequence; identical to SEQ ID NO: 10463
  GFR-binding peptide
  MOD_RES (2), (4), (36), (37): Xaa is C or S

SEQ ID NO: 36612 - protein, 34 aa, Artificial Sequence; identical to SEQ ID NO: 10465
  GFR-binding peptide
  MOD_RES (32), (32): Xaa is C or S

SEQ ID NO: 36613 - protein, 41 aa, Artificial Sequence; identical to SEQ ID NO: 12379
  GFR-binding peptide
  MOD_RES (1), (35), (36): Xaa is C or S
  MOD_RES (13), (14), (15), (16), (17): Xaa is A or G
  MOD_RES (18), (19), (20), (21): Xaa is A or G or is absent

SEQ ID NO: 36614 - protein, 34 aa, Artificial Sequence; identical to SEQ ID NO: 12380
  GFR-binding peptide
  MOD_RES (32), (33): Xaa is C or S

SEQ ID NO: 36615 - protein, 40 aa, Artificial Sequence; identical to SEQ ID NO: 12381
  GFR-binding peptide
  MOD_RES (1), (3), (36), (37): Xaa is C or S
  MOD_RES (14), (15), (16), (17), (18): Xaa is A or G
  MOD_RES (19), (20), (21), (22): Xaa is A or G or is absent

SEQ ID NO: 36616 - protein, 39 aa, Artificial Sequence; identical to SEQ ID NO: 10466
  GFR-binding peptide
  MOD_RES (2), (34): Xaa is C or S

SEQ ID NO: 36617 - protein, 37 aa, Artificial Sequence; identical to SEQ ID NO: 12382
  GFR-binding peptide
  MOD_RES (2), (4), (36), (37): Xaa is C or S

SEQ ID NO: 36618 - protein, 34 aa, Artificial Sequence; identical to SEQ ID NO: 10467
  GFR-binding peptide
  MOD_RES (33), (34): Xaa is C or S
  MOD_RES (11), (12), (13), (14), (15): Xaa is A or G
  MOD_RES (16), (17), (18), (19): Xaa is A or G or is absent

SEQ ID NO: 36619 - protein, 39 aa, Artificial Sequence
  GFR-binding peptide
  MOD_RES (2), (4), (35), (36): Xaa is C or S
SXKXSKVIMNSLQEIKPTKGIYYLITLPELDQSVXXPSA

SEQ ID NO: 36620 - protein, 35 aa, Artificial Sequence; identical to SEQ ID NO: 10469
  GFR-binding peptide
  MOD_RES (2), (4): Xaa is C or S

SEQ ID NO: 36621 - protein, 36 aa, Artificial Sequence; identical to SEQ ID NO: 12383
  GFR-binding peptide
  MOD_RES (1), (35), (36): Xaa is C or S
  MOD_RES (13), (14), (15), (16), (17): Xaa is A or G
  MOD_RES (18), (19), (20), (21): Xaa is A or G or is absent

SEQ ID NO: 36622 - protein, 36 aa, Artificial Sequence; identical to SEQ ID NO: 10470
  GFR-binding peptide
  MOD_RES (33), (34): Xaa is C or S
  MOD_RES (11), (12), (13), (14), (15): Xaa is A or G
  MOD_RES (16), (17), (18), (19): Xaa is A or G or is absent

SEQ ID NO: 36623 - protein, 36 aa, Artificial Sequence; identical to SEQ ID NO: 10471
  GFR-binding peptide
  MOD_RES (2), (4), (36): Xaa is C or S

SEQ ID NO: 36624 - protein, 36 aa, Artificial Sequence; identical to SEQ ID NO: 10473
  GFR-binding peptide
  MOD_RES (34), (35): Xaa is C or S
  MOD_RES (12), (13), (14), (15), (16): Xaa is A or G
  MOD_RES (17), (18), (19), (20): Xaa is A or G or is absent

SEQ ID NO: 36625 - protein, 37 aa, Artificial Sequence; identical to SEQ ID NO: 10474
  GFR-binding peptide
  MOD_RES (31), (32): Xaa is C or S

SEQ ID NO: 36626 - protein, 37 aa, Artificial Sequence; identical to SEQ ID NO: 12385
  GFR-binding peptide
  MOD_RES (1), (35), (36): Xaa is C or S
  MOD_RES (13), (14), (15), (16), (17): Xaa is A or G
  MOD_RES (18), (19), (20), (21): Xaa is A or G or is absent

SEQ ID NO: 36627 - protein, 40 aa, Artificial Sequence; identical to SEQ ID NO: 12387
  GFR-binding peptide
  MOD_RES (2), (36), (37): Xaa is C or S
  MOD_RES (14), (15), (16), (17), (18): Xaa is A or G
  MOD_RES (19), (20), (21), (22): Xaa is A or G or is absent

SEQ ID NO: 36628 - protein, 30 aa, Artificial Sequence; identical to SEQ ID NO: 12388
  GFR-binding peptide

SEQ ID NO: 36629 - protein, 31 aa, Artificial Sequence; identical to SEQ ID NO: 12389
  GFR-binding peptide
  MOD_RES (1), (1): Xaa is C or S

SEQ ID NO: 36630 - protein, 36 aa, Artificial Sequence; identical to SEQ ID NO: 10475
  GFR-binding peptide
  MOD_RES (32), (33): Xaa is C or S

SEQ ID NO: 36631 - protein, 40 aa, Artificial Sequence; identical to SEQ ID NO: 3025
  GFR-binding peptide
  MOD_RES (2), (4), (37), (38): Xaa is C or S
  MOD_RES (15), (16), (17), (18), (19): Xaa is A or G
  MOD_RES (20), (21), (22), (23): Xaa is A or G or is absent

SEQ ID NO: 36632 - protein, 35 aa, Artificial Sequence; identical to SEQ ID NO: 12392
  GFR-binding peptide
  MOD_RES (1), (3), (35): Xaa is C or S

SEQ ID NO: 36633 - protein, 36 aa, Artificial Sequence; identical to SEQ ID NO: 10478
  GFR-binding peptide
  MOD_RES (31), (32): Xaa is C or S

SEQ ID NO: 36634 - protein, 35 aa, Artificial Sequence; identical to SEQ ID NO: 12394
  GFR-binding peptide
  MOD_RES (2), (34), (35): Xaa is C or S

SEQ ID NO: 36635 - protein, 35 aa, Artificial Sequence; identical to SEQ ID NO: 12395
  GFR-binding peptide
  MOD_RES (2), (34), (35): Xaa is C or S

SEQ ID NO: 36636 - protein, 39 aa, Artificial Sequence; identical to SEQ ID NO: 12396
  GFR-binding peptide
  MOD_RES (1), (33): Xaa is C or S

SEQ ID NO: 36637 - protein, 38 aa, Artificial Sequence; identical to SEQ ID NO: 4964
  GFR-binding peptide
  MOD_RES (34), (35): Xaa is C or S
  MOD_RES (12), (13), (14), (15), (16): Xaa is A or G
  MOD_RES (17), (18), (19), (20): Xaa is A or G or is absent

SEQ ID NO: 36638 - protein, 33 aa, Artificial Sequence; identical to SEQ ID NO: 10480
  GFR-binding peptide
  MOD_RES (2), (2): Xaa is C or S

SEQ ID NO: 36639 - protein, 34 aa, Artificial Sequence; identical to SEQ ID NO: 12400
  GFR-binding peptide
  MOD_RES (2), (33), (34): Xaa is C or S

SEQ ID NO: 36640 - protein, 33 aa, Artificial Sequence; identical to SEQ ID NO: 12401
  GFR-binding peptide
  MOD_RES (33), (33): Xaa is C or S
  MOD_RES (11), (12), (13), (14), (15): Xaa is A or G
  MOD_RES (16), (17), (18), (19): Xaa is A or G or is absent

SEQ ID NO: 36641 - protein, 32 aa, Artificial Sequence; identical to SEQ ID NO: 12402
  GFR-binding peptide
  MOD_RES (1), (1): Xaa is C or S

SEQ ID NO: 36642 - protein, 34 aa, Artificial Sequence; identical to SEQ ID NO: 10482
  GFR-binding peptide
  MOD_RES (1), (33), (34): Xaa is C or S

SEQ ID NO: 36643 - protein, 39 aa, Artificial Sequence
  GFR-binding peptide
  MOD_RES (1), (3), (36), (37): Xaa is C or S
  MOD_RES (14), (15), (16), (17), (18): Xaa is A or G
  MOD_RES (19), (20), (21), (22): Xaa is A or G or is absent
XKXSKVIMNSLQEXXXXXXXXXYYLITLPELDQSVXXPS

SEQ ID NO: 36644 - protein, 32 aa, Artificial Sequence; identical to SEQ ID NO: 10484
  GFR-binding peptide
  MOD_RES (11), (12), (13), (14), (15): Xaa is A or G
  MOD_RES (16), (17), (18), (19): Xaa is A or G or is absent

SEQ ID NO: 36645 - protein, 37 aa, Artificial Sequence; identical to SEQ ID NO: 10485
  GFR-binding peptide
  MOD_RES (2), (34): Xaa is C or S

SEQ ID NO: 36646 - protein, 38 aa, Artificial Sequence; identical to SEQ ID NO: 12405
  GFR-binding peptide
  MOD_RES (1), (34), (35): Xaa is C or S
  MOD_RES (12), (13), (14), (15), (16): Xaa is A or G
  MOD_RES (17), (18), (19), (20): Xaa is A or G or is absent

SEQ ID NO: 36647 - protein, 34 aa, Artificial Sequence; identical to SEQ ID NO: 12406
  GFR-binding peptide
  MOD_RES (1), (33), (34): Xaa is C or S

SEQ ID NO: 36648 - protein, 41 aa, Artificial Sequence; identical to SEQ ID NO: 12407
  GFR-binding peptide
  MOD_RES (2), (36): Xaa is C or S
  MOD_RES (14), (15), (16), (17), (18): Xaa is A or G
  MOD_RES (19), (20), (21), (22): Xaa is A or G or is absent

SEQ ID NO: 36649 - protein, 33 aa, Artificial Sequence; identical to SEQ ID NO: 12408
  GFR-binding peptide
  MOD_RES (1), (1): Xaa is C or S
  MOD_RES (12), (13), (14), (15), (16): Xaa is A or G
  MOD_RES (17), (18), (19), (20): Xaa is A or G or is absent

SEQ ID NO: 36650 - protein, 40 aa, Artificial Sequence; identical to SEQ ID NO: 10486
  GFR-binding peptide
  MOD_RES (1), (3), (35), (36): Xaa is C or S

SEQ ID NO: 36651 - protein, 36 aa, Artificial Sequence; identical to SEQ ID NO: 12411
  GFR-binding peptide
  MOD_RES (34), (35): Xaa is C or S
  MOD_RES (12), (13), (14), (15), (16): Xaa is A or G
  MOD_RES (17), (18), (19), (20): Xaa is A or G or is absent

SEQ ID NO: 36652 - protein, 37 aa, Artificial Sequence; identical to SEQ ID NO: 10487
  GFR-binding peptide
  MOD_RES (1), (3), (37): Xaa is C or S
  MOD_RES (15), (16), (17), (18), (19): Xaa is A or G
  MOD_RES (20), (21), (22), (23): Xaa is A or G or is absent

SEQ ID NO: 36653 - protein, 38 aa, Artificial Sequence; identical to SEQ ID NO: 4980
  GFR-binding peptide
  MOD_RES (32), (33): Xaa is C or S

SEQ ID NO: 36654 - protein, 37 aa, Artificial Sequence; identical to SEQ ID NO: 10488
  GFR-binding peptide
  MOD_RES (32), (33): Xaa is C or S

SEQ ID NO: 36655 - protein, 36 aa, Artificial Sequence; identical to SEQ ID NO: 10489
  GFR-binding peptide
  MOD_RES (1), (3), (36): Xaa is C or S
  MOD_RES (14), (15), (16), (17), (18): Xaa is A or G
  MOD_RES (19), (20), (21), (22): Xaa is A or G or is absent

SEQ ID NO: 36656 - protein, 37 aa, Artificial Sequence; identical to SEQ ID NO: 12413
  GFR-binding peptide
  MOD_RES (1), (3), (35), (36): Xaa is C or S

SEQ ID NO: 36657 - protein, 34 aa, Artificial Sequence; identical to SEQ ID NO: 12414
  GFR-binding peptide
  MOD_RES (1), (34): Xaa is C or S
  MOD_RES (12), (13), (14), (15), (16): Xaa is A or G
  MOD_RES (17), (18), (19), (20): Xaa is A or G or is absent

SEQ ID NO: 36658 - protein, 38 aa, Artificial Sequence; identical to SEQ ID NO: 10490
  GFR-binding peptide
  MOD_RES (33), (33): Xaa is C or S
  MOD_RES (11), (12), (13), (14), (15): Xaa is A or G
  MOD_RES (16), (17), (18), (19): Xaa is A or G or is absent

SEQ ID NO: 36659 - protein, 36 aa, Artificial Sequence; identical to SEQ ID NO: 10491
  GFR-binding peptide
  MOD_RES (1), (35), (36): Xaa is C or S
  MOD_RES (13), (14), (15), (16), (17): Xaa is A or G
  MOD_RES (18), (19), (20), (21): Xaa is A or G or is absent

SEQ ID NO: 36660 - protein, 34 aa, Artificial Sequence; identical to SEQ ID NO: 12415
  GFR-binding peptide
  MOD_RES (33), (34): Xaa is C or S
  MOD_RES (11), (12), (13), (14), (15): Xaa is A or G
  MOD_RES (16), (17), (18), (19): Xaa is A or G or is absent

SEQ ID NO: 36661 - protein, 35 aa, Artificial Sequence; identical to SEQ ID NO: 3042
  GFR-binding peptide
  MOD_RES (32), (33): Xaa is C or S

SEQ ID NO: 36662 - protein, 34 aa, Artificial Sequence; identical to SEQ ID NO: 12417
  GFR-binding peptide
  MOD_RES (1), (33): Xaa is C or S

SEQ ID NO: 36663 - protein, 33 aa, Artificial Sequence; identical to SEQ ID NO: 10495
  GFR-binding peptide
  MOD_RES (2), (33): Xaa is C or S

SEQ ID NO: 36664 - protein, 36 aa, Artificial Sequence; identical to SEQ ID NO: 12418
  GFR-binding peptide
  MOD_RES (2), (36): Xaa is C or S
  MOD_RES (14), (15), (16), (17), (18): Xaa is A or G
  MOD_RES (19), (20), (21), (22): Xaa is A or G or is absent

SEQ ID NO: 36665 - protein, 37 aa, Artificial Sequence; identical to SEQ ID NO: 12419
  GFR-binding peptide
  MOD_RES (1), (35), (36): Xaa is C or S
  MOD_RES (13), (14), (15), (16), (17): Xaa is A or G
  MOD_RES (18), (19), (20), (21): Xaa is A or G or is absent

SEQ ID NO: 36666 - protein, 44 aa, Artificial Sequence; identical to SEQ ID NO: 10496
  GFR-binding peptide
  MOD_RES (2), (4), (38), (39): Xaa is C or S
  MOD_RES (16), (17), (18), (19), (20): Xaa is A or G
  MOD_RES (21), (22), (23), (24): Xaa is A or G or is absent

SEQ ID NO: 36667 - protein, 35 aa, Artificial Sequence; identical to SEQ ID NO: 10497
  GFR-binding peptide
  MOD_RES (1), (3), (35): Xaa is C or S

SEQ ID NO: 36668 - protein, 39 aa, Artificial Sequence; identical to SEQ ID NO: 10498
  GFR-binding peptide
  MOD_RES (1), (3), (36), (37): Xaa is C or S
  MOD_RES (14), (15), (16), (17), (18): Xaa is A or G
  MOD_RES (19), (20), (21), (22): Xaa is A or G or is absent

SEQ ID NO: 36669 - protein, 38 aa, Artificial Sequence; identical to SEQ ID NO: 4985
  GFR-binding peptide
  MOD_RES (2), (4), (35), (36): Xaa is C or S

SEQ ID NO: 36670 - protein, 37 aa, Artificial Sequence; identical to SEQ ID NO: 12422
  GFR-binding peptide
  MOD_RES (34), (35): Xaa is C or S
  MOD_RES (12), (13), (14), (15), (16): Xaa is A or G
  MOD_RES (17), (18), (19), (20): Xaa is A or G or is absent

SEQ ID NO: 36671 - protein, 35 aa, Artificial Sequence; identical to SEQ ID NO: 10499
  GFR-binding peptide
  MOD_RES (2), (4): Xaa is C or S

SEQ ID NO: 36672 - protein, 37 aa, Artificial Sequence; identical to SEQ ID NO: 10501
  GFR-binding peptide
  MOD_RES (33), (34): Xaa is C or S
  MOD_RES (11), (12), (13), (14), (15): Xaa is A or G
  MOD_RES (16), (17), (18), (19): Xaa is A or G or is absent

SEQ ID NO: 36673 - protein, 39 aa, Artificial Sequence; identical to SEQ ID NO: 10502
  GFR-binding peptide
  MOD_RES (1), (3), (36), (37): Xaa is C or S
  MOD_RES (14), (15), (16), (17), (18): Xaa is A or G
  MOD_RES (19), (20), (21), (22): Xaa is A or G or is absent

SEQ ID NO: 36674 - protein, 38 aa, Artificial Sequence; identical to SEQ ID NO: 12423
  GFR-binding peptide
  MOD_RES (1), (3), (37), (38): Xaa is C or S
  MOD_RES (15), (16), (17), (18), (19): Xaa is A or G
  MOD_RES (20), (21), (22), (23): Xaa is A or G or is absent

SEQ ID NO: 36675 - protein, 39 aa, Artificial Sequence; identical to SEQ ID NO: 10503
  GFR-binding peptide
  MOD_RES (1), (3), (37), (38): Xaa is C or S
  MOD_RES (15), (16), (17), (18), (19): Xaa is A or G
  MOD_RES (20), (21), (22), (23): Xaa is A or G or is absent

SEQ ID NO: 36676 - protein, 34 aa, Artificial Sequence; identical to SEQ ID NO: 10504
  GFR-binding peptide
  MOD_RES (31), (32): Xaa is C or S

SEQ ID NO: 36677 - protein, 36 aa, Artificial Sequence; identical to SEQ ID NO: 12425
  GFR-binding peptide
  MOD_RES (1), (3): Xaa is C or S
  MOD_RES (15), (16), (17), (18), (19): Xaa is A or G
  MOD_RES (20), (21), (22), (23): Xaa is A or G or is absent

SEQ ID NO: 36678 - protein, 33 aa, Artificial Sequence; identical to SEQ ID NO: 10506
  GFR-binding peptide
  MOD_RES (33), (33): Xaa is C or S
  MOD_RES (11), (12), (13), (14), (15): Xaa is A or G
  MOD_RES (16), (17), (18), (19): Xaa is A or G or is absent

SEQ ID NO: 36679 - protein, 38 aa, Artificial Sequence; identical to SEQ ID NO: 10507
  GFR-binding peptide
  MOD_RES (2), (36), (37): Xaa is C or S
  MOD_RES (14), (15), (16), (17), (18): Xaa is A or G
  MOD_RES (19), (20), (21), (22): Xaa is A or G or is absent

SEQ ID NO: 36680 - protein, 32 aa, Artificial Sequence; identical to SEQ ID NO: 12426
  GFR-binding peptide
  MOD_RES (31), (32): Xaa is C or S

SEQ ID NO: 36681 - protein, 39 aa, Artificial Sequence; identical to SEQ ID NO: 10509
  GFR-binding peptide
  MOD_RES (2), (36), (37): Xaa is C or S
  MOD_RES (14), (15), (16), (17), (18): Xaa is A or G
  MOD_RES (19), (20), (21), (22): Xaa is A or G or is absent

SEQ ID NO: 36682 - protein, 36 aa, Artificial Sequence; identical to SEQ ID NO: 12428
  GFR-binding peptide
  MOD_RES (1), (34), (35): Xaa is C or S
  MOD_RES (12), (13), (14), (15), (16): Xaa is A or G
  MOD_RES (17), (18), (19), (20): Xaa is A or G or is absent

SEQ ID NO: 36683 - protein, 39 aa, Artificial Sequence; identical to SEQ ID NO: 10511
  GFR-binding peptide
  MOD_RES (1), (3), (34), (35): Xaa is C or S

SEQ ID NO: 36684 - protein, 38 aa, Artificial Sequence; identical to SEQ ID NO: 3054
  GFR-binding peptide
  MOD_RES (1), (3), (36), (37): Xaa is C or S
  MOD_RES (14), (15), (16), (17), (18): Xaa is A or G
  MOD_RES (19), (20), (21), (22): Xaa is A or G or is absent

SEQ ID NO: 36685 - protein, 41 aa, Artificial Sequence; identical to SEQ ID NO: 12429
  GFR-binding peptide
  MOD_RES (2), (36), (37): Xaa is C or S
  MOD_RES (14), (15), (16), (17), (18): Xaa is A or G
  MOD_RES (19), (20), (21), (22): Xaa is A or G or is absent

SEQ ID NO: 36686 - protein, 34 aa, Artificial Sequence; identical to SEQ ID NO: 10513
  GFR-binding peptide
  MOD_RES (33), (34): Xaa is C or S
  MOD_RES (11), (12), (13), (14), (15): Xaa is A or G
  MOD_RES (16), (17), (18), (19): Xaa is A or G or is absent

SEQ ID NO: 36687 - protein, 39 aa, Artificial Sequence; identical to SEQ ID NO: 12430
  GFR-binding peptide
  MOD_RES (2), (36), (37): Xaa is C or S
  MOD_RES (14), (15), (16), (17), (18): Xaa is A or G
  MOD_RES (19), (20), (21), (22): Xaa is A or G or is absent

SEQ ID NO: 36688 - protein, 37 aa, Artificial Sequence; identical to SEQ ID NO: 3057
  GFR-binding peptide
  MOD_RES (34), (35): Xaa is C or S
  MOD_RES (12), (13), (14), (15), (16): Xaa is A or G
  MOD_RES (17), (18), (19), (20): Xaa is A or G or is absent

SEQ ID NO: 36689 - protein, 38 aa, Artificial Sequence; identical to SEQ ID NO: 12431
  GFR-binding peptide
  MOD_RES (2), (4), (38): Xaa is C or S
  MOD_RES (16), (17), (18), (19), (20): Xaa is A or G
  MOD_RES (21), (22), (23), (24): Xaa is A or G or is absent

SEQ ID NO: 36690 - protein, 38 aa, Artificial Sequence; identical to SEQ ID NO: 12432
  GFR-binding peptide
  MOD_RES (1), (3), (35), (36): Xaa is C or S

SEQ ID NO: 36691 - protein, 33 aa, Artificial Sequence; identical to SEQ ID NO: 10515
  GFR-binding peptide
  MOD_RES (31), (32): Xaa is C or S

SEQ ID NO: 36692 - protein, 40 aa, Artificial Sequence; identical to SEQ ID NO: 10516
  GFR-binding peptide
  MOD_RES (1), (34), (35): Xaa is C or S
  MOD_RES (12), (13), (14), (15), (16): Xaa is A or G
  MOD_RES (17), (18), (19), (20): Xaa is A or G or is absent

SEQ ID NO: 36693 - protein, 39 aa, Artificial Sequence; identical to SEQ ID NO: 12433
  GFR-binding peptide
  MOD_RES (1), (3), (35), (36): Xaa is C or S

SEQ ID NO: 36694 - protein, 38 aa, Artificial Sequence; identical to SEQ ID NO: 4991
  GFR-binding peptide
  MOD_RES (2), (33), (34): Xaa is C or S

SEQ ID NO: 36695 - protein, 44 aa, Artificial Sequence; identical to SEQ ID NO: 10517
  GFR-binding peptide
  MOD_RES (2), (4), (38), (39): Xaa is C or S
  MOD_RES (16), (17), (18), (19), (20): Xaa is A or G
  MOD_RES (21), (22), (23), (24): Xaa is A or G or is absent

SEQ ID NO: 36696 - protein, 40 aa, Artificial Sequence; identical to SEQ ID NO: 10518
  GFR-binding peptide
  MOD_RES (2), (36): Xaa is C or S
  MOD_RES (14), (15), (16), (17), (18): Xaa is A or G
  MOD_RES (19), (20), (21), (22): Xaa is A or G or is absent

SEQ ID NO: 36697 - protein, 32 aa, Artificial Sequence; identical to SEQ ID NO: 3061
  GFR-binding peptide
  MOD_RES (11), (12), (13), (14), (15): Xaa is A or G
  MOD_RES (16), (17), (18), (19): Xaa is A or G or is absent

SEQ ID NO: 36698 - protein, 34 aa, Artificial Sequence; identical to SEQ ID NO: 10522
  GFR-binding peptide
  MOD_RES (34), (34): Xaa is C or S
  MOD_RES (12), (13), (14), (15), (16): Xaa is A or G
  MOD_RES (17), (18), (19), (20): Xaa is A or G or is absent

SEQ ID NO: 36699 - protein, 36 aa, Artificial Sequence; identical to SEQ ID NO: 12436
  GFR-binding peptide
  MOD_RES (34), (35): Xaa is C or S
  MOD_RES (12), (13), (14), (15), (16): Xaa is A or G
  MOD_RES (17), (18), (19), (20): Xaa is A or G or is absent

SEQ ID NO: 36700 - protein, 38 aa, Artificial Sequence; identical to SEQ ID NO: 10523
  GFR-binding peptide
  MOD_RES (2), (36), (37): Xaa is C or S
  MOD_RES (14), (15), (16), (17), (18): Xaa is A or G
  MOD_RES (19), (20), (21), (22): Xaa is A or G or is absent

SEQ ID NO: 36701 - protein, 32 aa, Artificial Sequence; identical to SEQ ID NO: 12437
  GFR-binding peptide
  MOD_RES (32), (32): Xaa is C or S

SEQ ID NO: 36702 - protein, 40 aa, Artificial Sequence; identical to SEQ ID NO: 12438
  GFR-binding peptide
  MOD_RES (2), (34), (35): Xaa is C or S

SEQ ID NO: 36703 - protein, 41 aa, Artificial Sequence; identical to SEQ ID NO: 12439
  GFR-binding peptide
  MOD_RES (2), (4), (38), (39): Xaa is C or S
  MOD_RES (16), (17), (18), (19), (20): Xaa is A or G
  MOD_RES (21), (22), (23), (24): Xaa is A or G or is absent

SEQ ID NO: 36704 - protein, 38 aa, Artificial Sequence; identical to SEQ ID NO: 10524
  GFR-binding peptide
  MOD_RES (1), (3), (37), (38): Xaa is C or S
  MOD_RES (15), (16), (17), (18), (19): Xaa is A or G
  MOD_RES (20), (21), (22), (23): Xaa is A or G or is absent

SEQ ID NO: 36705 - protein, 36 aa, Artificial Sequence; identical to SEQ ID NO: 12440
  GFR-binding peptide
  MOD_RES (1), (34), (35): Xaa is C or S
  MOD_RES (12), (13), (14), (15), (16): Xaa is A or G
  MOD_RES (17), (18), (19), (20): Xaa is A or G or is absent

SEQ ID NO: 36706 - protein, 35 aa, Artificial Sequence; identical to SEQ ID NO: 5000
  GFR-binding peptide
  MOD_RES (2), (34), (35): Xaa is C or S

SEQ ID NO: 36707 - protein, 40 aa, Artificial Sequence; identical to SEQ ID NO: 10525
  GFR-binding peptide
  MOD_RES (2), (4), (37), (38): Xaa is C or S
  MOD_RES (15), (16), (17), (18), (19): Xaa is A or G
  MOD_RES (20), (21), (22), (23): Xaa is A or G or is absent

SEQ ID NO: 36708 - protein, 34 aa, Artificial Sequence; identical to SEQ ID NO: 12442
  GFR-binding peptide
  MOD_RES (1), (1): Xaa is C or S
  MOD_RES (13), (14), (15), (16), (17): Xaa is A or G
  MOD_RES (18), (19), (20), (21): Xaa is A or G or is absent

SEQ ID NO: 36709 - protein, 32 aa, Artificial Sequence; identical to SEQ ID NO: 10527
  GFR-binding peptide
  MOD_RES (31), (32): Xaa is C or S

SEQ ID NO: 36710 - protein, 30 aa, Artificial Sequence
  GFR-binding peptide
SKVIMNSLQEIKPTKGIYYLITLPELDQSV

SEQ ID NO: 36711 - protein, 37 aa, Artificial Sequence; identical to SEQ ID NO: 10528
  GFR-binding peptide
  MOD_RES (1), (3), (37): Xaa is C or S
  MOD_RES (15), (16), (17), (18), (19): Xaa is A or G
  MOD_RES (20), (21), (22), (23): Xaa is A or G or is absent

SEQ ID NO: 36712 - protein, 37 aa, Artificial Sequence; identical to SEQ ID NO: 5006
  GFR-binding peptide
  MOD_RES (1), (3), (34), (35): Xaa is C or S

SEQ ID NO: 36713 - protein, 35 aa, Artificial Sequence; identical to SEQ ID NO: 10529
  GFR-binding peptide
  MOD_RES (1), (34), (35): Xaa is C or S
  MOD_RES (12), (13), (14), (15), (16): Xaa is A or G
  MOD_RES (17), (18), (19), (20): Xaa is A or G or is absent

SEQ ID NO: 36714 - protein, 31 aa, Artificial Sequence; identical to SEQ ID NO: 3074
  GFR-binding peptide
  MOD_RES (31), (31): Xaa is C or S

SEQ ID NO: 36715 - protein, 39 aa, Artificial Sequence; identical to SEQ ID NO: 10531
  GFR-binding peptide
  MOD_RES (1), (3), (37), (38): Xaa is C or S
  MOD_RES (15), (16), (17), (18), (19): Xaa is A or G
  MOD_RES (20), (21), (22), (23): Xaa is A or G or is absent

SEQ ID NO: 36716 - protein, 37 aa, Artificial Sequence; identical to SEQ ID NO: 10532
  GFR-binding peptide
  MOD_RES (34), (35): Xaa is C or S
  MOD_RES (12), (13), (14), (15), (16): Xaa is A or G
  MOD_RES (17), (18), (19), (20): Xaa is A or G or is absent

SEQ ID NO: 36717 - protein, 34 aa, Artificial Sequence; identical to SEQ ID NO: 10533
  GFR-binding peptide
  MOD_RES (31), (32): Xaa is C or S

SEQ ID NO: 36718 - protein, 34 aa, Artificial Sequence; identical to SEQ ID NO: 12444
  GFR-binding peptide
  MOD_RES (33), (34): Xaa is C or S
  MOD_RES (11), (12), (13), (14), (15): Xaa is A or G
  MOD_RES (16), (17), (18), (19): Xaa is A or G or is absent

SEQ ID NO: 36719 - protein, 33 aa, Artificial Sequence; identical to SEQ ID NO: 12445
  GFR-binding peptide
  MOD_RES (31), (32): Xaa is C or S

SEQ ID NO: 36720 - protein, 37 aa, Artificial Sequence; identical to SEQ ID NO: 12447
  GFR-binding peptide
  MOD_RES (1), (35), (36): Xaa is C or S
  MOD_RES (13), (14), (15), (16), (17): Xaa is A or G
  MOD_RES (18), (19), (20), (21): Xaa is A or G or is absent

SEQ ID NO: 36721 - protein, 41 aa, Artificial Sequence; identical to SEQ ID NO: 10534
  GFR-binding peptide
  MOD_RES (1), (35), (36): Xaa is C or S
  MOD_RES (13), (14), (15), (16), (17): Xaa is A or G
  MOD_RES (18), (19), (20), (21): Xaa is A or G or is absent

SEQ ID NO: 36722 - protein, 36 aa, Artificial Sequence; identical to SEQ ID NO: 10535
  GFR-binding peptide
  MOD_RES (31), (32): Xaa is C or S

SEQ ID NO: 36723 - protein, 38 aa, Artificial Sequence; identical to SEQ ID NO: 10536
  GFR-binding peptide
  MOD_RES (2), (4), (38): Xaa is C or S
  MOD_RES (16), (17), (18), (19), (20): Xaa is A or G
  MOD_RES (21), (22), (23), (24): Xaa is A or G or is absent

SEQ ID NO: 36724 - protein, 34 aa, Artificial Sequence; identical to SEQ ID NO: 3078
  GFR-binding peptide
  MOD_RES (33), (34): Xaa is C or S
  MOD_RES (11), (12), (13), (14), (15): Xaa is A or G
  MOD_RES (16), (17), (18), (19): Xaa is A or G or is absent

SEQ ID NO: 36725 - protein, 37 aa, Artificial Sequence; identical to SEQ ID NO: 12450
  GFR-binding peptide
  MOD_RES (1), (3), (35), (36): Xaa is C or S

SEQ ID NO: 36726 - protein, 39 aa, Artificial Sequence; identical to SEQ ID NO: 12451
  GFR-binding peptide
  MOD_RES (2), (34), (35): Xaa is C or S

SEQ ID NO: 36727 - protein, 32 aa, Artificial Sequence; identical to SEQ ID NO: 10538
  GFR-binding peptide
  MOD_RES (1), (32): Xaa is C or S

SEQ ID NO: 36728 - protein, 37 aa, Artificial Sequence
  GFR-binding peptide
  MOD_RES (2), (35), (36): Xaa is C or S
  MOD_RES (13), (14), (15), (16), (17): Xaa is A or G
  MOD_RES (18), (19), (20), (21): Xaa is A or G or is absent
KXSKVIMNSLQEXXXXXXXXXYYLITLPELDQSVXXP

SEQ ID NO: 36729 - protein, 42 aa, Artificial Sequence; identical to SEQ ID NO: 10539
  GFR-binding peptide
  MOD_RES (2), (4), (38), (39): Xaa is C or S
  MOD_RES (16), (17), (18), (19), (20): Xaa is A or G
  MOD_RES (21), (22), (23), (24): Xaa is A or G or is absent

SEQ ID NO: 36730 - protein, 37 aa, Artificial Sequence; identical to SEQ ID NO: 10541
  GFR-binding peptide
  MOD_RES (31), (32): Xaa is C or S

SEQ ID NO: 36731 - protein, 33 aa, Artificial Sequence; identical to SEQ ID NO: 10542
  GFR-binding peptide
  MOD_RES (32), (32): Xaa is C or S

SEQ ID NO: 36732 - protein, 32 aa, Artificial Sequence; identical to SEQ ID NO: 10543
  GFR-binding peptide
  MOD_RES (1), (1): Xaa is C or S

SEQ ID NO: 36733 - protein, 37 aa, Artificial Sequence; identical to SEQ ID NO: 12452
  GFR-binding peptide
  MOD_RES (2), (35), (36): Xaa is C or S
  MOD_RES (13), (14), (15), (16), (17): Xaa is A or G
  MOD_RES (18), (19), (20), (21): Xaa is A or G or is absent

SEQ ID NO: 36734 - protein, 34 aa, Artificial Sequence; identical to SEQ ID NO: 3087
  GFR-binding peptide
  MOD_RES (1), (32), (33): Xaa is C or S

SEQ ID NO: 36735 - protein, 35 aa, Artificial Sequence; identical to SEQ ID NO: 10545
  GFR-binding peptide
  MOD_RES (2), (34): Xaa is C or S

SEQ ID NO: 36736 - protein, 38 aa, Artificial Sequence; identical to SEQ ID NO: 3088
  GFR-binding peptide
  MOD_RES (1), (32), (33): Xaa is C or S

SEQ ID NO: 36737 - protein, 38 aa, Artificial Sequence; identical to SEQ ID NO: 12454
  GFR-binding peptide
  MOD_RES (2), (4), (36), (37): Xaa is C or S

SEQ ID NO: 36738 - protein, 40 aa, Artificial Sequence; identical to SEQ ID NO: 10547
  GFR-binding peptide
  MOD_RES (34), (35): Xaa is C or S
  MOD_RES (12), (13), (14), (15), (16): Xaa is A or G
  MOD_RES (17), (18), (19), (20): Xaa is A or G or is absent

SEQ ID NO: 36739 - protein, 35 aa, Artificial Sequence; identical to SEQ ID NO: 12455
  GFR-binding peptide
  MOD_RES (2), (2): Xaa is C or S
  MOD_RES (14), (15), (16), (17), (18): Xaa is A or G
  MOD_RES (19), (20), (21), (22): Xaa is A or G or is absent

SEQ ID NO: 36740 - protein, 35 aa, Artificial Sequence; identical to SEQ ID NO: 10548
  GFR-binding peptide
  MOD_RES (2), (4): Xaa is C or S

SEQ ID NO: 36741 - protein, 37 aa, Artificial Sequence; identical to SEQ ID NO: 10549
  GFR-binding peptide
  MOD_RES (34), (35): Xaa is C or S
  MOD_RES (12), (13), (14), (15), (16): Xaa is A or G
  MOD_RES (17), (18), (19), (20): Xaa is A or G or is absent

SEQ ID NO: 36742 - protein, 34 aa, Artificial Sequence; identical to SEQ ID NO: 12456
  GFR-binding peptide
  MOD_RES (1), (1): Xaa is C or S
  MOD_RES (13), (14), (15), (16), (17): Xaa is A or G
  MOD_RES (18), (19), (20), (21): Xaa is A or G or is absent

SEQ ID NO: 36743 - protein, 41 aa, Artificial Sequence; identical to SEQ ID NO: 10550
  GFR-binding peptide
  MOD_RES (2), (36), (37): Xaa is C or S
  MOD_RES (14), (15), (16), (17), (18): Xaa is A or G
  MOD_RES (19), (20), (21), (22): Xaa is A or G or is absent

SEQ ID NO: 36744 - protein, 40 aa, Artificial Sequence; identical to SEQ ID NO: 10551
  GFR-binding peptide
  MOD_RES (2), (36), (37): Xaa is C or S
  MOD_RES (14), (15), (16), (17), (18): Xaa is A or G
  MOD_RES (19), (20), (21), (22): Xaa is A or G or is absent

SEQ ID NO: 36745 - protein, 36 aa, Artificial Sequence; identical to SEQ ID NO: 5025
  GFR-binding peptide
  MOD_RES (2), (35), (36): Xaa is C or S
  MOD_RES (13), (14), (15), (16), (17): Xaa is A or G
  MOD_RES (18), (19), (20), (21): Xaa is A or G or is absent

SEQ ID NO: 36746 - protein, 39 aa, Artificial Sequence; identical to SEQ ID NO: 12458
  GFR-binding peptide
  MOD_RES (1), (34), (35): Xaa is C or S
  MOD_RES (12), (13), (14), (15), (16): Xaa is A or G
  MOD_RES (17), (18), (19), (20): Xaa is A or G or is absent

SEQ ID NO: 36747 - protein, 40 aa, Artificial Sequence; identical to SEQ ID NO: 12459
  GFR-binding peptide
  MOD_RES (2), (4), (38), (39): Xaa is C or S
  MOD_RES (16), (17), (18), (19), (20): Xaa is A or G
  MOD_RES (21), (22), (23), (24): Xaa is A or G or is absent

SEQ ID NO: 36748 - protein, 37 aa, Artificial Sequence; identical to SEQ ID NO: 10554
  GFR-binding peptide
  MOD_RES (1), (34), (35): Xaa is C or S
  MOD_RES (12), (13), (14), (15), (16): Xaa is A or G
  MOD_RES (17), (18), (19), (20): Xaa is A or G or is absent

SEQ ID NO: 36749 - protein, 40 aa, Artificial Sequence; identical to SEQ ID NO: 10555
  GFR-binding peptide
  MOD_RES (1), (3), (36), (37): Xaa is C or S
  MOD_RES (14), (15), (16), (17), (18): Xaa is A or G
  MOD_RES (19), (20), (21), (22): Xaa is A or G or is absent

SEQ ID NO: 36750 - protein, 37 aa, Artificial Sequence; identical to SEQ ID NO: 12460
  GFR-binding peptide
  MOD_RES (1), (3), (37): Xaa is C or S
  MOD_RES (15), (16), (17), (18), (19): Xaa is A or G
  MOD_RES (20), (21), (22), (23): Xaa is A or G or is absent

SEQ ID NO: 36751 - protein, 35 aa, Artificial Sequence; identical to SEQ ID NO: 10556
  GFR-binding peptide
  MOD_RES (1), (3): Xaa is C or S
  MOD_RES (14), (15), (16), (17), (18): Xaa is A or G
  MOD_RES (19), (20), (21), (22): Xaa is A or G or is absent

SEQ ID NO: 36752 - protein, 37 aa, Artificial Sequence; identical to SEQ ID NO: 10557
  GFR-binding peptide
  MOD_RES (1), (32), (33): Xaa is C or S

SEQ ID NO: 36753 - protein, 35 aa, Artificial Sequence; identical to SEQ ID NO: 10558
  GFR-binding peptide
  MOD_RES (1), (3), (34), (35): Xaa is C or S

SEQ ID NO: 36754 - protein, 35 aa, Artificial Sequence; identical to SEQ ID NO: 10559
  GFR-binding peptide
  MOD_RES (34), (35): Xaa is C or S
  MOD_RES (12), (13), (14), (15), (16): Xaa is A or G
  MOD_RES (17), (18), (19), (20): Xaa is A or G or is absent

SEQ ID NO: 36755 - protein, 38 aa, Artificial Sequence; identical to SEQ ID NO: 12463
  GFR-binding peptide
  MOD_RES (2), (34): Xaa is C or S

SEQ ID NO: 36756 - protein, 30 aa, Artificial Sequence; identical to SEQ ID NO: 10560
  GFR-binding peptide

SEQ ID NO: 36757 - protein, 36 aa, Artificial Sequence; identical to SEQ ID NO: 10561
  GFR-binding peptide
  MOD_RES (2), (4), (36): Xaa is C or S

SEQ ID NO: 36758 - protein, 42 aa, Artificial Sequence; identical to SEQ ID NO: 10562
  GFR-binding peptide
  MOD_RES (2), (36), (37): Xaa is C or S
  MOD_RES (14), (15), (16), (17), (18): Xaa is A or G
  MOD_RES (19), (20), (21), (22): Xaa is A or G or is absent

SEQ ID NO: 36759 - protein, 37 aa, Artificial Sequence; identical to SEQ ID NO: 3101
  GFR-binding peptide
  MOD_RES (1), (3), (35), (36): Xaa is C or S

SEQ ID NO: 36760 - protein, 41 aa, Artificial Sequence; identical to SEQ ID NO: 5035
  GFR-binding peptide
  MOD_RES (2), (4), (38), (39): Xaa is C or S
  MOD_RES (16), (17), (18), (19), (20): Xaa is A or G
  MOD_RES (21), (22), (23), (24): Xaa is A or G or is absent

SEQ ID NO: 36761 - protein, 34 aa, Artificial Sequence; identical to SEQ ID NO: 10565
  GFR-binding peptide
  MOD_RES (33), (34): Xaa is C or S
  MOD_RES (11), (12), (13), (14), (15): Xaa is A or G
  MOD_RES (16), (17), (18), (19): Xaa is A or G or is absent

SEQ ID NO: 36762 - protein, 33 aa, Artificial Sequence; identical to SEQ ID NO: 12466
  GFR-binding peptide
  MOD_RES (33), (33): Xaa is C or S
  MOD_RES (11), (12), (13), (14), (15): Xaa is A or G
  MOD_RES (16), (17), (18), (19): Xaa is A or G or is absent

SEQ ID NO: 36763 - protein, 33 aa, Artificial Sequence; identical to SEQ ID NO: 12467
  GFR-binding peptide
  MOD_RES (2), (2): Xaa is C or S

SEQ ID NO: 36764 - protein, 35 aa, Artificial Sequence; identical to SEQ ID NO: 10567
  GFR-binding peptide
  MOD_RES (2), (34), (35): Xaa is C or S

SEQ ID NO: 36765 - protein, 39 aa, Artificial Sequence; identical to SEQ ID NO: 10568
  GFR-binding peptide
  MOD_RES (1), (35): Xaa is C or S
  MOD_RES (13), (14), (15), (16), (17): Xaa is A or G
  MOD_RES (18), (19), (20), (21): Xaa is A or G or is absent

SEQ ID NO: 36766 - protein, 39 aa, Artificial Sequence; identical to SEQ ID NO: 10569
  GFR-binding peptide
  MOD_RES (1), (3), (34), (35): Xaa is C or S

SEQ ID NO: 36767 - protein, 32 aa, Artificial Sequence; identical to SEQ ID NO: 12468
  GFR-binding peptide
  MOD_RES (1), (1): Xaa is C or S

SEQ ID NO: 36768 - protein, 38 aa, Artificial Sequence; identical to SEQ ID NO: 12469
  GFR-binding peptide
  MOD_RES (33), (34): Xaa is C or S
  MOD_RES (11), (12), (13), (14), (15): Xaa is A or G
  MOD_RES (16), (17), (18), (19): Xaa is A or G or is absent

SEQ ID NO: 36769 - protein, 38 aa, Artificial Sequence; identical to SEQ ID NO: 12470
  GFR-binding peptide
  MOD_RES (2), (34), (35): Xaa is C or S

SEQ ID NO: 36770 - protein, 35 aa, Artificial Sequence
  GFR-binding peptide
  MOD_RES (1), (34), (35): Xaa is C or S
  MOD_RES (12), (13), (14), (15), (16): Xaa is A or G
  MOD_RES (17), (18), (19), (20): Xaa is A or G or is absent
XSKVIMNSLQEXXXXXXXXXYYLITLPELDQSVXX

SEQ ID NO: 36771 - protein, 38 aa, Artificial Sequence; identical to SEQ ID NO: 12471
  GFR-binding peptide
  MOD_RES (2), (36): Xaa is C or S
  MOD_RES (14), (15), (16), (17), (18): Xaa is A or G
  MOD_RES (19), (20), (21), (22): Xaa is A or G or is absent

SEQ ID NO: 36772 - protein, 35 aa, Artificial Sequence; identical to SEQ ID NO: 12472
  GFR-binding peptide
  MOD_RES (1), (33): Xaa is C or S

SEQ ID NO: 36773 - protein, 33 aa, Artificial Sequence; identical to SEQ ID NO: 12473
  GFR-binding peptide
  MOD_RES (31), (32): Xaa is C or S

SEQ ID NO: 36774 - protein, 37 aa, Artificial Sequence; identical to SEQ ID NO: 5044
  GFR-binding peptide
  MOD_RES (32), (33): Xaa is C or S

SEQ ID NO: 36775 - protein, 32 aa, Artificial Sequence; identical to SEQ ID NO: 12475
  GFR-binding peptide
  MOD_RES (11), (12), (13), (14), (15): Xaa is A or G
  MOD_RES (16), (17), (18), (19): Xaa is A or G or is absent

SEQ ID NO: 36776 - protein, 36 aa, Artificial Sequence; identical to SEQ ID NO: 10576
  GFR-binding peptide
  MOD_RES (34), (34): Xaa is C or S
  MOD_RES (12), (13), (14), (15), (16): Xaa is A or G
  MOD_RES (17), (18), (19), (20): Xaa is A or G or is absent

SEQ ID NO: 36777 - protein, 37 aa, Artificial Sequence; identical to SEQ ID NO: 3124
  GFR-binding peptide
  MOD_RES (2), (4), (37): Xaa is C or S
  MOD_RES (15), (16), (17), (18), (19): Xaa is A or G
  MOD_RES (20), (21), (22), (23): Xaa is A or G or is absent

SEQ ID NO: 36778 - protein, 38 aa, Artificial Sequence; identical to SEQ ID NO: 12476
  GFR-binding peptide
  MOD_RES (32), (32): Xaa is C or S

SEQ ID NO: 36779 - protein, 40 aa, Artificial Sequence; identical to SEQ ID NO: 12477
  GFR-binding peptide
  MOD_RES (1), (3), (35), (36): Xaa is C or S

SEQ ID NO: 36780 - protein, 35 aa, Artificial Sequence; identical to SEQ ID NO: 12478
  GFR-binding peptide
  MOD_RES (32), (33): Xaa is C or S

SEQ ID NO: 36781 - protein, 39 aa, Artificial Sequence; identical to SEQ ID NO: 10579
  GFR-binding peptide
  MOD_RES (33), (33): Xaa is C or S
  MOD_RES (11), (12), (13), (14), (15): Xaa is A or G
  MOD_RES (16), (17), (18), (19): Xaa is A or G or is absent

SEQ ID NO: 36782 - protein, 35 aa, Artificial Sequence; identical to SEQ ID NO: 12479
  GFR-binding peptide
  MOD_RES (2), (35): Xaa is C or S
  MOD_RES (13), (14), (15), (16), (17): Xaa is A or G
  MOD_RES (18), (19), (20), (21): Xaa is A or G or is absent

SEQ ID NO: 36783 - protein, 32 aa, Artificial Sequence; identical to SEQ ID NO: 10580
  GFR-binding peptide
  MOD_RES (32), (32): Xaa is C or S

SEQ ID NO: 36784 - protein, 43 aa, Artificial Sequence; identical to SEQ ID NO: 10581
  GFR-binding peptide
  MOD_RES (1), (3), (37), (38): Xaa is C or S
  MOD_RES (15), (16), (17), (18), (19): Xaa is A or G
  MOD_RES (20), (21), (22), (23): Xaa is A or G or is absent

SEQ ID NO: 36785 - protein, 41 aa, Artificial Sequence; identical to SEQ ID NO: 10583
  GFR-binding peptide
  MOD_RES (2), (4), (36), (37): Xaa is C or S

SEQ ID NO: 36786 - protein, 39 aa, Artificial Sequence; identical to SEQ ID NO: 10584
  GFR-binding peptide
  MOD_RES (2), (4), (38), (39): Xaa is C or S
  MOD_RES (16), (17), (18), (19), (20): Xaa is A or G
  MOD_RES (21), (22), (23), (24): Xaa is A or G or is absent

SEQ ID NO: 36787 - protein, 35 aa, Artificial Sequence; identical to SEQ ID NO: 12480
  GFR-binding peptide
  MOD_RES (1), (35): Xaa is C or S
  MOD_RES (13), (14), (15), (16), (17): Xaa is A or G
  MOD_RES (18), (19), (20), (21): Xaa is A or G or is absent

SEQ ID NO: 36788 - protein, 35 aa, Artificial Sequence; identical to SEQ ID NO: 12481
  GFR-binding peptide
  MOD_RES (31), (32): Xaa is C or S

SEQ ID NO: 36789 - protein, 42 aa, Artificial Sequence; identical to SEQ ID NO: 10585
  GFR-binding peptide
  MOD_RES (2), (4), (38), (39): Xaa is C or S
  MOD_RES (16), (17), (18), (19), (20): Xaa is A or G
  MOD_RES (21), (22), (23), (24): Xaa is A or G or is absent

SEQ ID NO: 36790 - protein, 35 aa, Artificial Sequence; identical to SEQ ID NO: 12483
  GFR-binding peptide
  MOD_RES (2), (33), (34): Xaa is C or S

SEQ ID NO: 36791 - protein, 44 aa, Artificial Sequence; identical to SEQ ID NO: 12486
  GFR-binding peptide
  MOD_RES (2), (4), (38): Xaa is C or S
  MOD_RES (16), (17), (18), (19), (20): Xaa is A or G
  MOD_RES (21), (22), (23), (24): Xaa is A or G or is absent

SEQ ID NO: 36792 - protein, 33 aa, Artificial Sequence; identical to SEQ ID NO: 10587
  GFR-binding peptide
  MOD_RES (1), (33): Xaa is C or S

SEQ ID NO: 36793 - protein, 43 aa, Artificial Sequence; identical to SEQ ID NO: 10588
  GFR-binding peptide
  MOD_RES (2), (4), (38), (39): Xaa is C or S
  MOD_RES (16), (17), (18), (19), (20): Xaa is A or G
  MOD_RES (21), (22), (23), (24): Xaa is A or G or is absent

SEQ ID NO: 36794 - protein, 39 aa, Artificial Sequence; identical to SEQ ID NO: 10590
  GFR-binding peptide
  MOD_RES (1), (3), (37), (38): Xaa is C or S
  MOD_RES (15), (16), (17), (18), (19): Xaa is A or G
  MOD_RES (20), (21), (22), (23): Xaa is A or G or is absent

SEQ ID NO: 36795 - protein, 38 aa, Artificial Sequence; identical to SEQ ID NO: 3138
  GFR-binding peptide
  MOD_RES (34), (35): Xaa is C or S
  MOD_RES (12), (13), (14), (15), (16): Xaa is A or G
  MOD_RES (17), (18), (19), (20): Xaa is A or G or is absent

SEQ ID NO: 36796 - protein, 40 aa, Artificial Sequence; identical to SEQ ID NO: 12488
  GFR-binding peptide
  MOD_RES (2), (4), (36), (37): Xaa is C or S

SEQ ID NO: 36797 - protein, 39 aa, Artificial Sequence; identical to SEQ ID NO: 10593
  GFR-binding peptide
  MOD_RES (2), (4), (36), (37): Xaa is C or S

SEQ ID NO: 36798 - protein, 41 aa, Artificial Sequence; identical to SEQ ID NO: 10594
  GFR-binding peptide
  MOD_RES (1), (3), (37), (38): Xaa is C or S
  MOD_RES (15), (16), (17), (18), (19): Xaa is A or G
  MOD_RES (20), (21), (22), (23): Xaa is A or G or is absent

SEQ ID NO: 36799 - protein, 36 aa, Artificial Sequence; identical to SEQ ID NO: 12490
  GFR-binding peptide
  MOD_RES (32), (33): Xaa is C or S

SEQ ID NO: 36800 - protein, 37 aa, Artificial Sequence; identical to SEQ ID NO: 10595
  GFR-binding peptide
  MOD_RES (2), (4): Xaa is C or S
  MOD_RES (16), (17), (18), (19), (20): Xaa is A or G
  MOD_RES (21), (22), (23), (24): Xaa is A or G or is absent

SEQ ID NO: 36801 - protein, 36 aa, Artificial Sequence; identical to SEQ ID NO: 5060
  GFR-binding peptide
  MOD_RES (31), (32): Xaa is C or S

SEQ ID NO: 36802 - protein, 42 aa, Artificial Sequence; identical to SEQ ID NO: 12492
  GFR-binding peptide
  MOD_RES (2), (4), (38), (39): Xaa is C or S
  MOD_RES (16), (17), (18), (19), (20): Xaa is A or G
  MOD_RES (21), (22), (23), (24): Xaa is A or G or is absent

SEQ ID NO: 36803 - protein, 36 aa, Artificial Sequence; identical to SEQ ID NO: 12493
  GFR-binding peptide
  MOD_RES (2), (35), (36): Xaa is C or S
  MOD_RES (13), (14), (15), (16), (17): Xaa is A or G
  MOD_RES (18), (19), (20), (21): Xaa is A or G or is absent

SEQ ID NO: 36804 - protein, 35 aa, Artificial Sequence; identical to SEQ ID NO: 12494
  GFR-binding peptide
  MOD_RES (2), (33), (34): Xaa is C or S

SEQ ID NO: 36805 - protein, 36 aa, Artificial Sequence; identical to SEQ ID NO: 12495
  GFR-binding peptide
  MOD_RES (32), (33): Xaa is C or S

SEQ ID NO: 36806 - protein, 36 aa, Artificial Sequence; identical to SEQ ID NO: 12496
  GFR-binding peptide
  MOD_RES (31), (31): Xaa is C or S

SEQ ID NO: 36807 - protein, 38 aa, Artificial Sequence; identical to SEQ ID NO: 12497
  GFR-binding peptide
  MOD_RES (1), (3), (37), (38): Xaa is C or S
  MOD_RES (15), (16), (17), (18), (19): Xaa is A or G
  MOD_RES (20), (21), (22), (23): Xaa is A or G or is absent

SEQ ID NO: 36808 - protein, 31 aa, Artificial Sequence; identical to SEQ ID NO: 12498
  GFR-binding peptide
  MOD_RES (31), (31): Xaa is C or S

SEQ ID NO: 36809 - protein, 37 aa, Artificial Sequence; identical to SEQ ID NO: 12500
  GFR-binding peptide
  MOD_RES (31), (32): Xaa is C or S

SEQ ID NO: 36810 - protein, 42 aa, Artificial Sequence; identical to SEQ ID NO: 12501
  GFR-binding peptide
  MOD_RES (2), (36), (37): Xaa is C or S
  MOD_RES (14), (15), (16), (17), (18): Xaa is A or G
  MOD_RES (19), (20), (21), (22): Xaa is A or G or is absent

SEQ ID NO: 36811 - protein, 35 aa, Artificial Sequence; identical to SEQ ID NO: 10597
  GFR-binding peptide
  MOD_RES (31), (31): Xaa is C or S

SEQ ID NO: 36812 - protein, 39 aa, Artificial Sequence; identical to SEQ ID NO: 10598
  GFR-binding peptide
  MOD_RES (2), (34), (35): Xaa is C or S

SEQ ID NO: 36813 - protein, 32 aa, Artificial Sequence; identical to SEQ ID NO: 10600
  GFR-binding peptide
  MOD_RES (2), (2): Xaa is C or S

SEQ ID NO: 36814 - protein, 34 aa, Artificial Sequence; identical to SEQ ID NO: 12502
  GFR-binding peptide
  MOD_RES (1), (33), (34): Xaa is C or S

SEQ ID NO: 36815 - protein, 42 aa, Artificial Sequence; identical to SEQ ID NO: 10601
  GFR-binding peptide
  MOD_RES (2), (4), (36), (37): Xaa is C or S

SEQ ID NO: 36816 - protein, 40 aa, Artificial Sequence; identical to SEQ ID NO: 10602
  GFR-binding peptide
  MOD_RES (2), (35), (36): Xaa is C or S
  MOD_RES (13), (14), (15), (16), (17): Xaa is A or G
  MOD_RES (18), (19), (20), (21): Xaa is A or G or is absent

SEQ ID NO: 36817 - protein, 31 aa, Artificial Sequence; identical to SEQ ID NO: 3149
  GFR-binding peptide
  MOD_RES (31), (31): Xaa is C or S

SEQ ID NO: 36818 - protein, 36 aa, Artificial Sequence; identical to SEQ ID NO: 10604
  GFR-binding peptide
  MOD_RES (1), (3): Xaa is C or S
  MOD_RES (15), (16), (17), (18), (19): Xaa is A or G
  MOD_RES (20), (21), (22), (23): Xaa is A or G or is absent

SEQ ID NO: 36819 - protein, 35 aa, Artificial Sequence; identical to SEQ ID NO: 12503
  GFR-binding peptide
  MOD_RES (33), (34): Xaa is C or S
  MOD_RES (11), (12), (13), (14), (15): Xaa is A or G
  MOD_RES (16), (17), (18), (19): Xaa is A or G or is absent

SEQ ID NO: 36820 - protein, 33 aa, Artificial Sequence; identical to SEQ ID NO: 12504
  GFR-binding peptide
  MOD_RES (1), (33): Xaa is C or S

SEQ ID NO: 36821 - protein, 35 aa, Artificial Sequence; identical to SEQ ID NO: 10605
  GFR-binding peptide
  MOD_RES (2), (2): Xaa is C or S
  MOD_RES (14), (15), (16), (17), (18): Xaa is A or G
  MOD_RES (19), (20), (21), (22): Xaa is A or G or is absent

SEQ ID NO: 36822 - protein, 39 aa, Artificial Sequence; identical to SEQ ID NO: 12506
  GFR-binding peptide
  MOD_RES (2), (36), (37): Xaa is C or S
  MOD_RES (14), (15), (16), (17), (18): Xaa is A or G
  MOD_RES (19), (20), (21), (22): Xaa is A or G or is absent

SEQ ID NO: 36823 - protein, 32 aa, Artificial Sequence; identical to SEQ ID NO: 12507
  GFR-binding peptide
  MOD_RES (1), (32): Xaa is C or S

SEQ ID NO: 36824 - protein, 41 aa, Artificial Sequence; identical to SEQ ID NO: 12508
  GFR-binding peptide
  MOD_RES (1), (3), (36), (37): Xaa is C or S
  MOD_RES (14), (15), (16), (17), (18): Xaa is A or G
  MOD_RES (19), (20), (21), (22): Xaa is A or G or is absent

SEQ ID NO: 36825 - protein, 35 aa, Artificial Sequence; identical to SEQ ID NO: 12509
  GFR-binding peptide
  MOD_RES (33), (33): Xaa is C or S
  MOD_RES (11), (12), (13), (14), (15): Xaa is A or G
  MOD_RES (16), (17), (18), (19): Xaa is A or G or is absent

SEQ ID NO: 36826 - protein, 40 aa, Artificial Sequence; identical to SEQ ID NO: 12510
  GFR-binding peptide
  MOD_RES (2), (36), (37): Xaa is C or S
  MOD_RES (14), (15), (16), (17), (18): Xaa is A or G
  MOD_RES (19), (20), (21), (22): Xaa is A or G or is absent

SEQ ID NO: 36827 - protein, 40 aa, Artificial Sequence; identical to SEQ ID NO: 10606
  GFR-binding peptide
  MOD_RES (2), (4), (38): Xaa is C or S
  MOD_RES (16), (17), (18), (19), (20): Xaa is A or G
  MOD_RES (21), (22), (23), (24): Xaa is A or G or is absent

SEQ ID NO: 36828 - protein, 41 aa, Artificial Sequence; identical to SEQ ID NO: 10607
  GFR-binding peptide
  MOD_RES (2), (4), (35), (36): Xaa is C or S

SEQ ID NO: 36829 - protein, 37 aa, Artificial Sequence; identical to SEQ ID NO: 12511
  GFR-binding peptide
  MOD_RES (1), (33), (34): Xaa is C or S

SEQ ID NO: 36830 - protein, 39 aa, Artificial Sequence; identical to SEQ ID NO: 12512
  GFR-binding peptide
  MOD_RES (2), (34), (35): Xaa is C or S

SEQ ID NO: 36831 - protein, 38 aa, Artificial Sequence; identical to SEQ ID NO: 10608
  GFR-binding peptide
  MOD_RES (2), (34), (35): Xaa is C or S

SEQ ID NO: 36832 - protein, 33 aa, Artificial Sequence; identical to SEQ ID NO: 12513
  GFR-binding peptide
  MOD_RES (33), (33): Xaa is C or S
  MOD_RES (11), (12), (13), (14), (15): Xaa is A or G
  MOD_RES (16), (17), (18), (19): Xaa is A or G or is absent

SEQ ID NO: 36833 - protein, 36 aa, Artificial Sequence; identical to SEQ ID NO: 12515
  GFR-binding peptide
  MOD_RES (31), (32): Xaa is C or S

SEQ ID NO: 36834 - protein, 35 aa, Artificial Sequence; identical to SEQ ID NO: 10610
  GFR-binding peptide
  MOD_RES (1), (3), (35): Xaa is C or S

SEQ ID NO: 36835 - protein, 37 aa, Artificial Sequence; identical to SEQ ID NO: 12516
  GFR-binding peptide
  MOD_RES (31), (32): Xaa is C or S

SEQ ID NO: 36836 - protein, 35 aa, Artificial Sequence; identical to SEQ ID NO: 10611
  GFR-binding peptide
  MOD_RES (1), (33), (34): Xaa is C or S

SEQ ID NO: 36837 - protein, 39 aa, Artificial Sequence; identical to SEQ ID NO: 12517
  GFR-binding peptide
  MOD_RES (1), (3), (37), (38): Xaa is C or S
  MOD_RES (15), (16), (17), (18), (19): Xaa is A or G
  MOD_RES (20), (21), (22), (23): Xaa is A or G or is absent

SEQ ID NO: 36838 - protein, 38 aa, Artificial Sequence; identical to SEQ ID NO: 10612
  GFR-binding peptide
  MOD_RES (1), (3), (35): Xaa is C or S

SEQ ID NO: 36839 - protein, 40 aa, Artificial Sequence; identical to SEQ ID NO: 10613
  GFR-binding peptide
  MOD_RES (2), (34), (35): Xaa is C or S

SEQ ID NO: 36840 - protein, 40 aa, Artificial Sequence; identical to SEQ ID NO: 10615
  GFR-binding peptide
  MOD_RES (1), (3), (37), (38): Xaa is C or S
  MOD_RES (15), (16), (17), (18), (19): Xaa is A or G
  MOD_RES (20), (21), (22), (23): Xaa is A or G or is absent

SEQ ID NO: 36841 - protein, 34 aa, Artificial Sequence; identical to SEQ ID NO: 12520
  GFR-binding peptide
  MOD_RES (2), (34): Xaa is C or S

SEQ ID NO: 36842 - protein, 39 aa, Artificial Sequence; identical to SEQ ID NO: 12521
  GFR-binding peptide
  MOD_RES (1), (35): Xaa is C or S
  MOD_RES (13), (14), (15), (16), (17): Xaa is A or G
  MOD_RES (18), (19), (20), (21): Xaa is A or G or is absent

SEQ ID NO: 36843 - protein, 36 aa, Artificial Sequence; identical to SEQ ID NO: 10616
  GFR-binding peptide
  MOD_RES (1), (34), (35): Xaa is C or S
  MOD_RES (12), (13), (14), (15), (16): Xaa is A or G
  MOD_RES (17), (18), (19), (20): Xaa is A or G or is absent

SEQ ID NO: 36844 - protein, 37 aa, Artificial Sequence; identical to SEQ ID NO: 10617
  GFR-binding peptide
  MOD_RES (1), (33), (34): Xaa is C or S

SEQ ID NO: 36845 - protein, 38 aa, Artificial Sequence; identical to SEQ ID NO: 12522
  GFR-binding peptide
  MOD_RES (1), (34), (35): Xaa is C or S
  MOD_RES (12), (13), (14), (15), (16): Xaa is A or G
  MOD_RES (17), (18), (19), (20): Xaa is A or G or is absent

SEQ ID NO: 36846 - protein, 36 aa, Artificial Sequence; identical to SEQ ID NO: 12524
  GFR-binding peptide
  MOD_RES (32), (33): Xaa is C or S

SEQ ID NO: 36847 - protein, 42 aa, Artificial Sequence; identical to SEQ ID NO: 12525
  GFR-binding peptide
  MOD_RES (1), (3), (36), (37): Xaa is C or S
  MOD_RES (14), (15), (16), (17), (18): Xaa is A or G
  MOD_RES (19), (20), (21), (22): Xaa is A or G or is absent

SEQ ID NO: 36848 - protein, 36 aa, Artificial Sequence; identical to SEQ ID NO: 5098
  GFR-binding peptide
  MOD_RES (1), (32), (33): Xaa is C or S

SEQ ID NO: 36849 - protein, 35 aa, Artificial Sequence; identical to SEQ ID NO: 12528
  GFR-binding peptide
  MOD_RES (2), (2): Xaa is C or S
  MOD_RES (14), (15), (16), (17), (18): Xaa is A or G
  MOD_RES (19), (20), (21), (22): Xaa is A or G or is absent

SEQ ID NO: 36850 - protein, 37 aa, Artificial Sequence; identical to SEQ ID NO: 12529
  GFR-binding peptide
  MOD_RES (33), (34): Xaa is C or S
  MOD_RES (11), (12), (13), (14), (15): Xaa is A or G
  MOD_RES (16), (17), (18), (19): Xaa is A or G or is absent

SEQ ID NO: 36851 - protein, 40 aa, Artificial Sequence; identical to SEQ ID NO: 10618
  GFR-binding peptide
  MOD_RES (1), (3), (34), (35): Xaa is C or S

SEQ ID NO: 36852 - protein, 35 aa, Artificial Sequence; identical to SEQ ID NO: 10619
  GFR-binding peptide
  MOD_RES (1), (3), (35): Xaa is C or S

SEQ ID NO: 36853 - protein, 32 aa, Artificial Sequence; identical to SEQ ID NO: 10620
  GFR-binding peptide
  MOD_RES (31), (32): Xaa is C or S

SEQ ID NO: 36854 - protein, 35 aa, Artificial Sequence; identical to SEQ ID NO: 3170
  GFR-binding peptide
  MOD_RES (1), (3): Xaa is C or S
  MOD_RES (14), (15), (16), (17), (18): Xaa is A or G
  MOD_RES (19), (20), (21), (22): Xaa is A or G or is absent

SEQ ID NO: 36855 - protein, 36 aa, Artificial Sequence; identical to SEQ ID NO: 3171
  GFR-binding peptide
  MOD_RES (2), (4), (35), (36): Xaa is C or S

SEQ ID NO: 36856 - protein, 36 aa, Artificial Sequence; identical to SEQ ID NO: 12530
  GFR-binding peptide
  MOD_RES (1), (3): Xaa is C or S
  MOD_RES (15), (16), (17), (18), (19): Xaa is A or G
  MOD_RES (20), (21), (22), (23): Xaa is A or G or is absent

SEQ ID NO: 36857 - protein, 38 aa, Artificial Sequence; identical to SEQ ID NO: 12531
  GFR-binding peptide
  MOD_RES (2), (4), (36), (37): Xaa is C or S

SEQ ID NO: 36858 - protein, 38 aa, Artificial Sequence; identical to SEQ ID NO: 5102
  GFR-binding peptide
  MOD_RES (1), (35), (36): Xaa is C or S
  MOD_RES (13), (14), (15), (16), (17): Xaa is A or G
  MOD_RES (18), (19), (20), (21): Xaa is A or G or is absent

SEQ ID NO: 36859 - protein, 39 aa, Artificial Sequence; identical to SEQ ID NO: 10624
  GFR-binding peptide
  MOD_RES (2), (4), (37), (38): Xaa is C or S
  MOD_RES (15), (16), (17), (18), (19): Xaa is A or G
  MOD_RES (20), (21), (22), (23): Xaa is A or G or is absent

SEQ ID NO: 36860 - protein, 37 aa, Artificial Sequence; identical to SEQ ID NO: 12533
  GFR-binding peptide
  MOD_RES (1), (3), (37): Xaa is C or S
  MOD_RES (15), (16), (17), (18), (19): Xaa is A or G
  MOD_RES (20), (21), (22), (23): Xaa is A or G or is absent

SEQ ID NO: 36861 - protein, 38 aa, Artificial Sequence; identical to SEQ ID NO: 10625
  GFR-binding peptide
  MOD_RES (2), (33), (34): Xaa is C or S

SEQ ID NO: 36862 - protein, 40 aa, Artificial Sequence
  GFR-binding peptide
  MOD_RES (1), (3), (36), (37): Xaa is C or S
  MOD_RES (14), (15), (16), (17), (18): Xaa is A or G
  MOD_RES (19), (20), (21), (22): Xaa is A or G or is absent
XKXSKVIMNSLQEXXXXXXXXXYYLITLPELDQSVXXPSA

SEQ ID NO: 36863 - protein, 38 aa, Artificial Sequence; identical to SEQ ID NO: 5103
  GFR-binding peptide
  MOD_RES (33), (34): Xaa is C or S
  MOD_RES (11), (12), (13), (14), (15): Xaa is A or G
  MOD_RES (16), (17), (18), (19): Xaa is A or G or is absent

SEQ ID NO: 36864 - protein, 30 aa, Artificial Sequence; identical to SEQ ID NO: 5105
  GFR-binding peptide

SEQ ID NO: 36865 - protein, 31 aa, Artificial Sequence; identical to SEQ ID NO: 12537
  GFR-binding peptide
  MOD_RES (31), (31): Xaa is C or S

SEQ ID NO: 36866 - protein, 34 aa, Artificial Sequence; identical to SEQ ID NO: 10627
  GFR-binding peptide
  MOD_RES (1), (3), (34): Xaa is C or S

SEQ ID NO: 36867 - protein, 34 aa, Artificial Sequence; identical to SEQ ID NO: 12538
  GFR-binding peptide
  MOD_RES (31), (32): Xaa is C or S

SEQ ID NO: 36868 - protein, 37 aa, Artificial Sequence; identical to SEQ ID NO: 10628
  GFR-binding peptide
  MOD_RES (2), (4): Xaa is C or S
  MOD_RES (16), (17), (18), (19), (20): Xaa is A or G
  MOD_RES (21), (22), (23), (24): Xaa is A or G or is absent

SEQ ID NO: 36869 - protein, 37 aa, Artificial Sequence; identical to SEQ ID NO: 10631
  GFR-binding peptide
  MOD_RES (33), (34): Xaa is C or S
  MOD_RES (11), (12), (13), (14), (15): Xaa is A or G
  MOD_RES (16), (17), (18), (19): Xaa is A or G or is absent

SEQ ID NO: 36870 - protein, 39 aa, Artificial Sequence; identical to SEQ ID NO: 10632
  GFR-binding peptide
  MOD_RES (33), (34): Xaa is C or S
  MOD_RES (11), (12), (13), (14), (15): Xaa is A or G
  MOD_RES (16), (17), (18), (19): Xaa is A or G or is absent

SEQ ID NO: 36871 - protein, 34 aa, Artificial Sequence; identical to SEQ ID NO: 12541
  GFR-binding peptide
  MOD_RES (2), (34): Xaa is C or S

SEQ ID NO: 36872 - protein, 33 aa, Artificial Sequence; identical to SEQ ID NO: 12543
  GFR-binding peptide
  MOD_RES (1), (33): Xaa is C or S

SEQ ID NO: 36873 - protein, 40 aa, Artificial Sequence; identical to SEQ ID NO: 10634
  GFR-binding peptide
  MOD_RES (1), (3), (36), (37): Xaa is C or S
  MOD_RES (14), (15), (16), (17), (18): Xaa is A or G
  MOD_RES (19), (20), (21), (22): Xaa is A or G or is absent

SEQ ID NO: 36874 - protein, 35 aa, Artificial Sequence; identical to SEQ ID NO: 5116
  GFR-binding peptide
  MOD_RES (32), (33): Xaa is C or S

SEQ ID NO: 36875 - protein, 32 aa, Artificial Sequence; identical to SEQ ID NO: 5117
  GFR-binding peptide
  MOD_RES (31), (32): Xaa is C or S

SEQ ID NO: 36876 - protein, 39 aa, Artificial Sequence; identical to SEQ ID NO: 12547
  GFR-binding peptide
  MOD_RES (2), (34), (35): Xaa is C or S

SEQ ID NO: 36877 - protein, 39 aa, Artificial Sequence; identical to SEQ ID NO: 12548
  GFR-binding peptide
  MOD_RES (2), (4), (36), (37): Xaa is C or S

SEQ ID NO: 36878 - protein, 35 aa, Artificial Sequence; identical to SEQ ID NO: 12549
  GFR-binding peptide
  MOD_RES (33), (34): Xaa is C or S
  MOD_RES (11), (12), (13), (14), (15): Xaa is A or G
  MOD_RES (16), (17), (18), (19): Xaa is A or G or is absent

SEQ ID NO: 36879 - protein, 36 aa, Artificial Sequence; identical to SEQ ID NO: 3189
  GFR-binding peptide
  MOD_RES (1), (3), (35), (36): Xaa is C or S

SEQ ID NO: 36880 - protein, 42 aa, Artificial Sequence; identical to SEQ ID NO: 10637
  GFR-binding peptide
  MOD_RES (2), (36), (37): Xaa is C or S
  MOD_RES (14), (15), (16), (17), (18): Xaa is A or G
  MOD_RES (19), (20), (21), (22): Xaa is A or G or is absent

SEQ ID NO: 36881 - protein, 31 aa, Artificial Sequence; identical to SEQ ID NO: 10638
  GFR-binding peptide
  MOD_RES (1), (1): Xaa is C or S

SEQ ID NO: 36882 - protein, 38 aa, Artificial Sequence; identical to SEQ ID NO: 12550
  GFR-binding peptide
  MOD_RES (2), (34), (35): Xaa is C or S

SEQ ID NO: 36883 - protein, 43 aa, Artificial Sequence; identical to SEQ ID NO: 12551
  GFR-binding peptide
  MOD_RES (2), (4), (38), (39): Xaa is C or S
  MOD_RES (16), (17), (18), (19), (20): Xaa is A or G
  MOD_RES (21), (22), (23), (24): Xaa is A or G or is absent

SEQ ID NO: 36884 - protein, 34 aa, Artificial Sequence; identical to SEQ ID NO: 12552
  GFR-binding peptide
  MOD_RES (2), (2): Xaa is C or S
  MOD_RES (13), (14), (15), (16), (17): Xaa is A or G
  MOD_RES (18), (19), (20), (21): Xaa is A or G or is absent

SEQ ID NO: 36885 - protein, 35 aa, Artificial Sequence; identical to SEQ ID NO: 12553
  GFR-binding peptide
  MOD_RES (33), (33): Xaa is C or S
  MOD_RES (11), (12), (13), (14), (15): Xaa is A or G
  MOD_RES (16), (17), (18), (19): Xaa is A or G or is absent

SEQ ID NO: 36886 - protein, 44 aa, Artificial Sequence; identical to SEQ ID NO: 12554
  GFR-binding peptide
  MOD_RES (2), (4), (38), (39): Xaa is C or S
  MOD_RES (16), (17), (18), (19), (20): Xaa is A or G
  MOD_RES (21), (22), (23), (24): Xaa is A or G or is absent

SEQ ID NO: 36887 - protein, 41 aa, Artificial Sequence; identical to SEQ ID NO: 3195
  GFR-binding peptide
  MOD_RES (1), (3), (36), (37): Xaa is C or S
  MOD_RES (14), (15), (16), (17), (18): Xaa is A or G
  MOD_RES (19), (20), (21), (22): Xaa is A or G or is absent

SEQ ID NO: 36888 - protein, 31 aa, Artificial Sequence; identical to SEQ ID NO: 12555
  GFR-binding peptide
  MOD_RES (1), (1): Xaa is C or S

SEQ ID NO: 36889 - protein, 36 aa, Artificial Sequence; identical to SEQ ID NO: 5122
  GFR-binding peptide
  MOD_RES (33), (34): Xaa is C or S
  MOD_RES (11), (12), (13), (14), (15): Xaa is A or G
  MOD_RES (16), (17), (18), (19): Xaa is A or G or is absent

SEQ ID NO: 36890 - protein, 39 aa, Artificial Sequence; identical to SEQ ID NO: 12557
  GFR-binding peptide
  MOD_RES (1), (35), (36): Xaa is C or S
  MOD_RES (13), (14), (15), (16), (17): Xaa is A or G
  MOD_RES (18), (19), (20), (21): Xaa is A or G or is absent

SEQ ID NO: 36891 - protein, 35 aa, Artificial Sequence; identical to SEQ ID NO: 12558
  GFR-binding peptide
  MOD_RES (1), (3), (35): Xaa is C or S

SEQ ID NO: 36892 - protein, 36 aa, Artificial Sequence; identical to SEQ ID NO: 10641
  GFR-binding peptide
  MOD_RES (1), (35): Xaa is C or S
  MOD_RES (13), (14), (15), (16), (17): Xaa is A or G
  MOD_RES (18), (19), (20), (21): Xaa is A or G or is absent

SEQ ID NO: 36893 - protein, 34 aa, Artificial Sequence; identical to SEQ ID NO: 5124
  GFR-binding peptide
  MOD_RES (33), (34): Xaa is C or S
  MOD_RES (11), (12), (13), (14), (15): Xaa is A or G
  MOD_RES (16), (17), (18), (19): Xaa is A or G or is absent

SEQ ID NO: 36894 - protein, 38 aa, Artificial Sequence; identical to SEQ ID NO: 12560
  GFR-binding peptide
  MOD_RES (1), (3), (37), (38): Xaa is C or S
  MOD_RES (15), (16), (17), (18), (19): Xaa is A or G
  MOD_RES (20), (21), (22), (23): Xaa is A or G or is absent

SEQ ID NO: 36895 - protein, 38 aa, Artificial Sequence; identical to SEQ ID NO: 12561
  GFR-binding peptide
  MOD_RES (1), (33), (34): Xaa is C or S

SEQ ID NO: 36896 - protein, 40 aa, Artificial Sequence; identical to SEQ ID NO: 12562
  GFR-binding peptide
  MOD_RES (1), (35): Xaa is C or S
  MOD_RES (13), (14), (15), (16), (17): Xaa is A or G
  MOD_RES (18), (19), (20), (21): Xaa is A or G or is absent

SEQ ID NO: 36897 - protein, 37 aa, Artificial Sequence; identical to SEQ ID NO: 10643
  GFR-binding peptide
  MOD_RES (32), (33): Xaa is C or S

SEQ ID NO: 36898 - protein, 37 aa, Artificial Sequence; identical to SEQ ID NO: 12563
  GFR-binding peptide
  MOD_RES (2), (4), (36), (37): Xaa is C or S

SEQ ID NO: 36899 - protein, 34 aa, Artificial Sequence; identical to SEQ ID NO: 12564
  GFR-binding peptide
  MOD_RES (2), (2): Xaa is C or S
  MOD_RES (13), (14), (15), (16), (17): Xaa is A or G
  MOD_RES (18), (19), (20), (21): Xaa is A or G or is absent

SEQ ID NO: 36900 - protein, 32 aa, Artificial Sequence; identical to SEQ ID NO: 12565
  GFR-binding peptide
  MOD_RES (1), (32): Xaa is C or S

SEQ ID NO: 36901 - protein, 37 aa, Artificial Sequence; identical to SEQ ID NO: 10644
  GFR-binding peptide
  MOD_RES (2), (4): Xaa is C or S
  MOD_RES (16), (17), (18), (19), (20): Xaa is A or G
  MOD_RES (21), (22), (23), (24): Xaa is A or G or is absent

SEQ ID NO: 36902 - protein, 36 aa, Artificial Sequence; identical to SEQ ID NO: 10645
  GFR-binding peptide
  MOD_RES (2), (34), (35): Xaa is C or S

SEQ ID NO: 36903 - protein, 44 aa, Artificial Sequence; identical to SEQ ID NO: 5130
  GFR-binding peptide
  MOD_RES (2), (4), (38), (39): Xaa is C or S
  MOD_RES (16), (17), (18), (19), (20): Xaa is A or G
  MOD_RES (21), (22), (23), (24): Xaa is A or G or is absent

SEQ ID NO: 36904 - protein, 42 aa, Artificial Sequence; identical to SEQ ID NO: 5131
  GFR-binding peptide
  MOD_RES (2), (4), (37), (38): Xaa is C or S
  MOD_RES (15), (16), (17), (18), (19): Xaa is A or G
  MOD_RES (20), (21), (22), (23): Xaa is A or G or is absent

SEQ ID NO: 36905 - protein, 37 aa, Artificial Sequence; identical to SEQ ID NO: 10646
  GFR-binding peptide
  MOD_RES (2), (33), (34): Xaa is C or S

SEQ ID NO: 36906 - protein, 39 aa, Artificial Sequence; identical to SEQ ID NO: 3207
  GFR-binding peptide
  MOD_RES (34), (35): Xaa is C or S
  MOD_RES (12), (13), (14), (15), (16): Xaa is A or G
  MOD_RES (17), (18), (19), (20): Xaa is A or G or is absent

SEQ ID NO: 36907 - protein, 34 aa, Artificial Sequence; identical to SEQ ID NO: 3208
  GFR-binding peptide
  MOD_RES (33), (34): Xaa is C or S
  MOD_RES (11), (12), (13), (14), (15): Xaa is A or G
  MOD_RES (16), (17), (18), (19): Xaa is A or G or is absent

SEQ ID NO: 36908 - protein, 39 aa, Artificial Sequence; identical to SEQ ID NO: 12571
  GFR-binding peptide
  MOD_RES (2), (36), (37): Xaa is C or S
  MOD_RES (14), (15), (16), (17), (18): Xaa is A or G
  MOD_RES (19), (20), (21), (22): Xaa is A or G or is absent

SEQ ID NO: 36909 - protein, 30 aa, Artificial Sequence; identical to SEQ ID NO: 10650
  GFR-binding peptide

SEQ ID NO: 36910 - protein, 35 aa, Artificial Sequence; identical to SEQ ID NO: 10651
  GFR-binding peptide
  MOD_RES (1), (35): Xaa is C or S
  MOD_RES (13), (14), (15), (16), (17): Xaa is A or G
  MOD_RES (18), (19), (20), (21): Xaa is A or G or is absent

SEQ ID NO: 36911 - protein, 34 aa, Artificial Sequence; identical to SEQ ID NO: 10652
  GFR-binding peptide
  MOD_RES (1), (34): Xaa is C or S
  MOD_RES (12), (13), (14), (15), (16): Xaa is A or G
  MOD_RES (17), (18), (19), (20): Xaa is A or G or is absent

SEQ ID NO: 36912 - protein, 42 aa, Artificial Sequence; identical to SEQ ID NO: 12574
  GFR-binding peptide
  MOD_RES (2), (4), (38), (39): Xaa is C or S
  MOD_RES (16), (17), (18), (19), (20): Xaa is A or G
  MOD_RES (21), (22), (23), (24): Xaa is A or G or is absent

SEQ ID NO: 36913 - protein, 34 aa, Artificial Sequence; identical to SEQ ID NO: 10654
  GFR-binding peptide
  MOD_RES (31), (32): Xaa is C or S

SEQ ID NO: 36914 - protein, 38 aa, Artificial Sequence; identical to SEQ ID NO: 5139
  GFR-binding peptide
  MOD_RES (2), (34), (35): Xaa is C or S

SEQ ID NO: 36915 - protein, 41 aa, Artificial Sequence; identical to SEQ ID NO: 10655
  GFR-binding peptide
  MOD_RES (2), (36): Xaa is C or S
  MOD_RES (14), (15), (16), (17), (18): Xaa is A or G
  MOD_RES (19), (20), (21), (22): Xaa is A or G or is absent

SEQ ID NO: 36916 - protein, 33 aa, Artificial Sequence; identical to SEQ ID NO: 5140
  GFR-binding peptide
  MOD_RES (12), (13), (14), (15), (16): Xaa is A or G
  MOD_RES (17), (18), (19), (20): Xaa is A or G or is absent

SEQ ID NO: 36917 - protein, 36 aa, Artificial Sequence; identical to SEQ ID NO: 12579
  GFR-binding peptide
  MOD_RES (1), (3), (36): Xaa is C or S
  MOD_RES (14), (15), (16), (17), (18): Xaa is A or G
  MOD_RES (19), (20), (21), (22): Xaa is A or G or is absent

SEQ ID NO: 36918 - protein, 39 aa, Artificial Sequence; identical to SEQ ID NO: 10657
  GFR-binding peptide
  MOD_RES (33), (34): Xaa is C or S
  MOD_RES (11), (12), (13), (14), (15): Xaa is A or G
  MOD_RES (16), (17), (18), (19): Xaa is A or G or is absent

SEQ ID NO: 36919 - protein, 35 aa, Artificial Sequence; identical to SEQ ID NO: 12580
  GFR-binding peptide
  MOD_RES (1), (33), (34): Xaa is C or S

SEQ ID NO: 36920 - protein, 34 aa, Artificial Sequence; identical to SEQ ID NO: 12581
  GFR-binding peptide
  MOD_RES (1), (33), (34): Xaa is C or S

SEQ ID NO: 36921 - protein, 40 aa, Artificial Sequence; identical to SEQ ID NO: 10658
  GFR-binding peptide
  MOD_RES (1), (34), (35): Xaa is C or S
  MOD_RES (12), (13), (14), (15), (16): Xaa is A or G
  MOD_RES (17), (18), (19), (20): Xaa is A or G or is absent

SEQ ID NO: 36922 - protein, 36 aa, Artificial Sequence; identical to SEQ ID NO: 10659
  GFR-binding peptide
  MOD_RES (1), (33), (34): Xaa is C or S

SEQ ID NO: 36923 - protein, 33 aa, Artificial Sequence; identical to SEQ ID NO: 12582
  GFR-binding peptide
  MOD_RES (33), (33): Xaa is C or S
  MOD_RES (11), (12), (13), (14), (15): Xaa is A or G
  MOD_RES (16), (17), (18), (19): Xaa is A or G or is absent

SEQ ID NO: 36924 - protein, 37 aa, Artificial Sequence; identical to SEQ ID NO: 3223
  GFR-binding peptide
  MOD_RES (2), (4), (36), (37): Xaa is C or S

SEQ ID NO: 36925 - protein, 40 aa, Artificial Sequence; identical to SEQ ID NO: 12583
  GFR-binding peptide
  MOD_RES (2), (4), (38), (39): Xaa is C or S
  MOD_RES (16), (17), (18), (19), (20): Xaa is A or G
  MOD_RES (21), (22), (23), (24): Xaa is A or G or is absent

SEQ ID NO: 36926 - protein, 39 aa, Artificial Sequence; identical to SEQ ID NO: 10662
  GFR-binding peptide
  MOD_RES (1), (33), (34): Xaa is C or S

SEQ ID NO: 36927 - protein, 35 aa, Artificial Sequence; identical to SEQ ID NO: 10663
  GFR-binding peptide
  MOD_RES (2), (35): Xaa is C or S
  MOD_RES (13), (14), (15), (16), (17): Xaa is A or G
  MOD_RES (18), (19), (20), (21): Xaa is A or G or is absent

SEQ ID NO: 36928 - protein, 36 aa, Artificial Sequence; identical to SEQ ID NO: 10664
  GFR-binding peptide
  MOD_RES (33), (34): Xaa is C or S
  MOD_RES (11), (12), (13), (14), (15): Xaa is A or G
  MOD_RES (16), (17), (18), (19): Xaa is A or G or is absent

SEQ ID NO: 36929 - protein, 41 aa, Artificial Sequence; identical to SEQ ID NO: 12585
  GFR-binding peptide
  MOD_RES (1), (3), (37): Xaa is C or S
  MOD_RES (15), (16), (17), (18), (19): Xaa is A or G
  MOD_RES (20), (21), (22), (23): Xaa is A or G or is absent

SEQ ID NO: 36930 - protein, 31 aa, Artificial Sequence; identical to SEQ ID NO: 12586
  GFR-binding peptide
  MOD_RES (31), (31): Xaa is C or S

SEQ ID NO: 36931 - protein, 40 aa, Artificial Sequence; identical to SEQ ID NO: 12587
  GFR-binding peptide
  MOD_RES (1), (3), (37), (38): Xaa is C or S
  MOD_RES (15), (16), (17), (18), (19): Xaa is A or G
  MOD_RES (20), (21), (22), (23): Xaa is A or G or is absent

SEQ ID NO: 36932 - protein, 38 aa, Artificial Sequence; identical to SEQ ID NO: 12588
  GFR-binding peptide
  MOD_RES (1), (33), (34): Xaa is C or S

SEQ ID NO: 36933 - protein, 39 aa, Artificial Sequence; identical to SEQ ID NO: 5147
  GFR-binding peptide
  MOD_RES (1), (33), (34): Xaa is C or S

SEQ ID NO: 36934 - protein, 36 aa, Artificial Sequence; identical to SEQ ID NO: 5148
  GFR-binding peptide
  MOD_RES (2), (4), (35), (36): Xaa is C or S

SEQ ID NO: 36935 - protein, 39 aa, Artificial Sequence; identical to SEQ ID NO: 10666
  GFR-binding peptide
  MOD_RES (2), (34), (35): Xaa is C or S

SEQ ID NO: 36936 - protein, 42 aa, Artificial Sequence; identical to SEQ ID NO: 3231
  GFR-binding peptide
  MOD_RES (2), (4), (36), (37): Xaa is C or S

SEQ ID NO: 36937 - protein, 35 aa, Artificial Sequence; identical to SEQ ID NO: 10669
  GFR-binding peptide
  MOD_RES (2), (2): Xaa is C or S
  MOD_RES (14), (15), (16), (17), (18): Xaa is A or G
  MOD_RES (19), (20), (21), (22): Xaa is A or G or is absent

SEQ ID NO: 36938 - protein, 38 aa, Artificial Sequence; identical to SEQ ID NO: 12595
  GFR-binding peptide
  MOD_RES (34), (35): Xaa is C or S
  MOD_RES (12), (13), (14), (15), (16): Xaa is A or G
  MOD_RES (17), (18), (19), (20): Xaa is A or G or is absent

SEQ ID NO: 36939 - protein, 33 aa, Artificial Sequence; identical to SEQ ID NO: 12596
  GFR-binding peptide
  MOD_RES (31), (32): Xaa is C or S

SEQ ID NO: 36940 - protein, 35 aa, Artificial Sequence; identical to SEQ ID NO: 12597
  GFR-binding peptide
  MOD_RES (2), (33), (34): Xaa is C or S

SEQ ID NO: 36941 - protein, 37 aa, Artificial Sequence; identical to SEQ ID NO: 10670
  GFR-binding peptide
  MOD_RES (2), (36): Xaa is C or S
  MOD_RES (14), (15), (16), (17), (18): Xaa is A or G
  MOD_RES (19), (20), (21), (22): Xaa is A or G or is absent

SEQ ID NO: 36942 - protein, 38 aa, Artificial Sequence; identical to SEQ ID NO: 12598
  GFR-binding peptide
  MOD_RES (1), (3), (35): Xaa is C or S

SEQ ID NO: 36943 - protein, 36 aa, Artificial Sequence; identical to SEQ ID NO: 5154
  GFR-binding peptide
  MOD_RES (2), (34), (35): Xaa is C or S

SEQ ID NO: 36944 - protein, 39 aa, Artificial Sequence; identical to SEQ ID NO: 12602
  GFR-binding peptide
  MOD_RES (2), (36), (37): Xaa is C or S
  MOD_RES (14), (15), (16), (17), (18): Xaa is A or G
  MOD_RES (19), (20), (21), (22): Xaa is A or G or is absent

SEQ ID NO: 36945 - protein, 39 aa, Artificial Sequence; identical to SEQ ID NO: 12604
  GFR-binding peptide
  MOD_RES (34), (35): Xaa is C or S
  MOD_RES (12), (13), (14), (15), (16): Xaa is A or G
  MOD_RES (17), (18), (19), (20): Xaa is A or G or is absent

SEQ ID NO: 36946 - protein, 37 aa, Artificial Sequence; identical to SEQ ID NO: 10673
  GFR-binding peptide
  MOD_RES (2), (4), (36), (37): Xaa is C or S

SEQ ID NO: 36947 - protein, 40 aa, Artificial Sequence; identical to SEQ ID NO: 10674
  GFR-binding peptide
  MOD_RES (1), (3), (35), (36): Xaa is C or S

SEQ ID NO: 36948 - protein, 35 aa, Artificial Sequence; identical to SEQ ID NO: 12607
  GFR-binding peptide
  MOD_RES (32), (33): Xaa is C or S

SEQ ID NO: 36949 - protein, 41 aa, Artificial Sequence; identical to SEQ ID NO: 10675
  GFR-binding peptide
  MOD_RES (2), (4), (35), (36): Xaa is C or S

SEQ ID NO: 36950 - protein, 39 aa, Artificial Sequence; identical to SEQ ID NO: 12608
  GFR-binding peptide
  MOD_RES (33), (34): Xaa is C or S
  MOD_RES (11), (12), (13), (14), (15): Xaa is A or G
  MOD_RES (16), (17), (18), (19): Xaa is A or G or is absent

SEQ ID NO: 36951 - protein, 36 aa, Artificial Sequence; identical to SEQ ID NO: 12609
  GFR-binding peptide
  MOD_RES (2), (33), (34): Xaa is C or S

SEQ ID NO: 36952 - protein, 40 aa, Artificial Sequence; identical to SEQ ID NO: 12610
  GFR-binding peptide
  MOD_RES (1), (35), (36): Xaa is C or S
  MOD_RES (13), (14), (15), (16), (17): Xaa is A or G
  MOD_RES (18), (19), (20), (21): Xaa is A or G or is absent

SEQ ID NO: 36953 - protein, 36 aa, Artificial Sequence; identical to SEQ ID NO: 10676
  GFR-binding peptide
  MOD_RES (33), (34): Xaa is C or S
  MOD_RES (11), (12), (13), (14), (15): Xaa is A or G
  MOD_RES (16), (17), (18), (19): Xaa is A or G or is absent

SEQ ID NO: 36954 - protein, 37 aa, Artificial Sequence; identical to SEQ ID NO: 5168
  GFR-binding peptide
  MOD_RES (34), (35): Xaa is C or S
  MOD_RES (12), (13), (14), (15), (16): Xaa is A or G
  MOD_RES (17), (18), (19), (20): Xaa is A or G or is absent

SEQ ID NO: 36955 - protein, 34 aa, Artificial Sequence; identical to SEQ ID NO: 12613
  GFR-binding peptide
  MOD_RES (33), (34): Xaa is C or S
  MOD_RES (11), (12), (13), (14), (15): Xaa is A or G
  MOD_RES (16), (17), (18), (19): Xaa is A or G or is absent

SEQ ID NO: 36956 - protein, 33 aa, Artificial Sequence; identical to SEQ ID NO: 3250
  GFR-binding peptide
  MOD_RES (31), (32): Xaa is C or S

SEQ ID NO: 36957 - protein, 35 aa, Artificial Sequence; identical to SEQ ID NO: 10679
  GFR-binding peptide
  MOD_RES (1), (3), (35): Xaa is C or S

SEQ ID NO: 36958 - protein, 32 aa, Artificial Sequence; identical to SEQ ID NO: 5171
  GFR-binding peptide
  MOD_RES (31), (32): Xaa is C or S

SEQ ID NO: 36959 - protein, 35 aa, Artificial Sequence; identical to SEQ ID NO: 10680
  GFR-binding peptide
  MOD_RES (34), (34): Xaa is C or S
  MOD_RES (12), (13), (14), (15), (16): Xaa is A or G
  MOD_RES (17), (18), (19), (20): Xaa is A or G or is absent

SEQ ID NO: 36960 - protein, 40 aa, Artificial Sequence; identical to SEQ ID NO: 10682
  GFR-binding peptide
  MOD_RES (2), (36), (37): Xaa is C or S
  MOD_RES (14), (15), (16), (17), (18): Xaa is A or G
  MOD_RES (19), (20), (21), (22): Xaa is A or G or is absent

SEQ ID NO: 36961 - protein, 33 aa, Artificial Sequence; identical to SEQ ID NO: 12615
  GFR-binding peptide
  MOD_RES (1), (33): Xaa is C or S

SEQ ID NO: 36962 - protein, 36 aa, Artificial Sequence; identical to SEQ ID NO: 10683
  GFR-binding peptide
  MOD_RES (31), (32): Xaa is C or S

SEQ ID NO: 36963 - protein, 36 aa, Artificial Sequence
  GFR-binding peptide
  MOD_RES (2), (35), (36): Xaa is C or S
  MOD_RES (13), (14), (15), (16), (17): Xaa is A or G
  MOD_RES (18), (19), (20), (21): Xaa is A or G or is absent
KXSKVIMNSLQEXXXXXXXXXYYLITLPELDQSVXX

SEQ ID NO: 36964 - protein, 36 aa, Artificial Sequence; identical to SEQ ID NO: 12617
  GFR-binding peptide
  MOD_RES (1), (33), (34): Xaa is C or S

SEQ ID NO: 36965 - protein, 41 aa, Artificial Sequence; identical to SEQ ID NO: 10685
  GFR-binding peptide
  MOD_RES (2), (4), (36), (37): Xaa is C or S

SEQ ID NO: 36966 - protein, 40 aa, Artificial Sequence; identical to SEQ ID NO: 10686
  GFR-binding peptide
  MOD_RES (1), (3), (34), (35): Xaa is C or S

SEQ ID NO: 36967 - protein, 42 aa, Artificial Sequence; identical to SEQ ID NO: 10687
  GFR-binding peptide
  MOD_RES (1), (3), (36), (37): Xaa is C or S
  MOD_RES (14), (15), (16), (17), (18): Xaa is A or G
  MOD_RES (19), (20), (21), (22): Xaa is A or G or is absent

SEQ ID NO: 36968 - protein, 33 aa, Artificial Sequence; identical to SEQ ID NO: 12618
  GFR-binding peptide
  MOD_RES (2), (33): Xaa is C or S

SEQ ID NO: 36969 - protein, 37 aa, Artificial Sequence; identical to SEQ ID NO: 10689
  GFR-binding peptide
  MOD_RES (34), (35): Xaa is C or S
  MOD_RES (12), (13), (14), (15), (16): Xaa is A or G
  MOD_RES (17), (18), (19), (20): Xaa is A or G or is absent

SEQ ID NO: 36970 - protein, 40 aa, Artificial Sequence; identical to SEQ ID NO: 10690
  GFR-binding peptide
  MOD_RES (1), (3), (34), (35): Xaa is C or S

SEQ ID NO: 36971 - protein, 34 aa, Artificial Sequence; identical to SEQ ID NO: 10691
  GFR-binding peptide
  MOD_RES (1), (34): Xaa is C or S
  MOD_RES (12), (13), (14), (15), (16): Xaa is A or G
  MOD_RES (17), (18), (19), (20): Xaa is A or G or is absent

SEQ ID NO: 36972 - protein, 36 aa, Artificial Sequence; identical to SEQ ID NO: 10692
  GFR-binding peptide
  MOD_RES (33), (34): Xaa is C or S
  MOD_RES (11), (12), (13), (14), (15): Xaa is A or G
  MOD_RES (16), (17), (18), (19): Xaa is A or G or is absent

SEQ ID NO: 36973 - protein, 42 aa, Artificial Sequence; identical to SEQ ID NO: 10694
  GFR-binding peptide
  MOD_RES (2), (4), (38), (39): Xaa is C or S
  MOD_RES (16), (17), (18), (19), (20): Xaa is A or G
  MOD_RES (21), (22), (23), (24): Xaa is A or G or is absent

SEQ ID NO: 36974 - protein, 34 aa, Artificial Sequence; identical to SEQ ID NO: 5177
  GFR-binding peptide
  MOD_RES (33), (34): Xaa is C or S
  MOD_RES (11), (12), (13), (14), (15): Xaa is A or G
  MOD_RES (16), (17), (18), (19): Xaa is A or G or is absent

SEQ ID NO: 36975 - protein, 40 aa, Artificial Sequence; identical to SEQ ID NO: 12620
  GFR-binding peptide
  MOD_RES (2), (4), (38), (39): Xaa is C or S
  MOD_RES (16), (17), (18), (19), (20): Xaa is A or G
  MOD_RES (21), (22), (23), (24): Xaa is A or G or is absent

SEQ ID NO: 36976 - protein, 34 aa, Artificial Sequence; identical to SEQ ID NO: 12621
  GFR-binding peptide
  MOD_RES (32), (33): Xaa is C or S

SEQ ID NO: 36977 - protein, 38 aa, Artificial Sequence; identical to SEQ ID NO: 10696
  GFR-binding peptide
  MOD_RES (33), (34): Xaa is C or S
  MOD_RES (11), (12), (13), (14), (15): Xaa is A or G
  MOD_RES (16), (17), (18), (19): Xaa is A or G or is absent

SEQ ID NO: 36978 - protein, 35 aa, Artificial Sequence; identical to SEQ ID NO: 10697
  GFR-binding peptide
  MOD_RES (32), (33): Xaa is C or S

SEQ ID NO: 36979 - protein, 33 aa, Artificial Sequence; identical to SEQ ID NO: 5180
  GFR-binding peptide
  MOD_RES (12), (13), (14), (15), (16): Xaa is A or G
  MOD_RES (17), (18), (19), (20): Xaa is A or G or is absent

SEQ ID NO: 36980 - protein, 33 aa, Artificial Sequence; identical to SEQ ID NO: 10699
  GFR-binding peptide
  MOD_RES (1), (3): Xaa is C or S

SEQ ID NO: 36981 - protein, 36 aa, Artificial Sequence; identical to SEQ ID NO: 10700
  GFR-binding peptide
  MOD_RES (33), (34): Xaa is C or S
  MOD_RES (11), (12), (13), (14), (15): Xaa is A or G
  MOD_RES (16), (17), (18), (19): Xaa is A or G or is absent

SEQ ID NO: 36982 - protein, 41 aa, Artificial Sequence; identical to SEQ ID NO: 10701
  GFR-binding peptide
  MOD_RES (2), (35), (36): Xaa is C or S
  MOD_RES (13), (14), (15), (16), (17): Xaa is A or G
  MOD_RES (18), (19), (20), (21): Xaa is A or G or is absent

SEQ ID NO: 36983 - protein, 35 aa, Artificial Sequence; identical to SEQ ID NO: 12623
  GFR-binding peptide
  MOD_RES (31), (32): Xaa is C or S

SEQ ID NO: 36984 - protein, 35 aa, Artificial Sequence; identical to SEQ ID NO: 10702
  GFR-binding peptide
  MOD_RES (2), (4), (35): Xaa is C or S

SEQ ID NO: 36985 - protein, 37 aa, Artificial Sequence; identical to SEQ ID NO: 10704
  GFR-binding peptide
  MOD_RES (2), (35), (36): Xaa is C or S
  MOD_RES (13), (14), (15), (16), (17): Xaa is A or G
  MOD_RES (18), (19), (20), (21): Xaa is A or G or is absent

SEQ ID NO: 36986 - protein, 33 aa, Artificial Sequence; identical to SEQ ID NO: 10705
  GFR-binding peptide
  MOD_RES (1), (3): Xaa is C or S

SEQ ID NO: 36987 - protein, 36 aa, Artificial Sequence; identical to SEQ ID NO: 5185
  GFR-binding peptide
  MOD_RES (2), (33), (34): Xaa is C or S

SEQ ID NO: 36988 - protein, 40 aa, Artificial Sequence
  GFR-binding peptide
  MOD_RES (1), (34), (35): Xaa is C or S
  MOD_RES (12), (13), (14), (15), (16): Xaa is A or G
  MOD_RES (17), (18), (19), (20): Xaa is A or G or is absent
XSKVIMNSLQEXXXXXXXXXYYLITLPELDQSVXXPSASA

SEQ ID NO: 36989 - protein, 39 aa, Artificial Sequence; identical to SEQ ID NO: 12626
  GFR-binding peptide
  MOD_RES (1), (3), (37), (38): Xaa is C or S
  MOD_RES (15), (16), (17), (18), (19): Xaa is A or G
  MOD_RES (20), (21), (22), (23): Xaa is A or G or is absent

SEQ ID NO: 36990 - protein, 33 aa, Artificial Sequence; identical to SEQ ID NO: 12627
  GFR-binding peptide
  MOD_RES (12), (13), (14), (15), (16): Xaa is A or G
  MOD_RES (17), (18), (19), (20): Xaa is A or G or is absent

SEQ ID NO: 36991 - protein, 35 aa, Artificial Sequence
  GFR-binding peptide
  MOD_RES (2), (4), (35): Xaa is C or S
SXKXSKVIMNSLQEIKPTKGIYYLITLPELDQSVX

SEQ ID NO: 36992 - protein, 38 aa, Artificial Sequence; identical to SEQ ID NO: 10709
  GFR-binding peptide
  MOD_RES (1), (3), (36), (37): Xaa is C or S
  MOD_RES (14), (15), (16), (17), (18): Xaa is A or G
  MOD_RES (19), (20), (21), (22): Xaa is A or G or is absent

SEQ ID NO: 36993 - protein, 42 aa, Artificial Sequence; identical to SEQ ID NO: 12629
  GFR-binding peptide
  MOD_RES (2), (4), (38), (39): Xaa is C or S
  MOD_RES (16), (17), (18), (19), (20): Xaa is A or G
  MOD_RES (21), (22), (23), (24): Xaa is A or G or is absent

SEQ ID NO: 36994 - protein, 38 aa, Artificial Sequence; identical to SEQ ID NO: 12631
  GFR-binding peptide
  MOD_RES (33), (34): Xaa is C or S
  MOD_RES (11), (12), (13), (14), (15): Xaa is A or G
  MOD_RES (16), (17), (18), (19): Xaa is A or G or is absent

SEQ ID NO: 36995 - protein, 42 aa, Artificial Sequence; identical to SEQ ID NO: 3272
  GFR-binding peptide
  MOD_RES (2), (4), (36), (37): Xaa is C or S

SEQ ID NO: 36996 - protein, 35 aa, Artificial Sequence; identical to SEQ ID NO: 5195
  GFR-binding peptide
  MOD_RES (1), (32), (33): Xaa is C or S

SEQ ID NO: 36997 - protein, 36 aa, Artificial Sequence; identical to SEQ ID NO: 10711
  GFR-binding peptide
  MOD_RES (2), (4): Xaa is C or S
  MOD_RES (15), (16), (17), (18), (19): Xaa is A or G
  MOD_RES (20), (21), (22), (23): Xaa is A or G or is absent

SEQ ID NO: 36998 - protein, 39 aa, Artificial Sequence; identical to SEQ ID NO: 12633
  GFR-binding peptide
  MOD_RES (33), (34): Xaa is C or S
  MOD_RES (11), (12), (13), (14), (15): Xaa is A or G
  MOD_RES (16), (17), (18), (19): Xaa is A or G or is absent

SEQ ID NO: 36999 - protein, 37 aa, Artificial Sequence; identical to SEQ ID NO: 10712
  GFR-binding peptide
  MOD_RES (1), (35), (36): Xaa is C or S
  MOD_RES (13), (14), (15), (16), (17): Xaa is A or G
  MOD_RES (18), (19), (20), (21): Xaa is A or G or is absent

SEQ ID NO: 37000 - protein, 41 aa, Artificial Sequence; identical to SEQ ID NO: 12634
  GFR-binding peptide
  MOD_RES (1), (3), (35), (36): Xaa is C or S

SEQ ID NO: 37001 - protein, 35 aa, Artificial Sequence; identical to SEQ ID NO: 10713
  GFR-binding peptide
  MOD_RES (2), (4): Xaa is C or S

SEQ ID NO: 37002 - protein, 39 aa, Artificial Sequence; identical to SEQ ID NO: 12635
  GFR-binding peptide
  MOD_RES (2), (4), (36), (37): Xaa is C or S

SEQ ID NO: 37003 - protein, 39 aa, Artificial Sequence; identical to SEQ ID NO: 12636
  GFR-binding peptide
  MOD_RES (1), (33), (34): Xaa is C or S

SEQ ID NO: 37004 - protein, 32 aa, Artificial Sequence; identical to SEQ ID NO: 10716
  GFR-binding peptide
  MOD_RES (11), (12), (13), (14), (15): Xaa is A or G
  MOD_RES (16), (17), (18), (19): Xaa is A or G or is absent

SEQ ID NO: 37005 - protein, 43 aa, Artificial Sequence; identical to SEQ ID NO: 12638
  GFR-binding peptide
  MOD_RES (1), (3), (37), (38): Xaa is C or S
  MOD_RES (15), (16), (17), (18), (19): Xaa is A or G
  MOD_RES (20), (21), (22), (23): Xaa is A or G or is absent

SEQ ID NO: 37006 - protein, 33 aa, Artificial Sequence; identical to SEQ ID NO: 3281
  GFR-binding peptide
  MOD_RES (2), (33): Xaa is C or S

SEQ ID NO: 37007 - protein, 38 aa, Artificial Sequence; identical to SEQ ID NO: 10719
  GFR-binding peptide
  MOD_RES (1), (3), (34), (35): Xaa is C or S

SEQ ID NO: 37008 - protein, 34 aa, Artificial Sequence; identical to SEQ ID NO: 12640
  GFR-binding peptide
  MOD_RES (2), (4): Xaa is C or S

SEQ ID NO: 37009 - protein, 35 aa, Artificial Sequence; identical to SEQ ID NO: 12641
  GFR-binding peptide
  MOD_RES (1), (35): Xaa is C or S
  MOD_RES (13), (14), (15), (16), (17): Xaa is A or G
  MOD_RES (18), (19), (20), (21): Xaa is A or G or is absent

SEQ ID NO: 37010 - protein, 36 aa, Artificial Sequence; identical to SEQ ID NO: 10720
  GFR-binding peptide
  MOD_RES (1), (32), (33): Xaa is C or S

SEQ ID NO: 37011 - protein, 43 aa, Artificial Sequence; identical to SEQ ID NO: 12642
  GFR-binding peptide
  MOD_RES (2), (4), (38), (39): Xaa is C or S
  MOD_RES (16), (17), (18), (19), (20): Xaa is A or G
  MOD_RES (21), (22), (23), (24): Xaa is A or G or is absent

SEQ ID NO: 37012 - protein, 36 aa, Artificial Sequence; identical to SEQ ID NO: 10721
  GFR-binding peptide
  MOD_RES (1), (3): Xaa is C or S
  MOD_RES (15), (16), (17), (18), (19): Xaa is A or G
  MOD_RES (20), (21), (22), (23): Xaa is A or G or is absent

SEQ ID NO: 37013 - protein, 35 aa, Artificial Sequence; identical to SEQ ID NO: 3283
  GFR-binding peptide
  MOD_RES (1), (35): Xaa is C or S
  MOD_RES (13), (14), (15), (16), (17): Xaa is A or G
  MOD_RES (18), (19), (20), (21): Xaa is A or G or is absent

SEQ ID NO: 37014 - protein, 33 aa, Artificial Sequence; identical to SEQ ID NO: 12643
  GFR-binding peptide
  MOD_RES (1), (1): Xaa is C or S
  MOD_RES (12), (13), (14), (15), (16): Xaa is A or G
  MOD_RES (17), (18), (19), (20): Xaa is A or G or is absent

SEQ ID NO: 37015 - protein, 36 aa, Artificial Sequence; identical to SEQ ID NO: 10724
  GFR-binding peptide
  MOD_RES (33), (34): Xaa is C or S
  MOD_RES (11), (12), (13), (14), (15): Xaa is A or G
  MOD_RES (16), (17), (18), (19): Xaa is A or G or is absent

SEQ ID NO: 37016 - protein, 40 aa, Artificial Sequence; identical to SEQ ID NO: 12644
  GFR-binding peptide
  MOD_RES (2), (4), (36), (37): Xaa is C or S

SEQ ID NO: 37017 - protein, 36 aa, Artificial Sequence; identical to SEQ ID NO: 10725
  GFR-binding peptide
  MOD_RES (34), (35): Xaa is C or S
  MOD_RES (12), (13), (14), (15), (16): Xaa is A or G
  MOD_RES (17), (18), (19), (20): Xaa is A or G or is absent

SEQ ID NO: 37018 - protein, 37 aa, Artificial Sequence; identical to SEQ ID NO: 12645
  GFR-binding peptide
  MOD_RES (1), (33), (34): Xaa is C or S

SEQ ID NO: 37019 - protein, 35 aa, Artificial Sequence; identical to SEQ ID NO: 12646
  GFR-binding peptide
  MOD_RES (2), (35): Xaa is C or S
  MOD_RES (13), (14), (15), (16), (17): Xaa is A or G
  MOD_RES (18), (19), (20), (21): Xaa is A or G or is absent

SEQ ID NO: 37020 - protein, 34 aa, Artificial Sequence; identical to SEQ ID NO: 12647
  GFR-binding peptide
  MOD_RES (1), (33), (34): Xaa is C or S

SEQ ID NO: 37021 - protein, 40 aa, Artificial Sequence; identical to SEQ ID NO: 12648
  GFR-binding peptide
  MOD_RES (2), (4), (38), (39): Xaa is C or S
  MOD_RES (16), (17), (18), (19), (20): Xaa is A or G
  MOD_RES (21), (22), (23), (24): Xaa is A or G or is absent

SEQ ID NO: 37022 - protein, 40 aa, Artificial Sequence; identical to SEQ ID NO: 12649
  GFR-binding peptide
  MOD_RES (1), (3), (37): Xaa is C or S
  MOD_RES (15), (16), (17), (18), (19): Xaa is A or G
  MOD_RES (20), (21), (22), (23): Xaa is A or G or is absent

SEQ ID NO: 37023 - protein, 38 aa, Artificial Sequence; identical to SEQ ID NO: 10726
  GFR-binding peptide
  MOD_RES (2), (34), (35): Xaa is C or S

SEQ ID NO: 37024 - protein, 34 aa, Artificial Sequence; identical to SEQ ID NO: 12652
  GFR-binding peptide
  MOD_RES (33), (34): Xaa is C or S
  MOD_RES (11), (12), (13), (14), (15): Xaa is A or G
  MOD_RES (16), (17), (18), (19): Xaa is A or G or is absent

SEQ ID NO: 37025 - protein, 32 aa, Artificial Sequence; identical to SEQ ID NO: 10727
  GFR-binding peptide
  MOD_RES (11), (12), (13), (14), (15): Xaa is A or G
  MOD_RES (16), (17), (18), (19): Xaa is A or G or is absent

SEQ ID NO: 37026 - protein, 33 aa, Artificial Sequence; identical to SEQ ID NO: 12653
  GFR-binding peptide
  MOD_RES (33), (33): Xaa is C or S
  MOD_RES (11), (12), (13), (14), (15): Xaa is A or G
  MOD_RES (16), (17), (18), (19): Xaa is A or G or is absent

SEQ ID NO: 37027 - protein, 41 aa, Artificial Sequence; identical to SEQ ID NO: 10728
  GFR-binding peptide
  MOD_RES (2), (36), (37): Xaa is C or S
  MOD_RES (14), (15), (16), (17), (18): Xaa is A or G
  MOD_RES (19), (20), (21), (22): Xaa is A or G or is absent

SEQ ID NO: 37028 - protein, 41 aa, Artificial Sequence; identical to SEQ ID NO: 3292
  GFR-binding peptide
  MOD_RES (1), (3), (36), (37): Xaa is C or S
  MOD_RES (14), (15), (16), (17), (18): Xaa is A or G
  MOD_RES (19), (20), (21), (22): Xaa is A or G or is absent

SEQ ID NO: 37029 - protein, 38 aa, Artificial Sequence; identical to SEQ ID NO: 10730
  GFR-binding peptide
  MOD_RES (1), (3), (37), (38): Xaa is C or S
  MOD_RES (15), (16), (17), (18), (19): Xaa is A or G
  MOD_RES (20), (21), (22), (23): Xaa is A or G or is absent

SEQ ID NO: 37030 - protein, 37 aa, Artificial Sequence; identical to SEQ ID NO: 12654
  GFR-binding peptide
  MOD_RES (1), (35), (36): Xaa is C or S
  MOD_RES (13), (14), (15), (16), (17): Xaa is A or G
  MOD_RES (18), (19), (20), (21): Xaa is A or G or is absent

SEQ ID NO: 37031 - protein, 39 aa, Artificial Sequence; identical to SEQ ID NO: 10731
  GFR-binding peptide
  MOD_RES (1), (33): Xaa is C or S

SEQ ID NO: 37032 - protein, 37 aa, Artificial Sequence; identical to SEQ ID NO: 5217
  GFR-binding peptide
  MOD_RES (1), (3), (36), (37): Xaa is C or S
  MOD_RES (14), (15), (16), (17), (18): Xaa is A or G
  MOD_RES (19), (20), (21), (22): Xaa is A or G or is absent

SEQ ID NO: 37033 - protein, 42 aa, Artificial Sequence; identical to SEQ ID NO: 10732
  GFR-binding peptide
  MOD_RES (1), (3), (37), (38): Xaa is C or S
  MOD_RES (15), (16), (17), (18), (19): Xaa is A or G
  MOD_RES (20), (21), (22), (23): Xaa is A or G or is absent

SEQ ID NO: 37034 - protein, 36 aa, Artificial Sequence; identical to SEQ ID NO: 12656
  GFR-binding peptide
  MOD_RES (1), (32), (33): Xaa is C or S

SEQ ID NO: 37035 - protein, 37 aa, Artificial Sequence; identical to SEQ ID NO: 12658
  GFR-binding peptide
  MOD_RES (2), (36): Xaa is C or S
  MOD_RES (14), (15), (16), (17), (18): Xaa is A or G
  MOD_RES (19), (20), (21), (22): Xaa is A or G or is absent

SEQ ID NO: 37036 - protein, 36 aa, Artificial Sequence; identical to SEQ ID NO: 10734
  GFR-binding peptide
  MOD_RES (2), (4), (36): Xaa is C or S

SEQ ID NO: 37037 - protein, 32 aa, Artificial Sequence; identical to SEQ ID NO: 12659
  GFR-binding peptide
  MOD_RES (31), (32): Xaa is C or S

SEQ ID NO: 37038 - protein, 39 aa, Artificial Sequence; identical to SEQ ID NO: 10736
  GFR-binding peptide
  MOD_RES (2), (4), (35), (36): Xaa is C or S

SEQ ID NO: 37039 - protein, 42 aa, Artificial Sequence; identical to SEQ ID NO: 10737
  GFR-binding peptide
  MOD_RES (2), (4), (36), (37): Xaa is C or S

SEQ ID NO: 37040 - protein, 37 aa, Artificial Sequence; identical to SEQ ID NO: 5223
  GFR-binding peptide
  MOD_RES (31), (32): Xaa is C or S

SEQ ID NO: 37041 - protein, 38 aa, Artificial Sequence; identical to SEQ ID NO: 10738
  GFR-binding peptide
  MOD_RES (2), (4), (37), (38): Xaa is C or S
  MOD_RES (15), (16), (17), (18), (19): Xaa is A or G
  MOD_RES (20), (21), (22), (23): Xaa is A or G or is absent

SEQ ID NO: 37042 - protein, 37 aa, Artificial Sequence; identical to SEQ ID NO: 12661
  GFR-binding peptide
  MOD_RES (2), (35), (36): Xaa is C or S
  MOD_RES (13), (14), (15), (16), (17): Xaa is A or G
  MOD_RES (18), (19), (20), (21): Xaa is A or G or is absent

SEQ ID NO: 37043 - protein, 32 aa, Artificial Sequence; identical to SEQ ID NO: 12662
  GFR-binding peptide
  MOD_RES (11), (12), (13), (14), (15): Xaa is A or G
  MOD_RES (16), (17), (18), (19): Xaa is A or G or is absent

SEQ ID NO: 37044 - protein, 33 aa, Artificial Sequence; identical to SEQ ID NO: 10739
  GFR-binding peptide
  MOD_RES (1), (1): Xaa is C or S
  MOD_RES (12), (13), (14), (15), (16): Xaa is A or G
  MOD_RES (17), (18), (19), (20): Xaa is A or G or is absent

SEQ ID NO: 37045 - protein, 38 aa, Artificial Sequence; identical to SEQ ID NO: 10740
  GFR-binding peptide
  MOD_RES (1), (33), (34): Xaa is C or S

SEQ ID NO: 37046 - protein, 38 aa, Artificial Sequence; identical to SEQ ID NO: 10741
  GFR-binding peptide
  MOD_RES (2), (4), (35), (36): Xaa is C or S

SEQ ID NO: 37047 - protein, 38 aa, Artificial Sequence; identical to SEQ ID NO: 10742
  GFR-binding peptide
  MOD_RES (2), (4), (37), (38): Xaa is C or S
  MOD_RES (15), (16), (17), (18), (19): Xaa is A or G
  MOD_RES (20), (21), (22), (23): Xaa is A or G or is absent

SEQ ID NO: 37048 - protein, 37 aa, Artificial Sequence; identical to SEQ ID NO: 10743
  GFR-binding peptide
  MOD_RES (1), (34), (35): Xaa is C or S
  MOD_RES (12), (13), (14), (15), (16): Xaa is A or G
  MOD_RES (17), (18), (19), (20): Xaa is A or G or is absent

SEQ ID NO: 37049 - protein, 33 aa, Artificial Sequence; identical to SEQ ID NO: 10746
  GFR-binding peptide
  MOD_RES (32), (33): Xaa is C or S

SEQ ID NO: 37050 - protein, 36 aa, Artificial Sequence; identical to SEQ ID NO: 12666
  GFR-binding peptide
  MOD_RES (34), (35): Xaa is C or S
  MOD_RES (12), (13), (14), (15), (16): Xaa is A or G
  MOD_RES (17), (18), (19), (20): Xaa is A or G or is absent

SEQ ID NO: 37051 - protein, 31 aa, Artificial Sequence; identical to SEQ ID NO: 12667
  GFR-binding peptide

SEQ ID NO: 37052 - protein, 37 aa, Artificial Sequence; identical to SEQ ID NO: 10747
  GFR-binding peptide
  MOD_RES (1), (3), (35), (36): Xaa is C or S

SEQ ID NO: 37053 - protein, 37 aa, Artificial Sequence; identical to SEQ ID NO: 10749
  GFR-binding peptide
  MOD_RES (32), (33): Xaa is C or S

SEQ ID NO: 37054 - protein, 37 aa, Artificial Sequence; identical to SEQ ID NO: 10750
  GFR-binding peptide
  MOD_RES (2), (4): Xaa is C or S
  MOD_RES (16), (17), (18), (19), (20): Xaa is A or G
  MOD_RES (21), (22), (23), (24): Xaa is A or G or is absent

SEQ ID NO: 37055 - protein, 34 aa, Artificial Sequence; identical to SEQ ID NO: 12668
  GFR-binding peptide
  MOD_RES (1), (3): Xaa is C or S

SEQ ID NO: 37056 - protein, 42 aa, Artificial Sequence; identical to SEQ ID NO: 10751
  GFR-binding peptide
  MOD_RES (1), (3), (37), (38): Xaa is C or S
  MOD_RES (15), (16), (17), (18), (19): Xaa is A or G
  MOD_RES (20), (21), (22), (23): Xaa is A or G or is absent

SEQ ID NO: 37057 - protein, 35 aa, Artificial Sequence; identical to SEQ ID NO: 10752
  GFR-binding peptide
  MOD_RES (2), (34), (35): Xaa is C or S

SEQ ID NO: 37058 - protein, 37 aa, Artificial Sequence; identical to SEQ ID NO: 10753
  GFR-binding peptide
  MOD_RES (1), (33), (34): Xaa is C or S

SEQ ID NO: 37059 - protein, 37 aa, Artificial Sequence; identical to SEQ ID NO: 12669
  GFR-binding peptide
  MOD_RES (1), (3), (35), (36): Xaa is C or S

SEQ ID NO: 37060 - protein, 39 aa, Artificial Sequence; identical to SEQ ID NO: 10754
  GFR-binding peptide
  MOD_RES (1), (33), (34): Xaa is C or S

SEQ ID NO: 37061 - protein, 36 aa, Artificial Sequence; identical to SEQ ID NO: 10755
  GFR-binding peptide
  MOD_RES (1), (3), (34), (35): Xaa is C or S

SEQ ID NO: 37062 - protein, 37 aa, Artificial Sequence
  GFR-binding peptide
  MOD_RES (1), (34), (35): Xaa is C or S
  MOD_RES (12), (13), (14), (15), (16): Xaa is A or G
  MOD_RES (17), (18), (19), (20): Xaa is A or G or is absent
XSKVIMNSLQEXXXXXXXXXYYLITLPELDQSVXXPS

SEQ ID NO: 37063 - protein, 30 aa, Artificial Sequence; identical to SEQ ID NO: 10756
  GFR-binding peptide

SEQ ID NO: 37064 - protein, 38 aa, Artificial Sequence; identical to SEQ ID NO: 12672
  GFR-binding peptide
  MOD_RES (32), (32): Xaa is C or S

SEQ ID NO: 37065 - protein, 39 aa, Artificial Sequence; identical to SEQ ID NO: 10757
  GFR-binding peptide
  MOD_RES (33), (34): Xaa is C or S
  MOD_RES (11), (12), (13), (14), (15): Xaa is A or G
  MOD_RES (16), (17), (18), (19): Xaa is A or G or is absent

SEQ ID NO: 37066 - protein, 37 aa, Artificial Sequence; identical to SEQ ID NO: 10758
  GFR-binding peptide
  MOD_RES (33), (34): Xaa is C or S
  MOD_RES (11), (12), (13), (14), (15): Xaa is A or G
  MOD_RES (16), (17), (18), (19): Xaa is A or G or is absent

SEQ ID NO: 37067 - protein, 40 aa, Artificial Sequence; identical to SEQ ID NO: 12673
  GFR-binding peptide
  MOD_RES (2), (4), (37), (38): Xaa is C or S
  MOD_RES (15), (16), (17), (18), (19): Xaa is A or G
  MOD_RES (20), (21), (22), (23): Xaa is A or G or is absent

SEQ ID NO: 37068 - protein, 30 aa, Artificial Sequence; identical to SEQ ID NO: 10759
  GFR-binding peptide

SEQ ID NO: 37069 - protein, 38 aa, Artificial Sequence; identical to SEQ ID NO: 10760
  GFR-binding peptide
  MOD_RES (2), (34), (35): Xaa is C or S

SEQ ID NO: 37070 - protein, 40 aa, Artificial Sequence; identical to SEQ ID NO: 3321
  GFR-binding peptide
  MOD_RES (1), (3), (37), (38): Xaa is C or S
  MOD_RES (15), (16), (17), (18), (19): Xaa is A or G
  MOD_RES (20), (21), (22), (23): Xaa is A or G or is absent

SEQ ID NO: 37071 - protein, 39 aa, Artificial Sequence; identical to SEQ ID NO: 12675
  GFR-binding peptide
  MOD_RES (33), (34): Xaa is C or S
  MOD_RES (11), (12), (13), (14), (15): Xaa is A or G
  MOD_RES (16), (17), (18), (19): Xaa is A or G or is absent

SEQ ID NO: 37072 - protein, 41 aa, Artificial Sequence; identical to SEQ ID NO: 5242
  GFR-binding peptide
  MOD_RES (2), (35), (36): Xaa is C or S
  MOD_RES (13), (14), (15), (16), (17): Xaa is A or G
  MOD_RES (18), (19), (20), (21): Xaa is A or G or is absent

SEQ ID NO: 37073 - protein, 36 aa, Artificial Sequence; identical to SEQ ID NO: 10763
  GFR-binding peptide
  MOD_RES (2), (35), (36): Xaa is C or S
  MOD_RES (13), (14), (15), (16), (17): Xaa is A or G
  MOD_RES (18), (19), (20), (21): Xaa is A or G or is absent

SEQ ID NO: 37074 - protein, 39 aa, Artificial Sequence; identical to SEQ ID NO: 3330
  GFR-binding peptide
  MOD_RES (1), (33), (34): Xaa is C or S

SEQ ID NO: 37075 - protein, 36 aa, Artificial Sequence; identical to SEQ ID NO: 12680
  GFR-binding peptide
  MOD_RES (1), (3): Xaa is C or S
  MOD_RES (15), (16), (17), (18), (19): Xaa is A or G
  MOD_RES (20), (21), (22), (23): Xaa is A or G or is absent

SEQ ID NO: 37076 - protein, 33 aa, Artificial Sequence; identical to SEQ ID NO: 10766
  GFR-binding peptide
  MOD_RES (31), (31): Xaa is C or S

SEQ ID NO: 37077 - protein, 41 aa, Artificial Sequence; identical to SEQ ID NO: 12681
  GFR-binding peptide
  MOD_RES (2), (4), (38), (39): Xaa is C or S
  MOD_RES (16), (17), (18), (19), (20): Xaa is A or G
  MOD_RES (21), (22), (23), (24): Xaa is A or G or is absent

SEQ ID NO: 37078 - protein, 38 aa, Artificial Sequence
  GFR-binding peptide
  MOD_RES (1), (3), (34), (35): Xaa is C or S
XKXSKVIMNSLQEIKPTKGIYYLITLPELDQSVXXPSA

SEQ ID NO: 37079 - protein, 33 aa, Artificial Sequence; identical to SEQ ID NO: 12682
  GFR-binding peptide
  MOD_RES (2), (2): Xaa is C or S

SEQ ID NO: 37080 - protein, 38 aa, Artificial Sequence; identical to SEQ ID NO: 12683
  GFR-binding peptide
  MOD_RES (34), (35): Xaa is C or S
  MOD_RES (12), (13), (14), (15), (16): Xaa is A or G
  MOD_RES (17), (18), (19), (20): Xaa is A or G or is absent

SEQ ID NO: 37081 - protein, 38 aa, Artificial Sequence; identical to SEQ ID NO: 5250
  GFR-binding peptide
  MOD_RES (1), (3), (35), (36): Xaa is C or S

SEQ ID NO: 37082 - protein, 41 aa, Artificial Sequence; identical to SEQ ID NO: 10768
  GFR-binding peptide
  MOD_RES (1), (3), (35), (36): Xaa is C or S

SEQ ID NO: 37083 - protein, 33 aa, Artificial Sequence; identical to SEQ ID NO: 12685
  GFR-binding peptide
  MOD_RES (1), (33): Xaa is C or S

SEQ ID NO: 37084 - protein, 35 aa, Artificial Sequence
  GFR-binding peptide
  MOD_RES (31), (32): Xaa is C or S
SKVIMNSLQEIKPTKGIYYLITLPELDQSVXXPSA

SEQ ID NO: 37085 - protein, 43 aa, Artificial Sequence; identical to SEQ ID NO: 10769
  GFR-binding peptide
  MOD_RES (2), (4), (38), (39): Xaa is C or S
  MOD_RES (16), (17), (18), (19), (20): Xaa is A or G
  MOD_RES (21), (22), (23), (24): Xaa is A or G or is absent

SEQ ID NO: 37086 - protein, 33 aa, Artificial Sequence; identical to SEQ ID NO: 5255
  GFR-binding peptide
  MOD_RES (33), (33): Xaa is C or S
  MOD_RES (11), (12), (13), (14), (15): Xaa is A or G
  MOD_RES (16), (17), (18), (19): Xaa is A or G or is absent

SEQ ID NO: 37087 - protein, 43 aa, Artificial Sequence; identical to SEQ ID NO: 10770
  GFR-binding peptide
  MOD_RES (1), (3), (37), (38): Xaa is C or S
  MOD_RES (15), (16), (17), (18), (19): Xaa is A or G
  MOD_RES (20), (21), (22), (23): Xaa is A or G or is absent

SEQ ID NO: 37088 - protein, 40 aa, Artificial Sequence; identical to SEQ ID NO: 5256
  GFR-binding peptide
  MOD_RES (1), (3), (35), (36): Xaa is C or S

SEQ ID NO: 37089 - protein, 33 aa, Artificial Sequence; identical to SEQ ID NO: 12688
  GFR-binding peptide
  MOD_RES (1), (3): Xaa is C or S

SEQ ID NO: 37090 - protein, 37 aa, Artificial Sequence; identical to SEQ ID NO: 3341
  GFR-binding peptide
  MOD_RES (2), (35), (36): Xaa is C or S
  MOD_RES (13), (14), (15), (16), (17): Xaa is A or G
  MOD_RES (18), (19), (20), (21): Xaa is A or G or is absent

SEQ ID NO: 37091 - protein, 33 aa, Artificial Sequence; identical to SEQ ID NO: 12690
  GFR-binding peptide
  MOD_RES (31), (32): Xaa is C or S

SEQ ID NO: 37092 - protein, 33 aa, Artificial Sequence; identical to SEQ ID NO: 10773
  GFR-binding peptide
  MOD_RES (1), (1): Xaa is C or S
  MOD_RES (12), (13), (14), (15), (16): Xaa is A or G
  MOD_RES (17), (18), (19), (20): Xaa is A or G or is absent

SEQ ID NO: 37093 - protein, 37 aa, Artificial Sequence; identical to SEQ ID NO: 3342
  GFR-binding peptide
  MOD_RES (1), (32), (33): Xaa is C or S

SEQ ID NO: 37094 - protein, 36 aa, Artificial Sequence; identical to SEQ ID NO: 10775
  GFR-binding peptide
  MOD_RES (2), (34), (35): Xaa is C or S

SEQ ID NO: 37095 - protein, 33 aa, Artificial Sequence; identical to SEQ ID NO: 12693
  GFR-binding peptide
  MOD_RES (31), (32): Xaa is C or S

SEQ ID NO: 37096 - protein, 34 aa, Artificial Sequence; identical to SEQ ID NO: 12694
  GFR-binding peptide
  MOD_RES (33), (34): Xaa is C or S
  MOD_RES (11), (12), (13), (14), (15): Xaa is A or G
  MOD_RES (16), (17), (18), (19): Xaa is A or G or is absent

SEQ ID NO: 37097 - protein, 43 aa, Artificial Sequence; identical to SEQ ID NO: 12695
  GFR-binding peptide
  MOD_RES (2), (4), (38), (39): Xaa is C or S
  MOD_RES (16), (17), (18), (19), (20): Xaa is A or G
  MOD_RES (21), (22), (23), (24): Xaa is A or G or is absent

SEQ ID NO: 37098 - protein, 39 aa, Artificial Sequence; identical to SEQ ID NO: 5265
  GFR-binding peptide
  MOD_RES (1), (3), (36), (37): Xaa is C or S
  MOD_RES (14), (15), (16), (17), (18): Xaa is A or G
  MOD_RES (19), (20), (21), (22): Xaa is A or G or is absent

SEQ ID NO: 37099 - protein, 33 aa, Artificial Sequence; identical to SEQ ID NO: 12697
  GFR-binding peptide
  MOD_RES (2), (2): Xaa is C or S

SEQ ID NO: 37100 - protein, 39 aa, Artificial Sequence; identical to SEQ ID NO: 12698
  GFR-binding peptide
  MOD_RES (1), (35), (36): Xaa is C or S
  MOD_RES (13), (14), (15), (16), (17): Xaa is A or G
  MOD_RES (18), (19), (20), (21): Xaa is A or G or is absent

SEQ ID NO: 37101 - protein, 38 aa, Artificial Sequence; identical to SEQ ID NO: 12699
  GFR-binding peptide
  MOD_RES (2), (4), (38): Xaa is C or S
  MOD_RES (16), (17), (18), (19), (20): Xaa is A or G
  MOD_RES (21), (22), (23), (24): Xaa is A or G or is absent

SEQ ID NO: 37102 - protein, 36 aa, Artificial Sequence; identical to SEQ ID NO: 12701
  GFR-binding peptide
  MOD_RES (32), (33): Xaa is C or S

SEQ ID NO: 37103 - protein, 40 aa, Artificial Sequence; identical to SEQ ID NO: 5268
  GFR-binding peptide
  MOD_RES (34), (35): Xaa is C or S
  MOD_RES (12), (13), (14), (15), (16): Xaa is A or G
  MOD_RES (17), (18), (19), (20): Xaa is A or G or is absent

SEQ ID NO: 37104 - protein, 40 aa, Artificial Sequence; identical to SEQ ID NO: 10780
  GFR-binding peptide
  MOD_RES (2), (34), (35): Xaa is C or S

SEQ ID NO: 37105 - protein, 40 aa, Artificial Sequence; identical to SEQ ID NO: 12703
  GFR-binding peptide
  MOD_RES (2), (34), (35): Xaa is C or S

SEQ ID NO: 37106 - protein, 35 aa, Artificial Sequence; identical to SEQ ID NO: 12704
  GFR-binding peptide
  MOD_RES (1), (33): Xaa is C or S

SEQ ID NO: 37107 - protein, 43 aa, Artificial Sequence; identical to SEQ ID NO: 3356
  GFR-binding peptide
  MOD_RES (1), (3), (37), (38): Xaa is C or S
  MOD_RES (15), (16), (17), (18), (19): Xaa is A or G
  MOD_RES (20), (21), (22), (23): Xaa is A or G or is absent

SEQ ID NO: 37108 - protein, 32 aa, Artificial Sequence; identical to SEQ ID NO: 10782
  GFR-binding peptide
  MOD_RES (2), (2): Xaa is C or S

SEQ ID NO: 37109 - protein, 42 aa, Artificial Sequence; identical to SEQ ID NO: 12706
  GFR-binding peptide
  MOD_RES (2), (4), (36), (37): Xaa is C or S

SEQ ID NO: 37110 - protein, 41 aa, Artificial Sequence; identical to SEQ ID NO: 12707
  GFR-binding peptide
  MOD_RES (1), (3), (35), (36): Xaa is C or S

SEQ ID NO: 37111 - protein, 38 aa, Artificial Sequence; identical to SEQ ID NO: 12708
  GFR-binding peptide
  MOD_RES (32), (33): Xaa is C or S

SEQ ID NO: 37112 - protein, 38 aa, Artificial Sequence; identical to SEQ ID NO: 12709
  GFR-binding peptide
  MOD_RES (2), (4), (38): Xaa is C or S
  MOD_RES (16), (17), (18), (19), (20): Xaa is A or G
  MOD_RES (21), (22), (23), (24): Xaa is A or G or is absent

SEQ ID NO: 37113 - protein, 32 aa, Artificial Sequence; identical to SEQ ID NO: 12710
  GFR-binding peptide
  MOD_RES (11), (12), (13), (14), (15): Xaa is A or G
  MOD_RES (16), (17), (18), (19): Xaa is A or G or is absent

SEQ ID NO: 37114 - protein, 38 aa, Artificial Sequence; identical to SEQ ID NO: 10784
  GFR-binding peptide
  MOD_RES (32), (33): Xaa is C or S

SEQ ID NO: 37115 - protein, 34 aa, Artificial Sequence; identical to SEQ ID NO: 10785
  GFR-binding peptide
  MOD_RES (1), (3), (34): Xaa is C or S

SEQ ID NO: 37116 - protein, 35 aa, Artificial Sequence; identical to SEQ ID NO: 10786
  GFR-binding peptide
  MOD_RES (32), (32): Xaa is C or S

SEQ ID NO: 37117 - protein, 35 aa, Artificial Sequence; identical to SEQ ID NO: 10788
  GFR-binding peptide
  MOD_RES (31), (32): Xaa is C or S

SEQ ID NO: 37118 - protein, 37 aa, Artificial Sequence; identical to SEQ ID NO: 3368
  GFR-binding peptide
  MOD_RES (2), (4), (36), (37): Xaa is C or S

SEQ ID NO: 37119 - protein, 36 aa, Artificial Sequence; identical to SEQ ID NO: 3370
  GFR-binding peptide
  MOD_RES (1), (35), (36): Xaa is C or S
  MOD_RES (13), (14), (15), (16), (17): Xaa is A or G
  MOD_RES (18), (19), (20), (21): Xaa is A or G or is absent

SEQ ID NO: 37120 - protein, 39 aa, Artificial Sequence; identical to SEQ ID NO: 10791
  GFR-binding peptide
  MOD_RES (2), (36), (37): Xaa is C or S
  MOD_RES (14), (15), (16), (17), (18): Xaa is A or G
  MOD_RES (19), (20), (21), (22): Xaa is A or G or is absent

SEQ ID NO: 37121 - protein, 39 aa, Artificial Sequence; identical to SEQ ID NO: 12714
  GFR-binding peptide
  MOD_RES (2), (4), (36), (37): Xaa is C or S

SEQ ID NO: 37122 - protein, 37 aa, Artificial Sequence; identical to SEQ ID NO: 3372
  GFR-binding peptide
  MOD_RES (1), (3), (37): Xaa is C or S
  MOD_RES (15), (16), (17), (18), (19): Xaa is A or G
  MOD_RES (20), (21), (22), (23): Xaa is A or G or is absent

SEQ ID NO: 37123 - protein, 34 aa, Artificial Sequence; identical to SEQ ID NO: 12715
  GFR-binding peptide
  MOD_RES (1), (33), (34): Xaa is C or S

SEQ ID NO: 37124 - protein, 33 aa, Artificial Sequence; identical to SEQ ID NO: 10793
  GFR-binding peptide
  MOD_RES (33), (33): Xaa is C or S
  MOD_RES (11), (12), (13), (14), (15): Xaa is A or G
  MOD_RES (16), (17), (18), (19): Xaa is A or G or is absent

SEQ ID NO: 37125 - protein, 31 aa, Artificial Sequence; identical to SEQ ID NO: 10794
  GFR-binding peptide

SEQ ID NO: 37126 - protein, 37 aa, Artificial Sequence; identical to SEQ ID NO: 3373
  GFR-binding peptide
  MOD_RES (1), (3), (34), (35): Xaa is C or S

SEQ ID NO: 37127 - protein, 35 aa, Artificial Sequence; identical to SEQ ID NO: 5290
  GFR-binding peptide
  MOD_RES (1), (3), (35): Xaa is C or S

SEQ ID NO: 37128 - protein, 39 aa, Artificial Sequence; identical to SEQ ID NO: 10796
  GFR-binding peptide
  MOD_RES (34), (35): Xaa is C or S
  MOD_RES (12), (13), (14), (15), (16): Xaa is A or G
  MOD_RES (17), (18), (19), (20): Xaa is A or G or is absent

SEQ ID NO: 37129 - protein, 40 aa, Artificial Sequence; identical to SEQ ID NO: 10797
  GFR-binding peptide
  MOD_RES (2), (34), (35): Xaa is C or S

SEQ ID NO: 37130 - protein, 40 aa, Artificial Sequence; identical to SEQ ID NO: 5292
  GFR-binding peptide
  MOD_RES (2), (4), (37), (38): Xaa is C or S
  MOD_RES (15), (16), (17), (18), (19): Xaa is A or G
  MOD_RES (20), (21), (22), (23): Xaa is A or G or is absent

SEQ ID NO: 37131 - protein, 35 aa, Artificial Sequence; identical to SEQ ID NO: 12720
  GFR-binding peptide
  MOD_RES (33), (34): Xaa is C or S
  MOD_RES (11), (12), (13), (14), (15): Xaa is A or G
  MOD_RES (16), (17), (18), (19): Xaa is A or G or is absent

SEQ ID NO: 37132 - protein, 36 aa, Artificial Sequence; identical to SEQ ID NO: 10800
  GFR-binding peptide
  MOD_RES (2), (36): Xaa is C or S
  MOD_RES (14), (15), (16), (17), (18): Xaa is A or G
  MOD_RES (19), (20), (21), (22): Xaa is A or G or is absent

SEQ ID NO: 37133 - protein, 38 aa, Artificial Sequence; identical to SEQ ID NO: 12721
  GFR-binding peptide
  MOD_RES (1), (32), (33): Xaa is C or S

SEQ ID NO: 37134 - protein, 42 aa, Artificial Sequence; identical to SEQ ID NO: 3378
  GFR-binding peptide
  MOD_RES (1), (3), (37), (38): Xaa is C or S
  MOD_RES (15), (16), (17), (18), (19): Xaa is A or G
  MOD_RES (20), (21), (22), (23): Xaa is A or G or is absent

SEQ ID NO: 37135 - protein, 40 aa, Artificial Sequence; identical to SEQ ID NO: 10802
  GFR-binding peptide
  MOD_RES (2), (4), (37), (38): Xaa is C or S
  MOD_RES (15), (16), (17), (18), (19): Xaa is A or G
  MOD_RES (20), (21), (22), (23): Xaa is A or G or is absent

SEQ ID NO: 37136 - protein, 32 aa, Artificial Sequence; identical to SEQ ID NO: 10803
  GFR-binding peptide
  MOD_RES (11), (12), (13), (14), (15): Xaa is A or G
  MOD_RES (16), (17), (18), (19): Xaa is A or G or is absent

SEQ ID NO: 37137 - protein, 39 aa, Artificial Sequence; identical to SEQ ID NO: 10804
  GFR-binding peptide
  MOD_RES (2), (34), (35): Xaa is C or S

SEQ ID NO: 37138 - protein, 35 aa, Artificial Sequence; identical to SEQ ID NO: 5301
  GFR-binding peptide
  MOD_RES (2), (4): Xaa is C or S

SEQ ID NO: 37139 - protein, 34 aa, Artificial Sequence
  GFR-binding peptide
  MOD_RES (1), (32), (33): Xaa is C or S
XSKVIMNSLQEIKPTKGIYYLITLPELDQSVXXP

SEQ ID NO: 37140 - protein, 41 aa, Artificial Sequence; identical to SEQ ID NO: 10805
  GFR-binding peptide
  MOD_RES (1), (35), (36): Xaa is C or S
  MOD_RES (13), (14), (15), (16), (17): Xaa is A or G
  MOD_RES (18), (19), (20), (21): Xaa is A or G or is absent

SEQ ID NO: 37141 - protein, 43 aa, Artificial Sequence; identical to SEQ ID NO: 12724
  GFR-binding peptide
  MOD_RES (1), (3), (37), (38): Xaa is C or S
  MOD_RES (15), (16), (17), (18), (19): Xaa is A or G
  MOD_RES (20), (21), (22), (23): Xaa is A or G or is absent

SEQ ID NO: 37142 - protein, 35 aa, Artificial Sequence; identical to SEQ ID NO: 10807
  GFR-binding peptide
  MOD_RES (34), (35): Xaa is C or S
  MOD_RES (12), (13), (14), (15), (16): Xaa is A or G
  MOD_RES (17), (18), (19), (20): Xaa is A or G or is absent

SEQ ID NO: 37143 - protein, 38 aa, Artificial Sequence; identical to SEQ ID NO: 10808
  GFR-binding peptide
  MOD_RES (2), (34), (35): Xaa is C or S

SEQ ID NO: 37144 - protein, 36 aa, Artificial Sequence; identical to SEQ ID NO: 5304
  GFR-binding peptide
  MOD_RES (31), (32): Xaa is C or S

SEQ ID NO: 37145 - protein, 40 aa, Artificial Sequence; identical to SEQ ID NO: 12726
  GFR-binding peptide
  MOD_RES (2), (4), (36): Xaa is C or S

SEQ ID NO: 37146 - protein, 41 aa, Artificial Sequence; identical to SEQ ID NO: 12727
  GFR-binding peptide
  MOD_RES (2), (4), (37), (38): Xaa is C or S
  MOD_RES (15), (16), (17), (18), (19): Xaa is A or G
  MOD_RES (20), (21), (22), (23): Xaa is A or G or is absent

SEQ ID NO: 37147 - protein, 34 aa, Artificial Sequence; identical to SEQ ID NO: 12728
  GFR-binding peptide
  MOD_RES (2), (4): Xaa is C or S

SEQ ID NO: 37148 - protein, 30 aa, Artificial Sequence; identical to SEQ ID NO: 12729
  GFR-binding peptide

SEQ ID NO: 37149 - protein, 41 aa, Artificial Sequence; identical to SEQ ID NO: 5305
  GFR-binding peptide
  MOD_RES (2), (4), (37), (38): Xaa is C or S
  MOD_RES (15), (16), (17), (18), (19): Xaa is A or G
  MOD_RES (20), (21), (22), (23): Xaa is A or G or is absent

SEQ ID NO: 37150 - protein, 37 aa, Artificial Sequence; identical to SEQ ID NO: 12731
  GFR-binding peptide
  MOD_RES (31), (32): Xaa is C or S

SEQ ID NO: 37151 - protein, 40 aa, Artificial Sequence; identical to SEQ ID NO: 10810
  GFR-binding peptide
  MOD_RES (1), (3), (35), (36): Xaa is C or S

SEQ ID NO: 37152 - protein, 39 aa, Artificial Sequence; identical to SEQ ID NO: 12732
  GFR-binding peptide
  MOD_RES (2), (36): Xaa is C or S
  MOD_RES (14), (15), (16), (17), (18): Xaa is A or G
  MOD_RES (19), (20), (21), (22): Xaa is A or G or is absent

SEQ ID NO: 37153 - protein, 41 aa, Artificial Sequence; identical to SEQ ID NO: 12733
  GFR-binding peptide
  MOD_RES (1), (3), (35), (36): Xaa is C or S

SEQ ID NO: 37154 - protein, 36 aa, Artificial Sequence; identical to SEQ ID NO: 3388
  GFR-binding peptide
  MOD_RES (2), (4), (36): Xaa is C or S

SEQ ID NO: 37155 - protein, 34 aa, Artificial Sequence; identical to SEQ ID NO: 12734
  GFR-binding peptide
  MOD_RES (2), (34): Xaa is C or S

SEQ ID NO: 37156 - protein, 36 aa, Artificial Sequence; identical to SEQ ID NO: 12735
  GFR-binding peptide
  MOD_RES (33), (34): Xaa is C or S
  MOD_RES (11), (12), (13), (14), (15): Xaa is A or G
  MOD_RES (16), (17), (18), (19): Xaa is A or G or is absent

SEQ ID NO: 37157 - protein, 39 aa, Artificial Sequence; identical to SEQ ID NO: 10812
  GFR-binding peptide
  MOD_RES (2), (4), (38), (39): Xaa is C or S
  MOD_RES (16), (17), (18), (19), (20): Xaa is A or G
  MOD_RES (21), (22), (23), (24): Xaa is A or G or is absent

SEQ ID NO: 37158 - protein, 38 aa, Artificial Sequence; identical to SEQ ID NO: 5313
  GFR-binding peptide
  MOD_RES (1), (33), (34): Xaa is C or S

SEQ ID NO: 37159 - protein, 38 aa, Artificial Sequence; identical to SEQ ID NO: 10814
  GFR-binding peptide
  MOD_RES (1), (35), (36): Xaa is C or S
  MOD_RES (13), (14), (15), (16), (17): Xaa is A or G
  MOD_RES (18), (19), (20), (21): Xaa is A or G or is absent

SEQ ID NO: 37160 - protein, 41 aa, Artificial Sequence; identical to SEQ ID NO: 12738
  GFR-binding peptide
  MOD_RES (1), (3), (35), (36): Xaa is C or S

SEQ ID NO: 37161 - protein, 32 aa, Artificial Sequence; identical to SEQ ID NO: 5314
  GFR-binding peptide
  MOD_RES (2), (2): Xaa is C or S

SEQ ID NO: 37162 - protein, 38 aa, Artificial Sequence; identical to SEQ ID NO: 12740
  GFR-binding peptide
  MOD_RES (1), (3), (36), (37): Xaa is C or S
  MOD_RES (14), (15), (16), (17), (18): Xaa is A or G
  MOD_RES (19), (20), (21), (22): Xaa is A or G or is absent

SEQ ID NO: 37163 - protein, 37 aa, Artificial Sequence; identical to SEQ ID NO: 12741
  GFR-binding peptide
  MOD_RES (2), (4), (37): Xaa is C or S
  MOD_RES (15), (16), (17), (18), (19): Xaa is A or G
  MOD_RES (20), (21), (22), (23): Xaa is A or G or is absent

SEQ ID NO: 37164 - protein, 42 aa, Artificial Sequence; identical to SEQ ID NO: 12742
  GFR-binding peptide
  MOD_RES (2), (4), (38), (39): Xaa is C or S
  MOD_RES (16), (17), (18), (19), (20): Xaa is A or G
  MOD_RES (21), (22), (23), (24): Xaa is A or G or is absent

SEQ ID NO: 37165 - protein, 34 aa, Artificial Sequence; identical to SEQ ID NO: 10816
  GFR-binding peptide
  MOD_RES (1), (34): Xaa is C or S
  MOD_RES (12), (13), (14), (15), (16): Xaa is A or G
  MOD_RES (17), (18), (19), (20): Xaa is A or G or is absent

SEQ ID NO: 37166 - protein, 36 aa, Artificial Sequence; identical to SEQ ID NO: 12743
  GFR-binding peptide
  MOD_RES (1), (3): Xaa is C or S
  MOD_RES (15), (16), (17), (18), (19): Xaa is A or G
  MOD_RES (20), (21), (22), (23): Xaa is A or G or is absent

SEQ ID NO: 37167 - protein, 36 aa, Artificial Sequence; identical to SEQ ID NO: 12744
  GFR-binding peptide
  MOD_RES (33), (34): Xaa is C or S
  MOD_RES (11), (12), (13), (14), (15): Xaa is A or G
  MOD_RES (16), (17), (18), (19): Xaa is A or G or is absent

SEQ ID NO: 37168 - protein, 36 aa, Artificial Sequence; identical to SEQ ID NO: 10817
  GFR-binding peptide
  MOD_RES (1), (35), (36): Xaa is C or S
  MOD_RES (13), (14), (15), (16), (17): Xaa is A or G
  MOD_RES (18), (19), (20), (21): Xaa is A or G or is absent

SEQ ID NO: 37169 - protein, 33 aa, Artificial Sequence; identical to SEQ ID NO: 12745
  GFR-binding peptide
  MOD_RES (31), (32): Xaa is C or S

SEQ ID NO: 37170 - protein, 35 aa, Artificial Sequence; identical to SEQ ID NO: 10818
  GFR-binding peptide
  MOD_RES (2), (4), (35): Xaa is C or S

SEQ ID NO: 37171 - protein, 30 aa, Artificial Sequence; identical to SEQ ID NO: 12746
  GFR-binding peptide

SEQ ID NO: 37172 - protein, 39 aa, Artificial Sequence; identical to SEQ ID NO: 10819
  GFR-binding peptide
  MOD_RES (1), (3), (37), (38): Xaa is C or S
  MOD_RES (15), (16), (17), (18), (19): Xaa is A or G
  MOD_RES (20), (21), (22), (23): Xaa is A or G or is absent

SEQ ID NO: 37173 - protein, 39 aa, Artificial Sequence; identical to SEQ ID NO: 10820
  GFR-binding peptide
  MOD_RES (2), (4), (38), (39): Xaa is C or S
  MOD_RES (16), (17), (18), (19), (20): Xaa is A or G
  MOD_RES (21), (22), (23), (24): Xaa is A or G or is absent

SEQ ID NO: 37174 - protein, 39 aa, Artificial Sequence; identical to SEQ ID NO: 12747
  GFR-binding peptide
  MOD_RES (1), (3), (34), (35): Xaa is C or S

SEQ ID NO: 37175 - protein, 38 aa, Artificial Sequence; identical to SEQ ID NO: 10821
  GFR-binding peptide
  MOD_RES (2), (4), (36): Xaa is C or S

SEQ ID NO: 37176 - protein, 39 aa, Artificial Sequence; identical to SEQ ID NO: 12749
  GFR-binding peptide
  MOD_RES (2), (4), (37), (38): Xaa is C or S
  MOD_RES (15), (16), (17), (18), (19): Xaa is A or G
  MOD_RES (20), (21), (22), (23): Xaa is A or G or is absent

SEQ ID NO: 37177 - protein, 39 aa, Artificial Sequence; identical to SEQ ID NO: 10822
  GFR-binding peptide
  MOD_RES (2), (36): Xaa is C or S
  MOD_RES (14), (15), (16), (17), (18): Xaa is A or G
  MOD_RES (19), (20), (21), (22): Xaa is A or G or is absent

SEQ ID NO: 37178 - protein, 39 aa, Artificial Sequence; identical to SEQ ID NO: 10824
  GFR-binding peptide
  MOD_RES (1), (34), (35): Xaa is C or S
  MOD_RES (12), (13), (14), (15), (16): Xaa is A or G
  MOD_RES (17), (18), (19), (20): Xaa is A or G or is absent

SEQ ID NO: 37179 - protein, 35 aa, Artificial Sequence; identical to SEQ ID NO: 3404
  GFR-binding peptide
  MOD_RES (2), (34), (35): Xaa is C or S

SEQ ID NO: 37180 - protein, 40 aa, Artificial Sequence; identical to SEQ ID NO: 10826
  GFR-binding peptide
  MOD_RES (2), (4), (36), (37): Xaa is C or S

SEQ ID NO: 37181 - protein, 36 aa, Artificial Sequence; identical to SEQ ID NO: 10827
  GFR-binding peptide
  MOD_RES (1), (33): Xaa is C or S

SEQ ID NO: 37182 - protein, 38 aa, Artificial Sequence; identical to SEQ ID NO: 12751
  GFR-binding peptide
  MOD_RES (1), (35), (36): Xaa is C or S
  MOD_RES (13), (14), (15), (16), (17): Xaa is A or G
  MOD_RES (18), (19), (20), (21): Xaa is A or G or is absent

SEQ ID NO: 37183 - protein, 38 aa, Artificial Sequence; identical to SEQ ID NO: 12752
  GFR-binding peptide
  MOD_RES (1), (35): Xaa is C or S
  MOD_RES (13), (14), (15), (16), (17): Xaa is A or G
  MOD_RES (18), (19), (20), (21): Xaa is A or G or is absent

SEQ ID NO: 37184 - protein, 35 aa, Artificial Sequence; identical to SEQ ID NO: 12753
  GFR-binding peptide
  MOD_RES (1), (3), (34), (35): Xaa is C or S

SEQ ID NO: 37185 - protein, 40 aa, Artificial Sequence; identical to SEQ ID NO: 10828
  GFR-binding peptide
  MOD_RES (34), (35): Xaa is C or S
  MOD_RES (12), (13), (14), (15), (16): Xaa is A or G
  MOD_RES (17), (18), (19), (20): Xaa is A or G or is absent

SEQ ID NO: 37186 - protein, 36 aa, Artificial Sequence; identical to SEQ ID NO: 12755
  GFR-binding peptide
  MOD_RES (2), (36): Xaa is C or S
  MOD_RES (14), (15), (16), (17), (18): Xaa is A or G
  MOD_RES (19), (20), (21), (22): Xaa is A or G or is absent

SEQ ID NO: 37187 - protein, 33 aa, Artificial Sequence; identical to SEQ ID NO: 5330
  GFR-binding peptide
  MOD_RES (1), (33): Xaa is C or S

SEQ ID NO: 37188 - protein, 41 aa, Artificial Sequence; identical to SEQ ID NO: 12757
  GFR-binding peptide
  MOD_RES (1), (3), (35), (36): Xaa is C or S

SEQ ID NO: 37189 - protein, 34 aa, Artificial Sequence; identical to SEQ ID NO: 12758
  GFR-binding peptide
  MOD_RES (2), (2): Xaa is C or S
  MOD_RES (13), (14), (15), (16), (17): Xaa is A or G
  MOD_RES (18), (19), (20), (21): Xaa is A or G or is absent

SEQ ID NO: 37190 - protein, 37 aa, Artificial Sequence; identical to SEQ ID NO: 10829
  GFR-binding peptide
  MOD_RES (1), (33), (34): Xaa is C or S

SEQ ID NO: 37191 - protein, 36 aa, Artificial Sequence; identical to SEQ ID NO: 10830
  GFR-binding peptide
  MOD_RES (2), (36): Xaa is C or S
  MOD_RES (14), (15), (16), (17), (18): Xaa is A or G
  MOD_RES (19), (20), (21), (22): Xaa is A or G or is absent

SEQ ID NO: 37192 - protein, 33 aa, Artificial Sequence; identical to SEQ ID NO: 10831
  GFR-binding peptide
  MOD_RES (32), (33): Xaa is C or S

SEQ ID NO: 37193 - protein, 40 aa, Artificial Sequence; identical to SEQ ID NO: 10832
  GFR-binding peptide
  MOD_RES (2), (36): Xaa is C or S
  MOD_RES (14), (15), (16), (17), (18): Xaa is A or G
  MOD_RES (19), (20), (21), (22): Xaa is A or G or is absent

SEQ ID NO: 37194 - protein, 34 aa, Artificial Sequence; identical to SEQ ID NO: 10833
  GFR-binding peptide
  MOD_RES (34), (34): Xaa is C or S
  MOD_RES (12), (13), (14), (15), (16): Xaa is A or G
  MOD_RES (17), (18), (19), (20): Xaa is A or G or is absent

SEQ ID NO: 37195 - protein, 40 aa, Artificial Sequence; identical to SEQ ID NO: 3411
  GFR-binding peptide
  MOD_RES (1), (34), (35): Xaa is C or S
  MOD_RES (12), (13), (14), (15), (16): Xaa is A or G
  MOD_RES (17), (18), (19), (20): Xaa is A or G or is absent

SEQ ID NO: 37196 - protein, 36 aa, Artificial Sequence; identical to SEQ ID NO: 5334
  GFR-binding peptide
  MOD_RES (34), (35): Xaa is C or S
  MOD_RES (12), (13), (14), (15), (16): Xaa is A or G
  MOD_RES (17), (18), (19), (20): Xaa is A or G or is absent

SEQ ID NO: 37197 - protein, 37 aa, Artificial Sequence; identical to SEQ ID NO: 10835
  GFR-binding peptide
  MOD_RES (2), (35), (36): Xaa is C or S
  MOD_RES (13), (14), (15), (16), (17): Xaa is A or G
  MOD_RES (18), (19), (20), (21): Xaa is A or G or is absent

SEQ ID NO: 37198 - protein, 37 aa, Artificial Sequence; identical to SEQ ID NO: 10836
  GFR-binding peptide
  MOD_RES (1), (33): Xaa is C or S

SEQ ID NO: 37199 - protein, 37 aa, Artificial Sequence; identical to SEQ ID NO: 12760
  GFR-binding peptide
  MOD_RES (31), (32): Xaa is C or S

SEQ ID NO: 37200 - protein, 36 aa, Artificial Sequence; identical to SEQ ID NO: 10839
  GFR-binding peptide
  MOD_RES (31), (32): Xaa is C or S

SEQ ID NO: 37201 - protein, 33 aa, Artificial Sequence; identical to SEQ ID NO: 12761
  GFR-binding peptide
  MOD_RES (32), (33): Xaa is C or S

SEQ ID NO: 37202 - protein, 42 aa, Artificial Sequence; identical to SEQ ID NO: 10840
  GFR-binding peptide
  MOD_RES (2), (4), (37), (38): Xaa is C or S
  MOD_RES (15), (16), (17), (18), (19): Xaa is A or G
  MOD_RES (20), (21), (22), (23): Xaa is A or G or is absent

SEQ ID NO: 37203 - protein, 38 aa, Artificial Sequence; identical to SEQ ID NO: 12762
  GFR-binding peptide
  MOD_RES (34), (34): Xaa is C or S
  MOD_RES (12), (13), (14), (15), (16): Xaa is A or G
  MOD_RES (17), (18), (19), (20): Xaa is A or G or is absent

SEQ ID NO: 37204 - protein, 36 aa, Artificial Sequence; identical to SEQ ID NO: 3418
  GFR-binding peptide
  MOD_RES (33), (34): Xaa is C or S
  MOD_RES (11), (12), (13), (14), (15): Xaa is A or G
  MOD_RES (16), (17), (18), (19): Xaa is A or G or is absent

SEQ ID NO: 37205 - protein, 31 aa, Artificial Sequence; identical to SEQ ID NO: 5336
  GFR-binding peptide
  MOD_RES (31), (31): Xaa is C or S

SEQ ID NO: 37206 - protein, 35 aa, Artificial Sequence; identical to SEQ ID NO: 12764
  GFR-binding peptide
  MOD_RES (1), (3), (34), (35): Xaa is C or S

SEQ ID NO: 37207 - protein, 35 aa, Artificial Sequence; identical to SEQ ID NO: 10843
  GFR-binding peptide
  MOD_RES (31), (32): Xaa is C or S

SEQ ID NO: 37208 - protein, 36 aa, Artificial Sequence; identical to SEQ ID NO: 12765
  GFR-binding peptide
  MOD_RES (2), (36): Xaa is C or S
  MOD_RES (14), (15), (16), (17), (18): Xaa is A or G
  MOD_RES (19), (20), (21), (22): Xaa is A or G or is absent

SEQ ID NO: 37209 - protein, 38 aa, Artificial Sequence; identical to SEQ ID NO: 5338
  GFR-binding peptide
  MOD_RES (1), (3), (35), (36): Xaa is C or S

SEQ ID NO: 37210 - protein, 42 aa, Artificial Sequence; identical to SEQ ID NO: 12770
  GFR-binding peptide
  MOD_RES (2), (4), (38), (39): Xaa is C or S
  MOD_RES (16), (17), (18), (19), (20): Xaa is A or G
  MOD_RES (21), (22), (23), (24): Xaa is A or G or is absent

SEQ ID NO: 37211 - protein, 41 aa, Artificial Sequence; identical to SEQ ID NO: 10844
  GFR-binding peptide
  MOD_RES (1), (35), (36): Xaa is C or S
  MOD_RES (13), (14), (15), (16), (17): Xaa is A or G
  MOD_RES (18), (19), (20), (21): Xaa is A or G or is absent

SEQ ID NO: 37212 - protein, 41 aa, Artificial Sequence; identical to SEQ ID NO: 12771
  GFR-binding peptide
  MOD_RES (1), (35), (36): Xaa is C or S
  MOD_RES (13), (14), (15), (16), (17): Xaa is A or G
  MOD_RES (18), (19), (20), (21): Xaa is A or G or is absent

SEQ ID NO: 37213 - protein, 35 aa, Artificial Sequence; identical to SEQ ID NO: 12772
  GFR-binding peptide
  MOD_RES (2), (33), (34): Xaa is C or S

SEQ ID NO: 37214 - protein, 31 aa, Artificial Sequence; identical to SEQ ID NO: 12773
  GFR-binding peptide

SEQ ID NO: 37215 - protein, 36 aa, Artificial Sequence; identical to SEQ ID NO: 12774
  GFR-binding peptide
  MOD_RES (2), (4), (35), (36): Xaa is C or S

SEQ ID NO: 37216 - protein, 32 aa, Artificial Sequence; identical to SEQ ID NO: 5347
  GFR-binding peptide
  MOD_RES (31), (32): Xaa is C or S

SEQ ID NO: 37217 - protein, 34 aa, Artificial Sequence; identical to SEQ ID NO: 12776
  GFR-binding peptide
  MOD_RES (1), (34): Xaa is C or S
  MOD_RES (12), (13), (14), (15), (16): Xaa is A or G
  MOD_RES (17), (18), (19), (20): Xaa is A or G or is absent

SEQ ID NO: 37218 - protein, 44 aa, Artificial Sequence; identical to SEQ ID NO: 5349
  GFR-binding peptide
  MOD_RES (2), (4), (38), (39): Xaa is C or S
  MOD_RES (16), (17), (18), (19), (20): Xaa is A or G
  MOD_RES (21), (22), (23), (24): Xaa is A or G or is absent

SEQ ID NO: 37219 - protein, 33 aa, Artificial Sequence; identical to SEQ ID NO: 12779
  GFR-binding peptide
  MOD_RES (1), (33): Xaa is C or S

SEQ ID NO: 37220 - protein, 39 aa, Artificial Sequence; identical to SEQ ID NO: 12780
  GFR-binding peptide
  MOD_RES (1), (33): Xaa is C or S

SEQ ID NO: 37221 - protein, 43 aa, Artificial Sequence; identical to SEQ ID NO: 3427
  GFR-binding peptide
  MOD_RES (2), (4), (38), (39): Xaa is C or S
  MOD_RES (16), (17), (18), (19), (20): Xaa is A or G
  MOD_RES (21), (22), (23), (24): Xaa is A or G or is absent

SEQ ID NO: 37222 - protein, 38 aa, Artificial Sequence; identical to SEQ ID NO: 10846
  GFR-binding peptide
  MOD_RES (2), (35), (36): Xaa is C or S
  MOD_RES (13), (14), (15), (16), (17): Xaa is A or G
  MOD_RES (18), (19), (20), (21): Xaa is A or G or is absent

SEQ ID NO: 37223 - protein, 39 aa, Artificial Sequence; identical to SEQ ID NO: 12782
  GFR-binding peptide
  MOD_RES (1), (35), (36): Xaa is C or S
  MOD_RES (13), (14), (15), (16), (17): Xaa is A or G
  MOD_RES (18), (19), (20), (21): Xaa is A or G or is absent

SEQ ID NO: 37224 - protein, 40 aa, Artificial Sequence; identical to SEQ ID NO: 5355
  GFR-binding peptide
  MOD_RES (1), (35), (36): Xaa is C or S
  MOD_RES (13), (14), (15), (16), (17): Xaa is A or G
  MOD_RES (18), (19), (20), (21): Xaa is A or G or is absent

SEQ ID NO: 37225 - protein, 34 aa, Artificial Sequence
  GFR-binding peptide
  MOD_RES (33), (34): Xaa is C or S
  MOD_RES (11), (12), (13), (14), (15): Xaa is A or G
  MOD_RES (16), (17), (18), (19): Xaa is A or G or is absent
SKVIMNSLQEXXXXXXXXXYYLITLPELDQSVXX

SEQ ID NO: 37226 - protein, 41 aa, Artificial Sequence; identical to SEQ ID NO: 5357
  GFR-binding peptide
  MOD_RES (1), (3), (35), (36): Xaa is C or S

SEQ ID NO: 37227 - protein, 39 aa, Artificial Sequence; identical to SEQ ID NO: 12786
  GFR-binding peptide
  MOD_RES (34), (35): Xaa is C or S
  MOD_RES (12), (13), (14), (15), (16): Xaa is A or G
  MOD_RES (17), (18), (19), (20): Xaa is A or G or is absent

SEQ ID NO: 37228 - protein, 36 aa, Artificial Sequence; identical to SEQ ID NO: 12787
  GFR-binding peptide
  MOD_RES (31), (32): Xaa is C or S

SEQ ID NO: 37229 - protein, 37 aa, Artificial Sequence; identical to SEQ ID NO: 12788
  GFR-binding peptide
  MOD_RES (32), (33): Xaa is C or S

SEQ ID NO: 37230 - protein, 40 aa, Artificial Sequence; identical to SEQ ID NO: 10847
  GFR-binding peptide
  MOD_RES (34), (34): Xaa is C or S
  MOD_RES (12), (13), (14), (15), (16): Xaa is A or G
  MOD_RES (17), (18), (19), (20): Xaa is A or G or is absent

SEQ ID NO: 37231 - protein, 38 aa, Artificial Sequence; identical to SEQ ID NO: 12790
  GFR-binding peptide
  MOD_RES (32), (33): Xaa is C or S

SEQ ID NO: 37232 - protein, 37 aa, Artificial Sequence; identical to SEQ ID NO: 12791
  GFR-binding peptide
  MOD_RES (2), (34), (35): Xaa is C or S

SEQ ID NO: 37233 - protein, 37 aa, Artificial Sequence; identical to SEQ ID NO: 10850
  GFR-binding peptide
  MOD_RES (2), (4), (36), (37): Xaa is C or S

SEQ ID NO: 37234 - protein, 39 aa, Artificial Sequence; identical to SEQ ID NO: 10851
  GFR-binding peptide
  MOD_RES (2), (4), (38), (39): Xaa is C or S
  MOD_RES (16), (17), (18), (19), (20): Xaa is A or G
  MOD_RES (21), (22), (23), (24): Xaa is A or G or is absent

SEQ ID NO: 37235 - protein, 37 aa, Artificial Sequence; identical to SEQ ID NO: 12792
  GFR-binding peptide
  MOD_RES (1), (33), (34): Xaa is C or S

SEQ ID NO: 37236 - protein, 40 aa, Artificial Sequence; identical to SEQ ID NO: 12794
  GFR-binding peptide
  MOD_RES (2), (4), (35), (36): Xaa is C or S

SEQ ID NO: 37237 - protein, 43 aa, Artificial Sequence; identical to SEQ ID NO: 12795
  GFR-binding peptide
  MOD_RES (1), (3), (37), (38): Xaa is C or S
  MOD_RES (15), (16), (17), (18), (19): Xaa is A or G
  MOD_RES (20), (21), (22), (23): Xaa is A or G or is absent

SEQ ID NO: 37238 - protein, 37 aa, Artificial Sequence; identical to SEQ ID NO: 12796
  GFR-binding peptide
  MOD_RES (1), (3), (34), (35): Xaa is C or S

SEQ ID NO: 37239 - protein, 40 aa, Artificial Sequence; identical to SEQ ID NO: 3439
  GFR-binding peptide
  MOD_RES (2), (4), (35), (36): Xaa is C or S

SEQ ID NO: 37240 - protein, 44 aa, Artificial Sequence; identical to SEQ ID NO: 10856
  GFR-binding peptide
  MOD_RES (2), (4), (38), (39): Xaa is C or S
  MOD_RES (16), (17), (18), (19), (20): Xaa is A or G
  MOD_RES (21), (22), (23), (24): Xaa is A or G or is absent

SEQ ID NO: 37241 - protein, 41 aa, Artificial Sequence; identical to SEQ ID NO: 10857
  GFR-binding peptide
  MOD_RES (1), (3), (35), (36): Xaa is C or S

SEQ ID NO: 37242 - protein, 40 aa, Artificial Sequence; identical to SEQ ID NO: 3440
  GFR-binding peptide
  MOD_RES (2), (36), (37): Xaa is C or S
  MOD_RES (14), (15), (16), (17), (18): Xaa is A or G
  MOD_RES (19), (20), (21), (22): Xaa is A or G or is absent

SEQ ID NO: 37243 - protein, 38 aa, Artificial Sequence; identical to SEQ ID NO: 10859
  GFR-binding peptide
  MOD_RES (2), (4), (35), (36): Xaa is C or S

SEQ ID NO: 37244 - protein, 38 aa, Artificial Sequence; identical to SEQ ID NO: 12797
  GFR-binding peptide
  MOD_RES (2), (4), (37), (38): Xaa is C or S
  MOD_RES (15), (16), (17), (18), (19): Xaa is A or G
  MOD_RES (20), (21), (22), (23): Xaa is A or G or is absent

SEQ ID NO: 37245 - protein, 41 aa, Artificial Sequence; identical to SEQ ID NO: 12798
  GFR-binding peptide
  MOD_RES (2), (4), (38), (39): Xaa is C or S
  MOD_RES (16), (17), (18), (19), (20): Xaa is A or G
  MOD_RES (21), (22), (23), (24): Xaa is A or G or is absent

SEQ ID NO: 37246 - protein, 33 aa, Artificial Sequence; identical to SEQ ID NO: 12799
  GFR-binding peptide
  MOD_RES (12), (13), (14), (15), (16): Xaa is A or G
  MOD_RES (17), (18), (19), (20): Xaa is A or G or is absent

SEQ ID NO: 37247 - protein, 44 aa, Artificial Sequence; identical to SEQ ID NO: 12800
  GFR-binding peptide
  MOD_RES (2), (4), (38), (39): Xaa is C or S
  MOD_RES (16), (17), (18), (19), (20): Xaa is A or G
  MOD_RES (21), (22), (23), (24): Xaa is A or G or is absent

SEQ ID NO: 37248 - protein, 39 aa, Artificial Sequence; identical to SEQ ID NO: 12801
  GFR-binding peptide
  MOD_RES (34), (35): Xaa is C or S
  MOD_RES (12), (13), (14), (15), (16): Xaa is A or G
  MOD_RES (17), (18), (19), (20): Xaa is A or G or is absent

SEQ ID NO: 37249 - protein, 43 aa, Artificial Sequence; identical to SEQ ID NO: 10862
  GFR-binding peptide
  MOD_RES (2), (4), (37), (38): Xaa is C or S
  MOD_RES (15), (16), (17), (18), (19): Xaa is A or G
  MOD_RES (20), (21), (22), (23): Xaa is A or G or is absent

SEQ ID NO: 37250 - protein, 32 aa, Artificial Sequence; identical to SEQ ID NO: 10863
  GFR-binding peptide
  MOD_RES (31), (32): Xaa is C or S

SEQ ID NO: 37251 - protein, 37 aa, Artificial Sequence; identical to SEQ ID NO: 10864
  GFR-binding peptide
  MOD_RES (31), (32): Xaa is C or S

SEQ ID NO: 37252 - protein, 37 aa, Artificial Sequence; identical to SEQ ID NO: 10865
  GFR-binding peptide
  MOD_RES (1), (3), (37): Xaa is C or S
  MOD_RES (15), (16), (17), (18), (19): Xaa is A or G
  MOD_RES (20), (21), (22), (23): Xaa is A or G or is absent

SEQ ID NO: 37253 - protein, 31 aa, Artificial Sequence
  GFR-binding peptide
  MOD_RES (1), (1): Xaa is C or S
XSKVIMNSLQEIKPTKGIYYLITLPELDQSV

SEQ ID NO: 37254 - protein, 34 aa, Artificial Sequence; identical to SEQ ID NO: 10866
  GFR-binding peptide
  MOD_RES (1), (33), (34): Xaa is C or S

SEQ ID NO: 37255 - protein, 39 aa, Artificial Sequence; identical to SEQ ID NO: 12803
  GFR-binding peptide
  MOD_RES (2), (4), (36): Xaa is C or S

SEQ ID NO: 37256 - protein, 38 aa, Artificial Sequence; identical to SEQ ID NO: 10867
  GFR-binding peptide
  MOD_RES (2), (4), (36), (37): Xaa is C or S

SEQ ID NO: 37257 - protein, 33 aa, Artificial Sequence; identical to SEQ ID NO: 10868
  GFR-binding peptide
  MOD_RES (31), (31): Xaa is C or S

SEQ ID NO: 37258 - protein, 41 aa, Artificial Sequence; identical to SEQ ID NO: 12805
  GFR-binding peptide
  MOD_RES (2), (4), (37), (38): Xaa is C or S
  MOD_RES (15), (16), (17), (18), (19): Xaa is A or G
  MOD_RES (20), (21), (22), (23): Xaa is A or G or is absent

SEQ ID NO: 37259 - protein, 38 aa, Artificial Sequence; identical to SEQ ID NO: 10869
  GFR-binding peptide
  MOD_RES (2), (4), (36), (37): Xaa is C or S

SEQ ID NO: 37260 - protein, 36 aa, Artificial Sequence; identical to SEQ ID NO: 12806
  GFR-binding peptide
  MOD_RES (31), (32): Xaa is C or S

SEQ ID NO: 37261 - protein, 40 aa, Artificial Sequence; identical to SEQ ID NO: 10871
  GFR-binding peptide
  MOD_RES (34), (35): Xaa is C or S
  MOD_RES (12), (13), (14), (15), (16): Xaa is A or G
  MOD_RES (17), (18), (19), (20): Xaa is A or G or is absent

SEQ ID NO: 37262 - protein, 35 aa, Artificial Sequence; identical to SEQ ID NO: 12807
  GFR-binding peptide
  MOD_RES (34), (35): Xaa is C or S
  MOD_RES (12), (13), (14), (15), (16): Xaa is A or G
  MOD_RES (17), (18), (19), (20): Xaa is A or G or is absent

SEQ ID NO: 37263 - protein, 33 aa, Artificial Sequence; identical to SEQ ID NO: 10872
  GFR-binding peptide
  MOD_RES (32), (33): Xaa is C or S

SEQ ID NO: 37264 - protein, 36 aa, Artificial Sequence; identical to SEQ ID NO: 10873
  GFR-binding peptide
  MOD_RES (2), (33), (34): Xaa is C or S

SEQ ID NO: 37265 - protein, 36 aa, Artificial Sequence; identical to SEQ ID NO: 5376
  GFR-binding peptide
  MOD_RES (1), (3), (36): Xaa is C or S
  MOD_RES (14), (15), (16), (17), (18): Xaa is A or G
  MOD_RES (19), (20), (21), (22): Xaa is A or G or is absent

SEQ ID NO: 37266 - protein, 39 aa, Artificial Sequence; identical to SEQ ID NO: 10874
  GFR-binding peptide
  MOD_RES (1), (35), (36): Xaa is C or S
  MOD_RES (13), (14), (15), (16), (17): Xaa is A or G
  MOD_RES (18), (19), (20), (21): Xaa is A or G or is absent

SEQ ID NO: 37267 - protein, 39 aa, Artificial Sequence; identical to SEQ ID NO: 12809
  GFR-binding peptide
  MOD_RES (2), (4), (35), (36): Xaa is C or S

SEQ ID NO: 37268 - protein, 36 aa, Artificial Sequence; identical to SEQ ID NO: 5378
  GFR-binding peptide
  MOD_RES (2), (4): Xaa is C or S
  MOD_RES (15), (16), (17), (18), (19): Xaa is A or G
  MOD_RES (20), (21), (22), (23): Xaa is A or G or is absent

SEQ ID NO: 37269 - protein, 39 aa, Artificial Sequence; identical to SEQ ID NO: 5379
  GFR-binding peptide
  MOD_RES (1), (3), (36), (37): Xaa is C or S
  MOD_RES (14), (15), (16), (17), (18): Xaa is A or G
  MOD_RES (19), (20), (21), (22): Xaa is A or G or is absent

SEQ ID NO: 37270 - protein, 40 aa, Artificial Sequence; identical to SEQ ID NO: 12813
  GFR-binding peptide
  MOD_RES (1), (3), (37), (38): Xaa is C or S
  MOD_RES (15), (16), (17), (18), (19): Xaa is A or G
  MOD_RES (20), (21), (22), (23): Xaa is A or G or is absent

SEQ ID NO: 37271 - protein, 34 aa, Artificial Sequence; identical to SEQ ID NO: 10876
  GFR-binding peptide
  MOD_RES (2), (33), (34): Xaa is C or S

SEQ ID NO: 37272 - protein, 32 aa, Artificial Sequence; identical to SEQ ID NO: 12814
  GFR-binding peptide
  MOD_RES (31), (32): Xaa is C or S

SEQ ID NO: 37273 - protein, 39 aa, Artificial Sequence; identical to SEQ ID NO: 12815
  GFR-binding peptide
  MOD_RES (2), (4), (38), (39): Xaa is C or S
  MOD_RES (16), (17), (18), (19), (20): Xaa is A or G
  MOD_RES (21), (22), (23), (24): Xaa is A or G or is absent

SEQ ID NO: 37274 - protein, 41 aa, Artificial Sequence; identical to SEQ ID NO: 10878
  GFR-binding peptide
  MOD_RES (1), (3), (35), (36): Xaa is C or S

SEQ ID NO: 37275 - protein, 41 aa, Artificial Sequence
  GFR-binding peptide
  MOD_RES (2), (35), (36): Xaa is C or S
  MOD_RES (13), (14), (15), (16), (17): Xaa is A or G
  MOD_RES (18), (19), (20), (21): Xaa is A or G or is absent
KXSKVIMNSLQEXXXXXXXXXYYLITLPELDQSVXXPSASA

SEQ ID NO: 37276 - protein, 39 aa, Artificial Sequence; identical to SEQ ID NO: 12817
  GFR-binding peptide
  MOD_RES (2), (4), (36), (37): Xaa is C or S

SEQ ID NO: 37277 - protein, 41 aa, Artificial Sequence; identical to SEQ ID NO: 10879
  GFR-binding peptide
  MOD_RES (1), (3), (37), (38): Xaa is C or S
  MOD_RES (15), (16), (17), (18), (19): Xaa is A or G
  MOD_RES (20), (21), (22), (23): Xaa is A or G or is absent

SEQ ID NO: 37278 - protein, 37 aa, Artificial Sequence; identical to SEQ ID NO: 5383
  GFR-binding peptide
  MOD_RES (2), (34), (35): Xaa is C or S

SEQ ID NO: 37279 - protein, 35 aa, Artificial Sequence; identical to SEQ ID NO: 12820
  GFR-binding peptide
  MOD_RES (2), (4): Xaa is C or S

SEQ ID NO: 37280 - protein, 38 aa, Artificial Sequence; identical to SEQ ID NO: 12822
  GFR-binding peptide
  MOD_RES (1), (34), (35): Xaa is C or S
  MOD_RES (12), (13), (14), (15), (16): Xaa is A or G
  MOD_RES (17), (18), (19), (20): Xaa is A or G or is absent

SEQ ID NO: 37281 - protein, 34 aa, Artificial Sequence; identical to SEQ ID NO: 3465
  GFR-binding peptide
  MOD_RES (31), (32): Xaa is C or S

SEQ ID NO: 37282 - protein, 39 aa, Artificial Sequence; identical to SEQ ID NO: 10881
  GFR-binding peptide
  MOD_RES (2), (4), (35), (36): Xaa is C or S

SEQ ID NO: 37283 - protein, 36 aa, Artificial Sequence; identical to SEQ ID NO: 12823
  GFR-binding peptide
  MOD_RES (2), (36): Xaa is C or S
  MOD_RES (14), (15), (16), (17), (18): Xaa is A or G
  MOD_RES (19), (20), (21), (22): Xaa is A or G or is absent

SEQ ID NO: 37284 - protein, 34 aa, Artificial Sequence; identical to SEQ ID NO: 10882
  GFR-binding peptide
  MOD_RES (31), (32): Xaa is C or S

SEQ ID NO: 37285 - protein, 39 aa, Artificial Sequence; identical to SEQ ID NO: 3468
  GFR-binding peptide
  MOD_RES (2), (34), (35): Xaa is C or S

SEQ ID NO: 37286 - protein, 43 aa, Artificial Sequence; identical to SEQ ID NO: 5393
  GFR-binding peptide
  MOD_RES (2), (4), (38), (39): Xaa is C or S
  MOD_RES (16), (17), (18), (19), (20): Xaa is A or G
  MOD_RES (21), (22), (23), (24): Xaa is A or G or is absent

SEQ ID NO: 37287 - protein, 34 aa, Artificial Sequence; identical to SEQ ID NO: 10885
  GFR-binding peptide
  MOD_RES (31), (32): Xaa is C or S

SEQ ID NO: 37288 - protein, 43 aa, Artificial Sequence; identical to SEQ ID NO: 10886
  GFR-binding peptide
  MOD_RES (2), (4), (38): Xaa is C or S
  MOD_RES (16), (17), (18), (19), (20): Xaa is A or G
  MOD_RES (21), (22), (23), (24): Xaa is A or G or is absent

SEQ ID NO: 37289 - protein, 42 aa, Artificial Sequence; identical to SEQ ID NO: 5396
  GFR-binding peptide
  MOD_RES (2), (36), (37): Xaa is C or S
  MOD_RES (14), (15), (16), (17), (18): Xaa is A or G
  MOD_RES (19), (20), (21), (22): Xaa is A or G or is absent

SEQ ID NO: 37290 - protein, 36 aa, Artificial Sequence; identical to SEQ ID NO: 12829
  GFR-binding peptide
  MOD_RES (2), (33), (34): Xaa is C or S

SEQ ID NO: 37291 - protein, 42 aa, Artificial Sequence; identical to SEQ ID NO: 12830
  GFR-binding peptide
  MOD_RES (2), (4), (36), (37): Xaa is C or S

SEQ ID NO: 37292 - protein, 36 aa, Artificial Sequence; identical to SEQ ID NO: 12831
  GFR-binding peptide
  MOD_RES (2), (4), (36): Xaa is C or S

SEQ ID NO: 37293 - protein, 40 aa, Artificial Sequence; identical to SEQ ID NO: 10887
  GFR-binding peptide
  MOD_RES (2), (4), (38): Xaa is C or S
  MOD_RES (16), (17), (18), (19), (20): Xaa is A or G
  MOD_RES (21), (22), (23), (24): Xaa is A or G or is absent

SEQ ID NO: 37294 - protein, 42 aa, Artificial Sequence; identical to SEQ ID NO: 10888
  GFR-binding peptide
  MOD_RES (1), (3), (37), (38): Xaa is C or S
  MOD_RES (15), (16), (17), (18), (19): Xaa is A or G
  MOD_RES (20), (21), (22), (23): Xaa is A or G or is absent

SEQ ID NO: 37295 - protein, 39 aa, Artificial Sequence; identical to SEQ ID NO: 10889
  GFR-binding peptide
  MOD_RES (1), (3), (37), (38): Xaa is C or S
  MOD_RES (15), (16), (17), (18), (19): Xaa is A or G
  MOD_RES (20), (21), (22), (23): Xaa is A or G or is absent

SEQ ID NO: 37296 - protein, 38 aa, Artificial Sequence; identical to SEQ ID NO: 10891
  GFR-binding peptide
  MOD_RES (2), (4), (36), (37): Xaa is C or S

SEQ ID NO: 37297 - protein, 37 aa, Artificial Sequence; identical to SEQ ID NO: 3475
  GFR-binding peptide
  MOD_RES (34), (35): Xaa is C or S
  MOD_RES (12), (13), (14), (15), (16): Xaa is A or G
  MOD_RES (17), (18), (19), (20): Xaa is A or G or is absent

SEQ ID NO: 37298 - protein, 38 aa, Artificial Sequence; identical to SEQ ID NO: 10893
  GFR-binding peptide
  MOD_RES (1), (34), (35): Xaa is C or S
  MOD_RES (12), (13), (14), (15), (16): Xaa is A or G
  MOD_RES (17), (18), (19), (20): Xaa is A or G or is absent

SEQ ID NO: 37299 - protein, 37 aa, Artificial Sequence; identical to SEQ ID NO: 12833
  GFR-binding peptide
  MOD_RES (1), (32), (33): Xaa is C or S

SEQ ID NO: 37300 - protein, 40 aa, Artificial Sequence; identical to SEQ ID NO: 10894
  GFR-binding peptide
  MOD_RES (34), (35): Xaa is C or S
  MOD_RES (12), (13), (14), (15), (16): Xaa is A or G
  MOD_RES (17), (18), (19), (20): Xaa is A or G or is absent

SEQ ID NO: 37301 - protein, 34 aa, Artificial Sequence; identical to SEQ ID NO: 3477
  GFR-binding peptide
  MOD_RES (2), (4): Xaa is C or S

SEQ ID NO: 37302 - protein, 31 aa, Artificial Sequence; identical to SEQ ID NO: 12834
  GFR-binding peptide
  MOD_RES (31), (31): Xaa is C or S

SEQ ID NO: 37303 - protein, 42 aa, Artificial Sequence; identical to SEQ ID NO: 10896
  GFR-binding peptide
  MOD_RES (2), (36), (37): Xaa is C or S
  MOD_RES (14), (15), (16), (17), (18): Xaa is A or G
  MOD_RES (19), (20), (21), (22): Xaa is A or G or is absent

SEQ ID NO: 37304 - protein, 37 aa, Artificial Sequence; identical to SEQ ID NO: 12835
  GFR-binding peptide
  MOD_RES (2), (36), (37): Xaa is C or S
  MOD_RES (14), (15), (16), (17), (18): Xaa is A or G
  MOD_RES (19), (20), (21), (22): Xaa is A or G or is absent

SEQ ID NO: 37305 - protein, 35 aa, Artificial Sequence; identical to SEQ ID NO: 3481
  GFR-binding peptide
  MOD_RES (31), (32): Xaa is C or S

SEQ ID NO: 37306 - protein, 38 aa, Artificial Sequence; identical to SEQ ID NO: 12837
  GFR-binding peptide
  MOD_RES (33), (34): Xaa is C or S
  MOD_RES (11), (12), (13), (14), (15): Xaa is A or G
  MOD_RES (16), (17), (18), (19): Xaa is A or G or is absent

SEQ ID NO: 37307 - protein, 35 aa, Artificial Sequence; identical to SEQ ID NO: 12838
  GFR-binding peptide
  MOD_RES (2), (4): Xaa is C or S

SEQ ID NO: 37308 - protein, 36 aa, Artificial Sequence; identical to SEQ ID NO: 10898
  GFR-binding peptide
  MOD_RES (1), (33), (34): Xaa is C or S

SEQ ID NO: 37309 - protein, 36 aa, Artificial Sequence; identical to SEQ ID NO: 12839
  GFR-binding peptide
  MOD_RES (1), (35): Xaa is C or S
  MOD_RES (13), (14), (15), (16), (17): Xaa is A or G
  MOD_RES (18), (19), (20), (21): Xaa is A or G or is absent

SEQ ID NO: 37310 - protein, 38 aa, Artificial Sequence; identical to SEQ ID NO: 10899
  GFR-binding peptide
  MOD_RES (33), (34): Xaa is C or S
  MOD_RES (11), (12), (13), (14), (15): Xaa is A or G
  MOD_RES (16), (17), (18), (19): Xaa is A or G or is absent

SEQ ID NO: 37311 - protein, 32 aa, Artificial Sequence; identical to SEQ ID NO: 12840
  GFR-binding peptide
  MOD_RES (31), (32): Xaa is C or S

SEQ ID NO: 37312 - protein, 37 aa, Artificial Sequence
  GFR-binding peptide
  MOD_RES (2), (4), (37): Xaa is C or S
  MOD_RES (15), (16), (17), (18), (19): Xaa is A or G
  MOD_RES (20), (21), (22), (23): Xaa is A or G or is absent
SXKXSKVIMNSLQEXXXXXXXXXYYLITLPELDQSVX

SEQ ID NO: 37313 - protein, 35 aa, Artificial Sequence; identical to SEQ ID NO: 3487
  GFR-binding peptide
  MOD_RES (34), (35): Xaa is C or S
  MOD_RES (12), (13), (14), (15), (16): Xaa is A or G
  MOD_RES (17), (18), (19), (20): Xaa is A or G or is absent

SEQ ID NO: 37314 - protein, 36 aa, Artificial Sequence; identical to SEQ ID NO: 10901
  GFR-binding peptide
  MOD_RES (2), (34), (35): Xaa is C or S

SEQ ID NO: 37315 - protein, 31 aa, Artificial Sequence; identical to SEQ ID NO: 12841
  GFR-binding peptide

SEQ ID NO: 37316 - protein, 39 aa, Artificial Sequence; identical to SEQ ID NO: 5411
  GFR-binding peptide
  MOD_RES (1), (3), (36), (37): Xaa is C or S
  MOD_RES (14), (15), (16), (17), (18): Xaa is A or G
  MOD_RES (19), (20), (21), (22): Xaa is A or G or is absent

SEQ ID NO: 37317 - protein, 38 aa, Artificial Sequence; identical to SEQ ID NO: 5412
  GFR-binding peptide
  MOD_RES (2), (35), (36): Xaa is C or S
  MOD_RES (13), (14), (15), (16), (17): Xaa is A or G
  MOD_RES (18), (19), (20), (21): Xaa is A or G or is absent

SEQ ID NO: 37318 - protein, 32 aa, Artificial Sequence; identical to SEQ ID NO: 10902
  GFR-binding peptide
  MOD_RES (1), (1): Xaa is C or S

SEQ ID NO: 37319 - protein, 32 aa, Artificial Sequence; identical to SEQ ID NO: 12844
  GFR-binding peptide
  MOD_RES (1), (1): Xaa is C or S

SEQ ID NO: 37320 - protein, 35 aa, Artificial Sequence; identical to SEQ ID NO: 12845
  GFR-binding peptide
  MOD_RES (33), (33): Xaa is C or S
  MOD_RES (11), (12), (13), (14), (15): Xaa is A or G
  MOD_RES (16), (17), (18), (19): Xaa is A or G or is absent

SEQ ID NO: 37321 - protein, 33 aa, Artificial Sequence; identical to SEQ ID NO: 10903
  GFR-binding peptide
  MOD_RES (2), (2): Xaa is C or S

SEQ ID NO: 37322 - protein, 35 aa, Artificial Sequence; identical to SEQ ID NO: 5413
  GFR-binding peptide
  MOD_RES (1), (35): Xaa is C or S
  MOD_RES (13), (14), (15), (16), (17): Xaa is A or G
  MOD_RES (18), (19), (20), (21): Xaa is A or G or is absent

SEQ ID NO: 37323 - protein, 39 aa, Artificial Sequence; identical to SEQ ID NO: 3490
  GFR-binding peptide
  MOD_RES (1), (3), (35), (36): Xaa is C or S

SEQ ID NO: 37324 - protein, 32 aa, Artificial Sequence; identical to SEQ ID NO: 10905
  GFR-binding peptide
  MOD_RES (32), (32): Xaa is C or S

SEQ ID NO: 37325 - protein, 39 aa, Artificial Sequence; identical to SEQ ID NO: 12847
  GFR-binding peptide
  MOD_RES (1), (3), (35), (36): Xaa is C or S

SEQ ID NO: 37326 - protein, 40 aa, Artificial Sequence; identical to SEQ ID NO: 10906
  GFR-binding peptide
  MOD_RES (2), (35), (36): Xaa is C or S
  MOD_RES (13), (14), (15), (16), (17): Xaa is A or G
  MOD_RES (18), (19), (20), (21): Xaa is A or G or is absent

SEQ ID NO: 37327 - protein, 40 aa, Artificial Sequence; identical to SEQ ID NO: 10907
  GFR-binding peptide
  MOD_RES (2), (34), (35): Xaa is C or S

SEQ ID NO: 37328 - protein, 41 aa, Artificial Sequence; identical to SEQ ID NO: 3493
  GFR-binding peptide
  MOD_RES (1), (3), (36), (37): Xaa is C or S
  MOD_RES (14), (15), (16), (17), (18): Xaa is A or G
  MOD_RES (19), (20), (21), (22): Xaa is A or G or is absent

SEQ ID NO: 37329 - protein, 36 aa, Artificial Sequence; identical to SEQ ID NO: 12849
  GFR-binding peptide
  MOD_RES (32), (32): Xaa is C or S

SEQ ID NO: 37330 - protein, 37 aa, Artificial Sequence; identical to SEQ ID NO: 10910
  GFR-binding peptide
  MOD_RES (32), (32): Xaa is C or S

SEQ ID NO: 37331 - protein, 34 aa, Artificial Sequence; identical to SEQ ID NO: 3496
  GFR-binding peptide
  MOD_RES (33), (34): Xaa is C or S
  MOD_RES (11), (12), (13), (14), (15): Xaa is A or G
  MOD_RES (16), (17), (18), (19): Xaa is A or G or is absent

SEQ ID NO: 37332 - protein, 39 aa, Artificial Sequence; identical to SEQ ID NO: 10913
  GFR-binding peptide
  MOD_RES (1), (35), (36): Xaa is C or S
  MOD_RES (13), (14), (15), (16), (17): Xaa is A or G
  MOD_RES (18), (19), (20), (21): Xaa is A or G or is absent

SEQ ID NO: 37333 - protein, 32 aa, Artificial Sequence; identical to SEQ ID NO: 10914
  GFR-binding peptide
  MOD_RES (31), (31): Xaa is C or S

SEQ ID NO: 37334 - protein, 34 aa, Artificial Sequence
  GFR-binding peptide
  MOD_RES (2), (33), (34): Xaa is C or S
KXSKVIMNSLQEIKPTKGIYYLITLPELDQSVXX

SEQ ID NO: 37335 - protein, 35 aa, Artificial Sequence; identical to SEQ ID NO: 10916
  GFR-binding peptide
  MOD_RES (34), (34): Xaa is C or S
  MOD_RES (12), (13), (14), (15), (16): Xaa is A or G
  MOD_RES (17), (18), (19), (20): Xaa is A or G or is absent

SEQ ID NO: 37336 - protein, 34 aa, Artificial Sequence; identical to SEQ ID NO: 12853
  GFR-binding peptide
  MOD_RES (1), (33): Xaa is C or S

SEQ ID NO: 37337 - protein, 35 aa, Artificial Sequence; identical to SEQ ID NO: 10917
  GFR-binding peptide
  MOD_RES (31), (32): Xaa is C or S

SEQ ID NO: 37338 - protein, 35 aa, Artificial Sequence; identical to SEQ ID NO: 12854
  GFR-binding peptide
  MOD_RES (31), (32): Xaa is C or S

SEQ ID NO: 37339 - protein, 33 aa, Artificial Sequence; identical to SEQ ID NO: 10918
  GFR-binding peptide
  MOD_RES (31), (32): Xaa is C or S

SEQ ID NO: 37340 - protein, 36 aa, Artificial Sequence; identical to SEQ ID NO: 10919
  GFR-binding peptide
  MOD_RES (2), (36): Xaa is C or S
  MOD_RES (14), (15), (16), (17), (18): Xaa is A or G
  MOD_RES (19), (20), (21), (22): Xaa is A or G or is absent

SEQ ID NO: 37341 - protein, 33 aa, Artificial Sequence; identical to SEQ ID NO: 10920
  GFR-binding peptide
  MOD_RES (12), (13), (14), (15), (16): Xaa is A or G
  MOD_RES (17), (18), (19), (20): Xaa is A or G or is absent

SEQ ID NO: 37342 - protein, 40 aa, Artificial Sequence; identical to SEQ ID NO: 12856
  GFR-binding peptide
  MOD_RES (2), (4), (38): Xaa is C or S
  MOD_RES (16), (17), (18), (19), (20): Xaa is A or G
  MOD_RES (21), (22), (23), (24): Xaa is A or G or is absent

SEQ ID NO: 37343 - protein, 34 aa, Artificial Sequence; identical to SEQ ID NO: 10921
  GFR-binding peptide
  MOD_RES (33), (33): Xaa is C or S
  MOD_RES (11), (12), (13), (14), (15): Xaa is A or G
  MOD_RES (16), (17), (18), (19): Xaa is A or G or is absent

SEQ ID NO: 37344 - protein, 34 aa, Artificial Sequence; identical to SEQ ID NO: 3514
  GFR-binding peptide
  MOD_RES (34), (34): Xaa is C or S
  MOD_RES (12), (13), (14), (15), (16): Xaa is A or G
  MOD_RES (17), (18), (19), (20): Xaa is A or G or is absent

SEQ ID NO: 37345 - protein, 37 aa, Artificial Sequence; identical to SEQ ID NO: 3515
  GFR-binding peptide
  MOD_RES (2), (4), (35), (36): Xaa is C or S

SEQ ID NO: 37346 - protein, 33 aa, Artificial Sequence; identical to SEQ ID NO: 12858
  GFR-binding peptide
  MOD_RES (12), (13), (14), (15), (16): Xaa is A or G
  MOD_RES (17), (18), (19), (20): Xaa is A or G or is absent

SEQ ID NO: 37347 - protein, 43 aa, Artificial Sequence; identical to SEQ ID NO: 12859
  GFR-binding peptide
  MOD_RES (1), (3), (37), (38): Xaa is C or S
  MOD_RES (15), (16), (17), (18), (19): Xaa is A or G
  MOD_RES (20), (21), (22), (23): Xaa is A or G or is absent

SEQ ID NO: 37348 - protein, 37 aa, Artificial Sequence
  GFR-binding peptide
  MOD_RES (2), (33), (34): Xaa is C or S
KXSKVIMNSLQEIKPTKGIYYLITLPELDQSVXXPSA

SEQ ID NO: 37349 - protein, 32 aa, Artificial Sequence; identical to SEQ ID NO: 10927
  GFR-binding peptide
  MOD_RES (2), (2): Xaa is C or S

SEQ ID NO: 37350 - protein, 37 aa, Artificial Sequence
  GFR-binding peptide
  MOD_RES (2), (4), (35), (36): Xaa is C or S
SXKXSKVIMNSLQEIKPTKGIYYLITLPELDQSVXXP

SEQ ID NO: 37351 - protein, 42 aa, Artificial Sequence; identical to SEQ ID NO: 10928
  GFR-binding peptide
  MOD_RES (2), (4), (37), (38): Xaa is C or S
  MOD_RES (15), (16), (17), (18), (19): Xaa is A or G
  MOD_RES (20), (21), (22), (23): Xaa is A or G or is absent

SEQ ID NO: 37352 - protein, 41 aa, Artificial Sequence; identical to SEQ ID NO: 10929
  GFR-binding peptide
  MOD_RES (1), (3), (35), (36): Xaa is C or S

SEQ ID NO: 37353 - protein, 37 aa, Artificial Sequence; identical to SEQ ID NO: 10930
  GFR-binding peptide
  MOD_RES (2), (34), (35): Xaa is C or S

SEQ ID NO: 37354 - protein, 37 aa, Artificial Sequence; identical to SEQ ID NO: 10931
  GFR-binding peptide
  MOD_RES (2), (33), (34): Xaa is C or S

SEQ ID NO: 37355 - protein, 37 aa, Artificial Sequence; identical to SEQ ID NO: 12861
  GFR-binding peptide
  MOD_RES (2), (4), (35), (36): Xaa is C or S

SEQ ID NO: 37356 - protein, 39 aa, Artificial Sequence; identical to SEQ ID NO: 12864
  GFR-binding peptide
  MOD_RES (1), (3), (35), (36): Xaa is C or S

SEQ ID NO: 37357 - protein, 39 aa, Artificial Sequence; identical to SEQ ID NO: 12865
  GFR-binding peptide
  MOD_RES (1), (3), (37), (38): Xaa is C or S
  MOD_RES (15), (16), (17), (18), (19): Xaa is A or G
  MOD_RES (20), (21), (22), (23): Xaa is A or G or is absent

SEQ ID NO: 37358 - protein, 32 aa, Artificial Sequence; identical to SEQ ID NO: 3520
  GFR-binding peptide
  MOD_RES (1), (1): Xaa is C or S

SEQ ID NO: 37359 - protein, 42 aa, Artificial Sequence; identical to SEQ ID NO: 3521
  GFR-binding peptide
  MOD_RES (2), (4), (36): Xaa is C or S

SEQ ID NO: 37360 - protein, 41 aa, Artificial Sequence; identical to SEQ ID NO: 3522
  GFR-binding peptide
  MOD_RES (2), (4), (37), (38): Xaa is C or S
  MOD_RES (15), (16), (17), (18), (19): Xaa is A or G
  MOD_RES (20), (21), (22), (23): Xaa is A or G or is absent

SEQ ID NO: 37361 - protein, 39 aa, Artificial Sequence; identical to SEQ ID NO: 10935
  GFR-binding peptide
  MOD_RES (2), (4), (36), (37): Xaa is C or S

SEQ ID NO: 37362 - protein, 35 aa, Artificial Sequence; identical to SEQ ID NO: 5448
  GFR-binding peptide
  MOD_RES (1), (3): Xaa is C or S
  MOD_RES (14), (15), (16), (17), (18): Xaa is A or G
  MOD_RES (19), (20), (21), (22): Xaa is A or G or is absent

SEQ ID NO: 37363 - protein, 33 aa, Artificial Sequence; identical to SEQ ID NO: 12868
  GFR-binding peptide
  MOD_RES (12), (13), (14), (15), (16): Xaa is A or G
  MOD_RES (17), (18), (19), (20): Xaa is A or G or is absent

SEQ ID NO: 37364 - protein, 33 aa, Artificial Sequence; identical to SEQ ID NO: 5451
  GFR-binding peptide
  MOD_RES (12), (13), (14), (15), (16): Xaa is A or G
  MOD_RES (17), (18), (19), (20): Xaa is A or G or is absent

SEQ ID NO: 37365 - protein, 31 aa, Artificial Sequence; identical to SEQ ID NO: 12872
  GFR-binding peptide
  MOD_RES (31), (31): Xaa is C or S

SEQ ID NO: 37366 - protein, 36 aa, Artificial Sequence; identical to SEQ ID NO: 3527
  GFR-binding peptide
  MOD_RES (1), (3), (34), (35): Xaa is C or S

SEQ ID NO: 37367 - protein, 31 aa, Artificial Sequence; identical to SEQ ID NO: 5457
  GFR-binding peptide
  MOD_RES (1), (1): Xaa is C or S

SEQ ID NO: 37368 - protein, 41 aa, Artificial Sequence; identical to SEQ ID NO: 10939
  GFR-binding peptide
  MOD_RES (1), (3), (35), (36): Xaa is C or S

SEQ ID NO: 37369 - protein, 39 aa, Artificial Sequence; identical to SEQ ID NO: 12876
  GFR-binding peptide
  MOD_RES (2), (4), (35), (36): Xaa is C or S

SEQ ID NO: 37370 - protein, 36 aa, Artificial Sequence; identical to SEQ ID NO: 12877
  GFR-binding peptide
  MOD_RES (1), (3): Xaa is C or S
  MOD_RES (15), (16), (17), (18), (19): Xaa is A or G
  MOD_RES (20), (21), (22), (23): Xaa is A or G or is absent

SEQ ID NO: 37371 - protein, 36 aa, Artificial Sequence; identical to SEQ ID NO: 12878
  GFR-binding peptide
  MOD_RES (31), (32): Xaa is C or S

SEQ ID NO: 37372 - protein, 39 aa, Artificial Sequence
  GFR-binding peptide
  MOD_RES (2), (4), (37), (38): Xaa is C or S
  MOD_RES (15), (16), (17), (18), (19): Xaa is A or G
  MOD_RES (20), (21), (22), (23): Xaa is A or G or is absent
SXKXSKVIMNSLQEXXXXXXXXXYYLITLPELDQSVXXP

SEQ ID NO: 37373 - protein, 39 aa, Artificial Sequence; identical to SEQ ID NO: 10940
  GFR-binding peptide
  MOD_RES (1), (3), (37), (38): Xaa is C or S
  MOD_RES (15), (16), (17), (18), (19): Xaa is A or G
  MOD_RES (20), (21), (22), (23): Xaa is A or G or is absent

SEQ ID NO: 37374 - protein, 33 aa, Artificial Sequence; identical to SEQ ID NO: 12881
  GFR-binding peptide
  MOD_RES (32), (32): Xaa is C or S

SEQ ID NO: 37375 - protein, 36 aa, Artificial Sequence; identical to SEQ ID NO: 10941
  GFR-binding peptide
  MOD_RES (2), (4), (36): Xaa is C or S

SEQ ID NO: 37376 - protein, 36 aa, Artificial Sequence; identical to SEQ ID NO: 12882
  GFR-binding peptide
  MOD_RES (1), (33): Xaa is C or S

SEQ ID NO: 37377 - protein, 35 aa, Artificial Sequence; identical to SEQ ID NO: 10943
  GFR-binding peptide
  MOD_RES (1), (3), (35): Xaa is C or S

SEQ ID NO: 37378 - protein, 40 aa, Artificial Sequence; identical to SEQ ID NO: 10944
  GFR-binding peptide
  MOD_RES (1), (35), (36): Xaa is C or S
  MOD_RES (13), (14), (15), (16), (17): Xaa is A or G
  MOD_RES (18), (19), (20), (21): Xaa is A or G or is absent

SEQ ID NO: 37379 - protein, 38 aa, Artificial Sequence; identical to SEQ ID NO: 10945
  GFR-binding peptide
  MOD_RES (1), (3), (34), (35): Xaa is C or S

SEQ ID NO: 37380 - protein, 37 aa, Artificial Sequence; identical to SEQ ID NO: 12883
  GFR-binding peptide
  MOD_RES (2), (36), (37): Xaa is C or S
  MOD_RES (14), (15), (16), (17), (18): Xaa is A or G
  MOD_RES (19), (20), (21), (22): Xaa is A or G or is absent

SEQ ID NO: 37381 - protein, 37 aa, Artificial Sequence
  GFR-binding peptide
  MOD_RES (1), (32), (33): Xaa is C or S
XSKVIMNSLQEIKPTKGIYYLITLPELDQSVXXPSAS

SEQ ID NO: 37382 - protein, 37 aa, Artificial Sequence; identical to SEQ ID NO: 12884
  GFR-binding peptide
  MOD_RES (32), (33): Xaa is C or S

SEQ ID NO: 37383 - protein, 37 aa, Artificial Sequence; identical to SEQ ID NO: 10946
  GFR-binding peptide
  MOD_RES (34), (34): Xaa is C or S
  MOD_RES (12), (13), (14), (15), (16): Xaa is A or G
  MOD_RES (17), (18), (19), (20): Xaa is A or G or is absent

SEQ ID NO: 37384 - protein, 40 aa, Artificial Sequence; identical to SEQ ID NO: 12885
  GFR-binding peptide
  MOD_RES (34), (35): Xaa is C or S
  MOD_RES (12), (13), (14), (15), (16): Xaa is A or G
  MOD_RES (17), (18), (19), (20): Xaa is A or G or is absent

SEQ ID NO: 37385 - protein, 43 aa, Artificial Sequence; identical to SEQ ID NO: 10947
  GFR-binding peptide
  MOD_RES (1), (3), (37), (38): Xaa is C or S
  MOD_RES (15), (16), (17), (18), (19): Xaa is A or G
  MOD_RES (20), (21), (22), (23): Xaa is A or G or is absent

SEQ ID NO: 37386 - protein, 38 aa, Artificial Sequence; identical to SEQ ID NO: 12887
  GFR-binding peptide
  MOD_RES (2), (34): Xaa is C or S

SEQ ID NO: 37387 - protein, 35 aa, Artificial Sequence; identical to SEQ ID NO: 10948
  GFR-binding peptide
  MOD_RES (1), (35): Xaa is C or S
  MOD_RES (13), (14), (15), (16), (17): Xaa is A or G
  MOD_RES (18), (19), (20), (21): Xaa is A or G or is absent

SEQ ID NO: 37388 - protein, 44 aa, Artificial Sequence; identical to SEQ ID NO: 5477
  GFR-binding peptide
  MOD_RES (2), (4), (38), (39): Xaa is C or S
  MOD_RES (16), (17), (18), (19), (20): Xaa is A or G
  MOD_RES (21), (22), (23), (24): Xaa is A or G or is absent

SEQ ID NO: 37389 - protein, 33 aa, Artificial Sequence; identical to SEQ ID NO: 12891
  GFR-binding peptide
  MOD_RES (31), (32): Xaa is C or S

SEQ ID NO: 37390 - protein, 36 aa, Artificial Sequence; identical to SEQ ID NO: 10949
  GFR-binding peptide
  MOD_RES (2), (4), (36): Xaa is C or S

SEQ ID NO: 37391 - protein, 35 aa, Artificial Sequence; identical to SEQ ID NO: 10951
  GFR-binding peptide
  MOD_RES (2), (34), (35): Xaa is C or S

SEQ ID NO: 37392 - protein, 39 aa, Artificial Sequence; identical to SEQ ID NO: 10952
  GFR-binding peptide
  MOD_RES (1), (33), (34): Xaa is C or S

SEQ ID NO: 37393 - protein, 42 aa, Artificial Sequence; identical to SEQ ID NO: 10953
  GFR-binding peptide
  MOD_RES (1), (3), (37), (38): Xaa is C or S
  MOD_RES (15), (16), (17), (18), (19): Xaa is A or G
  MOD_RES (20), (21), (22), (23): Xaa is A or G or is absent

SEQ ID NO: 37394 - protein, 40 aa, Artificial Sequence; identical to SEQ ID NO: 10954
  GFR-binding peptide
  MOD_RES (1), (3), (37), (38): Xaa is C or S
  MOD_RES (15), (16), (17), (18), (19): Xaa is A or G
  MOD_RES (20), (21), (22), (23): Xaa is A or G or is absent

SEQ ID NO: 37395 - protein, 37 aa, Artificial Sequence; identical to SEQ ID NO: 10955
  GFR-binding peptide
  MOD_RES (2), (36), (37): Xaa is C or S
  MOD_RES (14), (15), (16), (17), (18): Xaa is A or G
  MOD_RES (19), (20), (21), (22): Xaa is A or G or is absent

SEQ ID NO: 37396 - protein, 36 aa, Artificial Sequence; identical to SEQ ID NO: 12892
  GFR-binding peptide
  MOD_RES (2), (36): Xaa is C or S
  MOD_RES (14), (15), (16), (17), (18): Xaa is A or G
  MOD_RES (19), (20), (21), (22): Xaa is A or G or is absent

SEQ ID NO: 37397 - protein, 38 aa, Artificial Sequence; identical to SEQ ID NO: 10957
  GFR-binding peptide
  MOD_RES (33), (34): Xaa is C or S
  MOD_RES (11), (12), (13), (14), (15): Xaa is A or G
  MOD_RES (16), (17), (18), (19): Xaa is A or G or is absent

SEQ ID NO: 37398 - protein, 40 aa, Artificial Sequence; identical to SEQ ID NO: 12893
  GFR-binding peptide
  MOD_RES (1), (3), (35), (36): Xaa is C or S

SEQ ID NO: 37399 - protein, 39 aa, Artificial Sequence; identical to SEQ ID NO: 5484
  GFR-binding peptide
  MOD_RES (2), (35), (36): Xaa is C or S
  MOD_RES (13), (14), (15), (16), (17): Xaa is A or G
  MOD_RES (18), (19), (20), (21): Xaa is A or G or is absent

SEQ ID NO: 37400 - protein, 32 aa, Artificial Sequence; identical to SEQ ID NO: 12895
  GFR-binding peptide
  MOD_RES (32), (32): Xaa is C or S

SEQ ID NO: 37401 - protein, 33 aa, Artificial Sequence; identical to SEQ ID NO: 12896
  GFR-binding peptide
  MOD_RES (12), (13), (14), (15), (16): Xaa is A or G
  MOD_RES (17), (18), (19), (20): Xaa is A or G or is absent

SEQ ID NO: 37402 - protein, 34 aa, Artificial Sequence; identical to SEQ ID NO: 10958
  GFR-binding peptide
  MOD_RES (1), (3): Xaa is C or S

SEQ ID NO: 37403 - protein, 34 aa, Artificial Sequence; identical to SEQ ID NO: 3549
  GFR-binding peptide
  MOD_RES (2), (2): Xaa is C or S
  MOD_RES (13), (14), (15), (16), (17): Xaa is A or G
  MOD_RES (18), (19), (20), (21): Xaa is A or G or is absent

SEQ ID NO: 37404 - protein, 43 aa, Artificial Sequence; identical to SEQ ID NO: 10961
  GFR-binding peptide
  MOD_RES (1), (3), (37), (38): Xaa is C or S
  MOD_RES (15), (16), (17), (18), (19): Xaa is A or G
  MOD_RES (20), (21), (22), (23): Xaa is A or G or is absent

SEQ ID NO: 37405 - protein, 32 aa, Artificial Sequence; identical to SEQ ID NO: 10962
  GFR-binding peptide
  MOD_RES (1), (1): Xaa is C or S

SEQ ID NO: 37406 - protein, 39 aa, Artificial Sequence; identical to SEQ ID NO: 12899
  GFR-binding peptide
  MOD_RES (1), (34), (35): Xaa is C or S
  MOD_RES (12), (13), (14), (15), (16): Xaa is A or G
  MOD_RES (17), (18), (19), (20): Xaa is A or G or is absent

SEQ ID NO: 37407 - protein, 37 aa, Artificial Sequence; identical to SEQ ID NO: 10963
  GFR-binding peptide
  MOD_RES (1), (3), (35), (36): Xaa is C or S

SEQ ID NO: 37408 - protein, 36 aa, Artificial Sequence; identical to SEQ ID NO: 10964
  GFR-binding peptide
  MOD_RES (2), (4), (36): Xaa is C or S

SEQ ID NO: 37409 - protein, 35 aa, Artificial Sequence; identical to SEQ ID NO: 12901
  GFR-binding peptide
  MOD_RES (1), (32), (33): Xaa is C or S

SEQ ID NO: 37410 - protein, 38 aa, Artificial Sequence; identical to SEQ ID NO: 12902
  GFR-binding peptide
  MOD_RES (1), (3), (34), (35): Xaa is C or S

SEQ ID NO: 37411 - protein, 40 aa, Artificial Sequence; identical to SEQ ID NO: 3550
  GFR-binding peptide
  MOD_RES (2), (4), (38), (39): Xaa is C or S
  MOD_RES (16), (17), (18), (19), (20): Xaa is A or G
  MOD_RES (21), (22), (23), (24): Xaa is A or G or is absent

SEQ ID NO: 37412 - protein, 38 aa, Artificial Sequence; identical to SEQ ID NO: 10966
  GFR-binding peptide
  MOD_RES (32), (33): Xaa is C or S

SEQ ID NO: 37413 - protein, 35 aa, Artificial Sequence; identical to SEQ ID NO: 12904
  GFR-binding peptide
  MOD_RES (32), (33): Xaa is C or S

SEQ ID NO: 37414 - protein, 36 aa, Artificial Sequence; identical to SEQ ID NO: 10967
  GFR-binding peptide
  MOD_RES (1), (34), (35): Xaa is C or S
  MOD_RES (12), (13), (14), (15), (16): Xaa is A or G
  MOD_RES (17), (18), (19), (20): Xaa is A or G or is absent

SEQ ID NO: 37415 - protein, 37 aa, Artificial Sequence; identical to SEQ ID NO: 10968
  GFR-binding peptide
  MOD_RES (2), (4), (36): Xaa is C or S

SEQ ID NO: 37416 - protein, 40 aa, Artificial Sequence; identical to SEQ ID NO: 12905
  GFR-binding peptide
  MOD_RES (2), (35), (36): Xaa is C or S
  MOD_RES (13), (14), (15), (16), (17): Xaa is A or G
  MOD_RES (18), (19), (20), (21): Xaa is A or G or is absent

SEQ ID NO: 37417 - protein, 39 aa, Artificial Sequence; identical to SEQ ID NO: 10969
  GFR-binding peptide
  MOD_RES (34), (35): Xaa is C or S
  MOD_RES (12), (13), (14), (15), (16): Xaa is A or G
  MOD_RES (17), (18), (19), (20): Xaa is A or G or is absent

SEQ ID NO: 37418 - protein, 43 aa, Artificial Sequence; identical to SEQ ID NO: 10970
  GFR-binding peptide
  MOD_RES (1), (3), (37): Xaa is C or S
  MOD_RES (15), (16), (17), (18), (19): Xaa is A or G
  MOD_RES (20), (21), (22), (23): Xaa is A or G or is absent

SEQ ID NO: 37419 - protein, 31 aa, Artificial Sequence; identical to SEQ ID NO: 10972
  GFR-binding peptide
  MOD_RES (31), (31): Xaa is C or S

SEQ ID NO: 37420 - protein, 37 aa, Artificial Sequence; identical to SEQ ID NO: 12907
  GFR-binding peptide
  MOD_RES (1), (33), (34): Xaa is C or S

SEQ ID NO: 37421 - protein, 37 aa, Artificial Sequence; identical to SEQ ID NO: 10973
  GFR-binding peptide
  MOD_RES (1), (3), (35), (36): Xaa is C or S

SEQ ID NO: 37422 - protein, 39 aa, Artificial Sequence; identical to SEQ ID NO: 5501
  GFR-binding peptide
  MOD_RES (1), (35), (36): Xaa is C or S
  MOD_RES (13), (14), (15), (16), (17): Xaa is A or G
  MOD_RES (18), (19), (20), (21): Xaa is A or G or is absent

SEQ ID NO: 37423 - protein, 40 aa, Artificial Sequence; identical to SEQ ID NO: 12909
  GFR-binding peptide
  MOD_RES (1), (3), (37), (38): Xaa is C or S
  MOD_RES (15), (16), (17), (18), (19): Xaa is A or G
  MOD_RES (20), (21), (22), (23): Xaa is A or G or is absent

SEQ ID NO: 37424 - protein, 36 aa, Artificial Sequence; identical to SEQ ID NO: 12910
  GFR-binding peptide
  MOD_RES (34), (35): Xaa is C or S
  MOD_RES (12), (13), (14), (15), (16): Xaa is A or G
  MOD_RES (17), (18), (19), (20): Xaa is A or G or is absent

SEQ ID NO: 37425 - protein, 38 aa, Artificial Sequence; identical to SEQ ID NO: 10974
  GFR-binding peptide
  MOD_RES (34), (35): Xaa is C or S
  MOD_RES (12), (13), (14), (15), (16): Xaa is A or G
  MOD_RES (17), (18), (19), (20): Xaa is A or G or is absent

SEQ ID NO: 37426 - protein, 35 aa, Artificial Sequence; identical to SEQ ID NO: 12911
  GFR-binding peptide
  MOD_RES (1), (33): Xaa is C or S

SEQ ID NO: 37427 - protein, 35 aa, Artificial Sequence; identical to SEQ ID NO: 12912
  GFR-binding peptide
  MOD_RES (2), (2): Xaa is C or S
  MOD_RES (14), (15), (16), (17), (18): Xaa is A or G
  MOD_RES (19), (20), (21), (22): Xaa is A or G or is absent

SEQ ID NO: 37428 - protein, 36 aa, Artificial Sequence
  GFR-binding peptide
  MOD_RES (33), (34): Xaa is C or S
  MOD_RES (11), (12), (13), (14), (15): Xaa is A or G
  MOD_RES (16), (17), (18), (19): Xaa is A or G or is absent
SKVIMNSLQEXXXXXXXXXYYLITLPELDQSVXXPS

SEQ ID NO: 37429 - protein, 35 aa, Artificial Sequence; identical to SEQ ID NO: 5503
  GFR-binding peptide
  MOD_RES (2), (2): Xaa is C or S
  MOD_RES (14), (15), (16), (17), (18): Xaa is A or G
  MOD_RES (19), (20), (21), (22): Xaa is A or G or is absent

SEQ ID NO: 37430 - protein, 42 aa, Artificial Sequence; identical to SEQ ID NO: 12914
  GFR-binding peptide
  MOD_RES (2), (36): Xaa is C or S
  MOD_RES (14), (15), (16), (17), (18): Xaa is A or G
  MOD_RES (19), (20), (21), (22): Xaa is A or G or is absent

SEQ ID NO: 37431 - protein, 40 aa, Artificial Sequence; identical to SEQ ID NO: 12915
  GFR-binding peptide
  MOD_RES (1), (3), (35), (36): Xaa is C or S

SEQ ID NO: 37432 - protein, 34 aa, Artificial Sequence; identical to SEQ ID NO: 10975
  GFR-binding peptide
  MOD_RES (1), (3): Xaa is C or S

SEQ ID NO: 37433 - protein, 38 aa, Artificial Sequence; identical to SEQ ID NO: 12916
  GFR-binding peptide
  MOD_RES (32), (33): Xaa is C or S

SEQ ID NO: 37434 - protein, 39 aa, Artificial Sequence; identical to SEQ ID NO: 12917
  GFR-binding peptide
  MOD_RES (33), (34): Xaa is C or S
  MOD_RES (11), (12), (13), (14), (15): Xaa is A or G
  MOD_RES (16), (17), (18), (19): Xaa is A or G or is absent

SEQ ID NO: 37435 - protein, 39 aa, Artificial Sequence; identical to SEQ ID NO: 3556
  GFR-binding peptide
  MOD_RES (2), (33), (34): Xaa is C or S

SEQ ID NO: 37436 - protein, 41 aa, Artificial Sequence; identical to SEQ ID NO: 10977
  GFR-binding peptide
  MOD_RES (1), (3), (35), (36): Xaa is C or S

SEQ ID NO: 37437 - protein, 40 aa, Artificial Sequence; identical to SEQ ID NO: 12918
  GFR-binding peptide
  MOD_RES (1), (35), (36): Xaa is C or S
  MOD_RES (13), (14), (15), (16), (17): Xaa is A or G
  MOD_RES (18), (19), (20), (21): Xaa is A or G or is absent

SEQ ID NO: 37438 - protein, 40 aa, Artificial Sequence; identical to SEQ ID NO: 5507
  GFR-binding peptide
  MOD_RES (1), (3), (36), (37): Xaa is C or S
  MOD_RES (14), (15), (16), (17), (18): Xaa is A or G
  MOD_RES (19), (20), (21), (22): Xaa is A or G or is absent

SEQ ID NO: 37439 - protein, 30 aa, Artificial Sequence; identical to SEQ ID NO: 10978
  GFR-binding peptide

SEQ ID NO: 37440 - protein, 34 aa, Artificial Sequence; identical to SEQ ID NO: 12920
  GFR-binding peptide
  MOD_RES (34), (34): Xaa is C or S
  MOD_RES (12), (13), (14), (15), (16): Xaa is A or G
  MOD_RES (17), (18), (19), (20): Xaa is A or G or is absent

SEQ ID NO: 37441 - protein, 35 aa, Artificial Sequence; identical to SEQ ID NO: 3562
  GFR-binding peptide
  MOD_RES (2), (4): Xaa is C or S

SEQ ID NO: 37442 - protein, 36 aa, Artificial Sequence; identical to SEQ ID NO: 3563
  GFR-binding peptide
  MOD_RES (31), (32): Xaa is C or S

SEQ ID NO: 37443 - protein, 33 aa, Artificial Sequence; identical to SEQ ID NO: 10982
  GFR-binding peptide
  MOD_RES (32), (33): Xaa is C or S

SEQ ID NO: 37444 - protein, 37 aa, Artificial Sequence; identical to SEQ ID NO: 12923
  GFR-binding peptide
  MOD_RES (1), (33), (34): Xaa is C or S

SEQ ID NO: 37445 - protein, 31 aa, Artificial Sequence; identical to SEQ ID NO: 12924
  GFR-binding peptide

SEQ ID NO: 37446 - protein, 36 aa, Artificial Sequence; identical to SEQ ID NO: 10983
  GFR-binding peptide
  MOD_RES (2), (34): Xaa is C or S

SEQ ID NO: 37447 - protein, 38 aa, Artificial Sequence; identical to SEQ ID NO: 12926
  GFR-binding peptide
  MOD_RES (1), (33), (34): Xaa is C or S

SEQ ID NO: 37448 - protein, 42 aa, Artificial Sequence; identical to SEQ ID NO: 12927
  GFR-binding peptide
  MOD_RES (2), (4), (36), (37): Xaa is C or S

SEQ ID NO: 37449 - protein, 35 aa, Artificial Sequence; identical to SEQ ID NO: 12928
  GFR-binding peptide
  MOD_RES (31), (32): Xaa is C or S

SEQ ID NO: 37450 - protein, 35 aa, Artificial Sequence; identical to SEQ ID NO: 10984
  GFR-binding peptide
  MOD_RES (1), (3), (34), (35): Xaa is C or S

SEQ ID NO: 37451 - protein, 33 aa, Artificial Sequence; identical to SEQ ID NO: 12929
  GFR-binding peptide
  MOD_RES (31), (32): Xaa is C or S

SEQ ID NO: 37452 - protein, 36 aa, Artificial Sequence; identical to SEQ ID NO: 12930
  GFR-binding peptide
  MOD_RES (2), (34), (35): Xaa is C or S

SEQ ID NO: 37453 - protein, 38 aa, Artificial Sequence; identical to SEQ ID NO: 12931
  GFR-binding peptide
  MOD_RES (1), (34), (35): Xaa is C or S
  MOD_RES (12), (13), (14), (15), (16): Xaa is A or G
  MOD_RES (17), (18), (19), (20): Xaa is A or G or is absent

SEQ ID NO: 37454 - protein, 36 aa, Artificial Sequence; identical to SEQ ID NO: 10985
  GFR-binding peptide
  MOD_RES (1), (35), (36): Xaa is C or S
  MOD_RES (13), (14), (15), (16), (17): Xaa is A or G
  MOD_RES (18), (19), (20), (21): Xaa is A or G or is absent

SEQ ID NO: 37455 - protein, 35 aa, Artificial Sequence; identical to SEQ ID NO: 10986
  GFR-binding peptide
  MOD_RES (1), (3), (35): Xaa is C or S

SEQ ID NO: 37456 - protein, 43 aa, Artificial Sequence; identical to SEQ ID NO: 10987
  GFR-binding peptide
  MOD_RES (2), (4), (38), (39): Xaa is C or S
  MOD_RES (16), (17), (18), (19), (20): Xaa is A or G
  MOD_RES (21), (22), (23), (24): Xaa is A or G or is absent

SEQ ID NO: 37457 - protein, 34 aa, Artificial Sequence; identical to SEQ ID NO: 12934
  GFR-binding peptide
  MOD_RES (34), (34): Xaa is C or S
  MOD_RES (12), (13), (14), (15), (16): Xaa is A or G
  MOD_RES (17), (18), (19), (20): Xaa is A or G or is absent

SEQ ID NO: 37458 - protein, 30 aa, Artificial Sequence; identical to SEQ ID NO: 3571
  GFR-binding peptide

SEQ ID NO: 37459 - protein, 35 aa, Artificial Sequence; identical to SEQ ID NO: 12935
  GFR-binding peptide
  MOD_RES (34), (35): Xaa is C or S
  MOD_RES (12), (13), (14), (15), (16): Xaa is A or G
  MOD_RES (17), (18), (19), (20): Xaa is A or G or is absent

SEQ ID NO: 37460 - protein, 36 aa, Artificial Sequence; identical to SEQ ID NO: 10989
  GFR-binding peptide
  MOD_RES (2), (34), (35): Xaa is C or S

SEQ ID NO: 37461 - protein, 36 aa, Artificial Sequence; identical to SEQ ID NO: 12936
  GFR-binding peptide
  MOD_RES (2), (34), (35): Xaa is C or S

SEQ ID NO: 37462 - protein, 35 aa, Artificial Sequence
  GFR-binding peptide
  MOD_RES (1), (3), (34), (35): Xaa is C or S
XKXSKVIMNSLQEIKPTKGIYYLITLPELDQSVXX

SEQ ID NO: 37463 - protein, 40 aa, Artificial Sequence; identical to SEQ ID NO: 10990
  GFR-binding peptide
  MOD_RES (2), (34), (35): Xaa is C or S

SEQ ID NO: 37464 - protein, 36 aa, Artificial Sequence; identical to SEQ ID NO: 12937
  GFR-binding peptide
  MOD_RES (33), (34): Xaa is C or S
  MOD_RES (11), (12), (13), (14), (15): Xaa is A or G
  MOD_RES (16), (17), (18), (19): Xaa is A or G or is absent

SEQ ID NO: 37465 - protein, 39 aa, Artificial Sequence; identical to SEQ ID NO: 10991
  GFR-binding peptide
  MOD_RES (2), (4), (38), (39): Xaa is C or S
  MOD_RES (16), (17), (18), (19), (20): Xaa is A or G
  MOD_RES (21), (22), (23), (24): Xaa is A or G or is absent

SEQ ID NO: 37466 - protein, 38 aa, Artificial Sequence; identical to SEQ ID NO: 3573
  GFR-binding peptide
  MOD_RES (2), (4), (35), (36): Xaa is C or S

SEQ ID NO: 37467 - protein, 32 aa, Artificial Sequence; identical to SEQ ID NO: 10993
  GFR-binding peptide
  MOD_RES (2), (2): Xaa is C or S

SEQ ID NO: 37468 - protein, 36 aa, Artificial Sequence; identical to SEQ ID NO: 12938
  GFR-binding peptide
  MOD_RES (32), (32): Xaa is C or S

SEQ ID NO: 37469 - protein, 40 aa, Artificial Sequence; identical to SEQ ID NO: 12939
  GFR-binding peptide
  MOD_RES (2), (4), (35), (36): Xaa is C or S

SEQ ID NO: 37470 - protein, 40 aa, Artificial Sequence; identical to SEQ ID NO: 12940
  GFR-binding peptide
  MOD_RES (2), (34), (35): Xaa is C or S

SEQ ID NO: 37471 - protein, 40 aa, Artificial Sequence; identical to SEQ ID NO: 3576
  GFR-binding peptide
  MOD_RES (2), (36), (37): Xaa is C or S
  MOD_RES (14), (15), (16), (17), (18): Xaa is A or G
  MOD_RES (19), (20), (21), (22): Xaa is A or G or is absent

SEQ ID NO: 37472 - protein, 35 aa, Artificial Sequence; identical to SEQ ID NO: 10996
  GFR-binding peptide
  MOD_RES (2), (34), (35): Xaa is C or S

SEQ ID NO: 37473 - protein, 34 aa, Artificial Sequence; identical to SEQ ID NO: 12941
  GFR-binding peptide
  MOD_RES (33), (34): Xaa is C or S
  MOD_RES (11), (12), (13), (14), (15): Xaa is A or G
  MOD_RES (16), (17), (18), (19): Xaa is A or G or is absent

SEQ ID NO: 37474 - protein, 37 aa, Artificial Sequence; identical to SEQ ID NO: 10997
  GFR-binding peptide
  MOD_RES (31), (31): Xaa is C or S

SEQ ID NO: 37475 - protein, 34 aa, Artificial Sequence; identical to SEQ ID NO: 12942
  GFR-binding peptide
  MOD_RES (32), (33): Xaa is C or S

SEQ ID NO: 37476 - protein, 38 aa, Artificial Sequence; identical to SEQ ID NO: 12943
  GFR-binding peptide
  MOD_RES (2), (34), (35): Xaa is C or S

SEQ ID NO: 37477 - protein, 37 aa, Artificial Sequence; identical to SEQ ID NO: 10998
  GFR-binding peptide
  MOD_RES (2), (34), (35): Xaa is C or S

SEQ ID NO: 37478 - protein, 37 aa, Artificial Sequence; identical to SEQ ID NO: 12944
  GFR-binding peptide
  MOD_RES (2), (4), (36), (37): Xaa is C or S

SEQ ID NO: 37479 - protein, 36 aa, Artificial Sequence; identical to SEQ ID NO: 3589
  GFR-binding peptide
  MOD_RES (1), (3), (36): Xaa is C or S
  MOD_RES (14), (15), (16), (17), (18): Xaa is A or G
  MOD_RES (19), (20), (21), (22): Xaa is A or G or is absent

SEQ ID NO: 37480 - protein, 31 aa, Artificial Sequence; identical to SEQ ID NO: 12945
  GFR-binding peptide

SEQ ID NO: 37481 - protein, 43 aa, Artificial Sequence; identical to SEQ ID NO: 12946
  GFR-binding peptide
  MOD_RES (2), (4), (37), (38): Xaa is C or S
  MOD_RES (15), (16), (17), (18), (19): Xaa is A or G
  MOD_RES (20), (21), (22), (23): Xaa is A or G or is absent

SEQ ID NO: 37482 - protein, 39 aa, Artificial Sequence; identical to SEQ ID NO: 12947
  GFR-binding peptide
  MOD_RES (33), (34): Xaa is C or S
  MOD_RES (11), (12), (13), (14), (15): Xaa is A or G
  MOD_RES (16), (17), (18), (19): Xaa is A or G or is absent

SEQ ID NO: 37483 - protein, 41 aa, Artificial Sequence; identical to SEQ ID NO: 11000
  GFR-binding peptide
  MOD_RES (2), (35), (36): Xaa is C or S
  MOD_RES (13), (14), (15), (16), (17): Xaa is A or G
  MOD_RES (18), (19), (20), (21): Xaa is A or G or is absent

SEQ ID NO: 37484 - protein, 39 aa, Artificial Sequence; identical to SEQ ID NO: 12948
  GFR-binding peptide
  MOD_RES (33), (34): Xaa is C or S
  MOD_RES (11), (12), (13), (14), (15): Xaa is A or G
  MOD_RES (16), (17), (18), (19): Xaa is A or G or is absent

SEQ ID NO: 37485 - protein, 37 aa, Artificial Sequence; identical to SEQ ID NO: 11001
  GFR-binding peptide
  MOD_RES (2), (34), (35): Xaa is C or S

SEQ ID NO: 37486 - protein, 40 aa, Artificial Sequence; identical to SEQ ID NO: 11002
  GFR-binding peptide
  MOD_RES (1), (3), (36), (37): Xaa is C or S
  MOD_RES (14), (15), (16), (17), (18): Xaa is A or G
  MOD_RES (19), (20), (21), (22): Xaa is A or G or is absent

SEQ ID NO: 37487 - protein, 37 aa, Artificial Sequence; identical to SEQ ID NO: 11003
  GFR-binding peptide
  MOD_RES (2), (4), (35), (36): Xaa is C or S

SEQ ID NO: 37488 - protein, 31 aa, Artificial Sequence
  GFR-binding peptide
  MOD_RES (31), (31): Xaa is C or S
SKVIMNSLQEIKPTKGIYYLITLPELDQSVX

SEQ ID NO: 37489 - protein, 34 aa, Artificial Sequence; identical to SEQ ID NO: 11005
  GFR-binding peptide
  MOD_RES (34), (34): Xaa is C or S
  MOD_RES (12), (13), (14), (15), (16): Xaa is A or G
  MOD_RES (17), (18), (19), (20): Xaa is A or G or is absent

SEQ ID NO: 37490 - protein, 37 aa, Artificial Sequence; identical to SEQ ID NO: 12953
  GFR-binding peptide
  MOD_RES (32), (33): Xaa is C or S

SEQ ID NO: 37491 - protein, 35 aa, Artificial Sequence; identical to SEQ ID NO: 11008
  GFR-binding peptide
  MOD_RES (31), (32): Xaa is C or S

SEQ ID NO: 37492 - protein, 37 aa, Artificial Sequence; identical to SEQ ID NO: 11009
  GFR-binding peptide
  MOD_RES (2), (4), (36): Xaa is C or S

SEQ ID NO: 37493 - protein, 31 aa, Artificial Sequence; identical to SEQ ID NO: 12954
  GFR-binding peptide
  MOD_RES (31), (31): Xaa is C or S

SEQ ID NO: 37494 - protein, 38 aa, Artificial Sequence; identical to SEQ ID NO: 12955
  GFR-binding peptide
  MOD_RES (1), (3), (37), (38): Xaa is C or S
  MOD_RES (15), (16), (17), (18), (19): Xaa is A or G
  MOD_RES (20), (21), (22), (23): Xaa is A or G or is absent

SEQ ID NO: 37495 - protein, 41 aa, Artificial Sequence; identical to SEQ ID NO: 11010
  GFR-binding peptide
  MOD_RES (2), (4), (37), (38): Xaa is C or S
  MOD_RES (15), (16), (17), (18), (19): Xaa is A or G
  MOD_RES (20), (21), (22), (23): Xaa is A or G or is absent

SEQ ID NO: 37496 - protein, 36 aa, Artificial Sequence; identical to SEQ ID NO: 12956
  GFR-binding peptide
  MOD_RES (1), (3), (35), (36): Xaa is C or S

SEQ ID NO: 37497 - protein, 41 aa, Artificial Sequence; identical to SEQ ID NO: 12957
  GFR-binding peptide
  MOD_RES (1), (3), (37): Xaa is C or S
  MOD_RES (15), (16), (17), (18), (19): Xaa is A or G
  MOD_RES (20), (21), (22), (23): Xaa is A or G or is absent

SEQ ID NO: 37498 - protein, 38 aa, Artificial Sequence; identical to SEQ ID NO: 11011
  GFR-binding peptide
  MOD_RES (1), (34), (35): Xaa is C or S
  MOD_RES (12), (13), (14), (15), (16): Xaa is A or G
  MOD_RES (17), (18), (19), (20): Xaa is A or G or is absent

SEQ ID NO: 37499 - protein, 37 aa, Artificial Sequence; identical to SEQ ID NO: 11012
  GFR-binding peptide
  MOD_RES (1), (35), (36): Xaa is C or S
  MOD_RES (13), (14), (15), (16), (17): Xaa is A or G
  MOD_RES (18), (19), (20), (21): Xaa is A or G or is absent

SEQ ID NO: 37500 - protein, 34 aa, Artificial Sequence; identical to SEQ ID NO: 12958
  GFR-binding peptide
  MOD_RES (2), (4): Xaa is C or S

SEQ ID NO: 37501 - protein, 40 aa, Artificial Sequence; identical to SEQ ID NO: 5544
  GFR-binding peptide
  MOD_RES (1), (3), (37), (38): Xaa is C or S
  MOD_RES (15), (16), (17), (18), (19): Xaa is A or G
  MOD_RES (20), (21), (22), (23): Xaa is A or G or is absent

SEQ ID NO: 37502 - protein, 40 aa, Artificial Sequence; identical to SEQ ID NO: 11014
  GFR-binding peptide
  MOD_RES (34), (35): Xaa is C or S
  MOD_RES (12), (13), (14), (15), (16): Xaa is A or G
  MOD_RES (17), (18), (19), (20): Xaa is A or G or is absent

SEQ ID NO: 37503 - protein, 32 aa, Artificial Sequence; identical to SEQ ID NO: 11015
  GFR-binding peptide
  MOD_RES (1), (1): Xaa is C or S

SEQ ID NO: 37504 - protein, 39 aa, Artificial Sequence; identical to SEQ ID NO: 3609
  GFR-binding peptide
  MOD_RES (1), (3), (34), (35): Xaa is C or S

SEQ ID NO: 37505 - protein, 34 aa, Artificial Sequence; identical to SEQ ID NO: 11017
  GFR-binding peptide
  MOD_RES (2), (34): Xaa is C or S

SEQ ID NO: 37506 - protein, 38 aa, Artificial Sequence; identical to SEQ ID NO: 11018
  GFR-binding peptide
  MOD_RES (1), (33), (34): Xaa is C or S

SEQ ID NO: 37507 - protein, 36 aa, Artificial Sequence; identical to SEQ ID NO: 11019
  GFR-binding peptide
  MOD_RES (1), (35), (36): Xaa is C or S
  MOD_RES (13), (14), (15), (16), (17): Xaa is A or G
  MOD_RES (18), (19), (20), (21): Xaa is A or G or is absent

SEQ ID NO: 37508 - protein, 40 aa, Artificial Sequence; identical to SEQ ID NO: 11020
  GFR-binding peptide
  MOD_RES (34), (35): Xaa is C or S
  MOD_RES (12), (13), (14), (15), (16): Xaa is A or G
  MOD_RES (17), (18), (19), (20): Xaa is A or G or is absent

SEQ ID NO: 37509 - protein, 34 aa, Artificial Sequence; identical to SEQ ID NO: 5551
  GFR-binding peptide
  MOD_RES (2), (4): Xaa is C or S

SEQ ID NO: 37510 - protein, 40 aa, Artificial Sequence; identical to SEQ ID NO: 11022
  GFR-binding peptide
  MOD_RES (2), (34): Xaa is C or S

SEQ ID NO: 37511 - protein, 42 aa, Artificial Sequence; identical to SEQ ID NO: 12963
  GFR-binding peptide
  MOD_RES (1), (3), (37), (38): Xaa is C or S
  MOD_RES (15), (16), (17), (18), (19): Xaa is A or G
  MOD_RES (20), (21), (22), (23): Xaa is A or G or is absent

SEQ ID NO: 37512 - protein, 35 aa, Artificial Sequence; identical to SEQ ID NO: 11023
  GFR-binding peptide
  MOD_RES (2), (33), (34): Xaa is C or S

SEQ ID NO: 37513 - protein, 37 aa, Artificial Sequence; identical to SEQ ID NO: 11024
  GFR-binding peptide
  MOD_RES (2), (4): Xaa is C or S
  MOD_RES (16), (17), (18), (19), (20): Xaa is A or G
  MOD_RES (21), (22), (23), (24): Xaa is A or G or is absent

SEQ ID NO: 37514 - protein, 39 aa, Artificial Sequence; identical to SEQ ID NO: 11025
  GFR-binding peptide
  MOD_RES (1), (33), (34): Xaa is C or S

SEQ ID NO: 37515 - protein, 34 aa, Artificial Sequence; identical to SEQ ID NO: 12964
  GFR-binding peptide
  MOD_RES (1), (32), (33): Xaa is C or S

SEQ ID NO: 37516 - protein, 37 aa, Artificial Sequence; identical to SEQ ID NO: 11026
  GFR-binding peptide
  MOD_RES (2), (36), (37): Xaa is C or S
  MOD_RES (14), (15), (16), (17), (18): Xaa is A or G
  MOD_RES (19), (20), (21), (22): Xaa is A or G or is absent

SEQ ID NO: 37517 - protein, 37 aa, Artificial Sequence; identical to SEQ ID NO: 11028
  GFR-binding peptide
  MOD_RES (2), (34), (35): Xaa is C or S

SEQ ID NO: 37518 - protein, 34 aa, Artificial Sequence; identical to SEQ ID NO: 11029
  GFR-binding peptide
  MOD_RES (1), (33), (34): Xaa is C or S

SEQ ID NO: 37519 - protein, 34 aa, Artificial Sequence; identical to SEQ ID NO: 3615
  GFR-binding peptide
  MOD_RES (31), (32): Xaa is C or S

SEQ ID NO: 37520 - protein, 38 aa, Artificial Sequence; identical to SEQ ID NO: 12965
  GFR-binding peptide
  MOD_RES (2), (35), (36): Xaa is C or S
  MOD_RES (13), (14), (15), (16), (17): Xaa is A or G
  MOD_RES (18), (19), (20), (21): Xaa is A or G or is absent

SEQ ID NO: 37521 - protein, 37 aa, Artificial Sequence; identical to SEQ ID NO: 12966
  GFR-binding peptide
  MOD_RES (31), (32): Xaa is C or S

SEQ ID NO: 37522 - protein, 39 aa, Artificial Sequence; identical to SEQ ID NO: 11031
  GFR-binding peptide
  MOD_RES (2), (36), (37): Xaa is C or S
  MOD_RES (14), (15), (16), (17), (18): Xaa is A or G
  MOD_RES (19), (20), (21), (22): Xaa is A or G or is absent

SEQ ID NO: 37523 - protein, 33 aa, Artificial Sequence; identical to SEQ ID NO: 12967
  GFR-binding peptide
  MOD_RES (33), (33): Xaa is C or S
  MOD_RES (11), (12), (13), (14), (15): Xaa is A or G
  MOD_RES (16), (17), (18), (19): Xaa is A or G or is absent

SEQ ID NO: 37524 - protein, 39 aa, Artificial Sequence; identical to SEQ ID NO: 12968
  GFR-binding peptide
  MOD_RES (1), (34), (35): Xaa is C or S
  MOD_RES (12), (13), (14), (15), (16): Xaa is A or G
  MOD_RES (17), (18), (19), (20): Xaa is A or G or is absent

SEQ ID NO: 37525 - protein, 36 aa, Artificial Sequence; identical to SEQ ID NO: 11032
  GFR-binding peptide
  MOD_RES (31), (32): Xaa is C or S

SEQ ID NO: 37526 - protein, 36 aa, Artificial Sequence; identical to SEQ ID NO: 12969
  GFR-binding peptide
  MOD_RES (2), (36): Xaa is C or S
  MOD_RES (14), (15), (16), (17), (18): Xaa is A or G
  MOD_RES (19), (20), (21), (22): Xaa is A or G or is absent

SEQ ID NO: 37527 - protein, 37 aa, Artificial Sequence; identical to SEQ ID NO: 11033
  GFR-binding peptide
  MOD_RES (2), (4), (36), (37): Xaa is C or S

SEQ ID NO: 37528 - protein, 35 aa, Artificial Sequence; identical to SEQ ID NO: 12970
  GFR-binding peptide
  MOD_RES (33), (34): Xaa is C or S
  MOD_RES (11), (12), (13), (14), (15): Xaa is A or G
  MOD_RES (16), (17), (18), (19): Xaa is A or G or is absent

SEQ ID NO: 37529 - protein, 35 aa, Artificial Sequence; identical to SEQ ID NO: 11034
  GFR-binding peptide
  MOD_RES (33), (34): Xaa is C or S
  MOD_RES (11), (12), (13), (14), (15): Xaa is A or G
  MOD_RES (16), (17), (18), (19): Xaa is A or G or is absent

SEQ ID NO: 37530 - protein, 33 aa, Artificial Sequence; identical to SEQ ID NO: 12971
  GFR-binding peptide
  MOD_RES (31), (32): Xaa is C or S

SEQ ID NO: 37531 - protein, 37 aa, Artificial Sequence; identical to SEQ ID NO: 11036
  GFR-binding peptide
  MOD_RES (1), (35), (36): Xaa is C or S
  MOD_RES (13), (14), (15), (16), (17): Xaa is A or G
  MOD_RES (18), (19), (20), (21): Xaa is A or G or is absent

SEQ ID NO: 37532 - protein, 37 aa, Artificial Sequence; identical to SEQ ID NO: 12972
  GFR-binding peptide
  MOD_RES (2), (4), (36), (37): Xaa is C or S

SEQ ID NO: 37533 - protein, 36 aa, Artificial Sequence; identical to SEQ ID NO: 5563
  GFR-binding peptide
  MOD_RES (2), (36): Xaa is C or S
  MOD_RES (14), (15), (16), (17), (18): Xaa is A or G
  MOD_RES (19), (20), (21), (22): Xaa is A or G or is absent

SEQ ID NO: 37534 - protein, 30 aa, Artificial Sequence; identical to SEQ ID NO: 11038
  GFR-binding peptide

SEQ ID NO: 37535 - protein, 38 aa, Artificial Sequence; identical to SEQ ID NO: 11039
  GFR-binding peptide
  MOD_RES (1), (3), (37), (38): Xaa is C or S
  MOD_RES (15), (16), (17), (18), (19): Xaa is A or G
  MOD_RES (20), (21), (22), (23): Xaa is A or G or is absent

SEQ ID NO: 37536 - protein, 39 aa, Artificial Sequence; identical to SEQ ID NO: 11040
  GFR-binding peptide
  MOD_RES (2), (4), (36), (37): Xaa is C or S

SEQ ID NO: 37537 - protein, 39 aa, Artificial Sequence; identical to SEQ ID NO: 11041
  GFR-binding peptide
  MOD_RES (33), (34): Xaa is C or S
  MOD_RES (11), (12), (13), (14), (15): Xaa is A or G
  MOD_RES (16), (17), (18), (19): Xaa is A or G or is absent

SEQ ID NO: 37538 - protein, 36 aa, Artificial Sequence; identical to SEQ ID NO: 12975
  GFR-binding peptide
  MOD_RES (1), (3), (35), (36): Xaa is C or S

SEQ ID NO: 37539 - protein, 37 aa, Artificial Sequence; identical to SEQ ID NO: 12976
  GFR-binding peptide
  MOD_RES (2), (36), (37): Xaa is C or S
  MOD_RES (14), (15), (16), (17), (18): Xaa is A or G
  MOD_RES (19), (20), (21), (22): Xaa is A or G or is absent

SEQ ID NO: 37540 - protein, 41 aa, Artificial Sequence; identical to SEQ ID NO: 11042
  GFR-binding peptide
  MOD_RES (2), (35), (36): Xaa is C or S
  MOD_RES (13), (14), (15), (16), (17): Xaa is A or G
  MOD_RES (18), (19), (20), (21): Xaa is A or G or is absent

SEQ ID NO: 37541 - protein, 33 aa, Artificial Sequence; identical to SEQ ID NO: 3626
  GFR-binding peptide
  MOD_RES (1), (33): Xaa is C or S

SEQ ID NO: 37542 - protein, 38 aa, Artificial Sequence; identical to SEQ ID NO: 12977
  GFR-binding peptide
  MOD_RES (2), (33), (34): Xaa is C or S

SEQ ID NO: 37543 - protein, 38 aa, Artificial Sequence; identical to SEQ ID NO: 12978
  GFR-binding peptide
  MOD_RES (1), (33), (34): Xaa is C or S

SEQ ID NO: 37544 - protein, 43 aa, Artificial Sequence; identical to SEQ ID NO: 11044
  GFR-binding peptide
  MOD_RES (2), (4), (38), (39): Xaa is C or S
  MOD_RES (16), (17), (18), (19), (20): Xaa is A or G
  MOD_RES (21), (22), (23), (24): Xaa is A or G or is absent

SEQ ID NO: 37545 - protein, 43 aa, Artificial Sequence; identical to SEQ ID NO: 3628
  GFR-binding peptide
  MOD_RES (1), (3), (37), (38): Xaa is C or S
  MOD_RES (15), (16), (17), (18), (19): Xaa is A or G
  MOD_RES (20), (21), (22), (23): Xaa is A or G or is absent

SEQ ID NO: 37546 - protein, 42 aa, Artificial Sequence; identical to SEQ ID NO: 11046
  GFR-binding peptide
  MOD_RES (2), (4), (36), (37): Xaa is C or S

SEQ ID NO: 37547 - protein, 39 aa, Artificial Sequence; identical to SEQ ID NO: 12980
  GFR-binding peptide
  MOD_RES (2), (4), (37), (38): Xaa is C or S
  MOD_RES (15), (16), (17), (18), (19): Xaa is A or G
  MOD_RES (20), (21), (22), (23): Xaa is A or G or is absent

SEQ ID NO: 37548 - protein, 34 aa, Artificial Sequence; identical to SEQ ID NO: 12981
  GFR-binding peptide
  MOD_RES (2), (34): Xaa is C or S

SEQ ID NO: 37549 - protein, 37 aa, Artificial Sequence; identical to SEQ ID NO: 12982
  GFR-binding peptide
  MOD_RES (1), (32), (33): Xaa is C or S

SEQ ID NO: 37550 - protein, 38 aa, Artificial Sequence; identical to SEQ ID NO: 3630
  GFR-binding peptide
  MOD_RES (33), (34): Xaa is C or S
  MOD_RES (11), (12), (13), (14), (15): Xaa is A or G
  MOD_RES (16), (17), (18), (19): Xaa is A or G or is absent

SEQ ID NO: 37551 - protein, 34 aa, Artificial Sequence; identical to SEQ ID NO: 3631
  GFR-binding peptide
  MOD_RES (1), (33), (34): Xaa is C or S

SEQ ID NO: 37552 - protein, 37 aa, Artificial Sequence; identical to SEQ ID NO: 11049
  GFR-binding peptide
  MOD_RES (2), (34), (35): Xaa is C or S

SEQ ID NO: 37553 - protein, 34 aa, Artificial Sequence; identical to SEQ ID NO: 11050
  GFR-binding peptide
  MOD_RES (2), (33), (34): Xaa is C or S

SEQ ID NO: 37554 - protein, 36 aa, Artificial Sequence; identical to SEQ ID NO: 12985
  GFR-binding peptide
  MOD_RES (34), (35): Xaa is C or S
  MOD_RES (12), (13), (14), (15), (16): Xaa is A or G
  MOD_RES (17), (18), (19), (20): Xaa is A or G or is absent

SEQ ID NO: 37555 - protein, 38 aa, Artificial Sequence; identical to SEQ ID NO: 11051
  GFR-binding peptide
  MOD_RES (2), (33), (34): Xaa is C or S

SEQ ID NO: 37556 - protein, 36 aa, Artificial Sequence; identical to SEQ ID NO: 5573
  GFR-binding peptide
  MOD_RES (34), (35): Xaa is C or S
  MOD_RES (12), (13), (14), (15), (16): Xaa is A or G
  MOD_RES (17), (18), (19), (20): Xaa is A or G or is absent

SEQ ID NO: 37557 - protein, 42 aa, Artificial Sequence; identical to SEQ ID NO: 5575
  GFR-binding peptide
  MOD_RES (1), (3), (37), (38): Xaa is C or S
  MOD_RES (15), (16), (17), (18), (19): Xaa is A or G
  MOD_RES (20), (21), (22), (23): Xaa is A or G or is absent

SEQ ID NO: 37558 - protein, 37 aa, Artificial Sequence; identical to SEQ ID NO: 11052
  GFR-binding peptide
  MOD_RES (33), (33): Xaa is C or S
  MOD_RES (11), (12), (13), (14), (15): Xaa is A or G
  MOD_RES (16), (17), (18), (19): Xaa is A or G or is absent

SEQ ID NO: 37559 - protein, 34 aa, Artificial Sequence; identical to SEQ ID NO: 11053
  GFR-binding peptide
  MOD_RES (32), (33): Xaa is C or S

SEQ ID NO: 37560 - protein, 36 aa, Artificial Sequence
  GFR-binding peptide
  MOD_RES (2), (4), (35), (36): Xaa is C or S
SXKXSKVIMNSLQEIKPTKGIYYLITLPELDQSVXX

SEQ ID NO: 37561 - protein, 34 aa, Artificial Sequence; identical to SEQ ID NO: 12988
  GFR-binding peptide
  MOD_RES (33), (34): Xaa is C or S
  MOD_RES (11), (12), (13), (14), (15): Xaa is A or G
  MOD_RES (16), (17), (18), (19): Xaa is A or G or is absent

SEQ ID NO: 37562 - protein, 38 aa, Artificial Sequence; identical to SEQ ID NO: 5578
  GFR-binding peptide
  MOD_RES (1), (3), (37), (38): Xaa is C or S
  MOD_RES (15), (16), (17), (18), (19): Xaa is A or G
  MOD_RES (20), (21), (22), (23): Xaa is A or G or is absent

SEQ ID NO: 37563 - protein, 34 aa, Artificial Sequence; identical to SEQ ID NO: 12990
  GFR-binding peptide
  MOD_RES (31), (32): Xaa is C or S

SEQ ID NO: 37564 - protein, 36 aa, Artificial Sequence; identical to SEQ ID NO: 12991
  GFR-binding peptide
  MOD_RES (34), (35): Xaa is C or S
  MOD_RES (12), (13), (14), (15), (16): Xaa is A or G
  MOD_RES (17), (18), (19), (20): Xaa is A or G or is absent

SEQ ID NO: 37565 - protein, 35 aa, Artificial Sequence; identical to SEQ ID NO: 3637
  GFR-binding peptide
  MOD_RES (2), (35): Xaa is C or S
  MOD_RES (13), (14), (15), (16), (17): Xaa is A or G
  MOD_RES (18), (19), (20), (21): Xaa is A or G or is absent

SEQ ID NO: 37566 - protein, 37 aa, Artificial Sequence; identical to SEQ ID NO: 11055
  GFR-binding peptide
  MOD_RES (1), (33), (34): Xaa is C or S

SEQ ID NO: 37567 - protein, 36 aa, Artificial Sequence; identical to SEQ ID NO: 3639
  GFR-binding peptide
  MOD_RES (2), (4), (35), (36): Xaa is C or S

SEQ ID NO: 37568 - protein, 36 aa, Artificial Sequence; identical to SEQ ID NO: 12992
  GFR-binding peptide
  MOD_RES (1), (3): Xaa is C or S
  MOD_RES (15), (16), (17), (18), (19): Xaa is A or G
  MOD_RES (20), (21), (22), (23): Xaa is A or G or is absent

SEQ ID NO: 37569 - protein, 39 aa, Artificial Sequence; identical to SEQ ID NO: 12993
  GFR-binding peptide
  MOD_RES (2), (36), (37): Xaa is C or S
  MOD_RES (14), (15), (16), (17), (18): Xaa is A or G
  MOD_RES (19), (20), (21), (22): Xaa is A or G or is absent

SEQ ID NO: 37570 - protein, 43 aa, Artificial Sequence; identical to SEQ ID NO: 12994
  GFR-binding peptide
  MOD_RES (2), (4), (38): Xaa is C or S
  MOD_RES (16), (17), (18), (19), (20): Xaa is A or G
  MOD_RES (21), (22), (23), (24): Xaa is A or G or is absent

SEQ ID NO: 37571 - protein, 36 aa, Artificial Sequence; identical to SEQ ID NO: 3640
  GFR-binding peptide
  MOD_RES (1), (35), (36): Xaa is C or S
  MOD_RES (13), (14), (15), (16), (17): Xaa is A or G
  MOD_RES (18), (19), (20), (21): Xaa is A or G or is absent

SEQ ID NO: 37572 - protein, 42 aa, Artificial Sequence; identical to SEQ ID NO: 11058
  GFR-binding peptide
  MOD_RES (2), (4), (36): Xaa is C or S

SEQ ID NO: 37573 - protein, 40 aa, Artificial Sequence; identical to SEQ ID NO: 12996
  GFR-binding peptide
  MOD_RES (1), (35), (36): Xaa is C or S
  MOD_RES (13), (14), (15), (16), (17): Xaa is A or G
  MOD_RES (18), (19), (20), (21): Xaa is A or G or is absent

SEQ ID NO: 37574 - protein, 37 aa, Artificial Sequence; identical to SEQ ID NO: 5586
  GFR-binding peptide
  MOD_RES (2), (35), (36): Xaa is C or S
  MOD_RES (13), (14), (15), (16), (17): Xaa is A or G
  MOD_RES (18), (19), (20), (21): Xaa is A or G or is absent

SEQ ID NO: 37575 - protein, 40 aa, Artificial Sequence; identical to SEQ ID NO: 12999
  GFR-binding peptide
  MOD_RES (2), (36), (37): Xaa is C or S
  MOD_RES (14), (15), (16), (17), (18): Xaa is A or G
  MOD_RES (19), (20), (21), (22): Xaa is A or G or is absent

SEQ ID NO: 37576 - protein, 39 aa, Artificial Sequence; identical to SEQ ID NO: 13000
  GFR-binding peptide
  MOD_RES (2), (34), (35): Xaa is C or S

SEQ ID NO: 37577 - protein, 38 aa, Artificial Sequence; identical to SEQ ID NO: 13001
  GFR-binding peptide
  MOD_RES (34), (35): Xaa is C or S
  MOD_RES (12), (13), (14), (15), (16): Xaa is A or G
  MOD_RES (17), (18), (19), (20): Xaa is A or G or is absent

SEQ ID NO: 37578 - protein, 37 aa, Artificial Sequence; identical to SEQ ID NO: 5589
  GFR-binding peptide
  MOD_RES (1), (3), (36), (37): Xaa is C or S
  MOD_RES (14), (15), (16), (17), (18): Xaa is A or G
  MOD_RES (19), (20), (21), (22): Xaa is A or G or is absent

SEQ ID NO: 37579 - protein, 33 aa, Artificial Sequence; identical to SEQ ID NO: 11060
  GFR-binding peptide
  MOD_RES (32), (33): Xaa is C or S

SEQ ID NO: 37580 - protein, 38 aa, Artificial Sequence; identical to SEQ ID NO: 3644
  GFR-binding peptide
  MOD_RES (1), (33), (34): Xaa is C or S

SEQ ID NO: 37581 - protein, 40 aa, Artificial Sequence; identical to SEQ ID NO: 11063
  GFR-binding peptide
  MOD_RES (1), (3), (35), (36): Xaa is C or S

SEQ ID NO: 37582 - protein, 38 aa, Artificial Sequence; identical to SEQ ID NO: 13003
  GFR-binding peptide
  MOD_RES (2), (34), (35): Xaa is C or S

SEQ ID NO: 37583 - protein, 39 aa, Artificial Sequence; identical to SEQ ID NO: 5593
  GFR-binding peptide
  MOD_RES (1), (3), (37), (38): Xaa is C or S
  MOD_RES (15), (16), (17), (18), (19): Xaa is A or G
  MOD_RES (20), (21), (22), (23): Xaa is A or G or is absent

SEQ ID NO: 37584 - protein, 38 aa, Artificial Sequence; identical to SEQ ID NO: 3648
  GFR-binding peptide
  MOD_RES (2), (36), (37): Xaa is C or S
  MOD_RES (14), (15), (16), (17), (18): Xaa is A or G
  MOD_RES (19), (20), (21), (22): Xaa is A or G or is absent

SEQ ID NO: 37585 - protein, 40 aa, Artificial Sequence; identical to SEQ ID NO: 13005
  GFR-binding peptide
  MOD_RES (1), (35): Xaa is C or S
  MOD_RES (13), (14), (15), (16), (17): Xaa is A or G
  MOD_RES (18), (19), (20), (21): Xaa is A or G or is absent

SEQ ID NO: 37586 - protein, 31 aa, Artificial Sequence; identical to SEQ ID NO: 11066
  GFR-binding peptide
  MOD_RES (31), (31): Xaa is C or S

SEQ ID NO: 37587 - protein, 38 aa, Artificial Sequence; identical to SEQ ID NO: 13006
  GFR-binding peptide
  MOD_RES (1), (3), (37), (38): Xaa is C or S
  MOD_RES (15), (16), (17), (18), (19): Xaa is A or G
  MOD_RES (20), (21), (22), (23): Xaa is A or G or is absent

SEQ ID NO: 37588 - protein, 35 aa, Artificial Sequence; identical to SEQ ID NO: 11067
  GFR-binding peptide
  MOD_RES (33), (34): Xaa is C or S
  MOD_RES (11), (12), (13), (14), (15): Xaa is A or G
  MOD_RES (16), (17), (18), (19): Xaa is A or G or is absent

SEQ ID NO: 37589 - protein, 42 aa, Artificial Sequence; identical to SEQ ID NO: 11068
  GFR-binding peptide
  MOD_RES (1), (3), (37): Xaa is C or S
  MOD_RES (15), (16), (17), (18), (19): Xaa is A or G
  MOD_RES (20), (21), (22), (23): Xaa is A or G or is absent

SEQ ID NO: 37590 - protein, 37 aa, Artificial Sequence; identical to SEQ ID NO: 5596
  GFR-binding peptide
  MOD_RES (1), (34), (35): Xaa is C or S
  MOD_RES (12), (13), (14), (15), (16): Xaa is A or G
  MOD_RES (17), (18), (19), (20): Xaa is A or G or is absent

SEQ ID NO: 37591 - protein, 34 aa, Artificial Sequence; identical to SEQ ID NO: 13009
  GFR-binding peptide
  MOD_RES (2), (34): Xaa is C or S

SEQ ID NO: 37592 - protein, 37 aa, Artificial Sequence; identical to SEQ ID NO: 13010
  GFR-binding peptide
  MOD_RES (1), (35), (36): Xaa is C or S
  MOD_RES (13), (14), (15), (16), (17): Xaa is A or G
  MOD_RES (18), (19), (20), (21): Xaa is A or G or is absent

SEQ ID NO: 37593 - protein, 37 aa, Artificial Sequence; identical to SEQ ID NO: 13011
  GFR-binding peptide
  MOD_RES (1), (3), (37): Xaa is C or S
  MOD_RES (15), (16), (17), (18), (19): Xaa is A or G
  MOD_RES (20), (21), (22), (23): Xaa is A or G or is absent

SEQ ID NO: 37594 - protein, 36 aa, Artificial Sequence; identical to SEQ ID NO: 11071
  GFR-binding peptide
  MOD_RES (33), (34): Xaa is C or S
  MOD_RES (11), (12), (13), (14), (15): Xaa is A or G
  MOD_RES (16), (17), (18), (19): Xaa is A or G or is absent

SEQ ID NO: 37595 - protein, 35 aa, Artificial Sequence; identical to SEQ ID NO: 13012
  GFR-binding peptide
  MOD_RES (2), (35): Xaa is C or S
  MOD_RES (13), (14), (15), (16), (17): Xaa is A or G
  MOD_RES (18), (19), (20), (21): Xaa is A or G or is absent

SEQ ID NO: 37596 - protein, 35 aa, Artificial Sequence; identical to SEQ ID NO: 13013
  GFR-binding peptide
  MOD_RES (32), (33): Xaa is C or S

SEQ ID NO: 37597 - protein, 36 aa, Artificial Sequence; identical to SEQ ID NO: 11072
  GFR-binding peptide
  MOD_RES (33), (34): Xaa is C or S
  MOD_RES (11), (12), (13), (14), (15): Xaa is A or G
  MOD_RES (16), (17), (18), (19): Xaa is A or G or is absent

SEQ ID NO: 37598 - protein, 39 aa, Artificial Sequence; identical to SEQ ID NO: 13014
  GFR-binding peptide
  MOD_RES (33), (34): Xaa is C or S
  MOD_RES (11), (12), (13), (14), (15): Xaa is A or G
  MOD_RES (16), (17), (18), (19): Xaa is A or G or is absent

SEQ ID NO: 37599 - protein, 37 aa, Artificial Sequence; identical to SEQ ID NO: 11073
  GFR-binding peptide
  MOD_RES (2), (4), (36), (37): Xaa is C or S

SEQ ID NO: 37600 - protein, 41 aa, Artificial Sequence; identical to SEQ ID NO: 13015
  GFR-binding peptide
  MOD_RES (1), (3), (37), (38): Xaa is C or S
  MOD_RES (15), (16), (17), (18), (19): Xaa is A or G
  MOD_RES (20), (21), (22), (23): Xaa is A or G or is absent

SEQ ID NO: 37601 - protein, 42 aa, Artificial Sequence; identical to SEQ ID NO: 11074
  GFR-binding peptide
  MOD_RES (2), (4), (36), (37): Xaa is C or S

SEQ ID NO: 37602 - protein, 33 aa, Artificial Sequence; identical to SEQ ID NO: 11075
  GFR-binding peptide
  MOD_RES (33), (33): Xaa is C or S
  MOD_RES (11), (12), (13), (14), (15): Xaa is A or G
  MOD_RES (16), (17), (18), (19): Xaa is A or G or is absent

SEQ ID NO: 37603 - protein, 40 aa, Artificial Sequence; identical to SEQ ID NO: 11076
  GFR-binding peptide
  MOD_RES (2), (35), (36): Xaa is C or S
  MOD_RES (13), (14), (15), (16), (17): Xaa is A or G
  MOD_RES (18), (19), (20), (21): Xaa is A or G or is absent

SEQ ID NO: 37604 - protein, 37 aa, Artificial Sequence; identical to SEQ ID NO: 11078
  GFR-binding peptide
  MOD_RES (33), (34): Xaa is C or S
  MOD_RES (11), (12), (13), (14), (15): Xaa is A or G
  MOD_RES (16), (17), (18), (19): Xaa is A or G or is absent

SEQ ID NO: 37605 - protein, 35 aa, Artificial Sequence; identical to SEQ ID NO: 13017
  GFR-binding peptide
  MOD_RES (1), (35): Xaa is C or S
  MOD_RES (13), (14), (15), (16), (17): Xaa is A or G
  MOD_RES (18), (19), (20), (21): Xaa is A or G or is absent

SEQ ID NO: 37606 - protein, 33 aa, Artificial Sequence; identical to SEQ ID NO: 11079
  GFR-binding peptide
  MOD_RES (33), (33): Xaa is C or S
  MOD_RES (11), (12), (13), (14), (15): Xaa is A or G
  MOD_RES (16), (17), (18), (19): Xaa is A or G or is absent

SEQ ID NO: 37607 - protein, 42 aa, Artificial Sequence; identical to SEQ ID NO: 13018
  GFR-binding peptide
  MOD_RES (2), (36): Xaa is C or S
  MOD_RES (14), (15), (16), (17), (18): Xaa is A or G
  MOD_RES (19), (20), (21), (22): Xaa is A or G or is absent

SEQ ID NO: 37608 - protein, 36 aa, Artificial Sequence; identical to SEQ ID NO: 5605
  GFR-binding peptide
  MOD_RES (1), (3), (36): Xaa is C or S
  MOD_RES (14), (15), (16), (17), (18): Xaa is A or G
  MOD_RES (19), (20), (21), (22): Xaa is A or G or is absent

SEQ ID NO: 37609 - protein, 34 aa, Artificial Sequence; identical to SEQ ID NO: 13020
  GFR-binding peptide
  MOD_RES (1), (33), (34): Xaa is C or S

SEQ ID NO: 37610 - protein, 40 aa, Artificial Sequence; identical to SEQ ID NO: 11080
  GFR-binding peptide
  MOD_RES (2), (4), (35), (36): Xaa is C or S

SEQ ID NO: 37611 - protein, 33 aa, Artificial Sequence; identical to SEQ ID NO: 13021
  GFR-binding peptide
  MOD_RES (31), (32): Xaa is C or S

SEQ ID NO: 37612 - protein, 38 aa, Artificial Sequence; identical to SEQ ID NO: 5607
  GFR-binding peptide
  MOD_RES (2), (33), (34): Xaa is C or S

SEQ ID NO: 37613 - protein, 36 aa, Artificial Sequence; identical to SEQ ID NO: 11082
  GFR-binding peptide
  MOD_RES (2), (4): Xaa is C or S
  MOD_RES (15), (16), (17), (18), (19): Xaa is A or G
  MOD_RES (20), (21), (22), (23): Xaa is A or G or is absent

SEQ ID NO: 37614 - protein, 36 aa, Artificial Sequence; identical to SEQ ID NO: 5609
  GFR-binding peptide
  MOD_RES (2), (4), (36): Xaa is C or S

SEQ ID NO: 37615 - protein, 43 aa, Artificial Sequence; identical to SEQ ID NO: 13026
  GFR-binding peptide
  MOD_RES (1), (3), (37), (38): Xaa is C or S
  MOD_RES (15), (16), (17), (18), (19): Xaa is A or G
  MOD_RES (20), (21), (22), (23): Xaa is A or G or is absent

SEQ ID NO: 37616 - protein, 37 aa, Artificial Sequence; identical to SEQ ID NO: 5610
  GFR-binding peptide
  MOD_RES (2), (33), (34): Xaa is C or S

SEQ ID NO: 37617 - protein, 41 aa, Artificial Sequence; identical to SEQ ID NO: 13028
  GFR-binding peptide
  MOD_RES (1), (3), (37), (38): Xaa is C or S
  MOD_RES (15), (16), (17), (18), (19): Xaa is A or G
  MOD_RES (20), (21), (22), (23): Xaa is A or G or is absent

SEQ ID NO: 37618 - protein, 34 aa, Artificial Sequence; identical to SEQ ID NO: 5613
  GFR-binding peptide
  MOD_RES (31), (32): Xaa is C or S

SEQ ID NO: 37619 - protein, 41 aa, Artificial Sequence; identical to SEQ ID NO: 13030
  GFR-binding peptide
  MOD_RES (1), (3), (35), (36): Xaa is C or S

SEQ ID NO: 37620 - protein, 37 aa, Artificial Sequence; identical to SEQ ID NO: 5614
  GFR-binding peptide
  MOD_RES (31), (32): Xaa is C or S

SEQ ID NO: 37621 - protein, 41 aa, Artificial Sequence; identical to SEQ ID NO: 3668
  GFR-binding peptide
  MOD_RES (1), (3), (35), (36): Xaa is C or S

SEQ ID NO: 37622 - protein, 38 aa, Artificial Sequence; identical to SEQ ID NO: 11086
  GFR-binding peptide
  MOD_RES (1), (35), (36): Xaa is C or S
  MOD_RES (13), (14), (15), (16), (17): Xaa is A or G
  MOD_RES (18), (19), (20), (21): Xaa is A or G or is absent

SEQ ID NO: 37623 - protein, 42 aa, Artificial Sequence; identical to SEQ ID NO: 11087
  GFR-binding peptide
  MOD_RES (1), (3), (37), (38): Xaa is C or S
  MOD_RES (15), (16), (17), (18), (19): Xaa is A or G
  MOD_RES (20), (21), (22), (23): Xaa is A or G or is absent

SEQ ID NO: 37624 - protein, 32 aa, Artificial Sequence; identical to SEQ ID NO: 11088
  GFR-binding peptide
  MOD_RES (1), (1): Xaa is C or S

SEQ ID NO: 37625 - protein, 32 aa, Artificial Sequence; identical to SEQ ID NO: 11089
  GFR-binding peptide
  MOD_RES (11), (12), (13), (14), (15): Xaa is A or G
  MOD_RES (16), (17), (18), (19): Xaa is A or G or is absent

SEQ ID NO: 37626 - protein, 36 aa, Artificial Sequence; identical to SEQ ID NO: 11090
  GFR-binding peptide
  MOD_RES (1), (3), (36): Xaa is C or S
  MOD_RES (14), (15), (16), (17), (18): Xaa is A or G
  MOD_RES (19), (20), (21), (22): Xaa is A or G or is absent

SEQ ID NO: 37627 - protein, 37 aa, Artificial Sequence; identical to SEQ ID NO: 5618
  GFR-binding peptide
  MOD_RES (33), (34): Xaa is C or S
  MOD_RES (11), (12), (13), (14), (15): Xaa is A or G
  MOD_RES (16), (17), (18), (19): Xaa is A or G or is absent

SEQ ID NO: 37628 - protein, 37 aa, Artificial Sequence; identical to SEQ ID NO: 11091
  GFR-binding peptide
  MOD_RES (31), (32): Xaa is C or S

SEQ ID NO: 37629 - protein, 32 aa, Artificial Sequence; identical to SEQ ID NO: 13035
  GFR-binding peptide
  MOD_RES (31), (32): Xaa is C or S

SEQ ID NO: 37630 - protein, 36 aa, Artificial Sequence; identical to SEQ ID NO: 11093
  GFR-binding peptide
  MOD_RES (31), (32): Xaa is C or S

SEQ ID NO: 37631 - protein, 38 aa, Artificial Sequence; identical to SEQ ID NO: 13036
  GFR-binding peptide
  MOD_RES (1), (33): Xaa is C or S

SEQ ID NO: 37632 - protein, 32 aa, Artificial Sequence; identical to SEQ ID NO: 11094
  GFR-binding peptide
  MOD_RES (31), (32): Xaa is C or S

SEQ ID NO: 37633 - protein, 38 aa, Artificial Sequence; identical to SEQ ID NO: 11095
  GFR-binding peptide
  MOD_RES (1), (3), (34), (35): Xaa is C or S

SEQ ID NO: 37634 - protein, 34 aa, Artificial Sequence; identical to SEQ ID NO: 3682
  GFR-binding peptide
  MOD_RES (1), (32), (33): Xaa is C or S

SEQ ID NO: 37635 - protein, 36 aa, Artificial Sequence; identical to SEQ ID NO: 13038
  GFR-binding peptide
  MOD_RES (31), (32): Xaa is C or S

SEQ ID NO: 37636 - protein, 40 aa, Artificial Sequence; identical to SEQ ID NO: 11098
  GFR-binding peptide
  MOD_RES (2), (36), (37): Xaa is C or S
  MOD_RES (14), (15), (16), (17), (18): Xaa is A or G
  MOD_RES (19), (20), (21), (22): Xaa is A or G or is absent

SEQ ID NO: 37637 - protein, 40 aa, Artificial Sequence; identical to SEQ ID NO: 13039
  GFR-binding peptide
  MOD_RES (2), (36), (37): Xaa is C or S
  MOD_RES (14), (15), (16), (17), (18): Xaa is A or G
  MOD_RES (19), (20), (21), (22): Xaa is A or G or is absent

SEQ ID NO: 37638 - protein, 38 aa, Artificial Sequence; identical to SEQ ID NO: 13040
  GFR-binding peptide
  MOD_RES (2), (4), (36), (37): Xaa is C or S

SEQ ID NO: 37639 - protein, 33 aa, Artificial Sequence; identical to SEQ ID NO: 11099
  GFR-binding peptide
  MOD_RES (1), (3): Xaa is C or S

SEQ ID NO: 37640 - protein, 36 aa, Artificial Sequence; identical to SEQ ID NO: 11100
  GFR-binding peptide
  MOD_RES (1), (3): Xaa is C or S
  MOD_RES (15), (16), (17), (18), (19): Xaa is A or G
  MOD_RES (20), (21), (22), (23): Xaa is A or G or is absent

SEQ ID NO: 37641 - protein, 38 aa, Artificial Sequence; identical to SEQ ID NO: 11101
  GFR-binding peptide
  MOD_RES (33), (34): Xaa is C or S
  MOD_RES (11), (12), (13), (14), (15): Xaa is A or G
  MOD_RES (16), (17), (18), (19): Xaa is A or G or is absent

SEQ ID NO: 37642 - protein, 41 aa, Artificial Sequence; identical to SEQ ID NO: 5629
  GFR-binding peptide
  MOD_RES (2), (4), (35), (36): Xaa is C or S

SEQ ID NO: 37643 - protein, 36 aa, Artificial Sequence; identical to SEQ ID NO: 13043
  GFR-binding peptide
  MOD_RES (1), (33), (34): Xaa is C or S

SEQ ID NO: 37644 - protein, 38 aa, Artificial Sequence; identical to SEQ ID NO: 3687
  GFR-binding peptide
  MOD_RES (1), (3), (37), (38): Xaa is C or S
  MOD_RES (15), (16), (17), (18), (19): Xaa is A or G
  MOD_RES (20), (21), (22), (23): Xaa is A or G or is absent

SEQ ID NO: 37645 - protein, 30 aa, Artificial Sequence; identical to SEQ ID NO: 13044
  GFR-binding peptide

SEQ ID NO: 37646 - protein, 33 aa, Artificial Sequence; identical to SEQ ID NO: 13045
  GFR-binding peptide
  MOD_RES (12), (13), (14), (15), (16): Xaa is A or G
  MOD_RES (17), (18), (19), (20): Xaa is A or G or is absent

SEQ ID NO: 37647 - protein, 40 aa, Artificial Sequence; identical to SEQ ID NO: 11103
  GFR-binding peptide
  MOD_RES (1), (35), (36): Xaa is C or S
  MOD_RES (13), (14), (15), (16), (17): Xaa is A or G
  MOD_RES (18), (19), (20), (21): Xaa is A or G or is absent

SEQ ID NO: 37648 - protein, 34 aa, Artificial Sequence; identical to SEQ ID NO: 11104
  GFR-binding peptide
  MOD_RES (32), (33): Xaa is C or S

SEQ ID NO: 37649 - protein, 44 aa, Artificial Sequence; identical to SEQ ID NO: 13046
  GFR-binding peptide
  MOD_RES (2), (4), (38), (39): Xaa is C or S
  MOD_RES (16), (17), (18), (19), (20): Xaa is A or G
  MOD_RES (21), (22), (23), (24): Xaa is A or G or is absent

SEQ ID NO: 37650 - protein, 36 aa, Artificial Sequence; identical to SEQ ID NO: 13047
  GFR-binding peptide
  MOD_RES (2), (35), (36): Xaa is C or S
  MOD_RES (13), (14), (15), (16), (17): Xaa is A or G
  MOD_RES (18), (19), (20), (21): Xaa is A or G or is absent

SEQ ID NO: 37651 - protein, 32 aa, Artificial Sequence; identical to SEQ ID NO: 11105
  GFR-binding peptide
  MOD_RES (1), (32): Xaa is C or S

SEQ ID NO: 37652 - protein, 39 aa, Artificial Sequence; identical to SEQ ID NO: 5632
  GFR-binding peptide
  MOD_RES (2), (4), (35), (36): Xaa is C or S

SEQ ID NO: 37653 - protein, 42 aa, Artificial Sequence; identical to SEQ ID NO: 11106
  GFR-binding peptide
  MOD_RES (1), (3), (37), (38): Xaa is C or S
  MOD_RES (15), (16), (17), (18), (19): Xaa is A or G
  MOD_RES (20), (21), (22), (23): Xaa is A or G or is absent

SEQ ID NO: 37654 - protein, 37 aa, Artificial Sequence; identical to SEQ ID NO: 11109
  GFR-binding peptide
  MOD_RES (2), (34), (35): Xaa is C or S

SEQ ID NO: 37655 - protein, 34 aa, Artificial Sequence; identical to SEQ ID NO: 3692
  GFR-binding peptide
  MOD_RES (2), (34): Xaa is C or S

SEQ ID NO: 37656 - protein, 40 aa, Artificial Sequence; identical to SEQ ID NO: 13051
  GFR-binding peptide
  MOD_RES (2), (35), (36): Xaa is C or S
  MOD_RES (13), (14), (15), (16), (17): Xaa is A or G
  MOD_RES (18), (19), (20), (21): Xaa is A or G or is absent

SEQ ID NO: 37657 - protein, 41 aa, Artificial Sequence; identical to SEQ ID NO: 11112
  GFR-binding peptide
  MOD_RES (2), (4), (37), (38): Xaa is C or S
  MOD_RES (15), (16), (17), (18), (19): Xaa is A or G
  MOD_RES (20), (21), (22), (23): Xaa is A or G or is absent

SEQ ID NO: 37658 - protein, 37 aa, Artificial Sequence; identical to SEQ ID NO: 13052
  GFR-binding peptide
  MOD_RES (2), (4), (36), (37): Xaa is C or S

SEQ ID NO: 37659 - protein, 39 aa, Artificial Sequence; identical to SEQ ID NO: 11113
  GFR-binding peptide
  MOD_RES (1), (35): Xaa is C or S
  MOD_RES (13), (14), (15), (16), (17): Xaa is A or G
  MOD_RES (18), (19), (20), (21): Xaa is A or G or is absent

SEQ ID NO: 37660 - protein, 38 aa, Artificial Sequence; identical to SEQ ID NO: 11114
  GFR-binding peptide
  MOD_RES (2), (4), (38): Xaa is C or S
  MOD_RES (16), (17), (18), (19), (20): Xaa is A or G
  MOD_RES (21), (22), (23), (24): Xaa is A or G or is absent

SEQ ID NO: 37661 - protein, 34 aa, Artificial Sequence; identical to SEQ ID NO: 3696
  GFR-binding peptide
  MOD_RES (1), (33), (34): Xaa is C or S

SEQ ID NO: 37662 - protein, 38 aa, Artificial Sequence; identical to SEQ ID NO: 11117
  GFR-binding peptide
  MOD_RES (33), (34): Xaa is C or S
  MOD_RES (11), (12), (13), (14), (15): Xaa is A or G
  MOD_RES (16), (17), (18), (19): Xaa is A or G or is absent

SEQ ID NO: 37663 - protein, 37 aa, Artificial Sequence; identical to SEQ ID NO: 3697
  GFR-binding peptide
  MOD_RES (31), (32): Xaa is C or S

SEQ ID NO: 37664 - protein, 40 aa, Artificial Sequence; identical to SEQ ID NO: 11119
  GFR-binding peptide
  MOD_RES (34), (35): Xaa is C or S
  MOD_RES (12), (13), (14), (15), (16): Xaa is A or G
  MOD_RES (17), (18), (19), (20): Xaa is A or G or is absent

SEQ ID NO: 37665 - protein, 33 aa, Artificial Sequence; identical to SEQ ID NO: 13053
  GFR-binding peptide
  MOD_RES (1), (33): Xaa is C or S

SEQ ID NO: 37666 - protein, 36 aa, Artificial Sequence; identical to SEQ ID NO: 13054
  GFR-binding peptide
  MOD_RES (1), (3), (35), (36): Xaa is C or S

SEQ ID NO: 37667 - protein, 41 aa, Artificial Sequence; identical to SEQ ID NO: 11120
  GFR-binding peptide
  MOD_RES (2), (4), (38), (39): Xaa is C or S
  MOD_RES (16), (17), (18), (19), (20): Xaa is A or G
  MOD_RES (21), (22), (23), (24): Xaa is A or G or is absent

SEQ ID NO: 37668 - protein, 32 aa, Artificial Sequence; identical to SEQ ID NO: 11121
  GFR-binding peptide
  MOD_RES (31), (31): Xaa is C or S

SEQ ID NO: 37669 - protein, 38 aa, Artificial Sequence; identical to SEQ ID NO: 13055
  GFR-binding peptide
  MOD_RES (1), (32), (33): Xaa is C or S

SEQ ID NO: 37670 - protein, 37 aa, Artificial Sequence; identical to SEQ ID NO: 11124
  GFR-binding peptide
  MOD_RES (2), (4), (37): Xaa is C or S
  MOD_RES (15), (16), (17), (18), (19): Xaa is A or G
  MOD_RES (20), (21), (22), (23): Xaa is A or G or is absent

SEQ ID NO: 37671 - protein, 33 aa, Artificial Sequence; identical to SEQ ID NO: 13056
  GFR-binding peptide
  MOD_RES (1), (3): Xaa is C or S

SEQ ID NO: 37672 - protein, 37 aa, Artificial Sequence; identical to SEQ ID NO: 11126
  GFR-binding peptide
  MOD_RES (1), (3), (35): Xaa is C or S

SEQ ID NO: 37673 - protein, 31 aa, Artificial Sequence; identical to SEQ ID NO: 13058
  GFR-binding peptide

SEQ ID NO: 37674 - protein, 37 aa, Artificial Sequence; identical to SEQ ID NO: 11127
  GFR-binding peptide
  MOD_RES (33), (34): Xaa is C or S
  MOD_RES (11), (12), (13), (14), (15): Xaa is A or G
  MOD_RES (16), (17), (18), (19): Xaa is A or G or is absent

SEQ ID NO: 37675 - protein, 37 aa, Artificial Sequence; identical to SEQ ID NO: 5638
  GFR-binding peptide
  MOD_RES (33), (34): Xaa is C or S
  MOD_RES (11), (12), (13), (14), (15): Xaa is A or G
  MOD_RES (16), (17), (18), (19): Xaa is A or G or is absent

SEQ ID NO: 37676 - protein, 34 aa, Artificial Sequence; identical to SEQ ID NO: 13060
  GFR-binding peptide
  MOD_RES (1), (1): Xaa is C or S
  MOD_RES (13), (14), (15), (16), (17): Xaa is A or G
  MOD_RES (18), (19), (20), (21): Xaa is A or G or is absent

SEQ ID NO: 37677 - protein, 37 aa, Artificial Sequence; identical to SEQ ID NO: 11128
  GFR-binding peptide
  MOD_RES (33), (33): Xaa is C or S
  MOD_RES (11), (12), (13), (14), (15): Xaa is A or G
  MOD_RES (16), (17), (18), (19): Xaa is A or G or is absent

SEQ ID NO: 37678 - protein, 37 aa, Artificial Sequence; identical to SEQ ID NO: 13061
  GFR-binding peptide
  MOD_RES (2), (4), (35), (36): Xaa is C or S

SEQ ID NO: 37679 - protein, 40 aa, Artificial Sequence; identical to SEQ ID NO: 11129
  GFR-binding peptide
  MOD_RES (2), (4), (38), (39): Xaa is C or S
  MOD_RES (16), (17), (18), (19), (20): Xaa is A or G
  MOD_RES (21), (22), (23), (24): Xaa is A or G or is absent

SEQ ID NO: 37680 - protein, 33 aa, Artificial Sequence; identical to SEQ ID NO: 3706
  GFR-binding peptide
  MOD_RES (32), (33): Xaa is C or S

SEQ ID NO: 37681 - protein, 41 aa, Artificial Sequence; identical to SEQ ID NO: 13062
  GFR-binding peptide
  MOD_RES (1), (3), (37): Xaa is C or S
  MOD_RES (15), (16), (17), (18), (19): Xaa is A or G
  MOD_RES (20), (21), (22), (23): Xaa is A or G or is absent

SEQ ID NO: 37682 - protein, 36 aa, Artificial Sequence; identical to SEQ ID NO: 13063
  GFR-binding peptide
  MOD_RES (1), (34), (35): Xaa is C or S
  MOD_RES (12), (13), (14), (15), (16): Xaa is A or G
  MOD_RES (17), (18), (19), (20): Xaa is A or G or is absent

SEQ ID NO: 37683 - protein, 37 aa, Artificial Sequence; identical to SEQ ID NO: 11133
  GFR-binding peptide
  MOD_RES (2), (33), (34): Xaa is C or S

SEQ ID NO: 37684 - protein, 35 aa, Artificial Sequence; identical to SEQ ID NO: 13064
  GFR-binding peptide
  MOD_RES (31), (32): Xaa is C or S

SEQ ID NO: 37685 - protein, 36 aa, Artificial Sequence; identical to SEQ ID NO: 11134
  GFR-binding peptide
  MOD_RES (33), (34): Xaa is C or S
  MOD_RES (11), (12), (13), (14), (15): Xaa is A or G
  MOD_RES (16), (17), (18), (19): Xaa is A or G or is absent

SEQ ID NO: 37686 - protein, 40 aa, Artificial Sequence; identical to SEQ ID NO: 13065
  GFR-binding peptide
  MOD_RES (2), (4), (36), (37): Xaa is C or S

SEQ ID NO: 37687 - protein, 40 aa, Artificial Sequence; identical to SEQ ID NO: 5640
  GFR-binding peptide
  MOD_RES (1), (3), (35), (36): Xaa is C or S

SEQ ID NO: 37688 - protein, 33 aa, Artificial Sequence; identical to SEQ ID NO: 13067
  GFR-binding peptide
  MOD_RES (1), (1): Xaa is C or S
  MOD_RES (12), (13), (14), (15), (16): Xaa is A or G
  MOD_RES (17), (18), (19), (20): Xaa is A or G or is absent

SEQ ID NO: 37689 - protein, 35 aa, Artificial Sequence; identical to SEQ ID NO: 13068
  GFR-binding peptide
  MOD_RES (34), (35): Xaa is C or S
  MOD_RES (12), (13), (14), (15), (16): Xaa is A or G
  MOD_RES (17), (18), (19), (20): Xaa is A or G or is absent

SEQ ID NO: 37690 - protein, 34 aa, Artificial Sequence; identical to SEQ ID NO: 13069
  GFR-binding peptide
  MOD_RES (1), (1): Xaa is C or S
  MOD_RES (13), (14), (15), (16), (17): Xaa is A or G
  MOD_RES (18), (19), (20), (21): Xaa is A or G or is absent

SEQ ID NO: 37691 - protein, 40 aa, Artificial Sequence; identical to SEQ ID NO: 11135
  GFR-binding peptide
  MOD_RES (34), (35): Xaa is C or S
  MOD_RES (12), (13), (14), (15), (16): Xaa is A or G
  MOD_RES (17), (18), (19), (20): Xaa is A or G or is absent

SEQ ID NO: 37692 - protein, 37 aa, Artificial Sequence; identical to SEQ ID NO: 11136
  GFR-binding peptide
  MOD_RES (2), (36), (37): Xaa is C or S
  MOD_RES (14), (15), (16), (17), (18): Xaa is A or G
  MOD_RES (19), (20), (21), (22): Xaa is A or G or is absent

SEQ ID NO: 37693 - protein, 34 aa, Artificial Sequence; identical to SEQ ID NO: 13070
  GFR-binding peptide
  MOD_RES (1), (1): Xaa is C or S
  MOD_RES (13), (14), (15), (16), (17): Xaa is A or G
  MOD_RES (18), (19), (20), (21): Xaa is A or G or is absent

SEQ ID NO: 37694 - protein, 37 aa, Artificial Sequence; identical to SEQ ID NO: 3710
  GFR-binding peptide
  MOD_RES (2), (4), (36), (37): Xaa is C or S

SEQ ID NO: 37695 - protein, 37 aa, Artificial Sequence; identical to SEQ ID NO: 13071
  GFR-binding peptide
  MOD_RES (2), (33), (34): Xaa is C or S

SEQ ID NO: 37696 - protein, 31 aa, Artificial Sequence; identical to SEQ ID NO: 13072
  GFR-binding peptide
  MOD_RES (31), (31): Xaa is C or S

SEQ ID NO: 37697 - protein, 39 aa, Artificial Sequence; identical to SEQ ID NO: 5645
  GFR-binding peptide
  MOD_RES (33), (34): Xaa is C or S
  MOD_RES (11), (12), (13), (14), (15): Xaa is A or G
  MOD_RES (16), (17), (18), (19): Xaa is A or G or is absent

SEQ ID NO: 37698 - protein, 41 aa, Artificial Sequence; identical to SEQ ID NO: 11139
  GFR-binding peptide
  MOD_RES (1), (35), (36): Xaa is C or S
  MOD_RES (13), (14), (15), (16), (17): Xaa is A or G
  MOD_RES (18), (19), (20), (21): Xaa is A or G or is absent

SEQ ID NO: 37699 - protein, 44 aa, Artificial Sequence; identical to SEQ ID NO: 5647
  GFR-binding peptide
  MOD_RES (2), (4), (38), (39): Xaa is C or S
  MOD_RES (16), (17), (18), (19), (20): Xaa is A or G
  MOD_RES (21), (22), (23), (24): Xaa is A or G or is absent

SEQ ID NO: 37700 - protein, 35 aa, Artificial Sequence; identical to SEQ ID NO: 13076
  GFR-binding peptide
  MOD_RES (2), (4): Xaa is C or S

SEQ ID NO: 37701 - protein, 34 aa, Artificial Sequence; identical to SEQ ID NO: 13077
  GFR-binding peptide
  MOD_RES (32), (33): Xaa is C or S

SEQ ID NO: 37702 - protein, 40 aa, Artificial Sequence; identical to SEQ ID NO: 13078
  GFR-binding peptide
  MOD_RES (1), (3), (35), (36): Xaa is C or S

SEQ ID NO: 37703 - protein, 38 aa, Artificial Sequence; identical to SEQ ID NO: 13079
  GFR-binding peptide
  MOD_RES (1), (35), (36): Xaa is C or S
  MOD_RES (13), (14), (15), (16), (17): Xaa is A or G
  MOD_RES (18), (19), (20), (21): Xaa is A or G or is absent

SEQ ID NO: 37704 - protein, 36 aa, Artificial Sequence; identical to SEQ ID NO: 3716
  GFR-binding peptide
  MOD_RES (31), (32): Xaa is C or S

SEQ ID NO: 37705 - protein, 40 aa, Artificial Sequence; identical to SEQ ID NO: 13080
  GFR-binding peptide
  MOD_RES (1), (3), (35), (36): Xaa is C or S

SEQ ID NO: 37706 - protein, 39 aa, Artificial Sequence; identical to SEQ ID NO: 11141
  GFR-binding peptide
  MOD_RES (2), (36), (37): Xaa is C or S
  MOD_RES (14), (15), (16), (17), (18): Xaa is A or G
  MOD_RES (19), (20), (21), (22): Xaa is A or G or is absent

SEQ ID NO: 37707 - protein, 39 aa, Artificial Sequence; identical to SEQ ID NO: 11142
  GFR-binding peptide
  MOD_RES (2), (4), (35), (36): Xaa is C or S

SEQ ID NO: 37708 - protein, 34 aa, Artificial Sequence; identical to SEQ ID NO: 13082
  GFR-binding peptide
  MOD_RES (2), (33), (34): Xaa is C or S

SEQ ID NO: 37709 - protein, 40 aa, Artificial Sequence; identical to SEQ ID NO: 11143
  GFR-binding peptide
  MOD_RES (1), (3), (35), (36): Xaa is C or S

SEQ ID NO: 37710 - protein, 42 aa, Artificial Sequence; identical to SEQ ID NO: 5655
  GFR-binding peptide
  MOD_RES (1), (3), (36), (37): Xaa is C or S
  MOD_RES (14), (15), (16), (17), (18): Xaa is A or G
  MOD_RES (19), (20), (21), (22): Xaa is A or G or is absent

SEQ ID NO: 37711 - protein, 43 aa, Artificial Sequence; identical to SEQ ID NO: 11144
  GFR-binding peptide
  MOD_RES (1), (3), (37), (38): Xaa is C or S
  MOD_RES (15), (16), (17), (18), (19): Xaa is A or G
  MOD_RES (20), (21), (22), (23): Xaa is A or G or is absent

SEQ ID NO: 37712 - protein, 33 aa, Artificial Sequence; identical to SEQ ID NO: 11145
  GFR-binding peptide
  MOD_RES (12), (13), (14), (15), (16): Xaa is A or G
  MOD_RES (17), (18), (19), (20): Xaa is A or G or is absent

SEQ ID NO: 37713 - protein, 32 aa, Artificial Sequence; identical to SEQ ID NO: 11146
  GFR-binding peptide
  MOD_RES (31), (32): Xaa is C or S

SEQ ID NO: 37714 - protein, 39 aa, Artificial Sequence; identical to SEQ ID NO: 13084
  GFR-binding peptide
  MOD_RES (33), (33): Xaa is C or S
  MOD_RES (11), (12), (13), (14), (15): Xaa is A or G
  MOD_RES (16), (17), (18), (19): Xaa is A or G or is absent

SEQ ID NO: 37715 - protein, 36 aa, Artificial Sequence; identical to SEQ ID NO: 13085
  GFR-binding peptide
  MOD_RES (1), (35), (36): Xaa is C or S
  MOD_RES (13), (14), (15), (16), (17): Xaa is A or G
  MOD_RES (18), (19), (20), (21): Xaa is A or G or is absent

SEQ ID NO: 37716 - protein, 42 aa, Artificial Sequence; identical to SEQ ID NO: 11147
  GFR-binding peptide
  MOD_RES (2), (4), (38), (39): Xaa is C or S
  MOD_RES (16), (17), (18), (19), (20): Xaa is A or G
  MOD_RES (21), (22), (23), (24): Xaa is A or G or is absent

SEQ ID NO: 37717 - protein, 34 aa, Artificial Sequence; identical to SEQ ID NO: 11148
  GFR-binding peptide
  MOD_RES (32), (33): Xaa is C or S

SEQ ID NO: 37718 - protein, 37 aa, Artificial Sequence; identical to SEQ ID NO: 13086
  GFR-binding peptide
  MOD_RES (1), (34), (35): Xaa is C or S
  MOD_RES (12), (13), (14), (15), (16): Xaa is A or G
  MOD_RES (17), (18), (19), (20): Xaa is A or G or is absent

SEQ ID NO: 37719 - protein, 40 aa, Artificial Sequence; identical to SEQ ID NO: 11149
  GFR-binding peptide
  MOD_RES (2), (34): Xaa is C or S

SEQ ID NO: 37720 - protein, 38 aa, Artificial Sequence; identical to SEQ ID NO: 11150
  GFR-binding peptide
  MOD_RES (1), (32), (33): Xaa is C or S

SEQ ID NO: 37721 - protein, 41 aa, Artificial Sequence; identical to SEQ ID NO: 11151
  GFR-binding peptide
  MOD_RES (1), (3), (35), (36): Xaa is C or S

SEQ ID NO: 37722 - protein, 43 aa, Artificial Sequence; identical to SEQ ID NO: 5656
  GFR-binding peptide
  MOD_RES (2), (4), (37), (38): Xaa is C or S
  MOD_RES (15), (16), (17), (18), (19): Xaa is A or G
  MOD_RES (20), (21), (22), (23): Xaa is A or G or is absent

SEQ ID NO: 37723 - protein, 35 aa, Artificial Sequence; identical to SEQ ID NO: 11152
  GFR-binding peptide
  MOD_RES (1), (3), (35): Xaa is C or S

SEQ ID NO: 37724 - protein, 33 aa, Artificial Sequence; identical to SEQ ID NO: 5657
  GFR-binding peptide
  MOD_RES (1), (3): Xaa is C or S

SEQ ID NO: 37725 - protein, 37 aa, Artificial Sequence; identical to SEQ ID NO: 13089
  GFR-binding peptide
  MOD_RES (1), (35): Xaa is C or S
  MOD_RES (13), (14), (15), (16), (17): Xaa is A or G
  MOD_RES (18), (19), (20), (21): Xaa is A or G or is absent

SEQ ID NO: 37726 - protein, 38 aa, Artificial Sequence; identical to SEQ ID NO: 13091
  GFR-binding peptide
  MOD_RES (33), (34): Xaa is C or S
  MOD_RES (11), (12), (13), (14), (15): Xaa is A or G
  MOD_RES (16), (17), (18), (19): Xaa is A or G or is absent

SEQ ID NO: 37727 - protein, 37 aa, Artificial Sequence; identical to SEQ ID NO: 13092
  GFR-binding peptide
  MOD_RES (32), (33): Xaa is C or S

SEQ ID NO: 37728 - protein, 34 aa, Artificial Sequence; identical to SEQ ID NO: 11154
  GFR-binding peptide
  MOD_RES (2), (4): Xaa is C or S

SEQ ID NO: 37729 - protein, 40 aa, Artificial Sequence; identical to SEQ ID NO: 11155
  GFR-binding peptide
  MOD_RES (1), (3), (36), (37): Xaa is C or S
  MOD_RES (14), (15), (16), (17), (18): Xaa is A or G
  MOD_RES (19), (20), (21), (22): Xaa is A or G or is absent

SEQ ID NO: 37730 - protein, 38 aa, Artificial Sequence; identical to SEQ ID NO: 11156
  GFR-binding peptide
  MOD_RES (1), (3), (37): Xaa is C or S
  MOD_RES (15), (16), (17), (18), (19): Xaa is A or G
  MOD_RES (20), (21), (22), (23): Xaa is A or G or is absent

SEQ ID NO: 37731 - protein, 34 aa, Artificial Sequence; identical to SEQ ID NO: 13093
  GFR-binding peptide
  MOD_RES (1), (33), (34): Xaa is C or S

SEQ ID NO: 37732 - protein, 41 aa, Artificial Sequence; identical to SEQ ID NO: 13094
  GFR-binding peptide
  MOD_RES (2), (4), (36): Xaa is C or S

SEQ ID NO: 37733 - protein, 39 aa, Artificial Sequence; identical to SEQ ID NO: 11157
  GFR-binding peptide
  MOD_RES (2), (33), (34): Xaa is C or S

SEQ ID NO: 37734 - protein, 39 aa, Artificial Sequence; identical to SEQ ID NO: 13095
  GFR-binding peptide
  MOD_RES (2), (34), (35): Xaa is C or S

SEQ ID NO: 37735 - protein, 40 aa, Artificial Sequence; identical to SEQ ID NO: 11158
  GFR-binding peptide
  MOD_RES (1), (3), (37), (38): Xaa is C or S
  MOD_RES (15), (16), (17), (18), (19): Xaa is A or G
  MOD_RES (20), (21), (22), (23): Xaa is A or G or is absent

SEQ ID NO: 37736 - protein, 39 aa, Artificial Sequence; identical to SEQ ID NO: 11159
  GFR-binding peptide
  MOD_RES (34), (35): Xaa is C or S
  MOD_RES (12), (13), (14), (15), (16): Xaa is A or G
  MOD_RES (17), (18), (19), (20): Xaa is A or G or is absent

SEQ ID NO: 37737 - protein, 41 aa, Artificial Sequence; identical to SEQ ID NO: 13097
  GFR-binding peptide
  MOD_RES (1), (35), (36): Xaa is C or S
  MOD_RES (13), (14), (15), (16), (17): Xaa is A or G
  MOD_RES (18), (19), (20), (21): Xaa is A or G or is absent

SEQ ID NO: 37738 - protein, 39 aa, Artificial Sequence; identical to SEQ ID NO: 13098
  GFR-binding peptide
  MOD_RES (2), (34), (35): Xaa is C or S

SEQ ID NO: 37739 - protein, 38 aa, Artificial Sequence; identical to SEQ ID NO: 13099
  GFR-binding peptide
  MOD_RES (2), (4), (36), (37): Xaa is C or S

SEQ ID NO: 37740 - protein, 37 aa, Artificial Sequence
  GFR-binding peptide
  MOD_RES (33), (34): Xaa is C or S
  MOD_RES (11), (12), (13), (14), (15): Xaa is A or G
  MOD_RES (16), (17), (18), (19): Xaa is A or G or is absent
SKVIMNSLQEXXXXXXXXXYYLITLPELDQSVXXPSA

SEQ ID NO: 37741 - protein, 38 aa, Artificial Sequence; identical to SEQ ID NO: 13101
  GFR-binding peptide
  MOD_RES (1), (3), (37), (38): Xaa is C or S
  MOD_RES (15), (16), (17), (18), (19): Xaa is A or G
  MOD_RES (20), (21), (22), (23): Xaa is A or G or is absent

SEQ ID NO: 37742 - protein, 38 aa, Artificial Sequence; identical to SEQ ID NO: 13102
  GFR-binding peptide
  MOD_RES (33), (34): Xaa is C or S
  MOD_RES (11), (12), (13), (14), (15): Xaa is A or G
  MOD_RES (16), (17), (18), (19): Xaa is A or G or is absent

SEQ ID NO: 37743 - protein, 36 aa, Artificial Sequence; identical to SEQ ID NO: 11160
  GFR-binding peptide
  MOD_RES (1), (3), (35), (36): Xaa is C or S

SEQ ID NO: 37744 - protein, 36 aa, Artificial Sequence; identical to SEQ ID NO: 3728
  GFR-binding peptide
  MOD_RES (1), (3), (35), (36): Xaa is C or S

SEQ ID NO: 37745 - protein, 36 aa, Artificial Sequence; identical to SEQ ID NO: 11162
  GFR-binding peptide
  MOD_RES (2), (34): Xaa is C or S

SEQ ID NO: 37746 - protein, 39 aa, Artificial Sequence; identical to SEQ ID NO: 11163
  GFR-binding peptide
  MOD_RES (1), (33), (34): Xaa is C or S

SEQ ID NO: 37747 - protein, 36 aa, Artificial Sequence; identical to SEQ ID NO: 13104
  GFR-binding peptide
  MOD_RES (31), (32): Xaa is C or S

SEQ ID NO: 37748 - protein, 38 aa, Artificial Sequence; identical to SEQ ID NO: 3731
  GFR-binding peptide
  MOD_RES (1), (35), (36): Xaa is C or S
  MOD_RES (13), (14), (15), (16), (17): Xaa is A or G
  MOD_RES (18), (19), (20), (21): Xaa is A or G or is absent

SEQ ID NO: 37749 - protein, 34 aa, Artificial Sequence; identical to SEQ ID NO: 13105
  GFR-binding peptide
  MOD_RES (34), (34): Xaa is C or S
  MOD_RES (12), (13), (14), (15), (16): Xaa is A or G
  MOD_RES (17), (18), (19), (20): Xaa is A or G or is absent

SEQ ID NO: 37750 - protein, 35 aa, Artificial Sequence; identical to SEQ ID NO: 11165
  GFR-binding peptide
  MOD_RES (2), (2): Xaa is C or S
  MOD_RES (14), (15), (16), (17), (18): Xaa is A or G
  MOD_RES (19), (20), (21), (22): Xaa is A or G or is absent

SEQ ID NO: 37751 - protein, 34 aa, Artificial Sequence; identical to SEQ ID NO: 13106
  GFR-binding peptide
  MOD_RES (33), (34): Xaa is C or S
  MOD_RES (11), (12), (13), (14), (15): Xaa is A or G
  MOD_RES (16), (17), (18), (19): Xaa is A or G or is absent

SEQ ID NO: 37752 - protein, 39 aa, Artificial Sequence; identical to SEQ ID NO: 3732
  GFR-binding peptide
  MOD_RES (33), (34): Xaa is C or S
  MOD_RES (11), (12), (13), (14), (15): Xaa is A or G
  MOD_RES (16), (17), (18), (19): Xaa is A or G or is absent

SEQ ID NO: 37753 - protein, 40 aa, Artificial Sequence; identical to SEQ ID NO: 13107
  GFR-binding peptide
  MOD_RES (1), (3), (36), (37): Xaa is C or S
  MOD_RES (14), (15), (16), (17), (18): Xaa is A or G
  MOD_RES (19), (20), (21), (22): Xaa is A or G or is absent

SEQ ID NO: 37754 - protein, 36 aa, Artificial Sequence; identical to SEQ ID NO: 5670
  GFR-binding peptide
  MOD_RES (33), (34): Xaa is C or S
  MOD_RES (11), (12), (13), (14), (15): Xaa is A or G
  MOD_RES (16), (17), (18), (19): Xaa is A or G or is absent

SEQ ID NO: 37755 - protein, 39 aa, Artificial Sequence; identical to SEQ ID NO: 11167
  GFR-binding peptide
  MOD_RES (1), (3), (35), (36): Xaa is C or S

SEQ ID NO: 37756 - protein, 37 aa, Artificial Sequence; identical to SEQ ID NO: 13110
  GFR-binding peptide
  MOD_RES (2), (4): Xaa is C or S
  MOD_RES (16), (17), (18), (19), (20): Xaa is A or G
  MOD_RES (21), (22), (23), (24): Xaa is A or G or is absent

SEQ ID NO: 37757 - protein, 37 aa, Artificial Sequence; identical to SEQ ID NO: 5671
  GFR-binding peptide
  MOD_RES (1), (34), (35): Xaa is C or S
  MOD_RES (12), (13), (14), (15), (16): Xaa is A or G
  MOD_RES (17), (18), (19), (20): Xaa is A or G or is absent

SEQ ID NO: 37758 - protein, 39 aa, Artificial Sequence; identical to SEQ ID NO: 13112
  GFR-binding peptide
  MOD_RES (2), (36): Xaa is C or S
  MOD_RES (14), (15), (16), (17), (18): Xaa is A or G
  MOD_RES (19), (20), (21), (22): Xaa is A or G or is absent

SEQ ID NO: 37759 - protein, 39 aa, Artificial Sequence; identical to SEQ ID NO: 3738
  GFR-binding peptide
  MOD_RES (34), (35): Xaa is C or S
  MOD_RES (12), (13), (14), (15), (16): Xaa is A or G
  MOD_RES (17), (18), (19), (20): Xaa is A or G or is absent

SEQ ID NO: 37760 - protein, 37 aa, Artificial Sequence; identical to SEQ ID NO: 11169
  GFR-binding peptide
  MOD_RES (2), (4): Xaa is C or S
  MOD_RES (16), (17), (18), (19), (20): Xaa is A or G
  MOD_RES (21), (22), (23), (24): Xaa is A or G or is absent

SEQ ID NO: 37761 - protein, 38 aa, Artificial Sequence; identical to SEQ ID NO: 11170
  GFR-binding peptide
  MOD_RES (34), (35): Xaa is C or S
  MOD_RES (12), (13), (14), (15), (16): Xaa is A or G
  MOD_RES (17), (18), (19), (20): Xaa is A or G or is absent

SEQ ID NO: 37762 - protein, 42 aa, Artificial Sequence; identical to SEQ ID NO: 11171
  GFR-binding peptide
  MOD_RES (1), (3), (37), (38): Xaa is C or S
  MOD_RES (15), (16), (17), (18), (19): Xaa is A or G
  MOD_RES (20), (21), (22), (23): Xaa is A or G or is absent

SEQ ID NO: 37763 - protein, 33 aa, Artificial Sequence; identical to SEQ ID NO: 11172
  GFR-binding peptide
  MOD_RES (1), (3): Xaa is C or S

SEQ ID NO: 37764 - protein, 35 aa, Artificial Sequence; identical to SEQ ID NO: 11173
  GFR-binding peptide
  MOD_RES (1), (3), (35): Xaa is C or S

SEQ ID NO: 37765 - protein, 41 aa, Artificial Sequence; identical to SEQ ID NO: 13114
  GFR-binding peptide
  MOD_RES (1), (3), (37), (38): Xaa is C or S
  MOD_RES (15), (16), (17), (18), (19): Xaa is A or G
  MOD_RES (20), (21), (22), (23): Xaa is A or G or is absent

SEQ ID NO: 37766 - protein, 37 aa, Artificial Sequence; identical to SEQ ID NO: 11174
  GFR-binding peptide
  MOD_RES (1), (3), (35): Xaa is C or S

SEQ ID NO: 37767 - protein, 42 aa, Artificial Sequence; identical to SEQ ID NO: 11175
  GFR-binding peptide
  MOD_RES (2), (4), (37), (38): Xaa is C or S
  MOD_RES (15), (16), (17), (18), (19): Xaa is A or G
  MOD_RES (20), (21), (22), (23): Xaa is A or G or is absent

SEQ ID NO: 37768 - protein, 35 aa, Artificial Sequence; identical to SEQ ID NO: 13117
  GFR-binding peptide
  MOD_RES (2), (4): Xaa is C or S

SEQ ID NO: 37769 - protein, 41 aa, Artificial Sequence; identical to SEQ ID NO: 13118
  GFR-binding peptide
  MOD_RES (1), (35): Xaa is C or S
  MOD_RES (13), (14), (15), (16), (17): Xaa is A or G
  MOD_RES (18), (19), (20), (21): Xaa is A or G or is absent

SEQ ID NO: 37770 - protein, 35 aa, Artificial Sequence; identical to SEQ ID NO: 5679
  GFR-binding peptide
  MOD_RES (1), (3), (35): Xaa is C or S

SEQ ID NO: 37771 - protein, 34 aa, Artificial Sequence; identical to SEQ ID NO: 11176
  GFR-binding peptide
  MOD_RES (1), (1): Xaa is C or S
  MOD_RES (13), (14), (15), (16), (17): Xaa is A or G
  MOD_RES (18), (19), (20), (21): Xaa is A or G or is absent

SEQ ID NO: 37772 - protein, 43 aa, Artificial Sequence; identical to SEQ ID NO: 11177
  GFR-binding peptide
  MOD_RES (2), (4), (38), (39): Xaa is C or S
  MOD_RES (16), (17), (18), (19), (20): Xaa is A or G
  MOD_RES (21), (22), (23), (24): Xaa is A or G or is absent

SEQ ID NO: 37773 - protein, 37 aa, Artificial Sequence; identical to SEQ ID NO: 5682
  GFR-binding peptide
  MOD_RES (1), (3), (36), (37): Xaa is C or S
  MOD_RES (14), (15), (16), (17), (18): Xaa is A or G
  MOD_RES (19), (20), (21), (22): Xaa is A or G or is absent

SEQ ID NO: 37774 - protein, 35 aa, Artificial Sequence; identical to SEQ ID NO: 13121
  GFR-binding peptide
  MOD_RES (1), (3): Xaa is C or S
  MOD_RES (14), (15), (16), (17), (18): Xaa is A or G
  MOD_RES (19), (20), (21), (22): Xaa is A or G or is absent

SEQ ID NO: 37775 - protein, 37 aa, Artificial Sequence; identical to SEQ ID NO: 5683
  GFR-binding peptide
  MOD_RES (2), (34), (35): Xaa is C or S

SEQ ID NO: 37776 - protein, 35 aa, Artificial Sequence; identical to SEQ ID NO: 13123
  GFR-binding peptide
  MOD_RES (33), (34): Xaa is C or S
  MOD_RES (11), (12), (13), (14), (15): Xaa is A or G
  MOD_RES (16), (17), (18), (19): Xaa is A or G or is absent

SEQ ID NO: 37777 - protein, 32 aa, Artificial Sequence; identical to SEQ ID NO: 13124
  GFR-binding peptide
  MOD_RES (1), (1): Xaa is C or S

SEQ ID NO: 37778 - protein, 37 aa, Artificial Sequence; identical to SEQ ID NO: 11179
  GFR-binding peptide
  MOD_RES (2), (35), (36): Xaa is C or S
  MOD_RES (13), (14), (15), (16), (17): Xaa is A or G
  MOD_RES (18), (19), (20), (21): Xaa is A or G or is absent

SEQ ID NO: 37779 - protein, 42 aa, Artificial Sequence; identical to SEQ ID NO: 11180
  GFR-binding peptide
  MOD_RES (1), (3), (37), (38): Xaa is C or S
  MOD_RES (15), (16), (17), (18), (19): Xaa is A or G
  MOD_RES (20), (21), (22), (23): Xaa is A or G or is absent

SEQ ID NO: 37780 - protein, 36 aa, Artificial Sequence; identical to SEQ ID NO: 5685
  GFR-binding peptide
  MOD_RES (1), (3): Xaa is C or S
  MOD_RES (15), (16), (17), (18), (19): Xaa is A or G
  MOD_RES (20), (21), (22), (23): Xaa is A or G or is absent

SEQ ID NO: 37781 - protein, 37 aa, Artificial Sequence; identical to SEQ ID NO: 3749
  GFR-binding peptide
  MOD_RES (2), (4), (37): Xaa is C or S
  MOD_RES (15), (16), (17), (18), (19): Xaa is A or G
  MOD_RES (20), (21), (22), (23): Xaa is A or G or is absent

SEQ ID NO: 37782 - protein, 35 aa, Artificial Sequence; identical to SEQ ID NO: 5688
  GFR-binding peptide
  MOD_RES (1), (32), (33): Xaa is C or S

SEQ ID NO: 37783 - protein, 38 aa, Artificial Sequence; identical to SEQ ID NO: 13128
  GFR-binding peptide
  MOD_RES (33), (34): Xaa is C or S
  MOD_RES (11), (12), (13), (14), (15): Xaa is A or G
  MOD_RES (16), (17), (18), (19): Xaa is A or G or is absent

SEQ ID NO: 37784 - protein, 39 aa, Artificial Sequence; identical to SEQ ID NO: 13129
  GFR-binding peptide
  MOD_RES (34), (35): Xaa is C or S
  MOD_RES (12), (13), (14), (15), (16): Xaa is A or G
  MOD_RES (17), (18), (19), (20): Xaa is A or G or is absent

SEQ ID NO: 37785 - protein, 39 aa, Artificial Sequence; identical to SEQ ID NO: 3750
  GFR-binding peptide
  MOD_RES (1), (3), (34), (35): Xaa is C or S

SEQ ID NO: 37786 - protein, 40 aa, Artificial Sequence; identical to SEQ ID NO: 11183
  GFR-binding peptide
  MOD_RES (1), (3), (37), (38): Xaa is C or S
  MOD_RES (15), (16), (17), (18), (19): Xaa is A or G
  MOD_RES (20), (21), (22), (23): Xaa is A or G or is absent

SEQ ID NO: 37787 - protein, 36 aa, Artificial Sequence; identical to SEQ ID NO: 11184
  GFR-binding peptide
  MOD_RES (2), (4), (36): Xaa is C or S

SEQ ID NO: 37788 - protein, 35 aa, Artificial Sequence; identical to SEQ ID NO: 5691
  GFR-binding peptide
  MOD_RES (2), (33), (34): Xaa is C or S

SEQ ID NO: 37789 - protein, 37 aa, Artificial Sequence; identical to SEQ ID NO: 13132
  GFR-binding peptide
  MOD_RES (31), (32): Xaa is C or S

SEQ ID NO: 37790 - protein, 40 aa, Artificial Sequence; identical to SEQ ID NO: 11186
  GFR-binding peptide
  MOD_RES (1), (3), (37), (38): Xaa is C or S
  MOD_RES (15), (16), (17), (18), (19): Xaa is A or G
  MOD_RES (20), (21), (22), (23): Xaa is A or G or is absent

SEQ ID NO: 37791 - protein, 38 aa, Artificial Sequence; identical to SEQ ID NO: 3755
  GFR-binding peptide
  MOD_RES (2), (36), (37): Xaa is C or S
  MOD_RES (14), (15), (16), (17), (18): Xaa is A or G
  MOD_RES (19), (20), (21), (22): Xaa is A or G or is absent

SEQ ID NO: 37792 - protein, 35 aa, Artificial Sequence; identical to SEQ ID NO: 13134
  GFR-binding peptide
  MOD_RES (1), (35): Xaa is C or S
  MOD_RES (13), (14), (15), (16), (17): Xaa is A or G
  MOD_RES (18), (19), (20), (21): Xaa is A or G or is absent

SEQ ID NO: 37793 - protein, 38 aa, Artificial Sequence; identical to SEQ ID NO: 11189
  GFR-binding peptide
  MOD_RES (1), (3), (35), (36): Xaa is C or S

SEQ ID NO: 37794 - protein, 37 aa, Artificial Sequence; identical to SEQ ID NO: 11190
  GFR-binding peptide
  MOD_RES (31), (32): Xaa is C or S

SEQ ID NO: 37795 - protein, 33 aa, Artificial Sequence; identical to SEQ ID NO: 13135
  GFR-binding peptide
  MOD_RES (33), (33): Xaa is C or S
  MOD_RES (11), (12), (13), (14), (15): Xaa is A or G
  MOD_RES (16), (17), (18), (19): Xaa is A or G or is absent

SEQ ID NO: 37796 - protein, 38 aa, Artificial Sequence; identical to SEQ ID NO: 3758
  GFR-binding peptide
  MOD_RES (2), (4), (38): Xaa is C or S
  MOD_RES (16), (17), (18), (19), (20): Xaa is A or G
  MOD_RES (21), (22), (23), (24): Xaa is A or G or is absent

SEQ ID NO: 37797 - protein, 37 aa, Artificial Sequence; identical to SEQ ID NO: 3761
  GFR-binding peptide
  MOD_RES (31), (32): Xaa is C or S

SEQ ID NO: 37798 - protein, 37 aa, Artificial Sequence; identical to SEQ ID NO: 11195
  GFR-binding peptide
  MOD_RES (1), (3), (36), (37): Xaa is C or S
  MOD_RES (14), (15), (16), (17), (18): Xaa is A or G
  MOD_RES (19), (20), (21), (22): Xaa is A or G or is absent

SEQ ID NO: 37799 - protein, 41 aa, Artificial Sequence; identical to SEQ ID NO: 3765
  GFR-binding peptide
  MOD_RES (2), (36), (37): Xaa is C or S
  MOD_RES (14), (15), (16), (17), (18): Xaa is A or G
  MOD_RES (19), (20), (21), (22): Xaa is A or G or is absent

SEQ ID NO: 37800 - protein, 31 aa, Artificial Sequence; identical to SEQ ID NO: 5701
  GFR-binding peptide

SEQ ID NO: 37801 - protein, 33 aa, Artificial Sequence
  GFR-binding peptide
  MOD_RES (31), (32): Xaa is C or S
SKVIMNSLQEIKPTKGIYYLITLPELDQSVXXP

SEQ ID NO: 37802 - protein, 38 aa, Artificial Sequence; identical to SEQ ID NO: 13139
  GFR-binding peptide
  MOD_RES (2), (36), (37): Xaa is C or S
  MOD_RES (14), (15), (16), (17), (18): Xaa is A or G
  MOD_RES (19), (20), (21), (22): Xaa is A or G or is absent

SEQ ID NO: 37803 - protein, 37 aa, Artificial Sequence; identical to SEQ ID NO: 3768
  GFR-binding peptide
  MOD_RES (33), (34): Xaa is C or S
  MOD_RES (11), (12), (13), (14), (15): Xaa is A or G
  MOD_RES (16), (17), (18), (19): Xaa is A or G or is absent

SEQ ID NO: 37804 - protein, 41 aa, Artificial Sequence; identical to SEQ ID NO: 13140
  GFR-binding peptide
  MOD_RES (1), (3), (35), (36): Xaa is C or S

SEQ ID NO: 37805 - protein, 41 aa, Artificial Sequence; identical to SEQ ID NO: 11200
  GFR-binding peptide
  MOD_RES (1), (35), (36): Xaa is C or S
  MOD_RES (13), (14), (15), (16), (17): Xaa is A or G
  MOD_RES (18), (19), (20), (21): Xaa is A or G or is absent

SEQ ID NO: 37806 - protein, 40 aa, Artificial Sequence; identical to SEQ ID NO: 13141
  GFR-binding peptide
  MOD_RES (1), (35), (36): Xaa is C or S
  MOD_RES (13), (14), (15), (16), (17): Xaa is A or G
  MOD_RES (18), (19), (20), (21): Xaa is A or G or is absent

SEQ ID NO: 37807 - protein, 40 aa, Artificial Sequence; identical to SEQ ID NO: 13142
  GFR-binding peptide
  MOD_RES (1), (3), (35), (36): Xaa is C or S

SEQ ID NO: 37808 - protein, 33 aa, Artificial Sequence; identical to SEQ ID NO: 11201
  GFR-binding peptide
  MOD_RES (33), (33): Xaa is C or S
  MOD_RES (11), (12), (13), (14), (15): Xaa is A or G
  MOD_RES (16), (17), (18), (19): Xaa is A or G or is absent

SEQ ID NO: 37809 - protein, 38 aa, Artificial Sequence; identical to SEQ ID NO: 11202
  GFR-binding peptide
  MOD_RES (33), (34): Xaa is C or S
  MOD_RES (11), (12), (13), (14), (15): Xaa is A or G
  MOD_RES (16), (17), (18), (19): Xaa is A or G or is absent

SEQ ID NO: 37810 - protein, 32 aa, Artificial Sequence; identical to SEQ ID NO: 11203
  GFR-binding peptide
  MOD_RES (31), (32): Xaa is C or S

SEQ ID NO: 37811 - protein, 42 aa, Artificial Sequence; identical to SEQ ID NO: 11204
  GFR-binding peptide
  MOD_RES (2), (4), (38): Xaa is C or S
  MOD_RES (16), (17), (18), (19), (20): Xaa is A or G
  MOD_RES (21), (22), (23), (24): Xaa is A or G or is absent

SEQ ID NO: 37812 - protein, 35 aa, Artificial Sequence; identical to SEQ ID NO: 11205
  GFR-binding peptide
  MOD_RES (2), (35): Xaa is C or S
  MOD_RES (13), (14), (15), (16), (17): Xaa is A or G
  MOD_RES (18), (19), (20), (21): Xaa is A or G or is absent

SEQ ID NO: 37813 - protein, 39 aa, Artificial Sequence; identical to SEQ ID NO: 13143
  GFR-binding peptide
  MOD_RES (2), (4), (36), (37): Xaa is C or S

SEQ ID NO: 37814 - protein, 37 aa, Artificial Sequence; identical to SEQ ID NO: 11206
  GFR-binding peptide
  MOD_RES (2), (36), (37): Xaa is C or S
  MOD_RES (14), (15), (16), (17), (18): Xaa is A or G
  MOD_RES (19), (20), (21), (22): Xaa is A or G or is absent

SEQ ID NO: 37815 - protein, 36 aa, Artificial Sequence; identical to SEQ ID NO: 11210
  GFR-binding peptide
  MOD_RES (2), (34), (35): Xaa is C or S

SEQ ID NO: 37816 - protein, 33 aa, Artificial Sequence; identical to SEQ ID NO: 13147
  GFR-binding peptide
  MOD_RES (31), (32): Xaa is C or S

SEQ ID NO: 37817 - protein, 38 aa, Artificial Sequence; identical to SEQ ID NO: 11211
  GFR-binding peptide
  MOD_RES (1), (32), (33): Xaa is C or S

SEQ ID NO: 37818 - protein, 35 aa, Artificial Sequence; identical to SEQ ID NO: 11212
  GFR-binding peptide
  MOD_RES (2), (4): Xaa is C or S

SEQ ID NO: 37819 - protein, 39 aa, Artificial Sequence; identical to SEQ ID NO: 5712
  GFR-binding peptide
  MOD_RES (2), (34), (35): Xaa is C or S

SEQ ID NO: 37820 - protein, 32 aa, Artificial Sequence
  GFR-binding peptide
  MOD_RES (11), (12), (13), (14), (15): Xaa is A or G
  MOD_RES (16), (17), (18), (19): Xaa is A or G or is absent
SKVIMNSLQEXXXXXXXXXYYLITLPELDQSV

SEQ ID NO: 37821 - protein, 40 aa, Artificial Sequence; identical to SEQ ID NO: 11213
  GFR-binding peptide
  MOD_RES (1), (3), (35), (36): Xaa is C or S

SEQ ID NO: 37822 - protein, 36 aa, Artificial Sequence; identical to SEQ ID NO: 3786
  GFR-binding peptide
  MOD_RES (1), (3): Xaa is C or S
  MOD_RES (15), (16), (17), (18), (19): Xaa is A or G
  MOD_RES (20), (21), (22), (23): Xaa is A or G or is absent

SEQ ID NO: 37823 - protein, 40 aa, Artificial Sequence; identical to SEQ ID NO: 13150
  GFR-binding peptide
  MOD_RES (1), (3), (35), (36): Xaa is C or S

SEQ ID NO: 37824 - protein, 40 aa, Artificial Sequence; identical to SEQ ID NO: 11215
  GFR-binding peptide
  MOD_RES (1), (35), (36): Xaa is C or S
  MOD_RES (13), (14), (15), (16), (17): Xaa is A or G
  MOD_RES (18), (19), (20), (21): Xaa is A or G or is absent

SEQ ID NO: 37825 - protein, 39 aa, Artificial Sequence; identical to SEQ ID NO: 13151
  GFR-binding peptide
  MOD_RES (1), (33), (34): Xaa is C or S

SEQ ID NO: 37826 - protein, 39 aa, Artificial Sequence; identical to SEQ ID NO: 13152
  GFR-binding peptide
  MOD_RES (2), (34), (35): Xaa is C or S

SEQ ID NO: 37827 - protein, 39 aa, Artificial Sequence; identical to SEQ ID NO: 13153
  GFR-binding peptide
  MOD_RES (1), (3), (35), (36): Xaa is C or S

SEQ ID NO: 37828 - protein, 35 aa, Artificial Sequence; identical to SEQ ID NO: 5719
  GFR-binding peptide
  MOD_RES (31), (32): Xaa is C or S

SEQ ID NO: 37829 - protein, 36 aa, Artificial Sequence; identical to SEQ ID NO: 13155
  GFR-binding peptide
  MOD_RES (2), (4), (35), (36): Xaa is C or S

SEQ ID NO: 37830 - protein, 38 aa, Artificial Sequence; identical to SEQ ID NO: 5721
  GFR-binding peptide
  MOD_RES (1), (35), (36): Xaa is C or S
  MOD_RES (13), (14), (15), (16), (17): Xaa is A or G
  MOD_RES (18), (19), (20), (21): Xaa is A or G or is absent

SEQ ID NO: 37831 - protein, 36 aa, Artificial Sequence; identical to SEQ ID NO: 13157
  GFR-binding peptide
  MOD_RES (2), (4), (36): Xaa is C or S

SEQ ID NO: 37832 - protein, 33 aa, Artificial Sequence; identical to SEQ ID NO: 11218
  GFR-binding peptide
  MOD_RES (1), (32), (33): Xaa is C or S

SEQ ID NO: 37833 - protein, 42 aa, Artificial Sequence; identical to SEQ ID NO: 13159
  GFR-binding peptide
  MOD_RES (2), (4), (38), (39): Xaa is C or S
  MOD_RES (16), (17), (18), (19), (20): Xaa is A or G
  MOD_RES (21), (22), (23), (24): Xaa is A or G or is absent

SEQ ID NO: 37834 - protein, 40 aa, Artificial Sequence; identical to SEQ ID NO: 3795
  GFR-binding peptide
  MOD_RES (2), (36), (37): Xaa is C or S
  MOD_RES (14), (15), (16), (17), (18): Xaa is A or G
  MOD_RES (19), (20), (21), (22): Xaa is A or G or is absent

SEQ ID NO: 37835 - protein, 37 aa, Artificial Sequence; identical to SEQ ID NO: 11220
  GFR-binding peptide
  MOD_RES (33), (34): Xaa is C or S
  MOD_RES (11), (12), (13), (14), (15): Xaa is A or G
  MOD_RES (16), (17), (18), (19): Xaa is A or G or is absent

SEQ ID NO: 37836 - protein, 36 aa, Artificial Sequence; identical to SEQ ID NO: 13160
  GFR-binding peptide
  MOD_RES (2), (4), (35), (36): Xaa is C or S

SEQ ID NO: 37837 - protein, 35 aa, Artificial Sequence; identical to SEQ ID NO: 11222
  GFR-binding peptide
  MOD_RES (1), (32), (33): Xaa is C or S

SEQ ID NO: 37838 - protein, 38 aa, Artificial Sequence; identical to SEQ ID NO: 13162
  GFR-binding peptide
  MOD_RES (1), (3), (35), (36): Xaa is C or S

SEQ ID NO: 37839 - protein, 37 aa, Artificial Sequence; identical to SEQ ID NO: 11223
  GFR-binding peptide
  MOD_RES (2), (36), (37): Xaa is C or S
  MOD_RES (14), (15), (16), (17), (18): Xaa is A or G
  MOD_RES (19), (20), (21), (22): Xaa is A or G or is absent

SEQ ID NO: 37840 - protein, 39 aa, Artificial Sequence; identical to SEQ ID NO: 11224
  GFR-binding peptide
  MOD_RES (2), (35), (36): Xaa is C or S
  MOD_RES (13), (14), (15), (16), (17): Xaa is A or G
  MOD_RES (18), (19), (20), (21): Xaa is A or G or is absent

SEQ ID NO: 37841 - protein, 38 aa, Artificial Sequence; identical to SEQ ID NO: 13163
  GFR-binding peptide
  MOD_RES (33), (34): Xaa is C or S
  MOD_RES (11), (12), (13), (14), (15): Xaa is A or G
  MOD_RES (16), (17), (18), (19): Xaa is A or G or is absent

SEQ ID NO: 37842 - protein, 39 aa, Artificial Sequence; identical to SEQ ID NO: 3801
  GFR-binding peptide
  MOD_RES (33), (34): Xaa is C or S
  MOD_RES (11), (12), (13), (14), (15): Xaa is A or G
  MOD_RES (16), (17), (18), (19): Xaa is A or G or is absent

SEQ ID NO: 37843 - protein, 39 aa, Artificial Sequence; identical to SEQ ID NO: 13164
  GFR-binding peptide
  MOD_RES (1), (3), (35), (36): Xaa is C or S

SEQ ID NO: 37844 - protein, 39 aa, Artificial Sequence; identical to SEQ ID NO: 11226
  GFR-binding peptide
  MOD_RES (2), (4), (38), (39): Xaa is C or S
  MOD_RES (16), (17), (18), (19), (20): Xaa is A or G
  MOD_RES (21), (22), (23), (24): Xaa is A or G or is absent

SEQ ID NO: 37845 - protein, 34 aa, Artificial Sequence; identical to SEQ ID NO: 11227
  GFR-binding peptide
  MOD_RES (1), (1): Xaa is C or S
  MOD_RES (13), (14), (15), (16), (17): Xaa is A or G
  MOD_RES (18), (19), (20), (21): Xaa is A or G or is absent

SEQ ID NO: 37846 - protein, 35 aa, Artificial Sequence; identical to SEQ ID NO: 11228
  GFR-binding peptide
  MOD_RES (34), (35): Xaa is C or S
  MOD_RES (12), (13), (14), (15), (16): Xaa is A or G
  MOD_RES (17), (18), (19), (20): Xaa is A or G or is absent

SEQ ID NO: 37847 - protein, 40 aa, Artificial Sequence; identical to SEQ ID NO: 13165
  GFR-binding peptide
  MOD_RES (2), (4), (38), (39): Xaa is C or S
  MOD_RES (16), (17), (18), (19), (20): Xaa is A or G
  MOD_RES (21), (22), (23), (24): Xaa is A or G or is absent

SEQ ID NO: 37848 - protein, 44 aa, Artificial Sequence; identical to SEQ ID NO: 13166
  GFR-binding peptide
  MOD_RES (2), (4), (38): Xaa is C or S
  MOD_RES (16), (17), (18), (19), (20): Xaa is A or G
  MOD_RES (21), (22), (23), (24): Xaa is A or G or is absent

SEQ ID NO: 37849 - protein, 33 aa, Artificial Sequence; identical to SEQ ID NO: 13167
  GFR-binding peptide
  MOD_RES (2), (2): Xaa is C or S

SEQ ID NO: 37850 - protein, 39 aa, Artificial Sequence; identical to SEQ ID NO: 11231
  GFR-binding peptide
  MOD_RES (34), (35): Xaa is C or S
  MOD_RES (12), (13), (14), (15), (16): Xaa is A or G
  MOD_RES (17), (18), (19), (20): Xaa is A or G or is absent

SEQ ID NO: 37851 - protein, 33 aa, Artificial Sequence
  GFR-binding peptide
  MOD_RES (1), (32), (33): Xaa is C or S
XSKVIMNSLQEIKPTKGIYYLITLPELDQSVXX

SEQ ID NO: 37852 - protein, 35 aa, Artificial Sequence; identical to SEQ ID NO: 3809
  GFR-binding peptide
  MOD_RES (1), (34), (35): Xaa is C or S
  MOD_RES (12), (13), (14), (15), (16): Xaa is A or G
  MOD_RES (17), (18), (19), (20): Xaa is A or G or is absent

SEQ ID NO: 37853 - protein, 39 aa, Artificial Sequence; identical to SEQ ID NO: 5733
  GFR-binding peptide
  MOD_RES (2), (4), (35), (36): Xaa is C or S

SEQ ID NO: 37854 - protein, 41 aa, Artificial Sequence; identical to SEQ ID NO: 13169
  GFR-binding peptide
  MOD_RES (2), (4), (38), (39): Xaa is C or S
  MOD_RES (16), (17), (18), (19), (20): Xaa is A or G
  MOD_RES (21), (22), (23), (24): Xaa is A or G or is absent

SEQ ID NO: 37855 - protein, 38 aa, Artificial Sequence; identical to SEQ ID NO: 5734
  GFR-binding peptide
  MOD_RES (2), (4), (36), (37): Xaa is C or S

SEQ ID NO: 37856 - protein, 42 aa, Artificial Sequence; identical to SEQ ID NO: 13171
  GFR-binding peptide
  MOD_RES (2), (4), (38), (39): Xaa is C or S
  MOD_RES (16), (17), (18), (19), (20): Xaa is A or G
  MOD_RES (21), (22), (23), (24): Xaa is A or G or is absent

SEQ ID NO: 37857 - protein, 40 aa, Artificial Sequence; identical to SEQ ID NO: 13172
  GFR-binding peptide
  MOD_RES (1), (35), (36): Xaa is C or S
  MOD_RES (13), (14), (15), (16), (17): Xaa is A or G
  MOD_RES (18), (19), (20), (21): Xaa is A or G or is absent

SEQ ID NO: 37858 - protein, 36 aa, Artificial Sequence; identical to SEQ ID NO: 13173
  GFR-binding peptide
  MOD_RES (2), (4): Xaa is C or S
  MOD_RES (15), (16), (17), (18), (19): Xaa is A or G
  MOD_RES (20), (21), (22), (23): Xaa is A or G or is absent

SEQ ID NO: 37859 - protein, 33 aa, Artificial Sequence; identical to SEQ ID NO: 13174
  GFR-binding peptide
  MOD_RES (32), (33): Xaa is C or S

SEQ ID NO: 37860 - protein, 33 aa, Artificial Sequence; identical to SEQ ID NO: 13175
  GFR-binding peptide
  MOD_RES (1), (32), (33): Xaa is C or S

SEQ ID NO: 37861 - protein, 36 aa, Artificial Sequence; identical to SEQ ID NO: 11233
  GFR-binding peptide
  MOD_RES (31), (32): Xaa is C or S

SEQ ID NO: 37862 - protein, 35 aa, Artificial Sequence; identical to SEQ ID NO: 13176
  GFR-binding peptide
  MOD_RES (1), (32), (33): Xaa is C or S

SEQ ID NO: 37863 - protein, 41 aa, Artificial Sequence; identical to SEQ ID NO: 13177
  GFR-binding peptide
  MOD_RES (2), (4), (36), (37): Xaa is C or S

SEQ ID NO: 37864 - protein, 42 aa, Artificial Sequence; identical to SEQ ID NO: 11235
  GFR-binding peptide
  MOD_RES (2), (4), (38), (39): Xaa is C or S
  MOD_RES (16), (17), (18), (19), (20): Xaa is A or G
  MOD_RES (21), (22), (23), (24): Xaa is A or G or is absent

SEQ ID NO: 37865 - protein, 40 aa, Artificial Sequence; identical to SEQ ID NO: 11236
  GFR-binding peptide
  MOD_RES (34), (35): Xaa is C or S
  MOD_RES (12), (13), (14), (15), (16): Xaa is A or G
  MOD_RES (17), (18), (19), (20): Xaa is A or G or is absent

SEQ ID NO: 37866 - protein, 43 aa, Artificial Sequence; identical to SEQ ID NO: 11237
  GFR-binding peptide
  MOD_RES (2), (4), (38): Xaa is C or S
  MOD_RES (16), (17), (18), (19), (20): Xaa is A or G
  MOD_RES (21), (22), (23), (24): Xaa is A or G or is absent

SEQ ID NO: 37867 - protein, 35 aa, Artificial Sequence; identical to SEQ ID NO: 5742
  GFR-binding peptide
  MOD_RES (2), (4): Xaa is C or S

SEQ ID NO: 37868 - protein, 32 aa, Artificial Sequence; identical to SEQ ID NO: 13182
  GFR-binding peptide
  MOD_RES (11), (12), (13), (14), (15): Xaa is A or G
  MOD_RES (16), (17), (18), (19): Xaa is A or G or is absent

SEQ ID NO: 37869 - protein, 32 aa, Artificial Sequence; identical to SEQ ID NO: 11238
  GFR-binding peptide
  MOD_RES (31), (32): Xaa is C or S

SEQ ID NO: 37870 - protein, 38 aa, Artificial Sequence; identical to SEQ ID NO: 13183
  GFR-binding peptide
  MOD_RES (34), (34): Xaa is C or S
  MOD_RES (12), (13), (14), (15), (16): Xaa is A or G
  MOD_RES (17), (18), (19), (20): Xaa is A or G or is absent

SEQ ID NO: 37871 - protein, 32 aa, Artificial Sequence; identical to SEQ ID NO: 5746
  GFR-binding peptide
  MOD_RES (11), (12), (13), (14), (15): Xaa is A or G
  MOD_RES (16), (17), (18), (19): Xaa is A or G or is absent

SEQ ID NO: 37872 - protein, 35 aa, Artificial Sequence; identical to SEQ ID NO: 3820
  GFR-binding peptide
  MOD_RES (2), (33), (34): Xaa is C or S

SEQ ID NO: 37873 - protein, 40 aa, Artificial Sequence; identical to SEQ ID NO: 11242
  GFR-binding peptide
  MOD_RES (2), (36), (37): Xaa is C or S
  MOD_RES (14), (15), (16), (17), (18): Xaa is A or G
  MOD_RES (19), (20), (21), (22): Xaa is A or G or is absent

SEQ ID NO: 37874 - protein, 40 aa, Artificial Sequence; identical to SEQ ID NO: 13186
  GFR-binding peptide
  MOD_RES (2), (36): Xaa is C or S
  MOD_RES (14), (15), (16), (17), (18): Xaa is A or G
  MOD_RES (19), (20), (21), (22): Xaa is A or G or is absent

SEQ ID NO: 37875 - protein, 39 aa, Artificial Sequence; identical to SEQ ID NO: 5750
  GFR-binding peptide
  MOD_RES (1), (35), (36): Xaa is C or S
  MOD_RES (13), (14), (15), (16), (17): Xaa is A or G
  MOD_RES (18), (19), (20), (21): Xaa is A or G or is absent

SEQ ID NO: 37876 - protein, 35 aa, Artificial Sequence; identical to SEQ ID NO: 3825
  GFR-binding peptide
  MOD_RES (31), (32): Xaa is C or S

SEQ ID NO: 37877 - protein, 38 aa, Artificial Sequence; identical to SEQ ID NO: 5753
  GFR-binding peptide
  MOD_RES (2), (4), (37), (38): Xaa is C or S
  MOD_RES (15), (16), (17), (18), (19): Xaa is A or G
  MOD_RES (20), (21), (22), (23): Xaa is A or G or is absent

SEQ ID NO: 37878 - protein, 40 aa, Artificial Sequence; identical to SEQ ID NO: 13189
  GFR-binding peptide
  MOD_RES (1), (3), (35), (36): Xaa is C or S

SEQ ID NO: 37879 - protein, 37 aa, Artificial Sequence; identical to SEQ ID NO: 11245
  GFR-binding peptide
  MOD_RES (2), (34), (35): Xaa is C or S

SEQ ID NO: 37880 - protein, 35 aa, Artificial Sequence; identical to SEQ ID NO: 13190
  GFR-binding peptide
  MOD_RES (33), (34): Xaa is C or S
  MOD_RES (11), (12), (13), (14), (15): Xaa is A or G
  MOD_RES (16), (17), (18), (19): Xaa is A or G or is absent

SEQ ID NO: 37881 - protein, 33 aa, Artificial Sequence; identical to SEQ ID NO: 13191
  GFR-binding peptide
  MOD_RES (31), (32): Xaa is C or S

SEQ ID NO: 37882 - protein, 39 aa, Artificial Sequence; identical to SEQ ID NO: 13192
  GFR-binding peptide
  MOD_RES (1), (33), (34): Xaa is C or S

SEQ ID NO: 37883 - protein, 40 aa, Artificial Sequence; identical to SEQ ID NO: 11246
  GFR-binding peptide
  MOD_RES (2), (34), (35): Xaa is C or S

SEQ ID NO: 37884 - protein, 39 aa, Artificial Sequence; identical to SEQ ID NO: 13194
  GFR-binding peptide
  MOD_RES (33), (34): Xaa is C or S
  MOD_RES (11), (12), (13), (14), (15): Xaa is A or G
  MOD_RES (16), (17), (18), (19): Xaa is A or G or is absent

SEQ ID NO: 37885 - protein, 36 aa, Artificial Sequence; identical to SEQ ID NO: 11247
  GFR-binding peptide
  MOD_RES (1), (32), (33): Xaa is C or S

SEQ ID NO: 37886 - protein, 32 aa, Artificial Sequence; identical to SEQ ID NO: 3829
  GFR-binding peptide
  MOD_RES (1), (1): Xaa is C or S

SEQ ID NO: 37887 - protein, 42 aa, Artificial Sequence; identical to SEQ ID NO: 11249
  GFR-binding peptide
  MOD_RES (2), (36), (37): Xaa is C or S
  MOD_RES (14), (15), (16), (17), (18): Xaa is A or G
  MOD_RES (19), (20), (21), (22): Xaa is A or G or is absent

SEQ ID NO: 37888 - protein, 38 aa, Artificial Sequence; identical to SEQ ID NO: 11250
  GFR-binding peptide
  MOD_RES (2), (36), (37): Xaa is C or S
  MOD_RES (14), (15), (16), (17), (18): Xaa is A or G
  MOD_RES (19), (20), (21), (22): Xaa is A or G or is absent

SEQ ID NO: 37889 - protein, 33 aa, Artificial Sequence; identical to SEQ ID NO: 13196
  GFR-binding peptide
  MOD_RES (1), (33): Xaa is C or S

SEQ ID NO: 37890 - protein, 33 aa, Artificial Sequence; identical to SEQ ID NO: 11251
  GFR-binding peptide
  MOD_RES (32), (33): Xaa is C or S

SEQ ID NO: 37891 - protein, 33 aa, Artificial Sequence; identical to SEQ ID NO: 11252
  GFR-binding peptide
  MOD_RES (32), (33): Xaa is C or S

SEQ ID NO: 37892 - protein, 37 aa, Artificial Sequence; identical to SEQ ID NO: 13198
  GFR-binding peptide
  MOD_RES (1), (3), (35), (36): Xaa is C or S

SEQ ID NO: 37893 - protein, 35 aa, Artificial Sequence; identical to SEQ ID NO: 13199
  GFR-binding peptide
  MOD_RES (2), (2): Xaa is C or S
  MOD_RES (14), (15), (16), (17), (18): Xaa is A or G
  MOD_RES (19), (20), (21), (22): Xaa is A or G or is absent

SEQ ID NO: 37894 - protein, 32 aa, Artificial Sequence
  GFR-binding peptide
  MOD_RES (31), (32): Xaa is C or S
SKVIMNSLQEIKPTKGIYYLITLPELDQSVXX

SEQ ID NO: 37895 - protein, 33 aa, Artificial Sequence; identical to SEQ ID NO: 11254
  GFR-binding peptide
  MOD_RES (33), (33): Xaa is C or S
  MOD_RES (11), (12), (13), (14), (15): Xaa is A or G
  MOD_RES (16), (17), (18), (19): Xaa is A or G or is absent

SEQ ID NO: 37896 - protein, 39 aa, Artificial Sequence; identical to SEQ ID NO: 13201
  GFR-binding peptide
  MOD_RES (1), (34), (35): Xaa is C or S
  MOD_RES (12), (13), (14), (15), (16): Xaa is A or G
  MOD_RES (17), (18), (19), (20): Xaa is A or G or is absent

SEQ ID NO: 37897 - protein, 40 aa, Artificial Sequence; identical to SEQ ID NO: 13202
  GFR-binding peptide
  MOD_RES (2), (4), (36), (37): Xaa is C or S

SEQ ID NO: 37898 - protein, 40 aa, Artificial Sequence; identical to SEQ ID NO: 11255
  GFR-binding peptide
  MOD_RES (2), (4), (37), (38): Xaa is C or S
  MOD_RES (15), (16), (17), (18), (19): Xaa is A or G
  MOD_RES (20), (21), (22), (23): Xaa is A or G or is absent

SEQ ID NO: 37899 - protein, 35 aa, Artificial Sequence; identical to SEQ ID NO: 13204
  GFR-binding peptide
  MOD_RES (32), (33): Xaa is C or S

SEQ ID NO: 37900 - protein, 37 aa, Artificial Sequence; identical to SEQ ID NO: 11256
  GFR-binding peptide
  MOD_RES (32), (33): Xaa is C or S

SEQ ID NO: 37901 - protein, 33 aa, Artificial Sequence; identical to SEQ ID NO: 11257
  GFR-binding peptide
  MOD_RES (12), (13), (14), (15), (16): Xaa is A or G
  MOD_RES (17), (18), (19), (20): Xaa is A or G or is absent

SEQ ID NO: 37902 - protein, 34 aa, Artificial Sequence; identical to SEQ ID NO: 5769
  GFR-binding peptide
  MOD_RES (1), (33), (34): Xaa is C or S

SEQ ID NO: 37903 - protein, 39 aa, Artificial Sequence; identical to SEQ ID NO: 11258
  GFR-binding peptide
  MOD_RES (1), (3), (35), (36): Xaa is C or S

SEQ ID NO: 37904 - protein, 33 aa, Artificial Sequence; identical to SEQ ID NO: 13206
  GFR-binding peptide
  MOD_RES (2), (2): Xaa is C or S

SEQ ID NO: 37905 - protein, 35 aa, Artificial Sequence; identical to SEQ ID NO: 13207
  GFR-binding peptide
  MOD_RES (33), (34): Xaa is C or S
  MOD_RES (11), (12), (13), (14), (15): Xaa is A or G
  MOD_RES (16), (17), (18), (19): Xaa is A or G or is absent

SEQ ID NO: 37906 - protein, 34 aa, Artificial Sequence; identical to SEQ ID NO: 11259
  GFR-binding peptide
  MOD_RES (33), (34): Xaa is C or S
  MOD_RES (11), (12), (13), (14), (15): Xaa is A or G
  MOD_RES (16), (17), (18), (19): Xaa is A or G or is absent

SEQ ID NO: 37907 - protein, 42 aa, Artificial Sequence; identical to SEQ ID NO: 13209
  GFR-binding peptide
  MOD_RES (2), (4), (36), (37): Xaa is C or S

SEQ ID NO: 37908 - protein, 37 aa, Artificial Sequence; identical to SEQ ID NO: 5771
  GFR-binding peptide
  MOD_RES (2), (33), (34): Xaa is C or S

SEQ ID NO: 37909 - protein, 33 aa, Artificial Sequence; identical to SEQ ID NO: 11261
  GFR-binding peptide
  MOD_RES (2), (2): Xaa is C or S

SEQ ID NO: 37910 - protein, 38 aa, Artificial Sequence; identical to SEQ ID NO: 13211
  GFR-binding peptide
  MOD_RES (33), (34): Xaa is C or S
  MOD_RES (11), (12), (13), (14), (15): Xaa is A or G
  MOD_RES (16), (17), (18), (19): Xaa is A or G or is absent

SEQ ID NO: 37911 - protein, 39 aa, Artificial Sequence; identical to SEQ ID NO: 11262
  GFR-binding peptide
  MOD_RES (2), (33), (34): Xaa is C or S

SEQ ID NO: 37912 - protein, 36 aa, Artificial Sequence; identical to SEQ ID NO: 11263
  GFR-binding peptide
  MOD_RES (1), (35), (36): Xaa is C or S
  MOD_RES (13), (14), (15), (16), (17): Xaa is A or G
  MOD_RES (18), (19), (20), (21): Xaa is A or G or is absent

SEQ ID NO: 37913 - protein, 41 aa, Artificial Sequence; identical to SEQ ID NO: 11265
  GFR-binding peptide
  MOD_RES (1), (35): Xaa is C or S
  MOD_RES (13), (14), (15), (16), (17): Xaa is A or G
  MOD_RES (18), (19), (20), (21): Xaa is A or G or is absent

SEQ ID NO: 37914 - protein, 37 aa, Artificial Sequence; identical to SEQ ID NO: 13212
  GFR-binding peptide
  MOD_RES (1), (35), (36): Xaa is C or S
  MOD_RES (13), (14), (15), (16), (17): Xaa is A or G
  MOD_RES (18), (19), (20), (21): Xaa is A or G or is absent

SEQ ID NO: 37915 - protein, 43 aa, Artificial Sequence; identical to SEQ ID NO: 13214
  GFR-binding peptide
  MOD_RES (1), (3), (37), (38): Xaa is C or S
  MOD_RES (15), (16), (17), (18), (19): Xaa is A or G
  MOD_RES (20), (21), (22), (23): Xaa is A or G or is absent

SEQ ID NO: 37916 - protein, 34 aa, Artificial Sequence; identical to SEQ ID NO: 11267
  GFR-binding peptide
  MOD_RES (31), (32): Xaa is C or S

SEQ ID NO: 37917 - protein, 42 aa, Artificial Sequence; identical to SEQ ID NO: 11268
  GFR-binding peptide
  MOD_RES (2), (4), (36), (37): Xaa is C or S

SEQ ID NO: 37918 - protein, 38 aa, Artificial Sequence; identical to SEQ ID NO: 11269
  GFR-binding peptide
  MOD_RES (2), (4), (38): Xaa is C or S
  MOD_RES (16), (17), (18), (19), (20): Xaa is A or G
  MOD_RES (21), (22), (23), (24): Xaa is A or G or is absent

SEQ ID NO: 37919 - protein, 39 aa, Artificial Sequence; identical to SEQ ID NO: 11270
  GFR-binding peptide
  MOD_RES (2), (4), (36), (37): Xaa is C or S

SEQ ID NO: 37920 - protein, 34 aa, Artificial Sequence; identical to SEQ ID NO: 3846
  GFR-binding peptide
  MOD_RES (2), (33), (34): Xaa is C or S

SEQ ID NO: 37921 - protein, 36 aa, Artificial Sequence; identical to SEQ ID NO: 13215
  GFR-binding peptide
  MOD_RES (33), (34): Xaa is C or S
  MOD_RES (11), (12), (13), (14), (15): Xaa is A or G
  MOD_RES (16), (17), (18), (19): Xaa is A or G or is absent

SEQ ID NO: 37922 - protein, 32 aa, Artificial Sequence; identical to SEQ ID NO: 5783
  GFR-binding peptide
  MOD_RES (1), (32): Xaa is C or S

SEQ ID NO: 37923 - protein, 38 aa, Artificial Sequence; identical to SEQ ID NO: 11272
  GFR-binding peptide
  MOD_RES (2), (33), (34): Xaa is C or S

SEQ ID NO: 37924 - protein, 36 aa, Artificial Sequence; identical to SEQ ID NO: 3849
  GFR-binding peptide
  MOD_RES (33), (34): Xaa is C or S
  MOD_RES (11), (12), (13), (14), (15): Xaa is A or G
  MOD_RES (16), (17), (18), (19): Xaa is A or G or is absent

SEQ ID NO: 37925 - protein, 38 aa, Artificial Sequence; identical to SEQ ID NO: 11274
  GFR-binding peptide
  MOD_RES (1), (3), (35), (36): Xaa is C or S

SEQ ID NO: 37926 - protein, 33 aa, Artificial Sequence; identical to SEQ ID NO: 13219
  GFR-binding peptide
  MOD_RES (33), (33): Xaa is C or S
  MOD_RES (11), (12), (13), (14), (15): Xaa is A or G
  MOD_RES (16), (17), (18), (19): Xaa is A or G or is absent

SEQ ID NO: 37927 - protein, 39 aa, Artificial Sequence
  GFR-binding peptide
  MOD_RES (33), (34): Xaa is C or S
  MOD_RES (11), (12), (13), (14), (15): Xaa is A or G
  MOD_RES (16), (17), (18), (19): Xaa is A or G or is absent
SKVIMNSLQEXXXXXXXXXYYLITLPELDQSVXXPSASA

SEQ ID NO: 37928 - protein, 37 aa, Artificial Sequence; identical to SEQ ID NO: 11275
  GFR-binding peptide
  MOD_RES (1), (35): Xaa is C or S
  MOD_RES (13), (14), (15), (16), (17): Xaa is A or G
  MOD_RES (18), (19), (20), (21): Xaa is A or G or is absent

SEQ ID NO: 37929 - protein, 35 aa, Artificial Sequence; identical to SEQ ID NO: 11276
  GFR-binding peptide
  MOD_RES (32), (33): Xaa is C or S

SEQ ID NO: 37930 - protein, 34 aa, Artificial Sequence; identical to SEQ ID NO: 11277
  GFR-binding peptide
  MOD_RES (33), (34): Xaa is C or S
  MOD_RES (11), (12), (13), (14), (15): Xaa is A or G
  MOD_RES (16), (17), (18), (19): Xaa is A or G or is absent

SEQ ID NO: 37931 - protein, 36 aa, Artificial Sequence; identical to SEQ ID NO: 5788
  GFR-binding peptide
  MOD_RES (34), (35): Xaa is C or S
  MOD_RES (12), (13), (14), (15), (16): Xaa is A or G
  MOD_RES (17), (18), (19), (20): Xaa is A or G or is absent

SEQ ID NO: 37932 - protein, 38 aa, Artificial Sequence; identical to SEQ ID NO: 11278
  GFR-binding peptide
  MOD_RES (2), (36), (37): Xaa is C or S
  MOD_RES (14), (15), (16), (17), (18): Xaa is A or G
  MOD_RES (19), (20), (21), (22): Xaa is A or G or is absent

SEQ ID NO: 37933 - protein, 32 aa, Artificial Sequence; identical to SEQ ID NO: 13221
  GFR-binding peptide
  MOD_RES (1), (1): Xaa is C or S

SEQ ID NO: 37934 - protein, 40 aa, Artificial Sequence; identical to SEQ ID NO: 11279
  GFR-binding peptide
  MOD_RES (1), (34), (35): Xaa is C or S
  MOD_RES (12), (13), (14), (15), (16): Xaa is A or G
  MOD_RES (17), (18), (19), (20): Xaa is A or G or is absent

SEQ ID NO: 37935 - protein, 34 aa, Artificial Sequence; identical to SEQ ID NO: 11280
  GFR-binding peptide
  MOD_RES (34), (34): Xaa is C or S
  MOD_RES (12), (13), (14), (15), (16): Xaa is A or G
  MOD_RES (17), (18), (19), (20): Xaa is A or G or is absent

SEQ ID NO: 37936 - protein, 43 aa, Artificial Sequence; identical to SEQ ID NO: 13222
  GFR-binding peptide
  MOD_RES (2), (4), (38), (39): Xaa is C or S
  MOD_RES (16), (17), (18), (19), (20): Xaa is A or G
  MOD_RES (21), (22), (23), (24): Xaa is A or G or is absent

SEQ ID NO: 37937 - protein, 35 aa, Artificial Sequence; identical to SEQ ID NO: 11281
  GFR-binding peptide
  MOD_RES (2), (34), (35): Xaa is C or S

SEQ ID NO: 37938 - protein, 37 aa, Artificial Sequence; identical to SEQ ID NO: 13223
  GFR-binding peptide
  MOD_RES (1), (3), (35): Xaa is C or S

SEQ ID NO: 37939 - protein, 35 aa, Artificial Sequence; identical to SEQ ID NO: 11282
  GFR-binding peptide
  MOD_RES (31), (32): Xaa is C or S

SEQ ID NO: 37940 - protein, 37 aa, Artificial Sequence; identical to SEQ ID NO: 11283
  GFR-binding peptide
  MOD_RES (34), (35): Xaa is C or S
  MOD_RES (12), (13), (14), (15), (16): Xaa is A or G
  MOD_RES (17), (18), (19), (20): Xaa is A or G or is absent

SEQ ID NO: 37941 - protein, 37 aa, Artificial Sequence; identical to SEQ ID NO: 11284
  GFR-binding peptide
  MOD_RES (1), (3), (34), (35): Xaa is C or S

SEQ ID NO: 37942 - protein, 34 aa, Artificial Sequence; identical to SEQ ID NO: 13224
  GFR-binding peptide
  MOD_RES (1), (33), (34): Xaa is C or S

SEQ ID NO: 37943 - protein, 37 aa, Artificial Sequence; identical to SEQ ID NO: 11285
  GFR-binding peptide
  MOD_RES (33), (34): Xaa is C or S
  MOD_RES (11), (12), (13), (14), (15): Xaa is A or G
  MOD_RES (16), (17), (18), (19): Xaa is A or G or is absent

SEQ ID NO: 37944 - protein, 37 aa, Artificial Sequence; identical to SEQ ID NO: 11286
  GFR-binding peptide
  MOD_RES (2), (4), (35), (36): Xaa is C or S

SEQ ID NO: 37945 - protein, 39 aa, Artificial Sequence; identical to SEQ ID NO: 13225
  GFR-binding peptide
  MOD_RES (1), (34), (35): Xaa is C or S
  MOD_RES (12), (13), (14), (15), (16): Xaa is A or G
  MOD_RES (17), (18), (19), (20): Xaa is A or G or is absent

SEQ ID NO: 37946 - protein, 36 aa, Artificial Sequence; identical to SEQ ID NO: 3855
  GFR-binding peptide
  MOD_RES (1), (3), (34), (35): Xaa is C or S

SEQ ID NO: 37947 - protein, 37 aa, Artificial Sequence; identical to SEQ ID NO: 11288
  GFR-binding peptide
  MOD_RES (2), (4), (35), (36): Xaa is C or S

SEQ ID NO: 37948 - protein, 41 aa, Artificial Sequence; identical to SEQ ID NO: 13226
  GFR-binding peptide
  MOD_RES (1), (3), (35): Xaa is C or S

SEQ ID NO: 37949 - protein, 37 aa, Artificial Sequence; identical to SEQ ID NO: 13227
  GFR-binding peptide
  MOD_RES (2), (36), (37): Xaa is C or S
  MOD_RES (14), (15), (16), (17), (18): Xaa is A or G
  MOD_RES (19), (20), (21), (22): Xaa is A or G or is absent

SEQ ID NO: 37950 - protein, 36 aa, Artificial Sequence
  GFR-binding peptide
  MOD_RES (2), (4): Xaa is C or S
  MOD_RES (15), (16), (17), (18), (19): Xaa is A or G
  MOD_RES (20), (21), (22), (23): Xaa is A or G or is absent
SXKXSKVIMNSLQEXXXXXXXXXYYLITLPELDQSV

SEQ ID NO: 37951 - protein, 40 aa, Artificial Sequence; identical to SEQ ID NO: 13230
  GFR-binding peptide
  MOD_RES (1), (34), (35): Xaa is C or S
  MOD_RES (12), (13), (14), (15), (16): Xaa is A or G
  MOD_RES (17), (18), (19), (20): Xaa is A or G or is absent

SEQ ID NO: 37952 - protein, 31 aa, Artificial Sequence; identical to SEQ ID NO: 13232
  GFR-binding peptide

SEQ ID NO: 37953 - protein, 34 aa, Artificial Sequence; identical to SEQ ID NO: 11289
  GFR-binding peptide
  MOD_RES (1), (3): Xaa is C or S

SEQ ID NO: 37954 - protein, 34 aa, Artificial Sequence; identical to SEQ ID NO: 11290
  GFR-binding peptide
  MOD_RES (1), (1): Xaa is C or S
  MOD_RES (13), (14), (15), (16), (17): Xaa is A or G
  MOD_RES (18), (19), (20), (21): Xaa is A or G or is absent

SEQ ID NO: 37955 - protein, 38 aa, Artificial Sequence; identical to SEQ ID NO: 3859
  GFR-binding peptide
  MOD_RES (34), (35): Xaa is C or S
  MOD_RES (12), (13), (14), (15), (16): Xaa is A or G
  MOD_RES (17), (18), (19), (20): Xaa is A or G or is absent

SEQ ID NO: 37956 - protein, 38 aa, Artificial Sequence; identical to SEQ ID NO: 13233
  GFR-binding peptide
  MOD_RES (32), (33): Xaa is C or S

SEQ ID NO: 37957 - protein, 40 aa, Artificial Sequence; identical to SEQ ID NO: 3861
  GFR-binding peptide
  MOD_RES (34), (35): Xaa is C or S
  MOD_RES (12), (13), (14), (15), (16): Xaa is A or G
  MOD_RES (17), (18), (19), (20): Xaa is A or G or is absent

SEQ ID NO: 37958 - protein, 39 aa, Artificial Sequence; identical to SEQ ID NO: 13234
  GFR-binding peptide
  MOD_RES (1), (35), (36): Xaa is C or S
  MOD_RES (13), (14), (15), (16), (17): Xaa is A or G
  MOD_RES (18), (19), (20), (21): Xaa is A or G or is absent

SEQ ID NO: 37959 - protein, 32 aa, Artificial Sequence; identical to SEQ ID NO: 11293
  GFR-binding peptide
  MOD_RES (31), (32): Xaa is C or S

SEQ ID NO: 37960 - protein, 38 aa, Artificial Sequence; identical to SEQ ID NO: 13237
  GFR-binding peptide
  MOD_RES (2), (35), (36): Xaa is C or S
  MOD_RES (13), (14), (15), (16), (17): Xaa is A or G
  MOD_RES (18), (19), (20), (21): Xaa is A or G or is absent

SEQ ID NO: 37961 - protein, 41 aa, Artificial Sequence; identical to SEQ ID NO: 13238
  GFR-binding peptide
  MOD_RES (1), (3), (35), (36): Xaa is C or S

SEQ ID NO: 37962 - protein, 39 aa, Artificial Sequence; identical to SEQ ID NO: 11294
  GFR-binding peptide
  MOD_RES (2), (35), (36): Xaa is C or S
  MOD_RES (13), (14), (15), (16), (17): Xaa is A or G
  MOD_RES (18), (19), (20), (21): Xaa is A or G or is absent

SEQ ID NO: 37963 - protein, 43 aa, Artificial Sequence; identical to SEQ ID NO: 13239
  GFR-binding peptide
  MOD_RES (2), (4), (38), (39): Xaa is C or S
  MOD_RES (16), (17), (18), (19), (20): Xaa is A or G
  MOD_RES (21), (22), (23), (24): Xaa is A or G or is absent

SEQ ID NO: 37964 - protein, 36 aa, Artificial Sequence
  GFR-binding peptide
  MOD_RES (1), (3), (34), (35): Xaa is C or S
XKXSKVIMNSLQEIKPTKGIYYLITLPELDQSVXXP

SEQ ID NO: 37965 - protein, 37 aa, Artificial Sequence; identical to SEQ ID NO: 13242
  GFR-binding peptide
  MOD_RES (2), (4), (36), (37): Xaa is C or S

SEQ ID NO: 37966 - protein, 30 aa, Artificial Sequence; identical to SEQ ID NO: 5814
  GFR-binding peptide

SEQ ID NO: 37967 - protein, 36 aa, Artificial Sequence; identical to SEQ ID NO: 13244
  GFR-binding peptide
  MOD_RES (2), (33), (34): Xaa is C or S

SEQ ID NO: 37968 - protein, 37 aa, Artificial Sequence; identical to SEQ ID NO: 11297
  GFR-binding peptide
  MOD_RES (2), (4): Xaa is C or S
  MOD_RES (16), (17), (18), (19), (20): Xaa is A or G
  MOD_RES (21), (22), (23), (24): Xaa is A or G or is absent

SEQ ID NO: 37969 - protein, 34 aa, Artificial Sequence; identical to SEQ ID NO: 11298
  GFR-binding peptide
  MOD_RES (33), (34): Xaa is C or S
  MOD_RES (11), (12), (13), (14), (15): Xaa is A or G
  MOD_RES (16), (17), (18), (19): Xaa is A or G or is absent

SEQ ID NO: 37970 - protein, 35 aa, Artificial Sequence; identical to SEQ ID NO: 13245
  GFR-binding peptide
  MOD_RES (2), (2): Xaa is C or S
  MOD_RES (14), (15), (16), (17), (18): Xaa is A or G
  MOD_RES (19), (20), (21), (22): Xaa is A or G or is absent

SEQ ID NO: 37971 - protein, 40 aa, Artificial Sequence; identical to SEQ ID NO: 11299
  GFR-binding peptide
  MOD_RES (2), (4), (36): Xaa is C or S

SEQ ID NO: 37972 - protein, 36 aa, Artificial Sequence; identical to SEQ ID NO: 11300
  GFR-binding peptide
  MOD_RES (32), (33): Xaa is C or S

SEQ ID NO: 37973 - protein, 36 aa, Artificial Sequence; identical to SEQ ID NO: 13247
  GFR-binding peptide
  MOD_RES (2), (34), (35): Xaa is C or S

SEQ ID NO: 37974 - protein, 36 aa, Artificial Sequence; identical to SEQ ID NO: 3875
  GFR-binding peptide
  MOD_RES (2), (4), (36): Xaa is C or S

SEQ ID NO: 37975 - protein, 33 aa, Artificial Sequence; identical to SEQ ID NO: 3877
  GFR-binding peptide
  MOD_RES (32), (33): Xaa is C or S

SEQ ID NO: 37976 - protein, 37 aa, Artificial Sequence; identical to SEQ ID NO: 13252
  GFR-binding peptide
  MOD_RES (34), (35): Xaa is C or S
  MOD_RES (12), (13), (14), (15), (16): Xaa is A or G
  MOD_RES (17), (18), (19), (20): Xaa is A or G or is absent

SEQ ID NO: 37977 - protein, 31 aa, Artificial Sequence; identical to SEQ ID NO: 13255
  GFR-binding peptide
  MOD_RES (31), (31): Xaa is C or S

SEQ ID NO: 37978 - protein, 42 aa, Artificial Sequence; identical to SEQ ID NO: 13256
  GFR-binding peptide
  MOD_RES (1), (3), (37), (38): Xaa is C or S
  MOD_RES (15), (16), (17), (18), (19): Xaa is A or G
  MOD_RES (20), (21), (22), (23): Xaa is A or G or is absent

SEQ ID NO: 37979 - protein, 33 aa, Artificial Sequence; identical to SEQ ID NO: 13257
  GFR-binding peptide
  MOD_RES (2), (2): Xaa is C or S

SEQ ID NO: 37980 - protein, 38 aa, Artificial Sequence; identical to SEQ ID NO: 13258
  GFR-binding peptide
  MOD_RES (2), (4), (35), (36): Xaa is C or S

SEQ ID NO: 37981 - protein, 34 aa, Artificial Sequence; identical to SEQ ID NO: 5826
  GFR-binding peptide
  MOD_RES (32), (33): Xaa is C or S

SEQ ID NO: 37982 - protein, 39 aa, Artificial Sequence; identical to SEQ ID NO: 11306
  GFR-binding peptide
  MOD_RES (1), (3), (35), (36): Xaa is C or S

SEQ ID NO: 37983 - protein, 38 aa, Artificial Sequence; identical to SEQ ID NO: 13261
  GFR-binding peptide
  MOD_RES (2), (33), (34): Xaa is C or S

SEQ ID NO: 37984 - protein, 41 aa, Artificial Sequence; identical to SEQ ID NO: 13262
  GFR-binding peptide
  MOD_RES (2), (4), (36), (37): Xaa is C or S

SEQ ID NO: 37985 - protein, 36 aa, Artificial Sequence; identical to SEQ ID NO: 13263
  GFR-binding peptide
  MOD_RES (2), (4), (36): Xaa is C or S

SEQ ID NO: 37986 - protein, 36 aa, Artificial Sequence; identical to SEQ ID NO: 13264
  GFR-binding peptide
  MOD_RES (33), (34): Xaa is C or S
  MOD_RES (11), (12), (13), (14), (15): Xaa is A or G
  MOD_RES (16), (17), (18), (19): Xaa is A or G or is absent

SEQ ID NO: 37987 - protein, 39 aa, Artificial Sequence; identical to SEQ ID NO: 13265
  GFR-binding peptide
  MOD_RES (1), (35), (36): Xaa is C or S
  MOD_RES (13), (14), (15), (16), (17): Xaa is A or G
  MOD_RES (18), (19), (20), (21): Xaa is A or G or is absent

SEQ ID NO: 37988 - protein, 39 aa, Artificial Sequence; identical to SEQ ID NO: 11308
  GFR-binding peptide
  MOD_RES (2), (34), (35): Xaa is C or S

SEQ ID NO: 37989 - protein, 33 aa, Artificial Sequence; identical to SEQ ID NO: 3886
  GFR-binding peptide
  MOD_RES (2), (2): Xaa is C or S

SEQ ID NO: 37990 - protein, 38 aa, Artificial Sequence; identical to SEQ ID NO: 3888
  GFR-binding peptide
  MOD_RES (1), (3), (34), (35): Xaa is C or S

SEQ ID NO: 37991 - protein, 35 aa, Artificial Sequence; identical to SEQ ID NO: 13267
  GFR-binding peptide
  MOD_RES (1), (34), (35): Xaa is C or S
  MOD_RES (12), (13), (14), (15), (16): Xaa is A or G
  MOD_RES (17), (18), (19), (20): Xaa is A or G or is absent

SEQ ID NO: 37992 - protein, 41 aa, Artificial Sequence; identical to SEQ ID NO: 11311
  GFR-binding peptide
  MOD_RES (1), (35), (36): Xaa is C or S
  MOD_RES (13), (14), (15), (16), (17): Xaa is A or G
  MOD_RES (18), (19), (20), (21): Xaa is A or G or is absent

SEQ ID NO: 37993 - protein, 34 aa, Artificial Sequence; identical to SEQ ID NO: 13269
  GFR-binding peptide
  MOD_RES (31), (32): Xaa is C or S

SEQ ID NO: 37994 - protein, 34 aa, Artificial Sequence; identical to SEQ ID NO: 13270
  GFR-binding peptide
  MOD_RES (34), (34): Xaa is C or S
  MOD_RES (12), (13), (14), (15), (16): Xaa is A or G
  MOD_RES (17), (18), (19), (20): Xaa is A or G or is absent

SEQ ID NO: 37995 - protein, 33 aa, Artificial Sequence; identical to SEQ ID NO: 13271
  GFR-binding peptide
  MOD_RES (1), (33): Xaa is C or S

SEQ ID NO: 37996 - protein, 37 aa, Artificial Sequence; identical to SEQ ID NO: 11312
  GFR-binding peptide
  MOD_RES (1), (3), (36), (37): Xaa is C or S
  MOD_RES (14), (15), (16), (17), (18): Xaa is A or G
  MOD_RES (19), (20), (21), (22): Xaa is A or G or is absent

SEQ ID NO: 37997 - protein, 37 aa, Artificial Sequence; identical to SEQ ID NO: 11313
  GFR-binding peptide
  MOD_RES (1), (32), (33): Xaa is C or S

SEQ ID NO: 37998 - protein, 42 aa, Artificial Sequence; identical to SEQ ID NO: 11314
  GFR-binding peptide
  MOD_RES (2), (36): Xaa is C or S
  MOD_RES (14), (15), (16), (17), (18): Xaa is A or G
  MOD_RES (19), (20), (21), (22): Xaa is A or G or is absent

SEQ ID NO: 37999 - protein, 41 aa, Artificial Sequence; identical to SEQ ID NO: 11315
  GFR-binding peptide
  MOD_RES (1), (3), (35): Xaa is C or S

SEQ ID NO: 38000 - protein, 35 aa, Artificial Sequence; identical to SEQ ID NO: 11317
  GFR-binding peptide
  MOD_RES (31), (32): Xaa is C or S

SEQ ID NO: 38001 - protein, 36 aa, Artificial Sequence; identical to SEQ ID NO: 5841
  GFR-binding peptide
  MOD_RES (2), (33), (34): Xaa is C or S

SEQ ID NO: 38002 - protein, 34 aa, Artificial Sequence; identical to SEQ ID NO: 3896
  GFR-binding peptide
  MOD_RES (1), (3): Xaa is C or S

SEQ ID NO: 38003 - protein, 39 aa, Artificial Sequence; identical to SEQ ID NO: 13275
  GFR-binding peptide
  MOD_RES (1), (33), (34): Xaa is C or S

SEQ ID NO: 38004 - protein, 35 aa, Artificial Sequence; identical to SEQ ID NO: 13276
  GFR-binding peptide
  MOD_RES (33), (34): Xaa is C or S
  MOD_RES (11), (12), (13), (14), (15): Xaa is A or G
  MOD_RES (16), (17), (18), (19): Xaa is A or G or is absent

SEQ ID NO: 38005 - protein, 42 aa, Artificial Sequence; identical to SEQ ID NO: 3898
  GFR-binding peptide
  MOD_RES (2), (4), (36), (37): Xaa is C or S

SEQ ID NO: 38006 - protein, 40 aa, Artificial Sequence; identical to SEQ ID NO: 13277
  GFR-binding peptide
  MOD_RES (1), (3), (35): Xaa is C or S

SEQ ID NO: 38007 - protein, 35 aa, Artificial Sequence; identical to SEQ ID NO: 5848
  GFR-binding peptide
  MOD_RES (2), (33), (34): Xaa is C or S

SEQ ID NO: 38008 - protein, 39 aa, Artificial Sequence; identical to SEQ ID NO: 13280
  GFR-binding peptide
  MOD_RES (1), (35), (36): Xaa is C or S
  MOD_RES (13), (14), (15), (16), (17): Xaa is A or G
  MOD_RES (18), (19), (20), (21): Xaa is A or G or is absent

SEQ ID NO: 38009 - protein, 36 aa, Artificial Sequence; identical to SEQ ID NO: 3899
  GFR-binding peptide
  MOD_RES (2), (34), (35): Xaa is C or S

SEQ ID NO: 38010 - protein, 34 aa, Artificial Sequence; identical to SEQ ID NO: 13281
  GFR-binding peptide
  MOD_RES (2), (34): Xaa is C or S

SEQ ID NO: 38011 - protein, 33 aa, Artificial Sequence; identical to SEQ ID NO: 11321
  GFR-binding peptide
  MOD_RES (12), (13), (14), (15), (16): Xaa is A or G
  MOD_RES (17), (18), (19), (20): Xaa is A or G or is absent

SEQ ID NO: 38012 - protein, 37 aa, Artificial Sequence; identical to SEQ ID NO: 13282
  GFR-binding peptide
  MOD_RES (1), (34), (35): Xaa is C or S
  MOD_RES (12), (13), (14), (15), (16): Xaa is A or G
  MOD_RES (17), (18), (19), (20): Xaa is A or G or is absent

SEQ ID NO: 38013 - protein, 33 aa, Artificial Sequence
  GFR-binding peptide
  MOD_RES (2), (33): Xaa is C or S
KXSKVIMNSLQEIKPTKGIYYLITLPELDQSVX

SEQ ID NO: 38014 - protein, 38 aa, Artificial Sequence; identical to SEQ ID NO: 11323
  GFR-binding peptide
  MOD_RES (2), (34), (35): Xaa is C or S

SEQ ID NO: 38015 - protein, 30 aa, Artificial Sequence; identical to SEQ ID NO: 11324
  GFR-binding peptide

SEQ ID NO: 38016 - protein, 42 aa, Artificial Sequence; identical to SEQ ID NO: 13283
  GFR-binding peptide
  MOD_RES (1), (3), (37), (38): Xaa is C or S
  MOD_RES (15), (16), (17), (18), (19): Xaa is A or G
  MOD_RES (20), (21), (22), (23): Xaa is A or G or is absent

SEQ ID NO: 38017 - protein, 40 aa, Artificial Sequence; identical to SEQ ID NO: 13284
  GFR-binding peptide
  MOD_RES (2), (4), (36): Xaa is C or S

SEQ ID NO: 38018 - protein, 38 aa, Artificial Sequence; identical to SEQ ID NO: 13285
  GFR-binding peptide
  MOD_RES (1), (35), (36): Xaa is C or S
  MOD_RES (13), (14), (15), (16), (17): Xaa is A or G
  MOD_RES (18), (19), (20), (21): Xaa is A or G or is absent

SEQ ID NO: 38019 - protein, 38 aa, Artificial Sequence; identical to SEQ ID NO: 11325
  GFR-binding peptide
  MOD_RES (1), (3), (36), (37): Xaa is C or S
  MOD_RES (14), (15), (16), (17), (18): Xaa is A or G
  MOD_RES (19), (20), (21), (22): Xaa is A or G or is absent

SEQ ID NO: 38020 - protein, 30 aa, Artificial Sequence; identical to SEQ ID NO: 13286
  GFR-binding peptide

SEQ ID NO: 38021 - protein, 43 aa, Artificial Sequence; identical to SEQ ID NO: 11326
  GFR-binding peptide
  MOD_RES (2), (4), (38), (39): Xaa is C or S
  MOD_RES (16), (17), (18), (19), (20): Xaa is A or G
  MOD_RES (21), (22), (23), (24): Xaa is A or G or is absent

SEQ ID NO: 38022 - protein, 37 aa, Artificial Sequence; identical to SEQ ID NO: 13287
  GFR-binding peptide
  MOD_RES (33), (34): Xaa is C or S
  MOD_RES (11), (12), (13), (14), (15): Xaa is A or G
  MOD_RES (16), (17), (18), (19): Xaa is A or G or is absent

SEQ ID NO: 38023 - protein, 35 aa, Artificial Sequence; identical to SEQ ID NO: 13288
  GFR-binding peptide
  MOD_RES (2), (4): Xaa is C or S

SEQ ID NO: 38024 - protein, 41 aa, Artificial Sequence; identical to SEQ ID NO: 5860
  GFR-binding peptide
  MOD_RES (2), (4), (38), (39): Xaa is C or S
  MOD_RES (16), (17), (18), (19), (20): Xaa is A or G
  MOD_RES (21), (22), (23), (24): Xaa is A or G or is absent

SEQ ID NO: 38025 - protein, 34 aa, Artificial Sequence; identical to SEQ ID NO: 13291
  GFR-binding peptide
  MOD_RES (1), (3): Xaa is C or S

SEQ ID NO: 38026 - protein, 36 aa, Artificial Sequence; identical to SEQ ID NO: 13292
  GFR-binding peptide
  MOD_RES (1), (35), (36): Xaa is C or S
  MOD_RES (13), (14), (15), (16), (17): Xaa is A or G
  MOD_RES (18), (19), (20), (21): Xaa is A or G or is absent

SEQ ID NO: 38027 - protein, 37 aa, Artificial Sequence; identical to SEQ ID NO: 3907
  GFR-binding peptide
  MOD_RES (1), (3), (37): Xaa is C or S
  MOD_RES (15), (16), (17), (18), (19): Xaa is A or G
  MOD_RES (20), (21), (22), (23): Xaa is A or G or is absent

SEQ ID NO: 38028 - protein, 31 aa, Artificial Sequence; identical to SEQ ID NO: 5867
  GFR-binding peptide

SEQ ID NO: 38029 - protein, 40 aa, Artificial Sequence; identical to SEQ ID NO: 5868
  GFR-binding peptide
  MOD_RES (2), (4), (38), (39): Xaa is C or S
  MOD_RES (16), (17), (18), (19), (20): Xaa is A or G
  MOD_RES (21), (22), (23), (24): Xaa is A or G or is absent

SEQ ID NO: 38030 - protein, 35 aa, Artificial Sequence; identical to SEQ ID NO: 11329
  GFR-binding peptide
  MOD_RES (2), (34), (35): Xaa is C or S

SEQ ID NO: 38031 - protein, 35 aa, Artificial Sequence; identical to SEQ ID NO: 3910
  GFR-binding peptide
  MOD_RES (31), (32): Xaa is C or S

SEQ ID NO: 38032 - protein, 41 aa, Artificial Sequence; identical to SEQ ID NO: 3911
  GFR-binding peptide
  MOD_RES (2), (35), (36): Xaa is C or S
  MOD_RES (13), (14), (15), (16), (17): Xaa is A or G
  MOD_RES (18), (19), (20), (21): Xaa is A or G or is absent

SEQ ID NO: 38033 - protein, 39 aa, Artificial Sequence; identical to SEQ ID NO: 13296
  GFR-binding peptide
  MOD_RES (1), (3), (37): Xaa is C or S
  MOD_RES (15), (16), (17), (18), (19): Xaa is A or G
  MOD_RES (20), (21), (22), (23): Xaa is A or G or is absent

SEQ ID NO: 38034 - protein, 37 aa, Artificial Sequence; identical to SEQ ID NO: 13297
  GFR-binding peptide
  MOD_RES (34), (35): Xaa is C or S
  MOD_RES (12), (13), (14), (15), (16): Xaa is A or G
  MOD_RES (17), (18), (19), (20): Xaa is A or G or is absent

SEQ ID NO: 38035 - protein, 35 aa, Artificial Sequence; identical to SEQ ID NO: 11332
  GFR-binding peptide
  MOD_RES (1), (3): Xaa is C or S
  MOD_RES (14), (15), (16), (17), (18): Xaa is A or G
  MOD_RES (19), (20), (21), (22): Xaa is A or G or is absent

SEQ ID NO: 38036 - protein, 41 aa, Artificial Sequence; identical to SEQ ID NO: 11333
  GFR-binding peptide
  MOD_RES (2), (4), (38), (39): Xaa is C or S
  MOD_RES (16), (17), (18), (19), (20): Xaa is A or G
  MOD_RES (21), (22), (23), (24): Xaa is A or G or is absent

SEQ ID NO: 38037 - protein, 41 aa, Artificial Sequence; identical to SEQ ID NO: 11334
  GFR-binding peptide
  MOD_RES (2), (4), (38), (39): Xaa is C or S
  MOD_RES (16), (17), (18), (19), (20): Xaa is A or G
  MOD_RES (21), (22), (23), (24): Xaa is A or G or is absent

SEQ ID NO: 38038 - protein, 38 aa, Artificial Sequence; identical to SEQ ID NO: 13299
  GFR-binding peptide
  MOD_RES (2), (34): Xaa is C or S

SEQ ID NO: 38039 - protein, 37 aa, Artificial Sequence; identical to SEQ ID NO: 5871
  GFR-binding peptide
  MOD_RES (1), (33), (34): Xaa is C or S

SEQ ID NO: 38040 - protein, 37 aa, Artificial Sequence; identical to SEQ ID NO: 11335
  GFR-binding peptide
  MOD_RES (32), (33): Xaa is C or S

SEQ ID NO: 38041 - protein, 37 aa, Artificial Sequence; identical to SEQ ID NO: 11336
  GFR-binding peptide
  MOD_RES (1), (3), (37): Xaa is C or S
  MOD_RES (15), (16), (17), (18), (19): Xaa is A or G
  MOD_RES (20), (21), (22), (23): Xaa is A or G or is absent

SEQ ID NO: 38042 - protein, 34 aa, Artificial Sequence; identical to SEQ ID NO: 13302
  GFR-binding peptide
  MOD_RES (31), (32): Xaa is C or S

SEQ ID NO: 38043 - protein, 39 aa, Artificial Sequence; identical to SEQ ID NO: 3918
  GFR-binding peptide
  MOD_RES (33), (34): Xaa is C or S
  MOD_RES (11), (12), (13), (14), (15): Xaa is A or G
  MOD_RES (16), (17), (18), (19): Xaa is A or G or is absent

SEQ ID NO: 38044 - protein, 31 aa, Artificial Sequence; identical to SEQ ID NO: 11338
  GFR-binding peptide
  MOD_RES (31), (31): Xaa is C or S

SEQ ID NO: 38045 - protein, 38 aa, Artificial Sequence; identical to SEQ ID NO: 11339
  GFR-binding peptide
  MOD_RES (34), (35): Xaa is C or S
  MOD_RES (12), (13), (14), (15), (16): Xaa is A or G
  MOD_RES (17), (18), (19), (20): Xaa is A or G or is absent

SEQ ID NO: 38046 - protein, 36 aa, Artificial Sequence; identical to SEQ ID NO: 13303
  GFR-binding peptide
  MOD_RES (1), (32), (33): Xaa is C or S

SEQ ID NO: 38047 - protein, 34 aa, Artificial Sequence; identical to SEQ ID NO: 5878
  GFR-binding peptide
  MOD_RES (1), (1): Xaa is C or S
  MOD_RES (13), (14), (15), (16), (17): Xaa is A or G
  MOD_RES (18), (19), (20), (21): Xaa is A or G or is absent

SEQ ID NO: 38048 - protein, 43 aa, Artificial Sequence; identical to SEQ ID NO: 5882
  GFR-binding peptide
  MOD_RES (2), (4), (37), (38): Xaa is C or S
  MOD_RES (15), (16), (17), (18), (19): Xaa is A or G
  MOD_RES (20), (21), (22), (23): Xaa is A or G or is absent

SEQ ID NO: 38049 - protein, 35 aa, Artificial Sequence; identical to SEQ ID NO: 13307
  GFR-binding peptide
  MOD_RES (33), (34): Xaa is C or S
  MOD_RES (11), (12), (13), (14), (15): Xaa is A or G
  MOD_RES (16), (17), (18), (19): Xaa is A or G or is absent

SEQ ID NO: 38050 - protein, 34 aa, Artificial Sequence
  GFR-binding peptide
  MOD_RES (2), (4): Xaa is C or S
SXKXSKVIMNSLQEIKPTKGIYYLITLPELDQSV

SEQ ID NO: 38051 - protein, 41 aa, Artificial Sequence; identical to SEQ ID NO: 5883
  GFR-binding peptide
  MOD_RES (2), (4), (35), (36): Xaa is C or S

SEQ ID NO: 38052 - protein, 39 aa, Artificial Sequence; identical to SEQ ID NO: 11341
  GFR-binding peptide
  MOD_RES (1), (3), (37), (38): Xaa is C or S
  MOD_RES (15), (16), (17), (18), (19): Xaa is A or G
  MOD_RES (20), (21), (22), (23): Xaa is A or G or is absent

SEQ ID NO: 38053 - protein, 41 aa, Artificial Sequence; identical to SEQ ID NO: 13310
  GFR-binding peptide
  MOD_RES (1), (3), (35): Xaa is C or S

SEQ ID NO: 38054 - protein, 37 aa, Artificial Sequence; identical to SEQ ID NO: 13311
  GFR-binding peptide
  MOD_RES (1), (3), (37): Xaa is C or S
  MOD_RES (15), (16), (17), (18), (19): Xaa is A or G
  MOD_RES (20), (21), (22), (23): Xaa is A or G or is absent

SEQ ID NO: 38055 - protein, 38 aa, Artificial Sequence; identical to SEQ ID NO: 3927
  GFR-binding peptide
  MOD_RES (33), (34): Xaa is C or S
  MOD_RES (11), (12), (13), (14), (15): Xaa is A or G
  MOD_RES (16), (17), (18), (19): Xaa is A or G or is absent

SEQ ID NO: 38056 - protein, 38 aa, Artificial Sequence; identical to SEQ ID NO: 13312
  GFR-binding peptide
  MOD_RES (1), (35), (36): Xaa is C or S
  MOD_RES (13), (14), (15), (16), (17): Xaa is A or G
  MOD_RES (18), (19), (20), (21): Xaa is A or G or is absent

SEQ ID NO: 38057 - protein, 35 aa, Artificial Sequence; identical to SEQ ID NO: 5885
  GFR-binding peptide
  MOD_RES (2), (34), (35): Xaa is C or S

SEQ ID NO: 38058 - protein, 37 aa, Artificial Sequence; identical to SEQ ID NO: 11343
  GFR-binding peptide
  MOD_RES (2), (36), (37): Xaa is C or S
  MOD_RES (14), (15), (16), (17), (18): Xaa is A or G
  MOD_RES (19), (20), (21), (22): Xaa is A or G or is absent

SEQ ID NO: 38059 - protein, 34 aa, Artificial Sequence; identical to SEQ ID NO: 11344
  GFR-binding peptide
  MOD_RES (1), (32), (33): Xaa is C or S

SEQ ID NO: 38060 - protein, 35 aa, Artificial Sequence; identical to SEQ ID NO: 3930
  GFR-binding peptide
  MOD_RES (1), (33), (34): Xaa is C or S

SEQ ID NO: 38061 - protein, 38 aa, Artificial Sequence; identical to SEQ ID NO: 13314
  GFR-binding peptide
  MOD_RES (1), (3), (35), (36): Xaa is C or S

SEQ ID NO: 38062 - protein, 41 aa, Artificial Sequence; identical to SEQ ID NO: 11346
  GFR-binding peptide
  MOD_RES (2), (36), (37): Xaa is C or S
  MOD_RES (14), (15), (16), (17), (18): Xaa is A or G
  MOD_RES (19), (20), (21), (22): Xaa is A or G or is absent

SEQ ID NO: 38063 - protein, 35 aa, Artificial Sequence; identical to SEQ ID NO: 3931
  GFR-binding peptide
  MOD_RES (33), (34): Xaa is C or S
  MOD_RES (11), (12), (13), (14), (15): Xaa is A or G
  MOD_RES (16), (17), (18), (19): Xaa is A or G or is absent

SEQ ID NO: 38064 - protein, 34 aa, Artificial Sequence; identical to SEQ ID NO: 13315
  GFR-binding peptide
  MOD_RES (2), (2): Xaa is C or S
  MOD_RES (13), (14), (15), (16), (17): Xaa is A or G
  MOD_RES (18), (19), (20), (21): Xaa is A or G or is absent

SEQ ID NO: 38065 - protein, 32 aa, Artificial Sequence; identical to SEQ ID NO: 11348
  GFR-binding peptide
  MOD_RES (32), (32): Xaa is C or S

SEQ ID NO: 38066 - protein, 35 aa, Artificial Sequence; identical to SEQ ID NO: 3933
  GFR-binding peptide
  MOD_RES (1), (3), (34), (35): Xaa is C or S

SEQ ID NO: 38067 - protein, 35 aa, Artificial Sequence; identical to SEQ ID NO: 11350
  GFR-binding peptide
  MOD_RES (32), (33): Xaa is C or S

SEQ ID NO: 38068 - protein, 41 aa, Artificial Sequence; identical to SEQ ID NO: 13317
  GFR-binding peptide
  MOD_RES (1), (3), (37), (38): Xaa is C or S
  MOD_RES (15), (16), (17), (18), (19): Xaa is A or G
  MOD_RES (20), (21), (22), (23): Xaa is A or G or is absent

SEQ ID NO: 38069 - protein, 39 aa, Artificial Sequence; identical to SEQ ID NO: 11351
  GFR-binding peptide
  MOD_RES (2), (4), (36): Xaa is C or S

SEQ ID NO: 38070 - protein, 35 aa, Artificial Sequence; identical to SEQ ID NO: 11352
  GFR-binding peptide
  MOD_RES (33), (34): Xaa is C or S
  MOD_RES (11), (12), (13), (14), (15): Xaa is A or G
  MOD_RES (16), (17), (18), (19): Xaa is A or G or is absent

SEQ ID NO: 38071 - protein, 37 aa, Artificial Sequence; identical to SEQ ID NO: 11353
  GFR-binding peptide
  MOD_RES (1), (32), (33): Xaa is C or S

SEQ ID NO: 38072 - protein, 32 aa, Artificial Sequence; identical to SEQ ID NO: 13318
  GFR-binding peptide
  MOD_RES (32), (32): Xaa is C or S

SEQ ID NO: 38073 - protein, 40 aa, Artificial Sequence; identical to SEQ ID NO: 13320
  GFR-binding peptide
  MOD_RES (1), (3), (35), (36): Xaa is C or S

SEQ ID NO: 38074 - protein, 34 aa, Artificial Sequence; identical to SEQ ID NO: 11354
  GFR-binding peptide
  MOD_RES (2), (4): Xaa is C or S

SEQ ID NO: 38075 - protein, 38 aa, Artificial Sequence; identical to SEQ ID NO: 13322
  GFR-binding peptide
  MOD_RES (34), (35): Xaa is C or S
  MOD_RES (12), (13), (14), (15), (16): Xaa is A or G
  MOD_RES (17), (18), (19), (20): Xaa is A or G or is absent

SEQ ID NO: 38076 - protein, 35 aa, Artificial Sequence; identical to SEQ ID NO: 13323
  GFR-binding peptide
  MOD_RES (2), (4): Xaa is C or S

SEQ ID NO: 38077 - protein, 35 aa, Artificial Sequence; identical to SEQ ID NO: 3943
  GFR-binding peptide
  MOD_RES (1), (3), (34), (35): Xaa is C or S

SEQ ID NO: 38078 - protein, 35 aa, Artificial Sequence; identical to SEQ ID NO: 11358
  GFR-binding peptide
  MOD_RES (32), (33): Xaa is C or S

SEQ ID NO: 38079 - protein, 42 aa, Artificial Sequence; identical to SEQ ID NO: 5901
  GFR-binding peptide
  MOD_RES (2), (4), (38), (39): Xaa is C or S
  MOD_RES (16), (17), (18), (19), (20): Xaa is A or G
  MOD_RES (21), (22), (23), (24): Xaa is A or G or is absent

SEQ ID NO: 38080 - protein, 33 aa, Artificial Sequence; identical to SEQ ID NO: 13326
  GFR-binding peptide
  MOD_RES (1), (33): Xaa is C or S

SEQ ID NO: 38081 - protein, 34 aa, Artificial Sequence; identical to SEQ ID NO: 13328
  GFR-binding peptide
  MOD_RES (32), (33): Xaa is C or S

SEQ ID NO: 38082 - protein, 37 aa, Artificial Sequence
  GFR-binding peptide
  MOD_RES (1), (3), (36), (37): Xaa is C or S
  MOD_RES (14), (15), (16), (17), (18): Xaa is A or G
  MOD_RES (19), (20), (21), (22): Xaa is A or G or is absent
XKXSKVIMNSLQEXXXXXXXXXYYLITLPELDQSVXX

SEQ ID NO: 38083 - protein, 36 aa, Artificial Sequence; identical to SEQ ID NO: 13329
  GFR-binding peptide
  MOD_RES (1), (3): Xaa is C or S
  MOD_RES (15), (16), (17), (18), (19): Xaa is A or G
  MOD_RES (20), (21), (22), (23): Xaa is A or G or is absent

SEQ ID NO: 38084 - protein, 39 aa, Artificial Sequence; identical to SEQ ID NO: 5904
  GFR-binding peptide
  MOD_RES (2), (4), (37), (38): Xaa is C or S
  MOD_RES (15), (16), (17), (18), (19): Xaa is A or G
  MOD_RES (20), (21), (22), (23): Xaa is A or G or is absent

SEQ ID NO: 38085 - protein, 35 aa, Artificial Sequence; identical to SEQ ID NO: 11359
  GFR-binding peptide
  MOD_RES (1), (34), (35): Xaa is C or S
  MOD_RES (12), (13), (14), (15), (16): Xaa is A or G
  MOD_RES (17), (18), (19), (20): Xaa is A or G or is absent

SEQ ID NO: 38086 - protein, 33 aa, Artificial Sequence; identical to SEQ ID NO: 13332
  GFR-binding peptide
  MOD_RES (12), (13), (14), (15), (16): Xaa is A or G
  MOD_RES (17), (18), (19), (20): Xaa is A or G or is absent

SEQ ID NO: 38087 - protein, 39 aa, Artificial Sequence; identical to SEQ ID NO: 5907
  GFR-binding peptide
  MOD_RES (2), (4), (36), (37): Xaa is C or S

SEQ ID NO: 38088 - protein, 39 aa, Artificial Sequence; identical to SEQ ID NO: 3949
  GFR-binding peptide
  MOD_RES (2), (36), (37): Xaa is C or S
  MOD_RES (14), (15), (16), (17), (18): Xaa is A or G
  MOD_RES (19), (20), (21), (22): Xaa is A or G or is absent

SEQ ID NO: 38089 - protein, 34 aa, Artificial Sequence; identical to SEQ ID NO: 3950
  GFR-binding peptide
  MOD_RES (1), (3): Xaa is C or S

SEQ ID NO: 38090 - protein, 38 aa, Artificial Sequence; identical to SEQ ID NO: 11364
  GFR-binding peptide
  MOD_RES (1), (33), (34): Xaa is C or S

SEQ ID NO: 38091 - protein, 35 aa, Artificial Sequence; identical to SEQ ID NO: 13335
  GFR-binding peptide
  MOD_RES (32), (33): Xaa is C or S

SEQ ID NO: 38092 - protein, 39 aa, Artificial Sequence; identical to SEQ ID NO: 13336
  GFR-binding peptide
  MOD_RES (33), (34): Xaa is C or S
  MOD_RES (11), (12), (13), (14), (15): Xaa is A or G
  MOD_RES (16), (17), (18), (19): Xaa is A or G or is absent

SEQ ID NO: 38093 - protein, 36 aa, Artificial Sequence; identical to SEQ ID NO: 11365
  GFR-binding peptide
  MOD_RES (1), (3), (34), (35): Xaa is C or S

SEQ ID NO: 38094 - protein, 40 aa, Artificial Sequence; identical to SEQ ID NO: 5912
  GFR-binding peptide
  MOD_RES (2), (4), (38), (39): Xaa is C or S
  MOD_RES (16), (17), (18), (19), (20): Xaa is A or G
  MOD_RES (21), (22), (23), (24): Xaa is A or G or is absent

SEQ ID NO: 38095 - protein, 40 aa, Artificial Sequence; identical to SEQ ID NO: 11366
  GFR-binding peptide
  MOD_RES (2), (4), (36), (37): Xaa is C or S

SEQ ID NO: 38096 - protein, 33 aa, Artificial Sequence; identical to SEQ ID NO: 11368
  GFR-binding peptide
  MOD_RES (32), (33): Xaa is C or S

SEQ ID NO: 38097 - protein, 40 aa, Artificial Sequence; identical to SEQ ID NO: 11369
  GFR-binding peptide
  MOD_RES (2), (35), (36): Xaa is C or S
  MOD_RES (13), (14), (15), (16), (17): Xaa is A or G
  MOD_RES (18), (19), (20), (21): Xaa is A or G or is absent

SEQ ID NO: 38098 - protein, 38 aa, Artificial Sequence; identical to SEQ ID NO: 11370
  GFR-binding peptide
  MOD_RES (1), (33): Xaa is C or S

SEQ ID NO: 38099 - protein, 36 aa, Artificial Sequence; identical to SEQ ID NO: 11372
  GFR-binding peptide
  MOD_RES (2), (36): Xaa is C or S
  MOD_RES (14), (15), (16), (17), (18): Xaa is A or G
  MOD_RES (19), (20), (21), (22): Xaa is A or G or is absent

SEQ ID NO: 38100 - protein, 37 aa, Artificial Sequence; identical to SEQ ID NO: 11373
  GFR-binding peptide
  MOD_RES (1), (35), (36): Xaa is C or S
  MOD_RES (13), (14), (15), (16), (17): Xaa is A or G
  MOD_RES (18), (19), (20), (21): Xaa is A or G or is absent

SEQ ID NO: 38101 - protein, 36 aa, Artificial Sequence; identical to SEQ ID NO: 13338
  GFR-binding peptide
  MOD_RES (31), (32): Xaa is C or S

SEQ ID NO: 38102 - protein, 39 aa, Artificial Sequence; identical to SEQ ID NO: 3955
  GFR-binding peptide
  MOD_RES (2), (4), (36), (37): Xaa is C or S

SEQ ID NO: 38103 - protein, 38 aa, Artificial Sequence; identical to SEQ ID NO: 5916
  GFR-binding peptide
  MOD_RES (32), (33): Xaa is C or S

SEQ ID NO: 38104 - protein, 41 aa, Artificial Sequence; identical to SEQ ID NO: 11376
  GFR-binding peptide
  MOD_RES (1), (3), (37), (38): Xaa is C or S
  MOD_RES (15), (16), (17), (18), (19): Xaa is A or G
  MOD_RES (20), (21), (22), (23): Xaa is A or G or is absent

SEQ ID NO: 38105 - protein, 34 aa, Artificial Sequence; identical to SEQ ID NO: 13341
  GFR-binding peptide
  MOD_RES (1), (3): Xaa is C or S

SEQ ID NO: 38106 - protein, 37 aa, Artificial Sequence; identical to SEQ ID NO: 13342
  GFR-binding peptide
  MOD_RES (2), (4), (35), (36): Xaa is C or S

SEQ ID NO: 38107 - protein, 37 aa, Artificial Sequence; identical to SEQ ID NO: 11377
  GFR-binding peptide
  MOD_RES (2), (4): Xaa is C or S
  MOD_RES (16), (17), (18), (19), (20): Xaa is A or G
  MOD_RES (21), (22), (23), (24): Xaa is A or G or is absent

SEQ ID NO: 38108 - protein, 35 aa, Artificial Sequence; identical to SEQ ID NO: 11378
  GFR-binding peptide
  MOD_RES (1), (35): Xaa is C or S
  MOD_RES (13), (14), (15), (16), (17): Xaa is A or G
  MOD_RES (18), (19), (20), (21): Xaa is A or G or is absent

SEQ ID NO: 38109 - protein, 38 aa, Artificial Sequence; identical to SEQ ID NO: 13343
  GFR-binding peptide
  MOD_RES (33), (34): Xaa is C or S
  MOD_RES (11), (12), (13), (14), (15): Xaa is A or G
  MOD_RES (16), (17), (18), (19): Xaa is A or G or is absent

SEQ ID NO: 38110 - protein, 33 aa, Artificial Sequence; identical to SEQ ID NO: 13344
  GFR-binding peptide
  MOD_RES (32), (33): Xaa is C or S

SEQ ID NO: 38111 - protein, 36 aa, Artificial Sequence; identical to SEQ ID NO: 11379
  GFR-binding peptide
  MOD_RES (1), (3): Xaa is C or S
  MOD_RES (15), (16), (17), (18), (19): Xaa is A or G
  MOD_RES (20), (21), (22), (23): Xaa is A or G or is absent

SEQ ID NO: 38112 - protein, 40 aa, Artificial Sequence; identical to SEQ ID NO: 5918
  GFR-binding peptide
  MOD_RES (2), (4), (35), (36): Xaa is C or S

SEQ ID NO: 38113 - protein, 39 aa, Artificial Sequence; identical to SEQ ID NO: 11381
  GFR-binding peptide
  MOD_RES (2), (34): Xaa is C or S

SEQ ID NO: 38114 - protein, 33 aa, Artificial Sequence; identical to SEQ ID NO: 11382
  GFR-binding peptide
  MOD_RES (31), (31): Xaa is C or S

SEQ ID NO: 38115 - protein, 38 aa, Artificial Sequence; identical to SEQ ID NO: 13348
  GFR-binding peptide
  MOD_RES (32), (33): Xaa is C or S

SEQ ID NO: 38116 - protein, 36 aa, Artificial Sequence; identical to SEQ ID NO: 11384
  GFR-binding peptide
  MOD_RES (1), (33), (34): Xaa is C or S

SEQ ID NO: 38117 - protein, 37 aa, Artificial Sequence; identical to SEQ ID NO: 13349
  GFR-binding peptide
  MOD_RES (31), (32): Xaa is C or S

SEQ ID NO: 38118 - protein, 31 aa, Artificial Sequence; identical to SEQ ID NO: 11386
  GFR-binding peptide
  MOD_RES (31), (31): Xaa is C or S

SEQ ID NO: 38119 - protein, 44 aa, Artificial Sequence; identical to SEQ ID NO: 11387
  GFR-binding peptide
  MOD_RES (2), (4), (38), (39): Xaa is C or S
  MOD_RES (16), (17), (18), (19), (20): Xaa is A or G
  MOD_RES (21), (22), (23), (24): Xaa is A or G or is absent

SEQ ID NO: 38120 - protein, 41 aa, Artificial Sequence; identical to SEQ ID NO: 11388
  GFR-binding peptide
  MOD_RES (1), (3), (36), (37): Xaa is C or S
  MOD_RES (14), (15), (16), (17), (18): Xaa is A or G
  MOD_RES (19), (20), (21), (22): Xaa is A or G or is absent

SEQ ID NO: 38121 - protein, 37 aa, Artificial Sequence; identical to SEQ ID NO: 11390
  GFR-binding peptide
  MOD_RES (1), (35), (36): Xaa is C or S
  MOD_RES (13), (14), (15), (16), (17): Xaa is A or G
  MOD_RES (18), (19), (20), (21): Xaa is A or G or is absent

SEQ ID NO: 38122 - protein, 41 aa, Artificial Sequence; identical to SEQ ID NO: 11391
  GFR-binding peptide
  MOD_RES (1), (35), (36): Xaa is C or S
  MOD_RES (13), (14), (15), (16), (17): Xaa is A or G
  MOD_RES (18), (19), (20), (21): Xaa is A or G or is absent

SEQ ID NO: 38123 - protein, 41 aa, Artificial Sequence; identical to SEQ ID NO: 13350
  GFR-binding peptide
  MOD_RES (2), (4), (38), (39): Xaa is C or S
  MOD_RES (16), (17), (18), (19), (20): Xaa is A or G
  MOD_RES (21), (22), (23), (24): Xaa is A or G or is absent

SEQ ID NO: 38124 - protein, 39 aa, Artificial Sequence; identical to SEQ ID NO: 5926
  GFR-binding peptide
  MOD_RES (2), (33), (34): Xaa is C or S

SEQ ID NO: 38125 - protein, 41 aa, Artificial Sequence; identical to SEQ ID NO: 11392
  GFR-binding peptide
  MOD_RES (2), (4), (38), (39): Xaa is C or S
  MOD_RES (16), (17), (18), (19), (20): Xaa is A or G
  MOD_RES (21), (22), (23), (24): Xaa is A or G or is absent

SEQ ID NO: 38126 - protein, 36 aa, Artificial Sequence; identical to SEQ ID NO: 13352
  GFR-binding peptide
  MOD_RES (33), (33): Xaa is C or S
  MOD_RES (11), (12), (13), (14), (15): Xaa is A or G
  MOD_RES (16), (17), (18), (19): Xaa is A or G or is absent

SEQ ID NO: 38127 - protein, 39 aa, Artificial Sequence; identical to SEQ ID NO: 11394
  GFR-binding peptide
  MOD_RES (1), (3), (34), (35): Xaa is C or S

SEQ ID NO: 38128 - protein, 37 aa, Artificial Sequence; identical to SEQ ID NO: 13353
  GFR-binding peptide
  MOD_RES (1), (33): Xaa is C or S

SEQ ID NO: 38129 - protein, 34 aa, Artificial Sequence; identical to SEQ ID NO: 11396
  GFR-binding peptide
  MOD_RES (34), (34): Xaa is C or S
  MOD_RES (12), (13), (14), (15), (16): Xaa is A or G
  MOD_RES (17), (18), (19), (20): Xaa is A or G or is absent

SEQ ID NO: 38130 - protein, 35 aa, Artificial Sequence; identical to SEQ ID NO: 13355
  GFR-binding peptide
  MOD_RES (31), (31): Xaa is C or S

SEQ ID NO: 38131 - protein, 36 aa, Artificial Sequence; identical to SEQ ID NO: 13356
  GFR-binding peptide
  MOD_RES (1), (33), (34): Xaa is C or S

SEQ ID NO: 38132 - protein, 41 aa, Artificial Sequence; identical to SEQ ID NO: 5932
  GFR-binding peptide
  MOD_RES (2), (4), (36), (37): Xaa is C or S

SEQ ID NO: 38133 - protein, 38 aa, Artificial Sequence; identical to SEQ ID NO: 13358
  GFR-binding peptide
  MOD_RES (2), (4), (38): Xaa is C or S
  MOD_RES (16), (17), (18), (19), (20): Xaa is A or G
  MOD_RES (21), (22), (23), (24): Xaa is A or G or is absent

SEQ ID NO: 38134 - protein, 34 aa, Artificial Sequence; identical to SEQ ID NO: 3976
  GFR-binding peptide
  MOD_RES (31), (32): Xaa is C or S

SEQ ID NO: 38135 - protein, 42 aa, Artificial Sequence; identical to SEQ ID NO: 13359
  GFR-binding peptide
  MOD_RES (1), (3), (37): Xaa is C or S
  MOD_RES (15), (16), (17), (18), (19): Xaa is A or G
  MOD_RES (20), (21), (22), (23): Xaa is A or G or is absent

SEQ ID NO: 38136 - protein, 38 aa, Artificial Sequence
  GFR-binding peptide
  MOD_RES (2), (4), (37), (38): Xaa is C or S
  MOD_RES (15), (16), (17), (18), (19): Xaa is A or G
  MOD_RES (20), (21), (22), (23): Xaa is A or G or is absent
SXKXSKVIMNSLQEXXXXXXXXXYYLITLPELDQSVXX

SEQ ID NO: 38137 - protein, 40 aa, Artificial Sequence; identical to SEQ ID NO: 13360
  GFR-binding peptide
  MOD_RES (2), (36), (37): Xaa is C or S
  MOD_RES (14), (15), (16), (17), (18): Xaa is A or G
  MOD_RES (19), (20), (21), (22): Xaa is A or G or is absent

SEQ ID NO: 38138 - protein, 36 aa, Artificial Sequence; identical to SEQ ID NO: 3978
  GFR-binding peptide
  MOD_RES (1), (3), (34), (35): Xaa is C or S

SEQ ID NO: 38139 - protein, 41 aa, Artificial Sequence; identical to SEQ ID NO: 3981
  GFR-binding peptide
  MOD_RES (1), (3), (37), (38): Xaa is C or S
  MOD_RES (15), (16), (17), (18), (19): Xaa is A or G
  MOD_RES (20), (21), (22), (23): Xaa is A or G or is absent

SEQ ID NO: 38140 - protein, 39 aa, Artificial Sequence; identical to SEQ ID NO: 13361
  GFR-binding peptide
  MOD_RES (2), (34), (35): Xaa is C or S

SEQ ID NO: 38141 - protein, 42 aa, Artificial Sequence; identical to SEQ ID NO: 11400
  GFR-binding peptide
  MOD_RES (1), (3), (36), (37): Xaa is C or S
  MOD_RES (14), (15), (16), (17), (18): Xaa is A or G
  MOD_RES (19), (20), (21), (22): Xaa is A or G or is absent

SEQ ID NO: 38142 - protein, 39 aa, Artificial Sequence; identical to SEQ ID NO: 3982
  GFR-binding peptide
  MOD_RES (2), (35), (36): Xaa is C or S
  MOD_RES (13), (14), (15), (16), (17): Xaa is A or G
  MOD_RES (18), (19), (20), (21): Xaa is A or G or is absent

SEQ ID NO: 38143 - protein, 40 aa, Artificial Sequence; identical to SEQ ID NO: 11402
  GFR-binding peptide
  MOD_RES (1), (34), (35): Xaa is C or S
  MOD_RES (12), (13), (14), (15), (16): Xaa is A or G
  MOD_RES (17), (18), (19), (20): Xaa is A or G or is absent

SEQ ID NO: 38144 - protein, 35 aa, Artificial Sequence; identical to SEQ ID NO: 13362
  GFR-binding peptide
  MOD_RES (2), (34), (35): Xaa is C or S

SEQ ID NO: 38145 - protein, 34 aa, Artificial Sequence; identical to SEQ ID NO: 13363
  GFR-binding peptide
  MOD_RES (1), (1): Xaa is C or S
  MOD_RES (13), (14), (15), (16), (17): Xaa is A or G
  MOD_RES (18), (19), (20), (21): Xaa is A or G or is absent

SEQ ID NO: 38146 - protein, 34 aa, Artificial Sequence; identical to SEQ ID NO: 5940
  GFR-binding peptide
  MOD_RES (1), (3), (34): Xaa is C or S

SEQ ID NO: 38147 - protein, 36 aa, Artificial Sequence
  GFR-binding peptide
  MOD_RES (31), (32): Xaa is C or S
SKVIMNSLQEIKPTKGIYYLITLPELDQSVXXPSAS

SEQ ID NO: 38148 - protein, 36 aa, Artificial Sequence; identical to SEQ ID NO: 13366
  GFR-binding peptide
  MOD_RES (1), (3): Xaa is C or S
  MOD_RES (15), (16), (17), (18), (19): Xaa is A or G
  MOD_RES (20), (21), (22), (23): Xaa is A or G or is absent

SEQ ID NO: 38149 - protein, 38 aa, Artificial Sequence; identical to SEQ ID NO: 11404
  GFR-binding peptide
  MOD_RES (2), (4), (38): Xaa is C or S
  MOD_RES (16), (17), (18), (19), (20): Xaa is A or G
  MOD_RES (21), (22), (23), (24): Xaa is A or G or is absent

SEQ ID NO: 38150 - protein, 42 aa, Artificial Sequence; identical to SEQ ID NO: 11405
  GFR-binding peptide
  MOD_RES (2), (4), (38), (39): Xaa is C or S
  MOD_RES (16), (17), (18), (19), (20): Xaa is A or G
  MOD_RES (21), (22), (23), (24): Xaa is A or G or is absent

SEQ ID NO: 38151 - protein, 37 aa, Artificial Sequence; identical to SEQ ID NO: 13368
  GFR-binding peptide
  MOD_RES (31), (32): Xaa is C or S

SEQ ID NO: 38152 - protein, 40 aa, Artificial Sequence; identical to SEQ ID NO: 5943
  GFR-binding peptide
  MOD_RES (2), (35), (36): Xaa is C or S
  MOD_RES (13), (14), (15), (16), (17): Xaa is A or G
  MOD_RES (18), (19), (20), (21): Xaa is A or G or is absent

SEQ ID NO: 38153 - protein, 33 aa, Artificial Sequence; identical to SEQ ID NO: 13370
  GFR-binding peptide
  MOD_RES (1), (33): Xaa is C or S

SEQ ID NO: 38154 - protein, 37 aa, Artificial Sequence; identical to SEQ ID NO: 11406
  GFR-binding peptide
  MOD_RES (2), (36): Xaa is C or S
  MOD_RES (14), (15), (16), (17), (18): Xaa is A or G
  MOD_RES (19), (20), (21), (22): Xaa is A or G or is absent

SEQ ID NO: 38155 - protein, 33 aa, Artificial Sequence; identical to SEQ ID NO: 13371
  GFR-binding peptide
  MOD_RES (1), (32), (33): Xaa is C or S

SEQ ID NO: 38156 - protein, 36 aa, Artificial Sequence; identical to SEQ ID NO: 3985
  GFR-binding peptide
  MOD_RES (1), (34), (35): Xaa is C or S
  MOD_RES (12), (13), (14), (15), (16): Xaa is A or G
  MOD_RES (17), (18), (19), (20): Xaa is A or G or is absent

SEQ ID NO: 38157 - protein, 43 aa, Artificial Sequence; identical to SEQ ID NO: 13372
  GFR-binding peptide
  MOD_RES (2), (4), (38), (39): Xaa is C or S
  MOD_RES (16), (17), (18), (19), (20): Xaa is A or G
  MOD_RES (21), (22), (23), (24): Xaa is A or G or is absent

SEQ ID NO: 38158 - protein, 41 aa, Artificial Sequence; identical to SEQ ID NO: 13373
  GFR-binding peptide
  MOD_RES (1), (3), (35), (36): Xaa is C or S

SEQ ID NO: 38159 - protein, 35 aa, Artificial Sequence; identical to SEQ ID NO: 11409
  GFR-binding peptide
  MOD_RES (2), (2): Xaa is C or S
  MOD_RES (14), (15), (16), (17), (18): Xaa is A or G
  MOD_RES (19), (20), (21), (22): Xaa is A or G or is absent

SEQ ID NO: 38160 - protein, 41 aa, Artificial Sequence; identical to SEQ ID NO: 11410
  GFR-binding peptide
  MOD_RES (2), (36), (37): Xaa is C or S
  MOD_RES (14), (15), (16), (17), (18): Xaa is A or G
  MOD_RES (19), (20), (21), (22): Xaa is A or G or is absent

SEQ ID NO: 38161 - protein, 40 aa, Artificial Sequence; identical to SEQ ID NO: 13374
  GFR-binding peptide
  MOD_RES (2), (4), (37), (38): Xaa is C or S
  MOD_RES (15), (16), (17), (18), (19): Xaa is A or G
  MOD_RES (20), (21), (22), (23): Xaa is A or G or is absent

SEQ ID NO: 38162 - protein, 34 aa, Artificial Sequence; identical to SEQ ID NO: 13375
  GFR-binding peptide
  MOD_RES (1), (3), (34): Xaa is C or S

SEQ ID NO: 38163 - protein, 39 aa, Artificial Sequence; identical to SEQ ID NO: 11411
  GFR-binding peptide
  MOD_RES (1), (3), (35), (36): Xaa is C or S

SEQ ID NO: 38164 - protein, 41 aa, Artificial Sequence; identical to SEQ ID NO: 11412
  GFR-binding peptide
  MOD_RES (1), (3), (37), (38): Xaa is C or S
  MOD_RES (15), (16), (17), (18), (19): Xaa is A or G
  MOD_RES (20), (21), (22), (23): Xaa is A or G or is absent

SEQ ID NO: 38165 - protein, 40 aa, Artificial Sequence; identical to SEQ ID NO: 11413
  GFR-binding peptide
  MOD_RES (2), (35), (36): Xaa is C or S
  MOD_RES (13), (14), (15), (16), (17): Xaa is A or G
  MOD_RES (18), (19), (20), (21): Xaa is A or G or is absent

SEQ ID NO: 38166 - protein, 38 aa, Artificial Sequence; identical to SEQ ID NO: 11414
  GFR-binding peptide
  MOD_RES (1), (35), (36): Xaa is C or S
  MOD_RES (13), (14), (15), (16), (17): Xaa is A or G
  MOD_RES (18), (19), (20), (21): Xaa is A or G or is absent

SEQ ID NO: 38167 - protein, 36 aa, Artificial Sequence; identical to SEQ ID NO: 13376
  GFR-binding peptide
  MOD_RES (1), (3), (35), (36): Xaa is C or S

SEQ ID NO: 38168 - protein, 38 aa, Artificial Sequence; identical to SEQ ID NO: 11416
  GFR-binding peptide
  MOD_RES (2), (36), (37): Xaa is C or S
  MOD_RES (14), (15), (16), (17), (18): Xaa is A or G
  MOD_RES (19), (20), (21), (22): Xaa is A or G or is absent

SEQ ID NO: 38169 - protein, 34 aa, Artificial Sequence; identical to SEQ ID NO: 11417
  GFR-binding peptide
  MOD_RES (32), (33): Xaa is C or S

SEQ ID NO: 38170 - protein, 35 aa, Artificial Sequence; identical to SEQ ID NO: 13379
  GFR-binding peptide
  MOD_RES (1), (34), (35): Xaa is C or S
  MOD_RES (12), (13), (14), (15), (16): Xaa is A or G
  MOD_RES (17), (18), (19), (20): Xaa is A or G or is absent

SEQ ID NO: 38171 - protein, 39 aa, Artificial Sequence; identical to SEQ ID NO: 11419
  GFR-binding peptide
  MOD_RES (34), (34): Xaa is C or S
  MOD_RES (12), (13), (14), (15), (16): Xaa is A or G
  MOD_RES (17), (18), (19), (20): Xaa is A or G or is absent

SEQ ID NO: 38172 - protein, 34 aa, Artificial Sequence; identical to SEQ ID NO: 11420
  GFR-binding peptide
  MOD_RES (31), (32): Xaa is C or S

SEQ ID NO: 38173 - protein, 35 aa, Artificial Sequence; identical to SEQ ID NO: 13380
  GFR-binding peptide
  MOD_RES (1), (34), (35): Xaa is C or S
  MOD_RES (12), (13), (14), (15), (16): Xaa is A or G
  MOD_RES (17), (18), (19), (20): Xaa is A or G or is absent

SEQ ID NO: 38174 - protein, 33 aa, Artificial Sequence; identical to SEQ ID NO: 5957
  GFR-binding peptide
  MOD_RES (33), (33): Xaa is C or S
  MOD_RES (11), (12), (13), (14), (15): Xaa is A or G
  MOD_RES (16), (17), (18), (19): Xaa is A or G or is absent

SEQ ID NO: 38175 - protein, 38 aa, Artificial Sequence; identical to SEQ ID NO: 13382
  GFR-binding peptide
  MOD_RES (1), (33), (34): Xaa is C or S

SEQ ID NO: 38176 - protein, 38 aa, Artificial Sequence; identical to SEQ ID NO: 13383
  GFR-binding peptide
  MOD_RES (1), (3), (35), (36): Xaa is C or S

SEQ ID NO: 38177 - protein, 38 aa, Artificial Sequence; identical to SEQ ID NO: 13384
  GFR-binding peptide
  MOD_RES (1), (33): Xaa is C or S

SEQ ID NO: 38178 - protein, 34 aa, Artificial Sequence; identical to SEQ ID NO: 13385
  GFR-binding peptide
  MOD_RES (1), (1): Xaa is C or S
  MOD_RES (13), (14), (15), (16), (17): Xaa is A or G
  MOD_RES (18), (19), (20), (21): Xaa is A or G or is absent

SEQ ID NO: 38179 - protein, 36 aa, Artificial Sequence; identical to SEQ ID NO: 13386
  GFR-binding peptide
  MOD_RES (33), (34): Xaa is C or S
  MOD_RES (11), (12), (13), (14), (15): Xaa is A or G
  MOD_RES (16), (17), (18), (19): Xaa is A or G or is absent

SEQ ID NO: 38180 - protein, 36 aa, Artificial Sequence; identical to SEQ ID NO: 4000
  GFR-binding peptide
  MOD_RES (31), (32): Xaa is C or S

SEQ ID NO: 38181 - protein, 40 aa, Artificial Sequence; identical to SEQ ID NO: 13387
  GFR-binding peptide
  MOD_RES (1), (3), (37), (38): Xaa is C or S
  MOD_RES (15), (16), (17), (18), (19): Xaa is A or G
  MOD_RES (20), (21), (22), (23): Xaa is A or G or is absent

SEQ ID NO: 38182 - protein, 31 aa, Artificial Sequence; identical to SEQ ID NO: 11422
  GFR-binding peptide
  MOD_RES (31), (31): Xaa is C or S

SEQ ID NO: 38183 - protein, 33 aa, Artificial Sequence; identical to SEQ ID NO: 11423
  GFR-binding peptide
  MOD_RES (32), (33): Xaa is C or S

SEQ ID NO: 38184 - protein, 34 aa, Artificial Sequence; identical to SEQ ID NO: 11426
  GFR-binding peptide
  MOD_RES (1), (3): Xaa is C or S

SEQ ID NO: 38185 - protein, 38 aa, Artificial Sequence; identical to SEQ ID NO: 5964
  GFR-binding peptide
  MOD_RES (2), (34), (35): Xaa is C or S

SEQ ID NO: 38186 - protein, 37 aa, Artificial Sequence; identical to SEQ ID NO: 13390
  GFR-binding peptide
  MOD_RES (32), (33): Xaa is C or S

SEQ ID NO: 38187 - protein, 41 aa, Artificial Sequence; identical to SEQ ID NO: 5967
  GFR-binding peptide
  MOD_RES (1), (35), (36): Xaa is C or S
  MOD_RES (13), (14), (15), (16), (17): Xaa is A or G
  MOD_RES (18), (19), (20), (21): Xaa is A or G or is absent

SEQ ID NO: 38188 - protein, 33 aa, Artificial Sequence; identical to SEQ ID NO: 11427
  GFR-binding peptide
  MOD_RES (2), (33): Xaa is C or S

SEQ ID NO: 38189 - protein, 38 aa, Artificial Sequence; identical to SEQ ID NO: 11428
  GFR-binding peptide
  MOD_RES (1), (3), (35), (36): Xaa is C or S

SEQ ID NO: 38190 - protein, 38 aa, Artificial Sequence; identical to SEQ ID NO: 11429
  GFR-binding peptide
  MOD_RES (2), (36), (37): Xaa is C or S
  MOD_RES (14), (15), (16), (17), (18): Xaa is A or G
  MOD_RES (19), (20), (21), (22): Xaa is A or G or is absent

SEQ ID NO: 38191 - protein, 38 aa, Artificial Sequence; identical to SEQ ID NO: 11430
  GFR-binding peptide
  MOD_RES (2), (4), (38): Xaa is C or S
  MOD_RES (16), (17), (18), (19), (20): Xaa is A or G
  MOD_RES (21), (22), (23), (24): Xaa is A or G or is absent

SEQ ID NO: 38192 - protein, 37 aa, Artificial Sequence; identical to SEQ ID NO: 5968
  GFR-binding peptide
  MOD_RES (33), (34): Xaa is C or S
  MOD_RES (11), (12), (13), (14), (15): Xaa is A or G
  MOD_RES (16), (17), (18), (19): Xaa is A or G or is absent

SEQ ID NO: 38193 - protein, 34 aa, Artificial Sequence; identical to SEQ ID NO: 11431
  GFR-binding peptide
  MOD_RES (32), (33): Xaa is C or S

SEQ ID NO: 38194 - protein, 40 aa, Artificial Sequence; identical to SEQ ID NO: 11432
  GFR-binding peptide
  MOD_RES (2), (4), (36), (37): Xaa is C or S

SEQ ID NO: 38195 - protein, 32 aa, Artificial Sequence; identical to SEQ ID NO: 13393
  GFR-binding peptide
  MOD_RES (11), (12), (13), (14), (15): Xaa is A or G
  MOD_RES (16), (17), (18), (19): Xaa is A or G or is absent

SEQ ID NO: 38196 - protein, 40 aa, Artificial Sequence; identical to SEQ ID NO: 11433
  GFR-binding peptide
  MOD_RES (2), (36), (37): Xaa is C or S
  MOD_RES (14), (15), (16), (17), (18): Xaa is A or G
  MOD_RES (19), (20), (21), (22): Xaa is A or G or is absent

SEQ ID NO: 38197 - protein, 36 aa, Artificial Sequence; identical to SEQ ID NO: 4007
  GFR-binding peptide
  MOD_RES (1), (32), (33): Xaa is C or S

SEQ ID NO: 38198 - protein, 43 aa, Artificial Sequence; identical to SEQ ID NO: 11435
  GFR-binding peptide
  MOD_RES (2), (4), (38), (39): Xaa is C or S
  MOD_RES (16), (17), (18), (19), (20): Xaa is A or G
  MOD_RES (21), (22), (23), (24): Xaa is A or G or is absent

SEQ ID NO: 38199 - protein, 42 aa, Artificial Sequence
  GFR-binding peptide
  MOD_RES (2), (4), (37), (38): Xaa is C or S
  MOD_RES (15), (16), (17), (18), (19): Xaa is A or G
  MOD_RES (20), (21), (22), (23): Xaa is A or G or is absent
SXKXSKVIMNSLQEXXXXXXXXXYYLITLPELDQSVXXPSAS

SEQ ID NO: 38200 - protein, 38 aa, Artificial Sequence; identical to SEQ ID NO: 11436
  GFR-binding peptide
  MOD_RES (2), (34), (35): Xaa is C or S

SEQ ID NO: 38201 - protein, 37 aa, Artificial Sequence; identical to SEQ ID NO: 11437
  GFR-binding peptide
  MOD_RES (1), (3), (34), (35): Xaa is C or S

SEQ ID NO: 38202 - protein, 37 aa, Artificial Sequence; identical to SEQ ID NO: 11438
  GFR-binding peptide
  MOD_RES (2), (4): Xaa is C or S
  MOD_RES (16), (17), (18), (19), (20): Xaa is A or G
  MOD_RES (21), (22), (23), (24): Xaa is A or G or is absent

SEQ ID NO: 38203 - protein, 43 aa, Artificial Sequence; identical to SEQ ID NO: 13396
  GFR-binding peptide
  MOD_RES (1), (3), (37), (38): Xaa is C or S
  MOD_RES (15), (16), (17), (18), (19): Xaa is A or G
  MOD_RES (20), (21), (22), (23): Xaa is A or G or is absent

SEQ ID NO: 38204 - protein, 36 aa, Artificial Sequence; identical to SEQ ID NO: 11439
  GFR-binding peptide
  MOD_RES (2), (4), (35), (36): Xaa is C or S

SEQ ID NO: 38205 - protein, 32 aa, Artificial Sequence; identical to SEQ ID NO: 5983
  GFR-binding peptide
  MOD_RES (11), (12), (13), (14), (15): Xaa is A or G
  MOD_RES (16), (17), (18), (19): Xaa is A or G or is absent

SEQ ID NO: 38206 - protein, 39 aa, Artificial Sequence; identical to SEQ ID NO: 13399
  GFR-binding peptide
  MOD_RES (1), (35), (36): Xaa is C or S
  MOD_RES (13), (14), (15), (16), (17): Xaa is A or G
  MOD_RES (18), (19), (20), (21): Xaa is A or G or is absent

SEQ ID NO: 38207 - protein, 38 aa, Artificial Sequence; identical to SEQ ID NO: 13400
  GFR-binding peptide
  MOD_RES (2), (4), (35), (36): Xaa is C or S

SEQ ID NO: 38208 - protein, 42 aa, Artificial Sequence; identical to SEQ ID NO: 5986
  GFR-binding peptide
  MOD_RES (1), (3), (36), (37): Xaa is C or S
  MOD_RES (14), (15), (16), (17), (18): Xaa is A or G
  MOD_RES (19), (20), (21), (22): Xaa is A or G or is absent

SEQ ID NO: 38209 - protein, 34 aa, Artificial Sequence; identical to SEQ ID NO: 11442
  GFR-binding peptide
  MOD_RES (2), (33), (34): Xaa is C or S

SEQ ID NO: 38210 - protein, 38 aa, Artificial Sequence; identical to SEQ ID NO: 13404
  GFR-binding peptide
  MOD_RES (1), (3), (36), (37): Xaa is C or S
  MOD_RES (14), (15), (16), (17), (18): Xaa is A or G
  MOD_RES (19), (20), (21), (22): Xaa is A or G or is absent

SEQ ID NO: 38211 - protein, 39 aa, Artificial Sequence; identical to SEQ ID NO: 11445
  GFR-binding peptide
  MOD_RES (2), (4), (36), (37): Xaa is C or S

SEQ ID NO: 38212 - protein, 35 aa, Artificial Sequence; identical to SEQ ID NO: 5992
  GFR-binding peptide
  MOD_RES (31), (32): Xaa is C or S

SEQ ID NO: 38213 - protein, 33 aa, Artificial Sequence
  GFR-binding peptide
  MOD_RES (1), (3): Xaa is C or S
XKXSKVIMNSLQEIKPTKGIYYLITLPELDQSV

SEQ ID NO: 38214 - protein, 39 aa, Artificial Sequence; identical to SEQ ID NO: 11446
  GFR-binding peptide
  MOD_RES (2), (36), (37): Xaa is C or S
  MOD_RES (14), (15), (16), (17), (18): Xaa is A or G
  MOD_RES (19), (20), (21), (22): Xaa is A or G or is absent

SEQ ID NO: 38215 - protein, 33 aa, Artificial Sequence; identical to SEQ ID NO: 13406
  GFR-binding peptide
  MOD_RES (33), (33): Xaa is C or S
  MOD_RES (11), (12), (13), (14), (15): Xaa is A or G
  MOD_RES (16), (17), (18), (19): Xaa is A or G or is absent

SEQ ID NO: 38216 - protein, 35 aa, Artificial Sequence; identical to SEQ ID NO: 11449
  GFR-binding peptide
  MOD_RES (1), (32), (33): Xaa is C or S

SEQ ID NO: 38217 - protein, 37 aa, Artificial Sequence; identical to SEQ ID NO: 4024
  GFR-binding peptide
  MOD_RES (1), (3), (35), (36): Xaa is C or S

SEQ ID NO: 38218 - protein, 37 aa, Artificial Sequence; identical to SEQ ID NO: 11451
  GFR-binding peptide
  MOD_RES (33), (33): Xaa is C or S
  MOD_RES (11), (12), (13), (14), (15): Xaa is A or G
  MOD_RES (16), (17), (18), (19): Xaa is A or G or is absent

SEQ ID NO: 38219 - protein, 41 aa, Artificial Sequence; identical to SEQ ID NO: 11452
  GFR-binding peptide
  MOD_RES (2), (36), (37): Xaa is C or S
  MOD_RES (14), (15), (16), (17), (18): Xaa is A or G
  MOD_RES (19), (20), (21), (22): Xaa is A or G or is absent

SEQ ID NO: 38220 - protein, 42 aa, Artificial Sequence; identical to SEQ ID NO: 11453
  GFR-binding peptide
  MOD_RES (1), (3), (37), (38): Xaa is C or S
  MOD_RES (15), (16), (17), (18), (19): Xaa is A or G
  MOD_RES (20), (21), (22), (23): Xaa is A or G or is absent

SEQ ID NO: 38221 - protein, 37 aa, Artificial Sequence; identical to SEQ ID NO: 13407
  GFR-binding peptide
  MOD_RES (1), (3), (35), (36): Xaa is C or S

SEQ ID NO: 38222 - protein, 37 aa, Artificial Sequence; identical to SEQ ID NO: 4025
  GFR-binding peptide
  MOD_RES (2), (36), (37): Xaa is C or S
  MOD_RES (14), (15), (16), (17), (18): Xaa is A or G
  MOD_RES (19), (20), (21), (22): Xaa is A or G or is absent

SEQ ID NO: 38223 - protein, 41 aa, Artificial Sequence; identical to SEQ ID NO: 13408
  GFR-binding peptide
  MOD_RES (2), (36), (37): Xaa is C or S
  MOD_RES (14), (15), (16), (17), (18): Xaa is A or G
  MOD_RES (19), (20), (21), (22): Xaa is A or G or is absent

SEQ ID NO: 38224 - protein, 37 aa, Artificial Sequence; identical to SEQ ID NO: 13409
  GFR-binding peptide
  MOD_RES (1), (3), (35), (36): Xaa is C or S

SEQ ID NO: 38225 - protein, 34 aa, Artificial Sequence; identical to SEQ ID NO: 11456
  GFR-binding peptide
  MOD_RES (2), (34): Xaa is C or S

SEQ ID NO: 38226 - protein, 33 aa, Artificial Sequence; identical to SEQ ID NO: 13410
  GFR-binding peptide
  MOD_RES (2), (2): Xaa is C or S

SEQ ID NO: 38227 - protein, 35 aa, Artificial Sequence; identical to SEQ ID NO: 11457
  GFR-binding peptide
  MOD_RES (31), (32): Xaa is C or S

SEQ ID NO: 38228 - protein, 36 aa, Artificial Sequence; identical to SEQ ID NO: 11458
  GFR-binding peptide
  MOD_RES (1), (3), (35), (36): Xaa is C or S

SEQ ID NO: 38229 - protein, 32 aa, Artificial Sequence; identical to SEQ ID NO: 11459
  GFR-binding peptide
  MOD_RES (11), (12), (13), (14), (15): Xaa is A or G
  MOD_RES (16), (17), (18), (19): Xaa is A or G or is absent

SEQ ID NO: 38230 - protein, 41 aa, Artificial Sequence; identical to SEQ ID NO: 13411
  GFR-binding peptide
  MOD_RES (2), (4), (36), (37): Xaa is C or S

SEQ ID NO: 38231 - protein, 39 aa, Artificial Sequence; identical to SEQ ID NO: 11460
  GFR-binding peptide
  MOD_RES (2), (35), (36): Xaa is C or S
  MOD_RES (13), (14), (15), (16), (17): Xaa is A or G
  MOD_RES (18), (19), (20), (21): Xaa is A or G or is absent

SEQ ID NO: 38232 - protein, 32 aa, Artificial Sequence; identical to SEQ ID NO: 13412
  GFR-binding peptide
  MOD_RES (11), (12), (13), (14), (15): Xaa is A or G
  MOD_RES (16), (17), (18), (19): Xaa is A or G or is absent

SEQ ID NO: 38233 - protein, 34 aa, Artificial Sequence; identical to SEQ ID NO: 11461
  GFR-binding peptide
  MOD_RES (31), (32): Xaa is C or S

SEQ ID NO: 38234 - protein, 41 aa, Artificial Sequence; identical to SEQ ID NO: 4033
  GFR-binding peptide
  MOD_RES (1), (3), (37), (38): Xaa is C or S
  MOD_RES (15), (16), (17), (18), (19): Xaa is A or G
  MOD_RES (20), (21), (22), (23): Xaa is A or G or is absent

SEQ ID NO: 38235 - protein, 41 aa, Artificial Sequence; identical to SEQ ID NO: 11463
  GFR-binding peptide
  MOD_RES (2), (36): Xaa is C or S
  MOD_RES (14), (15), (16), (17), (18): Xaa is A or G
  MOD_RES (19), (20), (21), (22): Xaa is A or G or is absent

SEQ ID NO: 38236 - protein, 38 aa, Artificial Sequence; identical to SEQ ID NO: 11464
  GFR-binding peptide
  MOD_RES (2), (4), (36), (37): Xaa is C or S

SEQ ID NO: 38237 - protein, 42 aa, Artificial Sequence; identical to SEQ ID NO: 11465
  GFR-binding peptide
  MOD_RES (2), (36), (37): Xaa is C or S
  MOD_RES (14), (15), (16), (17), (18): Xaa is A or G
  MOD_RES (19), (20), (21), (22): Xaa is A or G or is absent

SEQ ID NO: 38238 - protein, 33 aa, Artificial Sequence; identical to SEQ ID NO: 11466
  GFR-binding peptide
  MOD_RES (1), (32), (33): Xaa is C or S

SEQ ID NO: 38239 - protein, 42 aa, Artificial Sequence; identical to SEQ ID NO: 6005
  GFR-binding peptide
  MOD_RES (2), (36), (37): Xaa is C or S
  MOD_RES (14), (15), (16), (17), (18): Xaa is A or G
  MOD_RES (19), (20), (21), (22): Xaa is A or G or is absent

SEQ ID NO: 38240 - protein, 37 aa, Artificial Sequence; identical to SEQ ID NO: 11467
  GFR-binding peptide
  MOD_RES (33), (34): Xaa is C or S
  MOD_RES (11), (12), (13), (14), (15): Xaa is A or G
  MOD_RES (16), (17), (18), (19): Xaa is A or G or is absent

SEQ ID NO: 38241 - protein, 37 aa, Artificial Sequence; identical to SEQ ID NO: 13415
  GFR-binding peptide
  MOD_RES (2), (34): Xaa is C or S

SEQ ID NO: 38242 - protein, 43 aa, Artificial Sequence; identical to SEQ ID NO: 11468
  GFR-binding peptide
  MOD_RES (2), (4), (37), (38): Xaa is C or S
  MOD_RES (15), (16), (17), (18), (19): Xaa is A or G
  MOD_RES (20), (21), (22), (23): Xaa is A or G or is absent

SEQ ID NO: 38243 - protein, 36 aa, Artificial Sequence; identical to SEQ ID NO: 13416
  GFR-binding peptide
  MOD_RES (34), (35): Xaa is C or S
  MOD_RES (12), (13), (14), (15), (16): Xaa is A or G
  MOD_RES (17), (18), (19), (20): Xaa is A or G or is absent

SEQ ID NO: 38244 - protein, 35 aa, Artificial Sequence; identical to SEQ ID NO: 13417
  GFR-binding peptide
  MOD_RES (34), (35): Xaa is C or S
  MOD_RES (12), (13), (14), (15), (16): Xaa is A or G
  MOD_RES (17), (18), (19), (20): Xaa is A or G or is absent

SEQ ID NO: 38245 - protein, 38 aa, Artificial Sequence; identical to SEQ ID NO: 13419
  GFR-binding peptide
  MOD_RES (1), (33), (34): Xaa is C or S

SEQ ID NO: 38246 - protein, 37 aa, Artificial Sequence; identical to SEQ ID NO: 11471
  GFR-binding peptide
  MOD_RES (33), (34): Xaa is C or S
  MOD_RES (11), (12), (13), (14), (15): Xaa is A or G
  MOD_RES (16), (17), (18), (19): Xaa is A or G or is absent

SEQ ID NO: 38247 - protein, 38 aa, Artificial Sequence; identical to SEQ ID NO: 11472
  GFR-binding peptide
  MOD_RES (1), (35), (36): Xaa is C or S
  MOD_RES (13), (14), (15), (16), (17): Xaa is A or G
  MOD_RES (18), (19), (20), (21): Xaa is A or G or is absent

SEQ ID NO: 38248 - protein, 35 aa, Artificial Sequence; identical to SEQ ID NO: 11473
  GFR-binding peptide
  MOD_RES (2), (34): Xaa is C or S

SEQ ID NO: 38249 - protein, 40 aa, Artificial Sequence; identical to SEQ ID NO: 6014
  GFR-binding peptide
  MOD_RES (1), (3), (36), (37): Xaa is C or S
  MOD_RES (14), (15), (16), (17), (18): Xaa is A or G
  MOD_RES (19), (20), (21), (22): Xaa is A or G or is absent

SEQ ID NO: 38250 - protein, 42 aa, Artificial Sequence; identical to SEQ ID NO: 13421
  GFR-binding peptide
  MOD_RES (2), (4), (36): Xaa is C or S

SEQ ID NO: 38251 - protein, 39 aa, Artificial Sequence; identical to SEQ ID NO: 13422
  GFR-binding peptide
  MOD_RES (2), (4), (38), (39): Xaa is C or S
  MOD_RES (16), (17), (18), (19), (20): Xaa is A or G
  MOD_RES (21), (22), (23), (24): Xaa is A or G or is absent

SEQ ID NO: 38252 - protein, 41 aa, Artificial Sequence; identical to SEQ ID NO: 11474
  GFR-binding peptide
  MOD_RES (2), (4), (38), (39): Xaa is C or S
  MOD_RES (16), (17), (18), (19), (20): Xaa is A or G
  MOD_RES (21), (22), (23), (24): Xaa is A or G or is absent

SEQ ID NO: 38253 - protein, 41 aa, Artificial Sequence; identical to SEQ ID NO: 13423
  GFR-binding peptide
  MOD_RES (1), (35), (36): Xaa is C or S
  MOD_RES (13), (14), (15), (16), (17): Xaa is A or G
  MOD_RES (18), (19), (20), (21): Xaa is A or G or is absent

SEQ ID NO: 38254 - protein, 38 aa, Artificial Sequence; identical to SEQ ID NO: 13425
  GFR-binding peptide
  MOD_RES (33), (34): Xaa is C or S
  MOD_RES (11), (12), (13), (14), (15): Xaa is A or G
  MOD_RES (16), (17), (18), (19): Xaa is A or G or is absent

SEQ ID NO: 38255 - protein, 38 aa, Artificial Sequence; identical to SEQ ID NO: 11475
  GFR-binding peptide
  MOD_RES (2), (4), (37), (38): Xaa is C or S
  MOD_RES (15), (16), (17), (18), (19): Xaa is A or G
  MOD_RES (20), (21), (22), (23): Xaa is A or G or is absent

SEQ ID NO: 38256 - protein, 39 aa, Artificial Sequence; identical to SEQ ID NO: 13426
  GFR-binding peptide
  MOD_RES (1), (35), (36): Xaa is C or S
  MOD_RES (13), (14), (15), (16), (17): Xaa is A or G
  MOD_RES (18), (19), (20), (21): Xaa is A or G or is absent

SEQ ID NO: 38257 - protein, 39 aa, Artificial Sequence; identical to SEQ ID NO: 13427
  GFR-binding peptide
  MOD_RES (1), (3), (35), (36): Xaa is C or S

SEQ ID NO: 38258 - protein, 38 aa, Artificial Sequence; identical to SEQ ID NO: 13429
  GFR-binding peptide
  MOD_RES (1), (3), (35), (36): Xaa is C or S

SEQ ID NO: 38259 - protein, 37 aa, Artificial Sequence; identical to SEQ ID NO: 11478
  GFR-binding peptide
  MOD_RES (33), (34): Xaa is C or S
  MOD_RES (11), (12), (13), (14), (15): Xaa is A or G
  MOD_RES (16), (17), (18), (19): Xaa is A or G or is absent

SEQ ID NO: 38260 - protein, 35 aa, Artificial Sequence; identical to SEQ ID NO: 11479
  GFR-binding peptide
  MOD_RES (32), (33): Xaa is C or S

SEQ ID NO: 38261 - protein, 34 aa, Artificial Sequence; identical to SEQ ID NO: 11480
  GFR-binding peptide
  MOD_RES (33), (33): Xaa is C or S
  MOD_RES (11), (12), (13), (14), (15): Xaa is A or G
  MOD_RES (16), (17), (18), (19): Xaa is A or G or is absent

SEQ ID NO: 38262 - protein, 40 aa, Artificial Sequence; identical to SEQ ID NO: 11481
  GFR-binding peptide
  MOD_RES (2), (4), (35), (36): Xaa is C or S

SEQ ID NO: 38263 - protein, 40 aa, Artificial Sequence; identical to SEQ ID NO: 4050
  GFR-binding peptide
  MOD_RES (2), (35), (36): Xaa is C or S
  MOD_RES (13), (14), (15), (16), (17): Xaa is A or G
  MOD_RES (18), (19), (20), (21): Xaa is A or G or is absent

SEQ ID NO: 38264 - protein, 33 aa, Artificial Sequence; identical to SEQ ID NO: 13431
  GFR-binding peptide
  MOD_RES (33), (33): Xaa is C or S
  MOD_RES (11), (12), (13), (14), (15): Xaa is A or G
  MOD_RES (16), (17), (18), (19): Xaa is A or G or is absent

SEQ ID NO: 38265 - protein, 37 aa, Artificial Sequence; identical to SEQ ID NO: 13432
  GFR-binding peptide
  MOD_RES (1), (3), (35), (36): Xaa is C or S

SEQ ID NO: 38266 - protein, 41 aa, Artificial Sequence; identical to SEQ ID NO: 11484
  GFR-binding peptide
  MOD_RES (1), (3), (37), (38): Xaa is C or S
  MOD_RES (15), (16), (17), (18), (19): Xaa is A or G
  MOD_RES (20), (21), (22), (23): Xaa is A or G or is absent

SEQ ID NO: 38267 - protein, 38 aa, Artificial Sequence
  GFR-binding peptide
  MOD_RES (2), (33), (34): Xaa is C or S
KXSKVIMNSLQEIKPTKGIYYLITLPELDQSVXXPSAS

SEQ ID NO: 38268 - protein, 36 aa, Artificial Sequence; identical to SEQ ID NO: 11485
  GFR-binding peptide
  MOD_RES (1), (34), (35): Xaa is C or S
  MOD_RES (12), (13), (14), (15), (16): Xaa is A or G
  MOD_RES (17), (18), (19), (20): Xaa is A or G or is absent

SEQ ID NO: 38269 - protein, 41 aa, Artificial Sequence; identical to SEQ ID NO: 13433
  GFR-binding peptide
  MOD_RES (2), (4), (38): Xaa is C or S
  MOD_RES (16), (17), (18), (19), (20): Xaa is A or G
  MOD_RES (21), (22), (23), (24): Xaa is A or G or is absent

SEQ ID NO: 38270 - protein, 36 aa, Artificial Sequence
  GFR-binding peptide
  MOD_RES (2), (33), (34): Xaa is C or S
KXSKVIMNSLQEIKPTKGIYYLITLPELDQSVXXPS

SEQ ID NO: 38271 - protein, 38 aa, Artificial Sequence; identical to SEQ ID NO: 4058
  GFR-binding peptide
  MOD_RES (2), (4), (36), (37): Xaa is C or S

SEQ ID NO: 38272 - protein, 39 aa, Artificial Sequence; identical to SEQ ID NO: 11488
  GFR-binding peptide
  MOD_RES (33), (34): Xaa is C or S
  MOD_RES (11), (12), (13), (14), (15): Xaa is A or G
  MOD_RES (16), (17), (18), (19): Xaa is A or G or is absent

SEQ ID NO: 38273 - protein, 36 aa, Artificial Sequence; identical to SEQ ID NO: 13435
  GFR-binding peptide
  MOD_RES (1), (3), (35), (36): Xaa is C or S

SEQ ID NO: 38274 - protein, 38 aa, Artificial Sequence; identical to SEQ ID NO: 11491
  GFR-binding peptide
  MOD_RES (2), (34), (35): Xaa is C or S

SEQ ID NO: 38275 - protein, 33 aa, Artificial Sequence; identical to SEQ ID NO: 11492
  GFR-binding peptide
  MOD_RES (33), (33): Xaa is C or S
  MOD_RES (11), (12), (13), (14), (15): Xaa is A or G
  MOD_RES (16), (17), (18), (19): Xaa is A or G or is absent

SEQ ID NO: 38276 - protein, 38 aa, Artificial Sequence; identical to SEQ ID NO: 11494
  GFR-binding peptide
  MOD_RES (2), (36): Xaa is C or S
  MOD_RES (14), (15), (16), (17), (18): Xaa is A or G
  MOD_RES (19), (20), (21), (22): Xaa is A or G or is absent

SEQ ID NO: 38277 - protein, 34 aa, Artificial Sequence; identical to SEQ ID NO: 11495
  GFR-binding peptide
  MOD_RES (33), (34): Xaa is C or S
  MOD_RES (11), (12), (13), (14), (15): Xaa is A or G
  MOD_RES (16), (17), (18), (19): Xaa is A or G or is absent

SEQ ID NO: 38278 - protein, 36 aa, Artificial Sequence; identical to SEQ ID NO: 13437
  GFR-binding peptide
  MOD_RES (1), (33): Xaa is C or S

SEQ ID NO: 38279 - protein, 39 aa, Artificial Sequence; identical to SEQ ID NO: 11496
  GFR-binding peptide
  MOD_RES (2), (35), (36): Xaa is C or S
  MOD_RES (13), (14), (15), (16), (17): Xaa is A or G
  MOD_RES (18), (19), (20), (21): Xaa is A or G or is absent

SEQ ID NO: 38280 - protein, 32 aa, Artificial Sequence; identical to SEQ ID NO: 4064
  GFR-binding peptide
  MOD_RES (2), (2): Xaa is C or S

SEQ ID NO: 38281 - protein, 39 aa, Artificial Sequence; identical to SEQ ID NO: 13440
  GFR-binding peptide
  MOD_RES (2), (36), (37): Xaa is C or S
  MOD_RES (14), (15), (16), (17), (18): Xaa is A or G
  MOD_RES (19), (20), (21), (22): Xaa is A or G or is absent

SEQ ID NO: 38282 - protein, 36 aa, Artificial Sequence; identical to SEQ ID NO: 13441
  GFR-binding peptide
  MOD_RES (2), (36): Xaa is C or S
  MOD_RES (14), (15), (16), (17), (18): Xaa is A or G
  MOD_RES (19), (20), (21), (22): Xaa is A or G or is absent

SEQ ID NO: 38283 - protein, 37 aa, Artificial Sequence; identical to SEQ ID NO: 13442
  GFR-binding peptide
  MOD_RES (31), (32): Xaa is C or S

SEQ ID NO: 38284 - protein, 41 aa, Artificial Sequence; identical to SEQ ID NO: 11499
  GFR-binding peptide
  MOD_RES (2), (4), (36), (37): Xaa is C or S

SEQ ID NO: 38285 - protein, 39 aa, Artificial Sequence; identical to SEQ ID NO: 6040
  GFR-binding peptide
  MOD_RES (1), (3), (37), (38): Xaa is C or S
  MOD_RES (15), (16), (17), (18), (19): Xaa is A or G
  MOD_RES (20), (21), (22), (23): Xaa is A or G or is absent

SEQ ID NO: 38286 - protein, 36 aa, Artificial Sequence; identical to SEQ ID NO: 11500
  GFR-binding peptide
  MOD_RES (2), (35), (36): Xaa is C or S
  MOD_RES (13), (14), (15), (16), (17): Xaa is A or G
  MOD_RES (18), (19), (20), (21): Xaa is A or G or is absent

SEQ ID NO: 38287 - protein, 36 aa, Artificial Sequence; identical to SEQ ID NO: 13444
  GFR-binding peptide
  MOD_RES (31), (32): Xaa is C or S

SEQ ID NO: 38288 - protein, 40 aa, Artificial Sequence; identical to SEQ ID NO: 11502
  GFR-binding peptide
  MOD_RES (1), (3), (37), (38): Xaa is C or S
  MOD_RES (15), (16), (17), (18), (19): Xaa is A or G
  MOD_RES (20), (21), (22), (23): Xaa is A or G or is absent

SEQ ID NO: 38289 - protein, 32 aa, Artificial Sequence; identical to SEQ ID NO: 6044
  GFR-binding peptide
  MOD_RES (2), (2): Xaa is C or S

SEQ ID NO: 38290 - protein, 42 aa, Artificial Sequence; identical to SEQ ID NO: 6046
  GFR-binding peptide
  MOD_RES (1), (3), (36), (37): Xaa is C or S
  MOD_RES (14), (15), (16), (17), (18): Xaa is A or G
  MOD_RES (19), (20), (21), (22): Xaa is A or G or is absent

SEQ ID NO: 38291 - protein, 39 aa, Artificial Sequence; identical to SEQ ID NO: 11503
  GFR-binding peptide
  MOD_RES (2), (34), (35): Xaa is C or S

SEQ ID NO: 38292 - protein, 37 aa, Artificial Sequence; identical to SEQ ID NO: 13448
  GFR-binding peptide
  MOD_RES (1), (33), (34): Xaa is C or S

SEQ ID NO: 38293 - protein, 39 aa, Artificial Sequence; identical to SEQ ID NO: 4073
  GFR-binding peptide
  MOD_RES (1), (35), (36): Xaa is C or S
  MOD_RES (13), (14), (15), (16), (17): Xaa is A or G
  MOD_RES (18), (19), (20), (21): Xaa is A or G or is absent

SEQ ID NO: 38294 - protein, 41 aa, Artificial Sequence; identical to SEQ ID NO: 13449
  GFR-binding peptide
  MOD_RES (2), (4), (37), (38): Xaa is C or S
  MOD_RES (15), (16), (17), (18), (19): Xaa is A or G
  MOD_RES (20), (21), (22), (23): Xaa is A or G or is absent

SEQ ID NO: 38295 - protein, 37 aa, Artificial Sequence; identical to SEQ ID NO: 13450
  GFR-binding peptide
  MOD_RES (1), (3), (34), (35): Xaa is C or S

SEQ ID NO: 38296 - protein, 34 aa, Artificial Sequence; identical to SEQ ID NO: 13451
  GFR-binding peptide
  MOD_RES (2), (4): Xaa is C or S

SEQ ID NO: 38297 - protein, 41 aa, Artificial Sequence; identical to SEQ ID NO: 6049
  GFR-binding peptide
  MOD_RES (1), (35), (36): Xaa is C or S
  MOD_RES (13), (14), (15), (16), (17): Xaa is A or G
  MOD_RES (18), (19), (20), (21): Xaa is A or G or is absent

SEQ ID NO: 38298 - protein, 42 aa, Artificial Sequence; identical to SEQ ID NO: 13454
  GFR-binding peptide
  MOD_RES (1), (3), (37), (38): Xaa is C or S
  MOD_RES (15), (16), (17), (18), (19): Xaa is A or G
  MOD_RES (20), (21), (22), (23): Xaa is A or G or is absent

SEQ ID NO: 38299 - protein, 37 aa, Artificial Sequence; identical to SEQ ID NO: 13455
  GFR-binding peptide
  MOD_RES (1), (3), (37): Xaa is C or S
  MOD_RES (15), (16), (17), (18), (19): Xaa is A or G
  MOD_RES (20), (21), (22), (23): Xaa is A or G or is absent

SEQ ID NO: 38300 - protein, 43 aa, Artificial Sequence; identical to SEQ ID NO: 11507
  GFR-binding peptide
  MOD_RES (1), (3), (37), (38): Xaa is C or S
  MOD_RES (15), (16), (17), (18), (19): Xaa is A or G
  MOD_RES (20), (21), (22), (23): Xaa is A or G or is absent

SEQ ID NO: 38301 - protein, 33 aa, Artificial Sequence; identical to SEQ ID NO: 13456
  GFR-binding peptide
  MOD_RES (1), (1): Xaa is C or S
  MOD_RES (12), (13), (14), (15), (16): Xaa is A or G
  MOD_RES (17), (18), (19), (20): Xaa is A or G or is absent

SEQ ID NO: 38302 - protein, 32 aa, Artificial Sequence; identical to SEQ ID NO: 11508
  GFR-binding peptide
  MOD_RES (31), (32): Xaa is C or S

SEQ ID NO: 38303 - protein, 40 aa, Artificial Sequence; identical to SEQ ID NO: 13457
  GFR-binding peptide
  MOD_RES (1), (3), (37), (38): Xaa is C or S
  MOD_RES (15), (16), (17), (18), (19): Xaa is A or G
  MOD_RES (20), (21), (22), (23): Xaa is A or G or is absent

SEQ ID NO: 38304 - protein, 41 aa, Artificial Sequence; identical to SEQ ID NO: 13458
  GFR-binding peptide
  MOD_RES (2), (4), (38), (39): Xaa is C or S
  MOD_RES (16), (17), (18), (19), (20): Xaa is A or G
  MOD_RES (21), (22), (23), (24): Xaa is A or G or is absent

SEQ ID NO: 38305 - protein, 35 aa, Artificial Sequence; identical to SEQ ID NO: 13459
  GFR-binding peptide
  MOD_RES (1), (35): Xaa is C or S
  MOD_RES (13), (14), (15), (16), (17): Xaa is A or G
  MOD_RES (18), (19), (20), (21): Xaa is A or G or is absent

SEQ ID NO: 38306 - protein, 36 aa, Artificial Sequence; identical to SEQ ID NO: 6055
  GFR-binding peptide
  MOD_RES (1), (33), (34): Xaa is C or S

SEQ ID NO: 38307 - protein, 39 aa, Artificial Sequence; identical to SEQ ID NO: 11509
  GFR-binding peptide
  MOD_RES (34), (34): Xaa is C or S
  MOD_RES (12), (13), (14), (15), (16): Xaa is A or G
  MOD_RES (17), (18), (19), (20): Xaa is A or G or is absent

SEQ ID NO: 38308 - protein, 38 aa, Artificial Sequence; identical to SEQ ID NO: 11510
  GFR-binding peptide
  MOD_RES (2), (36), (37): Xaa is C or S
  MOD_RES (14), (15), (16), (17), (18): Xaa is A or G
  MOD_RES (19), (20), (21), (22): Xaa is A or G or is absent

SEQ ID NO: 38309 - protein, 44 aa, Artificial Sequence; identical to SEQ ID NO: 11511
  GFR-binding peptide
  MOD_RES (2), (4), (38), (39): Xaa is C or S
  MOD_RES (16), (17), (18), (19), (20): Xaa is A or G
  MOD_RES (21), (22), (23), (24): Xaa is A or G or is absent

SEQ ID NO: 38310 - protein, 35 aa, Artificial Sequence; identical to SEQ ID NO: 13461
  GFR-binding peptide
  MOD_RES (2), (34), (35): Xaa is C or S

SEQ ID NO: 38311 - protein, 35 aa, Artificial Sequence; identical to SEQ ID NO: 13462
  GFR-binding peptide
  MOD_RES (2), (35): Xaa is C or S
  MOD_RES (13), (14), (15), (16), (17): Xaa is A or G
  MOD_RES (18), (19), (20), (21): Xaa is A or G or is absent

SEQ ID NO: 38312 - protein, 35 aa, Artificial Sequence; identical to SEQ ID NO: 13463
  GFR-binding peptide
  MOD_RES (1), (35): Xaa is C or S
  MOD_RES (13), (14), (15), (16), (17): Xaa is A or G
  MOD_RES (18), (19), (20), (21): Xaa is A or G or is absent

SEQ ID NO: 38313 - protein, 31 aa, Artificial Sequence; identical to SEQ ID NO: 11513
  GFR-binding peptide
  MOD_RES (31), (31): Xaa is C or S

SEQ ID NO: 38314 - protein, 34 aa, Artificial Sequence; identical to SEQ ID NO: 11515
  GFR-binding peptide
  MOD_RES (32), (33): Xaa is C or S

SEQ ID NO: 38315 - protein, 37 aa, Artificial Sequence; identical to SEQ ID NO: 11516
  GFR-binding peptide
  MOD_RES (1), (33), (34): Xaa is C or S

SEQ ID NO: 38316 - protein, 32 aa, Artificial Sequence; identical to SEQ ID NO: 11520
  GFR-binding peptide
  MOD_RES (11), (12), (13), (14), (15): Xaa is A or G
  MOD_RES (16), (17), (18), (19): Xaa is A or G or is absent

SEQ ID NO: 38317 - protein, 40 aa, Artificial Sequence; identical to SEQ ID NO: 11521
  GFR-binding peptide
  MOD_RES (1), (3), (37): Xaa is C or S
  MOD_RES (15), (16), (17), (18), (19): Xaa is A or G
  MOD_RES (20), (21), (22), (23): Xaa is A or G or is absent

SEQ ID NO: 38318 - protein, 37 aa, Artificial Sequence; identical to SEQ ID NO: 11523
  GFR-binding peptide
  MOD_RES (33), (34): Xaa is C or S
  MOD_RES (11), (12), (13), (14), (15): Xaa is A or G
  MOD_RES (16), (17), (18), (19): Xaa is A or G or is absent

SEQ ID NO: 38319 - protein, 36 aa, Artificial Sequence; identical to SEQ ID NO: 4090
  GFR-binding peptide
  MOD_RES (33), (34): Xaa is C or S
  MOD_RES (11), (12), (13), (14), (15): Xaa is A or G
  MOD_RES (16), (17), (18), (19): Xaa is A or G or is absent

SEQ ID NO: 38320 - protein, 34 aa, Artificial Sequence; identical to SEQ ID NO: 11525
  GFR-binding peptide
  MOD_RES (34), (34): Xaa is C or S
  MOD_RES (12), (13), (14), (15), (16): Xaa is A or G
  MOD_RES (17), (18), (19), (20): Xaa is A or G or is absent

SEQ ID NO: 38321 - protein, 34 aa, Artificial Sequence; identical to SEQ ID NO: 13466
  GFR-binding peptide
  MOD_RES (32), (33): Xaa is C or S

SEQ ID NO: 38322 - protein, 42 aa, Artificial Sequence; identical to SEQ ID NO: 13467
  GFR-binding peptide
  MOD_RES (1), (3), (37), (38): Xaa is C or S
  MOD_RES (15), (16), (17), (18), (19): Xaa is A or G
  MOD_RES (20), (21), (22), (23): Xaa is A or G or is absent

SEQ ID NO: 38323 - protein, 31 aa, Artificial Sequence; identical to SEQ ID NO: 13468
  GFR-binding peptide

SEQ ID NO: 38324 - protein, 38 aa, Artificial Sequence; identical to SEQ ID NO: 11527
  GFR-binding peptide
  MOD_RES (2), (4), (38): Xaa is C or S
  MOD_RES (16), (17), (18), (19), (20): Xaa is A or G
  MOD_RES (21), (22), (23), (24): Xaa is A or G or is absent

SEQ ID NO: 38325 - protein, 40 aa, Artificial Sequence; identical to SEQ ID NO: 4098
  GFR-binding peptide
  MOD_RES (1), (3), (34), (35): Xaa is C or S

SEQ ID NO: 38326 - protein, 34 aa, Artificial Sequence; identical to SEQ ID NO: 4100
  GFR-binding peptide
  MOD_RES (1), (34): Xaa is C or S
  MOD_RES (12), (13), (14), (15), (16): Xaa is A or G
  MOD_RES (17), (18), (19), (20): Xaa is A or G or is absent

SEQ ID NO: 38327 - protein, 38 aa, Artificial Sequence; identical to SEQ ID NO: 4101
  GFR-binding peptide
  MOD_RES (1), (32), (33): Xaa is C or S

SEQ ID NO: 38328 - protein, 40 aa, Artificial Sequence; identical to SEQ ID NO: 11531
  GFR-binding peptide
  MOD_RES (2), (4), (38), (39): Xaa is C or S
  MOD_RES (16), (17), (18), (19), (20): Xaa is A or G
  MOD_RES (21), (22), (23), (24): Xaa is A or G or is absent

SEQ ID NO: 38329 - protein, 37 aa, Artificial Sequence; identical to SEQ ID NO: 11532
  GFR-binding peptide
  MOD_RES (2), (4), (37): Xaa is C or S
  MOD_RES (15), (16), (17), (18), (19): Xaa is A or G
  MOD_RES (20), (21), (22), (23): Xaa is A or G or is absent

SEQ ID NO: 38330 - protein, 39 aa, Artificial Sequence; identical to SEQ ID NO: 4104
  GFR-binding peptide
  MOD_RES (1), (3), (34), (35): Xaa is C or S

SEQ ID NO: 38331 - protein, 43 aa, Artificial Sequence; identical to SEQ ID NO: 13471
  GFR-binding peptide
  MOD_RES (1), (3), (37): Xaa is C or S
  MOD_RES (15), (16), (17), (18), (19): Xaa is A or G
  MOD_RES (20), (21), (22), (23): Xaa is A or G or is absent

SEQ ID NO: 38332 - protein, 31 aa, Artificial Sequence; identical to SEQ ID NO: 11534
  GFR-binding peptide

SEQ ID NO: 38333 - protein, 38 aa, Artificial Sequence; identical to SEQ ID NO: 13472
  GFR-binding peptide
  MOD_RES (1), (3), (36), (37): Xaa is C or S
  MOD_RES (14), (15), (16), (17), (18): Xaa is A or G
  MOD_RES (19), (20), (21), (22): Xaa is A or G or is absent

SEQ ID NO: 38334 - protein, 37 aa, Artificial Sequence; identical to SEQ ID NO: 13474
  GFR-binding peptide
  MOD_RES (33), (34): Xaa is C or S
  MOD_RES (11), (12), (13), (14), (15): Xaa is A or G
  MOD_RES (16), (17), (18), (19): Xaa is A or G or is absent

SEQ ID NO: 38335 - protein, 40 aa, Artificial Sequence; identical to SEQ ID NO: 11536
  GFR-binding peptide
  MOD_RES (2), (34), (35): Xaa is C or S

SEQ ID NO: 38336 - protein, 40 aa, Artificial Sequence; identical to SEQ ID NO: 13476
  GFR-binding peptide
  MOD_RES (1), (3), (37), (38): Xaa is C or S
  MOD_RES (15), (16), (17), (18), (19): Xaa is A or G
  MOD_RES (20), (21), (22), (23): Xaa is A or G or is absent

SEQ ID NO: 38337 - protein, 41 aa, Artificial Sequence; identical to SEQ ID NO: 4111
  GFR-binding peptide
  MOD_RES (2), (36), (37): Xaa is C or S
  MOD_RES (14), (15), (16), (17), (18): Xaa is A or G
  MOD_RES (19), (20), (21), (22): Xaa is A or G or is absent

SEQ ID NO: 38338 - protein, 34 aa, Artificial Sequence; identical to SEQ ID NO: 11539
  GFR-binding peptide
  MOD_RES (1), (34): Xaa is C or S
  MOD_RES (12), (13), (14), (15), (16): Xaa is A or G
  MOD_RES (17), (18), (19), (20): Xaa is A or G or is absent

SEQ ID NO: 38339 - protein, 33 aa, Artificial Sequence; identical to SEQ ID NO: 13477
  GFR-binding peptide
  MOD_RES (1), (3): Xaa is C or S

SEQ ID NO: 38340 - protein, 33 aa, Artificial Sequence; identical to SEQ ID NO: 13478
  GFR-binding peptide
  MOD_RES (12), (13), (14), (15), (16): Xaa is A or G
  MOD_RES (17), (18), (19), (20): Xaa is A or G or is absent

SEQ ID NO: 38341 - protein, 35 aa, Artificial Sequence; identical to SEQ ID NO: 11540
  GFR-binding peptide
  MOD_RES (2), (4): Xaa is C or S

SEQ ID NO: 38342 - protein, 40 aa, Artificial Sequence; identical to SEQ ID NO: 11541
  GFR-binding peptide
  MOD_RES (1), (3), (34), (35): Xaa is C or S

SEQ ID NO: 38343 - protein, 38 aa, Artificial Sequence; identical to SEQ ID NO: 13479
  GFR-binding peptide
  MOD_RES (32), (32): Xaa is C or S

SEQ ID NO: 38344 - protein, 35 aa, Artificial Sequence; identical to SEQ ID NO: 13480
  GFR-binding peptide
  MOD_RES (2), (34), (35): Xaa is C or S

SEQ ID NO: 38345 - protein, 33 aa, Artificial Sequence; identical to SEQ ID NO: 11542
  GFR-binding peptide
  MOD_RES (2), (33): Xaa is C or S

SEQ ID NO: 38346 - protein, 32 aa, Artificial Sequence; identical to SEQ ID NO: 13481
  GFR-binding peptide
  MOD_RES (32), (32): Xaa is C or S

SEQ ID NO: 38347 - protein, 36 aa, Artificial Sequence; identical to SEQ ID NO: 13482
  GFR-binding peptide
  MOD_RES (1), (3), (36): Xaa is C or S
  MOD_RES (14), (15), (16), (17), (18): Xaa is A or G
  MOD_RES (19), (20), (21), (22): Xaa is A or G or is absent

SEQ ID NO: 38348 - protein, 38 aa, Artificial Sequence
  GFR-binding peptide
  MOD_RES (2), (35), (36): Xaa is C or S
  MOD_RES (13), (14), (15), (16), (17): Xaa is A or G
  MOD_RES (18), (19), (20), (21): Xaa is A or G or is absent
KXSKVIMNSLQEXXXXXXXXXYYLITLPELDQSVXXPS

SEQ ID NO: 38349 - protein, 39 aa, Artificial Sequence; identical to SEQ ID NO: 13483
  GFR-binding peptide
  MOD_RES (2), (35), (36): Xaa is C or S
  MOD_RES (13), (14), (15), (16), (17): Xaa is A or G
  MOD_RES (18), (19), (20), (21): Xaa is A or G or is absent

SEQ ID NO: 38350 - protein, 32 aa, Artificial Sequence; identical to SEQ ID NO: 11543
  GFR-binding peptide
  MOD_RES (2), (2): Xaa is C or S

SEQ ID NO: 38351 - protein, 36 aa, Artificial Sequence; identical to SEQ ID NO: 6078
  GFR-binding peptide
  MOD_RES (31), (32): Xaa is C or S

SEQ ID NO: 38352 - protein, 39 aa, Artificial Sequence; identical to SEQ ID NO: 13485
  GFR-binding peptide
  MOD_RES (33), (34): Xaa is C or S
  MOD_RES (11), (12), (13), (14), (15): Xaa is A or G
  MOD_RES (16), (17), (18), (19): Xaa is A or G or is absent

SEQ ID NO: 38353 - protein, 38 aa, Artificial Sequence; identical to SEQ ID NO: 6079
  GFR-binding peptide
  MOD_RES (2), (34), (35): Xaa is C or S

SEQ ID NO: 38354 - protein, 38 aa, Artificial Sequence; identical to SEQ ID NO: 13487
  GFR-binding peptide
  MOD_RES (1), (3), (37), (38): Xaa is C or S
  MOD_RES (15), (16), (17), (18), (19): Xaa is A or G
  MOD_RES (20), (21), (22), (23): Xaa is A or G or is absent

SEQ ID NO: 38355 - protein, 32 aa, Artificial Sequence; identical to SEQ ID NO: 11544
  GFR-binding peptide
  MOD_RES (32), (32): Xaa is C or S

SEQ ID NO: 38356 - protein, 36 aa, Artificial Sequence; identical to SEQ ID NO: 4120
  GFR-binding peptide
  MOD_RES (1), (33), (34): Xaa is C or S

SEQ ID NO: 38357 - protein, 39 aa, Artificial Sequence; identical to SEQ ID NO: 13489
  GFR-binding peptide
  MOD_RES (1), (33), (34): Xaa is C or S

SEQ ID NO: 38358 - protein, 34 aa, Artificial Sequence; identical to SEQ ID NO: 11547
  GFR-binding peptide
  MOD_RES (1), (32), (33): Xaa is C or S

SEQ ID NO: 38359 - protein, 37 aa, Artificial Sequence; identical to SEQ ID NO: 11549
  GFR-binding peptide
  MOD_RES (31), (32): Xaa is C or S

SEQ ID NO: 38360 - protein, 34 aa, Artificial Sequence; identical to SEQ ID NO: 13491
  GFR-binding peptide
  MOD_RES (1), (1): Xaa is C or S
  MOD_RES (13), (14), (15), (16), (17): Xaa is A or G
  MOD_RES (18), (19), (20), (21): Xaa is A or G or is absent

SEQ ID NO: 38361 - protein, 42 aa, Artificial Sequence; identical to SEQ ID NO: 13492
  GFR-binding peptide
  MOD_RES (2), (36), (37): Xaa is C or S
  MOD_RES (14), (15), (16), (17), (18): Xaa is A or G
  MOD_RES (19), (20), (21), (22): Xaa is A or G or is absent

SEQ ID NO: 38362 - protein, 37 aa, Artificial Sequence; identical to SEQ ID NO: 11550
  GFR-binding peptide
  MOD_RES (32), (33): Xaa is C or S

SEQ ID NO: 38363 - protein, 35 aa, Artificial Sequence; identical to SEQ ID NO: 11551
  GFR-binding peptide
  MOD_RES (33), (34): Xaa is C or S
  MOD_RES (11), (12), (13), (14), (15): Xaa is A or G
  MOD_RES (16), (17), (18), (19): Xaa is A or G or is absent

SEQ ID NO: 38364 - protein, 40 aa, Artificial Sequence; identical to SEQ ID NO: 13493
  GFR-binding peptide
  MOD_RES (1), (34), (35): Xaa is C or S
  MOD_RES (12), (13), (14), (15), (16): Xaa is A or G
  MOD_RES (17), (18), (19), (20): Xaa is A or G or is absent

SEQ ID NO: 38365 - protein, 34 aa, Artificial Sequence
  GFR-binding peptide
  MOD_RES (1), (3), (34): Xaa is C or S
XKXSKVIMNSLQEIKPTKGIYYLITLPELDQSVX

SEQ ID NO: 38366 - protein, 39 aa, Artificial Sequence; identical to SEQ ID NO: 11552
  GFR-binding peptide
  MOD_RES (1), (35), (36): Xaa is C or S
  MOD_RES (13), (14), (15), (16), (17): Xaa is A or G
  MOD_RES (18), (19), (20), (21): Xaa is A or G or is absent

SEQ ID NO: 38367 - protein, 32 aa, Artificial Sequence; identical to SEQ ID NO: 11554
  GFR-binding peptide
  MOD_RES (32), (32): Xaa is C or S

SEQ ID NO: 38368 - protein, 31 aa, Artificial Sequence; identical to SEQ ID NO: 11555
  GFR-binding peptide

SEQ ID NO: 38369 - protein, 41 aa, Artificial Sequence; identical to SEQ ID NO: 6085
  GFR-binding peptide
  MOD_RES (2), (35), (36): Xaa is C or S
  MOD_RES (13), (14), (15), (16), (17): Xaa is A or G
  MOD_RES (18), (19), (20), (21): Xaa is A or G or is absent

SEQ ID NO: 38370 - protein, 37 aa, Artificial Sequence; identical to SEQ ID NO: 4129
  GFR-binding peptide
  MOD_RES (1), (32), (33): Xaa is C or S

SEQ ID NO: 38371 - protein, 36 aa, Artificial Sequence; identical to SEQ ID NO: 11557
  GFR-binding peptide
  MOD_RES (2), (4), (35), (36): Xaa is C or S

SEQ ID NO: 38372 - protein, 34 aa, Artificial Sequence; identical to SEQ ID NO: 13495
  GFR-binding peptide
  MOD_RES (1), (33), (34): Xaa is C or S

SEQ ID NO: 38373 - protein, 44 aa, Artificial Sequence; identical to SEQ ID NO: 11558
  GFR-binding peptide
  MOD_RES (2), (4), (38), (39): Xaa is C or S
  MOD_RES (16), (17), (18), (19), (20): Xaa is A or G
  MOD_RES (21), (22), (23), (24): Xaa is A or G or is absent

SEQ ID NO: 38374 - protein, 37 aa, Artificial Sequence; identical to SEQ ID NO: 4134
  GFR-binding peptide
  MOD_RES (1), (33), (34): Xaa is C or S

SEQ ID NO: 38375 - protein, 37 aa, Artificial Sequence; identical to SEQ ID NO: 6086
  GFR-binding peptide
  MOD_RES (33), (34): Xaa is C or S
  MOD_RES (11), (12), (13), (14), (15): Xaa is A or G
  MOD_RES (16), (17), (18), (19): Xaa is A or G or is absent

SEQ ID NO: 38376 - protein, 36 aa, Artificial Sequence; identical to SEQ ID NO: 11561
  GFR-binding peptide
  MOD_RES (2), (36): Xaa is C or S
  MOD_RES (14), (15), (16), (17), (18): Xaa is A or G
  MOD_RES (19), (20), (21), (22): Xaa is A or G or is absent

SEQ ID NO: 38377 - protein, 38 aa, Artificial Sequence; identical to SEQ ID NO: 13498
  GFR-binding peptide
  MOD_RES (2), (4), (35), (36): Xaa is C or S

SEQ ID NO: 38378 - protein, 40 aa, Artificial Sequence; identical to SEQ ID NO: 13499
  GFR-binding peptide
  MOD_RES (1), (35), (36): Xaa is C or S
  MOD_RES (13), (14), (15), (16), (17): Xaa is A or G
  MOD_RES (18), (19), (20), (21): Xaa is A or G or is absent

SEQ ID NO: 38379 - protein, 37 aa, Artificial Sequence; identical to SEQ ID NO: 13500
  GFR-binding peptide
  MOD_RES (1), (3), (36), (37): Xaa is C or S
  MOD_RES (14), (15), (16), (17), (18): Xaa is A or G
  MOD_RES (19), (20), (21), (22): Xaa is A or G or is absent

SEQ ID NO: 38380 - protein, 39 aa, Artificial Sequence; identical to SEQ ID NO: 13501
  GFR-binding peptide
  MOD_RES (1), (33), (34): Xaa is C or S

SEQ ID NO: 38381 - protein, 38 aa, Artificial Sequence; identical to SEQ ID NO: 11562
  GFR-binding peptide
  MOD_RES (2), (34), (35): Xaa is C or S

SEQ ID NO: 38382 - protein, 36 aa, Artificial Sequence; identical to SEQ ID NO: 13502
  GFR-binding peptide
  MOD_RES (1), (3), (35), (36): Xaa is C or S

SEQ ID NO: 38383 - protein, 36 aa, Artificial Sequence; identical to SEQ ID NO: 13503
  GFR-binding peptide
  MOD_RES (33), (34): Xaa is C or S
  MOD_RES (11), (12), (13), (14), (15): Xaa is A or G
  MOD_RES (16), (17), (18), (19): Xaa is A or G or is absent

SEQ ID NO: 38384 - protein, 35 aa, Artificial Sequence; identical to SEQ ID NO: 13504
  GFR-binding peptide
  MOD_RES (1), (33), (34): Xaa is C or S

SEQ ID NO: 38385 - protein, 42 aa, Artificial Sequence; identical to SEQ ID NO: 13505
  GFR-binding peptide
  MOD_RES (2), (4), (37), (38): Xaa is C or S
  MOD_RES (15), (16), (17), (18), (19): Xaa is A or G
  MOD_RES (20), (21), (22), (23): Xaa is A or G or is absent

SEQ ID NO: 38386 - protein, 37 aa, Artificial Sequence; identical to SEQ ID NO: 11564
  GFR-binding peptide
  MOD_RES (1), (3), (35), (36): Xaa is C or S

SEQ ID NO: 38387 - protein, 30 aa, Artificial Sequence; identical to SEQ ID NO: 6091
  GFR-binding peptide

SEQ ID NO: 38388 - protein, 32 aa, Artificial Sequence; identical to SEQ ID NO: 11566
  GFR-binding peptide
  MOD_RES (11), (12), (13), (14), (15): Xaa is A or G
  MOD_RES (16), (17), (18), (19): Xaa is A or G or is absent

SEQ ID NO: 38389 - protein, 37 aa, Artificial Sequence; identical to SEQ ID NO: 11567
  GFR-binding peptide
  MOD_RES (2), (33), (34): Xaa is C or S

SEQ ID NO: 38390 - protein, 31 aa, Artificial Sequence; identical to SEQ ID NO: 6093
  GFR-binding peptide
  MOD_RES (31), (31): Xaa is C or S

SEQ ID NO: 38391 - protein, 39 aa, Artificial Sequence; identical to SEQ ID NO: 13508
  GFR-binding peptide
  MOD_RES (2), (35), (36): Xaa is C or S
  MOD_RES (13), (14), (15), (16), (17): Xaa is A or G
  MOD_RES (18), (19), (20), (21): Xaa is A or G or is absent

SEQ ID NO: 38392 - protein, 37 aa, Artificial Sequence; identical to SEQ ID NO: 13509
  GFR-binding peptide
  MOD_RES (32), (33): Xaa is C or S

SEQ ID NO: 38393 - protein, 34 aa, Artificial Sequence; identical to SEQ ID NO: 13510
  GFR-binding peptide
  MOD_RES (1), (3): Xaa is C or S

SEQ ID NO: 38394 - protein, 42 aa, Artificial Sequence; identical to SEQ ID NO: 13511
  GFR-binding peptide
  MOD_RES (2), (4), (38), (39): Xaa is C or S
  MOD_RES (16), (17), (18), (19), (20): Xaa is A or G
  MOD_RES (21), (22), (23), (24): Xaa is A or G or is absent

SEQ ID NO: 38395 - protein, 33 aa, Artificial Sequence; identical to SEQ ID NO: 11568
  GFR-binding peptide
  MOD_RES (33), (33): Xaa is C or S
  MOD_RES (11), (12), (13), (14), (15): Xaa is A or G
  MOD_RES (16), (17), (18), (19): Xaa is A or G or is absent

SEQ ID NO: 38396 - protein, 33 aa, Artificial Sequence
  GFR-binding peptide
  MOD_RES (33), (33): Xaa is C or S
  MOD_RES (11), (12), (13), (14), (15): Xaa is A or G
  MOD_RES (16), (17), (18), (19): Xaa is A or G or is absent
SKVIMNSLQEXXXXXXXXXYYLITLPELDQSVX

SEQ ID NO: 38397 - protein, 37 aa, Artificial Sequence; identical to SEQ ID NO: 13512
  GFR-binding peptide
  MOD_RES (2), (4), (36): Xaa is C or S

SEQ ID NO: 38398 - protein, 40 aa, Artificial Sequence; identical to SEQ ID NO: 4150
  GFR-binding peptide
  MOD_RES (1), (34), (35): Xaa is C or S
  MOD_RES (12), (13), (14), (15), (16): Xaa is A or G
  MOD_RES (17), (18), (19), (20): Xaa is A or G or is absent

SEQ ID NO: 38399 - protein, 33 aa, Artificial Sequence; identical to SEQ ID NO: 11570
  GFR-binding peptide
  MOD_RES (33), (33): Xaa is C or S
  MOD_RES (11), (12), (13), (14), (15): Xaa is A or G
  MOD_RES (16), (17), (18), (19): Xaa is A or G or is absent

SEQ ID NO: 38400 - protein, 38 aa, Artificial Sequence; identical to SEQ ID NO: 11571
  GFR-binding peptide
  MOD_RES (2), (4), (35), (36): Xaa is C or S

SEQ ID NO: 38401 - protein, 40 aa, Artificial Sequence; identical to SEQ ID NO: 13513
  GFR-binding peptide
  MOD_RES (1), (3), (37), (38): Xaa is C or S
  MOD_RES (15), (16), (17), (18), (19): Xaa is A or G
  MOD_RES (20), (21), (22), (23): Xaa is A or G or is absent

SEQ ID NO: 38402 - protein, 33 aa, Artificial Sequence; identical to SEQ ID NO: 13514
  GFR-binding peptide
  MOD_RES (1), (32), (33): Xaa is C or S

SEQ ID NO: 38403 - protein, 37 aa, Artificial Sequence; identical to SEQ ID NO: 13515
  GFR-binding peptide
  MOD_RES (2), (34): Xaa is C or S

SEQ ID NO: 38404 - protein, 33 aa, Artificial Sequence; identical to SEQ ID NO: 6105
  GFR-binding peptide
  MOD_RES (1), (3): Xaa is C or S

SEQ ID NO: 38405 - protein, 39 aa, Artificial Sequence; identical to SEQ ID NO: 13517
  GFR-binding peptide
  MOD_RES (2), (33), (34): Xaa is C or S

SEQ ID NO: 38406 - protein, 39 aa, Artificial Sequence; identical to SEQ ID NO: 6107
  GFR-binding peptide
  MOD_RES (33), (34): Xaa is C or S
  MOD_RES (11), (12), (13), (14), (15): Xaa is A or G
  MOD_RES (16), (17), (18), (19): Xaa is A or G or is absent

SEQ ID NO: 38407 - protein, 39 aa, Artificial Sequence; identical to SEQ ID NO: 11572
  GFR-binding peptide
  MOD_RES (34), (34): Xaa is C or S
  MOD_RES (12), (13), (14), (15), (16): Xaa is A or G
  MOD_RES (17), (18), (19), (20): Xaa is A or G or is absent

SEQ ID NO: 38408 - protein, 35 aa, Artificial Sequence; identical to SEQ ID NO: 6108
  GFR-binding peptide
  MOD_RES (1), (3), (35): Xaa is C or S

SEQ ID NO: 38409 - protein, 40 aa, Artificial Sequence; identical to SEQ ID NO: 6109
  GFR-binding peptide
  MOD_RES (2), (35), (36): Xaa is C or S
  MOD_RES (13), (14), (15), (16), (17): Xaa is A or G
  MOD_RES (18), (19), (20), (21): Xaa is A or G or is absent

SEQ ID NO: 38410 - protein, 43 aa, Artificial Sequence; identical to SEQ ID NO: 13521
  GFR-binding peptide
  MOD_RES (2), (4), (37), (38): Xaa is C or S
  MOD_RES (15), (16), (17), (18), (19): Xaa is A or G
  MOD_RES (20), (21), (22), (23): Xaa is A or G or is absent

SEQ ID NO: 38411 - protein, 35 aa, Artificial Sequence; identical to SEQ ID NO: 13522
  GFR-binding peptide
  MOD_RES (2), (2): Xaa is C or S
  MOD_RES (14), (15), (16), (17), (18): Xaa is A or G
  MOD_RES (19), (20), (21), (22): Xaa is A or G or is absent

SEQ ID NO: 38412 - protein, 33 aa, Artificial Sequence; identical to SEQ ID NO: 4158
  GFR-binding peptide
  MOD_RES (31), (32): Xaa is C or S

SEQ ID NO: 38413 - protein, 40 aa, Artificial Sequence; identical to SEQ ID NO: 11576
  GFR-binding peptide
  MOD_RES (2), (4), (37), (38): Xaa is C or S
  MOD_RES (15), (16), (17), (18), (19): Xaa is A or G
  MOD_RES (20), (21), (22), (23): Xaa is A or G or is absent

SEQ ID NO: 38414 - protein, 35 aa, Artificial Sequence; identical to SEQ ID NO: 13524
  GFR-binding peptide
  MOD_RES (31), (32): Xaa is C or S

SEQ ID NO: 38415 - protein, 37 aa, Artificial Sequence; identical to SEQ ID NO: 13526
  GFR-binding peptide
  MOD_RES (2), (4), (36), (37): Xaa is C or S

SEQ ID NO: 38416 - protein, 34 aa, Artificial Sequence; identical to SEQ ID NO: 13527
  GFR-binding peptide
  MOD_RES (33), (34): Xaa is C or S
  MOD_RES (11), (12), (13), (14), (15): Xaa is A or G
  MOD_RES (16), (17), (18), (19): Xaa is A or G or is absent

SEQ ID NO: 38417 - protein, 39 aa, Artificial Sequence; identical to SEQ ID NO: 11578
  GFR-binding peptide
  MOD_RES (2), (4), (37), (38): Xaa is C or S
  MOD_RES (15), (16), (17), (18), (19): Xaa is A or G
  MOD_RES (20), (21), (22), (23): Xaa is A or G or is absent

SEQ ID NO: 38418 - protein, 35 aa, Artificial Sequence; identical to SEQ ID NO: 11579
  GFR-binding peptide
  MOD_RES (33), (34): Xaa is C or S
  MOD_RES (11), (12), (13), (14), (15): Xaa is A or G
  MOD_RES (16), (17), (18), (19): Xaa is A or G or is absent

SEQ ID NO: 38419 - protein, 34 aa, Artificial Sequence; identical to SEQ ID NO: 6120
  GFR-binding peptide
  MOD_RES (32), (33): Xaa is C or S

SEQ ID NO: 38420 - protein, 38 aa, Artificial Sequence; identical to SEQ ID NO: 11582
  GFR-binding peptide
  MOD_RES (2), (4), (36), (37): Xaa is C or S

SEQ ID NO: 38421 - protein, 37 aa, Artificial Sequence; identical to SEQ ID NO: 11583
  GFR-binding peptide
  MOD_RES (2), (33), (34): Xaa is C or S

SEQ ID NO: 38422 - protein, 35 aa, Artificial Sequence; identical to SEQ ID NO: 13529
  GFR-binding peptide
  MOD_RES (2), (34), (35): Xaa is C or S

SEQ ID NO: 38423 - protein, 38 aa, Artificial Sequence; identical to SEQ ID NO: 13530
  GFR-binding peptide
  MOD_RES (1), (3), (35), (36): Xaa is C or S

SEQ ID NO: 38424 - protein, 36 aa, Artificial Sequence; identical to SEQ ID NO: 13532
  GFR-binding peptide
  MOD_RES (33), (33): Xaa is C or S
  MOD_RES (11), (12), (13), (14), (15): Xaa is A or G
  MOD_RES (16), (17), (18), (19): Xaa is A or G or is absent

SEQ ID NO: 38425 - protein, 37 aa, Artificial Sequence; identical to SEQ ID NO: 6123
  GFR-binding peptide
  MOD_RES (1), (33), (34): Xaa is C or S

SEQ ID NO: 38426 - protein, 39 aa, Artificial Sequence; identical to SEQ ID NO: 11584
  GFR-binding peptide
  MOD_RES (2), (4), (36): Xaa is C or S

SEQ ID NO: 38427 - protein, 42 aa, Artificial Sequence; identical to SEQ ID NO: 13534
  GFR-binding peptide
  MOD_RES (2), (36), (37): Xaa is C or S
  MOD_RES (14), (15), (16), (17), (18): Xaa is A or G
  MOD_RES (19), (20), (21), (22): Xaa is A or G or is absent

SEQ ID NO: 38428 - protein, 40 aa, Artificial Sequence; identical to SEQ ID NO: 11585
  GFR-binding peptide
  MOD_RES (1), (3), (37), (38): Xaa is C or S
  MOD_RES (15), (16), (17), (18), (19): Xaa is A or G
  MOD_RES (20), (21), (22), (23): Xaa is A or G or is absent

SEQ ID NO: 38429 - protein, 34 aa, Artificial Sequence; identical to SEQ ID NO: 6127
  GFR-binding peptide
  MOD_RES (33), (34): Xaa is C or S
  MOD_RES (11), (12), (13), (14), (15): Xaa is A or G
  MOD_RES (16), (17), (18), (19): Xaa is A or G or is absent

SEQ ID NO: 38430 - protein, 38 aa, Artificial Sequence; identical to SEQ ID NO: 4174
  GFR-binding peptide
  MOD_RES (2), (4), (38): Xaa is C or S
  MOD_RES (16), (17), (18), (19), (20): Xaa is A or G
  MOD_RES (21), (22), (23), (24): Xaa is A or G or is absent

SEQ ID NO: 38431 - protein, 38 aa, Artificial Sequence; identical to SEQ ID NO: 11588
  GFR-binding peptide
  MOD_RES (1), (3), (36), (37): Xaa is C or S
  MOD_RES (14), (15), (16), (17), (18): Xaa is A or G
  MOD_RES (19), (20), (21), (22): Xaa is A or G or is absent

SEQ ID NO: 38432 - protein, 34 aa, Artificial Sequence; identical to SEQ ID NO: 11589
  GFR-binding peptide
  MOD_RES (34), (34): Xaa is C or S
  MOD_RES (12), (13), (14), (15), (16): Xaa is A or G
  MOD_RES (17), (18), (19), (20): Xaa is A or G or is absent

SEQ ID NO: 38433 - protein, 34 aa, Artificial Sequence; identical to SEQ ID NO: 11591
  GFR-binding peptide
  MOD_RES (1), (32), (33): Xaa is C or S

SEQ ID NO: 38434 - protein, 41 aa, Artificial Sequence; identical to SEQ ID NO: 11593
  GFR-binding peptide
  MOD_RES (2), (4), (36): Xaa is C or S

SEQ ID NO: 38435 - protein, 36 aa, Artificial Sequence; identical to SEQ ID NO: 11594
  GFR-binding peptide
  MOD_RES (2), (4), (35), (36): Xaa is C or S

SEQ ID NO: 38436 - protein, 34 aa, Artificial Sequence; identical to SEQ ID NO: 11596
  GFR-binding peptide
  MOD_RES (1), (1): Xaa is C or S
  MOD_RES (13), (14), (15), (16), (17): Xaa is A or G
  MOD_RES (18), (19), (20), (21): Xaa is A or G or is absent

SEQ ID NO: 38437 - protein, 40 aa, Artificial Sequence; identical to SEQ ID NO: 6134
  GFR-binding peptide
  MOD_RES (2), (34), (35): Xaa is C or S

SEQ ID NO: 38438 - protein, 35 aa, Artificial Sequence; identical to SEQ ID NO: 4183
  GFR-binding peptide
  MOD_RES (1), (33), (34): Xaa is C or S

SEQ ID NO: 38439 - protein, 36 aa, Artificial Sequence; identical to SEQ ID NO: 13538
  GFR-binding peptide
  MOD_RES (34), (35): Xaa is C or S
  MOD_RES (12), (13), (14), (15), (16): Xaa is A or G
  MOD_RES (17), (18), (19), (20): Xaa is A or G or is absent

SEQ ID NO: 38440 - protein, 43 aa, Artificial Sequence; identical to SEQ ID NO: 13539
  GFR-binding peptide
  MOD_RES (2), (4), (38), (39): Xaa is C or S
  MOD_RES (16), (17), (18), (19), (20): Xaa is A or G
  MOD_RES (21), (22), (23), (24): Xaa is A or G or is absent

SEQ ID NO: 38441 - protein, 37 aa, Artificial Sequence; identical to SEQ ID NO: 13541
  GFR-binding peptide
  MOD_RES (1), (35): Xaa is C or S
  MOD_RES (13), (14), (15), (16), (17): Xaa is A or G
  MOD_RES (18), (19), (20), (21): Xaa is A or G or is absent

SEQ ID NO: 38442 - protein, 36 aa, Artificial Sequence; identical to SEQ ID NO: 11599
  GFR-binding peptide
  MOD_RES (32), (33): Xaa is C or S

SEQ ID NO: 38443 - protein, 41 aa, Artificial Sequence; identical to SEQ ID NO: 13542
  GFR-binding peptide
  MOD_RES (2), (4), (37), (38): Xaa is C or S
  MOD_RES (15), (16), (17), (18), (19): Xaa is A or G
  MOD_RES (20), (21), (22), (23): Xaa is A or G or is absent

SEQ ID NO: 38444 - protein, 36 aa, Artificial Sequence; identical to SEQ ID NO: 13544
  GFR-binding peptide
  MOD_RES (1), (35), (36): Xaa is C or S
  MOD_RES (13), (14), (15), (16), (17): Xaa is A or G
  MOD_RES (18), (19), (20), (21): Xaa is A or G or is absent

SEQ ID NO: 38445 - protein, 38 aa, Artificial Sequence; identical to SEQ ID NO: 4186
  GFR-binding peptide
  MOD_RES (1), (32), (33): Xaa is C or S

SEQ ID NO: 38446 - protein, 37 aa, Artificial Sequence; identical to SEQ ID NO: 13545
  GFR-binding peptide
  MOD_RES (33), (34): Xaa is C or S
  MOD_RES (11), (12), (13), (14), (15): Xaa is A or G
  MOD_RES (16), (17), (18), (19): Xaa is A or G or is absent

SEQ ID NO: 38447 - protein, 40 aa, Artificial Sequence; identical to SEQ ID NO: 11601
  GFR-binding peptide
  MOD_RES (1), (35), (36): Xaa is C or S
  MOD_RES (13), (14), (15), (16), (17): Xaa is A or G
  MOD_RES (18), (19), (20), (21): Xaa is A or G or is absent

SEQ ID NO: 38448 - protein, 34 aa, Artificial Sequence; identical to SEQ ID NO: 4189
  GFR-binding peptide
  MOD_RES (32), (33): Xaa is C or S

SEQ ID NO: 38449 - protein, 36 aa, Artificial Sequence; identical to SEQ ID NO: 13546
  GFR-binding peptide
  MOD_RES (33), (34): Xaa is C or S
  MOD_RES (11), (12), (13), (14), (15): Xaa is A or G
  MOD_RES (16), (17), (18), (19): Xaa is A or G or is absent

SEQ ID NO: 38450 - protein, 40 aa, Artificial Sequence; identical to SEQ ID NO: 6144
  GFR-binding peptide
  MOD_RES (1), (3), (36), (37): Xaa is C or S
  MOD_RES (14), (15), (16), (17), (18): Xaa is A or G
  MOD_RES (19), (20), (21), (22): Xaa is A or G or is absent

SEQ ID NO: 38451 - protein, 39 aa, Artificial Sequence; identical to SEQ ID NO: 13548
  GFR-binding peptide
  MOD_RES (2), (35), (36): Xaa is C or S
  MOD_RES (13), (14), (15), (16), (17): Xaa is A or G
  MOD_RES (18), (19), (20), (21): Xaa is A or G or is absent

SEQ ID NO: 38452 - protein, 39 aa, Artificial Sequence; identical to SEQ ID NO: 13550
  GFR-binding peptide
  MOD_RES (1), (33), (34): Xaa is C or S

SEQ ID NO: 38453 - protein, 35 aa, Artificial Sequence; identical to SEQ ID NO: 11604
  GFR-binding peptide
  MOD_RES (2), (2): Xaa is C or S
  MOD_RES (14), (15), (16), (17), (18): Xaa is A or G
  MOD_RES (19), (20), (21), (22): Xaa is A or G or is absent

SEQ ID NO: 38454 - protein, 36 aa, Artificial Sequence; identical to SEQ ID NO: 13552
  GFR-binding peptide
  MOD_RES (2), (4), (35), (36): Xaa is C or S

SEQ ID NO: 38455 - protein, 36 aa, Artificial Sequence; identical to SEQ ID NO: 11605
  GFR-binding peptide
  MOD_RES (1), (3), (35), (36): Xaa is C or S

SEQ ID NO: 38456 - protein, 34 aa, Artificial Sequence; identical to SEQ ID NO: 11606
  GFR-binding peptide
  MOD_RES (2), (34): Xaa is C or S

SEQ ID NO: 38457 - protein, 35 aa, Artificial Sequence; identical to SEQ ID NO: 11608
  GFR-binding peptide
  MOD_RES (34), (35): Xaa is C or S
  MOD_RES (12), (13), (14), (15), (16): Xaa is A or G
  MOD_RES (17), (18), (19), (20): Xaa is A or G or is absent

SEQ ID NO: 38458 - protein, 38 aa, Artificial Sequence; identical to SEQ ID NO: 13555
  GFR-binding peptide
  MOD_RES (2), (36), (37): Xaa is C or S
  MOD_RES (14), (15), (16), (17), (18): Xaa is A or G
  MOD_RES (19), (20), (21), (22): Xaa is A or G or is absent

SEQ ID NO: 38459 - protein, 37 aa, Artificial Sequence; identical to SEQ ID NO: 11609
  GFR-binding peptide
  MOD_RES (2), (4), (37): Xaa is C or S
  MOD_RES (15), (16), (17), (18), (19): Xaa is A or G
  MOD_RES (20), (21), (22), (23): Xaa is A or G or is absent

SEQ ID NO: 38460 - protein, 35 aa, Artificial Sequence; identical to SEQ ID NO: 11610
  GFR-binding peptide
  MOD_RES (1), (35): Xaa is C or S
  MOD_RES (13), (14), (15), (16), (17): Xaa is A or G
  MOD_RES (18), (19), (20), (21): Xaa is A or G or is absent

SEQ ID NO: 38461 - protein, 38 aa, Artificial Sequence; identical to SEQ ID NO: 6159
  GFR-binding peptide
  MOD_RES (2), (4), (38): Xaa is C or S
  MOD_RES (16), (17), (18), (19), (20): Xaa is A or G
  MOD_RES (21), (22), (23), (24): Xaa is A or G or is absent

SEQ ID NO: 38462 - protein, 41 aa, Artificial Sequence; identical to SEQ ID NO: 4201
  GFR-binding peptide
  MOD_RES (2), (4), (35), (36): Xaa is C or S

SEQ ID NO: 38463 - protein, 32 aa, Artificial Sequence; identical to SEQ ID NO: 4202
  GFR-binding peptide
  MOD_RES (11), (12), (13), (14), (15): Xaa is A or G
  MOD_RES (16), (17), (18), (19): Xaa is A or G or is absent

SEQ ID NO: 38464 - protein, 32 aa, Artificial Sequence; identical to SEQ ID NO: 13558
  GFR-binding peptide
  MOD_RES (32), (32): Xaa is C or S

SEQ ID NO: 38465 - protein, 35 aa, Artificial Sequence; identical to SEQ ID NO: 11613
  GFR-binding peptide
  MOD_RES (33), (34): Xaa is C or S
  MOD_RES (11), (12), (13), (14), (15): Xaa is A or G
  MOD_RES (16), (17), (18), (19): Xaa is A or G or is absent

SEQ ID NO: 38466 - protein, 39 aa, Artificial Sequence; identical to SEQ ID NO: 11614
  GFR-binding peptide
  MOD_RES (33), (34): Xaa is C or S
  MOD_RES (11), (12), (13), (14), (15): Xaa is A or G
  MOD_RES (16), (17), (18), (19): Xaa is A or G or is absent

SEQ ID NO: 38467 - protein, 39 aa, Artificial Sequence; identical to SEQ ID NO: 11615
  GFR-binding peptide
  MOD_RES (33), (34): Xaa is C or S
  MOD_RES (11), (12), (13), (14), (15): Xaa is A or G
  MOD_RES (16), (17), (18), (19): Xaa is A or G or is absent

SEQ ID NO: 38468 - protein, 38 aa, Artificial Sequence; identical to SEQ ID NO: 4207
  GFR-binding peptide
  MOD_RES (2), (36), (37): Xaa is C or S
  MOD_RES (14), (15), (16), (17), (18): Xaa is A or G
  MOD_RES (19), (20), (21), (22): Xaa is A or G or is absent

SEQ ID NO: 38469 - protein, 41 aa, Artificial Sequence; identical to SEQ ID NO: 13559
  GFR-binding peptide
  MOD_RES (2), (4), (38): Xaa is C or S
  MOD_RES (16), (17), (18), (19), (20): Xaa is A or G
  MOD_RES (21), (22), (23), (24): Xaa is A or G or is absent

SEQ ID NO: 38470 - protein, 41 aa, Artificial Sequence; identical to SEQ ID NO: 13560
  GFR-binding peptide
  MOD_RES (2), (36), (37): Xaa is C or S
  MOD_RES (14), (15), (16), (17), (18): Xaa is A or G
  MOD_RES (19), (20), (21), (22): Xaa is A or G or is absent

SEQ ID NO: 38471 - protein, 35 aa, Artificial Sequence; identical to SEQ ID NO: 11617
  GFR-binding peptide
  MOD_RES (34), (35): Xaa is C or S
  MOD_RES (12), (13), (14), (15), (16): Xaa is A or G
  MOD_RES (17), (18), (19), (20): Xaa is A or G or is absent

SEQ ID NO: 38472 - protein, 39 aa, Artificial Sequence; identical to SEQ ID NO: 11618
  GFR-binding peptide
  MOD_RES (1), (3), (37), (38): Xaa is C or S
  MOD_RES (15), (16), (17), (18), (19): Xaa is A or G
  MOD_RES (20), (21), (22), (23): Xaa is A or G or is absent

SEQ ID NO: 38473 - protein, 33 aa, Artificial Sequence; identical to SEQ ID NO: 13561
  GFR-binding peptide
  MOD_RES (32), (33): Xaa is C or S

SEQ ID NO: 38474 - protein, 32 aa, Artificial Sequence; identical to SEQ ID NO: 11619
  GFR-binding peptide
  MOD_RES (31), (32): Xaa is C or S

SEQ ID NO: 38475 - protein, 38 aa, Artificial Sequence; identical to SEQ ID NO: 11620
  GFR-binding peptide
  MOD_RES (2), (35), (36): Xaa is C or S
  MOD_RES (13), (14), (15), (16), (17): Xaa is A or G
  MOD_RES (18), (19), (20), (21): Xaa is A or G or is absent

SEQ ID NO: 38476 - protein, 35 aa, Artificial Sequence; identical to SEQ ID NO: 11621
  GFR-binding peptide
  MOD_RES (1), (3), (35): Xaa is C or S

SEQ ID NO: 38477 - protein, 33 aa, Artificial Sequence; identical to SEQ ID NO: 4211
  GFR-binding peptide
  MOD_RES (33), (33): Xaa is C or S
  MOD_RES (11), (12), (13), (14), (15): Xaa is A or G
  MOD_RES (16), (17), (18), (19): Xaa is A or G or is absent

SEQ ID NO: 38478 - protein, 39 aa, Artificial Sequence; identical to SEQ ID NO: 11623
  GFR-binding peptide
  MOD_RES (2), (36), (37): Xaa is C or S
  MOD_RES (14), (15), (16), (17), (18): Xaa is A or G
  MOD_RES (19), (20), (21), (22): Xaa is A or G or is absent

SEQ ID NO: 38479 - protein, 34 aa, Artificial Sequence; identical to SEQ ID NO: 13562
  GFR-binding peptide
  MOD_RES (31), (32): Xaa is C or S

SEQ ID NO: 38480 - protein, 36 aa, Artificial Sequence; identical to SEQ ID NO: 11624
  GFR-binding peptide
  MOD_RES (1), (34), (35): Xaa is C or S
  MOD_RES (12), (13), (14), (15), (16): Xaa is A or G
  MOD_RES (17), (18), (19), (20): Xaa is A or G or is absent

SEQ ID NO: 38481 - protein, 36 aa, Artificial Sequence; identical to SEQ ID NO: 11625
  GFR-binding peptide
  MOD_RES (1), (3), (36): Xaa is C or S
  MOD_RES (14), (15), (16), (17), (18): Xaa is A or G
  MOD_RES (19), (20), (21), (22): Xaa is A or G or is absent

SEQ ID NO: 38482 - protein, 37 aa, Artificial Sequence; identical to SEQ ID NO: 4215
  GFR-binding peptide
  MOD_RES (1), (35), (36): Xaa is C or S
  MOD_RES (13), (14), (15), (16), (17): Xaa is A or G
  MOD_RES (18), (19), (20), (21): Xaa is A or G or is absent

SEQ ID NO: 38483 - protein, 37 aa, Artificial Sequence; identical to SEQ ID NO: 13563
  GFR-binding peptide
  MOD_RES (2), (4), (36), (37): Xaa is C or S

SEQ ID NO: 38484 - protein, 37 aa, Artificial Sequence; identical to SEQ ID NO: 11628
  GFR-binding peptide
  MOD_RES (2), (35), (36): Xaa is C or S
  MOD_RES (13), (14), (15), (16), (17): Xaa is A or G
  MOD_RES (18), (19), (20), (21): Xaa is A or G or is absent

SEQ ID NO: 38485 - protein, 39 aa, Artificial Sequence; identical to SEQ ID NO: 13567
  GFR-binding peptide
  MOD_RES (2), (4), (38), (39): Xaa is C or S
  MOD_RES (16), (17), (18), (19), (20): Xaa is A or G
  MOD_RES (21), (22), (23), (24): Xaa is A or G or is absent

SEQ ID NO: 38486 - protein, 31 aa, Artificial Sequence; identical to SEQ ID NO: 11629
  GFR-binding peptide
  MOD_RES (31), (31): Xaa is C or S

SEQ ID NO: 38487 - protein, 32 aa, Artificial Sequence; identical to SEQ ID NO: 4220
  GFR-binding peptide
  MOD_RES (1), (32): Xaa is C or S

SEQ ID NO: 38488 - protein, 40 aa, Artificial Sequence; identical to SEQ ID NO: 11631
  GFR-binding peptide
  MOD_RES (2), (36), (37): Xaa is C or S
  MOD_RES (14), (15), (16), (17), (18): Xaa is A or G
  MOD_RES (19), (20), (21), (22): Xaa is A or G or is absent

SEQ ID NO: 38489 - protein, 35 aa, Artificial Sequence; identical to SEQ ID NO: 6174
  GFR-binding peptide
  MOD_RES (2), (4), (35): Xaa is C or S

SEQ ID NO: 38490 - protein, 31 aa, Artificial Sequence; identical to SEQ ID NO: 4221
  GFR-binding peptide
  MOD_RES (1), (1): Xaa is C or S

SEQ ID NO: 38491 - protein, 38 aa, Artificial Sequence; identical to SEQ ID NO: 13569
  GFR-binding peptide
  MOD_RES (34), (34): Xaa is C or S
  MOD_RES (12), (13), (14), (15), (16): Xaa is A or G
  MOD_RES (17), (18), (19), (20): Xaa is A or G or is absent

SEQ ID NO: 38492 - protein, 37 aa, Artificial Sequence; identical to SEQ ID NO: 4223
  GFR-binding peptide
  MOD_RES (2), (36), (37): Xaa is C or S
  MOD_RES (14), (15), (16), (17), (18): Xaa is A or G
  MOD_RES (19), (20), (21), (22): Xaa is A or G or is absent

SEQ ID NO: 38493 - protein, 40 aa, Artificial Sequence; identical to SEQ ID NO: 11634
  GFR-binding peptide
  MOD_RES (2), (4), (36), (37): Xaa is C or S

SEQ ID NO: 38494 - protein, 35 aa, Artificial Sequence; identical to SEQ ID NO: 11635
  GFR-binding peptide
  MOD_RES (2), (34): Xaa is C or S

SEQ ID NO: 38495 - protein, 36 aa, Artificial Sequence; identical to SEQ ID NO: 11636
  GFR-binding peptide
  MOD_RES (2), (4): Xaa is C or S
  MOD_RES (15), (16), (17), (18), (19): Xaa is A or G
  MOD_RES (20), (21), (22), (23): Xaa is A or G or is absent

SEQ ID NO: 38496 - protein, 38 aa, Artificial Sequence; identical to SEQ ID NO: 13570
  GFR-binding peptide
  MOD_RES (1), (3), (35), (36): Xaa is C or S

SEQ ID NO: 38497 - protein, 33 aa, Artificial Sequence; identical to SEQ ID NO: 6179
  GFR-binding peptide
  MOD_RES (31), (32): Xaa is C or S

SEQ ID NO: 38498 - protein, 40 aa, Artificial Sequence; identical to SEQ ID NO: 4226
  GFR-binding peptide
  MOD_RES (1), (3), (34), (35): Xaa is C or S

SEQ ID NO: 38499 - protein, 38 aa, Artificial Sequence; identical to SEQ ID NO: 6181
  GFR-binding peptide
  MOD_RES (6), (7): Xaa is C or S

SEQ ID NO: 38500 - protein, 42 aa, Artificial Sequence; identical to SEQ ID NO: 15261
  GFR-binding peptide
  MOD_RES (5), (6), (39), (41): Xaa is C or S
  MOD_RES (20), (21), (22), (23), (24): Xaa is A or G
  MOD_RES (25), (26), (27), (28): Xaa is A or G or is absent

SEQ ID NO: 38501 - protein, 38 aa, Artificial Sequence; identical to SEQ ID NO: 7973
  GFR-binding peptide
  MOD_RES (4), (5), (38): Xaa is C or S
  MOD_RES (19), (20), (21), (22), (23): Xaa is A or G
  MOD_RES (24), (25), (26), (27): Xaa is A or G or is absent

SEQ ID NO: 38502 - protein, 36 aa, Artificial Sequence; identical to SEQ ID NO: 13576
  GFR-binding peptide
  MOD_RES (1), (33), (35): Xaa is C or S

SEQ ID NO: 38503 - protein, 42 aa, Artificial Sequence; identical to SEQ ID NO: 15263
  GFR-binding peptide
  MOD_RES (6), (7), (41): Xaa is C or S
  MOD_RES (21), (22), (23), (24), (25): Xaa is A or G
  MOD_RES (26), (27), (28), (29): Xaa is A or G or is absent

SEQ ID NO: 38504 - protein, 40 aa, Artificial Sequence; identical to SEQ ID NO: 15264
  GFR-binding peptide
  MOD_RES (3), (4), (37), (39): Xaa is C or S
  MOD_RES (18), (19), (20), (21), (22): Xaa is A or G
  MOD_RES (23), (24), (25), (26): Xaa is A or G or is absent

SEQ ID NO: 38505 - protein, 33 aa, Artificial Sequence; identical to SEQ ID NO: 6189
  GFR-binding peptide
  MOD_RES (32), (32): Xaa is C or S

SEQ ID NO: 38506 - protein, 39 aa, Artificial Sequence; identical to SEQ ID NO: 15265
  GFR-binding peptide
  MOD_RES (6), (7): Xaa is C or S
  MOD_RES (21), (22), (23), (24), (25): Xaa is A or G
  MOD_RES (26), (27), (28), (29): Xaa is A or G or is absent

SEQ ID NO: 38507 - protein, 37 aa, Artificial Sequence; identical to SEQ ID NO: 7974
  GFR-binding peptide
  MOD_RES (2), (3), (34), (36): Xaa is C or S

SEQ ID NO: 38508 - protein, 35 aa, Artificial Sequence; identical to SEQ ID NO: 13580
  GFR-binding peptide
  MOD_RES (2), (3), (35): Xaa is C or S

SEQ ID NO: 38509 - protein, 34 aa, Artificial Sequence; identical to SEQ ID NO: 13581
  GFR-binding peptide
  MOD_RES (1), (33): Xaa is C or S

SEQ ID NO: 38510 - protein, 35 aa, Artificial Sequence; identical to SEQ ID NO: 15268
  GFR-binding peptide
  MOD_RES (34), (34): Xaa is C or S
  MOD_RES (14), (15), (16), (17), (18): Xaa is A or G
  MOD_RES (19), (20), (21), (22): Xaa is A or G or is absent

SEQ ID NO: 38511 - protein, 34 aa, Artificial Sequence; identical to SEQ ID NO: 15269
  GFR-binding peptide
  MOD_RES (2), (3), (34): Xaa is C or S

SEQ ID NO: 38512 - protein, 35 aa, Artificial Sequence; identical to SEQ ID NO: 15270
  GFR-binding peptide
  MOD_RES (33), (35): Xaa is C or S
  MOD_RES (14), (15), (16), (17), (18): Xaa is A or G
  MOD_RES (19), (20), (21), (22): Xaa is A or G or is absent

SEQ ID NO: 38513 - protein, 34 aa, Artificial Sequence
  GFR-binding peptide
  MOD_RES (1), (34): Xaa is C or S
  MOD_RES (15), (16), (17), (18), (19): Xaa is A or G
  MOD_RES (20), (21), (22), (23): Xaa is A or G or is absent
XVSQDLEPLTILYYXXXXXXXXXEQLSNMIVKSX

SEQ ID NO: 38514 - protein, 40 aa, Artificial Sequence; identical to SEQ ID NO: 13582
  GFR-binding peptide
  MOD_RES (6), (7), (39): Xaa is C or S

SEQ ID NO: 38515 - protein, 39 aa, Artificial Sequence; identical to SEQ ID NO: 13584
  GFR-binding peptide
  MOD_RES (2), (3), (37), (39): Xaa is C or S
  MOD_RES (17), (18), (19), (20), (21): Xaa is A or G
  MOD_RES (22), (23), (24), (25): Xaa is A or G or is absent

SEQ ID NO: 38516 - protein, 39 aa, Artificial Sequence; identical to SEQ ID NO: 15271
  GFR-binding peptide
  MOD_RES (6), (7), (38): Xaa is C or S

SEQ ID NO: 38517 - protein, 42 aa, Artificial Sequence; identical to SEQ ID NO: 7977
  GFR-binding peptide
  MOD_RES (5), (6), (39), (41): Xaa is C or S
  MOD_RES (20), (21), (22), (23), (24): Xaa is A or G
  MOD_RES (25), (26), (27), (28): Xaa is A or G or is absent

SEQ ID NO: 38518 - protein, 36 aa, Artificial Sequence; identical to SEQ ID NO: 15273
  GFR-binding peptide
  MOD_RES (6), (6): Xaa is C or S

SEQ ID NO: 38519 - protein, 35 aa, Artificial Sequence; identical to SEQ ID NO: 15274
  GFR-binding peptide
  MOD_RES (1), (34): Xaa is C or S
  MOD_RES (15), (16), (17), (18), (19): Xaa is A or G
  MOD_RES (20), (21), (22), (23): Xaa is A or G or is absent

SEQ ID NO: 38520 - protein, 35 aa, Artificial Sequence; identical to SEQ ID NO: 13585
  GFR-binding peptide
  MOD_RES (2), (3), (35): Xaa is C or S

SEQ ID NO: 38521 - protein, 36 aa, Artificial Sequence; identical to SEQ ID NO: 13586
  GFR-binding peptide
  MOD_RES (1), (2), (36): Xaa is C or S
  MOD_RES (16), (17), (18), (19), (20): Xaa is A or G
  MOD_RES (21), (22), (23), (24): Xaa is A or G or is absent

SEQ ID NO: 38522 - protein, 41 aa, Artificial Sequence; identical to SEQ ID NO: 13587
  GFR-binding peptide
  MOD_RES (4), (5), (39), (41): Xaa is C or S
  MOD_RES (19), (20), (21), (22), (23): Xaa is A or G
  MOD_RES (24), (25), (26), (27): Xaa is A or G or is absent

SEQ ID NO: 38523 - protein, 41 aa, Artificial Sequence; identical to SEQ ID NO: 15276
  GFR-binding peptide
  MOD_RES (4), (5), (38), (40): Xaa is C or S
  MOD_RES (19), (20), (21), (22), (23): Xaa is A or G
  MOD_RES (24), (25), (26), (27): Xaa is A or G or is absent

SEQ ID NO: 38524 - protein, 35 aa, Artificial Sequence; identical to SEQ ID NO: 6199
  GFR-binding peptide
  MOD_RES (4), (5): Xaa is C or S

SEQ ID NO: 38525 - protein, 42 aa, Artificial Sequence; identical to SEQ ID NO: 13589
  GFR-binding peptide
  MOD_RES (6), (7), (40), (42): Xaa is C or S
  MOD_RES (21), (22), (23), (24), (25): Xaa is A or G
  MOD_RES (26), (27), (28), (29): Xaa is A or G or is absent

SEQ ID NO: 38526 - protein, 35 aa, Artificial Sequence; identical to SEQ ID NO: 15278
  GFR-binding peptide
  MOD_RES (1), (33), (35): Xaa is C or S

SEQ ID NO: 38527 - protein, 34 aa, Artificial Sequence; identical to SEQ ID NO: 15279
  GFR-binding peptide
  MOD_RES (2), (3): Xaa is C or S

SEQ ID NO: 38528 - protein, 35 aa, Artificial Sequence; identical to SEQ ID NO: 13590
  GFR-binding peptide
  MOD_RES (2), (3), (35): Xaa is C or S

SEQ ID NO: 38529 - protein, 33 aa, Artificial Sequence; identical to SEQ ID NO: 15280
  GFR-binding peptide
  MOD_RES (2), (3): Xaa is C or S

SEQ ID NO: 38530 - protein, 35 aa, Artificial Sequence; identical to SEQ ID NO: 13591
  GFR-binding peptide
  MOD_RES (1), (2), (34): Xaa is C or S

SEQ ID NO: 38531 - protein, 34 aa, Artificial Sequence; identical to SEQ ID NO: 15281
  GFR-binding peptide
  MOD_RES (2), (3), (34): Xaa is C or S

SEQ ID NO: 38532 - protein, 33 aa, Artificial Sequence; identical to SEQ ID NO: 13594
  GFR-binding peptide
  MOD_RES (14), (15), (16), (17), (18): Xaa is A or G
  MOD_RES (19), (20), (21), (22): Xaa is A or G or is absent

SEQ ID NO: 38533 - protein, 39 aa, Artificial Sequence; identical to SEQ ID NO: 6208
  GFR-binding peptide
  MOD_RES (4), (5), (37), (39): Xaa is C or S

SEQ ID NO: 38534 - protein, 35 aa, Artificial Sequence; identical to SEQ ID NO: 7994
  GFR-binding peptide
  MOD_RES (1), (32), (34): Xaa is C or S

SEQ ID NO: 38535 - protein, 39 aa, Artificial Sequence; identical to SEQ ID NO: 13598
  GFR-binding peptide
  MOD_RES (3), (37), (39): Xaa is C or S
  MOD_RES (17), (18), (19), (20), (21): Xaa is A or G
  MOD_RES (22), (23), (24), (25): Xaa is A or G or is absent

SEQ ID NO: 38536 - protein, 40 aa, Artificial Sequence; identical to SEQ ID NO: 15283
  GFR-binding peptide
  MOD_RES (5), (6), (40): Xaa is C or S
  MOD_RES (20), (21), (22), (23), (24): Xaa is A or G
  MOD_RES (25), (26), (27), (28): Xaa is A or G or is absent

SEQ ID NO: 38537 - protein, 32 aa, Artificial Sequence; identical to SEQ ID NO: 15284
  GFR-binding peptide
  MOD_RES (32), (32): Xaa is C or S

SEQ ID NO: 38538 - protein, 37 aa, Artificial Sequence; identical to SEQ ID NO: 13600
  GFR-binding peptide
  MOD_RES (3), (4), (37): Xaa is C or S
  MOD_RES (18), (19), (20), (21), (22): Xaa is A or G
  MOD_RES (23), (24), (25), (26): Xaa is A or G or is absent

SEQ ID NO: 38539 - protein, 36 aa, Artificial Sequence; identical to SEQ ID NO: 13601
  GFR-binding peptide
  MOD_RES (1), (35): Xaa is C or S
  MOD_RES (15), (16), (17), (18), (19): Xaa is A or G
  MOD_RES (20), (21), (22), (23): Xaa is A or G or is absent

SEQ ID NO: 38540 - protein, 39 aa, Artificial Sequence; identical to SEQ ID NO: 15285
  GFR-binding peptide
  MOD_RES (3), (4), (36), (38): Xaa is C or S

SEQ ID NO: 38541 - protein, 37 aa, Artificial Sequence; identical to SEQ ID NO: 13602
  GFR-binding peptide
  MOD_RES (5), (6): Xaa is C or S

SEQ ID NO: 38542 - protein, 38 aa, Artificial Sequence; identical to SEQ ID NO: 15286
  GFR-binding peptide
  MOD_RES (4), (5), (37): Xaa is C or S

SEQ ID NO: 38543 - protein, 33 aa, Artificial Sequence; identical to SEQ ID NO: 15287
  GFR-binding peptide
  MOD_RES (1), (1): Xaa is C or S
  MOD_RES (15), (16), (17), (18), (19): Xaa is A or G
  MOD_RES (20), (21), (22), (23): Xaa is A or G or is absent

SEQ ID NO: 38544 - protein, 41 aa, Artificial Sequence; identical to SEQ ID NO: 7999
  GFR-binding peptide
  MOD_RES (5), (6), (38), (40): Xaa is C or S

SEQ ID NO: 38545 - protein, 36 aa, Artificial Sequence; identical to SEQ ID NO: 13605
  GFR-binding peptide
  MOD_RES (3), (4): Xaa is C or S
  MOD_RES (18), (19), (20), (21), (22): Xaa is A or G
  MOD_RES (23), (24), (25), (26): Xaa is A or G or is absent

SEQ ID NO: 38546 - protein, 38 aa, Artificial Sequence; identical to SEQ ID NO: 15289
  GFR-binding peptide
  MOD_RES (3), (4), (38): Xaa is C or S
  MOD_RES (18), (19), (20), (21), (22): Xaa is A or G
  MOD_RES (23), (24), (25), (26): Xaa is A or G or is absent

SEQ ID NO: 38547 - protein, 35 aa, Artificial Sequence; identical to SEQ ID NO: 13606
  GFR-binding peptide
  MOD_RES (4), (5): Xaa is C or S

SEQ ID NO: 38548 - protein, 36 aa, Artificial Sequence; identical to SEQ ID NO: 15290
  GFR-binding peptide
  MOD_RES (2), (3), (34), (36): Xaa is C or S

SEQ ID NO: 38549 - protein, 41 aa, Artificial Sequence; identical to SEQ ID NO: 13607
  GFR-binding peptide
  MOD_RES (5), (6), (39), (41): Xaa is C or S
  MOD_RES (20), (21), (22), (23), (24): Xaa is A or G
  MOD_RES (25), (26), (27), (28): Xaa is A or G or is absent

SEQ ID NO: 38550 - protein, 43 aa, Artificial Sequence; identical to SEQ ID NO: 15291
  GFR-binding peptide
  MOD_RES (5), (6), (40), (42): Xaa is C or S
  MOD_RES (20), (21), (22), (23), (24): Xaa is A or G
  MOD_RES (25), (26), (27), (28): Xaa is A or G or is absent

SEQ ID NO: 38551 - protein, 37 aa, Artificial Sequence; identical to SEQ ID NO: 15292
  GFR-binding peptide
  MOD_RES (6), (6): Xaa is C or S

SEQ ID NO: 38552 - protein, 39 aa, Artificial Sequence; identical to SEQ ID NO: 13609
  GFR-binding peptide
  MOD_RES (3), (4), (37), (39): Xaa is C or S
  MOD_RES (18), (19), (20), (21), (22): Xaa is A or G
  MOD_RES (23), (24), (25), (26): Xaa is A or G or is absent

SEQ ID NO: 38553 - protein, 33 aa, Artificial Sequence; identical to SEQ ID NO: 13610
  GFR-binding peptide
  MOD_RES (32), (32): Xaa is C or S

SEQ ID NO: 38554 - protein, 37 aa, Artificial Sequence; identical to SEQ ID NO: 13611
  GFR-binding peptide
  MOD_RES (4), (5), (37): Xaa is C or S

SEQ ID NO: 38555 - protein, 36 aa, Artificial Sequence; identical to SEQ ID NO: 15293
  GFR-binding peptide
  MOD_RES (1), (2), (34), (36): Xaa is C or S

SEQ ID NO: 38556 - protein, 33 aa, Artificial Sequence; identical to SEQ ID NO: 15294
  GFR-binding peptide
  MOD_RES (1), (33): Xaa is C or S

SEQ ID NO: 38557 - protein, 35 aa, Artificial Sequence; identical to SEQ ID NO: 15295
  GFR-binding peptide
  MOD_RES (1), (2): Xaa is C or S
  MOD_RES (16), (17), (18), (19), (20): Xaa is A or G
  MOD_RES (21), (22), (23), (24): Xaa is A or G or is absent

SEQ ID NO: 38558 - protein, 35 aa, Artificial Sequence; identical to SEQ ID NO: 15296
  GFR-binding peptide
  MOD_RES (2), (3), (35): Xaa is C or S

SEQ ID NO: 38559 - protein, 39 aa, Artificial Sequence; identical to SEQ ID NO: 15298
  GFR-binding peptide
  MOD_RES (2), (3), (36), (38): Xaa is C or S
  MOD_RES (17), (18), (19), (20), (21): Xaa is A or G
  MOD_RES (22), (23), (24), (25): Xaa is A or G or is absent

SEQ ID NO: 38560 - protein, 37 aa, Artificial Sequence; identical to SEQ ID NO: 15299
  GFR-binding peptide
  MOD_RES (1), (34), (36): Xaa is C or S
  MOD_RES (15), (16), (17), (18), (19): Xaa is A or G
  MOD_RES (20), (21), (22), (23): Xaa is A or G or is absent

SEQ ID NO: 38561 - protein, 40 aa, Artificial Sequence; identical to SEQ ID NO: 15301
  GFR-binding peptide
  MOD_RES (4), (5), (37), (39): Xaa is C or S

SEQ ID NO: 38562 - protein, 37 aa, Artificial Sequence; identical to SEQ ID NO: 15302
  GFR-binding peptide
  MOD_RES (3), (4), (37): Xaa is C or S
  MOD_RES (18), (19), (20), (21), (22): Xaa is A or G
  MOD_RES (23), (24), (25), (26): Xaa is A or G or is absent

SEQ ID NO: 38563 - protein, 36 aa, Artificial Sequence; identical to SEQ ID NO: 15303
  GFR-binding peptide
  MOD_RES (1), (2), (34), (36): Xaa is C or S

SEQ ID NO: 38564 - protein, 36 aa, Artificial Sequence; identical to SEQ ID NO: 15304
  GFR-binding peptide
  MOD_RES (1), (2), (35): Xaa is C or S
  MOD_RES (16), (17), (18), (19), (20): Xaa is A or G
  MOD_RES (21), (22), (23), (24): Xaa is A or G or is absent

SEQ ID NO: 38565 - protein, 35 aa, Artificial Sequence; identical to SEQ ID NO: 15305
  GFR-binding peptide
  MOD_RES (2), (3): Xaa is C or S
  MOD_RES (17), (18), (19), (20), (21): Xaa is A or G
  MOD_RES (22), (23), (24), (25): Xaa is A or G or is absent

SEQ ID NO: 38566 - protein, 36 aa, Artificial Sequence; identical to SEQ ID NO: 13614
  GFR-binding peptide
  MOD_RES (34), (36): Xaa is C or S
  MOD_RES (14), (15), (16), (17), (18): Xaa is A or G
  MOD_RES (19), (20), (21), (22): Xaa is A or G or is absent

SEQ ID NO: 38567 - protein, 38 aa, Artificial Sequence; identical to SEQ ID NO: 15306
  GFR-binding peptide
  MOD_RES (4), (5), (37): Xaa is C or S

SEQ ID NO: 38568 - protein, 39 aa, Artificial Sequence; identical to SEQ ID NO: 15307
  GFR-binding peptide
  MOD_RES (6), (7), (38): Xaa is C or S

SEQ ID NO: 38569 - protein, 41 aa, Artificial Sequence; identical to SEQ ID NO: 15308
  GFR-binding peptide
  MOD_RES (3), (4), (38), (40): Xaa is C or S
  MOD_RES (18), (19), (20), (21), (22): Xaa is A or G
  MOD_RES (23), (24), (25), (26): Xaa is A or G or is absent

SEQ ID NO: 38570 - protein, 38 aa, Artificial Sequence; identical to SEQ ID NO: 13615
  GFR-binding peptide
  MOD_RES (1), (35), (37): Xaa is C or S
  MOD_RES (15), (16), (17), (18), (19): Xaa is A or G
  MOD_RES (20), (21), (22), (23): Xaa is A or G or is absent

SEQ ID NO: 38571 - protein, 40 aa, Artificial Sequence; identical to SEQ ID NO: 13616
  GFR-binding peptide
  MOD_RES (6), (7), (38), (40): Xaa is C or S

SEQ ID NO: 38572 - protein, 36 aa, Artificial Sequence; identical to SEQ ID NO: 15311
  GFR-binding peptide
  MOD_RES (3), (4), (35): Xaa is C or S

SEQ ID NO: 38573 - protein, 35 aa, Artificial Sequence; identical to SEQ ID NO: 13618
  GFR-binding peptide
  MOD_RES (32), (34): Xaa is C or S

SEQ ID NO: 38574 - protein, 36 aa, Artificial Sequence; identical to SEQ ID NO: 15312
  GFR-binding peptide
  MOD_RES (3), (4), (36): Xaa is C or S

SEQ ID NO: 38575 - protein, 34 aa, Artificial Sequence; identical to SEQ ID NO: 13620
  GFR-binding peptide
  MOD_RES (34), (34): Xaa is C or S
  MOD_RES (14), (15), (16), (17), (18): Xaa is A or G
  MOD_RES (19), (20), (21), (22): Xaa is A or G or is absent

SEQ ID NO: 38576 - protein, 38 aa, Artificial Sequence; identical to SEQ ID NO: 13621
  GFR-binding peptide
  MOD_RES (5), (6): Xaa is C or S
  MOD_RES (20), (21), (22), (23), (24): Xaa is A or G
  MOD_RES (25), (26), (27), (28): Xaa is A or G or is absent

SEQ ID NO: 38577 - protein, 34 aa, Artificial Sequence; identical to SEQ ID NO: 8019
  GFR-binding peptide
  MOD_RES (34), (34): Xaa is C or S
  MOD_RES (14), (15), (16), (17), (18): Xaa is A or G
  MOD_RES (19), (20), (21), (22): Xaa is A or G or is absent

SEQ ID NO: 38578 - protein, 31 aa, Artificial Sequence; identical to SEQ ID NO: 15316
  GFR-binding peptide
  MOD_RES (1), (1): Xaa is C or S

SEQ ID NO: 38579 - protein, 31 aa, Artificial Sequence; identical to SEQ ID NO: 13622
  GFR-binding peptide

SEQ ID NO: 38580 - protein, 36 aa, Artificial Sequence; identical to SEQ ID NO: 15317
  GFR-binding peptide
  MOD_RES (3), (4), (35): Xaa is C or S

SEQ ID NO: 38581 - protein, 40 aa, Artificial Sequence; identical to SEQ ID NO: 13623
  GFR-binding peptide
  MOD_RES (4), (5), (39): Xaa is C or S
  MOD_RES (19), (20), (21), (22), (23): Xaa is A or G
  MOD_RES (24), (25), (26), (27): Xaa is A or G or is absent

SEQ ID NO: 38582 - protein, 40 aa, Artificial Sequence; identical to SEQ ID NO: 15319
  GFR-binding peptide
  MOD_RES (4), (5), (37), (39): Xaa is C or S

SEQ ID NO: 38583 - protein, 32 aa, Artificial Sequence; identical to SEQ ID NO: 13625
  GFR-binding peptide
  MOD_RES (32), (32): Xaa is C or S

SEQ ID NO: 38584 - protein, 37 aa, Artificial Sequence; identical to SEQ ID NO: 15320
  GFR-binding peptide
  MOD_RES (2), (3), (37): Xaa is C or S
  MOD_RES (17), (18), (19), (20), (21): Xaa is A or G
  MOD_RES (22), (23), (24), (25): Xaa is A or G or is absent

SEQ ID NO: 38585 - protein, 41 aa, Artificial Sequence; identical to SEQ ID NO: 13626
  GFR-binding peptide
  MOD_RES (3), (4), (38), (40): Xaa is C or S
  MOD_RES (18), (19), (20), (21), (22): Xaa is A or G
  MOD_RES (23), (24), (25), (26): Xaa is A or G or is absent

SEQ ID NO: 38586 - protein, 39 aa, Artificial Sequence; identical to SEQ ID NO: 15321
  GFR-binding peptide
  MOD_RES (2), (3), (37), (39): Xaa is C or S
  MOD_RES (17), (18), (19), (20), (21): Xaa is A or G
  MOD_RES (22), (23), (24), (25): Xaa is A or G or is absent

SEQ ID NO: 38587 - protein, 33 aa, Artificial Sequence
  GFR-binding peptide
  MOD_RES (33), (33): Xaa is C or S
  MOD_RES (14), (15), (16), (17), (18): Xaa is A or G
  MOD_RES (19), (20), (21), (22): Xaa is A or G or is absent
VSQDLEPLTILYYXXXXXXXXXEQLSNMIVKSX

SEQ ID NO: 38588 - protein, 35 aa, Artificial Sequence; identical to SEQ ID NO: 13627
  GFR-binding peptide
  MOD_RES (4), (5): Xaa is C or S

SEQ ID NO: 38589 - protein, 42 aa, Artificial Sequence; identical to SEQ ID NO: 13629
  GFR-binding peptide
  MOD_RES (5), (6), (39), (41): Xaa is C or S
  MOD_RES (20), (21), (22), (23), (24): Xaa is A or G
  MOD_RES (25), (26), (27), (28): Xaa is A or G or is absent

SEQ ID NO: 38590 - protein, 36 aa, Artificial Sequence; identical to SEQ ID NO: 13630
  GFR-binding peptide
  MOD_RES (1), (34), (36): Xaa is C or S
  MOD_RES (15), (16), (17), (18), (19): Xaa is A or G
  MOD_RES (20), (21), (22), (23): Xaa is A or G or is absent

SEQ ID NO: 38591 - protein, 35 aa, Artificial Sequence; identical to SEQ ID NO: 15322
  GFR-binding peptide
  MOD_RES (1), (33), (35): Xaa is C or S

SEQ ID NO: 38592 - protein, 37 aa, Artificial Sequence; identical to SEQ ID NO: 13632
  GFR-binding peptide
  MOD_RES (1), (35), (37): Xaa is C or S
  MOD_RES (15), (16), (17), (18), (19): Xaa is A or G
  MOD_RES (20), (21), (22), (23): Xaa is A or G or is absent

SEQ ID NO: 38593 - protein, 37 aa, Artificial Sequence; identical to SEQ ID NO: 15324
  GFR-binding peptide
  MOD_RES (3), (4), (36): Xaa is C or S

SEQ ID NO: 38594 - protein, 35 aa, Artificial Sequence; identical to SEQ ID NO: 15325
  GFR-binding peptide
  MOD_RES (1), (2), (34): Xaa is C or S

SEQ ID NO: 38595 - protein, 36 aa, Artificial Sequence; identical to SEQ ID NO: 13633
  GFR-binding peptide
  MOD_RES (3), (4), (36): Xaa is C or S

SEQ ID NO: 38596 - protein, 37 aa, Artificial Sequence; identical to SEQ ID NO: 13634
  GFR-binding peptide
  MOD_RES (1), (2), (36): Xaa is C or S
  MOD_RES (16), (17), (18), (19), (20): Xaa is A or G
  MOD_RES (21), (22), (23), (24): Xaa is A or G or is absent

SEQ ID NO: 38597 - protein, 42 aa, Artificial Sequence; identical to SEQ ID NO: 15326
  GFR-binding peptide
  MOD_RES (6), (7), (39), (41): Xaa is C or S

SEQ ID NO: 38598 - protein, 39 aa, Artificial Sequence; identical to SEQ ID NO: 13636
  GFR-binding peptide
  MOD_RES (2), (36), (38): Xaa is C or S
  MOD_RES (16), (17), (18), (19), (20): Xaa is A or G
  MOD_RES (21), (22), (23), (24): Xaa is A or G or is absent

SEQ ID NO: 38599 - protein, 34 aa, Artificial Sequence; identical to SEQ ID NO: 15327
  GFR-binding peptide
  MOD_RES (34), (34): Xaa is C or S
  MOD_RES (14), (15), (16), (17), (18): Xaa is A or G
  MOD_RES (19), (20), (21), (22): Xaa is A or G or is absent

SEQ ID NO: 38600 - protein, 34 aa, Artificial Sequence; identical to SEQ ID NO: 6259
  GFR-binding peptide
  MOD_RES (1), (34): Xaa is C or S
  MOD_RES (15), (16), (17), (18), (19): Xaa is A or G
  MOD_RES (20), (21), (22), (23): Xaa is A or G or is absent

SEQ ID NO: 38601 - protein, 40 aa, Artificial Sequence; identical to SEQ ID NO: 15329
  GFR-binding peptide
  MOD_RES (5), (6), (37), (39): Xaa is C or S

SEQ ID NO: 38602 - protein, 40 aa, Artificial Sequence; identical to SEQ ID NO: 15330
  GFR-binding peptide
  MOD_RES (3), (4), (38), (40): Xaa is C or S
  MOD_RES (18), (19), (20), (21), (22): Xaa is A or G
  MOD_RES (23), (24), (25), (26): Xaa is A or G or is absent

SEQ ID NO: 38603 - protein, 37 aa, Artificial Sequence; identical to SEQ ID NO: 15331
  GFR-binding peptide
  MOD_RES (3), (4): Xaa is C or S
  MOD_RES (18), (19), (20), (21), (22): Xaa is A or G
  MOD_RES (23), (24), (25), (26): Xaa is A or G or is absent

SEQ ID NO: 38604 - protein, 43 aa, Artificial Sequence; identical to SEQ ID NO: 6260
  GFR-binding peptide
  MOD_RES (5), (6), (40), (42): Xaa is C or S
  MOD_RES (20), (21), (22), (23), (24): Xaa is A or G
  MOD_RES (25), (26), (27), (28): Xaa is A or G or is absent

SEQ ID NO: 38605 - protein, 37 aa, Artificial Sequence; identical to SEQ ID NO: 13639
  GFR-binding peptide
  MOD_RES (34), (36): Xaa is C or S
  MOD_RES (14), (15), (16), (17), (18): Xaa is A or G
  MOD_RES (19), (20), (21), (22): Xaa is A or G or is absent

SEQ ID NO: 38606 - protein, 33 aa, Artificial Sequence; identical to SEQ ID NO: 6261
  GFR-binding peptide
  MOD_RES (1), (1): Xaa is C or S
  MOD_RES (15), (16), (17), (18), (19): Xaa is A or G
  MOD_RES (20), (21), (22), (23): Xaa is A or G or is absent

SEQ ID NO: 38607 - protein, 38 aa, Artificial Sequence; identical to SEQ ID NO: 6262
  GFR-binding peptide
  MOD_RES (4), (5), (38): Xaa is C or S
  MOD_RES (19), (20), (21), (22), (23): Xaa is A or G
  MOD_RES (24), (25), (26), (27): Xaa is A or G or is absent

SEQ ID NO: 38608 - protein, 41 aa, Artificial Sequence; identical to SEQ ID NO: 13642
  GFR-binding peptide
  MOD_RES (5), (6), (38), (40): Xaa is C or S

SEQ ID NO: 38609 - protein, 39 aa, Artificial Sequence; identical to SEQ ID NO: 15332
  GFR-binding peptide
  MOD_RES (3), (4), (36), (38): Xaa is C or S

SEQ ID NO: 38610 - protein, 37 aa, Artificial Sequence; identical to SEQ ID NO: 6263
  GFR-binding peptide
  MOD_RES (1), (35), (37): Xaa is C or S
  MOD_RES (15), (16), (17), (18), (19): Xaa is A or G
  MOD_RES (20), (21), (22), (23): Xaa is A or G or is absent

SEQ ID NO: 38611 - protein, 35 aa, Artificial Sequence; identical to SEQ ID NO: 15333
  GFR-binding peptide
  MOD_RES (1), (2): Xaa is C or S
  MOD_RES (16), (17), (18), (19), (20): Xaa is A or G
  MOD_RES (21), (22), (23), (24): Xaa is A or G or is absent

SEQ ID NO: 38612 - protein, 36 aa, Artificial Sequence; identical to SEQ ID NO: 15334
  GFR-binding peptide
  MOD_RES (1), (34), (36): Xaa is C or S
  MOD_RES (15), (16), (17), (18), (19): Xaa is A or G
  MOD_RES (20), (21), (22), (23): Xaa is A or G or is absent

SEQ ID NO: 38613 - protein, 39 aa, Artificial Sequence; identical to SEQ ID NO: 6266
  GFR-binding peptide
  MOD_RES (6), (7): Xaa is C or S
  MOD_RES (21), (22), (23), (24), (25): Xaa is A or G
  MOD_RES (26), (27), (28), (29): Xaa is A or G or is absent

SEQ ID NO: 38614 - protein, 40 aa, Artificial Sequence; identical to SEQ ID NO: 13646
  GFR-binding peptide
  MOD_RES (5), (6), (40): Xaa is C or S
  MOD_RES (20), (21), (22), (23), (24): Xaa is A or G
  MOD_RES (25), (26), (27), (28): Xaa is A or G or is absent

SEQ ID NO: 38615 - protein, 38 aa, Artificial Sequence; identical to SEQ ID NO: 8036
  GFR-binding peptide
  MOD_RES (5), (6): Xaa is C or S
  MOD_RES (20), (21), (22), (23), (24): Xaa is A or G
  MOD_RES (25), (26), (27), (28): Xaa is A or G or is absent

SEQ ID NO: 38616 - protein, 33 aa, Artificial Sequence; identical to SEQ ID NO: 8037
  GFR-binding peptide
  MOD_RES (1), (32): Xaa is C or S

SEQ ID NO: 38617 - protein, 32 aa, Artificial Sequence; identical to SEQ ID NO: 13648
  GFR-binding peptide
  MOD_RES (1), (2): Xaa is C or S

SEQ ID NO: 38618 - protein, 39 aa, Artificial Sequence; identical to SEQ ID NO: 15337
  GFR-binding peptide
  MOD_RES (3), (4), (38): Xaa is C or S
  MOD_RES (18), (19), (20), (21), (22): Xaa is A or G
  MOD_RES (23), (24), (25), (26): Xaa is A or G or is absent

SEQ ID NO: 38619 - protein, 40 aa, Artificial Sequence; identical to SEQ ID NO: 13650
  GFR-binding peptide
  MOD_RES (5), (6), (37), (39): Xaa is C or S

SEQ ID NO: 38620 - protein, 39 aa, Artificial Sequence; identical to SEQ ID NO: 8038
  GFR-binding peptide
  MOD_RES (1), (2), (36), (38): Xaa is C or S
  MOD_RES (16), (17), (18), (19), (20): Xaa is A or G
  MOD_RES (21), (22), (23), (24): Xaa is A or G or is absent

SEQ ID NO: 38621 - protein, 41 aa, Artificial Sequence; identical to SEQ ID NO: 15339
  GFR-binding peptide
  MOD_RES (5), (6), (39), (41): Xaa is C or S
  MOD_RES (20), (21), (22), (23), (24): Xaa is A or G
  MOD_RES (25), (26), (27), (28): Xaa is A or G or is absent

SEQ ID NO: 38622 - protein, 33 aa, Artificial Sequence; identical to SEQ ID NO: 8039
  GFR-binding peptide
  MOD_RES (1), (32): Xaa is C or S

SEQ ID NO: 38623 - protein, 37 aa, Artificial Sequence; identical to SEQ ID NO: 8040
  GFR-binding peptide
  MOD_RES (1), (2), (36): Xaa is C or S
  MOD_RES (16), (17), (18), (19), (20): Xaa is A or G
  MOD_RES (21), (22), (23), (24): Xaa is A or G or is absent

SEQ ID NO: 38624 - protein, 42 aa, Artificial Sequence; identical to SEQ ID NO: 13651
  GFR-binding peptide
  MOD_RES (5), (39), (41): Xaa is C or S
  MOD_RES (19), (20), (21), (22), (23): Xaa is A or G
  MOD_RES (24), (25), (26), (27): Xaa is A or G or is absent

SEQ ID NO: 38625 - protein, 36 aa, Artificial Sequence; identical to SEQ ID NO: 13652
  GFR-binding peptide
  MOD_RES (2), (3), (36): Xaa is C or S
  MOD_RES (17), (18), (19), (20), (21): Xaa is A or G
  MOD_RES (22), (23), (24), (25): Xaa is A or G or is absent

SEQ ID NO: 38626 - protein, 32 aa, Artificial Sequence; identical to SEQ ID NO: 13653
  GFR-binding peptide
  MOD_RES (1), (1): Xaa is C or S

SEQ ID NO: 38627 - protein, 39 aa, Artificial Sequence; identical to SEQ ID NO: 13654
  GFR-binding peptide
  MOD_RES (4), (5), (37), (39): Xaa is C or S

SEQ ID NO: 38628 - protein, 39 aa, Artificial Sequence; identical to SEQ ID NO: 15343
  GFR-binding peptide
  MOD_RES (5), (6), (38): Xaa is C or S

SEQ ID NO: 38629 - protein, 33 aa, Artificial Sequence; identical to SEQ ID NO: 15344
  GFR-binding peptide
  MOD_RES (14), (15), (16), (17), (18): Xaa is A or G
  MOD_RES (19), (20), (21), (22): Xaa is A or G or is absent

SEQ ID NO: 38630 - protein, 40 aa, Artificial Sequence; identical to SEQ ID NO: 8045
  GFR-binding peptide
  MOD_RES (4), (5), (37), (39): Xaa is C or S

SEQ ID NO: 38631 - protein, 36 aa, Artificial Sequence; identical to SEQ ID NO: 15347
  GFR-binding peptide
  MOD_RES (1), (2), (34), (36): Xaa is C or S

SEQ ID NO: 38632 - protein, 37 aa, Artificial Sequence; identical to SEQ ID NO: 15348
  GFR-binding peptide
  MOD_RES (1), (35), (37): Xaa is C or S
  MOD_RES (15), (16), (17), (18), (19): Xaa is A or G
  MOD_RES (20), (21), (22), (23): Xaa is A or G or is absent

SEQ ID NO: 38633 - protein, 32 aa, Artificial Sequence; identical to SEQ ID NO: 8048
  GFR-binding peptide
  MOD_RES (1), (2): Xaa is C or S

SEQ ID NO: 38634 - protein, 38 aa, Artificial Sequence; identical to SEQ ID NO: 13657
  GFR-binding peptide
  MOD_RES (4), (38): Xaa is C or S
  MOD_RES (18), (19), (20), (21), (22): Xaa is A or G
  MOD_RES (23), (24), (25), (26): Xaa is A or G or is absent

SEQ ID NO: 38635 - protein, 37 aa, Artificial Sequence; identical to SEQ ID NO: 15351
  GFR-binding peptide
  MOD_RES (4), (5): Xaa is C or S
  MOD_RES (19), (20), (21), (22), (23): Xaa is A or G
  MOD_RES (24), (25), (26), (27): Xaa is A or G or is absent

SEQ ID NO: 38636 - protein, 41 aa, Artificial Sequence; identical to SEQ ID NO: 15352
  GFR-binding peptide
  MOD_RES (3), (4), (38), (40): Xaa is C or S
  MOD_RES (18), (19), (20), (21), (22): Xaa is A or G
  MOD_RES (23), (24), (25), (26): Xaa is A or G or is absent

SEQ ID NO: 38637 - protein, 32 aa, Artificial Sequence; identical to SEQ ID NO: 8053
  GFR-binding peptide
  MOD_RES (32), (32): Xaa is C or S

SEQ ID NO: 38638 - protein, 43 aa, Artificial Sequence; identical to SEQ ID NO: 13658
  GFR-binding peptide
  MOD_RES (6), (7), (40), (42): Xaa is C or S
  MOD_RES (21), (22), (23), (24), (25): Xaa is A or G
  MOD_RES (26), (27), (28), (29): Xaa is A or G or is absent

SEQ ID NO: 38639 - protein, 31 aa, Artificial Sequence; identical to SEQ ID NO: 13660
  GFR-binding peptide
  MOD_RES (1), (1): Xaa is C or S

SEQ ID NO: 38640 - protein, 37 aa, Artificial Sequence; identical to SEQ ID NO: 15354
  GFR-binding peptide
  MOD_RES (3), (4), (37): Xaa is C or S
  MOD_RES (18), (19), (20), (21), (22): Xaa is A or G
  MOD_RES (23), (24), (25), (26): Xaa is A or G or is absent

SEQ ID NO: 38641 - protein, 41 aa, Artificial Sequence; identical to SEQ ID NO: 13661
  GFR-binding peptide
  MOD_RES (4), (5), (39), (41): Xaa is C or S
  MOD_RES (19), (20), (21), (22), (23): Xaa is A or G
  MOD_RES (24), (25), (26), (27): Xaa is A or G or is absent

SEQ ID NO: 38642 - protein, 36 aa, Artificial Sequence; identical to SEQ ID NO: 15355
  GFR-binding peptide
  MOD_RES (3), (4), (35): Xaa is C or S

SEQ ID NO: 38643 - protein, 35 aa, Artificial Sequence; identical to SEQ ID NO: 6290
  GFR-binding peptide
  MOD_RES (3), (4), (35): Xaa is C or S

SEQ ID NO: 38644 - protein, 32 aa, Artificial Sequence; identical to SEQ ID NO: 13664
  GFR-binding peptide
  MOD_RES (1), (2): Xaa is C or S

SEQ ID NO: 38645 - protein, 41 aa, Artificial Sequence; identical to SEQ ID NO: 6294
  GFR-binding peptide
  MOD_RES (5), (6), (40): Xaa is C or S
  MOD_RES (20), (21), (22), (23), (24): Xaa is A or G
  MOD_RES (25), (26), (27), (28): Xaa is A or G or is absent

SEQ ID NO: 38646 - protein, 38 aa, Artificial Sequence; identical to SEQ ID NO: 13666
  GFR-binding peptide
  MOD_RES (1), (2), (35), (37): Xaa is C or S
  MOD_RES (16), (17), (18), (19), (20): Xaa is A or G
  MOD_RES (21), (22), (23), (24): Xaa is A or G or is absent

SEQ ID NO: 38647 - protein, 39 aa, Artificial Sequence; identical to SEQ ID NO: 13667
  GFR-binding peptide
  MOD_RES (7), (7): Xaa is C or S
  MOD_RES (21), (22), (23), (24), (25): Xaa is A or G
  MOD_RES (26), (27), (28), (29): Xaa is A or G or is absent

SEQ ID NO: 38648 - protein, 39 aa, Artificial Sequence; identical to SEQ ID NO: 13668
  GFR-binding peptide
  MOD_RES (3), (4), (37), (39): Xaa is C or S
  MOD_RES (18), (19), (20), (21), (22): Xaa is A or G
  MOD_RES (23), (24), (25), (26): Xaa is A or G or is absent

SEQ ID NO: 38649 - protein, 35 aa, Artificial Sequence; identical to SEQ ID NO: 13669
  GFR-binding peptide
  MOD_RES (2), (3): Xaa is C or S
  MOD_RES (17), (18), (19), (20), (21): Xaa is A or G
  MOD_RES (22), (23), (24), (25): Xaa is A or G or is absent

SEQ ID NO: 38650 - protein, 37 aa, Artificial Sequence; identical to SEQ ID NO: 13670
  GFR-binding peptide
  MOD_RES (3), (4): Xaa is C or S
  MOD_RES (18), (19), (20), (21), (22): Xaa is A or G
  MOD_RES (23), (24), (25), (26): Xaa is A or G or is absent

SEQ ID NO: 38651 - protein, 34 aa, Artificial Sequence; identical to SEQ ID NO: 13671
  GFR-binding peptide
  MOD_RES (4), (4): Xaa is C or S

SEQ ID NO: 38652 - protein, 44 aa, Artificial Sequence; identical to SEQ ID NO: 15356
  GFR-binding peptide
  MOD_RES (6), (7), (41), (43): Xaa is C or S
  MOD_RES (21), (22), (23), (24), (25): Xaa is A or G
  MOD_RES (26), (27), (28), (29): Xaa is A or G or is absent

SEQ ID NO: 38653 - protein, 44 aa, Artificial Sequence; identical to SEQ ID NO: 13672
  GFR-binding peptide
  MOD_RES (6), (7), (41), (43): Xaa is C or S
  MOD_RES (21), (22), (23), (24), (25): Xaa is A or G
  MOD_RES (26), (27), (28), (29): Xaa is A or G or is absent

SEQ ID NO: 38654 - protein, 36 aa, Artificial Sequence; identical to SEQ ID NO: 6298
  GFR-binding peptide
  MOD_RES (2), (3), (36): Xaa is C or S
  MOD_RES (17), (18), (19), (20), (21): Xaa is A or G
  MOD_RES (22), (23), (24), (25): Xaa is A or G or is absent

SEQ ID NO: 38655 - protein, 39 aa, Artificial Sequence; identical to SEQ ID NO: 13675
  GFR-binding peptide
  MOD_RES (5), (6): Xaa is C or S
  MOD_RES (20), (21), (22), (23), (24): Xaa is A or G
  MOD_RES (25), (26), (27), (28): Xaa is A or G or is absent

SEQ ID NO: 38656 - protein, 42 aa, Artificial Sequence; identical to SEQ ID NO: 13676
  GFR-binding peptide
  MOD_RES (6), (40), (42): Xaa is C or S
  MOD_RES (20), (21), (22), (23), (24): Xaa is A or G
  MOD_RES (25), (26), (27), (28): Xaa is A or G or is absent

SEQ ID NO: 38657 - protein, 33 aa, Artificial Sequence; identical to SEQ ID NO: 15358
  GFR-binding peptide
  MOD_RES (32), (32): Xaa is C or S

SEQ ID NO: 38658 - protein, 39 aa, Artificial Sequence; identical to SEQ ID NO: 13677
  GFR-binding peptide
  MOD_RES (2), (3), (36), (38): Xaa is C or S
  MOD_RES (17), (18), (19), (20), (21): Xaa is A or G
  MOD_RES (22), (23), (24), (25): Xaa is A or G or is absent

SEQ ID NO: 38659 - protein, 41 aa, Artificial Sequence; identical to SEQ ID NO: 13678
  GFR-binding peptide
  MOD_RES (4), (5), (39), (41): Xaa is C or S
  MOD_RES (19), (20), (21), (22), (23): Xaa is A or G
  MOD_RES (24), (25), (26), (27): Xaa is A or G or is absent

SEQ ID NO: 38660 - protein, 37 aa, Artificial Sequence; identical to SEQ ID NO: 13679
  GFR-binding peptide
  MOD_RES (1), (34), (36): Xaa is C or S
  MOD_RES (15), (16), (17), (18), (19): Xaa is A or G
  MOD_RES (20), (21), (22), (23): Xaa is A or G or is absent

SEQ ID NO: 38661 - protein, 38 aa, Artificial Sequence; identical to SEQ ID NO: 15359
  GFR-binding peptide
  MOD_RES (1), (35), (37): Xaa is C or S
  MOD_RES (15), (16), (17), (18), (19): Xaa is A or G
  MOD_RES (20), (21), (22), (23): Xaa is A or G or is absent

SEQ ID NO: 38662 - protein, 39 aa, Artificial Sequence; identical to SEQ ID NO: 13681
  GFR-binding peptide
  MOD_RES (4), (5), (39): Xaa is C or S
  MOD_RES (19), (20), (21), (22), (23): Xaa is A or G
  MOD_RES (24), (25), (26), (27): Xaa is A or G or is absent

SEQ ID NO: 38663 - protein, 38 aa, Artificial Sequence; identical to SEQ ID NO: 15360
  GFR-binding peptide
  MOD_RES (3), (4), (38): Xaa is C or S
  MOD_RES (18), (19), (20), (21), (22): Xaa is A or G
  MOD_RES (23), (24), (25), (26): Xaa is A or G or is absent

SEQ ID NO: 38664 - protein, 35 aa, Artificial Sequence; identical to SEQ ID NO: 8069
  GFR-binding peptide
  MOD_RES (1), (2): Xaa is C or S
  MOD_RES (16), (17), (18), (19), (20): Xaa is A or G
  MOD_RES (21), (22), (23), (24): Xaa is A or G or is absent

SEQ ID NO: 38665 - protein, 36 aa, Artificial Sequence; identical to SEQ ID NO: 13682
  GFR-binding peptide
  MOD_RES (3), (4): Xaa is C or S
  MOD_RES (18), (19), (20), (21), (22): Xaa is A or G
  MOD_RES (23), (24), (25), (26): Xaa is A or G or is absent

SEQ ID NO: 38666 - protein, 38 aa, Artificial Sequence; identical to SEQ ID NO: 15363
  GFR-binding peptide
  MOD_RES (5), (6): Xaa is C or S
  MOD_RES (20), (21), (22), (23), (24): Xaa is A or G
  MOD_RES (25), (26), (27), (28): Xaa is A or G or is absent

SEQ ID NO: 38667 - protein, 38 aa, Artificial Sequence; identical to SEQ ID NO: 13683
  GFR-binding peptide
  MOD_RES (1), (2), (36), (38): Xaa is C or S
  MOD_RES (16), (17), (18), (19), (20): Xaa is A or G
  MOD_RES (21), (22), (23), (24): Xaa is A or G or is absent

SEQ ID NO: 38668 - protein, 39 aa, Artificial Sequence; identical to SEQ ID NO: 13684
  GFR-binding peptide
  MOD_RES (6), (38): Xaa is C or S

SEQ ID NO: 38669 - protein, 33 aa, Artificial Sequence; identical to SEQ ID NO: 8073
  GFR-binding peptide
  MOD_RES (33), (33): Xaa is C or S
  MOD_RES (14), (15), (16), (17), (18): Xaa is A or G
  MOD_RES (19), (20), (21), (22): Xaa is A or G or is absent

SEQ ID NO: 38670 - protein, 37 aa, Artificial Sequence; identical to SEQ ID NO: 15365
  GFR-binding peptide
  MOD_RES (3), (4), (36): Xaa is C or S

SEQ ID NO: 38671 - protein, 39 aa, Artificial Sequence; identical to SEQ ID NO: 6306
  GFR-binding peptide
  MOD_RES (1), (2), (36), (38): Xaa is C or S
  MOD_RES (16), (17), (18), (19), (20): Xaa is A or G
  MOD_RES (21), (22), (23), (24): Xaa is A or G or is absent

SEQ ID NO: 38672 - protein, 34 aa, Artificial Sequence; identical to SEQ ID NO: 8076
  GFR-binding peptide
  MOD_RES (1), (34): Xaa is C or S
  MOD_RES (15), (16), (17), (18), (19): Xaa is A or G
  MOD_RES (20), (21), (22), (23): Xaa is A or G or is absent

SEQ ID NO: 38673 - protein, 40 aa, Artificial Sequence; identical to SEQ ID NO: 15368
  GFR-binding peptide
  MOD_RES (5), (6), (39): Xaa is C or S
  MOD_RES (20), (21), (22), (23), (24): Xaa is A or G
  MOD_RES (25), (26), (27), (28): Xaa is A or G or is absent

SEQ ID NO: 38674 - protein, 37 aa, Artificial Sequence; identical to SEQ ID NO: 13686
  GFR-binding peptide
  MOD_RES (4), (5): Xaa is C or S
  MOD_RES (19), (20), (21), (22), (23): Xaa is A or G
  MOD_RES (24), (25), (26), (27): Xaa is A or G or is absent

SEQ ID NO: 38675 - protein, 38 aa, Artificial Sequence; identical to SEQ ID NO: 6307
  GFR-binding peptide
  MOD_RES (5), (6): Xaa is C or S
  MOD_RES (20), (21), (22), (23), (24): Xaa is A or G
  MOD_RES (25), (26), (27), (28): Xaa is A or G or is absent

SEQ ID NO: 38676 - protein, 41 aa, Artificial Sequence; identical to SEQ ID NO: 13689
  GFR-binding peptide
  MOD_RES (6), (7), (40): Xaa is C or S
  MOD_RES (21), (22), (23), (24), (25): Xaa is A or G
  MOD_RES (26), (27), (28), (29): Xaa is A or G or is absent

SEQ ID NO: 38677 - protein, 35 aa, Artificial Sequence; identical to SEQ ID NO: 13691
  GFR-binding peptide
  MOD_RES (1), (2), (33), (35): Xaa is C or S

SEQ ID NO: 38678 - protein, 38 aa, Artificial Sequence; identical to SEQ ID NO: 13692
  GFR-binding peptide
  MOD_RES (2), (3), (35), (37): Xaa is C or S

SEQ ID NO: 38679 - protein, 37 aa, Artificial Sequence; identical to SEQ ID NO: 15369
  GFR-binding peptide
  MOD_RES (2), (3), (37): Xaa is C or S
  MOD_RES (17), (18), (19), (20), (21): Xaa is A or G
  MOD_RES (22), (23), (24), (25): Xaa is A or G or is absent

SEQ ID NO: 38680 - protein, 42 aa, Artificial Sequence; identical to SEQ ID NO: 15370
  GFR-binding peptide
  MOD_RES (6), (7), (40), (42): Xaa is C or S
  MOD_RES (21), (22), (23), (24), (25): Xaa is A or G
  MOD_RES (26), (27), (28), (29): Xaa is A or G or is absent

SEQ ID NO: 38681 - protein, 35 aa, Artificial Sequence; identical to SEQ ID NO: 13693
  GFR-binding peptide
  MOD_RES (33), (35): Xaa is C or S
  MOD_RES (14), (15), (16), (17), (18): Xaa is A or G
  MOD_RES (19), (20), (21), (22): Xaa is A or G or is absent

SEQ ID NO: 38682 - protein, 43 aa, Artificial Sequence; identical to SEQ ID NO: 15371
  GFR-binding peptide
  MOD_RES (6), (7), (40), (42): Xaa is C or S
  MOD_RES (21), (22), (23), (24), (25): Xaa is A or G
  MOD_RES (26), (27), (28), (29): Xaa is A or G or is absent

SEQ ID NO: 38683 - protein, 34 aa, Artificial Sequence; identical to SEQ ID NO: 13694
  GFR-binding peptide
  MOD_RES (2), (3): Xaa is C or S

SEQ ID NO: 38684 - protein, 40 aa, Artificial Sequence; identical to SEQ ID NO: 13695
  GFR-binding peptide
  MOD_RES (6), (7), (39): Xaa is C or S

SEQ ID NO: 38685 - protein, 38 aa, Artificial Sequence; identical to SEQ ID NO: 15373
  GFR-binding peptide
  MOD_RES (2), (3), (37): Xaa is C or S
  MOD_RES (17), (18), (19), (20), (21): Xaa is A or G
  MOD_RES (22), (23), (24), (25): Xaa is A or G or is absent

SEQ ID NO: 38686 - protein, 38 aa, Artificial Sequence; identical to SEQ ID NO: 13696
  GFR-binding peptide
  MOD_RES (1), (2), (35), (37): Xaa is C or S
  MOD_RES (16), (17), (18), (19), (20): Xaa is A or G
  MOD_RES (21), (22), (23), (24): Xaa is A or G or is absent

SEQ ID NO: 38687 - protein, 36 aa, Artificial Sequence; identical to SEQ ID NO: 6317
  GFR-binding peptide
  MOD_RES (4), (5), (36): Xaa is C or S

SEQ ID NO: 38688 - protein, 32 aa, Artificial Sequence; identical to SEQ ID NO: 15374
  GFR-binding peptide
  MOD_RES (1), (2): Xaa is C or S

SEQ ID NO: 38689 - protein, 33 aa, Artificial Sequence; identical to SEQ ID NO: 8088
  GFR-binding peptide
  MOD_RES (1), (1): Xaa is C or S
  MOD_RES (15), (16), (17), (18), (19): Xaa is A or G
  MOD_RES (20), (21), (22), (23): Xaa is A or G or is absent

SEQ ID NO: 38690 - protein, 36 aa, Artificial Sequence; identical to SEQ ID NO: 15377
  GFR-binding peptide
  MOD_RES (2), (3), (35): Xaa is C or S

SEQ ID NO: 38691 - protein, 34 aa, Artificial Sequence; identical to SEQ ID NO: 8089
  GFR-binding peptide
  MOD_RES (2), (3), (34): Xaa is C or S

SEQ ID NO: 38692 - protein, 34 aa, Artificial Sequence; identical to SEQ ID NO: 13698
  GFR-binding peptide
  MOD_RES (32), (34): Xaa is C or S

SEQ ID NO: 38693 - protein, 37 aa, Artificial Sequence; identical to SEQ ID NO: 15379
  GFR-binding peptide
  MOD_RES (2), (3), (37): Xaa is C or S
  MOD_RES (17), (18), (19), (20), (21): Xaa is A or G
  MOD_RES (22), (23), (24), (25): Xaa is A or G or is absent

SEQ ID NO: 38694 - protein, 34 aa, Artificial Sequence; identical to SEQ ID NO: 15380
  GFR-binding peptide
  MOD_RES (32), (34): Xaa is C or S

SEQ ID NO: 38695 - protein, 41 aa, Artificial Sequence; identical to SEQ ID NO: 13700
  GFR-binding peptide
  MOD_RES (7), (41): Xaa is C or S
  MOD_RES (21), (22), (23), (24), (25): Xaa is A or G
  MOD_RES (26), (27), (28), (29): Xaa is A or G or is absent

SEQ ID NO: 38696 - protein, 39 aa, Artificial Sequence; identical to SEQ ID NO: 15381
  GFR-binding peptide
  MOD_RES (3), (4), (37), (39): Xaa is C or S
  MOD_RES (18), (19), (20), (21), (22): Xaa is A or G
  MOD_RES (23), (24), (25), (26): Xaa is A or G or is absent

SEQ ID NO: 38697 - protein, 37 aa, Artificial Sequence; identical to SEQ ID NO: 15382
  GFR-binding peptide
  MOD_RES (6), (7): Xaa is C or S

SEQ ID NO: 38698 - protein, 36 aa, Artificial Sequence; identical to SEQ ID NO: 15383
  GFR-binding peptide
  MOD_RES (34), (36): Xaa is C or S
  MOD_RES (14), (15), (16), (17), (18): Xaa is A or G
  MOD_RES (19), (20), (21), (22): Xaa is A or G or is absent

SEQ ID NO: 38699 - protein, 33 aa, Artificial Sequence; identical to SEQ ID NO: 15384
  GFR-binding peptide
  MOD_RES (2), (3): Xaa is C or S

SEQ ID NO: 38700 - protein, 41 aa, Artificial Sequence; identical to SEQ ID NO: 15385
  GFR-binding peptide
  MOD_RES (5), (6), (40): Xaa is C or S
  MOD_RES (20), (21), (22), (23), (24): Xaa is A or G
  MOD_RES (25), (26), (27), (28): Xaa is A or G or is absent

SEQ ID NO: 38701 - protein, 35 aa, Artificial Sequence; identical to SEQ ID NO: 6325
  GFR-binding peptide
  MOD_RES (34), (34): Xaa is C or S
  MOD_RES (14), (15), (16), (17), (18): Xaa is A or G
  MOD_RES (19), (20), (21), (22): Xaa is A or G or is absent

SEQ ID NO: 38702 - protein, 30 aa, Artificial Sequence; identical to SEQ ID NO: 13703
  GFR-binding peptide

SEQ ID NO: 38703 - protein, 40 aa, Artificial Sequence; identical to SEQ ID NO: 13704
  GFR-binding peptide
  MOD_RES (6), (7): Xaa is C or S
  MOD_RES (21), (22), (23), (24), (25): Xaa is A or G
  MOD_RES (26), (27), (28), (29): Xaa is A or G or is absent

SEQ ID NO: 38704 - protein, 37 aa, Artificial Sequence; identical to SEQ ID NO: 8094
  GFR-binding peptide
  MOD_RES (34), (36): Xaa is C or S
  MOD_RES (14), (15), (16), (17), (18): Xaa is A or G
  MOD_RES (19), (20), (21), (22): Xaa is A or G or is absent

SEQ ID NO: 38705 - protein, 38 aa, Artificial Sequence; identical to SEQ ID NO: 15388
  GFR-binding peptide
  MOD_RES (3), (4), (35), (37): Xaa is C or S

SEQ ID NO: 38706 - protein, 37 aa, Artificial Sequence; identical to SEQ ID NO: 13705
  GFR-binding peptide
  MOD_RES (3), (4), (35), (37): Xaa is C or S

SEQ ID NO: 38707 - protein, 42 aa, Artificial Sequence; identical to SEQ ID NO: 8096
  GFR-binding peptide
  MOD_RES (4), (5), (39), (41): Xaa is C or S
  MOD_RES (19), (20), (21), (22), (23): Xaa is A or G
  MOD_RES (24), (25), (26), (27): Xaa is A or G or is absent

SEQ ID NO: 38708 - protein, 42 aa, Artificial Sequence; identical to SEQ ID NO: 8097
  GFR-binding peptide
  MOD_RES (6), (7), (41): Xaa is C or S
  MOD_RES (21), (22), (23), (24), (25): Xaa is A or G
  MOD_RES (26), (27), (28), (29): Xaa is A or G or is absent

SEQ ID NO: 38709 - protein, 40 aa, Artificial Sequence
  GFR-binding peptide
  MOD_RES (3), (4), (37), (39): Xaa is C or S
  MOD_RES (18), (19), (20), (21), (22): Xaa is A or G
  MOD_RES (23), (24), (25), (26): Xaa is A or G or is absent
SPXXVSQDLEPLTILYYXXXXXXXXXEQLSNMIVKSXKXS

SEQ ID NO: 38710 - protein, 40 aa, Artificial Sequence; identical to SEQ ID NO: 15391
  GFR-binding peptide
  MOD_RES (6), (7): Xaa is C or S
  MOD_RES (21), (22), (23), (24), (25): Xaa is A or G
  MOD_RES (26), (27), (28), (29): Xaa is A or G or is absent

SEQ ID NO: 38711 - protein, 32 aa, Artificial Sequence; identical to SEQ ID NO: 13706
  GFR-binding peptide
  MOD_RES (14), (15), (16), (17), (18): Xaa is A or G
  MOD_RES (19), (20), (21), (22): Xaa is A or G or is absent

SEQ ID NO: 38712 - protein, 38 aa, Artificial Sequence; identical to SEQ ID NO: 13707
  GFR-binding peptide
  MOD_RES (3), (4), (38): Xaa is C or S
  MOD_RES (18), (19), (20), (21), (22): Xaa is A or G
  MOD_RES (23), (24), (25), (26): Xaa is A or G or is absent

SEQ ID NO: 38713 - protein, 39 aa, Artificial Sequence
  GFR-binding peptide
  MOD_RES (4), (5), (38): Xaa is C or S
  MOD_RES (19), (20), (21), (22), (23): Xaa is A or G
  MOD_RES (24), (25), (26), (27): Xaa is A or G or is absent
ASPXXVSQDLEPLTILYYXXXXXXXXXEQLSNMIVKSXK

SEQ ID NO: 38714 - protein, 38 aa, Artificial Sequence; identical to SEQ ID NO: 13708
  GFR-binding peptide
  MOD_RES (2), (3), (35), (37): Xaa is C or S

SEQ ID NO: 38715 - protein, 37 aa, Artificial Sequence; identical to SEQ ID NO: 13709
  GFR-binding peptide
  MOD_RES (1), (35), (37): Xaa is C or S
  MOD_RES (15), (16), (17), (18), (19): Xaa is A or G
  MOD_RES (20), (21), (22), (23): Xaa is A or G or is absent

SEQ ID NO: 38716 - protein, 38 aa, Artificial Sequence; identical to SEQ ID NO: 15393
  GFR-binding peptide
  MOD_RES (4), (5): Xaa is C or S
  MOD_RES (19), (20), (21), (22), (23): Xaa is A or G
  MOD_RES (24), (25), (26), (27): Xaa is A or G or is absent

SEQ ID NO: 38717 - protein, 38 aa, Artificial Sequence; identical to SEQ ID NO: 13710
  GFR-binding peptide
  MOD_RES (5), (6): Xaa is C or S
  MOD_RES (20), (21), (22), (23), (24): Xaa is A or G
  MOD_RES (25), (26), (27), (28): Xaa is A or G or is absent

SEQ ID NO: 38718 - protein, 36 aa, Artificial Sequence
  GFR-binding peptide
  MOD_RES (2), (3), (36): Xaa is C or S
  MOD_RES (17), (18), (19), (20), (21): Xaa is A or G
  MOD_RES (22), (23), (24), (25): Xaa is A or G or is absent
PXXVSQDLEPLTILYYXXXXXXXXXEQLSNMIVKSX

SEQ ID NO: 38719 - protein, 32 aa, Artificial Sequence; identical to SEQ ID NO: 15394
  GFR-binding peptide
  MOD_RES (14), (15), (16), (17), (18): Xaa is A or G
  MOD_RES (19), (20), (21), (22): Xaa is A or G or is absent

SEQ ID NO: 38720 - protein, 31 aa, Artificial Sequence; identical to SEQ ID NO: 13711
  GFR-binding peptide
  MOD_RES (1), (1): Xaa is C or S

SEQ ID NO: 38721 - protein, 34 aa, Artificial Sequence; identical to SEQ ID NO: 15395
  GFR-binding peptide
  MOD_RES (3), (4): Xaa is C or S

SEQ ID NO: 38722 - protein, 36 aa, Artificial Sequence; identical to SEQ ID NO: 13712
  GFR-binding peptide
  MOD_RES (1), (35): Xaa is C or S
  MOD_RES (15), (16), (17), (18), (19): Xaa is A or G
  MOD_RES (20), (21), (22), (23): Xaa is A or G or is absent

SEQ ID NO: 38723 - protein, 39 aa, Artificial Sequence; identical to SEQ ID NO: 13713
  GFR-binding peptide
  MOD_RES (6), (7): Xaa is C or S
  MOD_RES (21), (22), (23), (24), (25): Xaa is A or G
  MOD_RES (26), (27), (28), (29): Xaa is A or G or is absent

SEQ ID NO: 38724 - protein, 36 aa, Artificial Sequence; identical to SEQ ID NO: 15397
  GFR-binding peptide
  MOD_RES (1), (34), (36): Xaa is C or S
  MOD_RES (15), (16), (17), (18), (19): Xaa is A or G
  MOD_RES (20), (21), (22), (23): Xaa is A or G or is absent

SEQ ID NO: 38725 - protein, 39 aa, Artificial Sequence; identical to SEQ ID NO: 15398
  GFR-binding peptide
  MOD_RES (4), (5), (39): Xaa is C or S
  MOD_RES (19), (20), (21), (22), (23): Xaa is A or G
  MOD_RES (24), (25), (26), (27): Xaa is A or G or is absent

SEQ ID NO: 38726 - protein, 36 aa, Artificial Sequence; identical to SEQ ID NO: 13715
  GFR-binding peptide
  MOD_RES (1), (35): Xaa is C or S
  MOD_RES (15), (16), (17), (18), (19): Xaa is A or G
  MOD_RES (20), (21), (22), (23): Xaa is A or G or is absent

SEQ ID NO: 38727 - protein, 36 aa, Artificial Sequence; identical to SEQ ID NO: 15399
  GFR-binding peptide
  MOD_RES (5), (6): Xaa is C or S

SEQ ID NO: 38728 - protein, 37 aa, Artificial Sequence; identical to SEQ ID NO: 15400
  GFR-binding peptide
  MOD_RES (3), (4), (36): Xaa is C or S

SEQ ID NO: 38729 - protein, 33 aa, Artificial Sequence; identical to SEQ ID NO: 6338
  GFR-binding peptide
  MOD_RES (2), (3): Xaa is C or S

SEQ ID NO: 38730 - protein, 37 aa, Artificial Sequence; identical to SEQ ID NO: 13718
  GFR-binding peptide
  MOD_RES (6), (7): Xaa is C or S

SEQ ID NO: 38731 - protein, 34 aa, Artificial Sequence
  GFR-binding peptide
  MOD_RES (33), (33): Xaa is C or S
  MOD_RES (14), (15), (16), (17), (18): Xaa is A or G
  MOD_RES (19), (20), (21), (22): Xaa is A or G or is absent
VSQDLEPLTILYYXXXXXXXXXEQLSNMIVKSXK

SEQ ID NO: 38732 - protein, 36 aa, Artificial Sequence; identical to SEQ ID NO: 13719
  GFR-binding peptide
  MOD_RES (4), (5): Xaa is C or S

SEQ ID NO: 38733 - protein, 41 aa, Artificial Sequence; identical to SEQ ID NO: 15402
  GFR-binding peptide
  MOD_RES (4), (5), (39), (41): Xaa is C or S
  MOD_RES (19), (20), (21), (22), (23): Xaa is A or G
  MOD_RES (24), (25), (26), (27): Xaa is A or G or is absent

SEQ ID NO: 38734 - protein, 37 aa, Artificial Sequence; identical to SEQ ID NO: 13720
  GFR-binding peptide
  MOD_RES (1), (35), (37): Xaa is C or S
  MOD_RES (15), (16), (17), (18), (19): Xaa is A or G
  MOD_RES (20), (21), (22), (23): Xaa is A or G or is absent

SEQ ID NO: 38735 - protein, 34 aa, Artificial Sequence; identical to SEQ ID NO: 15403
  GFR-binding peptide
  MOD_RES (32), (34): Xaa is C or S

SEQ ID NO: 38736 - protein, 38 aa, Artificial Sequence; identical to SEQ ID NO: 13721
  GFR-binding peptide
  MOD_RES (5), (6): Xaa is C or S
  MOD_RES (20), (21), (22), (23), (24): Xaa is A or G
  MOD_RES (25), (26), (27), (28): Xaa is A or G or is absent

SEQ ID NO: 38737 - protein, 31 aa, Artificial Sequence; identical to SEQ ID NO: 13722
  GFR-binding peptide
  MOD_RES (31), (31): Xaa is C or S

SEQ ID NO: 38738 - protein, 37 aa, Artificial Sequence; identical to SEQ ID NO: 15405
  GFR-binding peptide
  MOD_RES (1), (2), (35), (37): Xaa is C or S
  MOD_RES (16), (17), (18), (19), (20): Xaa is A or G
  MOD_RES (21), (22), (23), (24): Xaa is A or G or is absent

SEQ ID NO: 38739 - protein, 32 aa, Artificial Sequence; identical to SEQ ID NO: 13723
  GFR-binding peptide
  MOD_RES (14), (15), (16), (17), (18): Xaa is A or G
  MOD_RES (19), (20), (21), (22): Xaa is A or G or is absent

SEQ ID NO: 38740 - protein, 34 aa, Artificial Sequence; identical to SEQ ID NO: 13724
  GFR-binding peptide
  MOD_RES (32), (34): Xaa is C or S

SEQ ID NO: 38741 - protein, 40 aa, Artificial Sequence; identical to SEQ ID NO: 15406
  GFR-binding peptide
  MOD_RES (2), (3), (37), (39): Xaa is C or S
  MOD_RES (17), (18), (19), (20), (21): Xaa is A or G
  MOD_RES (22), (23), (24), (25): Xaa is A or G or is absent

SEQ ID NO: 38742 - protein, 35 aa, Artificial Sequence; identical to SEQ ID NO: 15407
  GFR-binding peptide
  MOD_RES (5), (5): Xaa is C or S

SEQ ID NO: 38743 - protein, 41 aa, Artificial Sequence; identical to SEQ ID NO: 13725
  GFR-binding peptide
  MOD_RES (5), (6), (40): Xaa is C or S
  MOD_RES (20), (21), (22), (23), (24): Xaa is A or G
  MOD_RES (25), (26), (27), (28): Xaa is A or G or is absent

SEQ ID NO: 38744 - protein, 40 aa, Artificial Sequence; identical to SEQ ID NO: 13726
  GFR-binding peptide
  MOD_RES (6), (7): Xaa is C or S
  MOD_RES (21), (22), (23), (24), (25): Xaa is A or G
  MOD_RES (26), (27), (28), (29): Xaa is A or G or is absent

SEQ ID NO: 38745 - protein, 34 aa, Artificial Sequence; identical to SEQ ID NO: 13727
  GFR-binding peptide
  MOD_RES (33), (33): Xaa is C or S
  MOD_RES (14), (15), (16), (17), (18): Xaa is A or G
  MOD_RES (19), (20), (21), (22): Xaa is A or G or is absent

SEQ ID NO: 38746 - protein, 34 aa, Artificial Sequence; identical to SEQ ID NO: 13728
  GFR-binding peptide
  MOD_RES (1), (1): Xaa is C or S
  MOD_RES (15), (16), (17), (18), (19): Xaa is A or G
  MOD_RES (20), (21), (22), (23): Xaa is A or G or is absent

SEQ ID NO: 38747 - protein, 35 aa, Artificial Sequence; identical to SEQ ID NO: 15410
  GFR-binding peptide
  MOD_RES (32), (34): Xaa is C or S

SEQ ID NO: 38748 - protein, 39 aa, Artificial Sequence; identical to SEQ ID NO: 13729
  GFR-binding peptide
  MOD_RES (2), (3), (37), (39): Xaa is C or S
  MOD_RES (17), (18), (19), (20), (21): Xaa is A or G
  MOD_RES (22), (23), (24), (25): Xaa is A or G or is absent

SEQ ID NO: 38749 - protein, 34 aa, Artificial Sequence; identical to SEQ ID NO: 13730
  GFR-binding peptide
  MOD_RES (34), (34): Xaa is C or S
  MOD_RES (14), (15), (16), (17), (18): Xaa is A or G
  MOD_RES (19), (20), (21), (22): Xaa is A or G or is absent

SEQ ID NO: 38750 - protein, 44 aa, Artificial Sequence; identical to SEQ ID NO: 15412
  GFR-binding peptide
  MOD_RES (6), (7), (41), (43): Xaa is C or S
  MOD_RES (21), (22), (23), (24), (25): Xaa is A or G
  MOD_RES (26), (27), (28), (29): Xaa is A or G or is absent

SEQ ID NO: 38751 - protein, 31 aa, Artificial Sequence; identical to SEQ ID NO: 6347
  GFR-binding peptide
  MOD_RES (1), (1): Xaa is C or S

SEQ ID NO: 38752 - protein, 34 aa, Artificial Sequence; identical to SEQ ID NO: 13732
  GFR-binding peptide
  MOD_RES (2), (3): Xaa is C or S

SEQ ID NO: 38753 - protein, 38 aa, Artificial Sequence; identical to SEQ ID NO: 15413
  GFR-binding peptide
  MOD_RES (4), (5): Xaa is C or S
  MOD_RES (19), (20), (21), (22), (23): Xaa is A or G
  MOD_RES (24), (25), (26), (27): Xaa is A or G or is absent

SEQ ID NO: 38754 - protein, 39 aa, Artificial Sequence; identical to SEQ ID NO: 13733
  GFR-binding peptide
  MOD_RES (5), (6): Xaa is C or S
  MOD_RES (20), (21), (22), (23), (24): Xaa is A or G
  MOD_RES (25), (26), (27), (28): Xaa is A or G or is absent

SEQ ID NO: 38755 - protein, 43 aa, Artificial Sequence; identical to SEQ ID NO: 15414
  GFR-binding peptide
  MOD_RES (5), (6), (40), (42): Xaa is C or S
  MOD_RES (20), (21), (22), (23), (24): Xaa is A or G
  MOD_RES (25), (26), (27), (28): Xaa is A or G or is absent

SEQ ID NO: 38756 - protein, 37 aa, Artificial Sequence; identical to SEQ ID NO: 15415
  GFR-binding peptide
  MOD_RES (3), (4): Xaa is C or S
  MOD_RES (18), (19), (20), (21), (22): Xaa is A or G
  MOD_RES (23), (24), (25), (26): Xaa is A or G or is absent

SEQ ID NO: 38757 - protein, 41 aa, Artificial Sequence; identical to SEQ ID NO: 13734
  GFR-binding peptide
  MOD_RES (5), (6), (38), (40): Xaa is C or S

SEQ ID NO: 38758 - protein, 36 aa, Artificial Sequence; identical to SEQ ID NO: 15417
  GFR-binding peptide
  MOD_RES (1), (2), (36): Xaa is C or S
  MOD_RES (16), (17), (18), (19), (20): Xaa is A or G
  MOD_RES (21), (22), (23), (24): Xaa is A or G or is absent

SEQ ID NO: 38759 - protein, 40 aa, Artificial Sequence; identical to SEQ ID NO: 6352
  GFR-binding peptide
  MOD_RES (4), (5), (37), (39): Xaa is C or S

SEQ ID NO: 38760 - protein, 36 aa, Artificial Sequence; identical to SEQ ID NO: 8121
  GFR-binding peptide
  MOD_RES (33), (35): Xaa is C or S
  MOD_RES (14), (15), (16), (17), (18): Xaa is A or G
  MOD_RES (19), (20), (21), (22): Xaa is A or G or is absent

SEQ ID NO: 38761 - protein, 34 aa, Artificial Sequence; identical to SEQ ID NO: 15420
  GFR-binding peptide
  MOD_RES (1), (34): Xaa is C or S
  MOD_RES (15), (16), (17), (18), (19): Xaa is A or G
  MOD_RES (20), (21), (22), (23): Xaa is A or G or is absent

SEQ ID NO: 38762 - protein, 42 aa, Artificial Sequence; identical to SEQ ID NO: 13737
  GFR-binding peptide
  MOD_RES (5), (6), (39), (41): Xaa is C or S
  MOD_RES (20), (21), (22), (23), (24): Xaa is A or G
  MOD_RES (25), (26), (27), (28): Xaa is A or G or is absent

SEQ ID NO: 38763 - protein, 44 aa, Artificial Sequence; identical to SEQ ID NO: 15421
  GFR-binding peptide
  MOD_RES (7), (41), (43): Xaa is C or S
  MOD_RES (21), (22), (23), (24), (25): Xaa is A or G
  MOD_RES (26), (27), (28), (29): Xaa is A or G or is absent

SEQ ID NO: 38764 - protein, 39 aa, Artificial Sequence; identical to SEQ ID NO: 15422
  GFR-binding peptide
  MOD_RES (6), (7), (38): Xaa is C or S

SEQ ID NO: 38765 - protein, 33 aa, Artificial Sequence; identical to SEQ ID NO: 13739
  GFR-binding peptide
  MOD_RES (1), (33): Xaa is C or S

SEQ ID NO: 38766 - protein, 40 aa, Artificial Sequence; identical to SEQ ID NO: 13740
  GFR-binding peptide
  MOD_RES (5), (6), (40): Xaa is C or S
  MOD_RES (20), (21), (22), (23), (24): Xaa is A or G
  MOD_RES (25), (26), (27), (28): Xaa is A or G or is absent

SEQ ID NO: 38767 - protein, 35 aa, Artificial Sequence; identical to SEQ ID NO: 13741
  GFR-binding peptide
  MOD_RES (2), (3), (35): Xaa is C or S

SEQ ID NO: 38768 - protein, 37 aa, Artificial Sequence; identical to SEQ ID NO: 13742
  GFR-binding peptide
  MOD_RES (5), (6): Xaa is C or S

SEQ ID NO: 38769 - protein, 42 aa, Artificial Sequence; identical to SEQ ID NO: 8123
  GFR-binding peptide
  MOD_RES (4), (5), (39), (41): Xaa is C or S
  MOD_RES (19), (20), (21), (22), (23): Xaa is A or G
  MOD_RES (24), (25), (26), (27): Xaa is A or G or is absent

SEQ ID NO: 38770 - protein, 37 aa, Artificial Sequence; identical to SEQ ID NO: 15424
  GFR-binding peptide
  MOD_RES (4), (5), (36): Xaa is C or S

SEQ ID NO: 38771 - protein, 36 aa, Artificial Sequence; identical to SEQ ID NO: 15425
  GFR-binding peptide
  MOD_RES (2), (3): Xaa is C or S
  MOD_RES (17), (18), (19), (20), (21): Xaa is A or G
  MOD_RES (22), (23), (24), (25): Xaa is A or G or is absent

SEQ ID NO: 38772 - protein, 33 aa, Artificial Sequence; identical to SEQ ID NO: 6355
  GFR-binding peptide
  MOD_RES (1), (1): Xaa is C or S
  MOD_RES (15), (16), (17), (18), (19): Xaa is A or G
  MOD_RES (20), (21), (22), (23): Xaa is A or G or is absent

SEQ ID NO: 38773 - protein, 38 aa, Artificial Sequence; identical to SEQ ID NO: 13744
  GFR-binding peptide
  MOD_RES (1), (2), (35), (37): Xaa is C or S
  MOD_RES (16), (17), (18), (19), (20): Xaa is A or G
  MOD_RES (21), (22), (23), (24): Xaa is A or G or is absent

SEQ ID NO: 38774 - protein, 38 aa, Artificial Sequence; identical to SEQ ID NO: 13745
  GFR-binding peptide
  MOD_RES (5), (6), (38): Xaa is C or S

SEQ ID NO: 38775 - protein, 40 aa, Artificial Sequence; identical to SEQ ID NO: 15429
  GFR-binding peptide
  MOD_RES (4), (5), (39): Xaa is C or S
  MOD_RES (19), (20), (21), (22), (23): Xaa is A or G
  MOD_RES (24), (25), (26), (27): Xaa is A or G or is absent

SEQ ID NO: 38776 - protein, 37 aa, Artificial Sequence; identical to SEQ ID NO: 13747
  GFR-binding peptide
  MOD_RES (3), (4), (35), (37): Xaa is C or S

SEQ ID NO: 38777 - protein, 35 aa, Artificial Sequence; identical to SEQ ID NO: 13748
  GFR-binding peptide
  MOD_RES (3), (4), (35): Xaa is C or S

SEQ ID NO: 38778 - protein, 40 aa, Artificial Sequence; identical to SEQ ID NO: 13749
  GFR-binding peptide
  MOD_RES (2), (3), (37), (39): Xaa is C or S
  MOD_RES (17), (18), (19), (20), (21): Xaa is A or G
  MOD_RES (22), (23), (24), (25): Xaa is A or G or is absent

SEQ ID NO: 38779 - protein, 38 aa, Artificial Sequence; identical to SEQ ID NO: 15430
  GFR-binding peptide
  MOD_RES (3), (4), (37): Xaa is C or S
  MOD_RES (18), (19), (20), (21), (22): Xaa is A or G
  MOD_RES (23), (24), (25), (26): Xaa is A or G or is absent

SEQ ID NO: 38780 - protein, 40 aa, Artificial Sequence; identical to SEQ ID NO: 13751
  GFR-binding peptide
  MOD_RES (2), (3), (37), (39): Xaa is C or S
  MOD_RES (17), (18), (19), (20), (21): Xaa is A or G
  MOD_RES (22), (23), (24), (25): Xaa is A or G or is absent

SEQ ID NO: 38781 - protein, 34 aa, Artificial Sequence; identical to SEQ ID NO: 13752
  GFR-binding peptide
  MOD_RES (3), (4): Xaa is C or S

SEQ ID NO: 38782 - protein, 35 aa, Artificial Sequence; identical to SEQ ID NO: 15432
  GFR-binding peptide
  MOD_RES (1), (2): Xaa is C or S
  MOD_RES (16), (17), (18), (19), (20): Xaa is A or G
  MOD_RES (21), (22), (23), (24): Xaa is A or G or is absent

SEQ ID NO: 38783 - protein, 35 aa, Artificial Sequence; identical to SEQ ID NO: 15433
  GFR-binding peptide
  MOD_RES (3), (4): Xaa is C or S

SEQ ID NO: 38784 - protein, 36 aa, Artificial Sequence; identical to SEQ ID NO: 15434
  GFR-binding peptide
  MOD_RES (5), (6): Xaa is C or S

SEQ ID NO: 38785 - protein, 32 aa, Artificial Sequence; identical to SEQ ID NO: 6367
  GFR-binding peptide
  MOD_RES (14), (15), (16), (17), (18): Xaa is A or G
  MOD_RES (19), (20), (21), (22): Xaa is A or G or is absent

SEQ ID NO: 38786 - protein, 40 aa, Artificial Sequence; identical to SEQ ID NO: 13755
  GFR-binding peptide
  MOD_RES (5), (6), (40): Xaa is C or S
  MOD_RES (20), (21), (22), (23), (24): Xaa is A or G
  MOD_RES (25), (26), (27), (28): Xaa is A or G or is absent

SEQ ID NO: 38787 - protein, 38 aa, Artificial Sequence; identical to SEQ ID NO: 15435
  GFR-binding peptide
  MOD_RES (6), (7): Xaa is C or S

SEQ ID NO: 38788 - protein, 39 aa, Artificial Sequence; identical to SEQ ID NO: 6373
  GFR-binding peptide
  MOD_RES (3), (4), (38): Xaa is C or S
  MOD_RES (18), (19), (20), (21), (22): Xaa is A or G
  MOD_RES (23), (24), (25), (26): Xaa is A or G or is absent

SEQ ID NO: 38789 - protein, 35 aa, Artificial Sequence; identical to SEQ ID NO: 13758
  GFR-binding peptide
  MOD_RES (2), (3): Xaa is C or S
  MOD_RES (17), (18), (19), (20), (21): Xaa is A or G
  MOD_RES (22), (23), (24), (25): Xaa is A or G or is absent

SEQ ID NO: 38790 - protein, 34 aa, Artificial Sequence; identical to SEQ ID NO: 13759
  GFR-binding peptide
  MOD_RES (1), (2), (34): Xaa is C or S

SEQ ID NO: 38791 - protein, 34 aa, Artificial Sequence; identical to SEQ ID NO: 13760
  GFR-binding peptide
  MOD_RES (1), (34): Xaa is C or S
  MOD_RES (15), (16), (17), (18), (19): Xaa is A or G
  MOD_RES (20), (21), (22), (23): Xaa is A or G or is absent

SEQ ID NO: 38792 - protein, 34 aa, Artificial Sequence; identical to SEQ ID NO: 8142
  GFR-binding peptide
  MOD_RES (1), (33): Xaa is C or S

SEQ ID NO: 38793 - protein, 41 aa, Artificial Sequence; identical to SEQ ID NO: 15437
  GFR-binding peptide
  MOD_RES (5), (6), (40): Xaa is C or S
  MOD_RES (20), (21), (22), (23), (24): Xaa is A or G
  MOD_RES (25), (26), (27), (28): Xaa is A or G or is absent

SEQ ID NO: 38794 - protein, 34 aa, Artificial Sequence; identical to SEQ ID NO: 13761
  GFR-binding peptide
  MOD_RES (32), (34): Xaa is C or S

SEQ ID NO: 38795 - protein, 32 aa, Artificial Sequence; identical to SEQ ID NO: 15438
  GFR-binding peptide
  MOD_RES (32), (32): Xaa is C or S

SEQ ID NO: 38796 - protein, 35 aa, Artificial Sequence; identical to SEQ ID NO: 8147
  GFR-binding peptide
  MOD_RES (1), (2), (33), (35): Xaa is C or S

SEQ ID NO: 38797 - protein, 32 aa, Artificial Sequence; identical to SEQ ID NO: 15441
  GFR-binding peptide
  MOD_RES (1), (1): Xaa is C or S

SEQ ID NO: 38798 - protein, 34 aa, Artificial Sequence; identical to SEQ ID NO: 13764
  GFR-binding peptide
  MOD_RES (3), (3): Xaa is C or S

SEQ ID NO: 38799 - protein, 39 aa, Artificial Sequence; identical to SEQ ID NO: 6381
  GFR-binding peptide
  MOD_RES (4), (5), (36), (38): Xaa is C or S

SEQ ID NO: 38800 - protein, 38 aa, Artificial Sequence; identical to SEQ ID NO: 15442
  GFR-binding peptide
  MOD_RES (5), (6): Xaa is C or S
  MOD_RES (20), (21), (22), (23), (24): Xaa is A or G
  MOD_RES (25), (26), (27), (28): Xaa is A or G or is absent

SEQ ID NO: 38801 - protein, 37 aa, Artificial Sequence; identical to SEQ ID NO: 13766
  GFR-binding peptide
  MOD_RES (3), (4), (37): Xaa is C or S
  MOD_RES (18), (19), (20), (21), (22): Xaa is A or G
  MOD_RES (23), (24), (25), (26): Xaa is A or G or is absent

SEQ ID NO: 38802 - protein, 39 aa, Artificial Sequence; identical to SEQ ID NO: 15443
  GFR-binding peptide
  MOD_RES (3), (4), (36), (38): Xaa is C or S

SEQ ID NO: 38803 - protein, 39 aa, Artificial Sequence; identical to SEQ ID NO: 6383
  GFR-binding peptide
  MOD_RES (5), (6): Xaa is C or S
  MOD_RES (20), (21), (22), (23), (24): Xaa is A or G
  MOD_RES (25), (26), (27), (28): Xaa is A or G or is absent

SEQ ID NO: 38804 - protein, 33 aa, Artificial Sequence; identical to SEQ ID NO: 8150
  GFR-binding peptide
  MOD_RES (2), (3): Xaa is C or S

SEQ ID NO: 38805 - protein, 36 aa, Artificial Sequence; identical to SEQ ID NO: 8151
  GFR-binding peptide
  MOD_RES (1), (2), (35): Xaa is C or S
  MOD_RES (16), (17), (18), (19), (20): Xaa is A or G
  MOD_RES (21), (22), (23), (24): Xaa is A or G or is absent

SEQ ID NO: 38806 - protein, 34 aa, Artificial Sequence; identical to SEQ ID NO: 13769
  GFR-binding peptide
  MOD_RES (1), (2), (33): Xaa is C or S

SEQ ID NO: 38807 - protein, 38 aa, Artificial Sequence; identical to SEQ ID NO: 15447
  GFR-binding peptide
  MOD_RES (2), (3), (35), (37): Xaa is C or S

SEQ ID NO: 38808 - protein, 40 aa, Artificial Sequence; identical to SEQ ID NO: 13770
  GFR-binding peptide
  MOD_RES (7), (7): Xaa is C or S
  MOD_RES (21), (22), (23), (24), (25): Xaa is A or G
  MOD_RES (26), (27), (28), (29): Xaa is A or G or is absent

SEQ ID NO: 38809 - protein, 42 aa, Artificial Sequence; identical to SEQ ID NO: 15450
  GFR-binding peptide
  MOD_RES (6), (7), (41): Xaa is C or S
  MOD_RES (21), (22), (23), (24), (25): Xaa is A or G
  MOD_RES (26), (27), (28), (29): Xaa is A or G or is absent

SEQ ID NO: 38810 - protein, 39 aa, Artificial Sequence; identical to SEQ ID NO: 13772
  GFR-binding peptide
  MOD_RES (5), (6): Xaa is C or S
  MOD_RES (20), (21), (22), (23), (24): Xaa is A or G
  MOD_RES (25), (26), (27), (28): Xaa is A or G or is absent

SEQ ID NO: 38811 - protein, 35 aa, Artificial Sequence; identical to SEQ ID NO: 13773
  GFR-binding peptide
  MOD_RES (1), (35): Xaa is C or S
  MOD_RES (15), (16), (17), (18), (19): Xaa is A or G
  MOD_RES (20), (21), (22), (23): Xaa is A or G or is absent

SEQ ID NO: 38812 - protein, 43 aa, Artificial Sequence; identical to SEQ ID NO: 15451
  GFR-binding peptide
  MOD_RES (6), (7), (41), (43): Xaa is C or S
  MOD_RES (21), (22), (23), (24), (25): Xaa is A or G
  MOD_RES (26), (27), (28), (29): Xaa is A or G or is absent

SEQ ID NO: 38813 - protein, 34 aa, Artificial Sequence; identical to SEQ ID NO: 15452
  GFR-binding peptide
  MOD_RES (32), (34): Xaa is C or S

SEQ ID NO: 38814 - protein, 34 aa, Artificial Sequence; identical to SEQ ID NO: 15453
  GFR-binding peptide
  MOD_RES (2), (3), (34): Xaa is C or S

SEQ ID NO: 38815 - protein, 36 aa, Artificial Sequence; identical to SEQ ID NO: 13774
  GFR-binding peptide
  MOD_RES (6), (6): Xaa is C or S

SEQ ID NO: 38816 - protein, 36 aa, Artificial Sequence; identical to SEQ ID NO: 15456
  GFR-binding peptide
  MOD_RES (2), (3), (34), (36): Xaa is C or S

SEQ ID NO: 38817 - protein, 38 aa, Artificial Sequence; identical to SEQ ID NO: 8161
  GFR-binding peptide
  MOD_RES (5), (6), (37): Xaa is C or S

SEQ ID NO: 38818 - protein, 36 aa, Artificial Sequence; identical to SEQ ID NO: 8162
  GFR-binding peptide
  MOD_RES (2), (3), (36): Xaa is C or S
  MOD_RES (17), (18), (19), (20), (21): Xaa is A or G
  MOD_RES (22), (23), (24), (25): Xaa is A or G or is absent

SEQ ID NO: 38819 - protein, 42 aa, Artificial Sequence; identical to SEQ ID NO: 15459
  GFR-binding peptide
  MOD_RES (6), (7), (39), (41): Xaa is C or S

SEQ ID NO: 38820 - protein, 41 aa, Artificial Sequence; identical to SEQ ID NO: 13777
  GFR-binding peptide
  MOD_RES (5), (6), (38), (40): Xaa is C or S

SEQ ID NO: 38821 - protein, 39 aa, Artificial Sequence; identical to SEQ ID NO: 13779
  GFR-binding peptide
  MOD_RES (1), (2), (36), (38): Xaa is C or S
  MOD_RES (16), (17), (18), (19), (20): Xaa is A or G
  MOD_RES (21), (22), (23), (24): Xaa is A or G or is absent

SEQ ID NO: 38822 - protein, 33 aa, Artificial Sequence; identical to SEQ ID NO: 15460
  GFR-binding peptide
  MOD_RES (1), (1): Xaa is C or S
  MOD_RES (15), (16), (17), (18), (19): Xaa is A or G
  MOD_RES (20), (21), (22), (23): Xaa is A or G or is absent

SEQ ID NO: 38823 - protein, 37 aa, Artificial Sequence; identical to SEQ ID NO: 13780
  GFR-binding peptide
  MOD_RES (2), (3), (36): Xaa is C or S
  MOD_RES (17), (18), (19), (20), (21): Xaa is A or G
  MOD_RES (22), (23), (24), (25): Xaa is A or G or is absent

SEQ ID NO: 38824 - protein, 36 aa, Artificial Sequence; identical to SEQ ID NO: 15461
  GFR-binding peptide
  MOD_RES (1), (2), (36): Xaa is C or S
  MOD_RES (16), (17), (18), (19), (20): Xaa is A or G
  MOD_RES (21), (22), (23), (24): Xaa is A or G or is absent

SEQ ID NO: 38825 - protein, 36 aa, Artificial Sequence; identical to SEQ ID NO: 8163
  GFR-binding peptide
  MOD_RES (3), (4): Xaa is C or S
  MOD_RES (18), (19), (20), (21), (22): Xaa is A or G
  MOD_RES (23), (24), (25), (26): Xaa is A or G or is absent

SEQ ID NO: 38826 - protein, 34 aa, Artificial Sequence; identical to SEQ ID NO: 8165
  GFR-binding peptide
  MOD_RES (33), (33): Xaa is C or S
  MOD_RES (14), (15), (16), (17), (18): Xaa is A or G
  MOD_RES (19), (20), (21), (22): Xaa is A or G or is absent

SEQ ID NO: 38827 - protein, 37 aa, Artificial Sequence; identical to SEQ ID NO: 15464
  GFR-binding peptide
  MOD_RES (7), (7): Xaa is C or S

SEQ ID NO: 38828 - protein, 34 aa, Artificial Sequence; identical to SEQ ID NO: 13781
  GFR-binding peptide
  MOD_RES (1), (2), (34): Xaa is C or S

SEQ ID NO: 38829 - protein, 38 aa, Artificial Sequence; identical to SEQ ID NO: 15465
  GFR-binding peptide
  MOD_RES (2), (3), (35), (37): Xaa is C or S

SEQ ID NO: 38830 - protein, 30 aa, Artificial Sequence; identical to SEQ ID NO: 13783
  GFR-binding peptide

SEQ ID NO: 38831 - protein, 38 aa, Artificial Sequence; identical to SEQ ID NO: 15466
  GFR-binding peptide
  MOD_RES (6), (7): Xaa is C or S

SEQ ID NO: 38832 - protein, 33 aa, Artificial Sequence; identical to SEQ ID NO: 8168
  GFR-binding peptide
  MOD_RES (1), (2), (33): Xaa is C or S

SEQ ID NO: 38833 - protein, 31 aa, Artificial Sequence; identical to SEQ ID NO: 15468
  GFR-binding peptide

SEQ ID NO: 38834 - protein, 35 aa, Artificial Sequence; identical to SEQ ID NO: 15469
  GFR-binding peptide
  MOD_RES (2), (3): Xaa is C or S
  MOD_RES (17), (18), (19), (20), (21): Xaa is A or G
  MOD_RES (22), (23), (24), (25): Xaa is A or G or is absent

SEQ ID NO: 38835 - protein, 37 aa, Artificial Sequence; identical to SEQ ID NO: 13784
  GFR-binding peptide
  MOD_RES (1), (2), (35), (37): Xaa is C or S
  MOD_RES (16), (17), (18), (19), (20): Xaa is A or G
  MOD_RES (21), (22), (23), (24): Xaa is A or G or is absent

SEQ ID NO: 38836 - protein, 36 aa, Artificial Sequence; identical to SEQ ID NO: 15470
  GFR-binding peptide
  MOD_RES (3), (4), (36): Xaa is C or S

SEQ ID NO: 38837 - protein, 40 aa, Artificial Sequence; identical to SEQ ID NO: 15471
  GFR-binding peptide
  MOD_RES (2), (3), (37), (39): Xaa is C or S
  MOD_RES (17), (18), (19), (20), (21): Xaa is A or G
  MOD_RES (22), (23), (24), (25): Xaa is A or G or is absent

SEQ ID NO: 38838 - protein, 35 aa, Artificial Sequence; identical to SEQ ID NO: 15472
  GFR-binding peptide
  MOD_RES (2), (3): Xaa is C or S
  MOD_RES (17), (18), (19), (20), (21): Xaa is A or G
  MOD_RES (22), (23), (24), (25): Xaa is A or G or is absent

SEQ ID NO: 38839 - protein, 34 aa, Artificial Sequence; identical to SEQ ID NO: 15473
  GFR-binding peptide
  MOD_RES (1), (1): Xaa is C or S
  MOD_RES (15), (16), (17), (18), (19): Xaa is A or G
  MOD_RES (20), (21), (22), (23): Xaa is A or G or is absent

SEQ ID NO: 38840 - protein, 35 aa, Artificial Sequence; identical to SEQ ID NO: 15474
  GFR-binding peptide
  MOD_RES (2), (3): Xaa is C or S
  MOD_RES (17), (18), (19), (20), (21): Xaa is A or G
  MOD_RES (22), (23), (24), (25): Xaa is A or G or is absent

SEQ ID NO: 38841 - protein, 36 aa, Artificial Sequence; identical to SEQ ID NO: 13787
  GFR-binding peptide
  MOD_RES (3), (3): Xaa is C or S
  MOD_RES (17), (18), (19), (20), (21): Xaa is A or G
  MOD_RES (22), (23), (24), (25): Xaa is A or G or is absent

SEQ ID NO: 38842 - protein, 39 aa, Artificial Sequence; identical to SEQ ID NO: 13788
  GFR-binding peptide
  MOD_RES (5), (6), (38): Xaa is C or S

SEQ ID NO: 38843 - protein, 42 aa, Artificial Sequence
  GFR-binding peptide
  MOD_RES (6), (7), (40), (42): Xaa is C or S
  MOD_RES (21), (22), (23), (24), (25): Xaa is A or G
  MOD_RES (26), (27), (28), (29): Xaa is A or G or is absent
ASASPXXVSQDLEPLTILYYXXXXXXXXXEQLSNMIVKSXKX

SEQ ID NO: 38844 - protein, 35 aa, Artificial Sequence; identical to SEQ ID NO: 13790
  GFR-binding peptide
  MOD_RES (1), (2): Xaa is C or S
  MOD_RES (16), (17), (18), (19), (20): Xaa is A or G
  MOD_RES (21), (22), (23), (24): Xaa is A or G or is absent

SEQ ID NO: 38845 - protein, 41 aa, Artificial Sequence; identical to SEQ ID NO: 15477
  GFR-binding peptide
  MOD_RES (5), (6), (39), (41): Xaa is C or S
  MOD_RES (20), (21), (22), (23), (24): Xaa is A or G
  MOD_RES (25), (26), (27), (28): Xaa is A or G or is absent

SEQ ID NO: 38846 - protein, 35 aa, Artificial Sequence; identical to SEQ ID NO: 13791
  GFR-binding peptide
  MOD_RES (4), (5): Xaa is C or S

SEQ ID NO: 38847 - protein, 36 aa, Artificial Sequence; identical to SEQ ID NO: 15479
  GFR-binding peptide
  MOD_RES (2), (34), (36): Xaa is C or S

SEQ ID NO: 38848 - protein, 35 aa, Artificial Sequence; identical to SEQ ID NO: 13792
  GFR-binding peptide
  MOD_RES (2), (3), (35): Xaa is C or S

SEQ ID NO: 38849 - protein, 33 aa, Artificial Sequence; identical to SEQ ID NO: 15481
  GFR-binding peptide
  MOD_RES (33), (33): Xaa is C or S
  MOD_RES (14), (15), (16), (17), (18): Xaa is A or G
  MOD_RES (19), (20), (21), (22): Xaa is A or G or is absent

SEQ ID NO: 38850 - protein, 36 aa, Artificial Sequence; identical to SEQ ID NO: 13793
  GFR-binding peptide
  MOD_RES (2), (3), (35): Xaa is C or S

SEQ ID NO: 38851 - protein, 36 aa, Artificial Sequence; identical to SEQ ID NO: 13794
  GFR-binding peptide
  MOD_RES (2), (3), (35): Xaa is C or S

SEQ ID NO: 38852 - protein, 36 aa, Artificial Sequence; identical to SEQ ID NO: 15482
  GFR-binding peptide
  MOD_RES (2), (3): Xaa is C or S
  MOD_RES (17), (18), (19), (20), (21): Xaa is A or G
  MOD_RES (22), (23), (24), (25): Xaa is A or G or is absent

SEQ ID NO: 38853 - protein, 34 aa, Artificial Sequence; identical to SEQ ID NO: 13795
  GFR-binding peptide
  MOD_RES (32), (34): Xaa is C or S

SEQ ID NO: 38854 - protein, 32 aa, Artificial Sequence; identical to SEQ ID NO: 13796
  GFR-binding peptide
  MOD_RES (14), (15), (16), (17), (18): Xaa is A or G
  MOD_RES (19), (20), (21), (22): Xaa is A or G or is absent

SEQ ID NO: 38855 - protein, 32 aa, Artificial Sequence; identical to SEQ ID NO: 8185
  GFR-binding peptide
  MOD_RES (14), (15), (16), (17), (18): Xaa is A or G
  MOD_RES (19), (20), (21), (22): Xaa is A or G or is absent

SEQ ID NO: 38856 - protein, 43 aa, Artificial Sequence; identical to SEQ ID NO: 8186
  GFR-binding peptide
  MOD_RES (6), (7), (40), (42): Xaa is C or S
  MOD_RES (21), (22), (23), (24), (25): Xaa is A or G
  MOD_RES (26), (27), (28), (29): Xaa is A or G or is absent

SEQ ID NO: 38857 - protein, 31 aa, Artificial Sequence; identical to SEQ ID NO: 15486
  GFR-binding peptide
  MOD_RES (1), (1): Xaa is C or S

SEQ ID NO: 38858 - protein, 39 aa, Artificial Sequence; identical to SEQ ID NO: 13799
  GFR-binding peptide
  MOD_RES (4), (5), (37), (39): Xaa is C or S

SEQ ID NO: 38859 - protein, 38 aa, Artificial Sequence; identical to SEQ ID NO: 15487
  GFR-binding peptide
  MOD_RES (4), (5): Xaa is C or S
  MOD_RES (19), (20), (21), (22), (23): Xaa is A or G
  MOD_RES (24), (25), (26), (27): Xaa is A or G or is absent

SEQ ID NO: 38860 - protein, 36 aa, Artificial Sequence; identical to SEQ ID NO: 8191
  GFR-binding peptide
  MOD_RES (33), (35): Xaa is C or S
  MOD_RES (14), (15), (16), (17), (18): Xaa is A or G
  MOD_RES (19), (20), (21), (22): Xaa is A or G or is absent

SEQ ID NO: 38861 - protein, 37 aa, Artificial Sequence; identical to SEQ ID NO: 15491
  GFR-binding peptide
  MOD_RES (2), (3), (34), (36): Xaa is C or S

SEQ ID NO: 38862 - protein, 37 aa, Artificial Sequence; identical to SEQ ID NO: 15492
  GFR-binding peptide
  MOD_RES (3), (4), (36): Xaa is C or S

SEQ ID NO: 38863 - protein, 35 aa, Artificial Sequence; identical to SEQ ID NO: 13800
  GFR-binding peptide
  MOD_RES (2), (3), (35): Xaa is C or S

SEQ ID NO: 38864 - protein, 35 aa, Artificial Sequence; identical to SEQ ID NO: 13801
  GFR-binding peptide
  MOD_RES (2), (3), (35): Xaa is C or S

SEQ ID NO: 38865 - protein, 34 aa, Artificial Sequence; identical to SEQ ID NO: 13803
  GFR-binding peptide
  MOD_RES (1), (33): Xaa is C or S

SEQ ID NO: 38866 - protein, 32 aa, Artificial Sequence; identical to SEQ ID NO: 13804
  GFR-binding peptide
  MOD_RES (32), (32): Xaa is C or S

SEQ ID NO: 38867 - protein, 37 aa, Artificial Sequence; identical to SEQ ID NO: 15494
  GFR-binding peptide
  MOD_RES (4), (5): Xaa is C or S
  MOD_RES (19), (20), (21), (22), (23): Xaa is A or G
  MOD_RES (24), (25), (26), (27): Xaa is A or G or is absent

SEQ ID NO: 38868 - protein, 33 aa, Artificial Sequence; identical to SEQ ID NO: 13805
  GFR-binding peptide
  MOD_RES (33), (33): Xaa is C or S
  MOD_RES (14), (15), (16), (17), (18): Xaa is A or G
  MOD_RES (19), (20), (21), (22): Xaa is A or G or is absent

SEQ ID NO: 38869 - protein, 36 aa, Artificial Sequence; identical to SEQ ID NO: 15495
  GFR-binding peptide
  MOD_RES (1), (2), (34), (36): Xaa is C or S

SEQ ID NO: 38870 - protein, 36 aa, Artificial Sequence; identical to SEQ ID NO: 15496
  GFR-binding peptide
  MOD_RES (3), (3): Xaa is C or S
  MOD_RES (17), (18), (19), (20), (21): Xaa is A or G
  MOD_RES (22), (23), (24), (25): Xaa is A or G or is absent

SEQ ID NO: 38871 - protein, 37 aa, Artificial Sequence; identical to SEQ ID NO: 15497
  GFR-binding peptide
  MOD_RES (3), (4), (36): Xaa is C or S

SEQ ID NO: 38872 - protein, 34 aa, Artificial Sequence; identical to SEQ ID NO: 8193
  GFR-binding peptide
  MOD_RES (1), (32), (34): Xaa is C or S

SEQ ID NO: 38873 - protein, 32 aa, Artificial Sequence; identical to SEQ ID NO: 13807
  GFR-binding peptide
  MOD_RES (31), (31): Xaa is C or S

SEQ ID NO: 38874 - protein, 38 aa, Artificial Sequence; identical to SEQ ID NO: 15499
  GFR-binding peptide
  MOD_RES (2), (3), (36), (38): Xaa is C or S
  MOD_RES (17), (18), (19), (20), (21): Xaa is A or G
  MOD_RES (22), (23), (24), (25): Xaa is A or G or is absent

SEQ ID NO: 38875 - protein, 36 aa, Artificial Sequence; identical to SEQ ID NO: 13808
  GFR-binding peptide
  MOD_RES (1), (33), (35): Xaa is C or S

SEQ ID NO: 38876 - protein, 37 aa, Artificial Sequence; identical to SEQ ID NO: 15500
  GFR-binding peptide
  MOD_RES (34), (36): Xaa is C or S
  MOD_RES (14), (15), (16), (17), (18): Xaa is A or G
  MOD_RES (19), (20), (21), (22): Xaa is A or G or is absent

SEQ ID NO: 38877 - protein, 38 aa, Artificial Sequence; identical to SEQ ID NO: 15502
  GFR-binding peptide
  MOD_RES (6), (7), (38): Xaa is C or S

SEQ ID NO: 38878 - protein, 42 aa, Artificial Sequence; identical to SEQ ID NO: 13809
  GFR-binding peptide
  MOD_RES (6), (7), (41): Xaa is C or S
  MOD_RES (21), (22), (23), (24), (25): Xaa is A or G
  MOD_RES (26), (27), (28), (29): Xaa is A or G or is absent

SEQ ID NO: 38879 - protein, 41 aa, Artificial Sequence; identical to SEQ ID NO: 15503
  GFR-binding peptide
  MOD_RES (4), (5), (38), (40): Xaa is C or S
  MOD_RES (19), (20), (21), (22), (23): Xaa is A or G
  MOD_RES (24), (25), (26), (27): Xaa is A or G or is absent

SEQ ID NO: 38880 - protein, 40 aa, Artificial Sequence; identical to SEQ ID NO: 13810
  GFR-binding peptide
  MOD_RES (4), (38), (40): Xaa is C or S
  MOD_RES (18), (19), (20), (21), (22): Xaa is A or G
  MOD_RES (23), (24), (25), (26): Xaa is A or G or is absent

SEQ ID NO: 38881 - protein, 43 aa, Artificial Sequence; identical to SEQ ID NO: 13811
  GFR-binding peptide
  MOD_RES (6), (7), (40), (42): Xaa is C or S
  MOD_RES (21), (22), (23), (24), (25): Xaa is A or G
  MOD_RES (26), (27), (28), (29): Xaa is A or G or is absent

SEQ ID NO: 38882 - protein, 37 aa, Artificial Sequence; identical to SEQ ID NO: 6432
  GFR-binding peptide
  MOD_RES (4), (5), (36): Xaa is C or S

SEQ ID NO: 38883 - protein, 32 aa, Artificial Sequence; identical to SEQ ID NO: 13813
  GFR-binding peptide
  MOD_RES (1), (2): Xaa is C or S

SEQ ID NO: 38884 - protein, 31 aa, Artificial Sequence; identical to SEQ ID NO: 15504
  GFR-binding peptide
  MOD_RES (1), (1): Xaa is C or S

SEQ ID NO: 38885 - protein, 38 aa, Artificial Sequence; identical to SEQ ID NO: 15506
  GFR-binding peptide
  MOD_RES (6), (7): Xaa is C or S

SEQ ID NO: 38886 - protein, 41 aa, Artificial Sequence; identical to SEQ ID NO: 6436
  GFR-binding peptide
  MOD_RES (5), (6), (38), (40): Xaa is C or S

SEQ ID NO: 38887 - protein, 36 aa, Artificial Sequence; identical to SEQ ID NO: 13816
  GFR-binding peptide
  MOD_RES (33), (35): Xaa is C or S
  MOD_RES (14), (15), (16), (17), (18): Xaa is A or G
  MOD_RES (19), (20), (21), (22): Xaa is A or G or is absent

SEQ ID NO: 38888 - protein, 38 aa, Artificial Sequence; identical to SEQ ID NO: 8199
  GFR-binding peptide
  MOD_RES (3), (4), (37): Xaa is C or S
  MOD_RES (18), (19), (20), (21), (22): Xaa is A or G
  MOD_RES (23), (24), (25), (26): Xaa is A or G or is absent

SEQ ID NO: 38889 - protein, 43 aa, Artificial Sequence; identical to SEQ ID NO: 15509
  GFR-binding peptide
  MOD_RES (6), (7), (41), (43): Xaa is C or S
  MOD_RES (21), (22), (23), (24), (25): Xaa is A or G
  MOD_RES (26), (27), (28), (29): Xaa is A or G or is absent

SEQ ID NO: 38890 - protein, 31 aa, Artificial Sequence; identical to SEQ ID NO: 13818
  GFR-binding peptide
  MOD_RES (1), (1): Xaa is C or S

SEQ ID NO: 38891 - protein, 36 aa, Artificial Sequence; identical to SEQ ID NO: 15510
  GFR-binding peptide
  MOD_RES (3), (4), (36): Xaa is C or S

SEQ ID NO: 38892 - protein, 38 aa, Artificial Sequence; identical to SEQ ID NO: 13820
  GFR-binding peptide
  MOD_RES (1), (2), (36), (38): Xaa is C or S
  MOD_RES (16), (17), (18), (19), (20): Xaa is A or G
  MOD_RES (21), (22), (23), (24): Xaa is A or G or is absent

SEQ ID NO: 38893 - protein, 35 aa, Artificial Sequence; identical to SEQ ID NO: 13821
  GFR-binding peptide
  MOD_RES (2), (3), (35): Xaa is C or S

SEQ ID NO: 38894 - protein, 39 aa, Artificial Sequence; identical to SEQ ID NO: 13822
  GFR-binding peptide
  MOD_RES (5), (37), (39): Xaa is C or S

SEQ ID NO: 38895 - protein, 41 aa, Artificial Sequence; identical to SEQ ID NO: 13823
  GFR-binding peptide
  MOD_RES (6), (38), (40): Xaa is C or S

SEQ ID NO: 38896 - protein, 36 aa, Artificial Sequence; identical to SEQ ID NO: 13824
  GFR-binding peptide
  MOD_RES (2), (3), (35): Xaa is C or S

SEQ ID NO: 38897 - protein, 41 aa, Artificial Sequence; identical to SEQ ID NO: 6443
  GFR-binding peptide
  MOD_RES (3), (4), (38), (40): Xaa is C or S
  MOD_RES (18), (19), (20), (21), (22): Xaa is A or G
  MOD_RES (23), (24), (25), (26): Xaa is A or G or is absent

SEQ ID NO: 38898 - protein, 41 aa, Artificial Sequence; identical to SEQ ID NO: 15511
  GFR-binding peptide
  MOD_RES (6), (7), (40): Xaa is C or S
  MOD_RES (21), (22), (23), (24), (25): Xaa is A or G
  MOD_RES (26), (27), (28), (29): Xaa is A or G or is absent

SEQ ID NO: 38899 - protein, 36 aa, Artificial Sequence; identical to SEQ ID NO: 13826
  GFR-binding peptide
  MOD_RES (5), (6): Xaa is C or S

SEQ ID NO: 38900 - protein, 37 aa, Artificial Sequence; identical to SEQ ID NO: 15512
  GFR-binding peptide
  MOD_RES (4), (5): Xaa is C or S
  MOD_RES (19), (20), (21), (22), (23): Xaa is A or G
  MOD_RES (24), (25), (26), (27): Xaa is A or G or is absent

SEQ ID NO: 38901 - protein, 37 aa, Artificial Sequence; identical to SEQ ID NO: 13827
  GFR-binding peptide
  MOD_RES (1), (35), (37): Xaa is C or S
  MOD_RES (15), (16), (17), (18), (19): Xaa is A or G
  MOD_RES (20), (21), (22), (23): Xaa is A or G or is absent

SEQ ID NO: 38902 - protein, 36 aa, Artificial Sequence; identical to SEQ ID NO: 6445
  GFR-binding peptide
  MOD_RES (4), (5): Xaa is C or S

SEQ ID NO: 38903 - protein, 39 aa, Artificial Sequence; identical to SEQ ID NO: 15514
  GFR-binding peptide
  MOD_RES (5), (6): Xaa is C or S
  MOD_RES (20), (21), (22), (23), (24): Xaa is A or G
  MOD_RES (25), (26), (27), (28): Xaa is A or G or is absent

SEQ ID NO: 38904 - protein, 38 aa, Artificial Sequence; identical to SEQ ID NO: 15515
  GFR-binding peptide
  MOD_RES (3), (4), (36), (38): Xaa is C or S

SEQ ID NO: 38905 - protein, 35 aa, Artificial Sequence; identical to SEQ ID NO: 15516
  GFR-binding peptide
  MOD_RES (2), (3), (34): Xaa is C or S

SEQ ID NO: 38906 - protein, 34 aa, Artificial Sequence; identical to SEQ ID NO: 6449
  GFR-binding peptide
  MOD_RES (31), (33): Xaa is C or S

SEQ ID NO: 38907 - protein, 39 aa, Artificial Sequence; identical to SEQ ID NO: 8212
  GFR-binding peptide
  MOD_RES (5), (6), (39): Xaa is C or S
  MOD_RES (20), (21), (22), (23), (24): Xaa is A or G
  MOD_RES (25), (26), (27), (28): Xaa is A or G or is absent

SEQ ID NO: 38908 - protein, 36 aa, Artificial Sequence; identical to SEQ ID NO: 15518
  GFR-binding peptide
  MOD_RES (1), (33), (35): Xaa is C or S

SEQ ID NO: 38909 - protein, 35 aa, Artificial Sequence; identical to SEQ ID NO: 15520
  GFR-binding peptide
  MOD_RES (2), (3), (35): Xaa is C or S

SEQ ID NO: 38910 - protein, 36 aa, Artificial Sequence; identical to SEQ ID NO: 15521
  GFR-binding peptide
  MOD_RES (33), (35): Xaa is C or S
  MOD_RES (14), (15), (16), (17), (18): Xaa is A or G
  MOD_RES (19), (20), (21), (22): Xaa is A or G or is absent

SEQ ID NO: 38911 - protein, 33 aa, Artificial Sequence; identical to SEQ ID NO: 15522
  GFR-binding peptide
  MOD_RES (14), (15), (16), (17), (18): Xaa is A or G
  MOD_RES (19), (20), (21), (22): Xaa is A or G or is absent

SEQ ID NO: 38912 - protein, 38 aa, Artificial Sequence
  GFR-binding peptide
  MOD_RES (2), (3), (36), (38): Xaa is C or S
  MOD_RES (17), (18), (19), (20), (21): Xaa is A or G
  MOD_RES (22), (23), (24), (25): Xaa is A or G or is absent
PXXVSQDLEPLTILYYXXXXXXXXXEQLSNMIVKSXKX

SEQ ID NO: 38913 - protein, 39 aa, Artificial Sequence; identical to SEQ ID NO: 15523
  GFR-binding peptide
  MOD_RES (2), (36), (38): Xaa is C or S
  MOD_RES (16), (17), (18), (19), (20): Xaa is A or G
  MOD_RES (21), (22), (23), (24): Xaa is A or G or is absent

SEQ ID NO: 38914 - protein, 34 aa, Artificial Sequence; identical to SEQ ID NO: 15525
  GFR-binding peptide
  MOD_RES (1), (1): Xaa is C or S
  MOD_RES (15), (16), (17), (18), (19): Xaa is A or G
  MOD_RES (20), (21), (22), (23): Xaa is A or G or is absent

SEQ ID NO: 38915 - protein, 37 aa, Artificial Sequence; identical to SEQ ID NO: 13831
  GFR-binding peptide
  MOD_RES (3), (4): Xaa is C or S
  MOD_RES (18), (19), (20), (21), (22): Xaa is A or G
  MOD_RES (23), (24), (25), (26): Xaa is A or G or is absent

SEQ ID NO: 38916 - protein, 36 aa, Artificial Sequence; identical to SEQ ID NO: 13832
  GFR-binding peptide
  MOD_RES (34), (36): Xaa is C or S
  MOD_RES (14), (15), (16), (17), (18): Xaa is A or G
  MOD_RES (19), (20), (21), (22): Xaa is A or G or is absent

SEQ ID NO: 38917 - protein, 33 aa, Artificial Sequence; identical to SEQ ID NO: 15527
  GFR-binding peptide
  MOD_RES (1), (2): Xaa is C or S

SEQ ID NO: 38918 - protein, 35 aa, Artificial Sequence; identical to SEQ ID NO: 6458
  GFR-binding peptide
  MOD_RES (2), (3), (35): Xaa is C or S

SEQ ID NO: 38919 - protein, 35 aa, Artificial Sequence; identical to SEQ ID NO: 15528
  GFR-binding peptide
  MOD_RES (1), (2), (35): Xaa is C or S
  MOD_RES (16), (17), (18), (19), (20): Xaa is A or G
  MOD_RES (21), (22), (23), (24): Xaa is A or G or is absent

SEQ ID NO: 38920 - protein, 39 aa, Artificial Sequence; identical to SEQ ID NO: 13834
  GFR-binding peptide
  MOD_RES (1), (2), (36), (38): Xaa is C or S
  MOD_RES (16), (17), (18), (19), (20): Xaa is A or G
  MOD_RES (21), (22), (23), (24): Xaa is A or G or is absent

SEQ ID NO: 38921 - protein, 40 aa, Artificial Sequence; identical to SEQ ID NO: 13836
  GFR-binding peptide
  MOD_RES (6), (38), (40): Xaa is C or S

SEQ ID NO: 38922 - protein, 37 aa, Artificial Sequence; identical to SEQ ID NO: 15530
  GFR-binding peptide
  MOD_RES (4), (5): Xaa is C or S
  MOD_RES (19), (20), (21), (22), (23): Xaa is A or G
  MOD_RES (24), (25), (26), (27): Xaa is A or G or is absent

SEQ ID NO: 38923 - protein, 35 aa, Artificial Sequence; identical to SEQ ID NO: 15531
  GFR-binding peptide
  MOD_RES (33), (35): Xaa is C or S
  MOD_RES (14), (15), (16), (17), (18): Xaa is A or G
  MOD_RES (19), (20), (21), (22): Xaa is A or G or is absent

SEQ ID NO: 38924 - protein, 31 aa, Artificial Sequence; identical to SEQ ID NO: 13837
  GFR-binding peptide
  MOD_RES (31), (31): Xaa is C or S

SEQ ID NO: 38925 - protein, 36 aa, Artificial Sequence; identical to SEQ ID NO: 15533
  GFR-binding peptide
  MOD_RES (3), (4), (35): Xaa is C or S

SEQ ID NO: 38926 - protein, 36 aa, Artificial Sequence; identical to SEQ ID NO: 15535
  GFR-binding peptide
  MOD_RES (4), (5): Xaa is C or S

SEQ ID NO: 38927 - protein, 42 aa, Artificial Sequence; identical to SEQ ID NO: 13838
  GFR-binding peptide
  MOD_RES (6), (7), (39), (41): Xaa is C or S

SEQ ID NO: 38928 - protein, 37 aa, Artificial Sequence; identical to SEQ ID NO: 13839
  GFR-binding peptide
  MOD_RES (1), (2), (36): Xaa is C or S
  MOD_RES (16), (17), (18), (19), (20): Xaa is A or G
  MOD_RES (21), (22), (23), (24): Xaa is A or G or is absent

SEQ ID NO: 38929 - protein, 42 aa, Artificial Sequence; identical to SEQ ID NO: 13840
  GFR-binding peptide
  MOD_RES (6), (7), (40), (42): Xaa is C or S
  MOD_RES (21), (22), (23), (24), (25): Xaa is A or G
  MOD_RES (26), (27), (28), (29): Xaa is A or G or is absent

SEQ ID NO: 38930 - protein, 38 aa, Artificial Sequence; identical to SEQ ID NO: 15537
  GFR-binding peptide
  MOD_RES (2), (3), (37): Xaa is C or S
  MOD_RES (17), (18), (19), (20), (21): Xaa is A or G
  MOD_RES (22), (23), (24), (25): Xaa is A or G or is absent

SEQ ID NO: 38931 - protein, 36 aa, Artificial Sequence; identical to SEQ ID NO: 13841
  GFR-binding peptide
  MOD_RES (1), (2), (33), (35): Xaa is C or S

SEQ ID NO: 38932 - protein, 37 aa, Artificial Sequence; identical to SEQ ID NO: 8227
  GFR-binding peptide
  MOD_RES (3), (4), (36): Xaa is C or S

SEQ ID NO: 38933 - protein, 39 aa, Artificial Sequence
  GFR-binding peptide
  MOD_RES (5), (6), (39): Xaa is C or S
  MOD_RES (20), (21), (22), (23), (24): Xaa is A or G
  MOD_RES (25), (26), (27), (28): Xaa is A or G or is absent
SASPXXVSQDLEPLTILYYXXXXXXXXXEQLSNMIVKSX

SEQ ID NO: 38934 - protein, 38 aa, Artificial Sequence; identical to SEQ ID NO: 6467
  GFR-binding peptide
  MOD_RES (2), (3), (36), (38): Xaa is C or S
  MOD_RES (17), (18), (19), (20), (21): Xaa is A or G
  MOD_RES (22), (23), (24), (25): Xaa is A or G or is absent

SEQ ID NO: 38935 - protein, 33 aa, Artificial Sequence; identical to SEQ ID NO: 13843
  GFR-binding peptide
  MOD_RES (31), (33): Xaa is C or S

SEQ ID NO: 38936 - protein, 38 aa, Artificial Sequence; identical to SEQ ID NO: 13844
  GFR-binding peptide
  MOD_RES (4), (5): Xaa is C or S
  MOD_RES (19), (20), (21), (22), (23): Xaa is A or G
  MOD_RES (24), (25), (26), (27): Xaa is A or G or is absent

SEQ ID NO: 38937 - protein, 34 aa, Artificial Sequence; identical to SEQ ID NO: 8229
  GFR-binding peptide
  MOD_RES (33), (33): Xaa is C or S
  MOD_RES (14), (15), (16), (17), (18): Xaa is A or G
  MOD_RES (19), (20), (21), (22): Xaa is A or G or is absent

SEQ ID NO: 38938 - protein, 39 aa, Artificial Sequence; identical to SEQ ID NO: 13845
  GFR-binding peptide
  MOD_RES (1), (2), (36), (38): Xaa is C or S
  MOD_RES (16), (17), (18), (19), (20): Xaa is A or G
  MOD_RES (21), (22), (23), (24): Xaa is A or G or is absent

SEQ ID NO: 38939 - protein, 34 aa, Artificial Sequence; identical to SEQ ID NO: 15541
  GFR-binding peptide
  MOD_RES (1), (2): Xaa is C or S
  MOD_RES (16), (17), (18), (19), (20): Xaa is A or G
  MOD_RES (21), (22), (23), (24): Xaa is A or G or is absent

SEQ ID NO: 38940 - protein, 36 aa, Artificial Sequence; identical to SEQ ID NO: 13846
  GFR-binding peptide
  MOD_RES (5), (6): Xaa is C or S

SEQ ID NO: 38941 - protein, 32 aa, Artificial Sequence; identical to SEQ ID NO: 15542
  GFR-binding peptide
  MOD_RES (14), (15), (16), (17), (18): Xaa is A or G
  MOD_RES (19), (20), (21), (22): Xaa is A or G or is absent

SEQ ID NO: 38942 - protein, 34 aa, Artificial Sequence; identical to SEQ ID NO: 15543
  GFR-binding peptide
  MOD_RES (1), (2), (34): Xaa is C or S

SEQ ID NO: 38943 - protein, 35 aa, Artificial Sequence; identical to SEQ ID NO: 13848
  GFR-binding peptide
  MOD_RES (3), (4): Xaa is C or S

SEQ ID NO: 38944 - protein, 41 aa, Artificial Sequence; identical to SEQ ID NO: 15544
  GFR-binding peptide
  MOD_RES (5), (6), (38), (40): Xaa is C or S

SEQ ID NO: 38945 - protein, 33 aa, Artificial Sequence; identical to SEQ ID NO: 13851
  GFR-binding peptide
  MOD_RES (2), (3): Xaa is C or S

SEQ ID NO: 38946 - protein, 42 aa, Artificial Sequence; identical to SEQ ID NO: 15546
  GFR-binding peptide
  MOD_RES (6), (7), (40), (42): Xaa is C or S
  MOD_RES (21), (22), (23), (24), (25): Xaa is A or G
  MOD_RES (26), (27), (28), (29): Xaa is A or G or is absent

SEQ ID NO: 38947 - protein, 37 aa, Artificial Sequence; identical to SEQ ID NO: 15547
  GFR-binding peptide
  MOD_RES (1), (2), (34), (36): Xaa is C or S

SEQ ID NO: 38948 - protein, 34 aa, Artificial Sequence; identical to SEQ ID NO: 13854
  GFR-binding peptide
  MOD_RES (3), (4): Xaa is C or S

SEQ ID NO: 38949 - protein, 38 aa, Artificial Sequence; identical to SEQ ID NO: 13855
  GFR-binding peptide
  MOD_RES (6), (7), (38): Xaa is C or S

SEQ ID NO: 38950 - protein, 36 aa, Artificial Sequence; identical to SEQ ID NO: 15549
  GFR-binding peptide
  MOD_RES (4), (5): Xaa is C or S

SEQ ID NO: 38951 - protein, 42 aa, Artificial Sequence; identical to SEQ ID NO: 15550
  GFR-binding peptide
  MOD_RES (5), (6), (39), (41): Xaa is C or S
  MOD_RES (20), (21), (22), (23), (24): Xaa is A or G
  MOD_RES (25), (26), (27), (28): Xaa is A or G or is absent

SEQ ID NO: 38952 - protein, 37 aa, Artificial Sequence; identical to SEQ ID NO: 13858
  GFR-binding peptide
  MOD_RES (6), (7): Xaa is C or S

SEQ ID NO: 38953 - protein, 41 aa, Artificial Sequence; identical to SEQ ID NO: 15551
  GFR-binding peptide
  MOD_RES (4), (5), (39), (41): Xaa is C or S
  MOD_RES (19), (20), (21), (22), (23): Xaa is A or G
  MOD_RES (24), (25), (26), (27): Xaa is A or G or is absent

SEQ ID NO: 38954 - protein, 35 aa, Artificial Sequence; identical to SEQ ID NO: 8240
  GFR-binding peptide
  MOD_RES (1), (2): Xaa is C or S
  MOD_RES (16), (17), (18), (19), (20): Xaa is A or G
  MOD_RES (21), (22), (23), (24): Xaa is A or G or is absent

SEQ ID NO: 38955 - protein, 38 aa, Artificial Sequence; identical to SEQ ID NO: 15553
  GFR-binding peptide
  MOD_RES (6), (7): Xaa is C or S

SEQ ID NO: 38956 - protein, 39 aa, Artificial Sequence; identical to SEQ ID NO: 8241
  GFR-binding peptide
  MOD_RES (3), (4), (38): Xaa is C or S
  MOD_RES (18), (19), (20), (21), (22): Xaa is A or G
  MOD_RES (23), (24), (25), (26): Xaa is A or G or is absent

SEQ ID NO: 38957 - protein, 32 aa, Artificial Sequence; identical to SEQ ID NO: 15555
  GFR-binding peptide
  MOD_RES (1), (1): Xaa is C or S

SEQ ID NO: 38958 - protein, 39 aa, Artificial Sequence; identical to SEQ ID NO: 15556
  GFR-binding peptide
  MOD_RES (4), (5), (39): Xaa is C or S
  MOD_RES (19), (20), (21), (22), (23): Xaa is A or G
  MOD_RES (24), (25), (26), (27): Xaa is A or G or is absent

SEQ ID NO: 38959 - protein, 38 aa, Artificial Sequence; identical to SEQ ID NO: 15557
  GFR-binding peptide
  MOD_RES (3), (35), (37): Xaa is C or S

SEQ ID NO: 38960 - protein, 41 aa, Artificial Sequence; identical to SEQ ID NO: 15558
  GFR-binding peptide
  MOD_RES (6), (7), (41): Xaa is C or S
  MOD_RES (21), (22), (23), (24), (25): Xaa is A or G
  MOD_RES (26), (27), (28), (29): Xaa is A or G or is absent

SEQ ID NO: 38961 - protein, 42 aa, Artificial Sequence; identical to SEQ ID NO: 15559
  GFR-binding peptide
  MOD_RES (5), (39), (41): Xaa is C or S
  MOD_RES (19), (20), (21), (22), (23): Xaa is A or G
  MOD_RES (24), (25), (26), (27): Xaa is A or G or is absent

SEQ ID NO: 38962 - protein, 40 aa, Artificial Sequence; identical to SEQ ID NO: 15560
  GFR-binding peptide
  MOD_RES (6), (7), (40): Xaa is C or S
  MOD_RES (21), (22), (23), (24), (25): Xaa is A or G
  MOD_RES (26), (27), (28), (29): Xaa is A or G or is absent

SEQ ID NO: 38963 - protein, 39 aa, Artificial Sequence; identical to SEQ ID NO: 15561
  GFR-binding peptide
  MOD_RES (3), (37), (39): Xaa is C or S
  MOD_RES (17), (18), (19), (20), (21): Xaa is A or G
  MOD_RES (22), (23), (24), (25): Xaa is A or G or is absent

SEQ ID NO: 38964 - protein, 42 aa, Artificial Sequence; identical to SEQ ID NO: 15565
  GFR-binding peptide
  MOD_RES (6), (7), (40), (42): Xaa is C or S
  MOD_RES (21), (22), (23), (24), (25): Xaa is A or G
  MOD_RES (26), (27), (28), (29): Xaa is A or G or is absent

SEQ ID NO: 38965 - protein, 35 aa, Artificial Sequence; identical to SEQ ID NO: 8249
  GFR-binding peptide
  MOD_RES (2), (3): Xaa is C or S
  MOD_RES (17), (18), (19), (20), (21): Xaa is A or G
  MOD_RES (22), (23), (24), (25): Xaa is A or G or is absent

SEQ ID NO: 38966 - protein, 37 aa, Artificial Sequence; identical to SEQ ID NO: 13861
  GFR-binding peptide
  MOD_RES (1), (2), (34), (36): Xaa is C or S

SEQ ID NO: 38967 - protein, 38 aa, Artificial Sequence; identical to SEQ ID NO: 13862
  GFR-binding peptide
  MOD_RES (3), (4), (37): Xaa is C or S
  MOD_RES (18), (19), (20), (21), (22): Xaa is A or G
  MOD_RES (23), (24), (25), (26): Xaa is A or G or is absent

SEQ ID NO: 38968 - protein, 38 aa, Artificial Sequence; identical to SEQ ID NO: 15567
  GFR-binding peptide
  MOD_RES (3), (4), (38): Xaa is C or S
  MOD_RES (18), (19), (20), (21), (22): Xaa is A or G
  MOD_RES (23), (24), (25), (26): Xaa is A or G or is absent

SEQ ID NO: 38969 - protein, 38 aa, Artificial Sequence; identical to SEQ ID NO: 13863
  GFR-binding peptide
  MOD_RES (5), (6), (38): Xaa is C or S

SEQ ID NO: 38970 - protein, 33 aa, Artificial Sequence; identical to SEQ ID NO: 13865
  GFR-binding peptide
  MOD_RES (2), (3): Xaa is C or S

SEQ ID NO: 38971 - protein, 40 aa, Artificial Sequence; identical to SEQ ID NO: 15568
  GFR-binding peptide
  MOD_RES (6), (7), (38), (40): Xaa is C or S

SEQ ID NO: 38972 - protein, 38 aa, Artificial Sequence; identical to SEQ ID NO: 13866
  GFR-binding peptide
  MOD_RES (4), (5), (38): Xaa is C or S
  MOD_RES (19), (20), (21), (22), (23): Xaa is A or G
  MOD_RES (24), (25), (26), (27): Xaa is A or G or is absent

SEQ ID NO: 38973 - protein, 38 aa, Artificial Sequence; identical to SEQ ID NO: 13867
  GFR-binding peptide
  MOD_RES (4), (5), (36), (38): Xaa is C or S

SEQ ID NO: 38974 - protein, 36 aa, Artificial Sequence; identical to SEQ ID NO: 13868
  GFR-binding peptide
  MOD_RES (3), (4): Xaa is C or S
  MOD_RES (18), (19), (20), (21), (22): Xaa is A or G
  MOD_RES (23), (24), (25), (26): Xaa is A or G or is absent

SEQ ID NO: 38975 - protein, 33 aa, Artificial Sequence; identical to SEQ ID NO: 6498
  GFR-binding peptide
  MOD_RES (33), (33): Xaa is C or S
  MOD_RES (14), (15), (16), (17), (18): Xaa is A or G
  MOD_RES (19), (20), (21), (22): Xaa is A or G or is absent

SEQ ID NO: 38976 - protein, 35 aa, Artificial Sequence; identical to SEQ ID NO: 6500
  GFR-binding peptide
  MOD_RES (2), (3): Xaa is C or S
  MOD_RES (17), (18), (19), (20), (21): Xaa is A or G
  MOD_RES (22), (23), (24), (25): Xaa is A or G or is absent

SEQ ID NO: 38977 - protein, 33 aa, Artificial Sequence; identical to SEQ ID NO: 15571
  GFR-binding peptide
  MOD_RES (1), (32): Xaa is C or S

SEQ ID NO: 38978 - protein, 34 aa, Artificial Sequence; identical to SEQ ID NO: 13871
  GFR-binding peptide
  MOD_RES (32), (34): Xaa is C or S

SEQ ID NO: 38979 - protein, 37 aa, Artificial Sequence; identical to SEQ ID NO: 15573
  GFR-binding peptide
  MOD_RES (3), (4): Xaa is C or S
  MOD_RES (18), (19), (20), (21), (22): Xaa is A or G
  MOD_RES (23), (24), (25), (26): Xaa is A or G or is absent

SEQ ID NO: 38980 - protein, 36 aa, Artificial Sequence; identical to SEQ ID NO: 15574
  GFR-binding peptide
  MOD_RES (2), (34), (36): Xaa is C or S

SEQ ID NO: 38981 - protein, 35 aa, Artificial Sequence; identical to SEQ ID NO: 13873
  GFR-binding peptide
  MOD_RES (1), (32), (34): Xaa is C or S

SEQ ID NO: 38982 - protein, 39 aa, Artificial Sequence; identical to SEQ ID NO: 15575
  GFR-binding peptide
  MOD_RES (3), (4), (38): Xaa is C or S
  MOD_RES (18), (19), (20), (21), (22): Xaa is A or G
  MOD_RES (23), (24), (25), (26): Xaa is A or G or is absent

SEQ ID NO: 38983 - protein, 39 aa, Artificial Sequence; identical to SEQ ID NO: 13874
  GFR-binding peptide
  MOD_RES (2), (3), (36), (38): Xaa is C or S
  MOD_RES (17), (18), (19), (20), (21): Xaa is A or G
  MOD_RES (22), (23), (24), (25): Xaa is A or G or is absent

SEQ ID NO: 38984 - protein, 38 aa, Artificial Sequence
  GFR-binding peptide
  MOD_RES (5), (6): Xaa is C or S
  MOD_RES (20), (21), (22), (23), (24): Xaa is A or G
  MOD_RES (25), (26), (27), (28): Xaa is A or G or is absent
SASPXXVSQDLEPLTILYYXXXXXXXXXEQLSNMIVKS

SEQ ID NO: 38985 - protein, 38 aa, Artificial Sequence; identical to SEQ ID NO: 15576
  GFR-binding peptide
  MOD_RES (3), (4), (36), (38): Xaa is C or S

SEQ ID NO: 38986 - protein, 34 aa, Artificial Sequence; identical to SEQ ID NO: 8262
  GFR-binding peptide
  MOD_RES (1), (2), (33): Xaa is C or S

SEQ ID NO: 38987 - protein, 40 aa, Artificial Sequence; identical to SEQ ID NO: 13875
  GFR-binding peptide
  MOD_RES (4), (5), (38), (40): Xaa is C or S
  MOD_RES (19), (20), (21), (22), (23): Xaa is A or G
  MOD_RES (24), (25), (26), (27): Xaa is A or G or is absent

SEQ ID NO: 38988 - protein, 36 aa, Artificial Sequence; identical to SEQ ID NO: 13876
  GFR-binding peptide
  MOD_RES (4), (5), (36): Xaa is C or S

SEQ ID NO: 38989 - protein, 32 aa, Artificial Sequence; identical to SEQ ID NO: 15579
  GFR-binding peptide
  MOD_RES (1), (2): Xaa is C or S

SEQ ID NO: 38990 - protein, 40 aa, Artificial Sequence; identical to SEQ ID NO: 13878
  GFR-binding peptide
  MOD_RES (5), (6), (38), (40): Xaa is C or S

SEQ ID NO: 38991 - protein, 40 aa, Artificial Sequence; identical to SEQ ID NO: 13881
  GFR-binding peptide
  MOD_RES (4), (5), (37), (39): Xaa is C or S

SEQ ID NO: 38992 - protein, 36 aa, Artificial Sequence; identical to SEQ ID NO: 13882
  GFR-binding peptide
  MOD_RES (2), (3): Xaa is C or S
  MOD_RES (17), (18), (19), (20), (21): Xaa is A or G
  MOD_RES (22), (23), (24), (25): Xaa is A or G or is absent

SEQ ID NO: 38993 - protein, 38 aa, Artificial Sequence; identical to SEQ ID NO: 15581
  GFR-binding peptide
  MOD_RES (3), (4), (35), (37): Xaa is C or S

SEQ ID NO: 38994 - protein, 38 aa, Artificial Sequence; identical to SEQ ID NO: 15582
  GFR-binding peptide
  MOD_RES (6), (7): Xaa is C or S

SEQ ID NO: 38995 - protein, 35 aa, Artificial Sequence; identical to SEQ ID NO: 15583
  GFR-binding peptide
  MOD_RES (2), (3), (34): Xaa is C or S

SEQ ID NO: 38996 - protein, 31 aa, Artificial Sequence; identical to SEQ ID NO: 6513
  GFR-binding peptide
  MOD_RES (1), (1): Xaa is C or S

SEQ ID NO: 38997 - protein, 40 aa, Artificial Sequence; identical to SEQ ID NO: 8275
  GFR-binding peptide
  MOD_RES (6), (7): Xaa is C or S
  MOD_RES (21), (22), (23), (24), (25): Xaa is A or G
  MOD_RES (26), (27), (28), (29): Xaa is A or G or is absent

SEQ ID NO: 38998 - protein, 39 aa, Artificial Sequence; identical to SEQ ID NO: 15586
  GFR-binding peptide
  MOD_RES (3), (4), (37), (39): Xaa is C or S
  MOD_RES (18), (19), (20), (21), (22): Xaa is A or G
  MOD_RES (23), (24), (25), (26): Xaa is A or G or is absent

SEQ ID NO: 38999 - protein, 37 aa, Artificial Sequence; identical to SEQ ID NO: 15588
  GFR-binding peptide
  MOD_RES (6), (6): Xaa is C or S

SEQ ID NO: 39000 - protein, 35 aa, Artificial Sequence; identical to SEQ ID NO: 13886
  GFR-binding peptide
  MOD_RES (2), (3): Xaa is C or S
  MOD_RES (17), (18), (19), (20), (21): Xaa is A or G
  MOD_RES (22), (23), (24), (25): Xaa is A or G or is absent

SEQ ID NO: 39001 - protein, 35 aa, Artificial Sequence; identical to SEQ ID NO: 8278
  GFR-binding peptide
  MOD_RES (34), (34): Xaa is C or S
  MOD_RES (14), (15), (16), (17), (18): Xaa is A or G
  MOD_RES (19), (20), (21), (22): Xaa is A or G or is absent

SEQ ID NO: 39002 - protein, 35 aa, Artificial Sequence; identical to SEQ ID NO: 15590
  GFR-binding peptide
  MOD_RES (4), (5): Xaa is C or S

SEQ ID NO: 39003 - protein, 39 aa, Artificial Sequence; identical to SEQ ID NO: 6521
  GFR-binding peptide
  MOD_RES (2), (3), (36), (38): Xaa is C or S
  MOD_RES (17), (18), (19), (20), (21): Xaa is A or G
  MOD_RES (22), (23), (24), (25): Xaa is A or G or is absent

SEQ ID NO: 39004 - protein, 35 aa, Artificial Sequence; identical to SEQ ID NO: 13891
  GFR-binding peptide
  MOD_RES (1), (33), (35): Xaa is C or S

SEQ ID NO: 39005 - protein, 41 aa, Artificial Sequence; identical to SEQ ID NO: 15591
  GFR-binding peptide
  MOD_RES (5), (6), (38), (40): Xaa is C or S

SEQ ID NO: 39006 - protein, 37 aa, Artificial Sequence; identical to SEQ ID NO: 15592
  GFR-binding peptide
  MOD_RES (3), (4): Xaa is C or S
  MOD_RES (18), (19), (20), (21), (22): Xaa is A or G
  MOD_RES (23), (24), (25), (26): Xaa is A or G or is absent

SEQ ID NO: 39007 - protein, 38 aa, Artificial Sequence; identical to SEQ ID NO: 13892
  GFR-binding peptide
  MOD_RES (1), (35), (37): Xaa is C or S
  MOD_RES (15), (16), (17), (18), (19): Xaa is A or G
  MOD_RES (20), (21), (22), (23): Xaa is A or G or is absent

SEQ ID NO: 39008 - protein, 37 aa, Artificial Sequence; identical to SEQ ID NO: 13893
  GFR-binding peptide
  MOD_RES (34), (36): Xaa is C or S
  MOD_RES (14), (15), (16), (17), (18): Xaa is A or G
  MOD_RES (19), (20), (21), (22): Xaa is A or G or is absent

SEQ ID NO: 39009 - protein, 37 aa, Artificial Sequence; identical to SEQ ID NO: 6526
  GFR-binding peptide
  MOD_RES (6), (7): Xaa is C or S

SEQ ID NO: 39010 - protein, 38 aa, Artificial Sequence; identical to SEQ ID NO: 8286
  GFR-binding peptide
  MOD_RES (2), (3), (36), (38): Xaa is C or S
  MOD_RES (17), (18), (19), (20), (21): Xaa is A or G
  MOD_RES (22), (23), (24), (25): Xaa is A or G or is absent

SEQ ID NO: 39011 - protein, 36 aa, Artificial Sequence; identical to SEQ ID NO: 13895
  GFR-binding peptide
  MOD_RES (2), (34), (36): Xaa is C or S

SEQ ID NO: 39012 - protein, 40 aa, Artificial Sequence; identical to SEQ ID NO: 15594
  GFR-binding peptide
  MOD_RES (6), (7), (39): Xaa is C or S

SEQ ID NO: 39013 - protein, 35 aa, Artificial Sequence; identical to SEQ ID NO: 15595
  GFR-binding peptide
  MOD_RES (34), (34): Xaa is C or S
  MOD_RES (14), (15), (16), (17), (18): Xaa is A or G
  MOD_RES (19), (20), (21), (22): Xaa is A or G or is absent

SEQ ID NO: 39014 - protein, 32 aa, Artificial Sequence; identical to SEQ ID NO: 15596
  GFR-binding peptide
  MOD_RES (14), (15), (16), (17), (18): Xaa is A or G
  MOD_RES (19), (20), (21), (22): Xaa is A or G or is absent

SEQ ID NO: 39015 - protein, 39 aa, Artificial Sequence; identical to SEQ ID NO: 13898
  GFR-binding peptide
  MOD_RES (6), (7): Xaa is C or S
  MOD_RES (21), (22), (23), (24), (25): Xaa is A or G
  MOD_RES (26), (27), (28), (29): Xaa is A or G or is absent

SEQ ID NO: 39016 - protein, 39 aa, Artificial Sequence; identical to SEQ ID NO: 8290
  GFR-binding peptide
  MOD_RES (4), (5), (37), (39): Xaa is C or S

SEQ ID NO: 39017 - protein, 40 aa, Artificial Sequence; identical to SEQ ID NO: 15598
  GFR-binding peptide
  MOD_RES (6), (7), (39): Xaa is C or S

SEQ ID NO: 39018 - protein, 33 aa, Artificial Sequence; identical to SEQ ID NO: 15599
  GFR-binding peptide
  MOD_RES (1), (2): Xaa is C or S

SEQ ID NO: 39019 - protein, 38 aa, Artificial Sequence; identical to SEQ ID NO: 13900
  GFR-binding peptide
  MOD_RES (5), (6): Xaa is C or S
  MOD_RES (20), (21), (22), (23), (24): Xaa is A or G
  MOD_RES (25), (26), (27), (28): Xaa is A or G or is absent

SEQ ID NO: 39020 - protein, 41 aa, Artificial Sequence
  GFR-binding peptide
  MOD_RES (4), (5), (38), (40): Xaa is C or S
  MOD_RES (19), (20), (21), (22), (23): Xaa is A or G
  MOD_RES (24), (25), (26), (27): Xaa is A or G or is absent
ASPXXVSQDLEPLTILYYXXXXXXXXXEQLSNMIVKSXKXS

SEQ ID NO: 39021 - protein, 33 aa, Artificial Sequence; identical to SEQ ID NO: 13901
  GFR-binding peptide
  MOD_RES (1), (1): Xaa is C or S
  MOD_RES (15), (16), (17), (18), (19): Xaa is A or G
  MOD_RES (20), (21), (22), (23): Xaa is A or G or is absent

SEQ ID NO: 39022 - protein, 36 aa, Artificial Sequence; identical to SEQ ID NO: 13902
  GFR-binding peptide
  MOD_RES (2), (3), (35): Xaa is C or S

SEQ ID NO: 39023 - protein, 37 aa, Artificial Sequence; identical to SEQ ID NO: 13903
  GFR-binding peptide
  MOD_RES (34), (36): Xaa is C or S
  MOD_RES (14), (15), (16), (17), (18): Xaa is A or G
  MOD_RES (19), (20), (21), (22): Xaa is A or G or is absent

SEQ ID NO: 39024 - protein, 38 aa, Artificial Sequence; identical to SEQ ID NO: 6541
  GFR-binding peptide
  MOD_RES (1), (2), (36), (38): Xaa is C or S
  MOD_RES (16), (17), (18), (19), (20): Xaa is A or G
  MOD_RES (21), (22), (23), (24): Xaa is A or G or is absent

SEQ ID NO: 39025 - protein, 38 aa, Artificial Sequence; identical to SEQ ID NO: 13906
  GFR-binding peptide
  MOD_RES (2), (3), (37): Xaa is C or S
  MOD_RES (17), (18), (19), (20), (21): Xaa is A or G
  MOD_RES (22), (23), (24), (25): Xaa is A or G or is absent

SEQ ID NO: 39026 - protein, 40 aa, Artificial Sequence; identical to SEQ ID NO: 13907
  GFR-binding peptide
  MOD_RES (4), (5), (38), (40): Xaa is C or S
  MOD_RES (19), (20), (21), (22), (23): Xaa is A or G
  MOD_RES (24), (25), (26), (27): Xaa is A or G or is absent

SEQ ID NO: 39027 - protein, 35 aa, Artificial Sequence; identical to SEQ ID NO: 6542
  GFR-binding peptide
  MOD_RES (1), (32), (34): Xaa is C or S

SEQ ID NO: 39028 - protein, 35 aa, Artificial Sequence; identical to SEQ ID NO: 15602
  GFR-binding peptide
  MOD_RES (1), (35): Xaa is C or S
  MOD_RES (15), (16), (17), (18), (19): Xaa is A or G
  MOD_RES (20), (21), (22), (23): Xaa is A or G or is absent

SEQ ID NO: 39029 - protein, 39 aa, Artificial Sequence; identical to SEQ ID NO: 15603
  GFR-binding peptide
  MOD_RES (6), (7), (38): Xaa is C or S

SEQ ID NO: 39030 - protein, 41 aa, Artificial Sequence; identical to SEQ ID NO: 15604
  GFR-binding peptide
  MOD_RES (5), (6), (40): Xaa is C or S
  MOD_RES (20), (21), (22), (23), (24): Xaa is A or G
  MOD_RES (25), (26), (27), (28): Xaa is A or G or is absent

SEQ ID NO: 39031 - protein, 37 aa, Artificial Sequence; identical to SEQ ID NO: 6546
  GFR-binding peptide
  MOD_RES (4), (5): Xaa is C or S
  MOD_RES (19), (20), (21), (22), (23): Xaa is A or G
  MOD_RES (24), (25), (26), (27): Xaa is A or G or is absent

SEQ ID NO: 39032 - protein, 37 aa, Artificial Sequence; identical to SEQ ID NO: 13912
  GFR-binding peptide
  MOD_RES (6), (7): Xaa is C or S

SEQ ID NO: 39033 - protein, 36 aa, Artificial Sequence; identical to SEQ ID NO: 6547
  GFR-binding peptide
  MOD_RES (1), (35): Xaa is C or S
  MOD_RES (15), (16), (17), (18), (19): Xaa is A or G
  MOD_RES (20), (21), (22), (23): Xaa is A or G or is absent

SEQ ID NO: 39034 - protein, 35 aa, Artificial Sequence; identical to SEQ ID NO: 15606
  GFR-binding peptide
  MOD_RES (1), (35): Xaa is C or S
  MOD_RES (15), (16), (17), (18), (19): Xaa is A or G
  MOD_RES (20), (21), (22), (23): Xaa is A or G or is absent

SEQ ID NO: 39035 - protein, 35 aa, Artificial Sequence; identical to SEQ ID NO: 13914
  GFR-binding peptide
  MOD_RES (1), (32), (34): Xaa is C or S

SEQ ID NO: 39036 - protein, 35 aa, Artificial Sequence; identical to SEQ ID NO: 13915
  GFR-binding peptide
  MOD_RES (4), (5): Xaa is C or S

SEQ ID NO: 39037 - protein, 40 aa, Artificial Sequence; identical to SEQ ID NO: 13916
  GFR-binding peptide
  MOD_RES (4), (5), (39): Xaa is C or S
  MOD_RES (19), (20), (21), (22), (23): Xaa is A or G
  MOD_RES (24), (25), (26), (27): Xaa is A or G or is absent

SEQ ID NO: 39038 - protein, 35 aa, Artificial Sequence; identical to SEQ ID NO: 13917
  GFR-binding peptide
  MOD_RES (1), (35): Xaa is C or S
  MOD_RES (15), (16), (17), (18), (19): Xaa is A or G
  MOD_RES (20), (21), (22), (23): Xaa is A or G or is absent

SEQ ID NO: 39039 - protein, 35 aa, Artificial Sequence; identical to SEQ ID NO: 8308
  GFR-binding peptide
  MOD_RES (1), (34): Xaa is C or S
  MOD_RES (15), (16), (17), (18), (19): Xaa is A or G
  MOD_RES (20), (21), (22), (23): Xaa is A or G or is absent

SEQ ID NO: 39040 - protein, 42 aa, Artificial Sequence; identical to SEQ ID NO: 13919
  GFR-binding peptide
  MOD_RES (4), (5), (39), (41): Xaa is C or S
  MOD_RES (19), (20), (21), (22), (23): Xaa is A or G
  MOD_RES (24), (25), (26), (27): Xaa is A or G or is absent

SEQ ID NO: 39041 - protein, 41 aa, Artificial Sequence; identical to SEQ ID NO: 13920
  GFR-binding peptide
  MOD_RES (6), (7), (41): Xaa is C or S
  MOD_RES (21), (22), (23), (24), (25): Xaa is A or G
  MOD_RES (26), (27), (28), (29): Xaa is A or G or is absent

SEQ ID NO: 39042 - protein, 39 aa, Artificial Sequence; identical to SEQ ID NO: 15609
  GFR-binding peptide
  MOD_RES (2), (3), (37), (39): Xaa is C or S
  MOD_RES (17), (18), (19), (20), (21): Xaa is A or G
  MOD_RES (22), (23), (24), (25): Xaa is A or G or is absent

SEQ ID NO: 39043 - protein, 39 aa, Artificial Sequence; identical to SEQ ID NO: 15610
  GFR-binding peptide
  MOD_RES (6), (7): Xaa is C or S
  MOD_RES (21), (22), (23), (24), (25): Xaa is A or G
  MOD_RES (26), (27), (28), (29): Xaa is A or G or is absent

SEQ ID NO: 39044 - protein, 35 aa, Artificial Sequence; identical to SEQ ID NO: 15611
  GFR-binding peptide
  MOD_RES (3), (4): Xaa is C or S

SEQ ID NO: 39045 - protein, 35 aa, Artificial Sequence; identical to SEQ ID NO: 13921
  GFR-binding peptide
  MOD_RES (1), (35): Xaa is C or S
  MOD_RES (15), (16), (17), (18), (19): Xaa is A or G
  MOD_RES (20), (21), (22), (23): Xaa is A or G or is absent

SEQ ID NO: 39046 - protein, 36 aa, Artificial Sequence; identical to SEQ ID NO: 13923
  GFR-binding peptide
  MOD_RES (4), (4): Xaa is C or S
  MOD_RES (18), (19), (20), (21), (22): Xaa is A or G
  MOD_RES (23), (24), (25), (26): Xaa is A or G or is absent

SEQ ID NO: 39047 - protein, 42 aa, Artificial Sequence; identical to SEQ ID NO: 15612
  GFR-binding peptide
  MOD_RES (6), (7), (41): Xaa is C or S
  MOD_RES (21), (22), (23), (24), (25): Xaa is A or G
  MOD_RES (26), (27), (28), (29): Xaa is A or G or is absent

SEQ ID NO: 39048 - protein, 36 aa, Artificial Sequence; identical to SEQ ID NO: 15613
  GFR-binding peptide
  MOD_RES (1), (33), (35): Xaa is C or S

SEQ ID NO: 39049 - protein, 37 aa, Artificial Sequence; identical to SEQ ID NO: 8309
  GFR-binding peptide
  MOD_RES (2), (3), (37): Xaa is C or S
  MOD_RES (17), (18), (19), (20), (21): Xaa is A or G
  MOD_RES (22), (23), (24), (25): Xaa is A or G or is absent

SEQ ID NO: 39050 - protein, 38 aa, Artificial Sequence; identical to SEQ ID NO: 13924
  GFR-binding peptide
  MOD_RES (4), (5), (36), (38): Xaa is C or S

SEQ ID NO: 39051 - protein, 33 aa, Artificial Sequence; identical to SEQ ID NO: 13926
  GFR-binding peptide
  MOD_RES (2), (3): Xaa is C or S

SEQ ID NO: 39052 - protein, 38 aa, Artificial Sequence; identical to SEQ ID NO: 13927
  GFR-binding peptide
  MOD_RES (4), (5): Xaa is C or S
  MOD_RES (19), (20), (21), (22), (23): Xaa is A or G
  MOD_RES (24), (25), (26), (27): Xaa is A or G or is absent

SEQ ID NO: 39053 - protein, 34 aa, Artificial Sequence; identical to SEQ ID NO: 13929
  GFR-binding peptide
  MOD_RES (1), (32), (34): Xaa is C or S

SEQ ID NO: 39054 - protein, 39 aa, Artificial Sequence; identical to SEQ ID NO: 13930
  GFR-binding peptide
  MOD_RES (3), (4), (36), (38): Xaa is C or S

SEQ ID NO: 39055 - protein, 39 aa, Artificial Sequence; identical to SEQ ID NO: 13931
  GFR-binding peptide
  MOD_RES (3), (4), (38): Xaa is C or S
  MOD_RES (18), (19), (20), (21), (22): Xaa is A or G
  MOD_RES (23), (24), (25), (26): Xaa is A or G or is absent

SEQ ID NO: 39056 - protein, 38 aa, Artificial Sequence; identical to SEQ ID NO: 13932
  GFR-binding peptide
  MOD_RES (6), (7): Xaa is C or S

SEQ ID NO: 39057 - protein, 34 aa, Artificial Sequence; identical to SEQ ID NO: 8320
  GFR-binding peptide
  MOD_RES (1), (32), (34): Xaa is C or S

SEQ ID NO: 39058 - protein, 35 aa, Artificial Sequence; identical to SEQ ID NO: 15622
  GFR-binding peptide
  MOD_RES (4), (4): Xaa is C or S

SEQ ID NO: 39059 - protein, 39 aa, Artificial Sequence; identical to SEQ ID NO: 15623
  GFR-binding peptide
  MOD_RES (3), (4), (37), (39): Xaa is C or S
  MOD_RES (18), (19), (20), (21), (22): Xaa is A or G
  MOD_RES (23), (24), (25), (26): Xaa is A or G or is absent

SEQ ID NO: 39060 - protein, 31 aa, Artificial Sequence; identical to SEQ ID NO: 13933
  GFR-binding peptide

SEQ ID NO: 39061 - protein, 41 aa, Artificial Sequence; identical to SEQ ID NO: 13934
  GFR-binding peptide
  MOD_RES (5), (6), (38), (40): Xaa is C or S

SEQ ID NO: 39062 - protein, 35 aa, Artificial Sequence; identical to SEQ ID NO: 13935
  GFR-binding peptide
  MOD_RES (3), (4): Xaa is C or S

SEQ ID NO: 39063 - protein, 41 aa, Artificial Sequence; identical to SEQ ID NO: 15625
  GFR-binding peptide
  MOD_RES (6), (7), (40): Xaa is C or S
  MOD_RES (21), (22), (23), (24), (25): Xaa is A or G
  MOD_RES (26), (27), (28), (29): Xaa is A or G or is absent

SEQ ID NO: 39064 - protein, 31 aa, Artificial Sequence; identical to SEQ ID NO: 13937
  GFR-binding peptide
  MOD_RES (1), (1): Xaa is C or S

SEQ ID NO: 39065 - protein, 37 aa, Artificial Sequence; identical to SEQ ID NO: 15626
  GFR-binding peptide
  MOD_RES (1), (34), (36): Xaa is C or S
  MOD_RES (15), (16), (17), (18), (19): Xaa is A or G
  MOD_RES (20), (21), (22), (23): Xaa is A or G or is absent

SEQ ID NO: 39066 - protein, 38 aa, Artificial Sequence; identical to SEQ ID NO: 13938
  GFR-binding peptide
  MOD_RES (5), (6): Xaa is C or S
  MOD_RES (20), (21), (22), (23), (24): Xaa is A or G
  MOD_RES (25), (26), (27), (28): Xaa is A or G or is absent

SEQ ID NO: 39067 - protein, 39 aa, Artificial Sequence; identical to SEQ ID NO: 13939
  GFR-binding peptide
  MOD_RES (6), (7): Xaa is C or S
  MOD_RES (21), (22), (23), (24), (25): Xaa is A or G
  MOD_RES (26), (27), (28), (29): Xaa is A or G or is absent

SEQ ID NO: 39068 - protein, 42 aa, Artificial Sequence; identical to SEQ ID NO: 13940
  GFR-binding peptide
  MOD_RES (5), (6), (40), (42): Xaa is C or S
  MOD_RES (20), (21), (22), (23), (24): Xaa is A or G
  MOD_RES (25), (26), (27), (28): Xaa is A or G or is absent

SEQ ID NO: 39069 - protein, 34 aa, Artificial Sequence; identical to SEQ ID NO: 13941
  GFR-binding peptide
  MOD_RES (1), (32), (34): Xaa is C or S

SEQ ID NO: 39070 - protein, 36 aa, Artificial Sequence; identical to SEQ ID NO: 13942
  GFR-binding peptide
  MOD_RES (3), (4): Xaa is C or S
  MOD_RES (18), (19), (20), (21), (22): Xaa is A or G
  MOD_RES (23), (24), (25), (26): Xaa is A or G or is absent

SEQ ID NO: 39071 - protein, 33 aa, Artificial Sequence; identical to SEQ ID NO: 15627
  GFR-binding peptide
  MOD_RES (1), (1): Xaa is C or S
  MOD_RES (15), (16), (17), (18), (19): Xaa is A or G
  MOD_RES (20), (21), (22), (23): Xaa is A or G or is absent

SEQ ID NO: 39072 - protein, 38 aa, Artificial Sequence; identical to SEQ ID NO: 13943
  GFR-binding peptide
  MOD_RES (4), (5): Xaa is C or S
  MOD_RES (19), (20), (21), (22), (23): Xaa is A or G
  MOD_RES (24), (25), (26), (27): Xaa is A or G or is absent

SEQ ID NO: 39073 - protein, 36 aa, Artificial Sequence; identical to SEQ ID NO: 15629
  GFR-binding peptide
  MOD_RES (3), (35): Xaa is C or S

SEQ ID NO: 39074 - protein, 40 aa, Artificial Sequence; identical to SEQ ID NO: 13944
  GFR-binding peptide
  MOD_RES (2), (3), (37), (39): Xaa is C or S
  MOD_RES (17), (18), (19), (20), (21): Xaa is A or G
  MOD_RES (22), (23), (24), (25): Xaa is A or G or is absent

SEQ ID NO: 39075 - protein, 39 aa, Artificial Sequence; identical to SEQ ID NO: 15630
  GFR-binding peptide
  MOD_RES (5), (37), (39): Xaa is C or S

SEQ ID NO: 39076 - protein, 39 aa, Artificial Sequence; identical to SEQ ID NO: 13947
  GFR-binding peptide
  MOD_RES (4), (5), (39): Xaa is C or S
  MOD_RES (19), (20), (21), (22), (23): Xaa is A or G
  MOD_RES (24), (25), (26), (27): Xaa is A or G or is absent

SEQ ID NO: 39077 - protein, 34 aa, Artificial Sequence; identical to SEQ ID NO: 15631
  GFR-binding peptide
  MOD_RES (3), (4): Xaa is C or S

SEQ ID NO: 39078 - protein, 41 aa, Artificial Sequence; identical to SEQ ID NO: 13948
  GFR-binding peptide
  MOD_RES (5), (6), (38), (40): Xaa is C or S

SEQ ID NO: 39079 - protein, 35 aa, Artificial Sequence; identical to SEQ ID NO: 13949
  GFR-binding peptide
  MOD_RES (3), (4), (35): Xaa is C or S

SEQ ID NO: 39080 - protein, 32 aa, Artificial Sequence; identical to SEQ ID NO: 15632
  GFR-binding peptide
  MOD_RES (14), (15), (16), (17), (18): Xaa is A or G
  MOD_RES (19), (20), (21), (22): Xaa is A or G or is absent

SEQ ID NO: 39081 - protein, 30 aa, Artificial Sequence; identical to SEQ ID NO: 6580
  GFR-binding peptide

SEQ ID NO: 39082 - protein, 39 aa, Artificial Sequence; identical to SEQ ID NO: 13951
  GFR-binding peptide
  MOD_RES (5), (6): Xaa is C or S
  MOD_RES (20), (21), (22), (23), (24): Xaa is A or G
  MOD_RES (25), (26), (27), (28): Xaa is A or G or is absent

SEQ ID NO: 39083 - protein, 33 aa, Artificial Sequence; identical to SEQ ID NO: 8344
  GFR-binding peptide
  MOD_RES (31), (33): Xaa is C or S

SEQ ID NO: 39084 - protein, 37 aa, Artificial Sequence; identical to SEQ ID NO: 15636
  GFR-binding peptide
  MOD_RES (4), (5): Xaa is C or S
  MOD_RES (19), (20), (21), (22), (23): Xaa is A or G
  MOD_RES (24), (25), (26), (27): Xaa is A or G or is absent

SEQ ID NO: 39085 - protein, 41 aa, Artificial Sequence; identical to SEQ ID NO: 13952
  GFR-binding peptide
  MOD_RES (6), (7), (41): Xaa is C or S
  MOD_RES (21), (22), (23), (24), (25): Xaa is A or G
  MOD_RES (26), (27), (28), (29): Xaa is A or G or is absent

SEQ ID NO: 39086 - protein, 38 aa, Artificial Sequence
  GFR-binding peptide
  MOD_RES (4), (5), (38): Xaa is C or S
  MOD_RES (19), (20), (21), (22), (23): Xaa is A or G
  MOD_RES (24), (25), (26), (27): Xaa is A or G or is absent
ASPXXVSQDLEPLTILYYXXXXXXXXXEQLSNMIVKSX

SEQ ID NO: 39087 - protein, 42 aa, Artificial Sequence; identical to SEQ ID NO: 15637
  GFR-binding peptide
  MOD_RES (6), (7), (41): Xaa is C or S
  MOD_RES (21), (22), (23), (24), (25): Xaa is A or G
  MOD_RES (26), (27), (28), (29): Xaa is A or G or is absent

SEQ ID NO: 39088 - protein, 39 aa, Artificial Sequence; identical to SEQ ID NO: 8347
  GFR-binding peptide
  MOD_RES (5), (6), (39): Xaa is C or S
  MOD_RES (20), (21), (22), (23), (24): Xaa is A or G
  MOD_RES (25), (26), (27), (28): Xaa is A or G or is absent

SEQ ID NO: 39089 - protein, 33 aa, Artificial Sequence; identical to SEQ ID NO: 15640
  GFR-binding peptide
  MOD_RES (1), (2), (33): Xaa is C or S

SEQ ID NO: 39090 - protein, 37 aa, Artificial Sequence; identical to SEQ ID NO: 13954
  GFR-binding peptide
  MOD_RES (3), (4): Xaa is C or S
  MOD_RES (18), (19), (20), (21), (22): Xaa is A or G
  MOD_RES (23), (24), (25), (26): Xaa is A or G or is absent

SEQ ID NO: 39091 - protein, 33 aa, Artificial Sequence; identical to SEQ ID NO: 15641
  GFR-binding peptide
  MOD_RES (2), (3): Xaa is C or S

SEQ ID NO: 39092 - protein, 42 aa, Artificial Sequence; identical to SEQ ID NO: 8349
  GFR-binding peptide
  MOD_RES (5), (6), (40), (42): Xaa is C or S
  MOD_RES (20), (21), (22), (23), (24): Xaa is A or G
  MOD_RES (25), (26), (27), (28): Xaa is A or G or is absent

SEQ ID NO: 39093 - protein, 42 aa, Artificial Sequence; identical to SEQ ID NO: 15643
  GFR-binding peptide
  MOD_RES (6), (7), (41): Xaa is C or S
  MOD_RES (21), (22), (23), (24), (25): Xaa is A or G
  MOD_RES (26), (27), (28), (29): Xaa is A or G or is absent

SEQ ID NO: 39094 - protein, 38 aa, Artificial Sequence; identical to SEQ ID NO: 15645
  GFR-binding peptide
  MOD_RES (3), (4), (37): Xaa is C or S
  MOD_RES (18), (19), (20), (21), (22): Xaa is A or G
  MOD_RES (23), (24), (25), (26): Xaa is A or G or is absent

SEQ ID NO: 39095 - protein, 40 aa, Artificial Sequence; identical to SEQ ID NO: 15646
  GFR-binding peptide
  MOD_RES (6), (38), (40): Xaa is C or S

SEQ ID NO: 39096 - protein, 38 aa, Artificial Sequence; identical to SEQ ID NO: 15647
  GFR-binding peptide
  MOD_RES (5), (6), (38): Xaa is C or S

SEQ ID NO: 39097 - protein, 34 aa, Artificial Sequence; identical to SEQ ID NO: 13957
  GFR-binding peptide
  MOD_RES (4), (4): Xaa is C or S

SEQ ID NO: 39098 - protein, 35 aa, Artificial Sequence; identical to SEQ ID NO: 13958
  GFR-binding peptide
  MOD_RES (1), (2): Xaa is C or S
  MOD_RES (16), (17), (18), (19), (20): Xaa is A or G
  MOD_RES (21), (22), (23), (24): Xaa is A or G or is absent

SEQ ID NO: 39099 - protein, 37 aa, Artificial Sequence; identical to SEQ ID NO: 13959
  GFR-binding peptide
  MOD_RES (4), (4): Xaa is C or S
  MOD_RES (18), (19), (20), (21), (22): Xaa is A or G
  MOD_RES (23), (24), (25), (26): Xaa is A or G or is absent

SEQ ID NO: 39100 - protein, 37 aa, Artificial Sequence; identical to SEQ ID NO: 15648
  GFR-binding peptide
  MOD_RES (1), (2), (35), (37): Xaa is C or S
  MOD_RES (16), (17), (18), (19), (20): Xaa is A or G
  MOD_RES (21), (22), (23), (24): Xaa is A or G or is absent

SEQ ID NO: 39101 - protein, 36 aa, Artificial Sequence; identical to SEQ ID NO: 15649
  GFR-binding peptide
  MOD_RES (4), (5): Xaa is C or S

SEQ ID NO: 39102 - protein, 37 aa, Artificial Sequence; identical to SEQ ID NO: 13960
  GFR-binding peptide
  MOD_RES (7), (7): Xaa is C or S

SEQ ID NO: 39103 - protein, 32 aa, Artificial Sequence; identical to SEQ ID NO: 13962
  GFR-binding peptide
  MOD_RES (1), (1): Xaa is C or S

SEQ ID NO: 39104 - protein, 38 aa, Artificial Sequence; identical to SEQ ID NO: 15650
  GFR-binding peptide
  MOD_RES (4), (5): Xaa is C or S
  MOD_RES (19), (20), (21), (22), (23): Xaa is A or G
  MOD_RES (24), (25), (26), (27): Xaa is A or G or is absent

SEQ ID NO: 39105 - protein, 40 aa, Artificial Sequence; identical to SEQ ID NO: 15651
  GFR-binding peptide
  MOD_RES (7), (7): Xaa is C or S
  MOD_RES (21), (22), (23), (24), (25): Xaa is A or G
  MOD_RES (26), (27), (28), (29): Xaa is A or G or is absent

SEQ ID NO: 39106 - protein, 38 aa, Artificial Sequence; identical to SEQ ID NO: 15652
  GFR-binding peptide
  MOD_RES (4), (5), (37): Xaa is C or S

SEQ ID NO: 39107 - protein, 38 aa, Artificial Sequence; identical to SEQ ID NO: 8357
  GFR-binding peptide
  MOD_RES (4), (5), (36), (38): Xaa is C or S

SEQ ID NO: 39108 - protein, 41 aa, Artificial Sequence; identical to SEQ ID NO: 13963
  GFR-binding peptide
  MOD_RES (6), (7), (40): Xaa is C or S
  MOD_RES (21), (22), (23), (24), (25): Xaa is A or G
  MOD_RES (26), (27), (28), (29): Xaa is A or G or is absent

SEQ ID NO: 39109 - protein, 34 aa, Artificial Sequence; identical to SEQ ID NO: 15654
  GFR-binding peptide
  MOD_RES (33), (33): Xaa is C or S
  MOD_RES (14), (15), (16), (17), (18): Xaa is A or G
  MOD_RES (19), (20), (21), (22): Xaa is A or G or is absent

SEQ ID NO: 39110 - protein, 39 aa, Artificial Sequence; identical to SEQ ID NO: 15655
  GFR-binding peptide
  MOD_RES (5), (6), (39): Xaa is C or S
  MOD_RES (20), (21), (22), (23), (24): Xaa is A or G
  MOD_RES (25), (26), (27), (28): Xaa is A or G or is absent

SEQ ID NO: 39111 - protein, 39 aa, Artificial Sequence; identical to SEQ ID NO: 8359
  GFR-binding peptide
  MOD_RES (4), (5), (38): Xaa is C or S
  MOD_RES (19), (20), (21), (22), (23): Xaa is A or G
  MOD_RES (24), (25), (26), (27): Xaa is A or G or is absent

SEQ ID NO: 39112 - protein, 33 aa, Artificial Sequence; identical to SEQ ID NO: 15657
  GFR-binding peptide
  MOD_RES (1), (32): Xaa is C or S

SEQ ID NO: 39113 - protein, 38 aa, Artificial Sequence; identical to SEQ ID NO: 15658
  GFR-binding peptide
  MOD_RES (2), (3), (37): Xaa is C or S
  MOD_RES (17), (18), (19), (20), (21): Xaa is A or G
  MOD_RES (22), (23), (24), (25): Xaa is A or G or is absent

SEQ ID NO: 39114 - protein, 34 aa, Artificial Sequence; identical to SEQ ID NO: 13964
  GFR-binding peptide
  MOD_RES (1), (2): Xaa is C or S
  MOD_RES (16), (17), (18), (19), (20): Xaa is A or G
  MOD_RES (21), (22), (23), (24): Xaa is A or G or is absent

SEQ ID NO: 39115 - protein, 30 aa, Artificial Sequence; identical to SEQ ID NO: 15660
  GFR-binding peptide

SEQ ID NO: 39116 - protein, 39 aa, Artificial Sequence; identical to SEQ ID NO: 15661
  GFR-binding peptide
  MOD_RES (5), (6), (37), (39): Xaa is C or S

SEQ ID NO: 39117 - protein, 34 aa, Artificial Sequence; identical to SEQ ID NO: 13966
  GFR-binding peptide
  MOD_RES (2), (34): Xaa is C or S

SEQ ID NO: 39118 - protein, 34 aa, Artificial Sequence; identical to SEQ ID NO: 15662
  GFR-binding peptide
  MOD_RES (34), (34): Xaa is C or S
  MOD_RES (14), (15), (16), (17), (18): Xaa is A or G
  MOD_RES (19), (20), (21), (22): Xaa is A or G or is absent

SEQ ID NO: 39119 - protein, 41 aa, Artificial Sequence; identical to SEQ ID NO: 15663
  GFR-binding peptide
  MOD_RES (5), (6), (38), (40): Xaa is C or S

SEQ ID NO: 39120 - protein, 42 aa, Artificial Sequence; identical to SEQ ID NO: 13967
  GFR-binding peptide
  MOD_RES (6), (7), (41): Xaa is C or S
  MOD_RES (21), (22), (23), (24), (25): Xaa is A or G
  MOD_RES (26), (27), (28), (29): Xaa is A or G or is absent

SEQ ID NO: 39121 - protein, 40 aa, Artificial Sequence; identical to SEQ ID NO: 15665
  GFR-binding peptide
  MOD_RES (6), (7): Xaa is C or S
  MOD_RES (21), (22), (23), (24), (25): Xaa is A or G
  MOD_RES (26), (27), (28), (29): Xaa is A or G or is absent

SEQ ID NO: 39122 - protein, 42 aa, Artificial Sequence; identical to SEQ ID NO: 13968
  GFR-binding peptide
  MOD_RES (6), (7), (41): Xaa is C or S
  MOD_RES (21), (22), (23), (24), (25): Xaa is A or G
  MOD_RES (26), (27), (28), (29): Xaa is A or G or is absent

SEQ ID NO: 39123 - protein, 36 aa, Artificial Sequence; identical to SEQ ID NO: 13969
  GFR-binding peptide
  MOD_RES (3), (4), (36): Xaa is C or S

SEQ ID NO: 39124 - protein, 33 aa, Artificial Sequence; identical to SEQ ID NO: 13970
  GFR-binding peptide
  MOD_RES (2), (3): Xaa is C or S

SEQ ID NO: 39125 - protein, 36 aa, Artificial Sequence; identical to SEQ ID NO: 15666
  GFR-binding peptide
  MOD_RES (2), (3): Xaa is C or S
  MOD_RES (17), (18), (19), (20), (21): Xaa is A or G
  MOD_RES (22), (23), (24), (25): Xaa is A or G or is absent

SEQ ID NO: 39126 - protein, 38 aa, Artificial Sequence; identical to SEQ ID NO: 8365
  GFR-binding peptide
  MOD_RES (4), (5), (36), (38): Xaa is C or S

SEQ ID NO: 39127 - protein, 36 aa, Artificial Sequence; identical to SEQ ID NO: 15668
  GFR-binding peptide
  MOD_RES (1), (2), (34), (36): Xaa is C or S

SEQ ID NO: 39128 - protein, 36 aa, Artificial Sequence; identical to SEQ ID NO: 15669
  GFR-binding peptide
  MOD_RES (5), (6): Xaa is C or S

SEQ ID NO: 39129 - protein, 35 aa, Artificial Sequence; identical to SEQ ID NO: 8368
  GFR-binding peptide
  MOD_RES (2), (3): Xaa is C or S
  MOD_RES (17), (18), (19), (20), (21): Xaa is A or G
  MOD_RES (22), (23), (24), (25): Xaa is A or G or is absent

SEQ ID NO: 39130 - protein, 37 aa, Artificial Sequence; identical to SEQ ID NO: 13971
  GFR-binding peptide
  MOD_RES (5), (6), (37): Xaa is C or S

SEQ ID NO: 39131 - protein, 36 aa, Artificial Sequence; identical to SEQ ID NO: 15671
  GFR-binding peptide
  MOD_RES (5), (6): Xaa is C or S

SEQ ID NO: 39132 - protein, 37 aa, Artificial Sequence; identical to SEQ ID NO: 15672
  GFR-binding peptide
  MOD_RES (34), (36): Xaa is C or S
  MOD_RES (14), (15), (16), (17), (18): Xaa is A or G
  MOD_RES (19), (20), (21), (22): Xaa is A or G or is absent

SEQ ID NO: 39133 - protein, 38 aa, Artificial Sequence; identical to SEQ ID NO: 13976
  GFR-binding peptide
  MOD_RES (1), (2), (36), (38): Xaa is C or S
  MOD_RES (16), (17), (18), (19), (20): Xaa is A or G
  MOD_RES (21), (22), (23), (24): Xaa is A or G or is absent

SEQ ID NO: 39134 - protein, 34 aa, Artificial Sequence; identical to SEQ ID NO: 15673
  GFR-binding peptide
  MOD_RES (1), (33): Xaa is C or S

SEQ ID NO: 39135 - protein, 34 aa, Artificial Sequence; identical to SEQ ID NO: 8374
  GFR-binding peptide
  MOD_RES (1), (1): Xaa is C or S
  MOD_RES (15), (16), (17), (18), (19): Xaa is A or G
  MOD_RES (20), (21), (22), (23): Xaa is A or G or is absent

SEQ ID NO: 39136 - protein, 32 aa, Artificial Sequence; identical to SEQ ID NO: 13978
  GFR-binding peptide
  MOD_RES (14), (15), (16), (17), (18): Xaa is A or G
  MOD_RES (19), (20), (21), (22): Xaa is A or G or is absent

SEQ ID NO: 39137 - protein, 34 aa, Artificial Sequence; identical to SEQ ID NO: 15675
  GFR-binding peptide
  MOD_RES (1), (33): Xaa is C or S

SEQ ID NO: 39138 - protein, 36 aa, Artificial Sequence; identical to SEQ ID NO: 15676
  GFR-binding peptide
  MOD_RES (4), (5), (36): Xaa is C or S

SEQ ID NO: 39139 - protein, 31 aa, Artificial Sequence; identical to SEQ ID NO: 8378
  GFR-binding peptide

SEQ ID NO: 39140 - protein, 41 aa, Artificial Sequence; identical to SEQ ID NO: 15678
  GFR-binding peptide
  MOD_RES (6), (7), (41): Xaa is C or S
  MOD_RES (21), (22), (23), (24), (25): Xaa is A or G
  MOD_RES (26), (27), (28), (29): Xaa is A or G or is absent

SEQ ID NO: 39141 - protein, 40 aa, Artificial Sequence; identical to SEQ ID NO: 15680
  GFR-binding peptide
  MOD_RES (2), (3), (37), (39): Xaa is C or S
  MOD_RES (17), (18), (19), (20), (21): Xaa is A or G
  MOD_RES (22), (23), (24), (25): Xaa is A or G or is absent

SEQ ID NO: 39142 - protein, 35 aa, Artificial Sequence; identical to SEQ ID NO: 15681
  GFR-binding peptide
  MOD_RES (1), (32), (34): Xaa is C or S

SEQ ID NO: 39143 - protein, 39 aa, Artificial Sequence; identical to SEQ ID NO: 15683
  GFR-binding peptide
  MOD_RES (3), (4), (37), (39): Xaa is C or S
  MOD_RES (18), (19), (20), (21), (22): Xaa is A or G
  MOD_RES (23), (24), (25), (26): Xaa is A or G or is absent

SEQ ID NO: 39144 - protein, 34 aa, Artificial Sequence; identical to SEQ ID NO: 13979
  GFR-binding peptide
  MOD_RES (1), (1): Xaa is C or S
  MOD_RES (15), (16), (17), (18), (19): Xaa is A or G
  MOD_RES (20), (21), (22), (23): Xaa is A or G or is absent

SEQ ID NO: 39145 - protein, 31 aa, Artificial Sequence; identical to SEQ ID NO: 6616
  GFR-binding peptide
  MOD_RES (31), (31): Xaa is C or S

SEQ ID NO: 39146 - protein, 38 aa, Artificial Sequence; identical to SEQ ID NO: 8383
  GFR-binding peptide
  MOD_RES (5), (6): Xaa is C or S
  MOD_RES (20), (21), (22), (23), (24): Xaa is A or G
  MOD_RES (25), (26), (27), (28): Xaa is A or G or is absent

SEQ ID NO: 39147 - protein, 40 aa, Artificial Sequence; identical to SEQ ID NO: 13981
  GFR-binding peptide
  MOD_RES (7), (39): Xaa is C or S

SEQ ID NO: 39148 - protein, 40 aa, Artificial Sequence; identical to SEQ ID NO: 13983
  GFR-binding peptide
  MOD_RES (5), (6), (40): Xaa is C or S
  MOD_RES (20), (21), (22), (23), (24): Xaa is A or G
  MOD_RES (25), (26), (27), (28): Xaa is A or G or is absent

SEQ ID NO: 39149 - protein, 31 aa, Artificial Sequence; identical to SEQ ID NO: 13984
  GFR-binding peptide

SEQ ID NO: 39150 - protein, 35 aa, Artificial Sequence; identical to SEQ ID NO: 13985
  GFR-binding peptide
  MOD_RES (34), (34): Xaa is C or S
  MOD_RES (14), (15), (16), (17), (18): Xaa is A or G
  MOD_RES (19), (20), (21), (22): Xaa is A or G or is absent

SEQ ID NO: 39151 - protein, 37 aa, Artificial Sequence; identical to SEQ ID NO: 13986
  GFR-binding peptide
  MOD_RES (3), (4): Xaa is C or S
  MOD_RES (18), (19), (20), (21), (22): Xaa is A or G
  MOD_RES (23), (24), (25), (26): Xaa is A or G or is absent

SEQ ID NO: 39152 - protein, 37 aa, Artificial Sequence; identical to SEQ ID NO: 13987
  GFR-binding peptide
  MOD_RES (3), (4): Xaa is C or S
  MOD_RES (18), (19), (20), (21), (22): Xaa is A or G
  MOD_RES (23), (24), (25), (26): Xaa is A or G or is absent

SEQ ID NO: 39153 - protein, 34 aa, Artificial Sequence; identical to SEQ ID NO: 15685
  GFR-binding peptide
  MOD_RES (3), (4): Xaa is C or S

SEQ ID NO: 39154 - protein, 38 aa, Artificial Sequence; identical to SEQ ID NO: 13988
  GFR-binding peptide
  MOD_RES (1), (35), (37): Xaa is C or S
  MOD_RES (15), (16), (17), (18), (19): Xaa is A or G
  MOD_RES (20), (21), (22), (23): Xaa is A or G or is absent

SEQ ID NO: 39155 - protein, 37 aa, Artificial Sequence; identical to SEQ ID NO: 15686
  GFR-binding peptide
  MOD_RES (4), (5): Xaa is C or S
  MOD_RES (19), (20), (21), (22), (23): Xaa is A or G
  MOD_RES (24), (25), (26), (27): Xaa is A or G or is absent

SEQ ID NO: 39156 - protein, 41 aa, Artificial Sequence; identical to SEQ ID NO: 6621
  GFR-binding peptide
  MOD_RES (4), (5), (38), (40): Xaa is C or S
  MOD_RES (19), (20), (21), (22), (23): Xaa is A or G
  MOD_RES (24), (25), (26), (27): Xaa is A or G or is absent

SEQ ID NO: 39157 - protein, 38 aa, Artificial Sequence; identical to SEQ ID NO: 15688
  GFR-binding peptide
  MOD_RES (3), (4), (37): Xaa is C or S
  MOD_RES (18), (19), (20), (21), (22): Xaa is A or G
  MOD_RES (23), (24), (25), (26): Xaa is A or G or is absent

SEQ ID NO: 39158 - protein, 36 aa, Artificial Sequence; identical to SEQ ID NO: 13991
  GFR-binding peptide
  MOD_RES (1), (2), (34), (36): Xaa is C or S

SEQ ID NO: 39159 - protein, 39 aa, Artificial Sequence; identical to SEQ ID NO: 13992
  GFR-binding peptide
  MOD_RES (5), (6): Xaa is C or S
  MOD_RES (20), (21), (22), (23), (24): Xaa is A or G
  MOD_RES (25), (26), (27), (28): Xaa is A or G or is absent

SEQ ID NO: 39160 - protein, 34 aa, Artificial Sequence; identical to SEQ ID NO: 13993
  GFR-binding peptide
  MOD_RES (1), (2): Xaa is C or S
  MOD_RES (16), (17), (18), (19), (20): Xaa is A or G
  MOD_RES (21), (22), (23), (24): Xaa is A or G or is absent

SEQ ID NO: 39161 - protein, 39 aa, Artificial Sequence; identical to SEQ ID NO: 15690
  GFR-binding peptide
  MOD_RES (5), (6), (38): Xaa is C or S

SEQ ID NO: 39162 - protein, 38 aa, Artificial Sequence; identical to SEQ ID NO: 13994
  GFR-binding peptide
  MOD_RES (4), (5), (38): Xaa is C or S
  MOD_RES (19), (20), (21), (22), (23): Xaa is A or G
  MOD_RES (24), (25), (26), (27): Xaa is A or G or is absent

SEQ ID NO: 39163 - protein, 40 aa, Artificial Sequence; identical to SEQ ID NO: 15692
  GFR-binding peptide
  MOD_RES (6), (40): Xaa is C or S
  MOD_RES (20), (21), (22), (23), (24): Xaa is A or G
  MOD_RES (25), (26), (27), (28): Xaa is A or G or is absent

SEQ ID NO: 39164 - protein, 42 aa, Artificial Sequence; identical to SEQ ID NO: 13995
  GFR-binding peptide
  MOD_RES (5), (6), (40), (42): Xaa is C or S
  MOD_RES (20), (21), (22), (23), (24): Xaa is A or G
  MOD_RES (25), (26), (27), (28): Xaa is A or G or is absent

SEQ ID NO: 39165 - protein, 30 aa, Artificial Sequence; identical to SEQ ID NO: 13996
  GFR-binding peptide

SEQ ID NO: 39166 - protein, 34 aa, Artificial Sequence; identical to SEQ ID NO: 15693
  GFR-binding peptide
  MOD_RES (1), (2), (33): Xaa is C or S

SEQ ID NO: 39167 - protein, 36 aa, Artificial Sequence; identical to SEQ ID NO: 8397
  GFR-binding peptide
  MOD_RES (3), (4), (35): Xaa is C or S

SEQ ID NO: 39168 - protein, 32 aa, Artificial Sequence; identical to SEQ ID NO: 8400
  GFR-binding peptide
  MOD_RES (1), (32): Xaa is C or S

SEQ ID NO: 39169 - protein, 39 aa, Artificial Sequence; identical to SEQ ID NO: 15696
  GFR-binding peptide
  MOD_RES (5), (6): Xaa is C or S
  MOD_RES (20), (21), (22), (23), (24): Xaa is A or G
  MOD_RES (25), (26), (27), (28): Xaa is A or G or is absent

SEQ ID NO: 39170 - protein, 36 aa, Artificial Sequence; identical to SEQ ID NO: 8401
  GFR-binding peptide
  MOD_RES (1), (2), (35): Xaa is C or S
  MOD_RES (16), (17), (18), (19), (20): Xaa is A or G
  MOD_RES (21), (22), (23), (24): Xaa is A or G or is absent

SEQ ID NO: 39171 - protein, 37 aa, Artificial Sequence; identical to SEQ ID NO: 13997
  GFR-binding peptide
  MOD_RES (6), (7): Xaa is C or S

SEQ ID NO: 39172 - protein, 34 aa, Artificial Sequence; identical to SEQ ID NO: 15698
  GFR-binding peptide
  MOD_RES (3), (4): Xaa is C or S

SEQ ID NO: 39173 - protein, 33 aa, Artificial Sequence; identical to SEQ ID NO: 15699
  GFR-binding peptide
  MOD_RES (1), (2): Xaa is C or S

SEQ ID NO: 39174 - protein, 39 aa, Artificial Sequence; identical to SEQ ID NO: 15700
  GFR-binding peptide
  MOD_RES (4), (5), (38): Xaa is C or S
  MOD_RES (19), (20), (21), (22), (23): Xaa is A or G
  MOD_RES (24), (25), (26), (27): Xaa is A or G or is absent

SEQ ID NO: 39175 - protein, 37 aa, Artificial Sequence; identical to SEQ ID NO: 15701
  GFR-binding peptide
  MOD_RES (1), (35), (37): Xaa is C or S
  MOD_RES (15), (16), (17), (18), (19): Xaa is A or G
  MOD_RES (20), (21), (22), (23): Xaa is A or G or is absent

SEQ ID NO: 39176 - protein, 36 aa, Artificial Sequence; identical to SEQ ID NO: 13998
  GFR-binding peptide
  MOD_RES (1), (33), (35): Xaa is C or S

SEQ ID NO: 39177 - protein, 40 aa, Artificial Sequence; identical to SEQ ID NO: 13999
  GFR-binding peptide
  MOD_RES (6), (7), (39): Xaa is C or S

SEQ ID NO: 39178 - protein, 43 aa, Artificial Sequence; identical to SEQ ID NO: 14000
  GFR-binding peptide
  MOD_RES (6), (7), (40), (42): Xaa is C or S
  MOD_RES (21), (22), (23), (24), (25): Xaa is A or G
  MOD_RES (26), (27), (28), (29): Xaa is A or G or is absent

SEQ ID NO: 39179 - protein, 37 aa, Artificial Sequence; identical to SEQ ID NO: 15702
  GFR-binding peptide
  MOD_RES (1), (35), (37): Xaa is C or S
  MOD_RES (15), (16), (17), (18), (19): Xaa is A or G
  MOD_RES (20), (21), (22), (23): Xaa is A or G or is absent

SEQ ID NO: 39180 - protein, 35 aa, Artificial Sequence; identical to SEQ ID NO: 14002
  GFR-binding peptide
  MOD_RES (1), (2), (33), (35): Xaa is C or S

SEQ ID NO: 39181 - protein, 37 aa, Artificial Sequence; identical to SEQ ID NO: 6632
  GFR-binding peptide
  MOD_RES (2), (3), (37): Xaa is C or S
  MOD_RES (17), (18), (19), (20), (21): Xaa is A or G
  MOD_RES (22), (23), (24), (25): Xaa is A or G or is absent

SEQ ID NO: 39182 - protein, 33 aa, Artificial Sequence; identical to SEQ ID NO: 15704
  GFR-binding peptide
  MOD_RES (1), (32): Xaa is C or S

SEQ ID NO: 39183 - protein, 36 aa, Artificial Sequence; identical to SEQ ID NO: 15705
  GFR-binding peptide
  MOD_RES (34), (36): Xaa is C or S
  MOD_RES (14), (15), (16), (17), (18): Xaa is A or G
  MOD_RES (19), (20), (21), (22): Xaa is A or G or is absent

SEQ ID NO: 39184 - protein, 38 aa, Artificial Sequence; identical to SEQ ID NO: 15706
  GFR-binding peptide
  MOD_RES (3), (35), (37): Xaa is C or S

SEQ ID NO: 39185 - protein, 35 aa, Artificial Sequence; identical to SEQ ID NO: 15707
  GFR-binding peptide
  MOD_RES (4), (4): Xaa is C or S

SEQ ID NO: 39186 - protein, 41 aa, Artificial Sequence; identical to SEQ ID NO: 14004
  GFR-binding peptide
  MOD_RES (5), (6), (39), (41): Xaa is C or S
  MOD_RES (20), (21), (22), (23), (24): Xaa is A or G
  MOD_RES (25), (26), (27), (28): Xaa is A or G or is absent

SEQ ID NO: 39187 - protein, 36 aa, Artificial Sequence; identical to SEQ ID NO: 14005
  GFR-binding peptide
  MOD_RES (5), (5): Xaa is C or S

SEQ ID NO: 39188 - protein, 35 aa, Artificial Sequence; identical to SEQ ID NO: 15709
  GFR-binding peptide
  MOD_RES (1), (33), (35): Xaa is C or S

SEQ ID NO: 39189 - protein, 40 aa, Artificial Sequence; identical to SEQ ID NO: 6635
  GFR-binding peptide
  MOD_RES (6), (7), (40): Xaa is C or S
  MOD_RES (21), (22), (23), (24), (25): Xaa is A or G
  MOD_RES (26), (27), (28), (29): Xaa is A or G or is absent

SEQ ID NO: 39190 - protein, 35 aa, Artificial Sequence; identical to SEQ ID NO: 14007
  GFR-binding peptide
  MOD_RES (1), (2), (33), (35): Xaa is C or S

SEQ ID NO: 39191 - protein, 36 aa, Artificial Sequence; identical to SEQ ID NO: 14008
  GFR-binding peptide
  MOD_RES (3), (4): Xaa is C or S
  MOD_RES (18), (19), (20), (21), (22): Xaa is A or G
  MOD_RES (23), (24), (25), (26): Xaa is A or G or is absent

SEQ ID NO: 39192 - protein, 34 aa, Artificial Sequence; identical to SEQ ID NO: 8411
  GFR-binding peptide
  MOD_RES (1), (2), (33): Xaa is C or S

SEQ ID NO: 39193 - protein, 38 aa, Artificial Sequence; identical to SEQ ID NO: 15713
  GFR-binding peptide
  MOD_RES (5), (6), (37): Xaa is C or S

SEQ ID NO: 39194 - protein, 37 aa, Artificial Sequence; identical to SEQ ID NO: 15715
  GFR-binding peptide
  MOD_RES (2), (3), (36): Xaa is C or S
  MOD_RES (17), (18), (19), (20), (21): Xaa is A or G
  MOD_RES (22), (23), (24), (25): Xaa is A or G or is absent

SEQ ID NO: 39195 - protein, 34 aa, Artificial Sequence; identical to SEQ ID NO: 15717
  GFR-binding peptide
  MOD_RES (1), (2): Xaa is C or S
  MOD_RES (16), (17), (18), (19), (20): Xaa is A or G
  MOD_RES (21), (22), (23), (24): Xaa is A or G or is absent

SEQ ID NO: 39196 - protein, 37 aa, Artificial Sequence; identical to SEQ ID NO: 6645
  GFR-binding peptide
  MOD_RES (3), (4), (37): Xaa is C or S
  MOD_RES (18), (19), (20), (21), (22): Xaa is A or G
  MOD_RES (23), (24), (25), (26): Xaa is A or G or is absent

SEQ ID NO: 39197 - protein, 39 aa, Artificial Sequence; identical to SEQ ID NO: 14011
  GFR-binding peptide
  MOD_RES (1), (2), (36), (38): Xaa is C or S
  MOD_RES (16), (17), (18), (19), (20): Xaa is A or G
  MOD_RES (21), (22), (23), (24): Xaa is A or G or is absent

SEQ ID NO: 39198 - protein, 36 aa, Artificial Sequence; identical to SEQ ID NO: 8417
  GFR-binding peptide
  MOD_RES (1), (2), (36): Xaa is C or S
  MOD_RES (16), (17), (18), (19), (20): Xaa is A or G
  MOD_RES (21), (22), (23), (24): Xaa is A or G or is absent

SEQ ID NO: 39199 - protein, 38 aa, Artificial Sequence; identical to SEQ ID NO: 8420
  GFR-binding peptide
  MOD_RES (3), (4), (35), (37): Xaa is C or S

SEQ ID NO: 39200 - protein, 41 aa, Artificial Sequence; identical to SEQ ID NO: 14012
  GFR-binding peptide
  MOD_RES (5), (6), (39), (41): Xaa is C or S
  MOD_RES (20), (21), (22), (23), (24): Xaa is A or G
  MOD_RES (25), (26), (27), (28): Xaa is A or G or is absent

SEQ ID NO: 39201 - protein, 37 aa, Artificial Sequence; identical to SEQ ID NO: 15721
  GFR-binding peptide
  MOD_RES (2), (3), (35), (37): Xaa is C or S

SEQ ID NO: 39202 - protein, 40 aa, Artificial Sequence; identical to SEQ ID NO: 14013
  GFR-binding peptide
  MOD_RES (4), (5), (39): Xaa is C or S
  MOD_RES (19), (20), (21), (22), (23): Xaa is A or G
  MOD_RES (24), (25), (26), (27): Xaa is A or G or is absent

SEQ ID NO: 39203 - protein, 43 aa, Artificial Sequence; identical to SEQ ID NO: 15722
  GFR-binding peptide
  MOD_RES (7), (41), (43): Xaa is C or S
  MOD_RES (21), (22), (23), (24), (25): Xaa is A or G
  MOD_RES (26), (27), (28), (29): Xaa is A or G or is absent

SEQ ID NO: 39204 - protein, 36 aa, Artificial Sequence; identical to SEQ ID NO: 15724
  GFR-binding peptide
  MOD_RES (3), (4): Xaa is C or S
  MOD_RES (18), (19), (20), (21), (22): Xaa is A or G
  MOD_RES (23), (24), (25), (26): Xaa is A or G or is absent

SEQ ID NO: 39205 - protein, 35 aa, Artificial Sequence; identical to SEQ ID NO: 6652
  GFR-binding peptide
  MOD_RES (2), (3): Xaa is C or S
  MOD_RES (17), (18), (19), (20), (21): Xaa is A or G
  MOD_RES (22), (23), (24), (25): Xaa is A or G or is absent

SEQ ID NO: 39206 - protein, 41 aa, Artificial Sequence; identical to SEQ ID NO: 15725
  GFR-binding peptide
  MOD_RES (5), (6), (40): Xaa is C or S
  MOD_RES (20), (21), (22), (23), (24): Xaa is A or G
  MOD_RES (25), (26), (27), (28): Xaa is A or G or is absent

SEQ ID NO: 39207 - protein, 36 aa, Artificial Sequence; identical to SEQ ID NO: 8428
  GFR-binding peptide
  MOD_RES (1), (2), (34), (36): Xaa is C or S

SEQ ID NO: 39208 - protein, 38 aa, Artificial Sequence; identical to SEQ ID NO: 15727
  GFR-binding peptide
  MOD_RES (2), (3), (37): Xaa is C or S
  MOD_RES (17), (18), (19), (20), (21): Xaa is A or G
  MOD_RES (22), (23), (24), (25): Xaa is A or G or is absent

SEQ ID NO: 39209 - protein, 35 aa, Artificial Sequence; identical to SEQ ID NO: 15728
  GFR-binding peptide
  MOD_RES (1), (35): Xaa is C or S
  MOD_RES (15), (16), (17), (18), (19): Xaa is A or G
  MOD_RES (20), (21), (22), (23): Xaa is A or G or is absent

SEQ ID NO: 39210 - protein, 36 aa, Artificial Sequence; identical to SEQ ID NO: 6655
  GFR-binding peptide
  MOD_RES (4), (5): Xaa is C or S

SEQ ID NO: 39211 - protein, 41 aa, Artificial Sequence; identical to SEQ ID NO: 8429
  GFR-binding peptide
  MOD_RES (4), (5), (39), (41): Xaa is C or S
  MOD_RES (19), (20), (21), (22), (23): Xaa is A or G
  MOD_RES (24), (25), (26), (27): Xaa is A or G or is absent

SEQ ID NO: 39212 - protein, 37 aa, Artificial Sequence; identical to SEQ ID NO: 8432
  GFR-binding peptide
  MOD_RES (5), (6), (37): Xaa is C or S

SEQ ID NO: 39213 - protein, 37 aa, Artificial Sequence; identical to SEQ ID NO: 15732
  GFR-binding peptide
  MOD_RES (5), (6), (37): Xaa is C or S

SEQ ID NO: 39214 - protein, 37 aa, Artificial Sequence; identical to SEQ ID NO: 15733
  GFR-binding peptide
  MOD_RES (6), (7): Xaa is C or S

SEQ ID NO: 39215 - protein, 41 aa, Artificial Sequence; identical to SEQ ID NO: 14019
  GFR-binding peptide
  MOD_RES (4), (38), (40): Xaa is C or S
  MOD_RES (18), (19), (20), (21), (22): Xaa is A or G
  MOD_RES (23), (24), (25), (26): Xaa is A or G or is absent

SEQ ID NO: 39216 - protein, 35 aa, Artificial Sequence; identical to SEQ ID NO: 14020
  GFR-binding peptide
  MOD_RES (1), (2), (33), (35): Xaa is C or S

SEQ ID NO: 39217 - protein, 37 aa, Artificial Sequence; identical to SEQ ID NO: 15735
  GFR-binding peptide
  MOD_RES (4), (5): Xaa is C or S
  MOD_RES (19), (20), (21), (22), (23): Xaa is A or G
  MOD_RES (24), (25), (26), (27): Xaa is A or G or is absent

SEQ ID NO: 39218 - protein, 38 aa, Artificial Sequence; identical to SEQ ID NO: 15736
  GFR-binding peptide
  MOD_RES (3), (4), (36), (38): Xaa is C or S

SEQ ID NO: 39219 - protein, 37 aa, Artificial Sequence; identical to SEQ ID NO: 14021
  GFR-binding peptide
  MOD_RES (2), (3), (35), (37): Xaa is C or S

SEQ ID NO: 39220 - protein, 36 aa, Artificial Sequence; identical to SEQ ID NO: 14022
  GFR-binding peptide
  MOD_RES (2), (3): Xaa is C or S
  MOD_RES (17), (18), (19), (20), (21): Xaa is A or G
  MOD_RES (22), (23), (24), (25): Xaa is A or G or is absent

SEQ ID NO: 39221 - protein, 38 aa, Artificial Sequence; identical to SEQ ID NO: 14023
  GFR-binding peptide
  MOD_RES (1), (2), (36), (38): Xaa is C or S
  MOD_RES (16), (17), (18), (19), (20): Xaa is A or G
  MOD_RES (21), (22), (23), (24): Xaa is A or G or is absent

SEQ ID NO: 39222 - protein, 38 aa, Artificial Sequence; identical to SEQ ID NO: 14024
  GFR-binding peptide
  MOD_RES (4), (5): Xaa is C or S
  MOD_RES (19), (20), (21), (22), (23): Xaa is A or G
  MOD_RES (24), (25), (26), (27): Xaa is A or G or is absent

SEQ ID NO: 39223 - protein, 38 aa, Artificial Sequence; identical to SEQ ID NO: 8442
  GFR-binding peptide
  MOD_RES (1), (2), (35), (37): Xaa is C or S
  MOD_RES (16), (17), (18), (19), (20): Xaa is A or G
  MOD_RES (21), (22), (23), (24): Xaa is A or G or is absent

SEQ ID NO: 39224 - protein, 35 aa, Artificial Sequence; identical to SEQ ID NO: 15739
  GFR-binding peptide
  MOD_RES (2), (2): Xaa is C or S
  MOD_RES (16), (17), (18), (19), (20): Xaa is A or G
  MOD_RES (21), (22), (23), (24): Xaa is A or G or is absent

SEQ ID NO: 39225 - protein, 40 aa, Artificial Sequence; identical to SEQ ID NO: 15740
  GFR-binding peptide
  MOD_RES (6), (7): Xaa is C or S
  MOD_RES (21), (22), (23), (24), (25): Xaa is A or G
  MOD_RES (26), (27), (28), (29): Xaa is A or G or is absent

SEQ ID NO: 39226 - protein, 41 aa, Artificial Sequence; identical to SEQ ID NO: 15741
  GFR-binding peptide
  MOD_RES (4), (5), (39), (41): Xaa is C or S
  MOD_RES (19), (20), (21), (22), (23): Xaa is A or G
  MOD_RES (24), (25), (26), (27): Xaa is A or G or is absent

SEQ ID NO: 39227 - protein, 38 aa, Artificial Sequence; identical to SEQ ID NO: 14025
  GFR-binding peptide
  MOD_RES (3), (37): Xaa is C or S
  MOD_RES (17), (18), (19), (20), (21): Xaa is A or G
  MOD_RES (22), (23), (24), (25): Xaa is A or G or is absent

SEQ ID NO: 39228 - protein, 31 aa, Artificial Sequence; identical to SEQ ID NO: 14026
  GFR-binding peptide

SEQ ID NO: 39229 - protein, 39 aa, Artificial Sequence; identical to SEQ ID NO: 14027
  GFR-binding peptide
  MOD_RES (5), (37), (39): Xaa is C or S

SEQ ID NO: 39230 - protein, 32 aa, Artificial Sequence; identical to SEQ ID NO: 8444
  GFR-binding peptide
  MOD_RES (1), (2): Xaa is C or S

SEQ ID NO: 39231 - protein, 37 aa, Artificial Sequence; identical to SEQ ID NO: 14028
  GFR-binding peptide
  MOD_RES (5), (37): Xaa is C or S

SEQ ID NO: 39232 - protein, 40 aa, Artificial Sequence; identical to SEQ ID NO: 6669
  GFR-binding peptide
  MOD_RES (5), (6), (40): Xaa is C or S
  MOD_RES (20), (21), (22), (23), (24): Xaa is A or G
  MOD_RES (25), (26), (27), (28): Xaa is A or G or is absent

SEQ ID NO: 39233 - protein, 36 aa, Artificial Sequence; identical to SEQ ID NO: 15743
  GFR-binding peptide
  MOD_RES (4), (5): Xaa is C or S

SEQ ID NO: 39234 - protein, 33 aa, Artificial Sequence; identical to SEQ ID NO: 14030
  GFR-binding peptide
  MOD_RES (2), (3): Xaa is C or S

SEQ ID NO: 39235 - protein, 34 aa, Artificial Sequence; identical to SEQ ID NO: 8446
  GFR-binding peptide
  MOD_RES (1), (1): Xaa is C or S
  MOD_RES (15), (16), (17), (18), (19): Xaa is A or G
  MOD_RES (20), (21), (22), (23): Xaa is A or G or is absent

SEQ ID NO: 39236 - protein, 35 aa, Artificial Sequence; identical to SEQ ID NO: 6670
  GFR-binding peptide
  MOD_RES (3), (4): Xaa is C or S

SEQ ID NO: 39237 - protein, 38 aa, Artificial Sequence; identical to SEQ ID NO: 15745
  GFR-binding peptide
  MOD_RES (3), (4), (38): Xaa is C or S
  MOD_RES (18), (19), (20), (21), (22): Xaa is A or G
  MOD_RES (23), (24), (25), (26): Xaa is A or G or is absent

SEQ ID NO: 39238 - protein, 36 aa, Artificial Sequence; identical to SEQ ID NO: 6671
  GFR-binding peptide
  MOD_RES (1), (35): Xaa is C or S
  MOD_RES (15), (16), (17), (18), (19): Xaa is A or G
  MOD_RES (20), (21), (22), (23): Xaa is A or G or is absent

SEQ ID NO: 39239 - protein, 33 aa, Artificial Sequence; identical to SEQ ID NO: 6672
  GFR-binding peptide
  MOD_RES (33), (33): Xaa is C or S
  MOD_RES (14), (15), (16), (17), (18): Xaa is A or G
  MOD_RES (19), (20), (21), (22): Xaa is A or G or is absent

SEQ ID NO: 39240 - protein, 36 aa, Artificial Sequence; identical to SEQ ID NO: 15746
  GFR-binding peptide
  MOD_RES (3), (4), (36): Xaa is C or S

SEQ ID NO: 39241 - protein, 38 aa, Artificial Sequence; identical to SEQ ID NO: 15747
  GFR-binding peptide
  MOD_RES (2), (3), (37): Xaa is C or S
  MOD_RES (17), (18), (19), (20), (21): Xaa is A or G
  MOD_RES (22), (23), (24), (25): Xaa is A or G or is absent

SEQ ID NO: 39242 - protein, 38 aa, Artificial Sequence; identical to SEQ ID NO: 15748
  GFR-binding peptide
  MOD_RES (5), (6), (38): Xaa is C or S

SEQ ID NO: 39243 - protein, 32 aa, Artificial Sequence; identical to SEQ ID NO: 14036
  GFR-binding peptide
  MOD_RES (1), (32): Xaa is C or S

SEQ ID NO: 39244 - protein, 34 aa, Artificial Sequence; identical to SEQ ID NO: 14037
  GFR-binding peptide
  MOD_RES (1), (32), (34): Xaa is C or S

SEQ ID NO: 39245 - protein, 39 aa, Artificial Sequence; identical to SEQ ID NO: 15749
  GFR-binding peptide
  MOD_RES (3), (4), (38): Xaa is C or S
  MOD_RES (18), (19), (20), (21), (22): Xaa is A or G
  MOD_RES (23), (24), (25), (26): Xaa is A or G or is absent

SEQ ID NO: 39246 - protein, 39 aa, Artificial Sequence; identical to SEQ ID NO: 15750
  GFR-binding peptide
  MOD_RES (5), (6): Xaa is C or S
  MOD_RES (20), (21), (22), (23), (24): Xaa is A or G
  MOD_RES (25), (26), (27), (28): Xaa is A or G or is absent

SEQ ID NO: 39247 - protein, 41 aa, Artificial Sequence; identical to SEQ ID NO: 15751
  GFR-binding peptide
  MOD_RES (6), (7), (40): Xaa is C or S
  MOD_RES (21), (22), (23), (24), (25): Xaa is A or G
  MOD_RES (26), (27), (28), (29): Xaa is A or G or is absent

SEQ ID NO: 39248 - protein, 35 aa, Artificial Sequence; identical to SEQ ID NO: 15752
  GFR-binding peptide
  MOD_RES (1), (2), (35): Xaa is C or S
  MOD_RES (16), (17), (18), (19), (20): Xaa is A or G
  MOD_RES (21), (22), (23), (24): Xaa is A or G or is absent

SEQ ID NO: 39249 - protein, 32 aa, Artificial Sequence; identical to SEQ ID NO: 14038
  GFR-binding peptide
  MOD_RES (2), (2): Xaa is C or S

SEQ ID NO: 39250 - protein, 37 aa, Artificial Sequence; identical to SEQ ID NO: 14039
  GFR-binding peptide
  MOD_RES (1), (2), (36): Xaa is C or S
  MOD_RES (16), (17), (18), (19), (20): Xaa is A or G
  MOD_RES (21), (22), (23), (24): Xaa is A or G or is absent

SEQ ID NO: 39251 - protein, 34 aa, Artificial Sequence; identical to SEQ ID NO: 14040
  GFR-binding peptide
  MOD_RES (1), (32), (34): Xaa is C or S

SEQ ID NO: 39252 - protein, 32 aa, Artificial Sequence; identical to SEQ ID NO: 15754
  GFR-binding peptide
  MOD_RES (32), (32): Xaa is C or S

SEQ ID NO: 39253 - protein, 35 aa, Artificial Sequence; identical to SEQ ID NO: 14042
  GFR-binding peptide
  MOD_RES (1), (2), (35): Xaa is C or S
  MOD_RES (16), (17), (18), (19), (20): Xaa is A or G
  MOD_RES (21), (22), (23), (24): Xaa is A or G or is absent

SEQ ID NO: 39254 - protein, 33 aa, Artificial Sequence; identical to SEQ ID NO: 6679
  GFR-binding peptide
  MOD_RES (1), (2): Xaa is C or S

SEQ ID NO: 39255 - protein, 38 aa, Artificial Sequence; identical to SEQ ID NO: 14044
  GFR-binding peptide
  MOD_RES (3), (4), (38): Xaa is C or S
  MOD_RES (18), (19), (20), (21), (22): Xaa is A or G
  MOD_RES (23), (24), (25), (26): Xaa is A or G or is absent

SEQ ID NO: 39256 - protein, 35 aa, Artificial Sequence; identical to SEQ ID NO: 14045
  GFR-binding peptide
  MOD_RES (34), (34): Xaa is C or S
  MOD_RES (14), (15), (16), (17), (18): Xaa is A or G
  MOD_RES (19), (20), (21), (22): Xaa is A or G or is absent

SEQ ID NO: 39257 - protein, 40 aa, Artificial Sequence; identical to SEQ ID NO: 15755
  GFR-binding peptide
  MOD_RES (2), (3), (37), (39): Xaa is C or S
  MOD_RES (17), (18), (19), (20), (21): Xaa is A or G
  MOD_RES (22), (23), (24), (25): Xaa is A or G or is absent

SEQ ID NO: 39258 - protein, 41 aa, Artificial Sequence; identical to SEQ ID NO: 15756
  GFR-binding peptide
  MOD_RES (6), (7), (41): Xaa is C or S
  MOD_RES (21), (22), (23), (24), (25): Xaa is A or G
  MOD_RES (26), (27), (28), (29): Xaa is A or G or is absent

SEQ ID NO: 39259 - protein, 33 aa, Artificial Sequence; identical to SEQ ID NO: 15757
  GFR-binding peptide
  MOD_RES (2), (3): Xaa is C or S

SEQ ID NO: 39260 - protein, 39 aa, Artificial Sequence; identical to SEQ ID NO: 15758
  GFR-binding peptide
  MOD_RES (6), (7): Xaa is C or S
  MOD_RES (21), (22), (23), (24), (25): Xaa is A or G
  MOD_RES (26), (27), (28), (29): Xaa is A or G or is absent

SEQ ID NO: 39261 - protein, 39 aa, Artificial Sequence; identical to SEQ ID NO: 15759
  GFR-binding peptide
  MOD_RES (3), (4), (36), (38): Xaa is C or S

SEQ ID NO: 39262 - protein, 34 aa, Artificial Sequence; identical to SEQ ID NO: 14046
  GFR-binding peptide
  MOD_RES (1), (2): Xaa is C or S
  MOD_RES (16), (17), (18), (19), (20): Xaa is A or G
  MOD_RES (21), (22), (23), (24): Xaa is A or G or is absent

SEQ ID NO: 39263 - protein, 34 aa, Artificial Sequence; identical to SEQ ID NO: 15760
  GFR-binding peptide
  MOD_RES (3), (4): Xaa is C or S

SEQ ID NO: 39264 - protein, 44 aa, Artificial Sequence; identical to SEQ ID NO: 14048
  GFR-binding peptide
  MOD_RES (6), (7), (41), (43): Xaa is C or S
  MOD_RES (21), (22), (23), (24), (25): Xaa is A or G
  MOD_RES (26), (27), (28), (29): Xaa is A or G or is absent

SEQ ID NO: 39265 - protein, 38 aa, Artificial Sequence; identical to SEQ ID NO: 14049
  GFR-binding peptide
  MOD_RES (6), (7): Xaa is C or S

SEQ ID NO: 39266 - protein, 36 aa, Artificial Sequence; identical to SEQ ID NO: 15761
  GFR-binding peptide
  MOD_RES (3), (4), (36): Xaa is C or S

SEQ ID NO: 39267 - protein, 35 aa, Artificial Sequence; identical to SEQ ID NO: 15762
  GFR-binding peptide
  MOD_RES (32), (34): Xaa is C or S

SEQ ID NO: 39268 - protein, 32 aa, Artificial Sequence; identical to SEQ ID NO: 15763
  GFR-binding peptide
  MOD_RES (1), (2): Xaa is C or S

SEQ ID NO: 39269 - protein, 39 aa, Artificial Sequence; identical to SEQ ID NO: 8457
  GFR-binding peptide
  MOD_RES (2), (3), (37), (39): Xaa is C or S
  MOD_RES (17), (18), (19), (20), (21): Xaa is A or G
  MOD_RES (22), (23), (24), (25): Xaa is A or G or is absent

SEQ ID NO: 39270 - protein, 37 aa, Artificial Sequence; identical to SEQ ID NO: 14050
  GFR-binding peptide
  MOD_RES (4), (5), (37): Xaa is C or S

SEQ ID NO: 39271 - protein, 37 aa, Artificial Sequence; identical to SEQ ID NO: 8458
  GFR-binding peptide
  MOD_RES (6), (7): Xaa is C or S

SEQ ID NO: 39272 - protein, 34 aa, Artificial Sequence; identical to SEQ ID NO: 15766
  GFR-binding peptide
  MOD_RES (1), (2), (34): Xaa is C or S

SEQ ID NO: 39273 - protein, 31 aa, Artificial Sequence; identical to SEQ ID NO: 15767
  GFR-binding peptide
  MOD_RES (1), (1): Xaa is C or S

SEQ ID NO: 39274 - protein, 37 aa, Artificial Sequence; identical to SEQ ID NO: 14051
  GFR-binding peptide
  MOD_RES (2), (3), (35), (37): Xaa is C or S

SEQ ID NO: 39275 - protein, 35 aa, Artificial Sequence; identical to SEQ ID NO: 14052
  GFR-binding peptide
  MOD_RES (1), (33), (35): Xaa is C or S

SEQ ID NO: 39276 - protein, 33 aa, Artificial Sequence; identical to SEQ ID NO: 8460
  GFR-binding peptide
  MOD_RES (2), (3): Xaa is C or S

SEQ ID NO: 39277 - protein, 34 aa, Artificial Sequence; identical to SEQ ID NO: 15769
  GFR-binding peptide
  MOD_RES (4), (4): Xaa is C or S

SEQ ID NO: 39278 - protein, 35 aa, Artificial Sequence; identical to SEQ ID NO: 15770
  GFR-binding peptide
  MOD_RES (2), (3), (35): Xaa is C or S

SEQ ID NO: 39279 - protein, 38 aa, Artificial Sequence; identical to SEQ ID NO: 15771
  GFR-binding peptide
  MOD_RES (2), (3), (37): Xaa is C or S
  MOD_RES (17), (18), (19), (20), (21): Xaa is A or G
  MOD_RES (22), (23), (24), (25): Xaa is A or G or is absent

SEQ ID NO: 39280 - protein, 37 aa, Artificial Sequence; identical to SEQ ID NO: 8462
  GFR-binding peptide
  MOD_RES (2), (3), (35), (37): Xaa is C or S

SEQ ID NO: 39281 - protein, 39 aa, Artificial Sequence; identical to SEQ ID NO: 15773
  GFR-binding peptide
  MOD_RES (4), (5), (37), (39): Xaa is C or S

SEQ ID NO: 39282 - protein, 37 aa, Artificial Sequence; identical to SEQ ID NO: 14054
  GFR-binding peptide
  MOD_RES (2), (3), (35), (37): Xaa is C or S

SEQ ID NO: 39283 - protein, 37 aa, Artificial Sequence; identical to SEQ ID NO: 15774
  GFR-binding peptide
  MOD_RES (4), (5): Xaa is C or S
  MOD_RES (19), (20), (21), (22), (23): Xaa is A or G
  MOD_RES (24), (25), (26), (27): Xaa is A or G or is absent

SEQ ID NO: 39284 - protein, 34 aa, Artificial Sequence; identical to SEQ ID NO: 14055
  GFR-binding peptide
  MOD_RES (3), (3): Xaa is C or S

SEQ ID NO: 39285 - protein, 34 aa, Artificial Sequence; identical to SEQ ID NO: 8464
  GFR-binding peptide
  MOD_RES (3), (4): Xaa is C or S

SEQ ID NO: 39286 - protein, 33 aa, Artificial Sequence; identical to SEQ ID NO: 14056
  GFR-binding peptide
  MOD_RES (2), (3): Xaa is C or S

SEQ ID NO: 39287 - protein, 33 aa, Artificial Sequence; identical to SEQ ID NO: 14058
  GFR-binding peptide
  MOD_RES (32), (32): Xaa is C or S

SEQ ID NO: 39288 - protein, 40 aa, Artificial Sequence; identical to SEQ ID NO: 15776
  GFR-binding peptide
  MOD_RES (2), (3), (37), (39): Xaa is C or S
  MOD_RES (17), (18), (19), (20), (21): Xaa is A or G
  MOD_RES (22), (23), (24), (25): Xaa is A or G or is absent

SEQ ID NO: 39289 - protein, 40 aa, Artificial Sequence; identical to SEQ ID NO: 15777
  GFR-binding peptide
  MOD_RES (6), (7): Xaa is C or S
  MOD_RES (21), (22), (23), (24), (25): Xaa is A or G
  MOD_RES (26), (27), (28), (29): Xaa is A or G or is absent

SEQ ID NO: 39290 - protein, 40 aa, Artificial Sequence; identical to SEQ ID NO: 6708
  GFR-binding peptide
  MOD_RES (3), (4), (38), (40): Xaa is C or S
  MOD_RES (18), (19), (20), (21), (22): Xaa is A or G
  MOD_RES (23), (24), (25), (26): Xaa is A or G or is absent

SEQ ID NO: 39291 - protein, 38 aa, Artificial Sequence; identical to SEQ ID NO: 14060
  GFR-binding peptide
  MOD_RES (6), (6): Xaa is C or S
  MOD_RES (20), (21), (22), (23), (24): Xaa is A or G
  MOD_RES (25), (26), (27), (28): Xaa is A or G or is absent

SEQ ID NO: 39292 - protein, 35 aa, Artificial Sequence; identical to SEQ ID NO: 14061
  GFR-binding peptide
  MOD_RES (4), (5): Xaa is C or S

SEQ ID NO: 39293 - protein, 38 aa, Artificial Sequence; identical to SEQ ID NO: 15778
  GFR-binding peptide
  MOD_RES (2), (36), (38): Xaa is C or S
  MOD_RES (16), (17), (18), (19), (20): Xaa is A or G
  MOD_RES (21), (22), (23), (24): Xaa is A or G or is absent

SEQ ID NO: 39294 - protein, 36 aa, Artificial Sequence; identical to SEQ ID NO: 14062
  GFR-binding peptide
  MOD_RES (33), (35): Xaa is C or S
  MOD_RES (14), (15), (16), (17), (18): Xaa is A or G
  MOD_RES (19), (20), (21), (22): Xaa is A or G or is absent

SEQ ID NO: 39295 - protein, 43 aa, Artificial Sequence; identical to SEQ ID NO: 6711
  GFR-binding peptide
  MOD_RES (6), (7), (41), (43): Xaa is C or S
  MOD_RES (21), (22), (23), (24), (25): Xaa is A or G
  MOD_RES (26), (27), (28), (29): Xaa is A or G or is absent

SEQ ID NO: 39296 - protein, 34 aa, Artificial Sequence; identical to SEQ ID NO: 14064
  GFR-binding peptide
  MOD_RES (1), (2): Xaa is C or S
  MOD_RES (16), (17), (18), (19), (20): Xaa is A or G
  MOD_RES (21), (22), (23), (24): Xaa is A or G or is absent

SEQ ID NO: 39297 - protein, 36 aa, Artificial Sequence; identical to SEQ ID NO: 14065
  GFR-binding peptide
  MOD_RES (2), (36): Xaa is C or S
  MOD_RES (16), (17), (18), (19), (20): Xaa is A or G
  MOD_RES (21), (22), (23), (24): Xaa is A or G or is absent

SEQ ID NO: 39298 - protein, 37 aa, Artificial Sequence; identical to SEQ ID NO: 15781
  GFR-binding peptide
  MOD_RES (1), (2), (34), (36): Xaa is C or S

SEQ ID NO: 39299 - protein, 38 aa, Artificial Sequence; identical to SEQ ID NO: 14066
  GFR-binding peptide
  MOD_RES (1), (35), (37): Xaa is C or S
  MOD_RES (15), (16), (17), (18), (19): Xaa is A or G
  MOD_RES (20), (21), (22), (23): Xaa is A or G or is absent

SEQ ID NO: 39300 - protein, 38 aa, Artificial Sequence; identical to SEQ ID NO: 6713
  GFR-binding peptide
  MOD_RES (2), (3), (35), (37): Xaa is C or S

SEQ ID NO: 39301 - protein, 37 aa, Artificial Sequence; identical to SEQ ID NO: 15783
  GFR-binding peptide
  MOD_RES (3), (4), (36): Xaa is C or S

SEQ ID NO: 39302 - protein, 40 aa, Artificial Sequence; identical to SEQ ID NO: 8480
  GFR-binding peptide
  MOD_RES (5), (6), (37), (39): Xaa is C or S

SEQ ID NO: 39303 - protein, 36 aa, Artificial Sequence; identical to SEQ ID NO: 15785
  GFR-binding peptide
  MOD_RES (4), (5), (36): Xaa is C or S

SEQ ID NO: 39304 - protein, 38 aa, Artificial Sequence; identical to SEQ ID NO: 14068
  GFR-binding peptide
  MOD_RES (5), (6), (38): Xaa is C or S

SEQ ID NO: 39305 - protein, 36 aa, Artificial Sequence
  GFR-binding peptide
  MOD_RES (1), (34), (36): Xaa is C or S
  MOD_RES (15), (16), (17), (18), (19): Xaa is A or G
  MOD_RES (20), (21), (22), (23): Xaa is A or G or is absent
XVSQDLEPLTILYYXXXXXXXXXEQLSNMIVKSXKX

SEQ ID NO: 39306 - protein, 35 aa, Artificial Sequence; identical to SEQ ID NO: 14070
  GFR-binding peptide
  MOD_RES (4), (5): Xaa is C or S

SEQ ID NO: 39307 - protein, 44 aa, Artificial Sequence; identical to SEQ ID NO: 6720
  GFR-binding peptide
  MOD_RES (7), (41), (43): Xaa is C or S
  MOD_RES (21), (22), (23), (24), (25): Xaa is A or G
  MOD_RES (26), (27), (28), (29): Xaa is A or G or is absent

SEQ ID NO: 39308 - protein, 36 aa, Artificial Sequence; identical to SEQ ID NO: 15786
  GFR-binding peptide
  MOD_RES (1), (2), (35): Xaa is C or S
  MOD_RES (16), (17), (18), (19), (20): Xaa is A or G
  MOD_RES (21), (22), (23), (24): Xaa is A or G or is absent

SEQ ID NO: 39309 - protein, 34 aa, Artificial Sequence; identical to SEQ ID NO: 15787
  GFR-binding peptide
  MOD_RES (33), (33): Xaa is C or S
  MOD_RES (14), (15), (16), (17), (18): Xaa is A or G
  MOD_RES (19), (20), (21), (22): Xaa is A or G or is absent

SEQ ID NO: 39310 - protein, 36 aa, Artificial Sequence; identical to SEQ ID NO: 15788
  GFR-binding peptide
  MOD_RES (4), (5): Xaa is C or S

SEQ ID NO: 39311 - protein, 34 aa, Artificial Sequence; identical to SEQ ID NO: 15789
  GFR-binding peptide
  MOD_RES (3), (4): Xaa is C or S

SEQ ID NO: 39312 - protein, 35 aa, Artificial Sequence; identical to SEQ ID NO: 15790
  GFR-binding peptide
  MOD_RES (1), (34): Xaa is C or S
  MOD_RES (15), (16), (17), (18), (19): Xaa is A or G
  MOD_RES (20), (21), (22), (23): Xaa is A or G or is absent

SEQ ID NO: 39313 - protein, 35 aa, Artificial Sequence; identical to SEQ ID NO: 8490
  GFR-binding peptide
  MOD_RES (1), (35): Xaa is C or S
  MOD_RES (15), (16), (17), (18), (19): Xaa is A or G
  MOD_RES (20), (21), (22), (23): Xaa is A or G or is absent

SEQ ID NO: 39314 - protein, 34 aa, Artificial Sequence; identical to SEQ ID NO: 15792
  GFR-binding peptide
  MOD_RES (3), (4): Xaa is C or S

SEQ ID NO: 39315 - protein, 39 aa, Artificial Sequence; identical to SEQ ID NO: 15793
  GFR-binding peptide
  MOD_RES (1), (2), (36), (38): Xaa is C or S
  MOD_RES (16), (17), (18), (19), (20): Xaa is A or G
  MOD_RES (21), (22), (23), (24): Xaa is A or G or is absent

SEQ ID NO: 39316 - protein, 39 aa, Artificial Sequence; identical to SEQ ID NO: 6726
  GFR-binding peptide
  MOD_RES (5), (6), (39): Xaa is C or S
  MOD_RES (20), (21), (22), (23), (24): Xaa is A or G
  MOD_RES (25), (26), (27), (28): Xaa is A or G or is absent

SEQ ID NO: 39317 - protein, 35 aa, Artificial Sequence; identical to SEQ ID NO: 6727
  GFR-binding peptide
  MOD_RES (1), (2), (35): Xaa is C or S
  MOD_RES (16), (17), (18), (19), (20): Xaa is A or G
  MOD_RES (21), (22), (23), (24): Xaa is A or G or is absent

SEQ ID NO: 39318 - protein, 40 aa, Artificial Sequence; identical to SEQ ID NO: 14076
  GFR-binding peptide
  MOD_RES (3), (4), (38), (40): Xaa is C or S
  MOD_RES (18), (19), (20), (21), (22): Xaa is A or G
  MOD_RES (23), (24), (25), (26): Xaa is A or G or is absent

SEQ ID NO: 39319 - protein, 36 aa, Artificial Sequence; identical to SEQ ID NO: 14077
  GFR-binding peptide
  MOD_RES (33), (35): Xaa is C or S
  MOD_RES (14), (15), (16), (17), (18): Xaa is A or G
  MOD_RES (19), (20), (21), (22): Xaa is A or G or is absent

SEQ ID NO: 39320 - protein, 34 aa, Artificial Sequence; identical to SEQ ID NO: 14078
  GFR-binding peptide
  MOD_RES (1), (32), (34): Xaa is C or S

SEQ ID NO: 39321 - protein, 33 aa, Artificial Sequence; identical to SEQ ID NO: 15796
  GFR-binding peptide
  MOD_RES (1), (33): Xaa is C or S

SEQ ID NO: 39322 - protein, 43 aa, Artificial Sequence; identical to SEQ ID NO: 15797
  GFR-binding peptide
  MOD_RES (6), (7), (40), (42): Xaa is C or S
  MOD_RES (21), (22), (23), (24), (25): Xaa is A or G
  MOD_RES (26), (27), (28), (29): Xaa is A or G or is absent

SEQ ID NO: 39323 - protein, 36 aa, Artificial Sequence; identical to SEQ ID NO: 15798
  GFR-binding peptide
  MOD_RES (3), (4), (36): Xaa is C or S

SEQ ID NO: 39324 - protein, 34 aa, Artificial Sequence; identical to SEQ ID NO: 15799
  GFR-binding peptide
  MOD_RES (3), (4): Xaa is C or S

SEQ ID NO: 39325 - protein, 38 aa, Artificial Sequence; identical to SEQ ID NO: 14079
  GFR-binding peptide
  MOD_RES (2), (3), (35), (37): Xaa is C or S

SEQ ID NO: 39326 - protein, 40 aa, Artificial Sequence; identical to SEQ ID NO: 14080
  GFR-binding peptide
  MOD_RES (2), (3), (37), (39): Xaa is C or S
  MOD_RES (17), (18), (19), (20), (21): Xaa is A or G
  MOD_RES (22), (23), (24), (25): Xaa is A or G or is absent

SEQ ID NO: 39327 - protein, 38 aa, Artificial Sequence; identical to SEQ ID NO: 14081
  GFR-binding peptide
  MOD_RES (4), (38): Xaa is C or S
  MOD_RES (18), (19), (20), (21), (22): Xaa is A or G
  MOD_RES (23), (24), (25), (26): Xaa is A or G or is absent

SEQ ID NO: 39328 - protein, 36 aa, Artificial Sequence; identical to SEQ ID NO: 15801
  GFR-binding peptide
  MOD_RES (5), (6): Xaa is C or S

SEQ ID NO: 39329 - protein, 39 aa, Artificial Sequence; identical to SEQ ID NO: 15802
  GFR-binding peptide
  MOD_RES (1), (2), (36), (38): Xaa is C or S
  MOD_RES (16), (17), (18), (19), (20): Xaa is A or G
  MOD_RES (21), (22), (23), (24): Xaa is A or G or is absent

SEQ ID NO: 39330 - protein, 36 aa, Artificial Sequence; identical to SEQ ID NO: 15804
  GFR-binding peptide
  MOD_RES (2), (3), (35): Xaa is C or S

SEQ ID NO: 39331 - protein, 40 aa, Artificial Sequence; identical to SEQ ID NO: 15805
  GFR-binding peptide
  MOD_RES (5), (6), (40): Xaa is C or S
  MOD_RES (20), (21), (22), (23), (24): Xaa is A or G
  MOD_RES (25), (26), (27), (28): Xaa is A or G or is absent

SEQ ID NO: 39332 - protein, 40 aa, Artificial Sequence; identical to SEQ ID NO: 15806
  GFR-binding peptide
  MOD_RES (4), (5), (39): Xaa is C or S
  MOD_RES (19), (20), (21), (22), (23): Xaa is A or G
  MOD_RES (24), (25), (26), (27): Xaa is A or G or is absent

SEQ ID NO: 39333 - protein, 38 aa, Artificial Sequence; identical to SEQ ID NO: 15807
  GFR-binding peptide
  MOD_RES (2), (3), (36), (38): Xaa is C or S
  MOD_RES (17), (18), (19), (20), (21): Xaa is A or G
  MOD_RES (22), (23), (24), (25): Xaa is A or G or is absent

SEQ ID NO: 39334 - protein, 39 aa, Artificial Sequence; identical to SEQ ID NO: 15808
  GFR-binding peptide
  MOD_RES (6), (7), (39): Xaa is C or S

SEQ ID NO: 39335 - protein, 35 aa, Artificial Sequence; identical to SEQ ID NO: 15809
  GFR-binding peptide
  MOD_RES (1), (2): Xaa is C or S
  MOD_RES (16), (17), (18), (19), (20): Xaa is A or G
  MOD_RES (21), (22), (23), (24): Xaa is A or G or is absent

SEQ ID NO: 39336 - protein, 33 aa, Artificial Sequence; identical to SEQ ID NO: 14085
  GFR-binding peptide
  MOD_RES (14), (15), (16), (17), (18): Xaa is A or G
  MOD_RES (19), (20), (21), (22): Xaa is A or G or is absent

SEQ ID NO: 39337 - protein, 41 aa, Artificial Sequence; identical to SEQ ID NO: 14086
  GFR-binding peptide
  MOD_RES (5), (6), (38), (40): Xaa is C or S

SEQ ID NO: 39338 - protein, 39 aa, Artificial Sequence; identical to SEQ ID NO: 15810
  GFR-binding peptide
  MOD_RES (4), (5), (36), (38): Xaa is C or S

SEQ ID NO: 39339 - protein, 39 aa, Artificial Sequence; identical to SEQ ID NO: 15811
  GFR-binding peptide
  MOD_RES (6), (7), (39): Xaa is C or S

SEQ ID NO: 39340 - protein, 44 aa, Artificial Sequence; identical to SEQ ID NO: 15812
  GFR-binding peptide
  MOD_RES (6), (7), (41), (43): Xaa is C or S
  MOD_RES (21), (22), (23), (24), (25): Xaa is A or G
  MOD_RES (26), (27), (28), (29): Xaa is A or G or is absent

SEQ ID NO: 39341 - protein, 37 aa, Artificial Sequence; identical to SEQ ID NO: 15813
  GFR-binding peptide
  MOD_RES (1), (2), (35), (37): Xaa is C or S
  MOD_RES (16), (17), (18), (19), (20): Xaa is A or G
  MOD_RES (21), (22), (23), (24): Xaa is A or G or is absent

SEQ ID NO: 39342 - protein, 37 aa, Artificial Sequence; identical to SEQ ID NO: 14089
  GFR-binding peptide
  MOD_RES (2), (3), (34), (36): Xaa is C or S

SEQ ID NO: 39343 - protein, 37 aa, Artificial Sequence; identical to SEQ ID NO: 14091
  GFR-binding peptide
  MOD_RES (5), (6): Xaa is C or S

SEQ ID NO: 39344 - protein, 37 aa, Artificial Sequence; identical to SEQ ID NO: 15814
  GFR-binding peptide
  MOD_RES (3), (4), (36): Xaa is C or S

SEQ ID NO: 39345 - protein, 37 aa, Artificial Sequence; identical to SEQ ID NO: 15815
  GFR-binding peptide
  MOD_RES (6), (7): Xaa is C or S

SEQ ID NO: 39346 - protein, 38 aa, Artificial Sequence; identical to SEQ ID NO: 15816
  GFR-binding peptide
  MOD_RES (4), (5): Xaa is C or S
  MOD_RES (19), (20), (21), (22), (23): Xaa is A or G
  MOD_RES (24), (25), (26), (27): Xaa is A or G or is absent

SEQ ID NO: 39347 - protein, 32 aa, Artificial Sequence; identical to SEQ ID NO: 15817
  GFR-binding peptide
  MOD_RES (1), (1): Xaa is C or S

SEQ ID NO: 39348 - protein, 39 aa, Artificial Sequence; identical to SEQ ID NO: 15818
  GFR-binding peptide
  MOD_RES (4), (5), (37), (39): Xaa is C or S

SEQ ID NO: 39349 - protein, 41 aa, Artificial Sequence; identical to SEQ ID NO: 14092
  GFR-binding peptide
  MOD_RES (3), (4), (38), (40): Xaa is C or S
  MOD_RES (18), (19), (20), (21), (22): Xaa is A or G
  MOD_RES (23), (24), (25), (26): Xaa is A or G or is absent

SEQ ID NO: 39350 - protein, 39 aa, Artificial Sequence; identical to SEQ ID NO: 14093
  GFR-binding peptide
  MOD_RES (4), (5), (37), (39): Xaa is C or S

SEQ ID NO: 39351 - protein, 32 aa, Artificial Sequence; identical to SEQ ID NO: 14095
  GFR-binding peptide
  MOD_RES (1), (2): Xaa is C or S

SEQ ID NO: 39352 - protein, 41 aa, Artificial Sequence; identical to SEQ ID NO: 15821
  GFR-binding peptide
  MOD_RES (5), (6), (40): Xaa is C or S
  MOD_RES (20), (21), (22), (23), (24): Xaa is A or G
  MOD_RES (25), (26), (27), (28): Xaa is A or G or is absent

SEQ ID NO: 39353 - protein, 37 aa, Artificial Sequence; identical to SEQ ID NO: 8524
  GFR-binding peptide
  MOD_RES (5), (6): Xaa is C or S

SEQ ID NO: 39354 - protein, 35 aa, Artificial Sequence; identical to SEQ ID NO: 14096
  GFR-binding peptide
  MOD_RES (33), (35): Xaa is C or S
  MOD_RES (14), (15), (16), (17), (18): Xaa is A or G
  MOD_RES (19), (20), (21), (22): Xaa is A or G or is absent

SEQ ID NO: 39355 - protein, 33 aa, Artificial Sequence; identical to SEQ ID NO: 8526
  GFR-binding peptide
  MOD_RES (1), (2), (33): Xaa is C or S

SEQ ID NO: 39356 - protein, 37 aa, Artificial Sequence; identical to SEQ ID NO: 6748
  GFR-binding peptide
  MOD_RES (2), (3), (36): Xaa is C or S
  MOD_RES (17), (18), (19), (20), (21): Xaa is A or G
  MOD_RES (22), (23), (24), (25): Xaa is A or G or is absent

SEQ ID NO: 39357 - protein, 39 aa, Artificial Sequence; identical to SEQ ID NO: 14098
  GFR-binding peptide
  MOD_RES (4), (5), (39): Xaa is C or S
  MOD_RES (19), (20), (21), (22), (23): Xaa is A or G
  MOD_RES (24), (25), (26), (27): Xaa is A or G or is absent

SEQ ID NO: 39358 - protein, 32 aa, Artificial Sequence; identical to SEQ ID NO: 15827
  GFR-binding peptide
  MOD_RES (32), (32): Xaa is C or S

SEQ ID NO: 39359 - protein, 39 aa, Artificial Sequence; identical to SEQ ID NO: 15829
  GFR-binding peptide
  MOD_RES (1), (2), (36), (38): Xaa is C or S
  MOD_RES (16), (17), (18), (19), (20): Xaa is A or G
  MOD_RES (21), (22), (23), (24): Xaa is A or G or is absent

SEQ ID NO: 39360 - protein, 41 aa, Artificial Sequence; identical to SEQ ID NO: 15830
  GFR-binding peptide
  MOD_RES (4), (5), (39), (41): Xaa is C or S
  MOD_RES (19), (20), (21), (22), (23): Xaa is A or G
  MOD_RES (24), (25), (26), (27): Xaa is A or G or is absent

SEQ ID NO: 39361 - protein, 37 aa, Artificial Sequence; identical to SEQ ID NO: 14099
  GFR-binding peptide
  MOD_RES (2), (3), (37): Xaa is C or S
  MOD_RES (17), (18), (19), (20), (21): Xaa is A or G
  MOD_RES (22), (23), (24), (25): Xaa is A or G or is absent

SEQ ID NO: 39362 - protein, 34 aa, Artificial Sequence; identical to SEQ ID NO: 14100
  GFR-binding peptide
  MOD_RES (2), (2): Xaa is C or S
  MOD_RES (16), (17), (18), (19), (20): Xaa is A or G
  MOD_RES (21), (22), (23), (24): Xaa is A or G or is absent

SEQ ID NO: 39363 - protein, 37 aa, Artificial Sequence; identical to SEQ ID NO: 6750
  GFR-binding peptide
  MOD_RES (2), (3), (34), (36): Xaa is C or S

SEQ ID NO: 39364 - protein, 38 aa, Artificial Sequence; identical to SEQ ID NO: 8534
  GFR-binding peptide
  MOD_RES (1), (2), (35), (37): Xaa is C or S
  MOD_RES (16), (17), (18), (19), (20): Xaa is A or G
  MOD_RES (21), (22), (23), (24): Xaa is A or G or is absent

SEQ ID NO: 39365 - protein, 38 aa, Artificial Sequence; identical to SEQ ID NO: 14102
  GFR-binding peptide
  MOD_RES (6), (7): Xaa is C or S

SEQ ID NO: 39366 - protein, 43 aa, Artificial Sequence; identical to SEQ ID NO: 15834
  GFR-binding peptide
  MOD_RES (6), (7), (41), (43): Xaa is C or S
  MOD_RES (21), (22), (23), (24), (25): Xaa is A or G
  MOD_RES (26), (27), (28), (29): Xaa is A or G or is absent

SEQ ID NO: 39367 - protein, 34 aa, Artificial Sequence; identical to SEQ ID NO: 15835
  GFR-binding peptide
  MOD_RES (1), (2): Xaa is C or S
  MOD_RES (16), (17), (18), (19), (20): Xaa is A or G
  MOD_RES (21), (22), (23), (24): Xaa is A or G or is absent

SEQ ID NO: 39368 - protein, 36 aa, Artificial Sequence; identical to SEQ ID NO: 14103
  GFR-binding peptide
  MOD_RES (2), (3), (35): Xaa is C or S

SEQ ID NO: 39369 - protein, 34 aa, Artificial Sequence; identical to SEQ ID NO: 14105
  GFR-binding peptide
  MOD_RES (1), (33): Xaa is C or S

SEQ ID NO: 39370 - protein, 36 aa, Artificial Sequence; identical to SEQ ID NO: 14106
  GFR-binding peptide
  MOD_RES (1), (2), (36): Xaa is C or S
  MOD_RES (16), (17), (18), (19), (20): Xaa is A or G
  MOD_RES (21), (22), (23), (24): Xaa is A or G or is absent

SEQ ID NO: 39371 - protein, 35 aa, Artificial Sequence; identical to SEQ ID NO: 15837
  GFR-binding peptide
  MOD_RES (1), (2), (34): Xaa is C or S

SEQ ID NO: 39372 - protein, 44 aa, Artificial Sequence; identical to SEQ ID NO: 14107
  GFR-binding peptide
  MOD_RES (6), (7), (41), (43): Xaa is C or S
  MOD_RES (21), (22), (23), (24), (25): Xaa is A or G
  MOD_RES (26), (27), (28), (29): Xaa is A or G or is absent

SEQ ID NO: 39373 - protein, 41 aa, Artificial Sequence; identical to SEQ ID NO: 14109
  GFR-binding peptide
  MOD_RES (5), (6), (40): Xaa is C or S
  MOD_RES (20), (21), (22), (23), (24): Xaa is A or G
  MOD_RES (25), (26), (27), (28): Xaa is A or G or is absent

SEQ ID NO: 39374 - protein, 33 aa, Artificial Sequence; identical to SEQ ID NO: 15840
  GFR-binding peptide
  MOD_RES (2), (2): Xaa is C or S

SEQ ID NO: 39375 - protein, 37 aa, Artificial Sequence; identical to SEQ ID NO: 15841
  GFR-binding peptide
  MOD_RES (1), (2), (35), (37): Xaa is C or S
  MOD_RES (16), (17), (18), (19), (20): Xaa is A or G
  MOD_RES (21), (22), (23), (24): Xaa is A or G or is absent

SEQ ID NO: 39376 - protein, 33 aa, Artificial Sequence; identical to SEQ ID NO: 14110
  GFR-binding peptide
  MOD_RES (1), (2), (33): Xaa is C or S

SEQ ID NO: 39377 - protein, 39 aa, Artificial Sequence; identical to SEQ ID NO: 15843
  GFR-binding peptide
  MOD_RES (6), (7), (38): Xaa is C or S

SEQ ID NO: 39378 - protein, 34 aa, Artificial Sequence; identical to SEQ ID NO: 15844
  GFR-binding peptide
  MOD_RES (31), (33): Xaa is C or S

SEQ ID NO: 39379 - protein, 38 aa, Artificial Sequence; identical to SEQ ID NO: 14112
  GFR-binding peptide
  MOD_RES (4), (5), (36), (38): Xaa is C or S

SEQ ID NO: 39380 - protein, 41 aa, Artificial Sequence
  GFR-binding peptide
  MOD_RES (5), (6), (39), (41): Xaa is C or S
  MOD_RES (20), (21), (22), (23), (24): Xaa is A or G
  MOD_RES (25), (26), (27), (28): Xaa is A or G or is absent
SASPXXVSQDLEPLTILYYXXXXXXXXXEQLSNMIVKSXKX

SEQ ID NO: 39381 - protein, 37 aa, Artificial Sequence; identical to SEQ ID NO: 14113
  GFR-binding peptide
  MOD_RES (4), (5), (37): Xaa is C or S

SEQ ID NO: 39382 - protein, 32 aa, Artificial Sequence; identical to SEQ ID NO: 8549
  GFR-binding peptide
  MOD_RES (1), (1): Xaa is C or S

SEQ ID NO: 39383 - protein, 36 aa, Artificial Sequence; identical to SEQ ID NO: 14116
  GFR-binding peptide
  MOD_RES (5), (6): Xaa is C or S

SEQ ID NO: 39384 - protein, 38 aa, Artificial Sequence; identical to SEQ ID NO: 14117
  GFR-binding peptide
  MOD_RES (4), (36), (38): Xaa is C or S

SEQ ID NO: 39385 - protein, 39 aa, Artificial Sequence; identical to SEQ ID NO: 14118
  GFR-binding peptide
  MOD_RES (3), (4), (36), (38): Xaa is C or S

SEQ ID NO: 39386 - protein, 39 aa, Artificial Sequence; identical to SEQ ID NO: 15848
  GFR-binding peptide
  MOD_RES (2), (3), (37), (39): Xaa is C or S
  MOD_RES (17), (18), (19), (20), (21): Xaa is A or G
  MOD_RES (22), (23), (24), (25): Xaa is A or G or is absent

SEQ ID NO: 39387 - protein, 42 aa, Artificial Sequence; identical to SEQ ID NO: 6765
  GFR-binding peptide
  MOD_RES (5), (6), (39), (41): Xaa is C or S
  MOD_RES (20), (21), (22), (23), (24): Xaa is A or G
  MOD_RES (25), (26), (27), (28): Xaa is A or G or is absent

SEQ ID NO: 39388 - protein, 42 aa, Artificial Sequence; identical to SEQ ID NO: 14120
  GFR-binding peptide
  MOD_RES (6), (7), (39), (41): Xaa is C or S

SEQ ID NO: 39389 - protein, 38 aa, Artificial Sequence; identical to SEQ ID NO: 14121
  GFR-binding peptide
  MOD_RES (3), (4), (36), (38): Xaa is C or S

SEQ ID NO: 39390 - protein, 41 aa, Artificial Sequence; identical to SEQ ID NO: 8556
  GFR-binding peptide
  MOD_RES (6), (7), (41): Xaa is C or S
  MOD_RES (21), (22), (23), (24), (25): Xaa is A or G
  MOD_RES (26), (27), (28), (29): Xaa is A or G or is absent

SEQ ID NO: 39391 - protein, 36 aa, Artificial Sequence; identical to SEQ ID NO: 15851
  GFR-binding peptide
  MOD_RES (2), (3), (34), (36): Xaa is C or S

SEQ ID NO: 39392 - protein, 35 aa, Artificial Sequence; identical to SEQ ID NO: 14123
  GFR-binding peptide
  MOD_RES (34), (34): Xaa is C or S
  MOD_RES (14), (15), (16), (17), (18): Xaa is A or G
  MOD_RES (19), (20), (21), (22): Xaa is A or G or is absent

SEQ ID NO: 39393 - protein, 32 aa, Artificial Sequence; identical to SEQ ID NO: 8558
  GFR-binding peptide
  MOD_RES (1), (1): Xaa is C or S

SEQ ID NO: 39394 - protein, 35 aa, Artificial Sequence; identical to SEQ ID NO: 6770
  GFR-binding peptide
  MOD_RES (2), (3): Xaa is C or S
  MOD_RES (17), (18), (19), (20), (21): Xaa is A or G
  MOD_RES (22), (23), (24), (25): Xaa is A or G or is absent

SEQ ID NO: 39395 - protein, 42 aa, Artificial Sequence; identical to SEQ ID NO: 14126
  GFR-binding peptide
  MOD_RES (7), (39), (41): Xaa is C or S

SEQ ID NO: 39396 - protein, 37 aa, Artificial Sequence; identical to SEQ ID NO: 8563
  GFR-binding peptide
  MOD_RES (34), (36): Xaa is C or S
  MOD_RES (14), (15), (16), (17), (18): Xaa is A or G
  MOD_RES (19), (20), (21), (22): Xaa is A or G or is absent

SEQ ID NO: 39397 - protein, 40 aa, Artificial Sequence; identical to SEQ ID NO: 14127
  GFR-binding peptide
  MOD_RES (6), (7), (39): Xaa is C or S

SEQ ID NO: 39398 - protein, 40 aa, Artificial Sequence; identical to SEQ ID NO: 8566
  GFR-binding peptide
  MOD_RES (6), (7), (39): Xaa is C or S

SEQ ID NO: 39399 - protein, 34 aa, Artificial Sequence; identical to SEQ ID NO: 15859
  GFR-binding peptide
  MOD_RES (33), (33): Xaa is C or S
  MOD_RES (14), (15), (16), (17), (18): Xaa is A or G
  MOD_RES (19), (20), (21), (22): Xaa is A or G or is absent

SEQ ID NO: 39400 - protein, 38 aa, Artificial Sequence; identical to SEQ ID NO: 15860
  GFR-binding peptide
  MOD_RES (5), (6), (38): Xaa is C or S

SEQ ID NO: 39401 - protein, 38 aa, Artificial Sequence; identical to SEQ ID NO: 15861
  GFR-binding peptide
  MOD_RES (1), (2), (35), (37): Xaa is C or S
  MOD_RES (16), (17), (18), (19), (20): Xaa is A or G
  MOD_RES (21), (22), (23), (24): Xaa is A or G or is absent

SEQ ID NO: 39402 - protein, 40 aa, Artificial Sequence; identical to SEQ ID NO: 6775
  GFR-binding peptide
  MOD_RES (3), (4), (37), (39): Xaa is C or S
  MOD_RES (18), (19), (20), (21), (22): Xaa is A or G
  MOD_RES (23), (24), (25), (26): Xaa is A or G or is absent

SEQ ID NO: 39403 - protein, 37 aa, Artificial Sequence; identical to SEQ ID NO: 15862
  GFR-binding peptide
  MOD_RES (4), (5), (37): Xaa is C or S

SEQ ID NO: 39404 - protein, 35 aa, Artificial Sequence; identical to SEQ ID NO: 15863
  GFR-binding peptide
  MOD_RES (3), (4), (35): Xaa is C or S

SEQ ID NO: 39405 - protein, 35 aa, Artificial Sequence; identical to SEQ ID NO: 15864
  GFR-binding peptide
  MOD_RES (4), (5): Xaa is C or S

SEQ ID NO: 39406 - protein, 33 aa, Artificial Sequence; identical to SEQ ID NO: 14131
  GFR-binding peptide
  MOD_RES (32), (32): Xaa is C or S

SEQ ID NO: 39407 - protein, 32 aa, Artificial Sequence; identical to SEQ ID NO: 15865
  GFR-binding peptide
  MOD_RES (1), (32): Xaa is C or S

SEQ ID NO: 39408 - protein, 37 aa, Artificial Sequence; identical to SEQ ID NO: 6782
  GFR-binding peptide
  MOD_RES (34), (36): Xaa is C or S
  MOD_RES (14), (15), (16), (17), (18): Xaa is A or G
  MOD_RES (19), (20), (21), (22): Xaa is A or G or is absent

SEQ ID NO: 39409 - protein, 39 aa, Artificial Sequence; identical to SEQ ID NO: 14133
  GFR-binding peptide
  MOD_RES (2), (36), (38): Xaa is C or S
  MOD_RES (16), (17), (18), (19), (20): Xaa is A or G
  MOD_RES (21), (22), (23), (24): Xaa is A or G or is absent

SEQ ID NO: 39410 - protein, 38 aa, Artificial Sequence; identical to SEQ ID NO: 14134
  GFR-binding peptide
  MOD_RES (1), (2), (36), (38): Xaa is C or S
  MOD_RES (16), (17), (18), (19), (20): Xaa is A or G
  MOD_RES (21), (22), (23), (24): Xaa is A or G or is absent

SEQ ID NO: 39411 - protein, 39 aa, Artificial Sequence; identical to SEQ ID NO: 14135
  GFR-binding peptide
  MOD_RES (5), (6), (37), (39): Xaa is C or S

SEQ ID NO: 39412 - protein, 35 aa, Artificial Sequence
  GFR-binding peptide
  MOD_RES (33), (35): Xaa is C or S
  MOD_RES (14), (15), (16), (17), (18): Xaa is A or G
  MOD_RES (19), (20), (21), (22): Xaa is A or G or is absent
VSQDLEPLTILYYXXXXXXXXXEQLSNMIVKSXKX

SEQ ID NO: 39413 - protein, 36 aa, Artificial Sequence; identical to SEQ ID NO: 15866
  GFR-binding peptide
  MOD_RES (2), (3), (34), (36): Xaa is C or S

SEQ ID NO: 39414 - protein, 38 aa, Artificial Sequence; identical to SEQ ID NO: 14136
  GFR-binding peptide
  MOD_RES (3), (4), (36), (38): Xaa is C or S

SEQ ID NO: 39415 - protein, 35 aa, Artificial Sequence; identical to SEQ ID NO: 14138
  GFR-binding peptide
  MOD_RES (4), (5): Xaa is C or S

SEQ ID NO: 39416 - protein, 35 aa, Artificial Sequence; identical to SEQ ID NO: 8570
  GFR-binding peptide
  MOD_RES (33), (35): Xaa is C or S
  MOD_RES (14), (15), (16), (17), (18): Xaa is A or G
  MOD_RES (19), (20), (21), (22): Xaa is A or G or is absent

SEQ ID NO: 39417 - protein, 31 aa, Artificial Sequence; identical to SEQ ID NO: 15868
  GFR-binding peptide
  MOD_RES (31), (31): Xaa is C or S

SEQ ID NO: 39418 - protein, 37 aa, Artificial Sequence; identical to SEQ ID NO: 15869
  GFR-binding peptide
  MOD_RES (2), (3), (35), (37): Xaa is C or S

SEQ ID NO: 39419 - protein, 40 aa, Artificial Sequence; identical to SEQ ID NO: 15870
  GFR-binding peptide
  MOD_RES (4), (5), (37), (39): Xaa is C or S

SEQ ID NO: 39420 - protein, 34 aa, Artificial Sequence; identical to SEQ ID NO: 14139
  GFR-binding peptide
  MOD_RES (1), (33): Xaa is C or S

SEQ ID NO: 39421 - protein, 38 aa, Artificial Sequence; identical to SEQ ID NO: 14141
  GFR-binding peptide
  MOD_RES (2), (36), (38): Xaa is C or S
  MOD_RES (16), (17), (18), (19), (20): Xaa is A or G
  MOD_RES (21), (22), (23), (24): Xaa is A or G or is absent

SEQ ID NO: 39422 - protein, 38 aa, Artificial Sequence; identical to SEQ ID NO: 14142
  GFR-binding peptide
  MOD_RES (5), (6), (38): Xaa is C or S

SEQ ID NO: 39423 - protein, 41 aa, Artificial Sequence; identical to SEQ ID NO: 15871
  GFR-binding peptide
  MOD_RES (5), (6), (38), (40): Xaa is C or S

SEQ ID NO: 39424 - protein, 38 aa, Artificial Sequence; identical to SEQ ID NO: 14143
  GFR-binding peptide
  MOD_RES (3), (4), (38): Xaa is C or S
  MOD_RES (18), (19), (20), (21), (22): Xaa is A or G
  MOD_RES (23), (24), (25), (26): Xaa is A or G or is absent

SEQ ID NO: 39425 - protein, 41 aa, Artificial Sequence; identical to SEQ ID NO: 8571
  GFR-binding peptide
  MOD_RES (6), (7), (39), (41): Xaa is C or S

SEQ ID NO: 39426 - protein, 40 aa, Artificial Sequence
  GFR-binding peptide
  MOD_RES (5), (6), (39): Xaa is C or S
  MOD_RES (20), (21), (22), (23), (24): Xaa is A or G
  MOD_RES (25), (26), (27), (28): Xaa is A or G or is absent
SASPXXVSQDLEPLTILYYXXXXXXXXXEQLSNMIVKSXK

SEQ ID NO: 39427 - protein, 34 aa, Artificial Sequence; identical to SEQ ID NO: 6797
  GFR-binding peptide
  MOD_RES (34), (34): Xaa is C or S
  MOD_RES (14), (15), (16), (17), (18): Xaa is A or G
  MOD_RES (19), (20), (21), (22): Xaa is A or G or is absent

SEQ ID NO: 39428 - protein, 41 aa, Artificial Sequence; identical to SEQ ID NO: 15876
  GFR-binding peptide
  MOD_RES (3), (4), (38), (40): Xaa is C or S
  MOD_RES (18), (19), (20), (21), (22): Xaa is A or G
  MOD_RES (23), (24), (25), (26): Xaa is A or G or is absent

SEQ ID NO: 39429 - protein, 41 aa, Artificial Sequence; identical to SEQ ID NO: 15877
  GFR-binding peptide
  MOD_RES (5), (6), (39), (41): Xaa is C or S
  MOD_RES (20), (21), (22), (23), (24): Xaa is A or G
  MOD_RES (25), (26), (27), (28): Xaa is A or G or is absent

SEQ ID NO: 39430 - protein, 35 aa, Artificial Sequence; identical to SEQ ID NO: 15878
  GFR-binding peptide
  MOD_RES (3), (4): Xaa is C or S

SEQ ID NO: 39431 - protein, 37 aa, Artificial Sequence; identical to SEQ ID NO: 15879
  GFR-binding peptide
  MOD_RES (1), (2), (36): Xaa is C or S
  MOD_RES (16), (17), (18), (19), (20): Xaa is A or G
  MOD_RES (21), (22), (23), (24): Xaa is A or G or is absent

SEQ ID NO: 39432 - protein, 38 aa, Artificial Sequence; identical to SEQ ID NO: 14146
  GFR-binding peptide
  MOD_RES (3), (4), (36), (38): Xaa is C or S

SEQ ID NO: 39433 - protein, 39 aa, Artificial Sequence; identical to SEQ ID NO: 8580
  GFR-binding peptide
  MOD_RES (3), (4), (36), (38): Xaa is C or S

SEQ ID NO: 39434 - protein, 40 aa, Artificial Sequence; identical to SEQ ID NO: 15881
  GFR-binding peptide
  MOD_RES (4), (5), (37), (39): Xaa is C or S

SEQ ID NO: 39435 - protein, 38 aa, Artificial Sequence; identical to SEQ ID NO: 6801
  GFR-binding peptide
  MOD_RES (4), (5), (38): Xaa is C or S
  MOD_RES (19), (20), (21), (22), (23): Xaa is A or G
  MOD_RES (24), (25), (26), (27): Xaa is A or G or is absent

SEQ ID NO: 39436 - protein, 33 aa, Artificial Sequence; identical to SEQ ID NO: 14149
  GFR-binding peptide
  MOD_RES (1), (1): Xaa is C or S
  MOD_RES (15), (16), (17), (18), (19): Xaa is A or G
  MOD_RES (20), (21), (22), (23): Xaa is A or G or is absent

SEQ ID NO: 39437 - protein, 36 aa, Artificial Sequence; identical to SEQ ID NO: 14150
  GFR-binding peptide
  MOD_RES (1), (2), (36): Xaa is C or S
  MOD_RES (16), (17), (18), (19), (20): Xaa is A or G
  MOD_RES (21), (22), (23), (24): Xaa is A or G or is absent

SEQ ID NO: 39438 - protein, 38 aa, Artificial Sequence; identical to SEQ ID NO: 15884
  GFR-binding peptide
  MOD_RES (2), (3), (35), (37): Xaa is C or S

SEQ ID NO: 39439 - protein, 40 aa, Artificial Sequence; identical to SEQ ID NO: 15885
  GFR-binding peptide
  MOD_RES (6), (7), (40): Xaa is C or S
  MOD_RES (21), (22), (23), (24), (25): Xaa is A or G
  MOD_RES (26), (27), (28), (29): Xaa is A or G or is absent

SEQ ID NO: 39440 - protein, 39 aa, Artificial Sequence; identical to SEQ ID NO: 15886
  GFR-binding peptide
  MOD_RES (6), (7): Xaa is C or S
  MOD_RES (21), (22), (23), (24), (25): Xaa is A or G
  MOD_RES (26), (27), (28), (29): Xaa is A or G or is absent

SEQ ID NO: 39441 - protein, 37 aa, Artificial Sequence; identical to SEQ ID NO: 15889
  GFR-binding peptide
  MOD_RES (2), (3), (37): Xaa is C or S
  MOD_RES (17), (18), (19), (20), (21): Xaa is A or G
  MOD_RES (22), (23), (24), (25): Xaa is A or G or is absent

SEQ ID NO: 39442 - protein, 32 aa, Artificial Sequence; identical to SEQ ID NO: 14152
  GFR-binding peptide
  MOD_RES (14), (15), (16), (17), (18): Xaa is A or G
  MOD_RES (19), (20), (21), (22): Xaa is A or G or is absent

SEQ ID NO: 39443 - protein, 36 aa, Artificial Sequence; identical to SEQ ID NO: 15891
  GFR-binding peptide
  MOD_RES (3), (4), (36): Xaa is C or S

SEQ ID NO: 39444 - protein, 37 aa, Artificial Sequence; identical to SEQ ID NO: 15892
  GFR-binding peptide
  MOD_RES (4), (4): Xaa is C or S
  MOD_RES (18), (19), (20), (21), (22): Xaa is A or G
  MOD_RES (23), (24), (25), (26): Xaa is A or G or is absent

SEQ ID NO: 39445 - protein, 37 aa, Artificial Sequence; identical to SEQ ID NO: 8590
  GFR-binding peptide
  MOD_RES (3), (4), (35), (37): Xaa is C or S

SEQ ID NO: 39446 - protein, 33 aa, Artificial Sequence; identical to SEQ ID NO: 14154
  GFR-binding peptide
  MOD_RES (1), (33): Xaa is C or S

SEQ ID NO: 39447 - protein, 40 aa, Artificial Sequence; identical to SEQ ID NO: 15894
  GFR-binding peptide
  MOD_RES (4), (5), (37), (39): Xaa is C or S

SEQ ID NO: 39448 - protein, 40 aa, Artificial Sequence; identical to SEQ ID NO: 14156
  GFR-binding peptide
  MOD_RES (3), (4), (37), (39): Xaa is C or S
  MOD_RES (18), (19), (20), (21), (22): Xaa is A or G
  MOD_RES (23), (24), (25), (26): Xaa is A or G or is absent

SEQ ID NO: 39449 - protein, 38 aa, Artificial Sequence; identical to SEQ ID NO: 14157
  GFR-binding peptide
  MOD_RES (6), (6): Xaa is C or S
  MOD_RES (20), (21), (22), (23), (24): Xaa is A or G
  MOD_RES (25), (26), (27), (28): Xaa is A or G or is absent

SEQ ID NO: 39450 - protein, 39 aa, Artificial Sequence; identical to SEQ ID NO: 14158
  GFR-binding peptide
  MOD_RES (6), (7), (39): Xaa is C or S

SEQ ID NO: 39451 - protein, 36 aa, Artificial Sequence; identical to SEQ ID NO: 14159
  GFR-binding peptide
  MOD_RES (4), (5): Xaa is C or S

SEQ ID NO: 39452 - protein, 35 aa, Artificial Sequence; identical to SEQ ID NO: 15895
  GFR-binding peptide
  MOD_RES (1), (2), (34): Xaa is C or S

SEQ ID NO: 39453 - protein, 42 aa, Artificial Sequence; identical to SEQ ID NO: 14160
  GFR-binding peptide
  MOD_RES (4), (5), (39), (41): Xaa is C or S
  MOD_RES (19), (20), (21), (22), (23): Xaa is A or G
  MOD_RES (24), (25), (26), (27): Xaa is A or G or is absent

SEQ ID NO: 39454 - protein, 39 aa, Artificial Sequence; identical to SEQ ID NO: 8592
  GFR-binding peptide
  MOD_RES (2), (3), (36), (38): Xaa is C or S
  MOD_RES (17), (18), (19), (20), (21): Xaa is A or G
  MOD_RES (22), (23), (24), (25): Xaa is A or G or is absent

SEQ ID NO: 39455 - protein, 35 aa, Artificial Sequence; identical to SEQ ID NO: 8594
  GFR-binding peptide
  MOD_RES (1), (34): Xaa is C or S
  MOD_RES (15), (16), (17), (18), (19): Xaa is A or G
  MOD_RES (20), (21), (22), (23): Xaa is A or G or is absent

SEQ ID NO: 39456 - protein, 39 aa, Artificial Sequence; identical to SEQ ID NO: 15898
  GFR-binding peptide
  MOD_RES (4), (5), (37), (39): Xaa is C or S

SEQ ID NO: 39457 - protein, 32 aa, Artificial Sequence; identical to SEQ ID NO: 14161
  GFR-binding peptide
  MOD_RES (14), (15), (16), (17), (18): Xaa is A or G
  MOD_RES (19), (20), (21), (22): Xaa is A or G or is absent

SEQ ID NO: 39458 - protein, 37 aa, Artificial Sequence; identical to SEQ ID NO: 15900
  GFR-binding peptide
  MOD_RES (5), (6): Xaa is C or S

SEQ ID NO: 39459 - protein, 35 aa, Artificial Sequence; identical to SEQ ID NO: 15901
  GFR-binding peptide
  MOD_RES (1), (2): Xaa is C or S
  MOD_RES (16), (17), (18), (19), (20): Xaa is A or G
  MOD_RES (21), (22), (23), (24): Xaa is A or G or is absent

SEQ ID NO: 39460 - protein, 40 aa, Artificial Sequence; identical to SEQ ID NO: 14162
  GFR-binding peptide
  MOD_RES (4), (5), (37), (39): Xaa is C or S

SEQ ID NO: 39461 - protein, 39 aa, Artificial Sequence; identical to SEQ ID NO: 14163
  GFR-binding peptide
  MOD_RES (2), (3), (36), (38): Xaa is C or S
  MOD_RES (17), (18), (19), (20), (21): Xaa is A or G
  MOD_RES (22), (23), (24), (25): Xaa is A or G or is absent

SEQ ID NO: 39462 - protein, 41 aa, Artificial Sequence; identical to SEQ ID NO: 15902
  GFR-binding peptide
  MOD_RES (5), (6), (40): Xaa is C or S
  MOD_RES (20), (21), (22), (23), (24): Xaa is A or G
  MOD_RES (25), (26), (27), (28): Xaa is A or G or is absent

SEQ ID NO: 39463 - protein, 35 aa, Artificial Sequence; identical to SEQ ID NO: 14164
  GFR-binding peptide
  MOD_RES (1), (32), (34): Xaa is C or S

SEQ ID NO: 39464 - protein, 37 aa, Artificial Sequence; identical to SEQ ID NO: 15903
  GFR-binding peptide
  MOD_RES (1), (2), (36): Xaa is C or S
  MOD_RES (16), (17), (18), (19), (20): Xaa is A or G
  MOD_RES (21), (22), (23), (24): Xaa is A or G or is absent

SEQ ID NO: 39465 - protein, 38 aa, Artificial Sequence; identical to SEQ ID NO: 14165
  GFR-binding peptide
  MOD_RES (5), (6): Xaa is C or S
  MOD_RES (20), (21), (22), (23), (24): Xaa is A or G
  MOD_RES (25), (26), (27), (28): Xaa is A or G or is absent

SEQ ID NO: 39466 - protein, 34 aa, Artificial Sequence; identical to SEQ ID NO: 15905
  GFR-binding peptide
  MOD_RES (1), (1): Xaa is C or S
  MOD_RES (15), (16), (17), (18), (19): Xaa is A or G
  MOD_RES (20), (21), (22), (23): Xaa is A or G or is absent

SEQ ID NO: 39467 - protein, 36 aa, Artificial Sequence; identical to SEQ ID NO: 14167
  GFR-binding peptide
  MOD_RES (4), (5): Xaa is C or S

SEQ ID NO: 39468 - protein, 32 aa, Artificial Sequence; identical to SEQ ID NO: 15906
  GFR-binding peptide
  MOD_RES (1), (2): Xaa is C or S

SEQ ID NO: 39469 - protein, 32 aa, Artificial Sequence; identical to SEQ ID NO: 15907
  GFR-binding peptide
  MOD_RES (31), (31): Xaa is C or S

SEQ ID NO: 39470 - protein, 34 aa, Artificial Sequence; identical to SEQ ID NO: 14168
  GFR-binding peptide
  MOD_RES (31), (33): Xaa is C or S

SEQ ID NO: 39471 - protein, 40 aa, Artificial Sequence; identical to SEQ ID NO: 6831
  GFR-binding peptide
  MOD_RES (6), (7), (38), (40): Xaa is C or S

SEQ ID NO: 39472 - protein, 36 aa, Artificial Sequence; identical to SEQ ID NO: 15908
  GFR-binding peptide
  MOD_RES (2), (3), (34), (36): Xaa is C or S

SEQ ID NO: 39473 - protein, 37 aa, Artificial Sequence; identical to SEQ ID NO: 14170
  GFR-binding peptide
  MOD_RES (1), (34), (36): Xaa is C or S
  MOD_RES (15), (16), (17), (18), (19): Xaa is A or G
  MOD_RES (20), (21), (22), (23): Xaa is A or G or is absent

SEQ ID NO: 39474 - protein, 39 aa, Artificial Sequence; identical to SEQ ID NO: 15910
  GFR-binding peptide
  MOD_RES (6), (7), (39): Xaa is C or S

SEQ ID NO: 39475 - protein, 36 aa, Artificial Sequence; identical to SEQ ID NO: 15911
  GFR-binding peptide
  MOD_RES (1), (35): Xaa is C or S
  MOD_RES (15), (16), (17), (18), (19): Xaa is A or G
  MOD_RES (20), (21), (22), (23): Xaa is A or G or is absent

SEQ ID NO: 39476 - protein, 40 aa, Artificial Sequence; identical to SEQ ID NO: 15912
  GFR-binding peptide
  MOD_RES (5), (6), (37), (39): Xaa is C or S

SEQ ID NO: 39477 - protein, 37 aa, Artificial Sequence; identical to SEQ ID NO: 14171
  GFR-binding peptide
  MOD_RES (34), (36): Xaa is C or S
  MOD_RES (14), (15), (16), (17), (18): Xaa is A or G
  MOD_RES (19), (20), (21), (22): Xaa is A or G or is absent

SEQ ID NO: 39478 - protein, 39 aa, Artificial Sequence; identical to SEQ ID NO: 15914
  GFR-binding peptide
  MOD_RES (4), (5), (36), (38): Xaa is C or S

SEQ ID NO: 39479 - protein, 39 aa, Artificial Sequence; identical to SEQ ID NO: 8610
  GFR-binding peptide
  MOD_RES (6), (7), (38): Xaa is C or S

SEQ ID NO: 39480 - protein, 40 aa, Artificial Sequence; identical to SEQ ID NO: 6834
  GFR-binding peptide
  MOD_RES (5), (6), (40): Xaa is C or S
  MOD_RES (20), (21), (22), (23), (24): Xaa is A or G
  MOD_RES (25), (26), (27), (28): Xaa is A or G or is absent

SEQ ID NO: 39481 - protein, 33 aa, Artificial Sequence; identical to SEQ ID NO: 14174
  GFR-binding peptide
  MOD_RES (32), (32): Xaa is C or S

SEQ ID NO: 39482 - protein, 38 aa, Artificial Sequence; identical to SEQ ID NO: 8613
  GFR-binding peptide
  MOD_RES (3), (4), (37): Xaa is C or S
  MOD_RES (18), (19), (20), (21), (22): Xaa is A or G
  MOD_RES (23), (24), (25), (26): Xaa is A or G or is absent

SEQ ID NO: 39483 - protein, 35 aa, Artificial Sequence; identical to SEQ ID NO: 14175
  GFR-binding peptide
  MOD_RES (2), (3), (35): Xaa is C or S

SEQ ID NO: 39484 - protein, 36 aa, Artificial Sequence; identical to SEQ ID NO: 15917
  GFR-binding peptide
  MOD_RES (3), (4): Xaa is C or S
  MOD_RES (18), (19), (20), (21), (22): Xaa is A or G
  MOD_RES (23), (24), (25), (26): Xaa is A or G or is absent

SEQ ID NO: 39485 - protein, 40 aa, Artificial Sequence; identical to SEQ ID NO: 14176
  GFR-binding peptide
  MOD_RES (4), (5), (37), (39): Xaa is C or S

SEQ ID NO: 39486 - protein, 38 aa, Artificial Sequence; identical to SEQ ID NO: 15918
  GFR-binding peptide
  MOD_RES (1), (35), (37): Xaa is C or S
  MOD_RES (15), (16), (17), (18), (19): Xaa is A or G
  MOD_RES (20), (21), (22), (23): Xaa is A or G or is absent

SEQ ID NO: 39487 - protein, 35 aa, Artificial Sequence; identical to SEQ ID NO: 15919
  GFR-binding peptide
  MOD_RES (33), (35): Xaa is C or S
  MOD_RES (14), (15), (16), (17), (18): Xaa is A or G
  MOD_RES (19), (20), (21), (22): Xaa is A or G or is absent

SEQ ID NO: 39488 - protein, 32 aa, Artificial Sequence; identical to SEQ ID NO: 14177
  GFR-binding peptide
  MOD_RES (31), (31): Xaa is C or S

SEQ ID NO: 39489 - protein, 36 aa, Artificial Sequence; identical to SEQ ID NO: 14178
  GFR-binding peptide
  MOD_RES (1), (2), (35): Xaa is C or S
  MOD_RES (16), (17), (18), (19), (20): Xaa is A or G
  MOD_RES (21), (22), (23), (24): Xaa is A or G or is absent

SEQ ID NO: 39490 - protein, 38 aa, Artificial Sequence; identical to SEQ ID NO: 15920
  GFR-binding peptide
  MOD_RES (3), (4), (38): Xaa is C or S
  MOD_RES (18), (19), (20), (21), (22): Xaa is A or G
  MOD_RES (23), (24), (25), (26): Xaa is A or G or is absent

SEQ ID NO: 39491 - protein, 39 aa, Artificial Sequence; identical to SEQ ID NO: 8615
  GFR-binding peptide
  MOD_RES (1), (2), (36), (38): Xaa is C or S
  MOD_RES (16), (17), (18), (19), (20): Xaa is A or G
  MOD_RES (21), (22), (23), (24): Xaa is A or G or is absent

SEQ ID NO: 39492 - protein, 36 aa, Artificial Sequence; identical to SEQ ID NO: 14179
  GFR-binding peptide
  MOD_RES (1), (2), (36): Xaa is C or S
  MOD_RES (16), (17), (18), (19), (20): Xaa is A or G
  MOD_RES (21), (22), (23), (24): Xaa is A or G or is absent

SEQ ID NO: 39493 - protein, 34 aa, Artificial Sequence; identical to SEQ ID NO: 14180
  GFR-binding peptide
  MOD_RES (1), (2): Xaa is C or S
  MOD_RES (16), (17), (18), (19), (20): Xaa is A or G
  MOD_RES (21), (22), (23), (24): Xaa is A or G or is absent

SEQ ID NO: 39494 - protein, 36 aa, Artificial Sequence; identical to SEQ ID NO: 15922
  GFR-binding peptide
  MOD_RES (1), (2), (35): Xaa is C or S
  MOD_RES (16), (17), (18), (19), (20): Xaa is A or G
  MOD_RES (21), (22), (23), (24): Xaa is A or G or is absent

SEQ ID NO: 39495 - protein, 44 aa, Artificial Sequence; identical to SEQ ID NO: 15923
  GFR-binding peptide
  MOD_RES (6), (7), (41), (43): Xaa is C or S
  MOD_RES (21), (22), (23), (24), (25): Xaa is A or G
  MOD_RES (26), (27), (28), (29): Xaa is A or G or is absent

SEQ ID NO: 39496 - protein, 33 aa, Artificial Sequence; identical to SEQ ID NO: 6840
  GFR-binding peptide
  MOD_RES (1), (2), (33): Xaa is C or S

SEQ ID NO: 39497 - protein, 39 aa, Artificial Sequence; identical to SEQ ID NO: 14182
  GFR-binding peptide
  MOD_RES (5), (6), (39): Xaa is C or S
  MOD_RES (20), (21), (22), (23), (24): Xaa is A or G
  MOD_RES (25), (26), (27), (28): Xaa is A or G or is absent

SEQ ID NO: 39498 - protein, 36 aa, Artificial Sequence; identical to SEQ ID NO: 15924
  GFR-binding peptide
  MOD_RES (1), (2), (36): Xaa is C or S
  MOD_RES (16), (17), (18), (19), (20): Xaa is A or G
  MOD_RES (21), (22), (23), (24): Xaa is A or G or is absent

SEQ ID NO: 39499 - protein, 35 aa, Artificial Sequence
  GFR-binding peptide
  MOD_RES (2), (3): Xaa is C or S
  MOD_RES (17), (18), (19), (20), (21): Xaa is A or G
  MOD_RES (22), (23), (24), (25): Xaa is A or G or is absent
PXXVSQDLEPLTILYYXXXXXXXXXEQLSNMIVKS

SEQ ID NO: 39500 - protein, 37 aa, Artificial Sequence; identical to SEQ ID NO: 15925
  GFR-binding peptide
  MOD_RES (6), (7): Xaa is C or S

SEQ ID NO: 39501 - protein, 35 aa, Artificial Sequence; identical to SEQ ID NO: 6849
  GFR-binding peptide
  MOD_RES (1), (2), (35): Xaa is C or S
  MOD_RES (16), (17), (18), (19), (20): Xaa is A or G
  MOD_RES (21), (22), (23), (24): Xaa is A or G or is absent

SEQ ID NO: 39502 - protein, 36 aa, Artificial Sequence; identical to SEQ ID NO: 14186
  GFR-binding peptide
  MOD_RES (2), (3): Xaa is C or S
  MOD_RES (17), (18), (19), (20), (21): Xaa is A or G
  MOD_RES (22), (23), (24), (25): Xaa is A or G or is absent

SEQ ID NO: 39503 - protein, 36 aa, Artificial Sequence; identical to SEQ ID NO: 8629
  GFR-binding peptide
  MOD_RES (34), (36): Xaa is C or S
  MOD_RES (14), (15), (16), (17), (18): Xaa is A or G
  MOD_RES (19), (20), (21), (22): Xaa is A or G or is absent

SEQ ID NO: 39504 - protein, 37 aa, Artificial Sequence; identical to SEQ ID NO: 8631
  GFR-binding peptide
  MOD_RES (1), (34), (36): Xaa is C or S
  MOD_RES (15), (16), (17), (18), (19): Xaa is A or G
  MOD_RES (20), (21), (22), (23): Xaa is A or G or is absent

SEQ ID NO: 39505 - protein, 33 aa, Artificial Sequence; identical to SEQ ID NO: 14189
  GFR-binding peptide
  MOD_RES (1), (32): Xaa is C or S

SEQ ID NO: 39506 - protein, 35 aa, Artificial Sequence
  GFR-binding peptide
  MOD_RES (1), (34): Xaa is C or S
  MOD_RES (15), (16), (17), (18), (19): Xaa is A or G
  MOD_RES (20), (21), (22), (23): Xaa is A or G or is absent
XVSQDLEPLTILYYXXXXXXXXXEQLSNMIVKSXK

SEQ ID NO: 39507 - protein, 37 aa, Artificial Sequence; identical to SEQ ID NO: 15929
  GFR-binding peptide
  MOD_RES (1), (2), (36): Xaa is C or S
  MOD_RES (16), (17), (18), (19), (20): Xaa is A or G
  MOD_RES (21), (22), (23), (24): Xaa is A or G or is absent

SEQ ID NO: 39508 - protein, 36 aa, Artificial Sequence; identical to SEQ ID NO: 14190
  GFR-binding peptide
  MOD_RES (4), (5): Xaa is C or S

SEQ ID NO: 39509 - protein, 35 aa, Artificial Sequence; identical to SEQ ID NO: 15930
  GFR-binding peptide
  MOD_RES (2), (3): Xaa is C or S
  MOD_RES (17), (18), (19), (20), (21): Xaa is A or G
  MOD_RES (22), (23), (24), (25): Xaa is A or G or is absent

SEQ ID NO: 39510 - protein, 38 aa, Artificial Sequence; identical to SEQ ID NO: 15931
  GFR-binding peptide
  MOD_RES (2), (3), (35), (37): Xaa is C or S

SEQ ID NO: 39511 - protein, 36 aa, Artificial Sequence; identical to SEQ ID NO: 14191
  GFR-binding peptide
  MOD_RES (2), (3), (35): Xaa is C or S

SEQ ID NO: 39512 - protein, 35 aa, Artificial Sequence; identical to SEQ ID NO: 14192
  GFR-binding peptide
  MOD_RES (2), (3): Xaa is C or S
  MOD_RES (17), (18), (19), (20), (21): Xaa is A or G
  MOD_RES (22), (23), (24), (25): Xaa is A or G or is absent

SEQ ID NO: 39513 - protein, 38 aa, Artificial Sequence; identical to SEQ ID NO: 15932
  GFR-binding peptide
  MOD_RES (1), (2), (36), (38): Xaa is C or S
  MOD_RES (16), (17), (18), (19), (20): Xaa is A or G
  MOD_RES (21), (22), (23), (24): Xaa is A or G or is absent

SEQ ID NO: 39514 - protein, 35 aa, Artificial Sequence; identical to SEQ ID NO: 15933
  GFR-binding peptide
  MOD_RES (2), (3), (35): Xaa is C or S

SEQ ID NO: 39515 - protein, 33 aa, Artificial Sequence; identical to SEQ ID NO: 6857
  GFR-binding peptide
  MOD_RES (32), (32): Xaa is C or S

SEQ ID NO: 39516 - protein, 42 aa, Artificial Sequence; identical to SEQ ID NO: 14194
  GFR-binding peptide
  MOD_RES (6), (7), (39), (41): Xaa is C or S

SEQ ID NO: 39517 - protein, 34 aa, Artificial Sequence; identical to SEQ ID NO: 14196
  GFR-binding peptide
  MOD_RES (3), (3): Xaa is C or S

SEQ ID NO: 39518 - protein, 41 aa, Artificial Sequence; identical to SEQ ID NO: 15935
  GFR-binding peptide
  MOD_RES (6), (7), (41): Xaa is C or S
  MOD_RES (21), (22), (23), (24), (25): Xaa is A or G
  MOD_RES (26), (27), (28), (29): Xaa is A or G or is absent

SEQ ID NO: 39519 - protein, 34 aa, Artificial Sequence; identical to SEQ ID NO: 15936
  GFR-binding peptide
  MOD_RES (2), (3): Xaa is C or S

SEQ ID NO: 39520 - protein, 40 aa, Artificial Sequence; identical to SEQ ID NO: 15937
  GFR-binding peptide
  MOD_RES (4), (5), (38), (40): Xaa is C or S
  MOD_RES (19), (20), (21), (22), (23): Xaa is A or G
  MOD_RES (24), (25), (26), (27): Xaa is A or G or is absent

SEQ ID NO: 39521 - protein, 39 aa, Artificial Sequence; identical to SEQ ID NO: 14197
  GFR-binding peptide
  MOD_RES (6), (38): Xaa is C or S

SEQ ID NO: 39522 - protein, 37 aa, Artificial Sequence; identical to SEQ ID NO: 15938
  GFR-binding peptide
  MOD_RES (1), (2), (34), (36): Xaa is C or S

SEQ ID NO: 39523 - protein, 34 aa, Artificial Sequence; identical to SEQ ID NO: 14198
  GFR-binding peptide
  MOD_RES (1), (2): Xaa is C or S
  MOD_RES (16), (17), (18), (19), (20): Xaa is A or G
  MOD_RES (21), (22), (23), (24): Xaa is A or G or is absent

SEQ ID NO: 39524 - protein, 35 aa, Artificial Sequence; identical to SEQ ID NO: 14200
  GFR-binding peptide
  MOD_RES (32), (34): Xaa is C or S

SEQ ID NO: 39525 - protein, 36 aa, Artificial Sequence; identical to SEQ ID NO: 15939
  GFR-binding peptide
  MOD_RES (1), (2), (36): Xaa is C or S
  MOD_RES (16), (17), (18), (19), (20): Xaa is A or G
  MOD_RES (21), (22), (23), (24): Xaa is A or G or is absent

SEQ ID NO: 39526 - protein, 36 aa, Artificial Sequence; identical to SEQ ID NO: 14201
  GFR-binding peptide
  MOD_RES (3), (4): Xaa is C or S
  MOD_RES (18), (19), (20), (21), (22): Xaa is A or G
  MOD_RES (23), (24), (25), (26): Xaa is A or G or is absent

SEQ ID NO: 39527 - protein, 36 aa, Artificial Sequence; identical to SEQ ID NO: 14202
  GFR-binding peptide
  MOD_RES (1), (33), (35): Xaa is C or S

SEQ ID NO: 39528 - protein, 36 aa, Artificial Sequence; identical to SEQ ID NO: 14204
  GFR-binding peptide
  MOD_RES (2), (3): Xaa is C or S
  MOD_RES (17), (18), (19), (20), (21): Xaa is A or G
  MOD_RES (22), (23), (24), (25): Xaa is A or G or is absent

SEQ ID NO: 39529 - protein, 37 aa, Artificial Sequence; identical to SEQ ID NO: 14205
  GFR-binding peptide
  MOD_RES (6), (7): Xaa is C or S

SEQ ID NO: 39530 - protein, 37 aa, Artificial Sequence; identical to SEQ ID NO: 15941
  GFR-binding peptide
  MOD_RES (2), (3), (37): Xaa is C or S
  MOD_RES (17), (18), (19), (20), (21): Xaa is A or G
  MOD_RES (22), (23), (24), (25): Xaa is A or G or is absent

SEQ ID NO: 39531 - protein, 40 aa, Artificial Sequence; identical to SEQ ID NO: 15943
  GFR-binding peptide
  MOD_RES (4), (5), (39): Xaa is C or S
  MOD_RES (19), (20), (21), (22), (23): Xaa is A or G
  MOD_RES (24), (25), (26), (27): Xaa is A or G or is absent

SEQ ID NO: 39532 - protein, 30 aa, Artificial Sequence; identical to SEQ ID NO: 15944
  GFR-binding peptide

SEQ ID NO: 39533 - protein, 31 aa, Artificial Sequence; identical to SEQ ID NO: 15945
  GFR-binding peptide
  MOD_RES (31), (31): Xaa is C or S

SEQ ID NO: 39534 - protein, 36 aa, Artificial Sequence; identical to SEQ ID NO: 14206
  GFR-binding peptide
  MOD_RES (4), (5): Xaa is C or S

SEQ ID NO: 39535 - protein, 40 aa, Artificial Sequence; identical to SEQ ID NO: 6869
  GFR-binding peptide
  MOD_RES (3), (4), (37), (39): Xaa is C or S
  MOD_RES (18), (19), (20), (21), (22): Xaa is A or G
  MOD_RES (23), (24), (25), (26): Xaa is A or G or is absent

SEQ ID NO: 39536 - protein, 36 aa, Artificial Sequence; identical to SEQ ID NO: 14209
  GFR-binding peptide
  MOD_RES (5), (6): Xaa is C or S

SEQ ID NO: 39537 - protein, 35 aa, Artificial Sequence; identical to SEQ ID NO: 15949
  GFR-binding peptide
  MOD_RES (1), (2), (34): Xaa is C or S

SEQ ID NO: 39538 - protein, 35 aa, Artificial Sequence; identical to SEQ ID NO: 15950
  GFR-binding peptide
  MOD_RES (1), (2), (34): Xaa is C or S

SEQ ID NO: 39539 - protein, 39 aa, Artificial Sequence; identical to SEQ ID NO: 15951
  GFR-binding peptide
  MOD_RES (7), (39): Xaa is C or S

SEQ ID NO: 39540 - protein, 38 aa, Artificial Sequence; identical to SEQ ID NO: 8656
  GFR-binding peptide
  MOD_RES (4), (5): Xaa is C or S
  MOD_RES (19), (20), (21), (22), (23): Xaa is A or G
  MOD_RES (24), (25), (26), (27): Xaa is A or G or is absent

SEQ ID NO: 39541 - protein, 33 aa, Artificial Sequence; identical to SEQ ID NO: 14211
  GFR-binding peptide
  MOD_RES (32), (32): Xaa is C or S

SEQ ID NO: 39542 - protein, 34 aa, Artificial Sequence; identical to SEQ ID NO: 15954
  GFR-binding peptide
  MOD_RES (1), (2), (33): Xaa is C or S

SEQ ID NO: 39543 - protein, 33 aa, Artificial Sequence; identical to SEQ ID NO: 15955
  GFR-binding peptide
  MOD_RES (1), (1): Xaa is C or S
  MOD_RES (15), (16), (17), (18), (19): Xaa is A or G
  MOD_RES (20), (21), (22), (23): Xaa is A or G or is absent

SEQ ID NO: 39544 - protein, 32 aa, Artificial Sequence; identical to SEQ ID NO: 15956
  GFR-binding peptide
  MOD_RES (32), (32): Xaa is C or S

SEQ ID NO: 39545 - protein, 34 aa, Artificial Sequence; identical to SEQ ID NO: 14213
  GFR-binding peptide
  MOD_RES (1), (2), (34): Xaa is C or S

SEQ ID NO: 39546 - protein, 39 aa, Artificial Sequence
  GFR-binding peptide
  MOD_RES (3), (4), (37), (39): Xaa is C or S
  MOD_RES (18), (19), (20), (21), (22): Xaa is A or G
  MOD_RES (23), (24), (25), (26): Xaa is A or G or is absent
SPXXVSQDLEPLTILYYXXXXXXXXXEQLSNMIVKSXKX

SEQ ID NO: 39547 - protein, 32 aa, Artificial Sequence; identical to SEQ ID NO: 14215
  GFR-binding peptide
  MOD_RES (14), (15), (16), (17), (18): Xaa is A or G
  MOD_RES (19), (20), (21), (22): Xaa is A or G or is absent

SEQ ID NO: 39548 - protein, 37 aa, Artificial Sequence; identical to SEQ ID NO: 14216
  GFR-binding peptide
  MOD_RES (4), (36): Xaa is C or S

SEQ ID NO: 39549 - protein, 38 aa, Artificial Sequence; identical to SEQ ID NO: 15959
  GFR-binding peptide
  MOD_RES (4), (5), (38): Xaa is C or S
  MOD_RES (19), (20), (21), (22), (23): Xaa is A or G
  MOD_RES (24), (25), (26), (27): Xaa is A or G or is absent

SEQ ID NO: 39550 - protein, 34 aa, Artificial Sequence; identical to SEQ ID NO: 15960
  GFR-binding peptide
  MOD_RES (1), (2), (34): Xaa is C or S

SEQ ID NO: 39551 - protein, 41 aa, Artificial Sequence; identical to SEQ ID NO: 15961
  GFR-binding peptide
  MOD_RES (6), (40): Xaa is C or S
  MOD_RES (20), (21), (22), (23), (24): Xaa is A or G
  MOD_RES (25), (26), (27), (28): Xaa is A or G or is absent

SEQ ID NO: 39552 - protein, 33 aa, Artificial Sequence; identical to SEQ ID NO: 15962
  GFR-binding peptide
  MOD_RES (33), (33): Xaa is C or S
  MOD_RES (14), (15), (16), (17), (18): Xaa is A or G
  MOD_RES (19), (20), (21), (22): Xaa is A or G or is absent

SEQ ID NO: 39553 - protein, 36 aa, Artificial Sequence; identical to SEQ ID NO: 15964
  GFR-binding peptide
  MOD_RES (2), (3): Xaa is C or S
  MOD_RES (17), (18), (19), (20), (21): Xaa is A or G
  MOD_RES (22), (23), (24), (25): Xaa is A or G or is absent

SEQ ID NO: 39554 - protein, 37 aa, Artificial Sequence; identical to SEQ ID NO: 14217
  GFR-binding peptide
  MOD_RES (1), (35), (37): Xaa is C or S
  MOD_RES (15), (16), (17), (18), (19): Xaa is A or G
  MOD_RES (20), (21), (22), (23): Xaa is A or G or is absent

SEQ ID NO: 39555 - protein, 37 aa, Artificial Sequence; identical to SEQ ID NO: 14218
  GFR-binding peptide
  MOD_RES (5), (6): Xaa is C or S

SEQ ID NO: 39556 - protein, 36 aa, Artificial Sequence; identical to SEQ ID NO: 14219
  GFR-binding peptide
  MOD_RES (1), (34), (36): Xaa is C or S
  MOD_RES (15), (16), (17), (18), (19): Xaa is A or G
  MOD_RES (20), (21), (22), (23): Xaa is A or G or is absent

SEQ ID NO: 39557 - protein, 37 aa, Artificial Sequence; identical to SEQ ID NO: 15965
  GFR-binding peptide
  MOD_RES (2), (3), (35), (37): Xaa is C or S

SEQ ID NO: 39558 - protein, 34 aa, Artificial Sequence; identical to SEQ ID NO: 15966
  GFR-binding peptide
  MOD_RES (1), (34): Xaa is C or S
  MOD_RES (15), (16), (17), (18), (19): Xaa is A or G
  MOD_RES (20), (21), (22), (23): Xaa is A or G or is absent

SEQ ID NO: 39559 - protein, 38 aa, Artificial Sequence; identical to SEQ ID NO: 14220
  GFR-binding peptide
  MOD_RES (6), (6): Xaa is C or S
  MOD_RES (20), (21), (22), (23), (24): Xaa is A or G
  MOD_RES (25), (26), (27), (28): Xaa is A or G or is absent

SEQ ID NO: 39560 - protein, 36 aa, Artificial Sequence; identical to SEQ ID NO: 14221
  GFR-binding peptide
  MOD_RES (1), (2), (36): Xaa is C or S
  MOD_RES (16), (17), (18), (19), (20): Xaa is A or G
  MOD_RES (21), (22), (23), (24): Xaa is A or G or is absent

SEQ ID NO: 39561 - protein, 34 aa, Artificial Sequence; identical to SEQ ID NO: 15967
  GFR-binding peptide
  MOD_RES (1), (2): Xaa is C or S
  MOD_RES (16), (17), (18), (19), (20): Xaa is A or G
  MOD_RES (21), (22), (23), (24): Xaa is A or G or is absent

SEQ ID NO: 39562 - protein, 35 aa, Artificial Sequence; identical to SEQ ID NO: 6886
  GFR-binding peptide
  MOD_RES (3), (4): Xaa is C or S

SEQ ID NO: 39563 - protein, 34 aa, Artificial Sequence; identical to SEQ ID NO: 15969
  GFR-binding peptide
  MOD_RES (2), (34): Xaa is C or S

SEQ ID NO: 39564 - protein, 36 aa, Artificial Sequence; identical to SEQ ID NO: 15970
  GFR-binding peptide
  MOD_RES (1), (35): Xaa is C or S
  MOD_RES (15), (16), (17), (18), (19): Xaa is A or G
  MOD_RES (20), (21), (22), (23): Xaa is A or G or is absent

SEQ ID NO: 39565 - protein, 37 aa, Artificial Sequence; identical to SEQ ID NO: 15971
  GFR-binding peptide
  MOD_RES (2), (3), (37): Xaa is C or S
  MOD_RES (17), (18), (19), (20), (21): Xaa is A or G
  MOD_RES (22), (23), (24), (25): Xaa is A or G or is absent

SEQ ID NO: 39566 - protein, 44 aa, Artificial Sequence; identical to SEQ ID NO: 14225
  GFR-binding peptide
  MOD_RES (6), (7), (41), (43): Xaa is C or S
  MOD_RES (21), (22), (23), (24), (25): Xaa is A or G
  MOD_RES (26), (27), (28), (29): Xaa is A or G or is absent

SEQ ID NO: 39567 - protein, 35 aa, Artificial Sequence; identical to SEQ ID NO: 14226
  GFR-binding peptide
  MOD_RES (1), (33), (35): Xaa is C or S

SEQ ID NO: 39568 - protein, 39 aa, Artificial Sequence; identical to SEQ ID NO: 14227
  GFR-binding peptide
  MOD_RES (3), (4), (37), (39): Xaa is C or S
  MOD_RES (18), (19), (20), (21), (22): Xaa is A or G
  MOD_RES (23), (24), (25), (26): Xaa is A or G or is absent

SEQ ID NO: 39569 - protein, 38 aa, Artificial Sequence; identical to SEQ ID NO: 8674
  GFR-binding peptide
  MOD_RES (3), (4), (35), (37): Xaa is C or S

SEQ ID NO: 39570 - protein, 37 aa, Artificial Sequence; identical to SEQ ID NO: 15974
  GFR-binding peptide
  MOD_RES (3), (4): Xaa is C or S
  MOD_RES (18), (19), (20), (21), (22): Xaa is A or G
  MOD_RES (23), (24), (25), (26): Xaa is A or G or is absent

SEQ ID NO: 39571 - protein, 35 aa, Artificial Sequence; identical to SEQ ID NO: 14228
  GFR-binding peptide
  MOD_RES (32), (34): Xaa is C or S

SEQ ID NO: 39572 - protein, 37 aa, Artificial Sequence; identical to SEQ ID NO: 14230
  GFR-binding peptide
  MOD_RES (4), (5): Xaa is C or S
  MOD_RES (19), (20), (21), (22), (23): Xaa is A or G
  MOD_RES (24), (25), (26), (27): Xaa is A or G or is absent

SEQ ID NO: 39573 - protein, 39 aa, Artificial Sequence; identical to SEQ ID NO: 14231
  GFR-binding peptide
  MOD_RES (3), (4), (37), (39): Xaa is C or S
  MOD_RES (18), (19), (20), (21), (22): Xaa is A or G
  MOD_RES (23), (24), (25), (26): Xaa is A or G or is absent

SEQ ID NO: 39574 - protein, 38 aa, Artificial Sequence; identical to SEQ ID NO: 15975
  GFR-binding peptide
  MOD_RES (1), (2), (36), (38): Xaa is C or S
  MOD_RES (16), (17), (18), (19), (20): Xaa is A or G
  MOD_RES (21), (22), (23), (24): Xaa is A or G or is absent

SEQ ID NO: 39575 - protein, 39 aa, Artificial Sequence; identical to SEQ ID NO: 14232
  GFR-binding peptide
  MOD_RES (2), (3), (37), (39): Xaa is C or S
  MOD_RES (17), (18), (19), (20), (21): Xaa is A or G
  MOD_RES (22), (23), (24), (25): Xaa is A or G or is absent

SEQ ID NO: 39576 - protein, 36 aa, Artificial Sequence; identical to SEQ ID NO: 15977
  GFR-binding peptide
  MOD_RES (34), (36): Xaa is C or S
  MOD_RES (14), (15), (16), (17), (18): Xaa is A or G
  MOD_RES (19), (20), (21), (22): Xaa is A or G or is absent

SEQ ID NO: 39577 - protein, 33 aa, Artificial Sequence; identical to SEQ ID NO: 14234
  GFR-binding peptide
  MOD_RES (1), (1): Xaa is C or S
  MOD_RES (15), (16), (17), (18), (19): Xaa is A or G
  MOD_RES (20), (21), (22), (23): Xaa is A or G or is absent

SEQ ID NO: 39578 - protein, 38 aa, Artificial Sequence; identical to SEQ ID NO: 14235
  GFR-binding peptide
  MOD_RES (2), (3), (37): Xaa is C or S
  MOD_RES (17), (18), (19), (20), (21): Xaa is A or G
  MOD_RES (22), (23), (24), (25): Xaa is A or G or is absent

SEQ ID NO: 39579 - protein, 32 aa, Artificial Sequence; identical to SEQ ID NO: 15978
  GFR-binding peptide
  MOD_RES (1), (2): Xaa is C or S

SEQ ID NO: 39580 - protein, 39 aa, Artificial Sequence; identical to SEQ ID NO: 14237
  GFR-binding peptide
  MOD_RES (3), (4), (38): Xaa is C or S
  MOD_RES (18), (19), (20), (21), (22): Xaa is A or G
  MOD_RES (23), (24), (25), (26): Xaa is A or G or is absent

SEQ ID NO: 39581 - protein, 36 aa, Artificial Sequence; identical to SEQ ID NO: 15980
  GFR-binding peptide
  MOD_RES (2), (3), (36): Xaa is C or S
  MOD_RES (17), (18), (19), (20), (21): Xaa is A or G
  MOD_RES (22), (23), (24), (25): Xaa is A or G or is absent

SEQ ID NO: 39582 - protein, 39 aa, Artificial Sequence; identical to SEQ ID NO: 14239
  GFR-binding peptide
  MOD_RES (5), (6), (37), (39): Xaa is C or S

SEQ ID NO: 39583 - protein, 38 aa, Artificial Sequence; identical to SEQ ID NO: 6898
  GFR-binding peptide
  MOD_RES (2), (3), (36), (38): Xaa is C or S
  MOD_RES (17), (18), (19), (20), (21): Xaa is A or G
  MOD_RES (22), (23), (24), (25): Xaa is A or G or is absent

SEQ ID NO: 39584 - protein, 41 aa, Artificial Sequence; identical to SEQ ID NO: 15981
  GFR-binding peptide
  MOD_RES (5), (6), (40): Xaa is C or S
  MOD_RES (20), (21), (22), (23), (24): Xaa is A or G
  MOD_RES (25), (26), (27), (28): Xaa is A or G or is absent

SEQ ID NO: 39585 - protein, 34 aa, Artificial Sequence; identical to SEQ ID NO: 14241
  GFR-binding peptide
  MOD_RES (1), (2): Xaa is C or S
  MOD_RES (16), (17), (18), (19), (20): Xaa is A or G
  MOD_RES (21), (22), (23), (24): Xaa is A or G or is absent

SEQ ID NO: 39586 - protein, 39 aa, Artificial Sequence; identical to SEQ ID NO: 15982
  GFR-binding peptide
  MOD_RES (3), (4), (38): Xaa is C or S
  MOD_RES (18), (19), (20), (21), (22): Xaa is A or G
  MOD_RES (23), (24), (25), (26): Xaa is A or G or is absent

SEQ ID NO: 39587 - protein, 37 aa, Artificial Sequence; identical to SEQ ID NO: 6901
  GFR-binding peptide
  MOD_RES (3), (4): Xaa is C or S
  MOD_RES (18), (19), (20), (21), (22): Xaa is A or G
  MOD_RES (23), (24), (25), (26): Xaa is A or G or is absent

SEQ ID NO: 39588 - protein, 38 aa, Artificial Sequence; identical to SEQ ID NO: 15983
  GFR-binding peptide
  MOD_RES (1), (35), (37): Xaa is C or S
  MOD_RES (15), (16), (17), (18), (19): Xaa is A or G
  MOD_RES (20), (21), (22), (23): Xaa is A or G or is absent

SEQ ID NO: 39589 - protein, 38 aa, Artificial Sequence; identical to SEQ ID NO: 15984
  GFR-binding peptide
  MOD_RES (3), (4), (36), (38): Xaa is C or S

SEQ ID NO: 39590 - protein, 33 aa, Artificial Sequence; identical to SEQ ID NO: 14243
  GFR-binding peptide
  MOD_RES (2), (3): Xaa is C or S

SEQ ID NO: 39591 - protein, 40 aa, Artificial Sequence; identical to SEQ ID NO: 14244
  GFR-binding peptide
  MOD_RES (6), (7), (40): Xaa is C or S
  MOD_RES (21), (22), (23), (24), (25): Xaa is A or G
  MOD_RES (26), (27), (28), (29): Xaa is A or G or is absent

SEQ ID NO: 39592 - protein, 39 aa, Artificial Sequence; identical to SEQ ID NO: 15985
  GFR-binding peptide
  MOD_RES (4), (5), (37), (39): Xaa is C or S

SEQ ID NO: 39593 - protein, 38 aa, Artificial Sequence; identical to SEQ ID NO: 8680
  GFR-binding peptide
  MOD_RES (5), (6), (37): Xaa is C or S

SEQ ID NO: 39594 - protein, 44 aa, Artificial Sequence; identical to SEQ ID NO: 14245
  GFR-binding peptide
  MOD_RES (6), (7), (41), (43): Xaa is C or S
  MOD_RES (21), (22), (23), (24), (25): Xaa is A or G
  MOD_RES (26), (27), (28), (29): Xaa is A or G or is absent

SEQ ID NO: 39595 - protein, 40 aa, Artificial Sequence; identical to SEQ ID NO: 14246
  GFR-binding peptide
  MOD_RES (5), (39): Xaa is C or S
  MOD_RES (19), (20), (21), (22), (23): Xaa is A or G
  MOD_RES (24), (25), (26), (27): Xaa is A or G or is absent

SEQ ID NO: 39596 - protein, 32 aa, Artificial Sequence; identical to SEQ ID NO: 6905
  GFR-binding peptide
  MOD_RES (14), (15), (16), (17), (18): Xaa is A or G
  MOD_RES (19), (20), (21), (22): Xaa is A or G or is absent

SEQ ID NO: 39597 - protein, 34 aa, Artificial Sequence; identical to SEQ ID NO: 14249
  GFR-binding peptide
  MOD_RES (1), (1): Xaa is C or S
  MOD_RES (15), (16), (17), (18), (19): Xaa is A or G
  MOD_RES (20), (21), (22), (23): Xaa is A or G or is absent

SEQ ID NO: 39598 - protein, 36 aa, Artificial Sequence; identical to SEQ ID NO: 15987
  GFR-binding peptide
  MOD_RES (2), (3): Xaa is C or S
  MOD_RES (17), (18), (19), (20), (21): Xaa is A or G
  MOD_RES (22), (23), (24), (25): Xaa is A or G or is absent

SEQ ID NO: 39599 - protein, 38 aa, Artificial Sequence; identical to SEQ ID NO: 14250
  GFR-binding peptide
  MOD_RES (2), (3), (37): Xaa is C or S
  MOD_RES (17), (18), (19), (20), (21): Xaa is A or G
  MOD_RES (22), (23), (24), (25): Xaa is A or G or is absent

SEQ ID NO: 39600 - protein, 32 aa, Artificial Sequence; identical to SEQ ID NO: 15988
  GFR-binding peptide
  MOD_RES (1), (1): Xaa is C or S

SEQ ID NO: 39601 - protein, 40 aa, Artificial Sequence; identical to SEQ ID NO: 15989
  GFR-binding peptide
  MOD_RES (6), (7), (39): Xaa is C or S

SEQ ID NO: 39602 - protein, 41 aa, Artificial Sequence; identical to SEQ ID NO: 15990
  GFR-binding peptide
  MOD_RES (3), (4), (38), (40): Xaa is C or S
  MOD_RES (18), (19), (20), (21), (22): Xaa is A or G
  MOD_RES (23), (24), (25), (26): Xaa is A or G or is absent

SEQ ID NO: 39603 - protein, 38 aa, Artificial Sequence; identical to SEQ ID NO: 14251
  GFR-binding peptide
  MOD_RES (1), (2), (36), (38): Xaa is C or S
  MOD_RES (16), (17), (18), (19), (20): Xaa is A or G
  MOD_RES (21), (22), (23), (24): Xaa is A or G or is absent

SEQ ID NO: 39604 - protein, 36 aa, Artificial Sequence; identical to SEQ ID NO: 15991
  GFR-binding peptide
  MOD_RES (2), (3), (36): Xaa is C or S
  MOD_RES (17), (18), (19), (20), (21): Xaa is A or G
  MOD_RES (22), (23), (24), (25): Xaa is A or G or is absent

SEQ ID NO: 39605 - protein, 35 aa, Artificial Sequence; identical to SEQ ID NO: 8688
  GFR-binding peptide
  MOD_RES (1), (2), (34): Xaa is C or S

SEQ ID NO: 39606 - protein, 40 aa, Artificial Sequence; identical to SEQ ID NO: 14252
  GFR-binding peptide
  MOD_RES (3), (4), (37), (39): Xaa is C or S
  MOD_RES (18), (19), (20), (21), (22): Xaa is A or G
  MOD_RES (23), (24), (25), (26): Xaa is A or G or is absent

SEQ ID NO: 39607 - protein, 34 aa, Artificial Sequence; identical to SEQ ID NO: 15993
  GFR-binding peptide
  MOD_RES (34), (34): Xaa is C or S
  MOD_RES (14), (15), (16), (17), (18): Xaa is A or G
  MOD_RES (19), (20), (21), (22): Xaa is A or G or is absent

SEQ ID NO: 39608 - protein, 32 aa, Artificial Sequence; identical to SEQ ID NO: 14253
  GFR-binding peptide
  MOD_RES (1), (2): Xaa is C or S

SEQ ID NO: 39609 - protein, 37 aa, Artificial Sequence; identical to SEQ ID NO: 14254
  GFR-binding peptide
  MOD_RES (1), (35), (37): Xaa is C or S
  MOD_RES (15), (16), (17), (18), (19): Xaa is A or G
  MOD_RES (20), (21), (22), (23): Xaa is A or G or is absent

SEQ ID NO: 39610 - protein, 37 aa, Artificial Sequence; identical to SEQ ID NO: 8693
  GFR-binding peptide
  MOD_RES (3), (4), (35), (37): Xaa is C or S

SEQ ID NO: 39611 - protein, 35 aa, Artificial Sequence; identical to SEQ ID NO: 14255
  GFR-binding peptide
  MOD_RES (1), (2), (35): Xaa is C or S
  MOD_RES (16), (17), (18), (19), (20): Xaa is A or G
  MOD_RES (21), (22), (23), (24): Xaa is A or G or is absent

SEQ ID NO: 39612 - protein, 31 aa, Artificial Sequence; identical to SEQ ID NO: 6916
  GFR-binding peptide
  MOD_RES (1), (1): Xaa is C or S

SEQ ID NO: 39613 - protein, 39 aa, Artificial Sequence; identical to SEQ ID NO: 14257
  GFR-binding peptide
  MOD_RES (2), (3), (37), (39): Xaa is C or S
  MOD_RES (17), (18), (19), (20), (21): Xaa is A or G
  MOD_RES (22), (23), (24), (25): Xaa is A or G or is absent

SEQ ID NO: 39614 - protein, 37 aa, Artificial Sequence; identical to SEQ ID NO: 14258
  GFR-binding peptide
  MOD_RES (3), (4): Xaa is C or S
  MOD_RES (18), (19), (20), (21), (22): Xaa is A or G
  MOD_RES (23), (24), (25), (26): Xaa is A or G or is absent

SEQ ID NO: 39615 - protein, 34 aa, Artificial Sequence; identical to SEQ ID NO: 14259
  GFR-binding peptide
  MOD_RES (3), (4): Xaa is C or S

SEQ ID NO: 39616 - protein, 34 aa, Artificial Sequence; identical to SEQ ID NO: 15995
  GFR-binding peptide
  MOD_RES (1), (2): Xaa is C or S
  MOD_RES (16), (17), (18), (19), (20): Xaa is A or G
  MOD_RES (21), (22), (23), (24): Xaa is A or G or is absent

SEQ ID NO: 39617 - protein, 33 aa, Artificial Sequence; identical to SEQ ID NO: 15996
  GFR-binding peptide
  MOD_RES (2), (3): Xaa is C or S

SEQ ID NO: 39618 - protein, 37 aa, Artificial Sequence; identical to SEQ ID NO: 15998
  GFR-binding peptide
  MOD_RES (2), (3), (37): Xaa is C or S
  MOD_RES (17), (18), (19), (20), (21): Xaa is A or G
  MOD_RES (22), (23), (24), (25): Xaa is A or G or is absent

SEQ ID NO: 39619 - protein, 41 aa, Artificial Sequence; identical to SEQ ID NO: 14260
  GFR-binding peptide
  MOD_RES (6), (7), (41): Xaa is C or S
  MOD_RES (21), (22), (23), (24), (25): Xaa is A or G
  MOD_RES (26), (27), (28), (29): Xaa is A or G or is absent

SEQ ID NO: 39620 - protein, 36 aa, Artificial Sequence; identical to SEQ ID NO: 14261
  GFR-binding peptide
  MOD_RES (5), (6): Xaa is C or S

SEQ ID NO: 39621 - protein, 38 aa, Artificial Sequence; identical to SEQ ID NO: 14262
  GFR-binding peptide
  MOD_RES (1), (35), (37): Xaa is C or S
  MOD_RES (15), (16), (17), (18), (19): Xaa is A or G
  MOD_RES (20), (21), (22), (23): Xaa is A or G or is absent

SEQ ID NO: 39622 - protein, 34 aa, Artificial Sequence; identical to SEQ ID NO: 6920
  GFR-binding peptide
  MOD_RES (1), (2): Xaa is C or S
  MOD_RES (16), (17), (18), (19), (20): Xaa is A or G
  MOD_RES (21), (22), (23), (24): Xaa is A or G or is absent

SEQ ID NO: 39623 - protein, 37 aa, Artificial Sequence; identical to SEQ ID NO: 16000
  GFR-binding peptide
  MOD_RES (2), (3), (35), (37): Xaa is C or S

SEQ ID NO: 39624 - protein, 39 aa, Artificial Sequence; identical to SEQ ID NO: 16001
  GFR-binding peptide
  MOD_RES (5), (6), (38): Xaa is C or S

SEQ ID NO: 39625 - protein, 32 aa, Artificial Sequence; identical to SEQ ID NO: 14264
  GFR-binding peptide
  MOD_RES (1), (32): Xaa is C or S

SEQ ID NO: 39626 - protein, 37 aa, Artificial Sequence
  GFR-binding peptide
  MOD_RES (2), (3), (36): Xaa is C or S
  MOD_RES (17), (18), (19), (20), (21): Xaa is A or G
  MOD_RES (22), (23), (24), (25): Xaa is A or G or is absent
PXXVSQDLEPLTILYYXXXXXXXXXEQLSNMIVKSXK

SEQ ID NO: 39627 - protein, 42 aa, Artificial Sequence; identical to SEQ ID NO: 14265
  GFR-binding peptide
  MOD_RES (4), (5), (39), (41): Xaa is C or S
  MOD_RES (19), (20), (21), (22), (23): Xaa is A or G
  MOD_RES (24), (25), (26), (27): Xaa is A or G or is absent

SEQ ID NO: 39628 - protein, 37 aa, Artificial Sequence; identical to SEQ ID NO: 14267
  GFR-binding peptide
  MOD_RES (6), (7): Xaa is C or S

SEQ ID NO: 39629 - protein, 33 aa, Artificial Sequence; identical to SEQ ID NO: 14268
  GFR-binding peptide
  MOD_RES (2), (2): Xaa is C or S

SEQ ID NO: 39630 - protein, 32 aa, Artificial Sequence; identical to SEQ ID NO: 14269
  GFR-binding peptide
  MOD_RES (32), (32): Xaa is C or S

SEQ ID NO: 39631 - protein, 37 aa, Artificial Sequence; identical to SEQ ID NO: 16002
  GFR-binding peptide
  MOD_RES (2), (3), (36): Xaa is C or S
  MOD_RES (17), (18), (19), (20), (21): Xaa is A or G
  MOD_RES (22), (23), (24), (25): Xaa is A or G or is absent

SEQ ID NO: 39632 - protein, 34 aa, Artificial Sequence; identical to SEQ ID NO: 6929
  GFR-binding peptide
  MOD_RES (2), (3), (34): Xaa is C or S

SEQ ID NO: 39633 - protein, 35 aa, Artificial Sequence; identical to SEQ ID NO: 14271
  GFR-binding peptide
  MOD_RES (2), (34): Xaa is C or S

SEQ ID NO: 39634 - protein, 38 aa, Artificial Sequence; identical to SEQ ID NO: 6930
  GFR-binding peptide
  MOD_RES (6), (7), (38): Xaa is C or S

SEQ ID NO: 39635 - protein, 38 aa, Artificial Sequence; identical to SEQ ID NO: 16004
  GFR-binding peptide
  MOD_RES (2), (3), (35), (37): Xaa is C or S

SEQ ID NO: 39636 - protein, 40 aa, Artificial Sequence; identical to SEQ ID NO: 14273
  GFR-binding peptide
  MOD_RES (6), (7): Xaa is C or S
  MOD_RES (21), (22), (23), (24), (25): Xaa is A or G
  MOD_RES (26), (27), (28), (29): Xaa is A or G or is absent

SEQ ID NO: 39637 - protein, 35 aa, Artificial Sequence; identical to SEQ ID NO: 16005
  GFR-binding peptide
  MOD_RES (34), (34): Xaa is C or S
  MOD_RES (14), (15), (16), (17), (18): Xaa is A or G
  MOD_RES (19), (20), (21), (22): Xaa is A or G or is absent

SEQ ID NO: 39638 - protein, 35 aa, Artificial Sequence; identical to SEQ ID NO: 14274
  GFR-binding peptide
  MOD_RES (32), (34): Xaa is C or S

SEQ ID NO: 39639 - protein, 37 aa, Artificial Sequence; identical to SEQ ID NO: 14275
  GFR-binding peptide
  MOD_RES (3), (4): Xaa is C or S
  MOD_RES (18), (19), (20), (21), (22): Xaa is A or G
  MOD_RES (23), (24), (25), (26): Xaa is A or G or is absent

SEQ ID NO: 39640 - protein, 34 aa, Artificial Sequence; identical to SEQ ID NO: 16006
  GFR-binding peptide
  MOD_RES (34), (34): Xaa is C or S
  MOD_RES (14), (15), (16), (17), (18): Xaa is A or G
  MOD_RES (19), (20), (21), (22): Xaa is A or G or is absent

SEQ ID NO: 39641 - protein, 41 aa, Artificial Sequence; identical to SEQ ID NO: 14276
  GFR-binding peptide
  MOD_RES (5), (6), (40): Xaa is C or S
  MOD_RES (20), (21), (22), (23), (24): Xaa is A or G
  MOD_RES (25), (26), (27), (28): Xaa is A or G or is absent

SEQ ID NO: 39642 - protein, 40 aa, Artificial Sequence; identical to SEQ ID NO: 14277
  GFR-binding peptide
  MOD_RES (4), (5), (39): Xaa is C or S
  MOD_RES (19), (20), (21), (22), (23): Xaa is A or G
  MOD_RES (24), (25), (26), (27): Xaa is A or G or is absent

SEQ ID NO: 39643 - protein, 36 aa, Artificial Sequence; identical to SEQ ID NO: 8711
  GFR-binding peptide
  MOD_RES (1), (2), (35): Xaa is C or S
  MOD_RES (16), (17), (18), (19), (20): Xaa is A or G
  MOD_RES (21), (22), (23), (24): Xaa is A or G or is absent

SEQ ID NO: 39644 - protein, 39 aa, Artificial Sequence; identical to SEQ ID NO: 16008
  GFR-binding peptide
  MOD_RES (5), (6), (39): Xaa is C or S
  MOD_RES (20), (21), (22), (23), (24): Xaa is A or G
  MOD_RES (25), (26), (27), (28): Xaa is A or G or is absent

SEQ ID NO: 39645 - protein, 40 aa, Artificial Sequence; identical to SEQ ID NO: 16009
  GFR-binding peptide
  MOD_RES (2), (3), (37), (39): Xaa is C or S
  MOD_RES (17), (18), (19), (20), (21): Xaa is A or G
  MOD_RES (22), (23), (24), (25): Xaa is A or G or is absent

SEQ ID NO: 39646 - protein, 37 aa, Artificial Sequence; identical to SEQ ID NO: 14280
  GFR-binding peptide
  MOD_RES (3), (4), (37): Xaa is C or S
  MOD_RES (18), (19), (20), (21), (22): Xaa is A or G
  MOD_RES (23), (24), (25), (26): Xaa is A or G or is absent

SEQ ID NO: 39647 - protein, 40 aa, Artificial Sequence; identical to SEQ ID NO: 14281
  GFR-binding peptide
  MOD_RES (4), (5), (38), (40): Xaa is C or S
  MOD_RES (19), (20), (21), (22), (23): Xaa is A or G
  MOD_RES (24), (25), (26), (27): Xaa is A or G or is absent

SEQ ID NO: 39648 - protein, 37 aa, Artificial Sequence; identical to SEQ ID NO: 16010
  GFR-binding peptide
  MOD_RES (1), (35), (37): Xaa is C or S
  MOD_RES (15), (16), (17), (18), (19): Xaa is A or G
  MOD_RES (20), (21), (22), (23): Xaa is A or G or is absent

SEQ ID NO: 39649 - protein, 35 aa, Artificial Sequence; identical to SEQ ID NO: 14282
  GFR-binding peptide
  MOD_RES (33), (35): Xaa is C or S
  MOD_RES (14), (15), (16), (17), (18): Xaa is A or G
  MOD_RES (19), (20), (21), (22): Xaa is A or G or is absent

SEQ ID NO: 39650 - protein, 37 aa, Artificial Sequence; identical to SEQ ID NO: 14283
  GFR-binding peptide
  MOD_RES (5), (6), (37): Xaa is C or S

SEQ ID NO: 39651 - protein, 35 aa, Artificial Sequence; identical to SEQ ID NO: 14284
  GFR-binding peptide
  MOD_RES (1), (2), (33), (35): Xaa is C or S

SEQ ID NO: 39652 - protein, 35 aa, Artificial Sequence; identical to SEQ ID NO: 14285
  GFR-binding peptide
  MOD_RES (1), (2): Xaa is C or S
  MOD_RES (16), (17), (18), (19), (20): Xaa is A or G
  MOD_RES (21), (22), (23), (24): Xaa is A or G or is absent

SEQ ID NO: 39653 - protein, 38 aa, Artificial Sequence; identical to SEQ ID NO: 16013
  GFR-binding peptide
  MOD_RES (5), (37): Xaa is C or S

SEQ ID NO: 39654 - protein, 36 aa, Artificial Sequence; identical to SEQ ID NO: 14286
  GFR-binding peptide
  MOD_RES (1), (33), (35): Xaa is C or S

SEQ ID NO: 39655 - protein, 42 aa, Artificial Sequence; identical to SEQ ID NO: 14287
  GFR-binding peptide
  MOD_RES (6), (7), (41): Xaa is C or S
  MOD_RES (21), (22), (23), (24), (25): Xaa is A or G
  MOD_RES (26), (27), (28), (29): Xaa is A or G or is absent

SEQ ID NO: 39656 - protein, 37 aa, Artificial Sequence; identical to SEQ ID NO: 6941
  GFR-binding peptide
  MOD_RES (2), (3), (35), (37): Xaa is C or S

SEQ ID NO: 39657 - protein, 41 aa, Artificial Sequence; identical to SEQ ID NO: 8719
  GFR-binding peptide
  MOD_RES (3), (4), (38), (40): Xaa is C or S
  MOD_RES (18), (19), (20), (21), (22): Xaa is A or G
  MOD_RES (23), (24), (25), (26): Xaa is A or G or is absent

SEQ ID NO: 39658 - protein, 34 aa, Artificial Sequence; identical to SEQ ID NO: 14290
  GFR-binding peptide
  MOD_RES (1), (2): Xaa is C or S
  MOD_RES (16), (17), (18), (19), (20): Xaa is A or G
  MOD_RES (21), (22), (23), (24): Xaa is A or G or is absent

SEQ ID NO: 39659 - protein, 33 aa, Artificial Sequence; identical to SEQ ID NO: 16015
  GFR-binding peptide
  MOD_RES (1), (1): Xaa is C or S
  MOD_RES (15), (16), (17), (18), (19): Xaa is A or G
  MOD_RES (20), (21), (22), (23): Xaa is A or G or is absent

SEQ ID NO: 39660 - protein, 33 aa, Artificial Sequence; identical to SEQ ID NO: 16016
  GFR-binding peptide
  MOD_RES (32), (32): Xaa is C or S

SEQ ID NO: 39661 - protein, 35 aa, Artificial Sequence; identical to SEQ ID NO: 14291
  GFR-binding peptide
  MOD_RES (1), (2), (34): Xaa is C or S

SEQ ID NO: 39662 - protein, 39 aa, Artificial Sequence; identical to SEQ ID NO: 14292
  GFR-binding peptide
  MOD_RES (5), (39): Xaa is C or S
  MOD_RES (19), (20), (21), (22), (23): Xaa is A or G
  MOD_RES (24), (25), (26), (27): Xaa is A or G or is absent

SEQ ID NO: 39663 - protein, 39 aa, Artificial Sequence; identical to SEQ ID NO: 14293
  GFR-binding peptide
  MOD_RES (5), (6), (37), (39): Xaa is C or S

SEQ ID NO: 39664 - protein, 32 aa, Artificial Sequence; identical to SEQ ID NO: 16017
  GFR-binding peptide
  MOD_RES (32), (32): Xaa is C or S

SEQ ID NO: 39665 - protein, 38 aa, Artificial Sequence; identical to SEQ ID NO: 16018
  GFR-binding peptide
  MOD_RES (5), (6): Xaa is C or S
  MOD_RES (20), (21), (22), (23), (24): Xaa is A or G
  MOD_RES (25), (26), (27), (28): Xaa is A or G or is absent

SEQ ID NO: 39666 - protein, 38 aa, Artificial Sequence; identical to SEQ ID NO: 16019
  GFR-binding peptide
  MOD_RES (4), (5), (37): Xaa is C or S

SEQ ID NO: 39667 - protein, 35 aa, Artificial Sequence
  GFR-binding peptide
  MOD_RES (1), (2), (35): Xaa is C or S
  MOD_RES (16), (17), (18), (19), (20): Xaa is A or G
  MOD_RES (21), (22), (23), (24): Xaa is A or G or is absent
XXVSQDLEPLTILYYXXXXXXXXXEQLSNMIVKSX

SEQ ID NO: 39668 - protein, 38 aa, Artificial Sequence; identical to SEQ ID NO: 16020
  GFR-binding peptide
  MOD_RES (3), (37): Xaa is C or S
  MOD_RES (17), (18), (19), (20), (21): Xaa is A or G
  MOD_RES (22), (23), (24), (25): Xaa is A or G or is absent

SEQ ID NO: 39669 - protein, 35 aa, Artificial Sequence; identical to SEQ ID NO: 16021
  GFR-binding peptide
  MOD_RES (3), (35): Xaa is C or S

SEQ ID NO: 39670 - protein, 33 aa, Artificial Sequence; identical to SEQ ID NO: 16022
  GFR-binding peptide
  MOD_RES (2), (3): Xaa is C or S

SEQ ID NO: 39671 - protein, 37 aa, Artificial Sequence; identical to SEQ ID NO: 8728
  GFR-binding peptide
  MOD_RES (5), (6): Xaa is C or S

SEQ ID NO: 39672 - protein, 32 aa, Artificial Sequence; identical to SEQ ID NO: 16024
  GFR-binding peptide
  MOD_RES (14), (15), (16), (17), (18): Xaa is A or G
  MOD_RES (19), (20), (21), (22): Xaa is A or G or is absent

SEQ ID NO: 39673 - protein, 36 aa, Artificial Sequence; identical to SEQ ID NO: 14299
  GFR-binding peptide
  MOD_RES (3), (3): Xaa is C or S
  MOD_RES (17), (18), (19), (20), (21): Xaa is A or G
  MOD_RES (22), (23), (24), (25): Xaa is A or G or is absent

SEQ ID NO: 39674 - protein, 37 aa, Artificial Sequence; identical to SEQ ID NO: 6961
  GFR-binding peptide
  MOD_RES (1), (34), (36): Xaa is C or S
  MOD_RES (15), (16), (17), (18), (19): Xaa is A or G
  MOD_RES (20), (21), (22), (23): Xaa is A or G or is absent

SEQ ID NO: 39675 - protein, 38 aa, Artificial Sequence; identical to SEQ ID NO: 16025
  GFR-binding peptide
  MOD_RES (7), (7): Xaa is C or S

SEQ ID NO: 39676 - protein, 40 aa, Artificial Sequence; identical to SEQ ID NO: 16026
  GFR-binding peptide
  MOD_RES (5), (6), (38), (40): Xaa is C or S

SEQ ID NO: 39677 - protein, 35 aa, Artificial Sequence; identical to SEQ ID NO: 16027
  GFR-binding peptide
  MOD_RES (3), (4): Xaa is C or S

SEQ ID NO: 39678 - protein, 39 aa, Artificial Sequence; identical to SEQ ID NO: 14302
  GFR-binding peptide
  MOD_RES (7), (7): Xaa is C or S
  MOD_RES (21), (22), (23), (24), (25): Xaa is A or G
  MOD_RES (26), (27), (28), (29): Xaa is A or G or is absent

SEQ ID NO: 39679 - protein, 35 aa, Artificial Sequence; identical to SEQ ID NO: 16028
  GFR-binding peptide
  MOD_RES (1), (34): Xaa is C or S
  MOD_RES (15), (16), (17), (18), (19): Xaa is A or G
  MOD_RES (20), (21), (22), (23): Xaa is A or G or is absent

SEQ ID NO: 39680 - protein, 32 aa, Artificial Sequence; identical to SEQ ID NO: 14303
  GFR-binding peptide
  MOD_RES (1), (1): Xaa is C or S

SEQ ID NO: 39681 - protein, 43 aa, Artificial Sequence; identical to SEQ ID NO: 14304
  GFR-binding peptide
  MOD_RES (6), (7), (41), (43): Xaa is C or S
  MOD_RES (21), (22), (23), (24), (25): Xaa is A or G
  MOD_RES (26), (27), (28), (29): Xaa is A or G or is absent

SEQ ID NO: 39682 - protein, 41 aa, Artificial Sequence; identical to SEQ ID NO: 14306
  GFR-binding peptide
  MOD_RES (5), (6), (38), (40): Xaa is C or S

SEQ ID NO: 39683 - protein, 39 aa, Artificial Sequence; identical to SEQ ID NO: 14307
  GFR-binding peptide
  MOD_RES (1), (2), (36), (38): Xaa is C or S
  MOD_RES (16), (17), (18), (19), (20): Xaa is A or G
  MOD_RES (21), (22), (23), (24): Xaa is A or G or is absent

SEQ ID NO: 39684 - protein, 35 aa, Artificial Sequence; identical to SEQ ID NO: 16029
  GFR-binding peptide
  MOD_RES (1), (35): Xaa is C or S
  MOD_RES (15), (16), (17), (18), (19): Xaa is A or G
  MOD_RES (20), (21), (22), (23): Xaa is A or G or is absent

SEQ ID NO: 39685 - protein, 35 aa, Artificial Sequence; identical to SEQ ID NO: 16030
  GFR-binding peptide
  MOD_RES (4), (5): Xaa is C or S

SEQ ID NO: 39686 - protein, 42 aa, Artificial Sequence; identical to SEQ ID NO: 14308
  GFR-binding peptide
  MOD_RES (4), (5), (39), (41): Xaa is C or S
  MOD_RES (19), (20), (21), (22), (23): Xaa is A or G
  MOD_RES (24), (25), (26), (27): Xaa is A or G or is absent

SEQ ID NO: 39687 - protein, 35 aa, Artificial Sequence; identical to SEQ ID NO: 16032
  GFR-binding peptide
  MOD_RES (2), (3), (34): Xaa is C or S

SEQ ID NO: 39688 - protein, 44 aa, Artificial Sequence; identical to SEQ ID NO: 16035
  GFR-binding peptide
  MOD_RES (7), (41), (43): Xaa is C or S
  MOD_RES (21), (22), (23), (24), (25): Xaa is A or G
  MOD_RES (26), (27), (28), (29): Xaa is A or G or is absent

SEQ ID NO: 39689 - protein, 33 aa, Artificial Sequence; identical to SEQ ID NO: 14310
  GFR-binding peptide
  MOD_RES (1), (33): Xaa is C or S

SEQ ID NO: 39690 - protein, 43 aa, Artificial Sequence; identical to SEQ ID NO: 14311
  GFR-binding peptide
  MOD_RES (5), (6), (40), (42): Xaa is C or S
  MOD_RES (20), (21), (22), (23), (24): Xaa is A or G
  MOD_RES (25), (26), (27), (28): Xaa is A or G or is absent

SEQ ID NO: 39691 - protein, 39 aa, Artificial Sequence; identical to SEQ ID NO: 14313
  GFR-binding peptide
  MOD_RES (2), (3), (37), (39): Xaa is C or S
  MOD_RES (17), (18), (19), (20), (21): Xaa is A or G
  MOD_RES (22), (23), (24), (25): Xaa is A or G or is absent

SEQ ID NO: 39692 - protein, 38 aa, Artificial Sequence; identical to SEQ ID NO: 6975
  GFR-binding peptide
  MOD_RES (4), (5): Xaa is C or S
  MOD_RES (19), (20), (21), (22), (23): Xaa is A or G
  MOD_RES (24), (25), (26), (27): Xaa is A or G or is absent

SEQ ID NO: 39693 - protein, 40 aa, Artificial Sequence; identical to SEQ ID NO: 16037
  GFR-binding peptide
  MOD_RES (4), (5), (37), (39): Xaa is C or S

SEQ ID NO: 39694 - protein, 39 aa, Artificial Sequence; identical to SEQ ID NO: 14316
  GFR-binding peptide
  MOD_RES (3), (4), (36), (38): Xaa is C or S

SEQ ID NO: 39695 - protein, 41 aa, Artificial Sequence; identical to SEQ ID NO: 14317
  GFR-binding peptide
  MOD_RES (4), (5), (39), (41): Xaa is C or S
  MOD_RES (19), (20), (21), (22), (23): Xaa is A or G
  MOD_RES (24), (25), (26), (27): Xaa is A or G or is absent

SEQ ID NO: 39696 - protein, 36 aa, Artificial Sequence; identical to SEQ ID NO: 16039
  GFR-binding peptide
  MOD_RES (4), (5): Xaa is C or S

SEQ ID NO: 39697 - protein, 37 aa, Artificial Sequence; identical to SEQ ID NO: 14318
  GFR-binding peptide
  MOD_RES (34), (36): Xaa is C or S
  MOD_RES (14), (15), (16), (17), (18): Xaa is A or G
  MOD_RES (19), (20), (21), (22): Xaa is A or G or is absent

SEQ ID NO: 39698 - protein, 36 aa, Artificial Sequence; identical to SEQ ID NO: 8744
  GFR-binding peptide
  MOD_RES (5), (6): Xaa is C or S

SEQ ID NO: 39699 - protein, 42 aa, Artificial Sequence; identical to SEQ ID NO: 16041
  GFR-binding peptide
  MOD_RES (4), (5), (39), (41): Xaa is C or S
  MOD_RES (19), (20), (21), (22), (23): Xaa is A or G
  MOD_RES (24), (25), (26), (27): Xaa is A or G or is absent

SEQ ID NO: 39700 - protein, 36 aa, Artificial Sequence; identical to SEQ ID NO: 16042
  GFR-binding peptide
  MOD_RES (1), (2), (35): Xaa is C or S
  MOD_RES (16), (17), (18), (19), (20): Xaa is A or G
  MOD_RES (21), (22), (23), (24): Xaa is A or G or is absent

SEQ ID NO: 39701 - protein, 35 aa, Artificial Sequence; identical to SEQ ID NO: 16043
  GFR-binding peptide
  MOD_RES (2), (3), (34): Xaa is C or S

SEQ ID NO: 39702 - protein, 36 aa, Artificial Sequence; identical to SEQ ID NO: 16044
  GFR-binding peptide
  MOD_RES (4), (5): Xaa is C or S

SEQ ID NO: 39703 - protein, 36 aa, Artificial Sequence; identical to SEQ ID NO: 16045
  GFR-binding peptide
  MOD_RES (6), (6): Xaa is C or S

SEQ ID NO: 39704 - protein, 38 aa, Artificial Sequence; identical to SEQ ID NO: 16046
  GFR-binding peptide
  MOD_RES (1), (2), (36), (38): Xaa is C or S
  MOD_RES (16), (17), (18), (19), (20): Xaa is A or G
  MOD_RES (21), (22), (23), (24): Xaa is A or G or is absent

SEQ ID NO: 39705 - protein, 31 aa, Artificial Sequence; identical to SEQ ID NO: 16047
  GFR-binding peptide
  MOD_RES (1), (1): Xaa is C or S

SEQ ID NO: 39706 - protein, 37 aa, Artificial Sequence; identical to SEQ ID NO: 16049
  GFR-binding peptide
  MOD_RES (6), (7): Xaa is C or S

SEQ ID NO: 39707 - protein, 42 aa, Artificial Sequence; identical to SEQ ID NO: 16050
  GFR-binding peptide
  MOD_RES (6), (7), (41): Xaa is C or S
  MOD_RES (21), (22), (23), (24), (25): Xaa is A or G
  MOD_RES (26), (27), (28), (29): Xaa is A or G or is absent

SEQ ID NO: 39708 - protein, 35 aa, Artificial Sequence; identical to SEQ ID NO: 14320
  GFR-binding peptide
  MOD_RES (5), (5): Xaa is C or S

SEQ ID NO: 39709 - protein, 34 aa, Artificial Sequence; identical to SEQ ID NO: 16051
  GFR-binding peptide
  MOD_RES (1), (2), (34): Xaa is C or S

SEQ ID NO: 39710 - protein, 42 aa, Artificial Sequence; identical to SEQ ID NO: 14322
  GFR-binding peptide
  MOD_RES (6), (7), (39), (41): Xaa is C or S

SEQ ID NO: 39711 - protein, 40 aa, Artificial Sequence; identical to SEQ ID NO: 14323
  GFR-binding peptide
  MOD_RES (5), (6), (39): Xaa is C or S
  MOD_RES (20), (21), (22), (23), (24): Xaa is A or G
  MOD_RES (25), (26), (27), (28): Xaa is A or G or is absent

SEQ ID NO: 39712 - protein, 31 aa, Artificial Sequence; identical to SEQ ID NO: 6986
  GFR-binding peptide
  MOD_RES (1), (1): Xaa is C or S

SEQ ID NO: 39713 - protein, 36 aa, Artificial Sequence; identical to SEQ ID NO: 14325
  GFR-binding peptide
  MOD_RES (34), (36): Xaa is C or S
  MOD_RES (14), (15), (16), (17), (18): Xaa is A or G
  MOD_RES (19), (20), (21), (22): Xaa is A or G or is absent

SEQ ID NO: 39714 - protein, 35 aa, Artificial Sequence; identical to SEQ ID NO: 16052
  GFR-binding peptide
  MOD_RES (2), (3): Xaa is C or S
  MOD_RES (17), (18), (19), (20), (21): Xaa is A or G
  MOD_RES (22), (23), (24), (25): Xaa is A or G or is absent

SEQ ID NO: 39715 - protein, 33 aa, Artificial Sequence; identical to SEQ ID NO: 16053
  GFR-binding peptide
  MOD_RES (1), (33): Xaa is C or S

SEQ ID NO: 39716 - protein, 35 aa, Artificial Sequence; identical to SEQ ID NO: 14326
  GFR-binding peptide
  MOD_RES (34), (34): Xaa is C or S
  MOD_RES (14), (15), (16), (17), (18): Xaa is A or G
  MOD_RES (19), (20), (21), (22): Xaa is A or G or is absent

SEQ ID NO: 39717 - protein, 39 aa, Artificial Sequence; identical to SEQ ID NO: 16055
  GFR-binding peptide
  MOD_RES (3), (4), (38): Xaa is C or S
  MOD_RES (18), (19), (20), (21), (22): Xaa is A or G
  MOD_RES (23), (24), (25), (26): Xaa is A or G or is absent

SEQ ID NO: 39718 - protein, 32 aa, Artificial Sequence; identical to SEQ ID NO: 16056
  GFR-binding peptide
  MOD_RES (1), (32): Xaa is C or S

SEQ ID NO: 39719 - protein, 41 aa, Artificial Sequence; identical to SEQ ID NO: 16057
  GFR-binding peptide
  MOD_RES (5), (6), (39), (41): Xaa is C or S
  MOD_RES (20), (21), (22), (23), (24): Xaa is A or G
  MOD_RES (25), (26), (27), (28): Xaa is A or G or is absent

SEQ ID NO: 39720 - protein, 35 aa, Artificial Sequence; identical to SEQ ID NO: 16058
  GFR-binding peptide
  MOD_RES (3), (3): Xaa is C or S
  MOD_RES (17), (18), (19), (20), (21): Xaa is A or G
  MOD_RES (22), (23), (24), (25): Xaa is A or G or is absent

SEQ ID NO: 39721 - protein, 40 aa, Artificial Sequence; identical to SEQ ID NO: 16059
  GFR-binding peptide
  MOD_RES (4), (5), (39): Xaa is C or S
  MOD_RES (19), (20), (21), (22), (23): Xaa is A or G
  MOD_RES (24), (25), (26), (27): Xaa is A or G or is absent

SEQ ID NO: 39722 - protein, 40 aa, Artificial Sequence; identical to SEQ ID NO: 14327
  GFR-binding peptide
  MOD_RES (3), (37), (39): Xaa is C or S
  MOD_RES (17), (18), (19), (20), (21): Xaa is A or G
  MOD_RES (22), (23), (24), (25): Xaa is A or G or is absent

SEQ ID NO: 39723 - protein, 37 aa, Artificial Sequence; identical to SEQ ID NO: 16060
  GFR-binding peptide
  MOD_RES (4), (5), (37): Xaa is C or S

SEQ ID NO: 39724 - protein, 39 aa, Artificial Sequence; identical to SEQ ID NO: 16061
  GFR-binding peptide
  MOD_RES (5), (6), (38): Xaa is C or S

SEQ ID NO: 39725 - protein, 38 aa, Artificial Sequence; identical to SEQ ID NO: 14328
  GFR-binding peptide
  MOD_RES (4), (5), (37): Xaa is C or S

SEQ ID NO: 39726 - protein, 33 aa, Artificial Sequence; identical to SEQ ID NO: 16062
  GFR-binding peptide
  MOD_RES (1), (1): Xaa is C or S
  MOD_RES (15), (16), (17), (18), (19): Xaa is A or G
  MOD_RES (20), (21), (22), (23): Xaa is A or G or is absent

SEQ ID NO: 39727 - protein, 36 aa, Artificial Sequence; identical to SEQ ID NO: 16063
  GFR-binding peptide
  MOD_RES (5), (6): Xaa is C or S

SEQ ID NO: 39728 - protein, 35 aa, Artificial Sequence; identical to SEQ ID NO: 14330
  GFR-binding peptide
  MOD_RES (1), (33), (35): Xaa is C or S

SEQ ID NO: 39729 - protein, 37 aa, Artificial Sequence; identical to SEQ ID NO: 16064
  GFR-binding peptide
  MOD_RES (6), (7): Xaa is C or S

SEQ ID NO: 39730 - protein, 35 aa, Artificial Sequence; identical to SEQ ID NO: 14331
  GFR-binding peptide
  MOD_RES (2), (3), (35): Xaa is C or S

SEQ ID NO: 39731 - protein, 39 aa, Artificial Sequence; identical to SEQ ID NO: 16065
  GFR-binding peptide
  MOD_RES (2), (3), (37), (39): Xaa is C or S
  MOD_RES (17), (18), (19), (20), (21): Xaa is A or G
  MOD_RES (22), (23), (24), (25): Xaa is A or G or is absent

SEQ ID NO: 39732 - protein, 38 aa, Artificial Sequence; identical to SEQ ID NO: 14332
  GFR-binding peptide
  MOD_RES (4), (36), (38): Xaa is C or S

SEQ ID NO: 39733 - protein, 40 aa, Artificial Sequence; identical to SEQ ID NO: 14333
  GFR-binding peptide
  MOD_RES (6), (7), (39): Xaa is C or S

SEQ ID NO: 39734 - protein, 40 aa, Artificial Sequence; identical to SEQ ID NO: 14335
  GFR-binding peptide
  MOD_RES (3), (4), (38), (40): Xaa is C or S
  MOD_RES (18), (19), (20), (21), (22): Xaa is A or G
  MOD_RES (23), (24), (25), (26): Xaa is A or G or is absent

SEQ ID NO: 39735 - protein, 34 aa, Artificial Sequence; identical to SEQ ID NO: 16067
  GFR-binding peptide
  MOD_RES (1), (33): Xaa is C or S

SEQ ID NO: 39736 - protein, 39 aa, Artificial Sequence; identical to SEQ ID NO: 16068
  GFR-binding peptide
  MOD_RES (5), (39): Xaa is C or S
  MOD_RES (19), (20), (21), (22), (23): Xaa is A or G
  MOD_RES (24), (25), (26), (27): Xaa is A or G or is absent

SEQ ID NO: 39737 - protein, 36 aa, Artificial Sequence; identical to SEQ ID NO: 14336
  GFR-binding peptide
  MOD_RES (2), (3), (36): Xaa is C or S
  MOD_RES (17), (18), (19), (20), (21): Xaa is A or G
  MOD_RES (22), (23), (24), (25): Xaa is A or G or is absent

SEQ ID NO: 39738 - protein, 37 aa, Artificial Sequence; identical to SEQ ID NO: 14337
  GFR-binding peptide
  MOD_RES (4), (5), (37): Xaa is C or S

SEQ ID NO: 39739 - protein, 38 aa, Artificial Sequence; identical to SEQ ID NO: 16069
  GFR-binding peptide
  MOD_RES (4), (5), (38): Xaa is C or S
  MOD_RES (19), (20), (21), (22), (23): Xaa is A or G
  MOD_RES (24), (25), (26), (27): Xaa is A or G or is absent

SEQ ID NO: 39740 - protein, 36 aa, Artificial Sequence; identical to SEQ ID NO: 16071
  GFR-binding peptide
  MOD_RES (4), (5): Xaa is C or S

SEQ ID NO: 39741 - protein, 42 aa, Artificial Sequence; identical to SEQ ID NO: 16072
  GFR-binding peptide
  MOD_RES (6), (7), (40), (42): Xaa is C or S
  MOD_RES (21), (22), (23), (24), (25): Xaa is A or G
  MOD_RES (26), (27), (28), (29): Xaa is A or G or is absent

SEQ ID NO: 39742 - protein, 36 aa, Artificial Sequence; identical to SEQ ID NO: 8778
  GFR-binding peptide
  MOD_RES (4), (5), (36): Xaa is C or S

SEQ ID NO: 39743 - protein, 35 aa, Artificial Sequence; identical to SEQ ID NO: 16074
  GFR-binding peptide
  MOD_RES (34), (34): Xaa is C or S
  MOD_RES (14), (15), (16), (17), (18): Xaa is A or G
  MOD_RES (19), (20), (21), (22): Xaa is A or G or is absent

SEQ ID NO: 39744 - protein, 37 aa, Artificial Sequence; identical to SEQ ID NO: 16075
  GFR-binding peptide
  MOD_RES (4), (5): Xaa is C or S
  MOD_RES (19), (20), (21), (22), (23): Xaa is A or G
  MOD_RES (24), (25), (26), (27): Xaa is A or G or is absent

SEQ ID NO: 39745 - protein, 40 aa, Artificial Sequence; identical to SEQ ID NO: 14338
  GFR-binding peptide
  MOD_RES (6), (7), (38), (40): Xaa is C or S

SEQ ID NO: 39746 - protein, 35 aa, Artificial Sequence; identical to SEQ ID NO: 14339
  GFR-binding peptide
  MOD_RES (1), (33), (35): Xaa is C or S

SEQ ID NO: 39747 - protein, 32 aa, Artificial Sequence; identical to SEQ ID NO: 14340
  GFR-binding peptide
  MOD_RES (1), (2): Xaa is C or S

SEQ ID NO: 39748 - protein, 35 aa, Artificial Sequence; identical to SEQ ID NO: 7006
  GFR-binding peptide
  MOD_RES (33), (35): Xaa is C or S
  MOD_RES (14), (15), (16), (17), (18): Xaa is A or G
  MOD_RES (19), (20), (21), (22): Xaa is A or G or is absent

SEQ ID NO: 39749 - protein, 36 aa, Artificial Sequence; identical to SEQ ID NO: 7007
  GFR-binding peptide
  MOD_RES (1), (2), (33), (35): Xaa is C or S

SEQ ID NO: 39750 - protein, 36 aa, Artificial Sequence; identical to SEQ ID NO: 16076
  GFR-binding peptide
  MOD_RES (34), (36): Xaa is C or S
  MOD_RES (14), (15), (16), (17), (18): Xaa is A or G
  MOD_RES (19), (20), (21), (22): Xaa is A or G or is absent

SEQ ID NO: 39751 - protein, 38 aa, Artificial Sequence; identical to SEQ ID NO: 8782
  GFR-binding peptide
  MOD_RES (3), (4), (38): Xaa is C or S
  MOD_RES (18), (19), (20), (21), (22): Xaa is A or G
  MOD_RES (23), (24), (25), (26): Xaa is A or G or is absent

SEQ ID NO: 39752 - protein, 39 aa, Artificial Sequence; identical to SEQ ID NO: 14344
  GFR-binding peptide
  MOD_RES (2), (3), (36), (38): Xaa is C or S
  MOD_RES (17), (18), (19), (20), (21): Xaa is A or G
  MOD_RES (22), (23), (24), (25): Xaa is A or G or is absent

SEQ ID NO: 39753 - protein, 37 aa, Artificial Sequence; identical to SEQ ID NO: 16078
  GFR-binding peptide
  MOD_RES (1), (35), (37): Xaa is C or S
  MOD_RES (15), (16), (17), (18), (19): Xaa is A or G
  MOD_RES (20), (21), (22), (23): Xaa is A or G or is absent

SEQ ID NO: 39754 - protein, 38 aa, Artificial Sequence; identical to SEQ ID NO: 14345
  GFR-binding peptide
  MOD_RES (5), (6), (37): Xaa is C or S

SEQ ID NO: 39755 - protein, 40 aa, Artificial Sequence
  GFR-binding peptide
  MOD_RES (4), (5), (38), (40): Xaa is C or S
  MOD_RES (19), (20), (21), (22), (23): Xaa is A or G
  MOD_RES (24), (25), (26), (27): Xaa is A or G or is absent
ASPXXVSQDLEPLTILYYXXXXXXXXXEQLSNMIVKSXKX

SEQ ID NO: 39756 - protein, 38 aa, Artificial Sequence; identical to SEQ ID NO: 8783
  GFR-binding peptide
  MOD_RES (5), (6): Xaa is C or S
  MOD_RES (20), (21), (22), (23), (24): Xaa is A or G
  MOD_RES (25), (26), (27), (28): Xaa is A or G or is absent

SEQ ID NO: 39757 - protein, 30 aa, Artificial Sequence; identical to SEQ ID NO: 8785
  GFR-binding peptide

SEQ ID NO: 39758 - protein, 31 aa, Artificial Sequence; identical to SEQ ID NO: 16082
  GFR-binding peptide
  MOD_RES (1), (1): Xaa is C or S

SEQ ID NO: 39759 - protein, 34 aa, Artificial Sequence; identical to SEQ ID NO: 16083
  GFR-binding peptide
  MOD_RES (3), (4): Xaa is C or S

SEQ ID NO: 39760 - protein, 37 aa, Artificial Sequence; identical to SEQ ID NO: 14347
  GFR-binding peptide
  MOD_RES (34), (36): Xaa is C or S
  MOD_RES (14), (15), (16), (17), (18): Xaa is A or G
  MOD_RES (19), (20), (21), (22): Xaa is A or G or is absent

SEQ ID NO: 39761 - protein, 37 aa, Artificial Sequence; identical to SEQ ID NO: 14350
  GFR-binding peptide
  MOD_RES (4), (5): Xaa is C or S
  MOD_RES (19), (20), (21), (22), (23): Xaa is A or G
  MOD_RES (24), (25), (26), (27): Xaa is A or G or is absent

SEQ ID NO: 39762 - protein, 39 aa, Artificial Sequence; identical to SEQ ID NO: 14351
  GFR-binding peptide
  MOD_RES (6), (7): Xaa is C or S
  MOD_RES (21), (22), (23), (24), (25): Xaa is A or G
  MOD_RES (26), (27), (28), (29): Xaa is A or G or is absent

SEQ ID NO: 39763 - protein, 34 aa, Artificial Sequence; identical to SEQ ID NO: 16085
  GFR-binding peptide
  MOD_RES (1), (33): Xaa is C or S

SEQ ID NO: 39764 - protein, 33 aa, Artificial Sequence; identical to SEQ ID NO: 16087
  GFR-binding peptide
  MOD_RES (1), (33): Xaa is C or S

SEQ ID NO: 39765 - protein, 40 aa, Artificial Sequence; identical to SEQ ID NO: 14353
  GFR-binding peptide
  MOD_RES (4), (5), (38), (40): Xaa is C or S
  MOD_RES (19), (20), (21), (22), (23): Xaa is A or G
  MOD_RES (24), (25), (26), (27): Xaa is A or G or is absent

SEQ ID NO: 39766 - protein, 32 aa, Artificial Sequence; identical to SEQ ID NO: 8795
  GFR-binding peptide
  MOD_RES (1), (2): Xaa is C or S

SEQ ID NO: 39767 - protein, 39 aa, Artificial Sequence; identical to SEQ ID NO: 16090
  GFR-binding peptide
  MOD_RES (5), (6), (38): Xaa is C or S

SEQ ID NO: 39768 - protein, 35 aa, Artificial Sequence; identical to SEQ ID NO: 16091
  GFR-binding peptide
  MOD_RES (2), (3): Xaa is C or S
  MOD_RES (17), (18), (19), (20), (21): Xaa is A or G
  MOD_RES (22), (23), (24), (25): Xaa is A or G or is absent

SEQ ID NO: 39769 - protein, 36 aa, Artificial Sequence; identical to SEQ ID NO: 7025
  GFR-binding peptide
  MOD_RES (1), (2), (34), (36): Xaa is C or S

SEQ ID NO: 39770 - protein, 42 aa, Artificial Sequence; identical to SEQ ID NO: 14356
  GFR-binding peptide
  MOD_RES (6), (7), (41): Xaa is C or S
  MOD_RES (21), (22), (23), (24), (25): Xaa is A or G
  MOD_RES (26), (27), (28), (29): Xaa is A or G or is absent

SEQ ID NO: 39771 - protein, 31 aa, Artificial Sequence; identical to SEQ ID NO: 14357
  GFR-binding peptide
  MOD_RES (31), (31): Xaa is C or S

SEQ ID NO: 39772 - protein, 38 aa, Artificial Sequence; identical to SEQ ID NO: 16092
  GFR-binding peptide
  MOD_RES (4), (5), (37): Xaa is C or S

SEQ ID NO: 39773 - protein, 43 aa, Artificial Sequence; identical to SEQ ID NO: 16093
  GFR-binding peptide
  MOD_RES (5), (6), (40), (42): Xaa is C or S
  MOD_RES (20), (21), (22), (23), (24): Xaa is A or G
  MOD_RES (25), (26), (27), (28): Xaa is A or G or is absent

SEQ ID NO: 39774 - protein, 34 aa, Artificial Sequence; identical to SEQ ID NO: 16094
  GFR-binding peptide
  MOD_RES (33), (33): Xaa is C or S
  MOD_RES (14), (15), (16), (17), (18): Xaa is A or G
  MOD_RES (19), (20), (21), (22): Xaa is A or G or is absent

SEQ ID NO: 39775 - protein, 35 aa, Artificial Sequence; identical to SEQ ID NO: 16095
  GFR-binding peptide
  MOD_RES (3), (3): Xaa is C or S
  MOD_RES (17), (18), (19), (20), (21): Xaa is A or G
  MOD_RES (22), (23), (24), (25): Xaa is A or G or is absent

SEQ ID NO: 39776 - protein, 44 aa, Artificial Sequence; identical to SEQ ID NO: 16096
  GFR-binding peptide
  MOD_RES (6), (7), (41), (43): Xaa is C or S
  MOD_RES (21), (22), (23), (24), (25): Xaa is A or G
  MOD_RES (26), (27), (28), (29): Xaa is A or G or is absent

SEQ ID NO: 39777 - protein, 41 aa, Artificial Sequence; identical to SEQ ID NO: 7031
  GFR-binding peptide
  MOD_RES (5), (6), (39), (41): Xaa is C or S
  MOD_RES (20), (21), (22), (23), (24): Xaa is A or G
  MOD_RES (25), (26), (27), (28): Xaa is A or G or is absent

SEQ ID NO: 39778 - protein, 31 aa, Artificial Sequence; identical to SEQ ID NO: 16097
  GFR-binding peptide
  MOD_RES (31), (31): Xaa is C or S

SEQ ID NO: 39779 - protein, 36 aa, Artificial Sequence; identical to SEQ ID NO: 8800
  GFR-binding peptide
  MOD_RES (3), (4): Xaa is C or S
  MOD_RES (18), (19), (20), (21), (22): Xaa is A or G
  MOD_RES (23), (24), (25), (26): Xaa is A or G or is absent

SEQ ID NO: 39780 - protein, 39 aa, Artificial Sequence; identical to SEQ ID NO: 16099
  GFR-binding peptide
  MOD_RES (4), (5), (39): Xaa is C or S
  MOD_RES (19), (20), (21), (22), (23): Xaa is A or G
  MOD_RES (24), (25), (26), (27): Xaa is A or G or is absent

SEQ ID NO: 39781 - protein, 35 aa, Artificial Sequence; identical to SEQ ID NO: 16100
  GFR-binding peptide
  MOD_RES (1), (33), (35): Xaa is C or S

SEQ ID NO: 39782 - protein, 36 aa, Artificial Sequence; identical to SEQ ID NO: 14360
  GFR-binding peptide
  MOD_RES (2), (36): Xaa is C or S
  MOD_RES (16), (17), (18), (19), (20): Xaa is A or G
  MOD_RES (21), (22), (23), (24): Xaa is A or G or is absent

SEQ ID NO: 39783 - protein, 34 aa, Artificial Sequence; identical to SEQ ID NO: 8802
  GFR-binding peptide
  MOD_RES (1), (2): Xaa is C or S
  MOD_RES (16), (17), (18), (19), (20): Xaa is A or G
  MOD_RES (21), (22), (23), (24): Xaa is A or G or is absent

SEQ ID NO: 39784 - protein, 38 aa, Artificial Sequence; identical to SEQ ID NO: 16102
  GFR-binding peptide
  MOD_RES (1), (2), (36), (38): Xaa is C or S
  MOD_RES (16), (17), (18), (19), (20): Xaa is A or G
  MOD_RES (21), (22), (23), (24): Xaa is A or G or is absent

SEQ ID NO: 39785 - protein, 38 aa, Artificial Sequence; identical to SEQ ID NO: 16103
  GFR-binding peptide
  MOD_RES (5), (6), (38): Xaa is C or S

SEQ ID NO: 39786 - protein, 40 aa, Artificial Sequence; identical to SEQ ID NO: 16104
  GFR-binding peptide
  MOD_RES (6), (40): Xaa is C or S
  MOD_RES (20), (21), (22), (23), (24): Xaa is A or G
  MOD_RES (25), (26), (27), (28): Xaa is A or G or is absent

SEQ ID NO: 39787 - protein, 37 aa, Artificial Sequence; identical to SEQ ID NO: 14362
  GFR-binding peptide
  MOD_RES (5), (6): Xaa is C or S

SEQ ID NO: 39788 - protein, 37 aa, Artificial Sequence; identical to SEQ ID NO: 16105
  GFR-binding peptide
  MOD_RES (1), (2), (34), (36): Xaa is C or S

SEQ ID NO: 39789 - protein, 34 aa, Artificial Sequence; identical to SEQ ID NO: 16106
  GFR-binding peptide
  MOD_RES (33), (33): Xaa is C or S
  MOD_RES (14), (15), (16), (17), (18): Xaa is A or G
  MOD_RES (19), (20), (21), (22): Xaa is A or G or is absent

SEQ ID NO: 39790 - protein, 32 aa, Artificial Sequence; identical to SEQ ID NO: 16107
  GFR-binding peptide
  MOD_RES (1), (32): Xaa is C or S

SEQ ID NO: 39791 - protein, 37 aa, Artificial Sequence; identical to SEQ ID NO: 14363
  GFR-binding peptide
  MOD_RES (34), (36): Xaa is C or S
  MOD_RES (14), (15), (16), (17), (18): Xaa is A or G
  MOD_RES (19), (20), (21), (22): Xaa is A or G or is absent

SEQ ID NO: 39792 - protein, 36 aa, Artificial Sequence; identical to SEQ ID NO: 14364
  GFR-binding peptide
  MOD_RES (2), (3), (35): Xaa is C or S

SEQ ID NO: 39793 - protein, 44 aa, Artificial Sequence; identical to SEQ ID NO: 8808
  GFR-binding peptide
  MOD_RES (6), (7), (41), (43): Xaa is C or S
  MOD_RES (21), (22), (23), (24), (25): Xaa is A or G
  MOD_RES (26), (27), (28), (29): Xaa is A or G or is absent

SEQ ID NO: 39794 - protein, 42 aa, Artificial Sequence; identical to SEQ ID NO: 8809
  GFR-binding peptide
  MOD_RES (5), (6), (39), (41): Xaa is C or S
  MOD_RES (20), (21), (22), (23), (24): Xaa is A or G
  MOD_RES (25), (26), (27), (28): Xaa is A or G or is absent

SEQ ID NO: 39795 - protein, 37 aa, Artificial Sequence; identical to SEQ ID NO: 14365
  GFR-binding peptide
  MOD_RES (4), (5), (36): Xaa is C or S

SEQ ID NO: 39796 - protein, 39 aa, Artificial Sequence; identical to SEQ ID NO: 7043
  GFR-binding peptide
  MOD_RES (5), (6): Xaa is C or S
  MOD_RES (20), (21), (22), (23), (24): Xaa is A or G
  MOD_RES (25), (26), (27), (28): Xaa is A or G or is absent

SEQ ID NO: 39797 - protein, 34 aa, Artificial Sequence; identical to SEQ ID NO: 7044
  GFR-binding peptide
  MOD_RES (1), (2): Xaa is C or S
  MOD_RES (16), (17), (18), (19), (20): Xaa is A or G
  MOD_RES (21), (22), (23), (24): Xaa is A or G or is absent

SEQ ID NO: 39798 - protein, 39 aa, Artificial Sequence; identical to SEQ ID NO: 16112
  GFR-binding peptide
  MOD_RES (3), (4), (38): Xaa is C or S
  MOD_RES (18), (19), (20), (21), (22): Xaa is A or G
  MOD_RES (23), (24), (25), (26): Xaa is A or G or is absent

SEQ ID NO: 39799 - protein, 35 aa, Artificial Sequence; identical to SEQ ID NO: 14369
  GFR-binding peptide
  MOD_RES (1), (35): Xaa is C or S
  MOD_RES (15), (16), (17), (18), (19): Xaa is A or G
  MOD_RES (20), (21), (22), (23): Xaa is A or G or is absent

SEQ ID NO: 39800 - protein, 34 aa, Artificial Sequence; identical to SEQ ID NO: 14370
  GFR-binding peptide
  MOD_RES (1), (34): Xaa is C or S
  MOD_RES (15), (16), (17), (18), (19): Xaa is A or G
  MOD_RES (20), (21), (22), (23): Xaa is A or G or is absent

SEQ ID NO: 39801 - protein, 42 aa, Artificial Sequence; identical to SEQ ID NO: 16115
  GFR-binding peptide
  MOD_RES (4), (5), (39), (41): Xaa is C or S
  MOD_RES (19), (20), (21), (22), (23): Xaa is A or G
  MOD_RES (24), (25), (26), (27): Xaa is A or G or is absent

SEQ ID NO: 39802 - protein, 34 aa, Artificial Sequence; identical to SEQ ID NO: 14372
  GFR-binding peptide
  MOD_RES (3), (4): Xaa is C or S

SEQ ID NO: 39803 - protein, 38 aa, Artificial Sequence; identical to SEQ ID NO: 8816
  GFR-binding peptide
  MOD_RES (4), (5), (37): Xaa is C or S

SEQ ID NO: 39804 - protein, 41 aa, Artificial Sequence; identical to SEQ ID NO: 14373
  GFR-binding peptide
  MOD_RES (6), (40): Xaa is C or S
  MOD_RES (20), (21), (22), (23), (24): Xaa is A or G
  MOD_RES (25), (26), (27), (28): Xaa is A or G or is absent

SEQ ID NO: 39805 - protein, 33 aa, Artificial Sequence; identical to SEQ ID NO: 8817
  GFR-binding peptide
  MOD_RES (14), (15), (16), (17), (18): Xaa is A or G
  MOD_RES (19), (20), (21), (22): Xaa is A or G or is absent

SEQ ID NO: 39806 - protein, 36 aa, Artificial Sequence; identical to SEQ ID NO: 16120
  GFR-binding peptide
  MOD_RES (1), (34), (36): Xaa is C or S
  MOD_RES (15), (16), (17), (18), (19): Xaa is A or G
  MOD_RES (20), (21), (22), (23): Xaa is A or G or is absent

SEQ ID NO: 39807 - protein, 39 aa, Artificial Sequence; identical to SEQ ID NO: 14375
  GFR-binding peptide
  MOD_RES (6), (7): Xaa is C or S
  MOD_RES (21), (22), (23), (24), (25): Xaa is A or G
  MOD_RES (26), (27), (28), (29): Xaa is A or G or is absent

SEQ ID NO: 39808 - protein, 35 aa, Artificial Sequence; identical to SEQ ID NO: 16121
  GFR-binding peptide
  MOD_RES (2), (3), (35): Xaa is C or S

SEQ ID NO: 39809 - protein, 34 aa, Artificial Sequence; identical to SEQ ID NO: 16122
  GFR-binding peptide
  MOD_RES (1), (2), (34): Xaa is C or S

SEQ ID NO: 39810 - protein, 40 aa, Artificial Sequence; identical to SEQ ID NO: 14376
  GFR-binding peptide
  MOD_RES (6), (7), (40): Xaa is C or S
  MOD_RES (21), (22), (23), (24), (25): Xaa is A or G
  MOD_RES (26), (27), (28), (29): Xaa is A or G or is absent

SEQ ID NO: 39811 - protein, 36 aa, Artificial Sequence; identical to SEQ ID NO: 14377
  GFR-binding peptide
  MOD_RES (3), (4), (36): Xaa is C or S

SEQ ID NO: 39812 - protein, 33 aa, Artificial Sequence; identical to SEQ ID NO: 16123
  GFR-binding peptide
  MOD_RES (1), (1): Xaa is C or S
  MOD_RES (15), (16), (17), (18), (19): Xaa is A or G
  MOD_RES (20), (21), (22), (23): Xaa is A or G or is absent

SEQ ID NO: 39813 - protein, 40 aa, Artificial Sequence; identical to SEQ ID NO: 16124
  GFR-binding peptide
  MOD_RES (2), (3), (37), (39): Xaa is C or S
  MOD_RES (17), (18), (19), (20), (21): Xaa is A or G
  MOD_RES (22), (23), (24), (25): Xaa is A or G or is absent

SEQ ID NO: 39814 - protein, 39 aa, Artificial Sequence; identical to SEQ ID NO: 14379
  GFR-binding peptide
  MOD_RES (6), (7), (39): Xaa is C or S

SEQ ID NO: 39815 - protein, 35 aa, Artificial Sequence; identical to SEQ ID NO: 14380
  GFR-binding peptide
  MOD_RES (1), (34): Xaa is C or S
  MOD_RES (15), (16), (17), (18), (19): Xaa is A or G
  MOD_RES (20), (21), (22), (23): Xaa is A or G or is absent

SEQ ID NO: 39816 - protein, 36 aa, Artificial Sequence; identical to SEQ ID NO: 14381
  GFR-binding peptide
  MOD_RES (3), (4): Xaa is C or S
  MOD_RES (18), (19), (20), (21), (22): Xaa is A or G
  MOD_RES (23), (24), (25), (26): Xaa is A or G or is absent

SEQ ID NO: 39817 - protein, 41 aa, Artificial Sequence; identical to SEQ ID NO: 16126
  GFR-binding peptide
  MOD_RES (5), (39), (41): Xaa is C or S
  MOD_RES (19), (20), (21), (22), (23): Xaa is A or G
  MOD_RES (24), (25), (26), (27): Xaa is A or G or is absent

SEQ ID NO: 39818 - protein, 31 aa, Artificial Sequence; identical to SEQ ID NO: 16127
  GFR-binding peptide
  MOD_RES (1), (1): Xaa is C or S

SEQ ID NO: 39819 - protein, 40 aa, Artificial Sequence; identical to SEQ ID NO: 16128
  GFR-binding peptide
  MOD_RES (3), (4), (38), (40): Xaa is C or S
  MOD_RES (18), (19), (20), (21), (22): Xaa is A or G
  MOD_RES (23), (24), (25), (26): Xaa is A or G or is absent

SEQ ID NO: 39820 - protein, 38 aa, Artificial Sequence; identical to SEQ ID NO: 16129
  GFR-binding peptide
  MOD_RES (5), (6), (38): Xaa is C or S

SEQ ID NO: 39821 - protein, 39 aa, Artificial Sequence; identical to SEQ ID NO: 8823
  GFR-binding peptide
  MOD_RES (6), (7), (39): Xaa is C or S

SEQ ID NO: 39822 - protein, 36 aa, Artificial Sequence; identical to SEQ ID NO: 8824
  GFR-binding peptide
  MOD_RES (1), (2), (33), (35): Xaa is C or S

SEQ ID NO: 39823 - protein, 39 aa, Artificial Sequence; identical to SEQ ID NO: 14383
  GFR-binding peptide
  MOD_RES (5), (6), (38): Xaa is C or S

SEQ ID NO: 39824 - protein, 42 aa, Artificial Sequence; identical to SEQ ID NO: 7063
  GFR-binding peptide
  MOD_RES (6), (7), (39), (41): Xaa is C or S

SEQ ID NO: 39825 - protein, 35 aa, Artificial Sequence; identical to SEQ ID NO: 14386
  GFR-binding peptide
  MOD_RES (34), (34): Xaa is C or S
  MOD_RES (14), (15), (16), (17), (18): Xaa is A or G
  MOD_RES (19), (20), (21), (22): Xaa is A or G or is absent

SEQ ID NO: 39826 - protein, 38 aa, Artificial Sequence; identical to SEQ ID NO: 16136
  GFR-binding peptide
  MOD_RES (4), (5): Xaa is C or S
  MOD_RES (19), (20), (21), (22), (23): Xaa is A or G
  MOD_RES (24), (25), (26), (27): Xaa is A or G or is absent

SEQ ID NO: 39827 - protein, 33 aa, Artificial Sequence; identical to SEQ ID NO: 16137
  GFR-binding peptide
  MOD_RES (2), (3): Xaa is C or S

SEQ ID NO: 39828 - protein, 35 aa, Artificial Sequence; identical to SEQ ID NO: 16138
  GFR-binding peptide
  MOD_RES (2), (3), (34): Xaa is C or S

SEQ ID NO: 39829 - protein, 37 aa, Artificial Sequence; identical to SEQ ID NO: 14387
  GFR-binding peptide
  MOD_RES (2), (36): Xaa is C or S
  MOD_RES (16), (17), (18), (19), (20): Xaa is A or G
  MOD_RES (21), (22), (23), (24): Xaa is A or G or is absent

SEQ ID NO: 39830 - protein, 38 aa, Artificial Sequence; identical to SEQ ID NO: 16139
  GFR-binding peptide
  MOD_RES (4), (36), (38): Xaa is C or S

SEQ ID NO: 39831 - protein, 36 aa, Artificial Sequence; identical to SEQ ID NO: 8830
  GFR-binding peptide
  MOD_RES (2), (3), (35): Xaa is C or S

SEQ ID NO: 39832 - protein, 39 aa, Artificial Sequence; identical to SEQ ID NO: 16141
  GFR-binding peptide
  MOD_RES (3), (4), (38): Xaa is C or S
  MOD_RES (18), (19), (20), (21), (22): Xaa is A or G
  MOD_RES (23), (24), (25), (26): Xaa is A or G or is absent

SEQ ID NO: 39833 - protein, 39 aa, Artificial Sequence; identical to SEQ ID NO: 16143
  GFR-binding peptide
  MOD_RES (5), (6): Xaa is C or S
  MOD_RES (20), (21), (22), (23), (24): Xaa is A or G
  MOD_RES (25), (26), (27), (28): Xaa is A or G or is absent

SEQ ID NO: 39834 - protein, 37 aa, Artificial Sequence; identical to SEQ ID NO: 14390
  GFR-binding peptide
  MOD_RES (1), (2), (34), (36): Xaa is C or S

SEQ ID NO: 39835 - protein, 40 aa, Artificial Sequence; identical to SEQ ID NO: 14391
  GFR-binding peptide
  MOD_RES (5), (6), (38), (40): Xaa is C or S

SEQ ID NO: 39836 - protein, 35 aa, Artificial Sequence; identical to SEQ ID NO: 16146
  GFR-binding peptide
  MOD_RES (3), (4): Xaa is C or S

SEQ ID NO: 39837 - protein, 39 aa, Artificial Sequence; identical to SEQ ID NO: 16147
  GFR-binding peptide
  MOD_RES (6), (7): Xaa is C or S
  MOD_RES (21), (22), (23), (24), (25): Xaa is A or G
  MOD_RES (26), (27), (28), (29): Xaa is A or G or is absent

SEQ ID NO: 39838 - protein, 36 aa, Artificial Sequence; identical to SEQ ID NO: 16148
  GFR-binding peptide
  MOD_RES (3), (4), (35): Xaa is C or S

SEQ ID NO: 39839 - protein, 40 aa, Artificial Sequence; identical to SEQ ID NO: 16149
  GFR-binding peptide
  MOD_RES (5), (6), (40): Xaa is C or S
  MOD_RES (20), (21), (22), (23), (24): Xaa is A or G
  MOD_RES (25), (26), (27), (28): Xaa is A or G or is absent

SEQ ID NO: 39840 - protein, 36 aa, Artificial Sequence; identical to SEQ ID NO: 14392
  GFR-binding peptide
  MOD_RES (3), (4): Xaa is C or S
  MOD_RES (18), (19), (20), (21), (22): Xaa is A or G
  MOD_RES (23), (24), (25), (26): Xaa is A or G or is absent

SEQ ID NO: 39841 - protein, 37 aa, Artificial Sequence; identical to SEQ ID NO: 8842
  GFR-binding peptide
  MOD_RES (3), (4): Xaa is C or S
  MOD_RES (18), (19), (20), (21), (22): Xaa is A or G
  MOD_RES (23), (24), (25), (26): Xaa is A or G or is absent

SEQ ID NO: 39842 - protein, 34 aa, Artificial Sequence; identical to SEQ ID NO: 16152
  GFR-binding peptide
  MOD_RES (1), (2): Xaa is C or S
  MOD_RES (16), (17), (18), (19), (20): Xaa is A or G
  MOD_RES (21), (22), (23), (24): Xaa is A or G or is absent

SEQ ID NO: 39843 - protein, 33 aa, Artificial Sequence; identical to SEQ ID NO: 7082
  GFR-binding peptide
  MOD_RES (2), (3): Xaa is C or S

SEQ ID NO: 39844 - protein, 35 aa, Artificial Sequence; identical to SEQ ID NO: 14395
  GFR-binding peptide
  MOD_RES (1), (33), (35): Xaa is C or S

SEQ ID NO: 39845 - protein, 32 aa, Artificial Sequence; identical to SEQ ID NO: 8845
  GFR-binding peptide
  MOD_RES (1), (2): Xaa is C or S

SEQ ID NO: 39846 - protein, 35 aa, Artificial Sequence; identical to SEQ ID NO: 14396
  GFR-binding peptide
  MOD_RES (2), (2): Xaa is C or S
  MOD_RES (16), (17), (18), (19), (20): Xaa is A or G
  MOD_RES (21), (22), (23), (24): Xaa is A or G or is absent

SEQ ID NO: 39847 - protein, 40 aa, Artificial Sequence; identical to SEQ ID NO: 14397
  GFR-binding peptide
  MOD_RES (4), (5), (39): Xaa is C or S
  MOD_RES (19), (20), (21), (22), (23): Xaa is A or G
  MOD_RES (24), (25), (26), (27): Xaa is A or G or is absent

SEQ ID NO: 39848 - protein, 33 aa, Artificial Sequence; identical to SEQ ID NO: 16154
  GFR-binding peptide
  MOD_RES (1), (33): Xaa is C or S

SEQ ID NO: 39849 - protein, 36 aa, Artificial Sequence; identical to SEQ ID NO: 14398
  GFR-binding peptide
  MOD_RES (5), (6): Xaa is C or S

SEQ ID NO: 39850 - protein, 36 aa, Artificial Sequence
  GFR-binding peptide
  MOD_RES (1), (2), (35): Xaa is C or S
  MOD_RES (16), (17), (18), (19), (20): Xaa is A or G
  MOD_RES (21), (22), (23), (24): Xaa is A or G or is absent
XXVSQDLEPLTILYYXXXXXXXXXEQLSNMIVKSXK

SEQ ID NO: 39851 - protein, 36 aa, Artificial Sequence; identical to SEQ ID NO: 16156
  GFR-binding peptide
  MOD_RES (3), (4), (36): Xaa is C or S

SEQ ID NO: 39852 - protein, 41 aa, Artificial Sequence; identical to SEQ ID NO: 14400
  GFR-binding peptide
  MOD_RES (5), (6), (38), (40): Xaa is C or S

SEQ ID NO: 39853 - protein, 40 aa, Artificial Sequence; identical to SEQ ID NO: 14401
  GFR-binding peptide
  MOD_RES (6), (7), (38), (40): Xaa is C or S

SEQ ID NO: 39854 - protein, 42 aa, Artificial Sequence; identical to SEQ ID NO: 14402
  GFR-binding peptide
  MOD_RES (6), (7), (40), (42): Xaa is C or S
  MOD_RES (21), (22), (23), (24), (25): Xaa is A or G
  MOD_RES (26), (27), (28), (29): Xaa is A or G or is absent

SEQ ID NO: 39855 - protein, 33 aa, Artificial Sequence; identical to SEQ ID NO: 16157
  GFR-binding peptide
  MOD_RES (1), (32): Xaa is C or S

SEQ ID NO: 39856 - protein, 37 aa, Artificial Sequence; identical to SEQ ID NO: 14404
  GFR-binding peptide
  MOD_RES (3), (4): Xaa is C or S
  MOD_RES (18), (19), (20), (21), (22): Xaa is A or G
  MOD_RES (23), (24), (25), (26): Xaa is A or G or is absent

SEQ ID NO: 39857 - protein, 40 aa, Artificial Sequence; identical to SEQ ID NO: 14405
  GFR-binding peptide
  MOD_RES (6), (7), (38), (40): Xaa is C or S

SEQ ID NO: 39858 - protein, 34 aa, Artificial Sequence; identical to SEQ ID NO: 14406
  GFR-binding peptide
  MOD_RES (1), (34): Xaa is C or S
  MOD_RES (15), (16), (17), (18), (19): Xaa is A or G
  MOD_RES (20), (21), (22), (23): Xaa is A or G or is absent

SEQ ID NO: 39859 - protein, 36 aa, Artificial Sequence; identical to SEQ ID NO: 14407
  GFR-binding peptide
  MOD_RES (3), (4): Xaa is C or S
  MOD_RES (18), (19), (20), (21), (22): Xaa is A or G
  MOD_RES (23), (24), (25), (26): Xaa is A or G or is absent

SEQ ID NO: 39860 - protein, 42 aa, Artificial Sequence; identical to SEQ ID NO: 14409
  GFR-binding peptide
  MOD_RES (4), (5), (39), (41): Xaa is C or S
  MOD_RES (19), (20), (21), (22), (23): Xaa is A or G
  MOD_RES (24), (25), (26), (27): Xaa is A or G or is absent

SEQ ID NO: 39861 - protein, 34 aa, Artificial Sequence; identical to SEQ ID NO: 8851
  GFR-binding peptide
  MOD_RES (1), (2): Xaa is C or S
  MOD_RES (16), (17), (18), (19), (20): Xaa is A or G
  MOD_RES (21), (22), (23), (24): Xaa is A or G or is absent

SEQ ID NO: 39862 - protein, 40 aa, Artificial Sequence; identical to SEQ ID NO: 16159
  GFR-binding peptide
  MOD_RES (2), (3), (37), (39): Xaa is C or S
  MOD_RES (17), (18), (19), (20), (21): Xaa is A or G
  MOD_RES (22), (23), (24), (25): Xaa is A or G or is absent

SEQ ID NO: 39863 - protein, 34 aa, Artificial Sequence; identical to SEQ ID NO: 16160
  GFR-binding peptide
  MOD_RES (2), (3): Xaa is C or S

SEQ ID NO: 39864 - protein, 38 aa, Artificial Sequence; identical to SEQ ID NO: 14410
  GFR-binding peptide
  MOD_RES (5), (6): Xaa is C or S
  MOD_RES (20), (21), (22), (23), (24): Xaa is A or G
  MOD_RES (25), (26), (27), (28): Xaa is A or G or is absent

SEQ ID NO: 39865 - protein, 35 aa, Artificial Sequence; identical to SEQ ID NO: 14411
  GFR-binding peptide
  MOD_RES (3), (4): Xaa is C or S

SEQ ID NO: 39866 - protein, 33 aa, Artificial Sequence; identical to SEQ ID NO: 8854
  GFR-binding peptide
  MOD_RES (14), (15), (16), (17), (18): Xaa is A or G
  MOD_RES (19), (20), (21), (22): Xaa is A or G or is absent

SEQ ID NO: 39867 - protein, 36 aa, Artificial Sequence; identical to SEQ ID NO: 14413
  GFR-binding peptide
  MOD_RES (3), (4): Xaa is C or S
  MOD_RES (18), (19), (20), (21), (22): Xaa is A or G
  MOD_RES (23), (24), (25), (26): Xaa is A or G or is absent

SEQ ID NO: 39868 - protein, 41 aa, Artificial Sequence; identical to SEQ ID NO: 14414
  GFR-binding peptide
  MOD_RES (6), (7), (40): Xaa is C or S
  MOD_RES (21), (22), (23), (24), (25): Xaa is A or G
  MOD_RES (26), (27), (28), (29): Xaa is A or G or is absent

SEQ ID NO: 39869 - protein, 35 aa, Artificial Sequence; identical to SEQ ID NO: 16162
  GFR-binding peptide
  MOD_RES (4), (5): Xaa is C or S

SEQ ID NO: 39870 - protein, 35 aa, Artificial Sequence; identical to SEQ ID NO: 14415
  GFR-binding peptide
  MOD_RES (1), (32), (34): Xaa is C or S

SEQ ID NO: 39871 - protein, 37 aa, Artificial Sequence; identical to SEQ ID NO: 14417
  GFR-binding peptide
  MOD_RES (2), (3), (36): Xaa is C or S
  MOD_RES (17), (18), (19), (20), (21): Xaa is A or G
  MOD_RES (22), (23), (24), (25): Xaa is A or G or is absent

SEQ ID NO: 39872 - protein, 33 aa, Artificial Sequence; identical to SEQ ID NO: 14418
  GFR-binding peptide
  MOD_RES (31), (33): Xaa is C or S

SEQ ID NO: 39873 - protein, 36 aa, Artificial Sequence; identical to SEQ ID NO: 8858
  GFR-binding peptide
  MOD_RES (3), (4), (35): Xaa is C or S

SEQ ID NO: 39874 - protein, 40 aa, Artificial Sequence
  GFR-binding peptide
  MOD_RES (6), (7), (40): Xaa is C or S
  MOD_RES (21), (22), (23), (24), (25): Xaa is A or G
  MOD_RES (26), (27), (28), (29): Xaa is A or G or is absent
ASASPXXVSQDLEPLTILYYXXXXXXXXXEQLSNMIVKSX

SEQ ID NO: 39875 - protein, 39 aa, Artificial Sequence; identical to SEQ ID NO: 16165
  GFR-binding peptide
  MOD_RES (2), (3), (37), (39): Xaa is C or S
  MOD_RES (17), (18), (19), (20), (21): Xaa is A or G
  MOD_RES (22), (23), (24), (25): Xaa is A or G or is absent

SEQ ID NO: 39876 - protein, 33 aa, Artificial Sequence; identical to SEQ ID NO: 16166
  GFR-binding peptide
  MOD_RES (14), (15), (16), (17), (18): Xaa is A or G
  MOD_RES (19), (20), (21), (22): Xaa is A or G or is absent

SEQ ID NO: 39877 - protein, 38 aa, Artificial Sequence; identical to SEQ ID NO: 14422
  GFR-binding peptide
  MOD_RES (2), (3), (36), (38): Xaa is C or S
  MOD_RES (17), (18), (19), (20), (21): Xaa is A or G
  MOD_RES (22), (23), (24), (25): Xaa is A or G or is absent

SEQ ID NO: 39878 - protein, 42 aa, Artificial Sequence; identical to SEQ ID NO: 16168
  GFR-binding peptide
  MOD_RES (4), (5), (39), (41): Xaa is C or S
  MOD_RES (19), (20), (21), (22), (23): Xaa is A or G
  MOD_RES (24), (25), (26), (27): Xaa is A or G or is absent

SEQ ID NO: 39879 - protein, 38 aa, Artificial Sequence; identical to SEQ ID NO: 16170
  GFR-binding peptide
  MOD_RES (5), (6): Xaa is C or S
  MOD_RES (20), (21), (22), (23), (24): Xaa is A or G
  MOD_RES (25), (26), (27), (28): Xaa is A or G or is absent

SEQ ID NO: 39880 - protein, 42 aa, Artificial Sequence; identical to SEQ ID NO: 7102
  GFR-binding peptide
  MOD_RES (6), (7), (39), (41): Xaa is C or S

SEQ ID NO: 39881 - protein, 35 aa, Artificial Sequence; identical to SEQ ID NO: 8868
  GFR-binding peptide
  MOD_RES (3), (4), (35): Xaa is C or S

SEQ ID NO: 39882 - protein, 36 aa, Artificial Sequence; identical to SEQ ID NO: 14424
  GFR-binding peptide
  MOD_RES (33), (35): Xaa is C or S
  MOD_RES (14), (15), (16), (17), (18): Xaa is A or G
  MOD_RES (19), (20), (21), (22): Xaa is A or G or is absent

SEQ ID NO: 39883 - protein, 39 aa, Artificial Sequence; identical to SEQ ID NO: 16172
  GFR-binding peptide
  MOD_RES (6), (7): Xaa is C or S
  MOD_RES (21), (22), (23), (24), (25): Xaa is A or G
  MOD_RES (26), (27), (28), (29): Xaa is A or G or is absent

SEQ ID NO: 39884 - protein, 37 aa, Artificial Sequence; identical to SEQ ID NO: 14425
  GFR-binding peptide
  MOD_RES (2), (3), (37): Xaa is C or S
  MOD_RES (17), (18), (19), (20), (21): Xaa is A or G
  MOD_RES (22), (23), (24), (25): Xaa is A or G or is absent

SEQ ID NO: 39885 - protein, 41 aa, Artificial Sequence; identical to SEQ ID NO: 16173
  GFR-binding peptide
  MOD_RES (6), (7), (39), (41): Xaa is C or S

SEQ ID NO: 39886 - protein, 35 aa, Artificial Sequence; identical to SEQ ID NO: 14426
  GFR-binding peptide
  MOD_RES (32), (34): Xaa is C or S

SEQ ID NO: 39887 - protein, 39 aa, Artificial Sequence; identical to SEQ ID NO: 16174
  GFR-binding peptide
  MOD_RES (3), (4), (36), (38): Xaa is C or S

SEQ ID NO: 39888 - protein, 39 aa, Artificial Sequence; identical to SEQ ID NO: 16175
  GFR-binding peptide
  MOD_RES (6), (7), (39): Xaa is C or S

SEQ ID NO: 39889 - protein, 32 aa, Artificial Sequence; identical to SEQ ID NO: 14429
  GFR-binding peptide
  MOD_RES (14), (15), (16), (17), (18): Xaa is A or G
  MOD_RES (19), (20), (21), (22): Xaa is A or G or is absent

SEQ ID NO: 39890 - protein, 43 aa, Artificial Sequence; identical to SEQ ID NO: 16177
  GFR-binding peptide
  MOD_RES (6), (7), (41), (43): Xaa is C or S
  MOD_RES (21), (22), (23), (24), (25): Xaa is A or G
  MOD_RES (26), (27), (28), (29): Xaa is A or G or is absent

SEQ ID NO: 39891 - protein, 33 aa, Artificial Sequence; identical to SEQ ID NO: 7110
  GFR-binding peptide
  MOD_RES (1), (32): Xaa is C or S

SEQ ID NO: 39892 - protein, 34 aa, Artificial Sequence; identical to SEQ ID NO: 16179
  GFR-binding peptide
  MOD_RES (31), (33): Xaa is C or S

SEQ ID NO: 39893 - protein, 35 aa, Artificial Sequence; identical to SEQ ID NO: 16180
  GFR-binding peptide
  MOD_RES (1), (35): Xaa is C or S
  MOD_RES (15), (16), (17), (18), (19): Xaa is A or G
  MOD_RES (20), (21), (22), (23): Xaa is A or G or is absent

SEQ ID NO: 39894 - protein, 36 aa, Artificial Sequence; identical to SEQ ID NO: 14431
  GFR-binding peptide
  MOD_RES (4), (5), (36): Xaa is C or S

SEQ ID NO: 39895 - protein, 43 aa, Artificial Sequence; identical to SEQ ID NO: 16181
  GFR-binding peptide
  MOD_RES (5), (6), (40), (42): Xaa is C or S
  MOD_RES (20), (21), (22), (23), (24): Xaa is A or G
  MOD_RES (25), (26), (27), (28): Xaa is A or G or is absent

SEQ ID NO: 39896 - protein, 36 aa, Artificial Sequence; identical to SEQ ID NO: 14432
  GFR-binding peptide
  MOD_RES (34), (36): Xaa is C or S
  MOD_RES (14), (15), (16), (17), (18): Xaa is A or G
  MOD_RES (19), (20), (21), (22): Xaa is A or G or is absent

SEQ ID NO: 39897 - protein, 35 aa, Artificial Sequence; identical to SEQ ID NO: 7112
  GFR-binding peptide
  MOD_RES (1), (35): Xaa is C or S
  MOD_RES (15), (16), (17), (18), (19): Xaa is A or G
  MOD_RES (20), (21), (22), (23): Xaa is A or G or is absent

SEQ ID NO: 39898 - protein, 33 aa, Artificial Sequence; identical to SEQ ID NO: 16182
  GFR-binding peptide
  MOD_RES (33), (33): Xaa is C or S
  MOD_RES (14), (15), (16), (17), (18): Xaa is A or G
  MOD_RES (19), (20), (21), (22): Xaa is A or G or is absent

SEQ ID NO: 39899 - protein, 36 aa, Artificial Sequence; identical to SEQ ID NO: 14435
  GFR-binding peptide
  MOD_RES (3), (4): Xaa is C or S
  MOD_RES (18), (19), (20), (21), (22): Xaa is A or G
  MOD_RES (23), (24), (25), (26): Xaa is A or G or is absent

SEQ ID NO: 39900 - protein, 40 aa, Artificial Sequence; identical to SEQ ID NO: 16183
  GFR-binding peptide
  MOD_RES (4), (5), (37), (39): Xaa is C or S

SEQ ID NO: 39901 - protein, 36 aa, Artificial Sequence; identical to SEQ ID NO: 14436
  GFR-binding peptide
  MOD_RES (2), (3): Xaa is C or S
  MOD_RES (17), (18), (19), (20), (21): Xaa is A or G
  MOD_RES (22), (23), (24), (25): Xaa is A or G or is absent

SEQ ID NO: 39902 - protein, 37 aa, Artificial Sequence; identical to SEQ ID NO: 16184
  GFR-binding peptide
  MOD_RES (4), (5), (37): Xaa is C or S

SEQ ID NO: 39903 - protein, 35 aa, Artificial Sequence; identical to SEQ ID NO: 16185
  GFR-binding peptide
  MOD_RES (1), (34): Xaa is C or S
  MOD_RES (15), (16), (17), (18), (19): Xaa is A or G
  MOD_RES (20), (21), (22), (23): Xaa is A or G or is absent

SEQ ID NO: 39904 - protein, 34 aa, Artificial Sequence; identical to SEQ ID NO: 16186
  GFR-binding peptide
  MOD_RES (1), (2), (34): Xaa is C or S

SEQ ID NO: 39905 - protein, 40 aa, Artificial Sequence; identical to SEQ ID NO: 16187
  GFR-binding peptide
  MOD_RES (2), (3), (37), (39): Xaa is C or S
  MOD_RES (17), (18), (19), (20), (21): Xaa is A or G
  MOD_RES (22), (23), (24), (25): Xaa is A or G or is absent

SEQ ID NO: 39906 - protein, 40 aa, Artificial Sequence; identical to SEQ ID NO: 16188
  GFR-binding peptide
  MOD_RES (4), (38), (40): Xaa is C or S
  MOD_RES (18), (19), (20), (21), (22): Xaa is A or G
  MOD_RES (23), (24), (25), (26): Xaa is A or G or is absent

SEQ ID NO: 39907 - protein, 38 aa, Artificial Sequence; identical to SEQ ID NO: 14437
  GFR-binding peptide
  MOD_RES (4), (5), (37): Xaa is C or S

SEQ ID NO: 39908 - protein, 34 aa, Artificial Sequence; identical to SEQ ID NO: 16190
  GFR-binding peptide
  MOD_RES (1), (2): Xaa is C or S
  MOD_RES (16), (17), (18), (19), (20): Xaa is A or G
  MOD_RES (21), (22), (23), (24): Xaa is A or G or is absent

SEQ ID NO: 39909 - protein, 32 aa, Artificial Sequence; identical to SEQ ID NO: 14438
  GFR-binding peptide
  MOD_RES (14), (15), (16), (17), (18): Xaa is A or G
  MOD_RES (19), (20), (21), (22): Xaa is A or G or is absent

SEQ ID NO: 39910 - protein, 33 aa, Artificial Sequence; identical to SEQ ID NO: 16191
  GFR-binding peptide
  MOD_RES (1), (1): Xaa is C or S
  MOD_RES (15), (16), (17), (18), (19): Xaa is A or G
  MOD_RES (20), (21), (22), (23): Xaa is A or G or is absent

SEQ ID NO: 39911 - protein, 41 aa, Artificial Sequence; identical to SEQ ID NO: 14439
  GFR-binding peptide
  MOD_RES (5), (6), (40): Xaa is C or S
  MOD_RES (20), (21), (22), (23), (24): Xaa is A or G
  MOD_RES (25), (26), (27), (28): Xaa is A or G or is absent

SEQ ID NO: 39912 - protein, 41 aa, Artificial Sequence; identical to SEQ ID NO: 7121
  GFR-binding peptide
  MOD_RES (5), (6), (39), (41): Xaa is C or S
  MOD_RES (20), (21), (22), (23), (24): Xaa is A or G
  MOD_RES (25), (26), (27), (28): Xaa is A or G or is absent

SEQ ID NO: 39913 - protein, 38 aa, Artificial Sequence; identical to SEQ ID NO: 14441
  GFR-binding peptide
  MOD_RES (1), (2), (36), (38): Xaa is C or S
  MOD_RES (16), (17), (18), (19), (20): Xaa is A or G
  MOD_RES (21), (22), (23), (24): Xaa is A or G or is absent

SEQ ID NO: 39914 - protein, 37 aa, Artificial Sequence; identical to SEQ ID NO: 16192
  GFR-binding peptide
  MOD_RES (2), (3), (37): Xaa is C or S
  MOD_RES (17), (18), (19), (20), (21): Xaa is A or G
  MOD_RES (22), (23), (24), (25): Xaa is A or G or is absent

SEQ ID NO: 39915 - protein, 39 aa, Artificial Sequence; identical to SEQ ID NO: 14442
  GFR-binding peptide
  MOD_RES (7), (39): Xaa is C or S

SEQ ID NO: 39916 - protein, 37 aa, Artificial Sequence; identical to SEQ ID NO: 8889
  GFR-binding peptide
  MOD_RES (1), (2), (35), (37): Xaa is C or S
  MOD_RES (16), (17), (18), (19), (20): Xaa is A or G
  MOD_RES (21), (22), (23), (24): Xaa is A or G or is absent

SEQ ID NO: 39917 - protein, 42 aa, Artificial Sequence; identical to SEQ ID NO: 14443
  GFR-binding peptide
  MOD_RES (5), (6), (40), (42): Xaa is C or S
  MOD_RES (20), (21), (22), (23), (24): Xaa is A or G
  MOD_RES (25), (26), (27), (28): Xaa is A or G or is absent

SEQ ID NO: 39918 - protein, 36 aa, Artificial Sequence; identical to SEQ ID NO: 16194
  GFR-binding peptide
  MOD_RES (4), (5), (36): Xaa is C or S

SEQ ID NO: 39919 - protein, 37 aa, Artificial Sequence; identical to SEQ ID NO: 16196
  GFR-binding peptide
  MOD_RES (2), (36): Xaa is C or S
  MOD_RES (16), (17), (18), (19), (20): Xaa is A or G
  MOD_RES (21), (22), (23), (24): Xaa is A or G or is absent

SEQ ID NO: 39920 - protein, 36 aa, Artificial Sequence; identical to SEQ ID NO: 14445
  GFR-binding peptide
  MOD_RES (1), (33), (35): Xaa is C or S

SEQ ID NO: 39921 - protein, 32 aa, Artificial Sequence; identical to SEQ ID NO: 16197
  GFR-binding peptide
  MOD_RES (1), (2): Xaa is C or S

SEQ ID NO: 39922 - protein, 39 aa, Artificial Sequence; identical to SEQ ID NO: 14447
  GFR-binding peptide
  MOD_RES (4), (5), (36), (38): Xaa is C or S

SEQ ID NO: 39923 - protein, 42 aa, Artificial Sequence; identical to SEQ ID NO: 14448
  GFR-binding peptide
  MOD_RES (6), (7), (39), (41): Xaa is C or S

SEQ ID NO: 39924 - protein, 37 aa, Artificial Sequence; identical to SEQ ID NO: 8895
  GFR-binding peptide
  MOD_RES (6), (7): Xaa is C or S

SEQ ID NO: 39925 - protein, 38 aa, Artificial Sequence; identical to SEQ ID NO: 14449
  GFR-binding peptide
  MOD_RES (1), (2), (35), (37): Xaa is C or S
  MOD_RES (16), (17), (18), (19), (20): Xaa is A or G
  MOD_RES (21), (22), (23), (24): Xaa is A or G or is absent

SEQ ID NO: 39926 - protein, 37 aa, Artificial Sequence; identical to SEQ ID NO: 16199
  GFR-binding peptide
  MOD_RES (2), (3), (36): Xaa is C or S
  MOD_RES (17), (18), (19), (20), (21): Xaa is A or G
  MOD_RES (22), (23), (24), (25): Xaa is A or G or is absent

SEQ ID NO: 39927 - protein, 32 aa, Artificial Sequence; identical to SEQ ID NO: 16200
  GFR-binding peptide
  MOD_RES (14), (15), (16), (17), (18): Xaa is A or G
  MOD_RES (19), (20), (21), (22): Xaa is A or G or is absent

SEQ ID NO: 39928 - protein, 33 aa, Artificial Sequence; identical to SEQ ID NO: 14450
  GFR-binding peptide
  MOD_RES (33), (33): Xaa is C or S
  MOD_RES (14), (15), (16), (17), (18): Xaa is A or G
  MOD_RES (19), (20), (21), (22): Xaa is A or G or is absent

SEQ ID NO: 39929 - protein, 38 aa, Artificial Sequence; identical to SEQ ID NO: 14451
  GFR-binding peptide
  MOD_RES (5), (6), (38): Xaa is C or S

SEQ ID NO: 39930 - protein, 38 aa, Artificial Sequence; identical to SEQ ID NO: 14452
  GFR-binding peptide
  MOD_RES (1), (2), (35), (37): Xaa is C or S
  MOD_RES (16), (17), (18), (19), (20): Xaa is A or G
  MOD_RES (21), (22), (23), (24): Xaa is A or G or is absent

SEQ ID NO: 39931 - protein, 37 aa, Artificial Sequence; identical to SEQ ID NO: 14453
  GFR-binding peptide
  MOD_RES (3), (4), (37): Xaa is C or S
  MOD_RES (18), (19), (20), (21), (22): Xaa is A or G
  MOD_RES (23), (24), (25), (26): Xaa is A or G or is absent

SEQ ID NO: 39932 - protein, 33 aa, Artificial Sequence; identical to SEQ ID NO: 14456
  GFR-binding peptide
  MOD_RES (1), (2): Xaa is C or S

SEQ ID NO: 39933 - protein, 36 aa, Artificial Sequence; identical to SEQ ID NO: 16204
  GFR-binding peptide
  MOD_RES (2), (3): Xaa is C or S
  MOD_RES (17), (18), (19), (20), (21): Xaa is A or G
  MOD_RES (22), (23), (24), (25): Xaa is A or G or is absent

SEQ ID NO: 39934 - protein, 31 aa, Artificial Sequence; identical to SEQ ID NO: 16205
  GFR-binding peptide

SEQ ID NO: 39935 - protein, 37 aa, Artificial Sequence; identical to SEQ ID NO: 14457
  GFR-binding peptide
  MOD_RES (2), (3), (35), (37): Xaa is C or S

SEQ ID NO: 39936 - protein, 37 aa, Artificial Sequence; identical to SEQ ID NO: 14459
  GFR-binding peptide
  MOD_RES (5), (6): Xaa is C or S

SEQ ID NO: 39937 - protein, 37 aa, Artificial Sequence; identical to SEQ ID NO: 14460
  GFR-binding peptide
  MOD_RES (34), (36): Xaa is C or S
  MOD_RES (14), (15), (16), (17), (18): Xaa is A or G
  MOD_RES (19), (20), (21), (22): Xaa is A or G or is absent

SEQ ID NO: 39938 - protein, 34 aa, Artificial Sequence; identical to SEQ ID NO: 16206
  GFR-binding peptide
  MOD_RES (32), (34): Xaa is C or S

SEQ ID NO: 39939 - protein, 42 aa, Artificial Sequence; identical to SEQ ID NO: 14461
  GFR-binding peptide
  MOD_RES (5), (6), (40), (42): Xaa is C or S
  MOD_RES (20), (21), (22), (23), (24): Xaa is A or G
  MOD_RES (25), (26), (27), (28): Xaa is A or G or is absent

SEQ ID NO: 39940 - protein, 35 aa, Artificial Sequence; identical to SEQ ID NO: 14462
  GFR-binding peptide
  MOD_RES (1), (2), (34): Xaa is C or S

SEQ ID NO: 39941 - protein, 37 aa, Artificial Sequence; identical to SEQ ID NO: 14463
  GFR-binding peptide
  MOD_RES (4), (5), (37): Xaa is C or S

SEQ ID NO: 39942 - protein, 37 aa, Artificial Sequence; identical to SEQ ID NO: 16207
  GFR-binding peptide
  MOD_RES (2), (3), (35), (37): Xaa is C or S

SEQ ID NO: 39943 - protein, 39 aa, Artificial Sequence; identical to SEQ ID NO: 14464
  GFR-binding peptide
  MOD_RES (6), (7), (39): Xaa is C or S

SEQ ID NO: 39944 - protein, 36 aa, Artificial Sequence; identical to SEQ ID NO: 14465
  GFR-binding peptide
  MOD_RES (2), (3), (34), (36): Xaa is C or S

SEQ ID NO: 39945 - protein, 37 aa, Artificial Sequence
  GFR-binding peptide
  MOD_RES (3), (4), (37): Xaa is C or S
  MOD_RES (18), (19), (20), (21), (22): Xaa is A or G
  MOD_RES (23), (24), (25), (26): Xaa is A or G or is absent
SPXXVSQDLEPLTILYYXXXXXXXXXEQLSNMIVKSX

SEQ ID NO: 39946 - protein, 38 aa, Artificial Sequence; identical to SEQ ID NO: 16210
  GFR-binding peptide
  MOD_RES (7), (7): Xaa is C or S

SEQ ID NO: 39947 - protein, 39 aa, Artificial Sequence; identical to SEQ ID NO: 14466
  GFR-binding peptide
  MOD_RES (6), (7): Xaa is C or S
  MOD_RES (21), (22), (23), (24), (25): Xaa is A or G
  MOD_RES (26), (27), (28), (29): Xaa is A or G or is absent

SEQ ID NO: 39948 - protein, 37 aa, Artificial Sequence; identical to SEQ ID NO: 14467
  GFR-binding peptide
  MOD_RES (4), (5): Xaa is C or S
  MOD_RES (19), (20), (21), (22), (23): Xaa is A or G
  MOD_RES (24), (25), (26), (27): Xaa is A or G or is absent

SEQ ID NO: 39949 - protein, 40 aa, Artificial Sequence; identical to SEQ ID NO: 16211
  GFR-binding peptide
  MOD_RES (3), (4), (37), (39): Xaa is C or S
  MOD_RES (18), (19), (20), (21), (22): Xaa is A or G
  MOD_RES (23), (24), (25), (26): Xaa is A or G or is absent

SEQ ID NO: 39950 - protein, 30 aa, Artificial Sequence; identical to SEQ ID NO: 14468
  GFR-binding peptide

SEQ ID NO: 39951 - protein, 38 aa, Artificial Sequence; identical to SEQ ID NO: 14469
  GFR-binding peptide
  MOD_RES (4), (5), (37): Xaa is C or S

SEQ ID NO: 39952 - protein, 40 aa, Artificial Sequence; identical to SEQ ID NO: 7150
  GFR-binding peptide
  MOD_RES (3), (4), (38), (40): Xaa is C or S
  MOD_RES (18), (19), (20), (21), (22): Xaa is A or G
  MOD_RES (23), (24), (25), (26): Xaa is A or G or is absent

SEQ ID NO: 39953 - protein, 39 aa, Artificial Sequence; identical to SEQ ID NO: 16213
  GFR-binding peptide
  MOD_RES (6), (7): Xaa is C or S
  MOD_RES (21), (22), (23), (24), (25): Xaa is A or G
  MOD_RES (26), (27), (28), (29): Xaa is A or G or is absent

SEQ ID NO: 39954 - protein, 41 aa, Artificial Sequence; identical to SEQ ID NO: 8913
  GFR-binding peptide
  MOD_RES (6), (7), (40): Xaa is C or S
  MOD_RES (21), (22), (23), (24), (25): Xaa is A or G
  MOD_RES (26), (27), (28), (29): Xaa is A or G or is absent

SEQ ID NO: 39955 - protein, 36 aa, Artificial Sequence; identical to SEQ ID NO: 14472
  GFR-binding peptide
  MOD_RES (1), (2), (35): Xaa is C or S
  MOD_RES (16), (17), (18), (19), (20): Xaa is A or G
  MOD_RES (21), (22), (23), (24): Xaa is A or G or is absent

SEQ ID NO: 39956 - protein, 39 aa, Artificial Sequence; identical to SEQ ID NO: 7159
  GFR-binding peptide
  MOD_RES (6), (7), (39): Xaa is C or S

SEQ ID NO: 39957 - protein, 36 aa, Artificial Sequence; identical to SEQ ID NO: 16218
  GFR-binding peptide
  MOD_RES (34), (36): Xaa is C or S
  MOD_RES (14), (15), (16), (17), (18): Xaa is A or G
  MOD_RES (19), (20), (21), (22): Xaa is A or G or is absent

SEQ ID NO: 39958 - protein, 33 aa, Artificial Sequence; identical to SEQ ID NO: 14475
  GFR-binding peptide
  MOD_RES (3), (3): Xaa is C or S

SEQ ID NO: 39959 - protein, 41 aa, Artificial Sequence; identical to SEQ ID NO: 16219
  GFR-binding peptide
  MOD_RES (3), (4), (38), (40): Xaa is C or S
  MOD_RES (18), (19), (20), (21), (22): Xaa is A or G
  MOD_RES (23), (24), (25), (26): Xaa is A or G or is absent

SEQ ID NO: 39960 - protein, 33 aa, Artificial Sequence; identical to SEQ ID NO: 16220
  GFR-binding peptide
  MOD_RES (32), (32): Xaa is C or S

SEQ ID NO: 39961 - protein, 38 aa, Artificial Sequence; identical to SEQ ID NO: 16221
  GFR-binding peptide
  MOD_RES (4), (5): Xaa is C or S
  MOD_RES (19), (20), (21), (22), (23): Xaa is A or G
  MOD_RES (24), (25), (26), (27): Xaa is A or G or is absent

SEQ ID NO: 39962 - protein, 38 aa, Artificial Sequence; identical to SEQ ID NO: 8920
  GFR-binding peptide
  MOD_RES (3), (4), (36), (38): Xaa is C or S

SEQ ID NO: 39963 - protein, 41 aa, Artificial Sequence; identical to SEQ ID NO: 14477
  GFR-binding peptide
  MOD_RES (6), (7), (39), (41): Xaa is C or S

SEQ ID NO: 39964 - protein, 33 aa, Artificial Sequence; identical to SEQ ID NO: 16223
  GFR-binding peptide
  MOD_RES (1), (33): Xaa is C or S

SEQ ID NO: 39965 - protein, 43 aa, Artificial Sequence; identical to SEQ ID NO: 14478
  GFR-binding peptide
  MOD_RES (5), (6), (40), (42): Xaa is C or S
  MOD_RES (20), (21), (22), (23), (24): Xaa is A or G
  MOD_RES (25), (26), (27), (28): Xaa is A or G or is absent

SEQ ID NO: 39966 - protein, 33 aa, Artificial Sequence; identical to SEQ ID NO: 8925
  GFR-binding peptide
  MOD_RES (1), (1): Xaa is C or S
  MOD_RES (15), (16), (17), (18), (19): Xaa is A or G
  MOD_RES (20), (21), (22), (23): Xaa is A or G or is absent

SEQ ID NO: 39967 - protein, 43 aa, Artificial Sequence; identical to SEQ ID NO: 14479
  GFR-binding peptide
  MOD_RES (6), (7), (41), (43): Xaa is C or S
  MOD_RES (21), (22), (23), (24), (25): Xaa is A or G
  MOD_RES (26), (27), (28), (29): Xaa is A or G or is absent

SEQ ID NO: 39968 - protein, 40 aa, Artificial Sequence; identical to SEQ ID NO: 8926
  GFR-binding peptide
  MOD_RES (5), (6), (38), (40): Xaa is C or S

SEQ ID NO: 39969 - protein, 33 aa, Artificial Sequence; identical to SEQ ID NO: 16226
  GFR-binding peptide
  MOD_RES (31), (33): Xaa is C or S

SEQ ID NO: 39970 - protein, 37 aa, Artificial Sequence; identical to SEQ ID NO: 7170
  GFR-binding peptide
  MOD_RES (2), (3), (36): Xaa is C or S
  MOD_RES (17), (18), (19), (20), (21): Xaa is A or G
  MOD_RES (22), (23), (24), (25): Xaa is A or G or is absent

SEQ ID NO: 39971 - protein, 33 aa, Artificial Sequence; identical to SEQ ID NO: 14482
  GFR-binding peptide
  MOD_RES (33), (33): Xaa is C or S
  MOD_RES (14), (15), (16), (17), (18): Xaa is A or G
  MOD_RES (19), (20), (21), (22): Xaa is A or G or is absent

SEQ ID NO: 39972 - protein, 37 aa, Artificial Sequence; identical to SEQ ID NO: 7171
  GFR-binding peptide
  MOD_RES (5), (6), (37): Xaa is C or S

SEQ ID NO: 39973 - protein, 33 aa, Artificial Sequence; identical to SEQ ID NO: 16230
  GFR-binding peptide
  MOD_RES (2), (3): Xaa is C or S

SEQ ID NO: 39974 - protein, 34 aa, Artificial Sequence; identical to SEQ ID NO: 16231
  GFR-binding peptide
  MOD_RES (1), (2): Xaa is C or S
  MOD_RES (16), (17), (18), (19), (20): Xaa is A or G
  MOD_RES (21), (22), (23), (24): Xaa is A or G or is absent

SEQ ID NO: 39975 - protein, 43 aa, Artificial Sequence; identical to SEQ ID NO: 16232
  GFR-binding peptide
  MOD_RES (5), (6), (40), (42): Xaa is C or S
  MOD_RES (20), (21), (22), (23), (24): Xaa is A or G
  MOD_RES (25), (26), (27), (28): Xaa is A or G or is absent

SEQ ID NO: 39976 - protein, 39 aa, Artificial Sequence; identical to SEQ ID NO: 8935
  GFR-binding peptide
  MOD_RES (3), (4), (37), (39): Xaa is C or S
  MOD_RES (18), (19), (20), (21), (22): Xaa is A or G
  MOD_RES (23), (24), (25), (26): Xaa is A or G or is absent

SEQ ID NO: 39977 - protein, 33 aa, Artificial Sequence; identical to SEQ ID NO: 16234
  GFR-binding peptide
  MOD_RES (32), (32): Xaa is C or S

SEQ ID NO: 39978 - protein, 39 aa, Artificial Sequence; identical to SEQ ID NO: 16235
  GFR-binding peptide
  MOD_RES (4), (5), (39): Xaa is C or S
  MOD_RES (19), (20), (21), (22), (23): Xaa is A or G
  MOD_RES (24), (25), (26), (27): Xaa is A or G or is absent

SEQ ID NO: 39979 - protein, 38 aa, Artificial Sequence; identical to SEQ ID NO: 16236
  GFR-binding peptide
  MOD_RES (1), (35), (37): Xaa is C or S
  MOD_RES (15), (16), (17), (18), (19): Xaa is A or G
  MOD_RES (20), (21), (22), (23): Xaa is A or G or is absent

SEQ ID NO: 39980 - protein, 36 aa, Artificial Sequence; identical to SEQ ID NO: 16238
  GFR-binding peptide
  MOD_RES (4), (5): Xaa is C or S

SEQ ID NO: 39981 - protein, 40 aa, Artificial Sequence; identical to SEQ ID NO: 8938
  GFR-binding peptide
  MOD_RES (6), (7): Xaa is C or S
  MOD_RES (21), (22), (23), (24), (25): Xaa is A or G
  MOD_RES (26), (27), (28), (29): Xaa is A or G or is absent

SEQ ID NO: 39982 - protein, 40 aa, Artificial Sequence; identical to SEQ ID NO: 14488
  GFR-binding peptide
  MOD_RES (6), (7), (39): Xaa is C or S

SEQ ID NO: 39983 - protein, 35 aa, Artificial Sequence; identical to SEQ ID NO: 16240
  GFR-binding peptide
  MOD_RES (3), (35): Xaa is C or S

SEQ ID NO: 39984 - protein, 43 aa, Artificial Sequence; identical to SEQ ID NO: 7185
  GFR-binding peptide
  MOD_RES (6), (7), (41), (43): Xaa is C or S
  MOD_RES (21), (22), (23), (24), (25): Xaa is A or G
  MOD_RES (26), (27), (28), (29): Xaa is A or G or is absent

SEQ ID NO: 39985 - protein, 32 aa, Artificial Sequence; identical to SEQ ID NO: 14490
  GFR-binding peptide
  MOD_RES (31), (31): Xaa is C or S

SEQ ID NO: 39986 - protein, 42 aa, Artificial Sequence; identical to SEQ ID NO: 16242
  GFR-binding peptide
  MOD_RES (6), (7), (39), (41): Xaa is C or S

SEQ ID NO: 39987 - protein, 38 aa, Artificial Sequence; identical to SEQ ID NO: 16243
  GFR-binding peptide
  MOD_RES (6), (7): Xaa is C or S

SEQ ID NO: 39988 - protein, 38 aa, Artificial Sequence; identical to SEQ ID NO: 16244
  GFR-binding peptide
  MOD_RES (1), (35), (37): Xaa is C or S
  MOD_RES (15), (16), (17), (18), (19): Xaa is A or G
  MOD_RES (20), (21), (22), (23): Xaa is A or G or is absent

SEQ ID NO: 39989 - protein, 32 aa, Artificial Sequence; identical to SEQ ID NO: 16245
  GFR-binding peptide
  MOD_RES (14), (15), (16), (17), (18): Xaa is A or G
  MOD_RES (19), (20), (21), (22): Xaa is A or G or is absent

SEQ ID NO: 39990 - protein, 38 aa, Artificial Sequence; identical to SEQ ID NO: 14492
  GFR-binding peptide
  MOD_RES (6), (7): Xaa is C or S

SEQ ID NO: 39991 - protein, 34 aa, Artificial Sequence; identical to SEQ ID NO: 14493
  GFR-binding peptide
  MOD_RES (1), (32), (34): Xaa is C or S

SEQ ID NO: 39992 - protein, 35 aa, Artificial Sequence; identical to SEQ ID NO: 14494
  GFR-binding peptide
  MOD_RES (4), (4): Xaa is C or S

SEQ ID NO: 39993 - protein, 35 aa, Artificial Sequence; identical to SEQ ID NO: 14495
  GFR-binding peptide
  MOD_RES (4), (5): Xaa is C or S

SEQ ID NO: 39994 - protein, 37 aa, Artificial Sequence; identical to SEQ ID NO: 7195
  GFR-binding peptide
  MOD_RES (1), (2), (34), (36): Xaa is C or S

SEQ ID NO: 39995 - protein, 36 aa, Artificial Sequence; identical to SEQ ID NO: 7197
  GFR-binding peptide
  MOD_RES (1), (2), (36): Xaa is C or S
  MOD_RES (16), (17), (18), (19), (20): Xaa is A or G
  MOD_RES (21), (22), (23), (24): Xaa is A or G or is absent

SEQ ID NO: 39996 - protein, 39 aa, Artificial Sequence; identical to SEQ ID NO: 14498
  GFR-binding peptide
  MOD_RES (3), (4), (38): Xaa is C or S
  MOD_RES (18), (19), (20), (21), (22): Xaa is A or G
  MOD_RES (23), (24), (25), (26): Xaa is A or G or is absent

SEQ ID NO: 39997 - protein, 39 aa, Artificial Sequence; identical to SEQ ID NO: 16248
  GFR-binding peptide
  MOD_RES (3), (4), (36), (38): Xaa is C or S

SEQ ID NO: 39998 - protein, 37 aa, Artificial Sequence; identical to SEQ ID NO: 7199
  GFR-binding peptide
  MOD_RES (1), (35), (37): Xaa is C or S
  MOD_RES (15), (16), (17), (18), (19): Xaa is A or G
  MOD_RES (20), (21), (22), (23): Xaa is A or G or is absent

SEQ ID NO: 39999 - protein, 34 aa, Artificial Sequence; identical to SEQ ID NO: 16249
  GFR-binding peptide
  MOD_RES (1), (2), (34): Xaa is C or S

SEQ ID NO: 40000 - protein, 33 aa, Artificial Sequence; identical to SEQ ID NO: 14500
  GFR-binding peptide
  MOD_RES (1), (1): Xaa is C or S
  MOD_RES (15), (16), (17), (18), (19): Xaa is A or G
  MOD_RES (20), (21), (22), (23): Xaa is A or G or is absent

SEQ ID NO: 40001 - protein, 31 aa, Artificial Sequence; identical to SEQ ID NO: 14501
  GFR-binding peptide

SEQ ID NO: 40002 - protein, 37 aa, Artificial Sequence; identical to SEQ ID NO: 7200
  GFR-binding peptide
  MOD_RES (3), (4), (35), (37): Xaa is C or S

SEQ ID NO: 40003 - protein, 35 aa, Artificial Sequence; identical to SEQ ID NO: 8957
  GFR-binding peptide
  MOD_RES (1), (33), (35): Xaa is C or S

SEQ ID NO: 40004 - protein, 39 aa, Artificial Sequence; identical to SEQ ID NO: 14503
  GFR-binding peptide
  MOD_RES (5), (6): Xaa is C or S
  MOD_RES (20), (21), (22), (23), (24): Xaa is A or G
  MOD_RES (25), (26), (27), (28): Xaa is A or G or is absent

SEQ ID NO: 40005 - protein, 40 aa, Artificial Sequence; identical to SEQ ID NO: 14504
  GFR-binding peptide
  MOD_RES (6), (7), (39): Xaa is C or S

SEQ ID NO: 40006 - protein, 40 aa, Artificial Sequence; identical to SEQ ID NO: 8959
  GFR-binding peptide
  MOD_RES (3), (4), (37), (39): Xaa is C or S
  MOD_RES (18), (19), (20), (21), (22): Xaa is A or G
  MOD_RES (23), (24), (25), (26): Xaa is A or G or is absent

SEQ ID NO: 40007 - protein, 35 aa, Artificial Sequence; identical to SEQ ID NO: 16254
  GFR-binding peptide
  MOD_RES (2), (3): Xaa is C or S
  MOD_RES (17), (18), (19), (20), (21): Xaa is A or G
  MOD_RES (22), (23), (24), (25): Xaa is A or G or is absent

SEQ ID NO: 40008 - protein, 36 aa, Artificial Sequence; identical to SEQ ID NO: 14506
  GFR-binding peptide
  MOD_RES (1), (35): Xaa is C or S
  MOD_RES (15), (16), (17), (18), (19): Xaa is A or G
  MOD_RES (20), (21), (22), (23): Xaa is A or G or is absent

SEQ ID NO: 40009 - protein, 38 aa, Artificial Sequence; identical to SEQ ID NO: 16255
  GFR-binding peptide
  MOD_RES (6), (7), (38): Xaa is C or S

SEQ ID NO: 40010 - protein, 42 aa, Artificial Sequence; identical to SEQ ID NO: 7204
  GFR-binding peptide
  MOD_RES (5), (6), (40), (42): Xaa is C or S
  MOD_RES (20), (21), (22), (23), (24): Xaa is A or G
  MOD_RES (25), (26), (27), (28): Xaa is A or G or is absent

SEQ ID NO: 40011 - protein, 40 aa, Artificial Sequence; identical to SEQ ID NO: 14508
  GFR-binding peptide
  MOD_RES (3), (4), (37), (39): Xaa is C or S
  MOD_RES (18), (19), (20), (21), (22): Xaa is A or G
  MOD_RES (23), (24), (25), (26): Xaa is A or G or is absent

SEQ ID NO: 40012 - protein, 32 aa, Artificial Sequence; identical to SEQ ID NO: 14509
  GFR-binding peptide
  MOD_RES (14), (15), (16), (17), (18): Xaa is A or G
  MOD_RES (19), (20), (21), (22): Xaa is A or G or is absent

SEQ ID NO: 40013 - protein, 39 aa, Artificial Sequence; identical to SEQ ID NO: 14510
  GFR-binding peptide
  MOD_RES (5), (6), (38): Xaa is C or S

SEQ ID NO: 40014 - protein, 35 aa, Artificial Sequence; identical to SEQ ID NO: 8968
  GFR-binding peptide
  MOD_RES (32), (34): Xaa is C or S

SEQ ID NO: 40015 - protein, 41 aa, Artificial Sequence; identical to SEQ ID NO: 14511
  GFR-binding peptide
  MOD_RES (6), (7), (41): Xaa is C or S
  MOD_RES (21), (22), (23), (24), (25): Xaa is A or G
  MOD_RES (26), (27), (28), (29): Xaa is A or G or is absent

SEQ ID NO: 40016 - protein, 43 aa, Artificial Sequence; identical to SEQ ID NO: 16258
  GFR-binding peptide
  MOD_RES (6), (7), (41), (43): Xaa is C or S
  MOD_RES (21), (22), (23), (24), (25): Xaa is A or G
  MOD_RES (26), (27), (28), (29): Xaa is A or G or is absent

SEQ ID NO: 40017 - protein, 35 aa, Artificial Sequence; identical to SEQ ID NO: 14513
  GFR-binding peptide
  MOD_RES (1), (2): Xaa is C or S
  MOD_RES (16), (17), (18), (19), (20): Xaa is A or G
  MOD_RES (21), (22), (23), (24): Xaa is A or G or is absent

SEQ ID NO: 40018 - protein, 38 aa, Artificial Sequence; identical to SEQ ID NO: 14514
  GFR-binding peptide
  MOD_RES (4), (5), (37): Xaa is C or S

SEQ ID NO: 40019 - protein, 36 aa, Artificial Sequence; identical to SEQ ID NO: 8971
  GFR-binding peptide
  MOD_RES (5), (6): Xaa is C or S

SEQ ID NO: 40020 - protein, 40 aa, Artificial Sequence; identical to SEQ ID NO: 16260
  GFR-binding peptide
  MOD_RES (5), (37), (39): Xaa is C or S

SEQ ID NO: 40021 - protein, 41 aa, Artificial Sequence; identical to SEQ ID NO: 16261
  GFR-binding peptide
  MOD_RES (4), (5), (38), (40): Xaa is C or S
  MOD_RES (19), (20), (21), (22), (23): Xaa is A or G
  MOD_RES (24), (25), (26), (27): Xaa is A or G or is absent

SEQ ID NO: 40022 - protein, 30 aa, Artificial Sequence; identical to SEQ ID NO: 16262
  GFR-binding peptide

SEQ ID NO: 40023 - protein, 41 aa, Artificial Sequence; identical to SEQ ID NO: 8972
  GFR-binding peptide
  MOD_RES (4), (5), (38), (40): Xaa is C or S
  MOD_RES (19), (20), (21), (22), (23): Xaa is A or G
  MOD_RES (24), (25), (26), (27): Xaa is A or G or is absent

SEQ ID NO: 40024 - protein, 37 aa, Artificial Sequence; identical to SEQ ID NO: 16264
  GFR-binding peptide
  MOD_RES (6), (7): Xaa is C or S

SEQ ID NO: 40025 - protein, 40 aa, Artificial Sequence; identical to SEQ ID NO: 14516
  GFR-binding peptide
  MOD_RES (5), (6), (38), (40): Xaa is C or S

SEQ ID NO: 40026 - protein, 39 aa, Artificial Sequence; identical to SEQ ID NO: 16265
  GFR-binding peptide
  MOD_RES (4), (38): Xaa is C or S
  MOD_RES (18), (19), (20), (21), (22): Xaa is A or G
  MOD_RES (23), (24), (25), (26): Xaa is A or G or is absent

SEQ ID NO: 40027 - protein, 41 aa, Artificial Sequence; identical to SEQ ID NO: 16266
  GFR-binding peptide
  MOD_RES (6), (7), (39), (41): Xaa is C or S

SEQ ID NO: 40028 - protein, 36 aa, Artificial Sequence; identical to SEQ ID NO: 7214
  GFR-binding peptide
  MOD_RES (1), (33), (35): Xaa is C or S

SEQ ID NO: 40029 - protein, 34 aa, Artificial Sequence; identical to SEQ ID NO: 16267
  GFR-binding peptide
  MOD_RES (1), (33): Xaa is C or S

SEQ ID NO: 40030 - protein, 36 aa, Artificial Sequence; identical to SEQ ID NO: 16268
  GFR-binding peptide
  MOD_RES (3), (4): Xaa is C or S
  MOD_RES (18), (19), (20), (21), (22): Xaa is A or G
  MOD_RES (23), (24), (25), (26): Xaa is A or G or is absent

SEQ ID NO: 40031 - protein, 39 aa, Artificial Sequence; identical to SEQ ID NO: 14518
  GFR-binding peptide
  MOD_RES (1), (2), (36), (38): Xaa is C or S
  MOD_RES (16), (17), (18), (19), (20): Xaa is A or G
  MOD_RES (21), (22), (23), (24): Xaa is A or G or is absent

SEQ ID NO: 40032 - protein, 38 aa, Artificial Sequence; identical to SEQ ID NO: 8980
  GFR-binding peptide
  MOD_RES (5), (6), (38): Xaa is C or S

SEQ ID NO: 40033 - protein, 38 aa, Artificial Sequence; identical to SEQ ID NO: 14520
  GFR-binding peptide
  MOD_RES (3), (4), (38): Xaa is C or S
  MOD_RES (18), (19), (20), (21), (22): Xaa is A or G
  MOD_RES (23), (24), (25), (26): Xaa is A or G or is absent

SEQ ID NO: 40034 - protein, 41 aa, Artificial Sequence; identical to SEQ ID NO: 16271
  GFR-binding peptide
  MOD_RES (6), (7), (39), (41): Xaa is C or S

SEQ ID NO: 40035 - protein, 32 aa, Artificial Sequence; identical to SEQ ID NO: 8981
  GFR-binding peptide
  MOD_RES (31), (31): Xaa is C or S

SEQ ID NO: 40036 - protein, 38 aa, Artificial Sequence; identical to SEQ ID NO: 16273
  GFR-binding peptide
  MOD_RES (2), (3), (36), (38): Xaa is C or S
  MOD_RES (17), (18), (19), (20), (21): Xaa is A or G
  MOD_RES (22), (23), (24), (25): Xaa is A or G or is absent

SEQ ID NO: 40037 - protein, 37 aa, Artificial Sequence; identical to SEQ ID NO: 16274
  GFR-binding peptide
  MOD_RES (1), (34), (36): Xaa is C or S
  MOD_RES (15), (16), (17), (18), (19): Xaa is A or G
  MOD_RES (20), (21), (22), (23): Xaa is A or G or is absent

SEQ ID NO: 40038 - protein, 42 aa, Artificial Sequence; identical to SEQ ID NO: 16275
  GFR-binding peptide
  MOD_RES (4), (5), (39), (41): Xaa is C or S
  MOD_RES (19), (20), (21), (22), (23): Xaa is A or G
  MOD_RES (24), (25), (26), (27): Xaa is A or G or is absent

SEQ ID NO: 40039 - protein, 34 aa, Artificial Sequence; identical to SEQ ID NO: 14521
  GFR-binding peptide
  MOD_RES (1), (34): Xaa is C or S
  MOD_RES (15), (16), (17), (18), (19): Xaa is A or G
  MOD_RES (20), (21), (22), (23): Xaa is A or G or is absent

SEQ ID NO: 40040 - protein, 36 aa, Artificial Sequence; identical to SEQ ID NO: 16276
  GFR-binding peptide
  MOD_RES (34), (36): Xaa is C or S
  MOD_RES (14), (15), (16), (17), (18): Xaa is A or G
  MOD_RES (19), (20), (21), (22): Xaa is A or G or is absent

SEQ ID NO: 40041 - protein, 36 aa, Artificial Sequence; identical to SEQ ID NO: 16277
  GFR-binding peptide
  MOD_RES (3), (4): Xaa is C or S
  MOD_RES (18), (19), (20), (21), (22): Xaa is A or G
  MOD_RES (23), (24), (25), (26): Xaa is A or G or is absent

SEQ ID NO: 40042 - protein, 36 aa, Artificial Sequence; identical to SEQ ID NO: 14522
  GFR-binding peptide
  MOD_RES (1), (2), (36): Xaa is C or S
  MOD_RES (16), (17), (18), (19), (20): Xaa is A or G
  MOD_RES (21), (22), (23), (24): Xaa is A or G or is absent

SEQ ID NO: 40043 - protein, 33 aa, Artificial Sequence; identical to SEQ ID NO: 16278
  GFR-binding peptide
  MOD_RES (2), (3): Xaa is C or S

SEQ ID NO: 40044 - protein, 35 aa, Artificial Sequence; identical to SEQ ID NO: 14523
  GFR-binding peptide
  MOD_RES (1), (32), (34): Xaa is C or S

SEQ ID NO: 40045 - protein, 30 aa, Artificial Sequence; identical to SEQ ID NO: 16279
  GFR-binding peptide

SEQ ID NO: 40046 - protein, 39 aa, Artificial Sequence; identical to SEQ ID NO: 14524
  GFR-binding peptide
  MOD_RES (2), (3), (37), (39): Xaa is C or S
  MOD_RES (17), (18), (19), (20), (21): Xaa is A or G
  MOD_RES (22), (23), (24), (25): Xaa is A or G or is absent

SEQ ID NO: 40047 - protein, 39 aa, Artificial Sequence; identical to SEQ ID NO: 14525
  GFR-binding peptide
  MOD_RES (1), (2), (36), (38): Xaa is C or S
  MOD_RES (16), (17), (18), (19), (20): Xaa is A or G
  MOD_RES (21), (22), (23), (24): Xaa is A or G or is absent

SEQ ID NO: 40048 - protein, 39 aa, Artificial Sequence; identical to SEQ ID NO: 16280
  GFR-binding peptide
  MOD_RES (5), (6), (37), (39): Xaa is C or S

SEQ ID NO: 40049 - protein, 38 aa, Artificial Sequence; identical to SEQ ID NO: 14526
  GFR-binding peptide
  MOD_RES (3), (35), (37): Xaa is C or S

SEQ ID NO: 40050 - protein, 39 aa, Artificial Sequence; identical to SEQ ID NO: 16282
  GFR-binding peptide
  MOD_RES (2), (3), (36), (38): Xaa is C or S
  MOD_RES (17), (18), (19), (20), (21): Xaa is A or G
  MOD_RES (22), (23), (24), (25): Xaa is A or G or is absent

SEQ ID NO: 40051 - protein, 39 aa, Artificial Sequence; identical to SEQ ID NO: 14527
  GFR-binding peptide
  MOD_RES (4), (38): Xaa is C or S
  MOD_RES (18), (19), (20), (21), (22): Xaa is A or G
  MOD_RES (23), (24), (25), (26): Xaa is A or G or is absent

SEQ ID NO: 40052 - protein, 39 aa, Artificial Sequence; identical to SEQ ID NO: 14528
  GFR-binding peptide
  MOD_RES (5), (6), (39): Xaa is C or S
  MOD_RES (20), (21), (22), (23), (24): Xaa is A or G
  MOD_RES (25), (26), (27), (28): Xaa is A or G or is absent

SEQ ID NO: 40053 - protein, 40 aa, Artificial Sequence; identical to SEQ ID NO: 14529
  GFR-binding peptide
  MOD_RES (4), (5), (37), (39): Xaa is C or S

SEQ ID NO: 40054 - protein, 36 aa, Artificial Sequence; identical to SEQ ID NO: 14530
  GFR-binding peptide
  MOD_RES (4), (36): Xaa is C or S

SEQ ID NO: 40055 - protein, 38 aa, Artificial Sequence; identical to SEQ ID NO: 16284
  GFR-binding peptide
  MOD_RES (3), (4), (38): Xaa is C or S
  MOD_RES (18), (19), (20), (21), (22): Xaa is A or G
  MOD_RES (23), (24), (25), (26): Xaa is A or G or is absent

SEQ ID NO: 40056 - protein, 38 aa, Artificial Sequence; identical to SEQ ID NO: 16285
  GFR-binding peptide
  MOD_RES (4), (38): Xaa is C or S
  MOD_RES (18), (19), (20), (21), (22): Xaa is A or G
  MOD_RES (23), (24), (25), (26): Xaa is A or G or is absent

SEQ ID NO: 40057 - protein, 40 aa, Artificial Sequence; identical to SEQ ID NO: 14531
  GFR-binding peptide
  MOD_RES (6), (7): Xaa is C or S
  MOD_RES (21), (22), (23), (24), (25): Xaa is A or G
  MOD_RES (26), (27), (28), (29): Xaa is A or G or is absent

SEQ ID NO: 40058 - protein, 36 aa, Artificial Sequence; identical to SEQ ID NO: 16287
  GFR-binding peptide
  MOD_RES (1), (35): Xaa is C or S
  MOD_RES (15), (16), (17), (18), (19): Xaa is A or G
  MOD_RES (20), (21), (22), (23): Xaa is A or G or is absent

SEQ ID NO: 40059 - protein, 33 aa, Artificial Sequence; identical to SEQ ID NO: 8997
  GFR-binding peptide
  MOD_RES (1), (33): Xaa is C or S

SEQ ID NO: 40060 - protein, 41 aa, Artificial Sequence; identical to SEQ ID NO: 16289
  GFR-binding peptide
  MOD_RES (6), (7), (39), (41): Xaa is C or S

SEQ ID NO: 40061 - protein, 34 aa, Artificial Sequence; identical to SEQ ID NO: 16290
  GFR-binding peptide
  MOD_RES (33), (33): Xaa is C or S
  MOD_RES (14), (15), (16), (17), (18): Xaa is A or G
  MOD_RES (19), (20), (21), (22): Xaa is A or G or is absent

SEQ ID NO: 40062 - protein, 37 aa, Artificial Sequence; identical to SEQ ID NO: 14532
  GFR-binding peptide
  MOD_RES (4), (5), (37): Xaa is C or S

SEQ ID NO: 40063 - protein, 36 aa, Artificial Sequence; identical to SEQ ID NO: 14533
  GFR-binding peptide
  MOD_RES (1), (35): Xaa is C or S
  MOD_RES (15), (16), (17), (18), (19): Xaa is A or G
  MOD_RES (20), (21), (22), (23): Xaa is A or G or is absent

SEQ ID NO: 40064 - protein, 33 aa, Artificial Sequence; identical to SEQ ID NO: 14534
  GFR-binding peptide
  MOD_RES (1), (2): Xaa is C or S

SEQ ID NO: 40065 - protein, 40 aa, Artificial Sequence; identical to SEQ ID NO: 14535
  GFR-binding peptide
  MOD_RES (5), (39): Xaa is C or S
  MOD_RES (19), (20), (21), (22), (23): Xaa is A or G
  MOD_RES (24), (25), (26), (27): Xaa is A or G or is absent

SEQ ID NO: 40066 - protein, 34 aa, Artificial Sequence; identical to SEQ ID NO: 14536
  GFR-binding peptide
  MOD_RES (1), (1): Xaa is C or S
  MOD_RES (15), (16), (17), (18), (19): Xaa is A or G
  MOD_RES (20), (21), (22), (23): Xaa is A or G or is absent

SEQ ID NO: 40067 - protein, 40 aa, Artificial Sequence; identical to SEQ ID NO: 7234
  GFR-binding peptide
  MOD_RES (6), (7), (40): Xaa is C or S
  MOD_RES (21), (22), (23), (24), (25): Xaa is A or G
  MOD_RES (26), (27), (28), (29): Xaa is A or G or is absent

SEQ ID NO: 40068 - protein, 36 aa, Artificial Sequence; identical to SEQ ID NO: 9001
  GFR-binding peptide
  MOD_RES (2), (3): Xaa is C or S
  MOD_RES (17), (18), (19), (20), (21): Xaa is A or G
  MOD_RES (22), (23), (24), (25): Xaa is A or G or is absent

SEQ ID NO: 40069 - protein, 37 aa, Artificial Sequence; identical to SEQ ID NO: 14538
  GFR-binding peptide
  MOD_RES (2), (3), (36): Xaa is C or S
  MOD_RES (17), (18), (19), (20), (21): Xaa is A or G
  MOD_RES (22), (23), (24), (25): Xaa is A or G or is absent

SEQ ID NO: 40070 - protein, 37 aa, Artificial Sequence; identical to SEQ ID NO: 14539
  GFR-binding peptide
  MOD_RES (5), (37): Xaa is C or S

SEQ ID NO: 40071 - protein, 37 aa, Artificial Sequence; identical to SEQ ID NO: 16292
  GFR-binding peptide
  MOD_RES (6), (7): Xaa is C or S

SEQ ID NO: 40072 - protein, 36 aa, Artificial Sequence; identical to SEQ ID NO: 14542
  GFR-binding peptide
  MOD_RES (5), (6): Xaa is C or S

SEQ ID NO: 40073 - protein, 33 aa, Artificial Sequence; identical to SEQ ID NO: 16293
  GFR-binding peptide
  MOD_RES (1), (2): Xaa is C or S

SEQ ID NO: 40074 - protein, 42 aa, Artificial Sequence; identical to SEQ ID NO: 14543
  GFR-binding peptide
  MOD_RES (5), (6), (39), (41): Xaa is C or S
  MOD_RES (20), (21), (22), (23), (24): Xaa is A or G
  MOD_RES (25), (26), (27), (28): Xaa is A or G or is absent

SEQ ID NO: 40075 - protein, 38 aa, Artificial Sequence; identical to SEQ ID NO: 16294
  GFR-binding peptide
  MOD_RES (5), (5): Xaa is C or S
  MOD_RES (19), (20), (21), (22), (23): Xaa is A or G
  MOD_RES (24), (25), (26), (27): Xaa is A or G or is absent

SEQ ID NO: 40076 - protein, 36 aa, Artificial Sequence; identical to SEQ ID NO: 7239
  GFR-binding peptide
  MOD_RES (3), (4): Xaa is C or S
  MOD_RES (18), (19), (20), (21), (22): Xaa is A or G
  MOD_RES (23), (24), (25), (26): Xaa is A or G or is absent

SEQ ID NO: 40077 - protein, 31 aa, Artificial Sequence; identical to SEQ ID NO: 9003
  GFR-binding peptide
  MOD_RES (1), (1): Xaa is C or S

SEQ ID NO: 40078 - protein, 35 aa, Artificial Sequence; identical to SEQ ID NO: 16296
  GFR-binding peptide
  MOD_RES (1), (2), (33), (35): Xaa is C or S

SEQ ID NO: 40079 - protein, 35 aa, Artificial Sequence; identical to SEQ ID NO: 14545
  GFR-binding peptide
  MOD_RES (4), (5): Xaa is C or S

SEQ ID NO: 40080 - protein, 36 aa, Artificial Sequence; identical to SEQ ID NO: 16297
  GFR-binding peptide
  MOD_RES (1), (35): Xaa is C or S
  MOD_RES (15), (16), (17), (18), (19): Xaa is A or G
  MOD_RES (20), (21), (22), (23): Xaa is A or G or is absent

SEQ ID NO: 40081 - protein, 38 aa, Artificial Sequence; identical to SEQ ID NO: 9005
  GFR-binding peptide
  MOD_RES (3), (4), (36), (38): Xaa is C or S

SEQ ID NO: 40082 - protein, 42 aa, Artificial Sequence; identical to SEQ ID NO: 16301
  GFR-binding peptide
  MOD_RES (4), (5), (39), (41): Xaa is C or S
  MOD_RES (19), (20), (21), (22), (23): Xaa is A or G
  MOD_RES (24), (25), (26), (27): Xaa is A or G or is absent

SEQ ID NO: 40083 - protein, 41 aa, Artificial Sequence; identical to SEQ ID NO: 14546
  GFR-binding peptide
  MOD_RES (6), (7), (41): Xaa is C or S
  MOD_RES (21), (22), (23), (24), (25): Xaa is A or G
  MOD_RES (26), (27), (28), (29): Xaa is A or G or is absent

SEQ ID NO: 40084 - protein, 41 aa, Artificial Sequence; identical to SEQ ID NO: 16302
  GFR-binding peptide
  MOD_RES (6), (7), (41): Xaa is C or S
  MOD_RES (21), (22), (23), (24), (25): Xaa is A or G
  MOD_RES (26), (27), (28), (29): Xaa is A or G or is absent

SEQ ID NO: 40085 - protein, 35 aa, Artificial Sequence; identical to SEQ ID NO: 16303
  GFR-binding peptide
  MOD_RES (2), (3), (34): Xaa is C or S

SEQ ID NO: 40086 - protein, 31 aa, Artificial Sequence; identical to SEQ ID NO: 16304
  GFR-binding peptide

SEQ ID NO: 40087 - protein, 36 aa, Artificial Sequence; identical to SEQ ID NO: 16305
  GFR-binding peptide
  MOD_RES (1), (2), (33), (35): Xaa is C or S

SEQ ID NO: 40088 - protein, 32 aa, Artificial Sequence; identical to SEQ ID NO: 9012
  GFR-binding peptide
  MOD_RES (1), (2): Xaa is C or S

SEQ ID NO: 40089 - protein, 34 aa, Artificial Sequence; identical to SEQ ID NO: 16307
  GFR-binding peptide
  MOD_RES (1), (34): Xaa is C or S
  MOD_RES (15), (16), (17), (18), (19): Xaa is A or G
  MOD_RES (20), (21), (22), (23): Xaa is A or G or is absent

SEQ ID NO: 40090 - protein, 44 aa, Artificial Sequence; identical to SEQ ID NO: 9014
  GFR-binding peptide
  MOD_RES (6), (7), (41), (43): Xaa is C or S
  MOD_RES (21), (22), (23), (24), (25): Xaa is A or G
  MOD_RES (26), (27), (28), (29): Xaa is A or G or is absent

SEQ ID NO: 40091 - protein, 33 aa, Artificial Sequence; identical to SEQ ID NO: 16310
  GFR-binding peptide
  MOD_RES (1), (33): Xaa is C or S

SEQ ID NO: 40092 - protein, 39 aa, Artificial Sequence; identical to SEQ ID NO: 16311
  GFR-binding peptide
  MOD_RES (7), (39): Xaa is C or S

SEQ ID NO: 40093 - protein, 43 aa, Artificial Sequence; identical to SEQ ID NO: 7248
  GFR-binding peptide
  MOD_RES (5), (6), (40), (42): Xaa is C or S
  MOD_RES (20), (21), (22), (23), (24): Xaa is A or G
  MOD_RES (25), (26), (27), (28): Xaa is A or G or is absent

SEQ ID NO: 40094 - protein, 38 aa, Artificial Sequence; identical to SEQ ID NO: 14548
  GFR-binding peptide
  MOD_RES (3), (4), (37): Xaa is C or S
  MOD_RES (18), (19), (20), (21), (22): Xaa is A or G
  MOD_RES (23), (24), (25), (26): Xaa is A or G or is absent

SEQ ID NO: 40095 - protein, 39 aa, Artificial Sequence; identical to SEQ ID NO: 16313
  GFR-binding peptide
  MOD_RES (4), (5), (39): Xaa is C or S
  MOD_RES (19), (20), (21), (22), (23): Xaa is A or G
  MOD_RES (24), (25), (26), (27): Xaa is A or G or is absent

SEQ ID NO: 40096 - protein, 40 aa, Artificial Sequence; identical to SEQ ID NO: 9020
  GFR-binding peptide
  MOD_RES (5), (6), (40): Xaa is C or S
  MOD_RES (20), (21), (22), (23), (24): Xaa is A or G
  MOD_RES (25), (26), (27), (28): Xaa is A or G or is absent

SEQ ID NO: 40097 - protein, 34 aa, Artificial Sequence
  GFR-binding peptide
  MOD_RES (1), (2): Xaa is C or S
  MOD_RES (16), (17), (18), (19), (20): Xaa is A or G
  MOD_RES (21), (22), (23), (24): Xaa is A or G or is absent
XXVSQDLEPLTILYYXXXXXXXXXEQLSNMIVKS

SEQ ID NO: 40098 - protein, 39 aa, Artificial Sequence; identical to SEQ ID NO: 16316
  GFR-binding peptide
  MOD_RES (5), (6): Xaa is C or S
  MOD_RES (20), (21), (22), (23), (24): Xaa is A or G
  MOD_RES (25), (26), (27), (28): Xaa is A or G or is absent

SEQ ID NO: 40099 - protein, 36 aa, Artificial Sequence; identical to SEQ ID NO: 16317
  GFR-binding peptide
  MOD_RES (5), (6): Xaa is C or S

SEQ ID NO: 40100 - protein, 37 aa, Artificial Sequence; identical to SEQ ID NO: 16318
  GFR-binding peptide
  MOD_RES (5), (6): Xaa is C or S

SEQ ID NO: 40101 - protein, 40 aa, Artificial Sequence; identical to SEQ ID NO: 14549
  GFR-binding peptide
  MOD_RES (7), (7): Xaa is C or S
  MOD_RES (21), (22), (23), (24), (25): Xaa is A or G
  MOD_RES (26), (27), (28), (29): Xaa is A or G or is absent

SEQ ID NO: 40102 - protein, 38 aa, Artificial Sequence; identical to SEQ ID NO: 16320
  GFR-binding peptide
  MOD_RES (6), (7): Xaa is C or S

SEQ ID NO: 40103 - protein, 37 aa, Artificial Sequence; identical to SEQ ID NO: 16321
  GFR-binding peptide
  MOD_RES (3), (4), (36): Xaa is C or S

SEQ ID NO: 40104 - protein, 37 aa, Artificial Sequence; identical to SEQ ID NO: 14550
  GFR-binding peptide
  MOD_RES (1), (2), (34), (36): Xaa is C or S

SEQ ID NO: 40105 - protein, 39 aa, Artificial Sequence; identical to SEQ ID NO: 14551
  GFR-binding peptide
  MOD_RES (1), (2), (36), (38): Xaa is C or S
  MOD_RES (16), (17), (18), (19), (20): Xaa is A or G
  MOD_RES (21), (22), (23), (24): Xaa is A or G or is absent

SEQ ID NO: 40106 - protein, 37 aa, Artificial Sequence; identical to SEQ ID NO: 16322
  GFR-binding peptide
  MOD_RES (4), (5), (37): Xaa is C or S

SEQ ID NO: 40107 - protein, 43 aa, Artificial Sequence; identical to SEQ ID NO: 16323
  GFR-binding peptide
  MOD_RES (6), (7), (41), (43): Xaa is C or S
  MOD_RES (21), (22), (23), (24), (25): Xaa is A or G
  MOD_RES (26), (27), (28), (29): Xaa is A or G or is absent

SEQ ID NO: 40108 - protein, 37 aa, Artificial Sequence; identical to SEQ ID NO: 16324
  GFR-binding peptide
  MOD_RES (3), (4), (35), (37): Xaa is C or S

SEQ ID NO: 40109 - protein, 40 aa, Artificial Sequence; identical to SEQ ID NO: 7256
  GFR-binding peptide
  MOD_RES (5), (6), (37), (39): Xaa is C or S

SEQ ID NO: 40110 - protein, 44 aa, Artificial Sequence; identical to SEQ ID NO: 14555
  GFR-binding peptide
  MOD_RES (6), (7), (41), (43): Xaa is C or S
  MOD_RES (21), (22), (23), (24), (25): Xaa is A or G
  MOD_RES (26), (27), (28), (29): Xaa is A or G or is absent

SEQ ID NO: 40111 - protein, 41 aa, Artificial Sequence; identical to SEQ ID NO: 14556
  GFR-binding peptide
  MOD_RES (6), (7), (39), (41): Xaa is C or S

SEQ ID NO: 40112 - protein, 40 aa, Artificial Sequence; identical to SEQ ID NO: 7257
  GFR-binding peptide
  MOD_RES (4), (5), (39): Xaa is C or S
  MOD_RES (19), (20), (21), (22), (23): Xaa is A or G
  MOD_RES (24), (25), (26), (27): Xaa is A or G or is absent

SEQ ID NO: 40113 - protein, 38 aa, Artificial Sequence; identical to SEQ ID NO: 14558
  GFR-binding peptide
  MOD_RES (3), (4), (35), (37): Xaa is C or S

SEQ ID NO: 40114 - protein, 38 aa, Artificial Sequence; identical to SEQ ID NO: 16325
  GFR-binding peptide
  MOD_RES (1), (2), (35), (37): Xaa is C or S
  MOD_RES (16), (17), (18), (19), (20): Xaa is A or G
  MOD_RES (21), (22), (23), (24): Xaa is A or G or is absent

SEQ ID NO: 40115 - protein, 41 aa, Artificial Sequence; identical to SEQ ID NO: 16326
  GFR-binding peptide
  MOD_RES (3), (4), (38), (40): Xaa is C or S
  MOD_RES (18), (19), (20), (21), (22): Xaa is A or G
  MOD_RES (23), (24), (25), (26): Xaa is A or G or is absent

SEQ ID NO: 40116 - protein, 33 aa, Artificial Sequence; identical to SEQ ID NO: 16327
  GFR-binding peptide
  MOD_RES (14), (15), (16), (17), (18): Xaa is A or G
  MOD_RES (19), (20), (21), (22): Xaa is A or G or is absent

SEQ ID NO: 40117 - protein, 44 aa, Artificial Sequence; identical to SEQ ID NO: 16328
  GFR-binding peptide
  MOD_RES (6), (7), (41), (43): Xaa is C or S
  MOD_RES (21), (22), (23), (24), (25): Xaa is A or G
  MOD_RES (26), (27), (28), (29): Xaa is A or G or is absent

SEQ ID NO: 40118 - protein, 39 aa, Artificial Sequence; identical to SEQ ID NO: 16329
  GFR-binding peptide
  MOD_RES (5), (6): Xaa is C or S
  MOD_RES (20), (21), (22), (23), (24): Xaa is A or G
  MOD_RES (25), (26), (27), (28): Xaa is A or G or is absent

SEQ ID NO: 40119 - protein, 43 aa, Artificial Sequence; identical to SEQ ID NO: 14561
  GFR-binding peptide
  MOD_RES (6), (7), (40), (42): Xaa is C or S
  MOD_RES (21), (22), (23), (24), (25): Xaa is A or G
  MOD_RES (26), (27), (28), (29): Xaa is A or G or is absent

SEQ ID NO: 40120 - protein, 32 aa, Artificial Sequence; identical to SEQ ID NO: 14562
  GFR-binding peptide
  MOD_RES (1), (2): Xaa is C or S

SEQ ID NO: 40121 - protein, 37 aa, Artificial Sequence; identical to SEQ ID NO: 14563
  GFR-binding peptide
  MOD_RES (6), (7): Xaa is C or S

SEQ ID NO: 40122 - protein, 37 aa, Artificial Sequence; identical to SEQ ID NO: 14564
  GFR-binding peptide
  MOD_RES (1), (35), (37): Xaa is C or S
  MOD_RES (15), (16), (17), (18), (19): Xaa is A or G
  MOD_RES (20), (21), (22), (23): Xaa is A or G or is absent

SEQ ID NO: 40123 - protein, 34 aa, Artificial Sequence; identical to SEQ ID NO: 14565
  GFR-binding peptide
  MOD_RES (1), (2), (34): Xaa is C or S

SEQ ID NO: 40124 - protein, 39 aa, Artificial Sequence; identical to SEQ ID NO: 16331
  GFR-binding peptide
  MOD_RES (4), (36), (38): Xaa is C or S

SEQ ID NO: 40125 - protein, 38 aa, Artificial Sequence; identical to SEQ ID NO: 14566
  GFR-binding peptide
  MOD_RES (2), (3), (35), (37): Xaa is C or S

SEQ ID NO: 40126 - protein, 33 aa, Artificial Sequence; identical to SEQ ID NO: 14567
  GFR-binding peptide
  MOD_RES (3), (3): Xaa is C or S

SEQ ID NO: 40127 - protein, 41 aa, Artificial Sequence; identical to SEQ ID NO: 16333
  GFR-binding peptide
  MOD_RES (4), (5), (38), (40): Xaa is C or S
  MOD_RES (19), (20), (21), (22), (23): Xaa is A or G
  MOD_RES (24), (25), (26), (27): Xaa is A or G or is absent

SEQ ID NO: 40128 - protein, 38 aa, Artificial Sequence; identical to SEQ ID NO: 14568
  GFR-binding peptide
  MOD_RES (2), (3), (35), (37): Xaa is C or S

SEQ ID NO: 40129 - protein, 36 aa, Artificial Sequence; identical to SEQ ID NO: 16334
  GFR-binding peptide
  MOD_RES (5), (6): Xaa is C or S

SEQ ID NO: 40130 - protein, 40 aa, Artificial Sequence; identical to SEQ ID NO: 14570
  GFR-binding peptide
  MOD_RES (6), (7): Xaa is C or S
  MOD_RES (21), (22), (23), (24), (25): Xaa is A or G
  MOD_RES (26), (27), (28), (29): Xaa is A or G or is absent

SEQ ID NO: 40131 - protein, 35 aa, Artificial Sequence; identical to SEQ ID NO: 16335
  GFR-binding peptide
  MOD_RES (1), (2): Xaa is C or S
  MOD_RES (16), (17), (18), (19), (20): Xaa is A or G
  MOD_RES (21), (22), (23), (24): Xaa is A or G or is absent

SEQ ID NO: 40132 - protein, 36 aa, Artificial Sequence; identical to SEQ ID NO: 14571
  GFR-binding peptide
  MOD_RES (3), (4), (35): Xaa is C or S

SEQ ID NO: 40133 - protein, 36 aa, Artificial Sequence; identical to SEQ ID NO: 9038
  GFR-binding peptide
  MOD_RES (1), (34), (36): Xaa is C or S
  MOD_RES (15), (16), (17), (18), (19): Xaa is A or G
  MOD_RES (20), (21), (22), (23): Xaa is A or G or is absent

SEQ ID NO: 40134 - protein, 39 aa, Artificial Sequence; identical to SEQ ID NO: 14572
  GFR-binding peptide
  MOD_RES (4), (5), (39): Xaa is C or S
  MOD_RES (19), (20), (21), (22), (23): Xaa is A or G
  MOD_RES (24), (25), (26), (27): Xaa is A or G or is absent

SEQ ID NO: 40135 - protein, 39 aa, Artificial Sequence; identical to SEQ ID NO: 16337
  GFR-binding peptide
  MOD_RES (4), (5), (36), (38): Xaa is C or S

SEQ ID NO: 40136 - protein, 36 aa, Artificial Sequence; identical to SEQ ID NO: 9040
  GFR-binding peptide
  MOD_RES (33), (35): Xaa is C or S
  MOD_RES (14), (15), (16), (17), (18): Xaa is A or G
  MOD_RES (19), (20), (21), (22): Xaa is A or G or is absent

SEQ ID NO: 40137 - protein, 39 aa, Artificial Sequence; identical to SEQ ID NO: 9041
  GFR-binding peptide
  MOD_RES (3), (4), (37), (39): Xaa is C or S
  MOD_RES (18), (19), (20), (21), (22): Xaa is A or G
  MOD_RES (23), (24), (25), (26): Xaa is A or G or is absent

SEQ ID NO: 40138 - protein, 40 aa, Artificial Sequence; identical to SEQ ID NO: 16341
  GFR-binding peptide
  MOD_RES (3), (4), (38), (40): Xaa is C or S
  MOD_RES (18), (19), (20), (21), (22): Xaa is A or G
  MOD_RES (23), (24), (25), (26): Xaa is A or G or is absent

SEQ ID NO: 40139 - protein, 32 aa, Artificial Sequence; identical to SEQ ID NO: 16342
  GFR-binding peptide
  MOD_RES (1), (2): Xaa is C or S

SEQ ID NO: 40140 - protein, 39 aa, Artificial Sequence; identical to SEQ ID NO: 16343
  GFR-binding peptide
  MOD_RES (1), (2), (36), (38): Xaa is C or S
  MOD_RES (16), (17), (18), (19), (20): Xaa is A or G
  MOD_RES (21), (22), (23), (24): Xaa is A or G or is absent

SEQ ID NO: 40141 - protein, 41 aa, Artificial Sequence; identical to SEQ ID NO: 14574
  GFR-binding peptide
  MOD_RES (6), (7), (39), (41): Xaa is C or S

SEQ ID NO: 40142 - protein, 41 aa, Artificial Sequence
  GFR-binding peptide
  MOD_RES (6), (7), (40): Xaa is C or S
  MOD_RES (21), (22), (23), (24), (25): Xaa is A or G
  MOD_RES (26), (27), (28), (29): Xaa is A or G or is absent
ASASPXXVSQDLEPLTILYYXXXXXXXXXEQLSNMIVKSXK

SEQ ID NO: 40143 - protein, 39 aa, Artificial Sequence; identical to SEQ ID NO: 16345
  GFR-binding peptide
  MOD_RES (3), (4), (36), (38): Xaa is C or S

SEQ ID NO: 40144 - protein, 41 aa, Artificial Sequence; identical to SEQ ID NO: 14575
  GFR-binding peptide
  MOD_RES (4), (5), (39), (41): Xaa is C or S
  MOD_RES (19), (20), (21), (22), (23): Xaa is A or G
  MOD_RES (24), (25), (26), (27): Xaa is A or G or is absent

SEQ ID NO: 40145 - protein, 35 aa, Artificial Sequence; identical to SEQ ID NO: 16347
  GFR-binding peptide
  MOD_RES (32), (34): Xaa is C or S

SEQ ID NO: 40146 - protein, 38 aa, Artificial Sequence; identical to SEQ ID NO: 16349
  GFR-binding peptide
  MOD_RES (4), (5), (38): Xaa is C or S
  MOD_RES (19), (20), (21), (22), (23): Xaa is A or G
  MOD_RES (24), (25), (26), (27): Xaa is A or G or is absent

SEQ ID NO: 40147 - protein, 34 aa, Artificial Sequence; identical to SEQ ID NO: 7279
  GFR-binding peptide
  MOD_RES (3), (4): Xaa is C or S

SEQ ID NO: 40148 - protein, 39 aa, Artificial Sequence; identical to SEQ ID NO: 14577
  GFR-binding peptide
  MOD_RES (4), (5), (36), (38): Xaa is C or S

SEQ ID NO: 40149 - protein, 36 aa, Artificial Sequence; identical to SEQ ID NO: 16350
  GFR-binding peptide
  MOD_RES (1), (35): Xaa is C or S
  MOD_RES (15), (16), (17), (18), (19): Xaa is A or G
  MOD_RES (20), (21), (22), (23): Xaa is A or G or is absent

SEQ ID NO: 40150 - protein, 34 aa, Artificial Sequence; identical to SEQ ID NO: 14578
  GFR-binding peptide
  MOD_RES (3), (4): Xaa is C or S

SEQ ID NO: 40151 - protein, 39 aa, Artificial Sequence; identical to SEQ ID NO: 7281
  GFR-binding peptide
  MOD_RES (5), (6), (38): Xaa is C or S

SEQ ID NO: 40152 - protein, 43 aa, Artificial Sequence; identical to SEQ ID NO: 9053
  GFR-binding peptide
  MOD_RES (5), (6), (40), (42): Xaa is C or S
  MOD_RES (20), (21), (22), (23), (24): Xaa is A or G
  MOD_RES (25), (26), (27), (28): Xaa is A or G or is absent

SEQ ID NO: 40153 - protein, 34 aa, Artificial Sequence; identical to SEQ ID NO: 14581
  GFR-binding peptide
  MOD_RES (3), (4): Xaa is C or S

SEQ ID NO: 40154 - protein, 43 aa, Artificial Sequence; identical to SEQ ID NO: 14582
  GFR-binding peptide
  MOD_RES (6), (40), (42): Xaa is C or S
  MOD_RES (20), (21), (22), (23), (24): Xaa is A or G
  MOD_RES (25), (26), (27), (28): Xaa is A or G or is absent

SEQ ID NO: 40155 - protein, 42 aa, Artificial Sequence; identical to SEQ ID NO: 9056
  GFR-binding peptide
  MOD_RES (6), (7), (41): Xaa is C or S
  MOD_RES (21), (22), (23), (24), (25): Xaa is A or G
  MOD_RES (26), (27), (28), (29): Xaa is A or G or is absent

SEQ ID NO: 40156 - protein, 42 aa, Artificial Sequence; identical to SEQ ID NO: 16356
  GFR-binding peptide
  MOD_RES (6), (7), (39), (41): Xaa is C or S

SEQ ID NO: 40157 - protein, 36 aa, Artificial Sequence; identical to SEQ ID NO: 16357
  GFR-binding peptide
  MOD_RES (1), (33), (35): Xaa is C or S

SEQ ID NO: 40158 - protein, 40 aa, Artificial Sequence; identical to SEQ ID NO: 14583
  GFR-binding peptide
  MOD_RES (3), (37), (39): Xaa is C or S
  MOD_RES (17), (18), (19), (20), (21): Xaa is A or G
  MOD_RES (22), (23), (24), (25): Xaa is A or G or is absent

SEQ ID NO: 40159 - protein, 42 aa, Artificial Sequence; identical to SEQ ID NO: 14584
  GFR-binding peptide
  MOD_RES (5), (6), (40), (42): Xaa is C or S
  MOD_RES (20), (21), (22), (23), (24): Xaa is A or G
  MOD_RES (25), (26), (27), (28): Xaa is A or G or is absent

SEQ ID NO: 40160 - protein, 39 aa, Artificial Sequence; identical to SEQ ID NO: 14585
  GFR-binding peptide
  MOD_RES (2), (3), (37), (39): Xaa is C or S
  MOD_RES (17), (18), (19), (20), (21): Xaa is A or G
  MOD_RES (22), (23), (24), (25): Xaa is A or G or is absent

SEQ ID NO: 40161 - protein, 38 aa, Artificial Sequence; identical to SEQ ID NO: 14586
  GFR-binding peptide
  MOD_RES (2), (3), (35), (37): Xaa is C or S

SEQ ID NO: 40162 - protein, 37 aa, Artificial Sequence; identical to SEQ ID NO: 7287
  GFR-binding peptide
  MOD_RES (3), (4): Xaa is C or S
  MOD_RES (18), (19), (20), (21), (22): Xaa is A or G
  MOD_RES (23), (24), (25), (26): Xaa is A or G or is absent

SEQ ID NO: 40163 - protein, 38 aa, Artificial Sequence; identical to SEQ ID NO: 14588
  GFR-binding peptide
  MOD_RES (4), (5), (38): Xaa is C or S
  MOD_RES (19), (20), (21), (22), (23): Xaa is A or G
  MOD_RES (24), (25), (26), (27): Xaa is A or G or is absent

SEQ ID NO: 40164 - protein, 37 aa, Artificial Sequence; identical to SEQ ID NO: 16358
  GFR-binding peptide
  MOD_RES (5), (6), (37): Xaa is C or S

SEQ ID NO: 40165 - protein, 40 aa, Artificial Sequence; identical to SEQ ID NO: 14589
  GFR-binding peptide
  MOD_RES (6), (7): Xaa is C or S
  MOD_RES (21), (22), (23), (24), (25): Xaa is A or G
  MOD_RES (26), (27), (28), (29): Xaa is A or G or is absent

SEQ ID NO: 40166 - protein, 34 aa, Artificial Sequence; identical to SEQ ID NO: 7289
  GFR-binding peptide
  MOD_RES (31), (33): Xaa is C or S

SEQ ID NO: 40167 - protein, 31 aa, Artificial Sequence; identical to SEQ ID NO: 16359
  GFR-binding peptide
  MOD_RES (1), (1): Xaa is C or S

SEQ ID NO: 40168 - protein, 42 aa, Artificial Sequence; identical to SEQ ID NO: 14591
  GFR-binding peptide
  MOD_RES (6), (7), (41): Xaa is C or S
  MOD_RES (21), (22), (23), (24), (25): Xaa is A or G
  MOD_RES (26), (27), (28), (29): Xaa is A or G or is absent

SEQ ID NO: 40169 - protein, 37 aa, Artificial Sequence; identical to SEQ ID NO: 16360
  GFR-binding peptide
  MOD_RES (1), (2), (36): Xaa is C or S
  MOD_RES (16), (17), (18), (19), (20): Xaa is A or G
  MOD_RES (21), (22), (23), (24): Xaa is A or G or is absent

SEQ ID NO: 40170 - protein, 35 aa, Artificial Sequence; identical to SEQ ID NO: 7293
  GFR-binding peptide
  MOD_RES (4), (5): Xaa is C or S

SEQ ID NO: 40171 - protein, 38 aa, Artificial Sequence; identical to SEQ ID NO: 16362
  GFR-binding peptide
  MOD_RES (5), (6): Xaa is C or S
  MOD_RES (20), (21), (22), (23), (24): Xaa is A or G
  MOD_RES (25), (26), (27), (28): Xaa is A or G or is absent

SEQ ID NO: 40172 - protein, 35 aa, Artificial Sequence; identical to SEQ ID NO: 16363
  GFR-binding peptide
  MOD_RES (32), (34): Xaa is C or S

SEQ ID NO: 40173 - protein, 36 aa, Artificial Sequence; identical to SEQ ID NO: 14593
  GFR-binding peptide
  MOD_RES (3), (4), (36): Xaa is C or S

SEQ ID NO: 40174 - protein, 36 aa, Artificial Sequence; identical to SEQ ID NO: 16364
  GFR-binding peptide
  MOD_RES (2), (36): Xaa is C or S
  MOD_RES (16), (17), (18), (19), (20): Xaa is A or G
  MOD_RES (21), (22), (23), (24): Xaa is A or G or is absent

SEQ ID NO: 40175 - protein, 38 aa, Artificial Sequence; identical to SEQ ID NO: 14594
  GFR-binding peptide
  MOD_RES (5), (6): Xaa is C or S
  MOD_RES (20), (21), (22), (23), (24): Xaa is A or G
  MOD_RES (25), (26), (27), (28): Xaa is A or G or is absent

SEQ ID NO: 40176 - protein, 32 aa, Artificial Sequence; identical to SEQ ID NO: 16365
  GFR-binding peptide
  MOD_RES (1), (2): Xaa is C or S

SEQ ID NO: 40177 - protein, 37 aa, Artificial Sequence
  GFR-binding peptide
  MOD_RES (1), (34), (36): Xaa is C or S
  MOD_RES (15), (16), (17), (18), (19): Xaa is A or G
  MOD_RES (20), (21), (22), (23): Xaa is A or G or is absent
XVSQDLEPLTILYYXXXXXXXXXEQLSNMIVKSXKXS

SEQ ID NO: 40178 - protein, 35 aa, Artificial Sequence; identical to SEQ ID NO: 7297
  GFR-binding peptide
  MOD_RES (1), (2): Xaa is C or S
  MOD_RES (16), (17), (18), (19), (20): Xaa is A or G
  MOD_RES (21), (22), (23), (24): Xaa is A or G or is absent

SEQ ID NO: 40179 - protein, 36 aa, Artificial Sequence; identical to SEQ ID NO: 14596
  GFR-binding peptide
  MOD_RES (2), (3), (35): Xaa is C or S

SEQ ID NO: 40180 - protein, 39 aa, Artificial Sequence; identical to SEQ ID NO: 9070
  GFR-binding peptide
  MOD_RES (3), (4), (37), (39): Xaa is C or S
  MOD_RES (18), (19), (20), (21), (22): Xaa is A or G
  MOD_RES (23), (24), (25), (26): Xaa is A or G or is absent

SEQ ID NO: 40181 - protein, 38 aa, Artificial Sequence; identical to SEQ ID NO: 9071
  GFR-binding peptide
  MOD_RES (3), (4), (37): Xaa is C or S
  MOD_RES (18), (19), (20), (21), (22): Xaa is A or G
  MOD_RES (23), (24), (25), (26): Xaa is A or G or is absent

SEQ ID NO: 40182 - protein, 32 aa, Artificial Sequence; identical to SEQ ID NO: 14597
  GFR-binding peptide
  MOD_RES (32), (32): Xaa is C or S

SEQ ID NO: 40183 - protein, 32 aa, Artificial Sequence; identical to SEQ ID NO: 16368
  GFR-binding peptide
  MOD_RES (32), (32): Xaa is C or S

SEQ ID NO: 40184 - protein, 35 aa, Artificial Sequence; identical to SEQ ID NO: 16369
  GFR-binding peptide
  MOD_RES (3), (3): Xaa is C or S
  MOD_RES (17), (18), (19), (20), (21): Xaa is A or G
  MOD_RES (22), (23), (24), (25): Xaa is A or G or is absent

SEQ ID NO: 40185 - protein, 33 aa, Artificial Sequence; identical to SEQ ID NO: 14598
  GFR-binding peptide
  MOD_RES (32), (32): Xaa is C or S

SEQ ID NO: 40186 - protein, 35 aa, Artificial Sequence; identical to SEQ ID NO: 9072
  GFR-binding peptide
  MOD_RES (1), (35): Xaa is C or S
  MOD_RES (15), (16), (17), (18), (19): Xaa is A or G
  MOD_RES (20), (21), (22), (23): Xaa is A or G or is absent

SEQ ID NO: 40187 - protein, 32 aa, Artificial Sequence; identical to SEQ ID NO: 14599
  GFR-binding peptide
  MOD_RES (1), (1): Xaa is C or S

SEQ ID NO: 40188 - protein, 39 aa, Artificial Sequence; identical to SEQ ID NO: 16371
  GFR-binding peptide
  MOD_RES (4), (5), (37), (39): Xaa is C or S

SEQ ID NO: 40189 - protein, 40 aa, Artificial Sequence; identical to SEQ ID NO: 14600
  GFR-binding peptide
  MOD_RES (5), (6), (39): Xaa is C or S
  MOD_RES (20), (21), (22), (23), (24): Xaa is A or G
  MOD_RES (25), (26), (27), (28): Xaa is A or G or is absent

SEQ ID NO: 40190 - protein, 40 aa, Artificial Sequence; identical to SEQ ID NO: 14601
  GFR-binding peptide
  MOD_RES (6), (7), (39): Xaa is C or S

SEQ ID NO: 40191 - protein, 41 aa, Artificial Sequence; identical to SEQ ID NO: 7302
  GFR-binding peptide
  MOD_RES (5), (6), (39), (41): Xaa is C or S
  MOD_RES (20), (21), (22), (23), (24): Xaa is A or G
  MOD_RES (25), (26), (27), (28): Xaa is A or G or is absent

SEQ ID NO: 40192 - protein, 36 aa, Artificial Sequence; identical to SEQ ID NO: 16372
  GFR-binding peptide
  MOD_RES (5), (5): Xaa is C or S

SEQ ID NO: 40193 - protein, 37 aa, Artificial Sequence; identical to SEQ ID NO: 14604
  GFR-binding peptide
  MOD_RES (6), (6): Xaa is C or S

SEQ ID NO: 40194 - protein, 34 aa, Artificial Sequence; identical to SEQ ID NO: 7305
  GFR-binding peptide
  MOD_RES (1), (2): Xaa is C or S
  MOD_RES (16), (17), (18), (19), (20): Xaa is A or G
  MOD_RES (21), (22), (23), (24): Xaa is A or G or is absent

SEQ ID NO: 40195 - protein, 39 aa, Artificial Sequence; identical to SEQ ID NO: 14607
  GFR-binding peptide
  MOD_RES (4), (5), (39): Xaa is C or S
  MOD_RES (19), (20), (21), (22), (23): Xaa is A or G
  MOD_RES (24), (25), (26), (27): Xaa is A or G or is absent

SEQ ID NO: 40196 - protein, 32 aa, Artificial Sequence; identical to SEQ ID NO: 14608
  GFR-binding peptide
  MOD_RES (2), (2): Xaa is C or S

SEQ ID NO: 40197 - protein, 35 aa, Artificial Sequence; identical to SEQ ID NO: 14609
  GFR-binding peptide
  MOD_RES (2), (2): Xaa is C or S
  MOD_RES (16), (17), (18), (19), (20): Xaa is A or G
  MOD_RES (21), (22), (23), (24): Xaa is A or G or is absent

SEQ ID NO: 40198 - protein, 34 aa, Artificial Sequence; identical to SEQ ID NO: 16376
  GFR-binding peptide
  MOD_RES (2), (34): Xaa is C or S

SEQ ID NO: 40199 - protein, 35 aa, Artificial Sequence; identical to SEQ ID NO: 14610
  GFR-binding peptide
  MOD_RES (4), (5): Xaa is C or S

SEQ ID NO: 40200 - protein, 35 aa, Artificial Sequence; identical to SEQ ID NO: 16377
  GFR-binding peptide
  MOD_RES (4), (5): Xaa is C or S

SEQ ID NO: 40201 - protein, 33 aa, Artificial Sequence; identical to SEQ ID NO: 14611
  GFR-binding peptide
  MOD_RES (2), (3): Xaa is C or S

SEQ ID NO: 40202 - protein, 36 aa, Artificial Sequence; identical to SEQ ID NO: 14612
  GFR-binding peptide
  MOD_RES (1), (35): Xaa is C or S
  MOD_RES (15), (16), (17), (18), (19): Xaa is A or G
  MOD_RES (20), (21), (22), (23): Xaa is A or G or is absent

SEQ ID NO: 40203 - protein, 33 aa, Artificial Sequence; identical to SEQ ID NO: 14613
  GFR-binding peptide
  MOD_RES (14), (15), (16), (17), (18): Xaa is A or G
  MOD_RES (19), (20), (21), (22): Xaa is A or G or is absent

SEQ ID NO: 40204 - protein, 40 aa, Artificial Sequence; identical to SEQ ID NO: 16378
  GFR-binding peptide
  MOD_RES (3), (37), (39): Xaa is C or S
  MOD_RES (17), (18), (19), (20), (21): Xaa is A or G
  MOD_RES (22), (23), (24), (25): Xaa is A or G or is absent

SEQ ID NO: 40205 - protein, 34 aa, Artificial Sequence; identical to SEQ ID NO: 14614
  GFR-binding peptide
  MOD_RES (2), (2): Xaa is C or S
  MOD_RES (16), (17), (18), (19), (20): Xaa is A or G
  MOD_RES (21), (22), (23), (24): Xaa is A or G or is absent

SEQ ID NO: 40206 - protein, 34 aa, Artificial Sequence; identical to SEQ ID NO: 7321
  GFR-binding peptide
  MOD_RES (1), (1): Xaa is C or S
  MOD_RES (15), (16), (17), (18), (19): Xaa is A or G
  MOD_RES (20), (21), (22), (23): Xaa is A or G or is absent

SEQ ID NO: 40207 - protein, 37 aa, Artificial Sequence; identical to SEQ ID NO: 7322
  GFR-binding peptide
  MOD_RES (2), (3), (34), (36): Xaa is C or S

SEQ ID NO: 40208 - protein, 33 aa, Artificial Sequence; identical to SEQ ID NO: 16380
  GFR-binding peptide
  MOD_RES (14), (15), (16), (17), (18): Xaa is A or G
  MOD_RES (19), (20), (21), (22): Xaa is A or G or is absent

SEQ ID NO: 40209 - protein, 43 aa, Artificial Sequence; identical to SEQ ID NO: 16381
  GFR-binding peptide
  MOD_RES (6), (7), (41), (43): Xaa is C or S
  MOD_RES (21), (22), (23), (24), (25): Xaa is A or G
  MOD_RES (26), (27), (28), (29): Xaa is A or G or is absent

SEQ ID NO: 40210 - protein, 32 aa, Artificial Sequence; identical to SEQ ID NO: 14620
  GFR-binding peptide
  MOD_RES (31), (31): Xaa is C or S

SEQ ID NO: 40211 - protein, 42 aa, Artificial Sequence; identical to SEQ ID NO: 14621
  GFR-binding peptide
  MOD_RES (5), (6), (39), (41): Xaa is C or S
  MOD_RES (20), (21), (22), (23), (24): Xaa is A or G
  MOD_RES (25), (26), (27), (28): Xaa is A or G or is absent

SEQ ID NO: 40212 - protein, 41 aa, Artificial Sequence; identical to SEQ ID NO: 14622
  GFR-binding peptide
  MOD_RES (6), (7), (39), (41): Xaa is C or S

SEQ ID NO: 40213 - protein, 37 aa, Artificial Sequence; identical to SEQ ID NO: 14623
  GFR-binding peptide
  MOD_RES (3), (4), (36): Xaa is C or S

SEQ ID NO: 40214 - protein, 37 aa, Artificial Sequence; identical to SEQ ID NO: 16383
  GFR-binding peptide
  MOD_RES (2), (3), (34), (36): Xaa is C or S

SEQ ID NO: 40215 - protein, 39 aa, Artificial Sequence; identical to SEQ ID NO: 16385
  GFR-binding peptide
  MOD_RES (4), (5), (37), (39): Xaa is C or S

SEQ ID NO: 40216 - protein, 39 aa, Artificial Sequence; identical to SEQ ID NO: 16386
  GFR-binding peptide
  MOD_RES (2), (3), (37), (39): Xaa is C or S
  MOD_RES (17), (18), (19), (20), (21): Xaa is A or G
  MOD_RES (22), (23), (24), (25): Xaa is A or G or is absent

SEQ ID NO: 40217 - protein, 41 aa, Artificial Sequence; identical to SEQ ID NO: 7327
  GFR-binding peptide
  MOD_RES (4), (5), (38), (40): Xaa is C or S
  MOD_RES (19), (20), (21), (22), (23): Xaa is A or G
  MOD_RES (24), (25), (26), (27): Xaa is A or G or is absent

SEQ ID NO: 40218 - protein, 39 aa, Artificial Sequence; identical to SEQ ID NO: 14625
  GFR-binding peptide
  MOD_RES (3), (4), (36), (38): Xaa is C or S

SEQ ID NO: 40219 - protein, 35 aa, Artificial Sequence; identical to SEQ ID NO: 9104
  GFR-binding peptide
  MOD_RES (33), (35): Xaa is C or S
  MOD_RES (14), (15), (16), (17), (18): Xaa is A or G
  MOD_RES (19), (20), (21), (22): Xaa is A or G or is absent

SEQ ID NO: 40220 - protein, 33 aa, Artificial Sequence; identical to SEQ ID NO: 16389
  GFR-binding peptide
  MOD_RES (14), (15), (16), (17), (18): Xaa is A or G
  MOD_RES (19), (20), (21), (22): Xaa is A or G or is absent

SEQ ID NO: 40221 - protein, 33 aa, Artificial Sequence; identical to SEQ ID NO: 9107
  GFR-binding peptide
  MOD_RES (14), (15), (16), (17), (18): Xaa is A or G
  MOD_RES (19), (20), (21), (22): Xaa is A or G or is absent

SEQ ID NO: 40222 - protein, 31 aa, Artificial Sequence; identical to SEQ ID NO: 16391
  GFR-binding peptide
  MOD_RES (1), (1): Xaa is C or S

SEQ ID NO: 40223 - protein, 36 aa, Artificial Sequence; identical to SEQ ID NO: 7332
  GFR-binding peptide
  MOD_RES (2), (3), (34), (36): Xaa is C or S

SEQ ID NO: 40224 - protein, 31 aa, Artificial Sequence; identical to SEQ ID NO: 9111
  GFR-binding peptide
  MOD_RES (31), (31): Xaa is C or S

SEQ ID NO: 40225 - protein, 41 aa, Artificial Sequence; identical to SEQ ID NO: 14629
  GFR-binding peptide
  MOD_RES (6), (7), (39), (41): Xaa is C or S

SEQ ID NO: 40226 - protein, 36 aa, Artificial Sequence; identical to SEQ ID NO: 16395
  GFR-binding peptide
  MOD_RES (34), (36): Xaa is C or S
  MOD_RES (14), (15), (16), (17), (18): Xaa is A or G
  MOD_RES (19), (20), (21), (22): Xaa is A or G or is absent

SEQ ID NO: 40227 - protein, 36 aa, Artificial Sequence; identical to SEQ ID NO: 16396
  GFR-binding peptide
  MOD_RES (5), (6): Xaa is C or S

SEQ ID NO: 40228 - protein, 39 aa, Artificial Sequence
  GFR-binding peptide
  MOD_RES (2), (3), (36), (38): Xaa is C or S
  MOD_RES (17), (18), (19), (20), (21): Xaa is A or G
  MOD_RES (22), (23), (24), (25): Xaa is A or G or is absent
PXXVSQDLEPLTILYYXXXXXXXXXEQLSNMIVKSXKXS

SEQ ID NO: 40229 - protein, 39 aa, Artificial Sequence; identical to SEQ ID NO: 14630
  GFR-binding peptide
  MOD_RES (2), (3), (37), (39): Xaa is C or S
  MOD_RES (17), (18), (19), (20), (21): Xaa is A or G
  MOD_RES (22), (23), (24), (25): Xaa is A or G or is absent

SEQ ID NO: 40230 - protein, 33 aa, Artificial Sequence; identical to SEQ ID NO: 16399
  GFR-binding peptide
  MOD_RES (2), (2): Xaa is C or S

SEQ ID NO: 40231 - protein, 36 aa, Artificial Sequence; identical to SEQ ID NO: 14631
  GFR-binding peptide
  MOD_RES (1), (33), (35): Xaa is C or S

SEQ ID NO: 40232 - protein, 36 aa, Artificial Sequence; identical to SEQ ID NO: 16400
  GFR-binding peptide
  MOD_RES (4), (36): Xaa is C or S

SEQ ID NO: 40233 - protein, 35 aa, Artificial Sequence; identical to SEQ ID NO: 14633
  GFR-binding peptide
  MOD_RES (1), (33), (35): Xaa is C or S

SEQ ID NO: 40234 - protein, 40 aa, Artificial Sequence; identical to SEQ ID NO: 14634
  GFR-binding peptide
  MOD_RES (5), (6), (40): Xaa is C or S
  MOD_RES (20), (21), (22), (23), (24): Xaa is A or G
  MOD_RES (25), (26), (27), (28): Xaa is A or G or is absent

SEQ ID NO: 40235 - protein, 38 aa, Artificial Sequence; identical to SEQ ID NO: 14635
  GFR-binding peptide
  MOD_RES (4), (5), (36), (38): Xaa is C or S

SEQ ID NO: 40236 - protein, 37 aa, Artificial Sequence; identical to SEQ ID NO: 16401
  GFR-binding peptide
  MOD_RES (1), (2), (36): Xaa is C or S
  MOD_RES (16), (17), (18), (19), (20): Xaa is A or G
  MOD_RES (21), (22), (23), (24): Xaa is A or G or is absent

SEQ ID NO: 40237 - protein, 37 aa, Artificial Sequence; identical to SEQ ID NO: 14636
  GFR-binding peptide
  MOD_RES (4), (4): Xaa is C or S
  MOD_RES (18), (19), (20), (21), (22): Xaa is A or G
  MOD_RES (23), (24), (25), (26): Xaa is A or G or is absent

SEQ ID NO: 40238 - protein, 40 aa, Artificial Sequence; identical to SEQ ID NO: 16402
  GFR-binding peptide
  MOD_RES (6), (7): Xaa is C or S
  MOD_RES (21), (22), (23), (24), (25): Xaa is A or G
  MOD_RES (26), (27), (28), (29): Xaa is A or G or is absent

SEQ ID NO: 40239 - protein, 43 aa, Artificial Sequence; identical to SEQ ID NO: 14637
  GFR-binding peptide
  MOD_RES (6), (7), (41), (43): Xaa is C or S
  MOD_RES (21), (22), (23), (24), (25): Xaa is A or G
  MOD_RES (26), (27), (28), (29): Xaa is A or G or is absent

SEQ ID NO: 40240 - protein, 38 aa, Artificial Sequence; identical to SEQ ID NO: 16404
  GFR-binding peptide
  MOD_RES (5), (37): Xaa is C or S

SEQ ID NO: 40241 - protein, 35 aa, Artificial Sequence; identical to SEQ ID NO: 14638
  GFR-binding peptide
  MOD_RES (1), (35): Xaa is C or S
  MOD_RES (15), (16), (17), (18), (19): Xaa is A or G
  MOD_RES (20), (21), (22), (23): Xaa is A or G or is absent

SEQ ID NO: 40242 - protein, 44 aa, Artificial Sequence; identical to SEQ ID NO: 9131
  GFR-binding peptide
  MOD_RES (6), (7), (41), (43): Xaa is C or S
  MOD_RES (21), (22), (23), (24), (25): Xaa is A or G
  MOD_RES (26), (27), (28), (29): Xaa is A or G or is absent

SEQ ID NO: 40243 - protein, 33 aa, Artificial Sequence; identical to SEQ ID NO: 16408
  GFR-binding peptide
  MOD_RES (2), (3): Xaa is C or S

SEQ ID NO: 40244 - protein, 36 aa, Artificial Sequence; identical to SEQ ID NO: 14639
  GFR-binding peptide
  MOD_RES (1), (33), (35): Xaa is C or S

SEQ ID NO: 40245 - protein, 35 aa, Artificial Sequence; identical to SEQ ID NO: 14641
  GFR-binding peptide
  MOD_RES (1), (2), (34): Xaa is C or S

SEQ ID NO: 40246 - protein, 42 aa, Artificial Sequence; identical to SEQ ID NO: 14642
  GFR-binding peptide
  MOD_RES (5), (6), (40), (42): Xaa is C or S
  MOD_RES (20), (21), (22), (23), (24): Xaa is A or G
  MOD_RES (25), (26), (27), (28): Xaa is A or G or is absent

SEQ ID NO: 40247 - protein, 40 aa, Artificial Sequence; identical to SEQ ID NO: 14643
  GFR-binding peptide
  MOD_RES (3), (4), (38), (40): Xaa is C or S
  MOD_RES (18), (19), (20), (21), (22): Xaa is A or G
  MOD_RES (23), (24), (25), (26): Xaa is A or G or is absent

SEQ ID NO: 40248 - protein, 37 aa, Artificial Sequence; identical to SEQ ID NO: 14644
  GFR-binding peptide
  MOD_RES (1), (2), (36): Xaa is C or S
  MOD_RES (16), (17), (18), (19), (20): Xaa is A or G
  MOD_RES (21), (22), (23), (24): Xaa is A or G or is absent

SEQ ID NO: 40249 - protein, 36 aa, Artificial Sequence; identical to SEQ ID NO: 16409
  GFR-binding peptide
  MOD_RES (1), (35): Xaa is C or S
  MOD_RES (15), (16), (17), (18), (19): Xaa is A or G
  MOD_RES (20), (21), (22), (23): Xaa is A or G or is absent

SEQ ID NO: 40250 - protein, 38 aa, Artificial Sequence; identical to SEQ ID NO: 14646
  GFR-binding peptide
  MOD_RES (5), (6): Xaa is C or S
  MOD_RES (20), (21), (22), (23), (24): Xaa is A or G
  MOD_RES (25), (26), (27), (28): Xaa is A or G or is absent

SEQ ID NO: 40251 - protein, 40 aa, Artificial Sequence; identical to SEQ ID NO: 16410
  GFR-binding peptide
  MOD_RES (5), (6), (38), (40): Xaa is C or S

SEQ ID NO: 40252 - protein, 39 aa, Artificial Sequence; identical to SEQ ID NO: 9138
  GFR-binding peptide
  MOD_RES (4), (5), (38): Xaa is C or S
  MOD_RES (19), (20), (21), (22), (23): Xaa is A or G
  MOD_RES (24), (25), (26), (27): Xaa is A or G or is absent

SEQ ID NO: 40253 - protein, 32 aa, Artificial Sequence; identical to SEQ ID NO: 16412
  GFR-binding peptide
  MOD_RES (1), (1): Xaa is C or S

SEQ ID NO: 40254 - protein, 33 aa, Artificial Sequence; identical to SEQ ID NO: 16413
  GFR-binding peptide
  MOD_RES (14), (15), (16), (17), (18): Xaa is A or G
  MOD_RES (19), (20), (21), (22): Xaa is A or G or is absent

SEQ ID NO: 40255 - protein, 34 aa, Artificial Sequence; identical to SEQ ID NO: 14647
  GFR-binding peptide
  MOD_RES (32), (34): Xaa is C or S

SEQ ID NO: 40256 - protein, 34 aa, Artificial Sequence; identical to SEQ ID NO: 7352
  GFR-binding peptide
  MOD_RES (33), (33): Xaa is C or S
  MOD_RES (14), (15), (16), (17), (18): Xaa is A or G
  MOD_RES (19), (20), (21), (22): Xaa is A or G or is absent

SEQ ID NO: 40257 - protein, 43 aa, Artificial Sequence; identical to SEQ ID NO: 14650
  GFR-binding peptide
  MOD_RES (6), (7), (41), (43): Xaa is C or S
  MOD_RES (21), (22), (23), (24), (25): Xaa is A or G
  MOD_RES (26), (27), (28), (29): Xaa is A or G or is absent

SEQ ID NO: 40258 - protein, 32 aa, Artificial Sequence; identical to SEQ ID NO: 14651
  GFR-binding peptide
  MOD_RES (32), (32): Xaa is C or S

SEQ ID NO: 40259 - protein, 39 aa, Artificial Sequence; identical to SEQ ID NO: 16416
  GFR-binding peptide
  MOD_RES (5), (6), (39): Xaa is C or S
  MOD_RES (20), (21), (22), (23), (24): Xaa is A or G
  MOD_RES (25), (26), (27), (28): Xaa is A or G or is absent

SEQ ID NO: 40260 - protein, 37 aa, Artificial Sequence; identical to SEQ ID NO: 14652
  GFR-binding peptide
  MOD_RES (2), (3), (35), (37): Xaa is C or S

SEQ ID NO: 40261 - protein, 36 aa, Artificial Sequence; identical to SEQ ID NO: 14653
  GFR-binding peptide
  MOD_RES (1), (33), (35): Xaa is C or S

SEQ ID NO: 40262 - protein, 35 aa, Artificial Sequence; identical to SEQ ID NO: 16418
  GFR-binding peptide
  MOD_RES (3), (4), (35): Xaa is C or S

SEQ ID NO: 40263 - protein, 38 aa, Artificial Sequence; identical to SEQ ID NO: 16419
  GFR-binding peptide
  MOD_RES (4), (5), (36), (38): Xaa is C or S

SEQ ID NO: 40264 - protein, 40 aa, Artificial Sequence; identical to SEQ ID NO: 7353
  GFR-binding peptide
  MOD_RES (2), (3), (37), (39): Xaa is C or S
  MOD_RES (17), (18), (19), (20), (21): Xaa is A or G
  MOD_RES (22), (23), (24), (25): Xaa is A or G or is absent

SEQ ID NO: 40265 - protein, 38 aa, Artificial Sequence; identical to SEQ ID NO: 14655
  GFR-binding peptide
  MOD_RES (6), (7): Xaa is C or S

SEQ ID NO: 40266 - protein, 35 aa, Artificial Sequence; identical to SEQ ID NO: 16421
  GFR-binding peptide
  MOD_RES (3), (4): Xaa is C or S

SEQ ID NO: 40267 - protein, 36 aa, Artificial Sequence; identical to SEQ ID NO: 14656
  GFR-binding peptide
  MOD_RES (2), (3), (36): Xaa is C or S
  MOD_RES (17), (18), (19), (20), (21): Xaa is A or G
  MOD_RES (22), (23), (24), (25): Xaa is A or G or is absent

SEQ ID NO: 40268 - protein, 37 aa, Artificial Sequence; identical to SEQ ID NO: 14657
  GFR-binding peptide
  MOD_RES (2), (34), (36): Xaa is C or S

SEQ ID NO: 40269 - protein, 40 aa, Artificial Sequence; identical to SEQ ID NO: 16422
  GFR-binding peptide
  MOD_RES (5), (6), (39): Xaa is C or S
  MOD_RES (20), (21), (22), (23), (24): Xaa is A or G
  MOD_RES (25), (26), (27), (28): Xaa is A or G or is absent

SEQ ID NO: 40270 - protein, 39 aa, Artificial Sequence; identical to SEQ ID NO: 14658
  GFR-binding peptide
  MOD_RES (5), (6): Xaa is C or S
  MOD_RES (20), (21), (22), (23), (24): Xaa is A or G
  MOD_RES (25), (26), (27), (28): Xaa is A or G or is absent

SEQ ID NO: 40271 - protein, 43 aa, Artificial Sequence; identical to SEQ ID NO: 14659
  GFR-binding peptide
  MOD_RES (7), (41), (43): Xaa is C or S
  MOD_RES (21), (22), (23), (24), (25): Xaa is A or G
  MOD_RES (26), (27), (28), (29): Xaa is A or G or is absent

SEQ ID NO: 40272 - protein, 31 aa, Artificial Sequence; identical to SEQ ID NO: 14661
  GFR-binding peptide
  MOD_RES (1), (1): Xaa is C or S

SEQ ID NO: 40273 - protein, 37 aa, Artificial Sequence; identical to SEQ ID NO: 16424
  GFR-binding peptide
  MOD_RES (4), (5), (37): Xaa is C or S

SEQ ID NO: 40274 - protein, 39 aa, Artificial Sequence; identical to SEQ ID NO: 9155
  GFR-binding peptide
  MOD_RES (4), (5), (39): Xaa is C or S
  MOD_RES (19), (20), (21), (22), (23): Xaa is A or G
  MOD_RES (24), (25), (26), (27): Xaa is A or G or is absent

SEQ ID NO: 40275 - protein, 40 aa, Artificial Sequence; identical to SEQ ID NO: 16426
  GFR-binding peptide
  MOD_RES (3), (4), (38), (40): Xaa is C or S
  MOD_RES (18), (19), (20), (21), (22): Xaa is A or G
  MOD_RES (23), (24), (25), (26): Xaa is A or G or is absent

SEQ ID NO: 40276 - protein, 36 aa, Artificial Sequence; identical to SEQ ID NO: 16427
  GFR-binding peptide
  MOD_RES (2), (3): Xaa is C or S
  MOD_RES (17), (18), (19), (20), (21): Xaa is A or G
  MOD_RES (22), (23), (24), (25): Xaa is A or G or is absent

SEQ ID NO: 40277 - protein, 38 aa, Artificial Sequence; identical to SEQ ID NO: 14662
  GFR-binding peptide
  MOD_RES (4), (5): Xaa is C or S
  MOD_RES (19), (20), (21), (22), (23): Xaa is A or G
  MOD_RES (24), (25), (26), (27): Xaa is A or G or is absent

SEQ ID NO: 40278 - protein, 35 aa, Artificial Sequence; identical to SEQ ID NO: 16428
  GFR-binding peptide
  MOD_RES (3), (35): Xaa is C or S

SEQ ID NO: 40279 - protein, 35 aa, Artificial Sequence; identical to SEQ ID NO: 16429
  GFR-binding peptide
  MOD_RES (34), (34): Xaa is C or S
  MOD_RES (14), (15), (16), (17), (18): Xaa is A or G
  MOD_RES (19), (20), (21), (22): Xaa is A or G or is absent

SEQ ID NO: 40280 - protein, 36 aa, Artificial Sequence
  GFR-binding peptide
  MOD_RES (3), (4): Xaa is C or S
  MOD_RES (18), (19), (20), (21), (22): Xaa is A or G
  MOD_RES (23), (24), (25), (26): Xaa is A or G or is absent
SPXXVSQDLEPLTILYYXXXXXXXXXEQLSNMIVKS

SEQ ID NO: 40281 - protein, 35 aa, Artificial Sequence; identical to SEQ ID NO: 9157
  GFR-binding peptide
  MOD_RES (34), (34): Xaa is C or S
  MOD_RES (14), (15), (16), (17), (18): Xaa is A or G
  MOD_RES (19), (20), (21), (22): Xaa is A or G or is absent

SEQ ID NO: 40282 - protein, 42 aa, Artificial Sequence; identical to SEQ ID NO: 16431
  GFR-binding peptide
  MOD_RES (7), (41): Xaa is C or S
  MOD_RES (21), (22), (23), (24), (25): Xaa is A or G
  MOD_RES (26), (27), (28), (29): Xaa is A or G or is absent

SEQ ID NO: 40283 - protein, 40 aa, Artificial Sequence; identical to SEQ ID NO: 16432
  GFR-binding peptide
  MOD_RES (5), (6), (38), (40): Xaa is C or S

SEQ ID NO: 40284 - protein, 34 aa, Artificial Sequence; identical to SEQ ID NO: 14663
  GFR-binding peptide
  MOD_RES (32), (34): Xaa is C or S

SEQ ID NO: 40285 - protein, 38 aa, Artificial Sequence; identical to SEQ ID NO: 16433
  GFR-binding peptide
  MOD_RES (6), (7): Xaa is C or S

SEQ ID NO: 40286 - protein, 39 aa, Artificial Sequence; identical to SEQ ID NO: 16434
  GFR-binding peptide
  MOD_RES (6), (7): Xaa is C or S
  MOD_RES (21), (22), (23), (24), (25): Xaa is A or G
  MOD_RES (26), (27), (28), (29): Xaa is A or G or is absent

SEQ ID NO: 40287 - protein, 39 aa, Artificial Sequence; identical to SEQ ID NO: 7359
  GFR-binding peptide
  MOD_RES (6), (7), (38): Xaa is C or S

SEQ ID NO: 40288 - protein, 41 aa, Artificial Sequence; identical to SEQ ID NO: 14665
  GFR-binding peptide
  MOD_RES (6), (7), (39), (41): Xaa is C or S

SEQ ID NO: 40289 - protein, 40 aa, Artificial Sequence; identical to SEQ ID NO: 16435
  GFR-binding peptide
  MOD_RES (5), (6), (40): Xaa is C or S
  MOD_RES (20), (21), (22), (23), (24): Xaa is A or G
  MOD_RES (25), (26), (27), (28): Xaa is A or G or is absent

SEQ ID NO: 40290 - protein, 40 aa, Artificial Sequence; identical to SEQ ID NO: 9161
  GFR-binding peptide
  MOD_RES (4), (5), (38), (40): Xaa is C or S
  MOD_RES (19), (20), (21), (22), (23): Xaa is A or G
  MOD_RES (24), (25), (26), (27): Xaa is A or G or is absent

SEQ ID NO: 40291 - protein, 30 aa, Artificial Sequence; identical to SEQ ID NO: 14666
  GFR-binding peptide

SEQ ID NO: 40292 - protein, 34 aa, Artificial Sequence; identical to SEQ ID NO: 16437
  GFR-binding peptide
  MOD_RES (1), (1): Xaa is C or S
  MOD_RES (15), (16), (17), (18), (19): Xaa is A or G
  MOD_RES (20), (21), (22), (23): Xaa is A or G or is absent

SEQ ID NO: 40293 - protein, 35 aa, Artificial Sequence; identical to SEQ ID NO: 7365
  GFR-binding peptide
  MOD_RES (32), (34): Xaa is C or S

SEQ ID NO: 40294 - protein, 36 aa, Artificial Sequence; identical to SEQ ID NO: 7366
  GFR-binding peptide
  MOD_RES (5), (6): Xaa is C or S

SEQ ID NO: 40295 - protein, 33 aa, Artificial Sequence; identical to SEQ ID NO: 14670
  GFR-binding peptide
  MOD_RES (1), (2): Xaa is C or S

SEQ ID NO: 40296 - protein, 37 aa, Artificial Sequence; identical to SEQ ID NO: 16440
  GFR-binding peptide
  MOD_RES (4), (5), (37): Xaa is C or S

SEQ ID NO: 40297 - protein, 31 aa, Artificial Sequence; identical to SEQ ID NO: 16441
  GFR-binding peptide

SEQ ID NO: 40298 - protein, 36 aa, Artificial Sequence; identical to SEQ ID NO: 14671
  GFR-binding peptide
  MOD_RES (3), (35): Xaa is C or S

SEQ ID NO: 40299 - protein, 38 aa, Artificial Sequence; identical to SEQ ID NO: 16443
  GFR-binding peptide
  MOD_RES (5), (6), (38): Xaa is C or S

SEQ ID NO: 40300 - protein, 42 aa, Artificial Sequence; identical to SEQ ID NO: 16444
  GFR-binding peptide
  MOD_RES (6), (7), (39), (41): Xaa is C or S

SEQ ID NO: 40301 - protein, 35 aa, Artificial Sequence; identical to SEQ ID NO: 16445
  GFR-binding peptide
  MOD_RES (4), (5): Xaa is C or S

SEQ ID NO: 40302 - protein, 33 aa, Artificial Sequence; identical to SEQ ID NO: 16446
  GFR-binding peptide
  MOD_RES (2), (3): Xaa is C or S

SEQ ID NO: 40303 - protein, 36 aa, Artificial Sequence; identical to SEQ ID NO: 16447
  GFR-binding peptide
  MOD_RES (2), (3), (35): Xaa is C or S

SEQ ID NO: 40304 - protein, 38 aa, Artificial Sequence; identical to SEQ ID NO: 16448
  GFR-binding peptide
  MOD_RES (4), (5), (38): Xaa is C or S
  MOD_RES (19), (20), (21), (22), (23): Xaa is A or G
  MOD_RES (24), (25), (26), (27): Xaa is A or G or is absent

SEQ ID NO: 40305 - protein, 36 aa, Artificial Sequence; identical to SEQ ID NO: 14672
  GFR-binding peptide
  MOD_RES (1), (2), (36): Xaa is C or S
  MOD_RES (16), (17), (18), (19), (20): Xaa is A or G
  MOD_RES (21), (22), (23), (24): Xaa is A or G or is absent

SEQ ID NO: 40306 - protein, 35 aa, Artificial Sequence; identical to SEQ ID NO: 14673
  GFR-binding peptide
  MOD_RES (1), (33), (35): Xaa is C or S

SEQ ID NO: 40307 - protein, 43 aa, Artificial Sequence; identical to SEQ ID NO: 14674
  GFR-binding peptide
  MOD_RES (5), (6), (40), (42): Xaa is C or S
  MOD_RES (20), (21), (22), (23), (24): Xaa is A or G
  MOD_RES (25), (26), (27), (28): Xaa is A or G or is absent

SEQ ID NO: 40308 - protein, 34 aa, Artificial Sequence; identical to SEQ ID NO: 16450
  GFR-binding peptide
  MOD_RES (1), (1): Xaa is C or S
  MOD_RES (15), (16), (17), (18), (19): Xaa is A or G
  MOD_RES (20), (21), (22), (23): Xaa is A or G or is absent

SEQ ID NO: 40309 - protein, 30 aa, Artificial Sequence; identical to SEQ ID NO: 7373
  GFR-binding peptide

SEQ ID NO: 40310 - protein, 35 aa, Artificial Sequence; identical to SEQ ID NO: 16451
  GFR-binding peptide
  MOD_RES (1), (2): Xaa is C or S
  MOD_RES (16), (17), (18), (19), (20): Xaa is A or G
  MOD_RES (21), (22), (23), (24): Xaa is A or G or is absent

SEQ ID NO: 40311 - protein, 36 aa, Artificial Sequence; identical to SEQ ID NO: 14676
  GFR-binding peptide
  MOD_RES (2), (3), (35): Xaa is C or S

SEQ ID NO: 40312 - protein, 36 aa, Artificial Sequence; identical to SEQ ID NO: 16452
  GFR-binding peptide
  MOD_RES (2), (3), (35): Xaa is C or S

SEQ ID NO: 40313 - protein, 40 aa, Artificial Sequence; identical to SEQ ID NO: 14677
  GFR-binding peptide
  MOD_RES (6), (7), (39): Xaa is C or S

SEQ ID NO: 40314 - protein, 36 aa, Artificial Sequence; identical to SEQ ID NO: 16453
  GFR-binding peptide
  MOD_RES (3), (4): Xaa is C or S
  MOD_RES (18), (19), (20), (21), (22): Xaa is A or G
  MOD_RES (23), (24), (25), (26): Xaa is A or G or is absent

SEQ ID NO: 40315 - protein, 39 aa, Artificial Sequence; identical to SEQ ID NO: 14678
  GFR-binding peptide
  MOD_RES (1), (2), (36), (38): Xaa is C or S
  MOD_RES (16), (17), (18), (19), (20): Xaa is A or G
  MOD_RES (21), (22), (23), (24): Xaa is A or G or is absent

SEQ ID NO: 40316 - protein, 38 aa, Artificial Sequence; identical to SEQ ID NO: 7375
  GFR-binding peptide
  MOD_RES (3), (4), (35), (37): Xaa is C or S

SEQ ID NO: 40317 - protein, 32 aa, Artificial Sequence; identical to SEQ ID NO: 14680
  GFR-binding peptide
  MOD_RES (31), (31): Xaa is C or S

SEQ ID NO: 40318 - protein, 36 aa, Artificial Sequence; identical to SEQ ID NO: 16454
  GFR-binding peptide
  MOD_RES (5), (5): Xaa is C or S

SEQ ID NO: 40319 - protein, 40 aa, Artificial Sequence; identical to SEQ ID NO: 16455
  GFR-binding peptide
  MOD_RES (5), (6), (37), (39): Xaa is C or S

SEQ ID NO: 40320 - protein, 40 aa, Artificial Sequence; identical to SEQ ID NO: 16456
  GFR-binding peptide
  MOD_RES (6), (7), (39): Xaa is C or S

SEQ ID NO: 40321 - protein, 40 aa, Artificial Sequence; identical to SEQ ID NO: 7378
  GFR-binding peptide
  MOD_RES (4), (5), (39): Xaa is C or S
  MOD_RES (19), (20), (21), (22), (23): Xaa is A or G
  MOD_RES (24), (25), (26), (27): Xaa is A or G or is absent

SEQ ID NO: 40322 - protein, 34 aa, Artificial Sequence; identical to SEQ ID NO: 16457
  GFR-binding peptide
  MOD_RES (1), (2): Xaa is C or S
  MOD_RES (16), (17), (18), (19), (20): Xaa is A or G
  MOD_RES (21), (22), (23), (24): Xaa is A or G or is absent

SEQ ID NO: 40323 - protein, 37 aa, Artificial Sequence; identical to SEQ ID NO: 14683
  GFR-binding peptide
  MOD_RES (7), (7): Xaa is C or S

SEQ ID NO: 40324 - protein, 34 aa, Artificial Sequence; identical to SEQ ID NO: 16458
  GFR-binding peptide
  MOD_RES (2), (3): Xaa is C or S

SEQ ID NO: 40325 - protein, 38 aa, Artificial Sequence; identical to SEQ ID NO: 16459
  GFR-binding peptide
  MOD_RES (4), (5), (37): Xaa is C or S

SEQ ID NO: 40326 - protein, 37 aa, Artificial Sequence; identical to SEQ ID NO: 14684
  GFR-binding peptide
  MOD_RES (3), (4), (36): Xaa is C or S

SEQ ID NO: 40327 - protein, 37 aa, Artificial Sequence; identical to SEQ ID NO: 16460
  GFR-binding peptide
  MOD_RES (1), (2), (34), (36): Xaa is C or S

SEQ ID NO: 40328 - protein, 36 aa, Artificial Sequence; identical to SEQ ID NO: 7390
  GFR-binding peptide
  MOD_RES (1), (34), (36): Xaa is C or S
  MOD_RES (15), (16), (17), (18), (19): Xaa is A or G
  MOD_RES (20), (21), (22), (23): Xaa is A or G or is absent

SEQ ID NO: 40329 - protein, 31 aa, Artificial Sequence; identical to SEQ ID NO: 16461
  GFR-binding peptide

SEQ ID NO: 40330 - protein, 43 aa, Artificial Sequence; identical to SEQ ID NO: 16462
  GFR-binding peptide
  MOD_RES (6), (7), (40), (42): Xaa is C or S
  MOD_RES (21), (22), (23), (24), (25): Xaa is A or G
  MOD_RES (26), (27), (28), (29): Xaa is A or G or is absent

SEQ ID NO: 40331 - protein, 39 aa, Artificial Sequence; identical to SEQ ID NO: 16463
  GFR-binding peptide
  MOD_RES (6), (7): Xaa is C or S
  MOD_RES (21), (22), (23), (24), (25): Xaa is A or G
  MOD_RES (26), (27), (28), (29): Xaa is A or G or is absent

SEQ ID NO: 40332 - protein, 41 aa, Artificial Sequence; identical to SEQ ID NO: 14686
  GFR-binding peptide
  MOD_RES (6), (7), (40): Xaa is C or S
  MOD_RES (21), (22), (23), (24), (25): Xaa is A or G
  MOD_RES (26), (27), (28), (29): Xaa is A or G or is absent

SEQ ID NO: 40333 - protein, 39 aa, Artificial Sequence; identical to SEQ ID NO: 16464
  GFR-binding peptide
  MOD_RES (6), (7): Xaa is C or S
  MOD_RES (21), (22), (23), (24), (25): Xaa is A or G
  MOD_RES (26), (27), (28), (29): Xaa is A or G or is absent

SEQ ID NO: 40334 - protein, 37 aa, Artificial Sequence; identical to SEQ ID NO: 14687
  GFR-binding peptide
  MOD_RES (3), (4), (36): Xaa is C or S

SEQ ID NO: 40335 - protein, 40 aa, Artificial Sequence; identical to SEQ ID NO: 14688
  GFR-binding peptide
  MOD_RES (4), (5), (38), (40): Xaa is C or S
  MOD_RES (19), (20), (21), (22), (23): Xaa is A or G
  MOD_RES (24), (25), (26), (27): Xaa is A or G or is absent

SEQ ID NO: 40336 - protein, 37 aa, Artificial Sequence; identical to SEQ ID NO: 14689
  GFR-binding peptide
  MOD_RES (2), (3), (34), (36): Xaa is C or S

SEQ ID NO: 40337 - protein, 34 aa, Artificial Sequence; identical to SEQ ID NO: 14691
  GFR-binding peptide
  MOD_RES (1), (1): Xaa is C or S
  MOD_RES (15), (16), (17), (18), (19): Xaa is A or G
  MOD_RES (20), (21), (22), (23): Xaa is A or G or is absent

SEQ ID NO: 40338 - protein, 37 aa, Artificial Sequence; identical to SEQ ID NO: 16469
  GFR-binding peptide
  MOD_RES (5), (6): Xaa is C or S

SEQ ID NO: 40339 - protein, 35 aa, Artificial Sequence; identical to SEQ ID NO: 14693
  GFR-binding peptide
  MOD_RES (4), (5): Xaa is C or S

SEQ ID NO: 40340 - protein, 37 aa, Artificial Sequence; identical to SEQ ID NO: 14694
  GFR-binding peptide
  MOD_RES (2), (34), (36): Xaa is C or S

SEQ ID NO: 40341 - protein, 31 aa, Artificial Sequence; identical to SEQ ID NO: 16470
  GFR-binding peptide
  MOD_RES (1), (1): Xaa is C or S

SEQ ID NO: 40342 - protein, 38 aa, Artificial Sequence; identical to SEQ ID NO: 16471
  GFR-binding peptide
  MOD_RES (1), (2), (36), (38): Xaa is C or S
  MOD_RES (16), (17), (18), (19), (20): Xaa is A or G
  MOD_RES (21), (22), (23), (24): Xaa is A or G or is absent

SEQ ID NO: 40343 - protein, 41 aa, Artificial Sequence; identical to SEQ ID NO: 14695
  GFR-binding peptide
  MOD_RES (4), (5), (38), (40): Xaa is C or S
  MOD_RES (19), (20), (21), (22), (23): Xaa is A or G
  MOD_RES (24), (25), (26), (27): Xaa is A or G or is absent

SEQ ID NO: 40344 - protein, 36 aa, Artificial Sequence; identical to SEQ ID NO: 16472
  GFR-binding peptide
  MOD_RES (1), (2), (34), (36): Xaa is C or S

SEQ ID NO: 40345 - protein, 41 aa, Artificial Sequence; identical to SEQ ID NO: 16473
  GFR-binding peptide
  MOD_RES (5), (39), (41): Xaa is C or S
  MOD_RES (19), (20), (21), (22), (23): Xaa is A or G
  MOD_RES (24), (25), (26), (27): Xaa is A or G or is absent

SEQ ID NO: 40346 - protein, 38 aa, Artificial Sequence; identical to SEQ ID NO: 14696
  GFR-binding peptide
  MOD_RES (4), (5), (38): Xaa is C or S
  MOD_RES (19), (20), (21), (22), (23): Xaa is A or G
  MOD_RES (24), (25), (26), (27): Xaa is A or G or is absent

SEQ ID NO: 40347 - protein, 37 aa, Artificial Sequence; identical to SEQ ID NO: 14697
  GFR-binding peptide
  MOD_RES (2), (3), (37): Xaa is C or S
  MOD_RES (17), (18), (19), (20), (21): Xaa is A or G
  MOD_RES (22), (23), (24), (25): Xaa is A or G or is absent

SEQ ID NO: 40348 - protein, 40 aa, Artificial Sequence; identical to SEQ ID NO: 9195
  GFR-binding peptide
  MOD_RES (3), (4), (38), (40): Xaa is C or S
  MOD_RES (18), (19), (20), (21), (22): Xaa is A or G
  MOD_RES (23), (24), (25), (26): Xaa is A or G or is absent

SEQ ID NO: 40349 - protein, 40 aa, Artificial Sequence; identical to SEQ ID NO: 14698
  GFR-binding peptide
  MOD_RES (6), (7): Xaa is C or S
  MOD_RES (21), (22), (23), (24), (25): Xaa is A or G
  MOD_RES (26), (27), (28), (29): Xaa is A or G or is absent

SEQ ID NO: 40350 - protein, 39 aa, Artificial Sequence; identical to SEQ ID NO: 7408
  GFR-binding peptide
  MOD_RES (5), (6), (37), (39): Xaa is C or S

SEQ ID NO: 40351 - protein, 34 aa, Artificial Sequence; identical to SEQ ID NO: 14700
  GFR-binding peptide
  MOD_RES (1), (33): Xaa is C or S

SEQ ID NO: 40352 - protein, 36 aa, Artificial Sequence; identical to SEQ ID NO: 14701
  GFR-binding peptide
  MOD_RES (1), (2), (36): Xaa is C or S
  MOD_RES (16), (17), (18), (19), (20): Xaa is A or G
  MOD_RES (21), (22), (23), (24): Xaa is A or G or is absent

SEQ ID NO: 40353 - protein, 40 aa, Artificial Sequence; identical to SEQ ID NO: 14702
  GFR-binding peptide
  MOD_RES (6), (7): Xaa is C or S
  MOD_RES (21), (22), (23), (24), (25): Xaa is A or G
  MOD_RES (26), (27), (28), (29): Xaa is A or G or is absent

SEQ ID NO: 40354 - protein, 34 aa, Artificial Sequence; identical to SEQ ID NO: 9202
  GFR-binding peptide
  MOD_RES (31), (33): Xaa is C or S

SEQ ID NO: 40355 - protein, 40 aa, Artificial Sequence; identical to SEQ ID NO: 14703
  GFR-binding peptide
  MOD_RES (7), (39): Xaa is C or S

SEQ ID NO: 40356 - protein, 42 aa, Artificial Sequence; identical to SEQ ID NO: 16478
  GFR-binding peptide
  MOD_RES (5), (6), (40), (42): Xaa is C or S
  MOD_RES (20), (21), (22), (23), (24): Xaa is A or G
  MOD_RES (25), (26), (27), (28): Xaa is A or G or is absent

SEQ ID NO: 40357 - protein, 37 aa, Artificial Sequence; identical to SEQ ID NO: 14704
  GFR-binding peptide
  MOD_RES (34), (36): Xaa is C or S
  MOD_RES (14), (15), (16), (17), (18): Xaa is A or G
  MOD_RES (19), (20), (21), (22): Xaa is A or G or is absent

SEQ ID NO: 40358 - protein, 39 aa, Artificial Sequence; identical to SEQ ID NO: 14705
  GFR-binding peptide
  MOD_RES (6), (7), (39): Xaa is C or S

SEQ ID NO: 40359 - protein, 34 aa, Artificial Sequence; identical to SEQ ID NO: 16479
  GFR-binding peptide
  MOD_RES (2), (3), (34): Xaa is C or S

SEQ ID NO: 40360 - protein, 37 aa, Artificial Sequence; identical to SEQ ID NO: 14706
  GFR-binding peptide
  MOD_RES (1), (2), (36): Xaa is C or S
  MOD_RES (16), (17), (18), (19), (20): Xaa is A or G
  MOD_RES (21), (22), (23), (24): Xaa is A or G or is absent

SEQ ID NO: 40361 - protein, 37 aa, Artificial Sequence; identical to SEQ ID NO: 14708
  GFR-binding peptide
  MOD_RES (3), (4), (36): Xaa is C or S

SEQ ID NO: 40362 - protein, 34 aa, Artificial Sequence; identical to SEQ ID NO: 7413
  GFR-binding peptide
  MOD_RES (3), (4): Xaa is C or S

SEQ ID NO: 40363 - protein, 38 aa, Artificial Sequence; identical to SEQ ID NO: 16480
  GFR-binding peptide
  MOD_RES (3), (4), (37): Xaa is C or S
  MOD_RES (18), (19), (20), (21), (22): Xaa is A or G
  MOD_RES (23), (24), (25), (26): Xaa is A or G or is absent

SEQ ID NO: 40364 - protein, 37 aa, Artificial Sequence; identical to SEQ ID NO: 16481
  GFR-binding peptide
  MOD_RES (6), (7): Xaa is C or S

SEQ ID NO: 40365 - protein, 39 aa, Artificial Sequence; identical to SEQ ID NO: 14710
  GFR-binding peptide
  MOD_RES (3), (4), (38): Xaa is C or S
  MOD_RES (18), (19), (20), (21), (22): Xaa is A or G
  MOD_RES (23), (24), (25), (26): Xaa is A or G or is absent

SEQ ID NO: 40366 - protein, 33 aa, Artificial Sequence; identical to SEQ ID NO: 16482
  GFR-binding peptide
  MOD_RES (1), (1): Xaa is C or S
  MOD_RES (15), (16), (17), (18), (19): Xaa is A or G
  MOD_RES (20), (21), (22), (23): Xaa is A or G or is absent

SEQ ID NO: 40367 - protein, 39 aa, Artificial Sequence; identical to SEQ ID NO: 16483
  GFR-binding peptide
  MOD_RES (5), (6), (39): Xaa is C or S
  MOD_RES (20), (21), (22), (23), (24): Xaa is A or G
  MOD_RES (25), (26), (27), (28): Xaa is A or G or is absent

SEQ ID NO: 40368 - protein, 36 aa, Artificial Sequence; identical to SEQ ID NO: 14711
  GFR-binding peptide
  MOD_RES (5), (6): Xaa is C or S

SEQ ID NO: 40369 - protein, 36 aa, Artificial Sequence; identical to SEQ ID NO: 16484
  GFR-binding peptide
  MOD_RES (1), (35): Xaa is C or S
  MOD_RES (15), (16), (17), (18), (19): Xaa is A or G
  MOD_RES (20), (21), (22), (23): Xaa is A or G or is absent

SEQ ID NO: 40370 - protein, 37 aa, Artificial Sequence; identical to SEQ ID NO: 14712
  GFR-binding peptide
  MOD_RES (1), (2), (34), (36): Xaa is C or S

SEQ ID NO: 40371 - protein, 35 aa, Artificial Sequence; identical to SEQ ID NO: 16485
  GFR-binding peptide
  MOD_RES (2), (3): Xaa is C or S
  MOD_RES (17), (18), (19), (20), (21): Xaa is A or G
  MOD_RES (22), (23), (24), (25): Xaa is A or G or is absent

SEQ ID NO: 40372 - protein, 35 aa, Artificial Sequence; identical to SEQ ID NO: 14713
  GFR-binding peptide
  MOD_RES (2), (3): Xaa is C or S
  MOD_RES (17), (18), (19), (20), (21): Xaa is A or G
  MOD_RES (22), (23), (24), (25): Xaa is A or G or is absent

SEQ ID NO: 40373 - protein, 37 aa, Artificial Sequence; identical to SEQ ID NO: 14715
  GFR-binding peptide
  MOD_RES (2), (3), (37): Xaa is C or S
  MOD_RES (17), (18), (19), (20), (21): Xaa is A or G
  MOD_RES (22), (23), (24), (25): Xaa is A or G or is absent

SEQ ID NO: 40374 - protein, 37 aa, Artificial Sequence; identical to SEQ ID NO: 16486
  GFR-binding peptide
  MOD_RES (1), (2), (34), (36): Xaa is C or S

SEQ ID NO: 40375 - protein, 36 aa, Artificial Sequence; identical to SEQ ID NO: 9213
  GFR-binding peptide
  MOD_RES (1), (35): Xaa is C or S
  MOD_RES (15), (16), (17), (18), (19): Xaa is A or G
  MOD_RES (20), (21), (22), (23): Xaa is A or G or is absent

SEQ ID NO: 40376 - protein, 30 aa, Artificial Sequence; identical to SEQ ID NO: 14717
  GFR-binding peptide

SEQ ID NO: 40377 - protein, 38 aa, Artificial Sequence; identical to SEQ ID NO: 14718
  GFR-binding peptide
  MOD_RES (1), (2), (36), (38): Xaa is C or S
  MOD_RES (16), (17), (18), (19), (20): Xaa is A or G
  MOD_RES (21), (22), (23), (24): Xaa is A or G or is absent

SEQ ID NO: 40378 - protein, 39 aa, Artificial Sequence; identical to SEQ ID NO: 14719
  GFR-binding peptide
  MOD_RES (3), (4), (36), (38): Xaa is C or S

SEQ ID NO: 40379 - protein, 39 aa, Artificial Sequence; identical to SEQ ID NO: 14720
  GFR-binding peptide
  MOD_RES (6), (7): Xaa is C or S
  MOD_RES (21), (22), (23), (24), (25): Xaa is A or G
  MOD_RES (26), (27), (28), (29): Xaa is A or G or is absent

SEQ ID NO: 40380 - protein, 36 aa, Artificial Sequence; identical to SEQ ID NO: 16488
  GFR-binding peptide
  MOD_RES (1), (2), (34), (36): Xaa is C or S

SEQ ID NO: 40381 - protein, 37 aa, Artificial Sequence; identical to SEQ ID NO: 16489
  GFR-binding peptide
  MOD_RES (1), (2), (36): Xaa is C or S
  MOD_RES (16), (17), (18), (19), (20): Xaa is A or G
  MOD_RES (21), (22), (23), (24): Xaa is A or G or is absent

SEQ ID NO: 40382 - protein, 41 aa, Artificial Sequence; identical to SEQ ID NO: 14721
  GFR-binding peptide
  MOD_RES (6), (7), (40): Xaa is C or S
  MOD_RES (21), (22), (23), (24), (25): Xaa is A or G
  MOD_RES (26), (27), (28), (29): Xaa is A or G or is absent

SEQ ID NO: 40383 - protein, 33 aa, Artificial Sequence; identical to SEQ ID NO: 7423
  GFR-binding peptide
  MOD_RES (1), (33): Xaa is C or S

SEQ ID NO: 40384 - protein, 38 aa, Artificial Sequence; identical to SEQ ID NO: 16490
  GFR-binding peptide
  MOD_RES (5), (6), (37): Xaa is C or S

SEQ ID NO: 40385 - protein, 38 aa, Artificial Sequence; identical to SEQ ID NO: 16491
  GFR-binding peptide
  MOD_RES (5), (6), (38): Xaa is C or S

SEQ ID NO: 40386 - protein, 43 aa, Artificial Sequence; identical to SEQ ID NO: 14723
  GFR-binding peptide
  MOD_RES (5), (6), (40), (42): Xaa is C or S
  MOD_RES (20), (21), (22), (23), (24): Xaa is A or G
  MOD_RES (25), (26), (27), (28): Xaa is A or G or is absent

SEQ ID NO: 40387 - protein, 43 aa, Artificial Sequence; identical to SEQ ID NO: 7425
  GFR-binding peptide
  MOD_RES (6), (7), (41), (43): Xaa is C or S
  MOD_RES (21), (22), (23), (24), (25): Xaa is A or G
  MOD_RES (26), (27), (28), (29): Xaa is A or G or is absent

SEQ ID NO: 40388 - protein, 42 aa, Artificial Sequence; identical to SEQ ID NO: 14725
  GFR-binding peptide
  MOD_RES (6), (7), (39), (41): Xaa is C or S

SEQ ID NO: 40389 - protein, 39 aa, Artificial Sequence; identical to SEQ ID NO: 16493
  GFR-binding peptide
  MOD_RES (2), (3), (36), (38): Xaa is C or S
  MOD_RES (17), (18), (19), (20), (21): Xaa is A or G
  MOD_RES (22), (23), (24), (25): Xaa is A or G or is absent

SEQ ID NO: 40390 - protein, 34 aa, Artificial Sequence; identical to SEQ ID NO: 16494
  GFR-binding peptide
  MOD_RES (1), (33): Xaa is C or S

SEQ ID NO: 40391 - protein, 37 aa, Artificial Sequence; identical to SEQ ID NO: 16495
  GFR-binding peptide
  MOD_RES (5), (6), (37): Xaa is C or S

SEQ ID NO: 40392 - protein, 38 aa, Artificial Sequence; identical to SEQ ID NO: 7427
  GFR-binding peptide
  MOD_RES (5), (6): Xaa is C or S
  MOD_RES (20), (21), (22), (23), (24): Xaa is A or G
  MOD_RES (25), (26), (27), (28): Xaa is A or G or is absent

SEQ ID NO: 40393 - protein, 34 aa, Artificial Sequence; identical to SEQ ID NO: 7428
  GFR-binding peptide
  MOD_RES (1), (2), (34): Xaa is C or S

SEQ ID NO: 40394 - protein, 37 aa, Artificial Sequence; identical to SEQ ID NO: 14728
  GFR-binding peptide
  MOD_RES (3), (4), (36): Xaa is C or S

SEQ ID NO: 40395 - protein, 34 aa, Artificial Sequence; identical to SEQ ID NO: 14729
  GFR-binding peptide
  MOD_RES (1), (2), (33): Xaa is C or S

SEQ ID NO: 40396 - protein, 36 aa, Artificial Sequence; identical to SEQ ID NO: 16498
  GFR-binding peptide
  MOD_RES (2), (3): Xaa is C or S
  MOD_RES (17), (18), (19), (20), (21): Xaa is A or G
  MOD_RES (22), (23), (24), (25): Xaa is A or G or is absent

SEQ ID NO: 40397 - protein, 38 aa, Artificial Sequence; identical to SEQ ID NO: 14730
  GFR-binding peptide
  MOD_RES (5), (6), (37): Xaa is C or S

SEQ ID NO: 40398 - protein, 36 aa, Artificial Sequence; identical to SEQ ID NO: 9223
  GFR-binding peptide
  MOD_RES (2), (3): Xaa is C or S
  MOD_RES (17), (18), (19), (20), (21): Xaa is A or G
  MOD_RES (22), (23), (24), (25): Xaa is A or G or is absent

SEQ ID NO: 40399 - protein, 42 aa, Artificial Sequence; identical to SEQ ID NO: 9225
  GFR-binding peptide
  MOD_RES (5), (6), (40), (42): Xaa is C or S
  MOD_RES (20), (21), (22), (23), (24): Xaa is A or G
  MOD_RES (25), (26), (27), (28): Xaa is A or G or is absent

SEQ ID NO: 40400 - protein, 37 aa, Artificial Sequence; identical to SEQ ID NO: 14731
  GFR-binding peptide
  MOD_RES (5), (5): Xaa is C or S
  MOD_RES (19), (20), (21), (22), (23): Xaa is A or G
  MOD_RES (24), (25), (26), (27): Xaa is A or G or is absent

SEQ ID NO: 40401 - protein, 34 aa, Artificial Sequence; identical to SEQ ID NO: 14732
  GFR-binding peptide
  MOD_RES (2), (3): Xaa is C or S

SEQ ID NO: 40402 - protein, 34 aa, Artificial Sequence; identical to SEQ ID NO: 16501
  GFR-binding peptide
  MOD_RES (1), (2): Xaa is C or S
  MOD_RES (16), (17), (18), (19), (20): Xaa is A or G
  MOD_RES (21), (22), (23), (24): Xaa is A or G or is absent

SEQ ID NO: 40403 - protein, 38 aa, Artificial Sequence; identical to SEQ ID NO: 9228
  GFR-binding peptide
  MOD_RES (1), (2), (36), (38): Xaa is C or S
  MOD_RES (16), (17), (18), (19), (20): Xaa is A or G
  MOD_RES (21), (22), (23), (24): Xaa is A or G or is absent

SEQ ID NO: 40404 - protein, 34 aa, Artificial Sequence; identical to SEQ ID NO: 16503
  GFR-binding peptide
  MOD_RES (3), (4): Xaa is C or S

SEQ ID NO: 40405 - protein, 36 aa, Artificial Sequence; identical to SEQ ID NO: 16504
  GFR-binding peptide
  MOD_RES (2), (3): Xaa is C or S
  MOD_RES (17), (18), (19), (20), (21): Xaa is A or G
  MOD_RES (22), (23), (24), (25): Xaa is A or G or is absent

SEQ ID NO: 40406 - protein, 35 aa, Artificial Sequence; identical to SEQ ID NO: 7434
  GFR-binding peptide
  MOD_RES (1), (34): Xaa is C or S
  MOD_RES (15), (16), (17), (18), (19): Xaa is A or G
  MOD_RES (20), (21), (22), (23): Xaa is A or G or is absent

SEQ ID NO: 40407 - protein, 37 aa, Artificial Sequence; identical to SEQ ID NO: 14734
  GFR-binding peptide
  MOD_RES (4), (5), (37): Xaa is C or S

SEQ ID NO: 40408 - protein, 36 aa, Artificial Sequence; identical to SEQ ID NO: 7436
  GFR-binding peptide
  MOD_RES (1), (2), (33), (35): Xaa is C or S

SEQ ID NO: 40409 - protein, 36 aa, Artificial Sequence; identical to SEQ ID NO: 16505
  GFR-binding peptide
  MOD_RES (34), (36): Xaa is C or S
  MOD_RES (14), (15), (16), (17), (18): Xaa is A or G
  MOD_RES (19), (20), (21), (22): Xaa is A or G or is absent

SEQ ID NO: 40410 - protein, 39 aa, Artificial Sequence; identical to SEQ ID NO: 16506
  GFR-binding peptide
  MOD_RES (3), (4), (38): Xaa is C or S
  MOD_RES (18), (19), (20), (21), (22): Xaa is A or G
  MOD_RES (23), (24), (25), (26): Xaa is A or G or is absent

SEQ ID NO: 40411 - protein, 43 aa, Artificial Sequence; identical to SEQ ID NO: 16507
  GFR-binding peptide
  MOD_RES (6), (40), (42): Xaa is C or S
  MOD_RES (20), (21), (22), (23), (24): Xaa is A or G
  MOD_RES (25), (26), (27), (28): Xaa is A or G or is absent

SEQ ID NO: 40412 - protein, 36 aa, Artificial Sequence; identical to SEQ ID NO: 7437
  GFR-binding peptide
  MOD_RES (1), (2), (36): Xaa is C or S
  MOD_RES (16), (17), (18), (19), (20): Xaa is A or G
  MOD_RES (21), (22), (23), (24): Xaa is A or G or is absent

SEQ ID NO: 40413 - protein, 42 aa, Artificial Sequence; identical to SEQ ID NO: 14737
  GFR-binding peptide
  MOD_RES (7), (39), (41): Xaa is C or S

SEQ ID NO: 40414 - protein, 40 aa, Artificial Sequence; identical to SEQ ID NO: 16508
  GFR-binding peptide
  MOD_RES (5), (6), (40): Xaa is C or S
  MOD_RES (20), (21), (22), (23), (24): Xaa is A or G
  MOD_RES (25), (26), (27), (28): Xaa is A or G or is absent

SEQ ID NO: 40415 - protein, 37 aa, Artificial Sequence; identical to SEQ ID NO: 9235
  GFR-binding peptide
  MOD_RES (2), (3), (36): Xaa is C or S
  MOD_RES (17), (18), (19), (20), (21): Xaa is A or G
  MOD_RES (22), (23), (24), (25): Xaa is A or G or is absent

SEQ ID NO: 40416 - protein, 40 aa, Artificial Sequence; identical to SEQ ID NO: 16511
  GFR-binding peptide
  MOD_RES (4), (5), (39): Xaa is C or S
  MOD_RES (19), (20), (21), (22), (23): Xaa is A or G
  MOD_RES (24), (25), (26), (27): Xaa is A or G or is absent

SEQ ID NO: 40417 - protein, 39 aa, Artificial Sequence; identical to SEQ ID NO: 16512
  GFR-binding peptide
  MOD_RES (5), (6), (38): Xaa is C or S

SEQ ID NO: 40418 - protein, 38 aa, Artificial Sequence; identical to SEQ ID NO: 16513
  GFR-binding peptide
  MOD_RES (4), (5): Xaa is C or S
  MOD_RES (19), (20), (21), (22), (23): Xaa is A or G
  MOD_RES (24), (25), (26), (27): Xaa is A or G or is absent

SEQ ID NO: 40419 - protein, 37 aa, Artificial Sequence; identical to SEQ ID NO: 9238
  GFR-binding peptide
  MOD_RES (1), (2), (35), (37): Xaa is C or S
  MOD_RES (16), (17), (18), (19), (20): Xaa is A or G
  MOD_RES (21), (22), (23), (24): Xaa is A or G or is absent

SEQ ID NO: 40420 - protein, 33 aa, Artificial Sequence; identical to SEQ ID NO: 14739
  GFR-binding peptide
  MOD_RES (1), (2): Xaa is C or S

SEQ ID NO: 40421 - protein, 38 aa, Artificial Sequence; identical to SEQ ID NO: 7441
  GFR-binding peptide
  MOD_RES (5), (6), (38): Xaa is C or S

SEQ ID NO: 40422 - protein, 40 aa, Artificial Sequence; identical to SEQ ID NO: 14742
  GFR-binding peptide
  MOD_RES (5), (6), (38), (40): Xaa is C or S

SEQ ID NO: 40423 - protein, 38 aa, Artificial Sequence; identical to SEQ ID NO: 16515
  GFR-binding peptide
  MOD_RES (4), (5), (37): Xaa is C or S

SEQ ID NO: 40424 - protein, 39 aa, Artificial Sequence; identical to SEQ ID NO: 9242
  GFR-binding peptide
  MOD_RES (2), (3), (37), (39): Xaa is C or S
  MOD_RES (17), (18), (19), (20), (21): Xaa is A or G
  MOD_RES (22), (23), (24), (25): Xaa is A or G or is absent

SEQ ID NO: 40425 - protein, 38 aa, Artificial Sequence; identical to SEQ ID NO: 7445
  GFR-binding peptide
  MOD_RES (2), (3), (37): Xaa is C or S
  MOD_RES (17), (18), (19), (20), (21): Xaa is A or G
  MOD_RES (22), (23), (24), (25): Xaa is A or G or is absent

SEQ ID NO: 40426 - protein, 40 aa, Artificial Sequence; identical to SEQ ID NO: 16517
  GFR-binding peptide
  MOD_RES (6), (40): Xaa is C or S
  MOD_RES (20), (21), (22), (23), (24): Xaa is A or G
  MOD_RES (25), (26), (27), (28): Xaa is A or G or is absent

SEQ ID NO: 40427 - protein, 31 aa, Artificial Sequence; identical to SEQ ID NO: 14745
  GFR-binding peptide
  MOD_RES (1), (1): Xaa is C or S

SEQ ID NO: 40428 - protein, 38 aa, Artificial Sequence; identical to SEQ ID NO: 16518
  GFR-binding peptide
  MOD_RES (1), (2), (36), (38): Xaa is C or S
  MOD_RES (16), (17), (18), (19), (20): Xaa is A or G
  MOD_RES (21), (22), (23), (24): Xaa is A or G or is absent

SEQ ID NO: 40429 - protein, 35 aa, Artificial Sequence; identical to SEQ ID NO: 14746
  GFR-binding peptide
  MOD_RES (2), (3): Xaa is C or S
  MOD_RES (17), (18), (19), (20), (21): Xaa is A or G
  MOD_RES (22), (23), (24), (25): Xaa is A or G or is absent

SEQ ID NO: 40430 - protein, 42 aa, Artificial Sequence; identical to SEQ ID NO: 14747
  GFR-binding peptide
  MOD_RES (6), (40), (42): Xaa is C or S
  MOD_RES (20), (21), (22), (23), (24): Xaa is A or G
  MOD_RES (25), (26), (27), (28): Xaa is A or G or is absent

SEQ ID NO: 40431 - protein, 37 aa, Artificial Sequence; identical to SEQ ID NO: 9244
  GFR-binding peptide
  MOD_RES (3), (4), (37): Xaa is C or S
  MOD_RES (18), (19), (20), (21), (22): Xaa is A or G
  MOD_RES (23), (24), (25), (26): Xaa is A or G or is absent

SEQ ID NO: 40432 - protein, 34 aa, Artificial Sequence; identical to SEQ ID NO: 16520
  GFR-binding peptide
  MOD_RES (1), (33): Xaa is C or S

SEQ ID NO: 40433 - protein, 37 aa, Artificial Sequence; identical to SEQ ID NO: 16521
  GFR-binding peptide
  MOD_RES (2), (3), (37): Xaa is C or S
  MOD_RES (17), (18), (19), (20), (21): Xaa is A or G
  MOD_RES (22), (23), (24), (25): Xaa is A or G or is absent

SEQ ID NO: 40434 - protein, 37 aa, Artificial Sequence; identical to SEQ ID NO: 16522
  GFR-binding peptide
  MOD_RES (1), (35), (37): Xaa is C or S
  MOD_RES (15), (16), (17), (18), (19): Xaa is A or G
  MOD_RES (20), (21), (22), (23): Xaa is A or G or is absent

SEQ ID NO: 40435 - protein, 36 aa, Artificial Sequence; identical to SEQ ID NO: 14748
  GFR-binding peptide
  MOD_RES (3), (4): Xaa is C or S
  MOD_RES (18), (19), (20), (21), (22): Xaa is A or G
  MOD_RES (23), (24), (25), (26): Xaa is A or G or is absent

SEQ ID NO: 40436 - protein, 35 aa, Artificial Sequence; identical to SEQ ID NO: 16523
  GFR-binding peptide
  MOD_RES (1), (34): Xaa is C or S
  MOD_RES (15), (16), (17), (18), (19): Xaa is A or G
  MOD_RES (20), (21), (22), (23): Xaa is A or G or is absent

SEQ ID NO: 40437 - protein, 35 aa, Artificial Sequence; identical to SEQ ID NO: 16524
  GFR-binding peptide
  MOD_RES (3), (4): Xaa is C or S

SEQ ID NO: 40438 - protein, 36 aa, Artificial Sequence; identical to SEQ ID NO: 14749
  GFR-binding peptide
  MOD_RES (3), (4): Xaa is C or S
  MOD_RES (18), (19), (20), (21), (22): Xaa is A or G
  MOD_RES (23), (24), (25), (26): Xaa is A or G or is absent

SEQ ID NO: 40439 - protein, 39 aa, Artificial Sequence; identical to SEQ ID NO: 16525
  GFR-binding peptide
  MOD_RES (6), (7): Xaa is C or S
  MOD_RES (21), (22), (23), (24), (25): Xaa is A or G
  MOD_RES (26), (27), (28), (29): Xaa is A or G or is absent

SEQ ID NO: 40440 - protein, 37 aa, Artificial Sequence; identical to SEQ ID NO: 14750
  GFR-binding peptide
  MOD_RES (1), (2), (34), (36): Xaa is C or S

SEQ ID NO: 40441 - protein, 41 aa, Artificial Sequence; identical to SEQ ID NO: 16526
  GFR-binding peptide
  MOD_RES (4), (5), (39), (41): Xaa is C or S
  MOD_RES (19), (20), (21), (22), (23): Xaa is A or G
  MOD_RES (24), (25), (26), (27): Xaa is A or G or is absent

SEQ ID NO: 40442 - protein, 33 aa, Artificial Sequence; identical to SEQ ID NO: 14751
  GFR-binding peptide
  MOD_RES (1), (1): Xaa is C or S
  MOD_RES (15), (16), (17), (18), (19): Xaa is A or G
  MOD_RES (20), (21), (22), (23): Xaa is A or G or is absent

SEQ ID NO: 40443 - protein, 40 aa, Artificial Sequence; identical to SEQ ID NO: 14752
  GFR-binding peptide
  MOD_RES (5), (6), (39): Xaa is C or S
  MOD_RES (20), (21), (22), (23), (24): Xaa is A or G
  MOD_RES (25), (26), (27), (28): Xaa is A or G or is absent

SEQ ID NO: 40444 - protein, 37 aa, Artificial Sequence; identical to SEQ ID NO: 14753
  GFR-binding peptide
  MOD_RES (4), (5): Xaa is C or S
  MOD_RES (19), (20), (21), (22), (23): Xaa is A or G
  MOD_RES (24), (25), (26), (27): Xaa is A or G or is absent

SEQ ID NO: 40445 - protein, 35 aa, Artificial Sequence; identical to SEQ ID NO: 16528
  GFR-binding peptide
  MOD_RES (1), (35): Xaa is C or S
  MOD_RES (15), (16), (17), (18), (19): Xaa is A or G
  MOD_RES (20), (21), (22), (23): Xaa is A or G or is absent

SEQ ID NO: 40446 - protein, 33 aa, Artificial Sequence; identical to SEQ ID NO: 14754
  GFR-binding peptide
  MOD_RES (1), (1): Xaa is C or S
  MOD_RES (15), (16), (17), (18), (19): Xaa is A or G
  MOD_RES (20), (21), (22), (23): Xaa is A or G or is absent

SEQ ID NO: 40447 - protein, 42 aa, Artificial Sequence; identical to SEQ ID NO: 16529
  GFR-binding peptide
  MOD_RES (7), (41): Xaa is C or S
  MOD_RES (21), (22), (23), (24), (25): Xaa is A or G
  MOD_RES (26), (27), (28), (29): Xaa is A or G or is absent

SEQ ID NO: 40448 - protein, 36 aa, Artificial Sequence; identical to SEQ ID NO: 9253
  GFR-binding peptide
  MOD_RES (1), (34), (36): Xaa is C or S
  MOD_RES (15), (16), (17), (18), (19): Xaa is A or G
  MOD_RES (20), (21), (22), (23): Xaa is A or G or is absent

SEQ ID NO: 40449 - protein, 34 aa, Artificial Sequence; identical to SEQ ID NO: 16531
  GFR-binding peptide
  MOD_RES (1), (2), (34): Xaa is C or S

SEQ ID NO: 40450 - protein, 40 aa, Artificial Sequence; identical to SEQ ID NO: 14755
  GFR-binding peptide
  MOD_RES (5), (6), (37), (39): Xaa is C or S

SEQ ID NO: 40451 - protein, 38 aa, Artificial Sequence; identical to SEQ ID NO: 9255
  GFR-binding peptide
  MOD_RES (5), (6), (37): Xaa is C or S

SEQ ID NO: 40452 - protein, 36 aa, Artificial Sequence; identical to SEQ ID NO: 14757
  GFR-binding peptide
  MOD_RES (33), (35): Xaa is C or S
  MOD_RES (14), (15), (16), (17), (18): Xaa is A or G
  MOD_RES (19), (20), (21), (22): Xaa is A or G or is absent

SEQ ID NO: 40453 - protein, 36 aa, Artificial Sequence; identical to SEQ ID NO: 9257
  GFR-binding peptide
  MOD_RES (1), (33), (35): Xaa is C or S

SEQ ID NO: 40454 - protein, 43 aa, Artificial Sequence; identical to SEQ ID NO: 16536
  GFR-binding peptide
  MOD_RES (6), (7), (41), (43): Xaa is C or S
  MOD_RES (21), (22), (23), (24), (25): Xaa is A or G
  MOD_RES (26), (27), (28), (29): Xaa is A or G or is absent

SEQ ID NO: 40455 - protein, 37 aa, Artificial Sequence; identical to SEQ ID NO: 9258
  GFR-binding peptide
  MOD_RES (4), (5), (36): Xaa is C or S

SEQ ID NO: 40456 - protein, 41 aa, Artificial Sequence; identical to SEQ ID NO: 16538
  GFR-binding peptide
  MOD_RES (4), (5), (39), (41): Xaa is C or S
  MOD_RES (19), (20), (21), (22), (23): Xaa is A or G
  MOD_RES (24), (25), (26), (27): Xaa is A or G or is absent

SEQ ID NO: 40457 - protein, 34 aa, Artificial Sequence; identical to SEQ ID NO: 9261
  GFR-binding peptide
  MOD_RES (3), (4): Xaa is C or S

SEQ ID NO: 40458 - protein, 41 aa, Artificial Sequence; identical to SEQ ID NO: 16540
  GFR-binding peptide
  MOD_RES (6), (7), (39), (41): Xaa is C or S

SEQ ID NO: 40459 - protein, 41 aa, Artificial Sequence; identical to SEQ ID NO: 7462
  GFR-binding peptide
  MOD_RES (6), (7), (39), (41): Xaa is C or S

SEQ ID NO: 40460 - protein, 38 aa, Artificial Sequence; identical to SEQ ID NO: 14761
  GFR-binding peptide
  MOD_RES (3), (4), (38): Xaa is C or S
  MOD_RES (18), (19), (20), (21), (22): Xaa is A or G
  MOD_RES (23), (24), (25), (26): Xaa is A or G or is absent

SEQ ID NO: 40461 - protein, 42 aa, Artificial Sequence; identical to SEQ ID NO: 14762
  GFR-binding peptide
  MOD_RES (5), (6), (40), (42): Xaa is C or S
  MOD_RES (20), (21), (22), (23), (24): Xaa is A or G
  MOD_RES (25), (26), (27), (28): Xaa is A or G or is absent

SEQ ID NO: 40462 - protein, 32 aa, Artificial Sequence; identical to SEQ ID NO: 14763
  GFR-binding peptide
  MOD_RES (32), (32): Xaa is C or S

SEQ ID NO: 40463 - protein, 32 aa, Artificial Sequence; identical to SEQ ID NO: 14764
  GFR-binding peptide
  MOD_RES (14), (15), (16), (17), (18): Xaa is A or G
  MOD_RES (19), (20), (21), (22): Xaa is A or G or is absent

SEQ ID NO: 40464 - protein, 36 aa, Artificial Sequence; identical to SEQ ID NO: 14765
  GFR-binding peptide
  MOD_RES (1), (34), (36): Xaa is C or S
  MOD_RES (15), (16), (17), (18), (19): Xaa is A or G
  MOD_RES (20), (21), (22), (23): Xaa is A or G or is absent

SEQ ID NO: 40465 - protein, 37 aa, Artificial Sequence; identical to SEQ ID NO: 9265
  GFR-binding peptide
  MOD_RES (4), (5): Xaa is C or S
  MOD_RES (19), (20), (21), (22), (23): Xaa is A or G
  MOD_RES (24), (25), (26), (27): Xaa is A or G or is absent

SEQ ID NO: 40466 - protein, 32 aa, Artificial Sequence; identical to SEQ ID NO: 16544
  GFR-binding peptide
  MOD_RES (1), (2): Xaa is C or S

SEQ ID NO: 40467 - protein, 36 aa, Artificial Sequence; identical to SEQ ID NO: 14767
  GFR-binding peptide
  MOD_RES (5), (6): Xaa is C or S

SEQ ID NO: 40468 - protein, 38 aa, Artificial Sequence; identical to SEQ ID NO: 16545
  GFR-binding peptide
  MOD_RES (6), (38): Xaa is C or S

SEQ ID NO: 40469 - protein, 32 aa, Artificial Sequence; identical to SEQ ID NO: 14768
  GFR-binding peptide
  MOD_RES (1), (2): Xaa is C or S

SEQ ID NO: 40470 - protein, 38 aa, Artificial Sequence; identical to SEQ ID NO: 14769
  GFR-binding peptide
  MOD_RES (4), (5), (36), (38): Xaa is C or S

SEQ ID NO: 40471 - protein, 34 aa, Artificial Sequence; identical to SEQ ID NO: 7475
  GFR-binding peptide
  MOD_RES (2), (3), (34): Xaa is C or S

SEQ ID NO: 40472 - protein, 36 aa, Artificial Sequence; identical to SEQ ID NO: 16547
  GFR-binding peptide
  MOD_RES (5), (6): Xaa is C or S

SEQ ID NO: 40473 - protein, 40 aa, Artificial Sequence; identical to SEQ ID NO: 14772
  GFR-binding peptide
  MOD_RES (4), (5), (39): Xaa is C or S
  MOD_RES (19), (20), (21), (22), (23): Xaa is A or G
  MOD_RES (24), (25), (26), (27): Xaa is A or G or is absent

SEQ ID NO: 40474 - protein, 40 aa, Artificial Sequence; identical to SEQ ID NO: 16548
  GFR-binding peptide
  MOD_RES (4), (5), (39): Xaa is C or S
  MOD_RES (19), (20), (21), (22), (23): Xaa is A or G
  MOD_RES (24), (25), (26), (27): Xaa is A or G or is absent

SEQ ID NO: 40475 - protein, 38 aa, Artificial Sequence; identical to SEQ ID NO: 16549
  GFR-binding peptide
  MOD_RES (2), (3), (35), (37): Xaa is C or S

SEQ ID NO: 40476 - protein, 33 aa, Artificial Sequence; identical to SEQ ID NO: 14773
  GFR-binding peptide
  MOD_RES (31), (33): Xaa is C or S

SEQ ID NO: 40477 - protein, 36 aa, Artificial Sequence; identical to SEQ ID NO: 14774
  GFR-binding peptide
  MOD_RES (34), (36): Xaa is C or S
  MOD_RES (14), (15), (16), (17), (18): Xaa is A or G
  MOD_RES (19), (20), (21), (22): Xaa is A or G or is absent

SEQ ID NO: 40478 - protein, 38 aa, Artificial Sequence; identical to SEQ ID NO: 14775
  GFR-binding peptide
  MOD_RES (5), (6): Xaa is C or S
  MOD_RES (20), (21), (22), (23), (24): Xaa is A or G
  MOD_RES (25), (26), (27), (28): Xaa is A or G or is absent

SEQ ID NO: 40479 - protein, 41 aa, Artificial Sequence; identical to SEQ ID NO: 9276
  GFR-binding peptide
  MOD_RES (6), (7), (38), (40): Xaa is C or S

SEQ ID NO: 40480 - protein, 36 aa, Artificial Sequence; identical to SEQ ID NO: 16552
  GFR-binding peptide
  MOD_RES (3), (4), (36): Xaa is C or S

SEQ ID NO: 40481 - protein, 38 aa, Artificial Sequence; identical to SEQ ID NO: 7480
  GFR-binding peptide
  MOD_RES (1), (2), (36), (38): Xaa is C or S
  MOD_RES (16), (17), (18), (19), (20): Xaa is A or G
  MOD_RES (21), (22), (23), (24): Xaa is A or G or is absent

SEQ ID NO: 40482 - protein, 30 aa, Artificial Sequence; identical to SEQ ID NO: 16553
  GFR-binding peptide

SEQ ID NO: 40483 - protein, 33 aa, Artificial Sequence; identical to SEQ ID NO: 16554
  GFR-binding peptide
  MOD_RES (14), (15), (16), (17), (18): Xaa is A or G
  MOD_RES (19), (20), (21), (22): Xaa is A or G or is absent

SEQ ID NO: 40484 - protein, 40 aa, Artificial Sequence; identical to SEQ ID NO: 14777
  GFR-binding peptide
  MOD_RES (5), (6), (40): Xaa is C or S
  MOD_RES (20), (21), (22), (23), (24): Xaa is A or G
  MOD_RES (25), (26), (27), (28): Xaa is A or G or is absent

SEQ ID NO: 40485 - protein, 34 aa, Artificial Sequence; identical to SEQ ID NO: 14778
  GFR-binding peptide
  MOD_RES (2), (3): Xaa is C or S

SEQ ID NO: 40486 - protein, 44 aa, Artificial Sequence; identical to SEQ ID NO: 16555
  GFR-binding peptide
  MOD_RES (6), (7), (41), (43): Xaa is C or S
  MOD_RES (21), (22), (23), (24), (25): Xaa is A or G
  MOD_RES (26), (27), (28), (29): Xaa is A or G or is absent

SEQ ID NO: 40487 - protein, 36 aa, Artificial Sequence; identical to SEQ ID NO: 16556
  GFR-binding peptide
  MOD_RES (1), (2), (35): Xaa is C or S
  MOD_RES (16), (17), (18), (19), (20): Xaa is A or G
  MOD_RES (21), (22), (23), (24): Xaa is A or G or is absent

SEQ ID NO: 40488 - protein, 32 aa, Artificial Sequence; identical to SEQ ID NO: 14779
  GFR-binding peptide
  MOD_RES (1), (32): Xaa is C or S

SEQ ID NO: 40489 - protein, 39 aa, Artificial Sequence; identical to SEQ ID NO: 9279
  GFR-binding peptide
  MOD_RES (4), (5), (36), (38): Xaa is C or S

SEQ ID NO: 40490 - protein, 42 aa, Artificial Sequence; identical to SEQ ID NO: 14780
  GFR-binding peptide
  MOD_RES (5), (6), (40), (42): Xaa is C or S
  MOD_RES (20), (21), (22), (23), (24): Xaa is A or G
  MOD_RES (25), (26), (27), (28): Xaa is A or G or is absent

SEQ ID NO: 40491 - protein, 37 aa, Artificial Sequence; identical to SEQ ID NO: 14783
  GFR-binding peptide
  MOD_RES (3), (4), (36): Xaa is C or S

SEQ ID NO: 40492 - protein, 34 aa, Artificial Sequence; identical to SEQ ID NO: 7485
  GFR-binding peptide
  MOD_RES (1), (33): Xaa is C or S

SEQ ID NO: 40493 - protein, 40 aa, Artificial Sequence; identical to SEQ ID NO: 16560
  GFR-binding peptide
  MOD_RES (5), (6), (39): Xaa is C or S
  MOD_RES (20), (21), (22), (23), (24): Xaa is A or G
  MOD_RES (25), (26), (27), (28): Xaa is A or G or is absent

SEQ ID NO: 40494 - protein, 41 aa, Artificial Sequence; identical to SEQ ID NO: 14786
  GFR-binding peptide
  MOD_RES (4), (5), (38), (40): Xaa is C or S
  MOD_RES (19), (20), (21), (22), (23): Xaa is A or G
  MOD_RES (24), (25), (26), (27): Xaa is A or G or is absent

SEQ ID NO: 40495 - protein, 37 aa, Artificial Sequence; identical to SEQ ID NO: 16561
  GFR-binding peptide
  MOD_RES (1), (2), (34), (36): Xaa is C or S

SEQ ID NO: 40496 - protein, 39 aa, Artificial Sequence; identical to SEQ ID NO: 14787
  GFR-binding peptide
  MOD_RES (5), (39): Xaa is C or S
  MOD_RES (19), (20), (21), (22), (23): Xaa is A or G
  MOD_RES (24), (25), (26), (27): Xaa is A or G or is absent

SEQ ID NO: 40497 - protein, 38 aa, Artificial Sequence; identical to SEQ ID NO: 14788
  GFR-binding peptide
  MOD_RES (1), (35), (37): Xaa is C or S
  MOD_RES (15), (16), (17), (18), (19): Xaa is A or G
  MOD_RES (20), (21), (22), (23): Xaa is A or G or is absent

SEQ ID NO: 40498 - protein, 38 aa, Artificial Sequence; identical to SEQ ID NO: 14790
  GFR-binding peptide
  MOD_RES (5), (6): Xaa is C or S
  MOD_RES (20), (21), (22), (23), (24): Xaa is A or G
  MOD_RES (25), (26), (27), (28): Xaa is A or G or is absent

SEQ ID NO: 40499 - protein, 37 aa, Artificial Sequence; identical to SEQ ID NO: 7489
  GFR-binding peptide
  MOD_RES (6), (7): Xaa is C or S

SEQ ID NO: 40500 - protein, 40 aa, Artificial Sequence; identical to SEQ ID NO: 14792
  GFR-binding peptide
  MOD_RES (6), (7): Xaa is C or S
  MOD_RES (21), (22), (23), (24), (25): Xaa is A or G
  MOD_RES (26), (27), (28), (29): Xaa is A or G or is absent

SEQ ID NO: 40501 - protein, 33 aa, Artificial Sequence; identical to SEQ ID NO: 16562
  GFR-binding peptide
  MOD_RES (1), (33): Xaa is C or S

SEQ ID NO: 40502 - protein, 36 aa, Artificial Sequence; identical to SEQ ID NO: 16563
  GFR-binding peptide
  MOD_RES (1), (2), (34), (36): Xaa is C or S

SEQ ID NO: 40503 - protein, 41 aa, Artificial Sequence; identical to SEQ ID NO: 14793
  GFR-binding peptide
  MOD_RES (3), (4), (38), (40): Xaa is C or S
  MOD_RES (18), (19), (20), (21), (22): Xaa is A or G
  MOD_RES (23), (24), (25), (26): Xaa is A or G or is absent

SEQ ID NO: 40504 - protein, 32 aa, Artificial Sequence; identical to SEQ ID NO: 14794
  GFR-binding peptide
  MOD_RES (2), (2): Xaa is C or S

SEQ ID NO: 40505 - protein, 38 aa, Artificial Sequence; identical to SEQ ID NO: 16564
  GFR-binding peptide
  MOD_RES (6), (7), (38): Xaa is C or S

SEQ ID NO: 40506 - protein, 37 aa, Artificial Sequence; identical to SEQ ID NO: 14797
  GFR-binding peptide
  MOD_RES (1), (34), (36): Xaa is C or S
  MOD_RES (15), (16), (17), (18), (19): Xaa is A or G
  MOD_RES (20), (21), (22), (23): Xaa is A or G or is absent

SEQ ID NO: 40507 - protein, 33 aa, Artificial Sequence; identical to SEQ ID NO: 16565
  GFR-binding peptide
  MOD_RES (31), (33): Xaa is C or S

SEQ ID NO: 40508 - protein, 37 aa, Artificial Sequence; identical to SEQ ID NO: 14799
  GFR-binding peptide
  MOD_RES (3), (35), (37): Xaa is C or S

SEQ ID NO: 40509 - protein, 31 aa, Artificial Sequence; identical to SEQ ID NO: 16567
  GFR-binding peptide

SEQ ID NO: 40510 - protein, 37 aa, Artificial Sequence; identical to SEQ ID NO: 14800
  GFR-binding peptide
  MOD_RES (4), (5): Xaa is C or S
  MOD_RES (19), (20), (21), (22), (23): Xaa is A or G
  MOD_RES (24), (25), (26), (27): Xaa is A or G or is absent

SEQ ID NO: 40511 - protein, 37 aa, Artificial Sequence; identical to SEQ ID NO: 9285
  GFR-binding peptide
  MOD_RES (4), (5): Xaa is C or S
  MOD_RES (19), (20), (21), (22), (23): Xaa is A or G
  MOD_RES (24), (25), (26), (27): Xaa is A or G or is absent

SEQ ID NO: 40512 - protein, 34 aa, Artificial Sequence; identical to SEQ ID NO: 16569
  GFR-binding peptide
  MOD_RES (34), (34): Xaa is C or S
  MOD_RES (14), (15), (16), (17), (18): Xaa is A or G
  MOD_RES (19), (20), (21), (22): Xaa is A or G or is absent

SEQ ID NO: 40513 - protein, 37 aa, Artificial Sequence; identical to SEQ ID NO: 14801
  GFR-binding peptide
  MOD_RES (5), (5): Xaa is C or S
  MOD_RES (19), (20), (21), (22), (23): Xaa is A or G
  MOD_RES (24), (25), (26), (27): Xaa is A or G or is absent

SEQ ID NO: 40514 - protein, 37 aa, Artificial Sequence; identical to SEQ ID NO: 16570
  GFR-binding peptide
  MOD_RES (2), (3), (34), (36): Xaa is C or S

SEQ ID NO: 40515 - protein, 40 aa, Artificial Sequence; identical to SEQ ID NO: 14802
  GFR-binding peptide
  MOD_RES (2), (3), (37), (39): Xaa is C or S
  MOD_RES (17), (18), (19), (20), (21): Xaa is A or G
  MOD_RES (22), (23), (24), (25): Xaa is A or G or is absent

SEQ ID NO: 40516 - protein, 33 aa, Artificial Sequence; identical to SEQ ID NO: 7497
  GFR-binding peptide
  MOD_RES (1), (2): Xaa is C or S

SEQ ID NO: 40517 - protein, 41 aa, Artificial Sequence; identical to SEQ ID NO: 16571
  GFR-binding peptide
  MOD_RES (5), (39), (41): Xaa is C or S
  MOD_RES (19), (20), (21), (22), (23): Xaa is A or G
  MOD_RES (24), (25), (26), (27): Xaa is A or G or is absent

SEQ ID NO: 40518 - protein, 36 aa, Artificial Sequence; identical to SEQ ID NO: 16572
  GFR-binding peptide
  MOD_RES (2), (3), (36): Xaa is C or S
  MOD_RES (17), (18), (19), (20), (21): Xaa is A or G
  MOD_RES (22), (23), (24), (25): Xaa is A or G or is absent

SEQ ID NO: 40519 - protein, 37 aa, Artificial Sequence; identical to SEQ ID NO: 14805
  GFR-binding peptide
  MOD_RES (4), (5), (36): Xaa is C or S

SEQ ID NO: 40520 - protein, 35 aa, Artificial Sequence; identical to SEQ ID NO: 16573
  GFR-binding peptide
  MOD_RES (4), (5): Xaa is C or S

SEQ ID NO: 40521 - protein, 36 aa, Artificial Sequence; identical to SEQ ID NO: 14806
  GFR-binding peptide
  MOD_RES (3), (4): Xaa is C or S
  MOD_RES (18), (19), (20), (21), (22): Xaa is A or G
  MOD_RES (23), (24), (25), (26): Xaa is A or G or is absent

SEQ ID NO: 40522 - protein, 40 aa, Artificial Sequence; identical to SEQ ID NO: 16574
  GFR-binding peptide
  MOD_RES (4), (5), (37), (39): Xaa is C or S

SEQ ID NO: 40523 - protein, 40 aa, Artificial Sequence; identical to SEQ ID NO: 9287
  GFR-binding peptide
  MOD_RES (5), (6), (38), (40): Xaa is C or S

SEQ ID NO: 40524 - protein, 33 aa, Artificial Sequence; identical to SEQ ID NO: 16576
  GFR-binding peptide
  MOD_RES (33), (33): Xaa is C or S
  MOD_RES (14), (15), (16), (17), (18): Xaa is A or G
  MOD_RES (19), (20), (21), (22): Xaa is A or G or is absent

SEQ ID NO: 40525 - protein, 35 aa, Artificial Sequence; identical to SEQ ID NO: 16577
  GFR-binding peptide
  MOD_RES (1), (2): Xaa is C or S
  MOD_RES (16), (17), (18), (19), (20): Xaa is A or G
  MOD_RES (21), (22), (23), (24): Xaa is A or G or is absent

SEQ ID NO: 40526 - protein, 34 aa, Artificial Sequence; identical to SEQ ID NO: 16578
  GFR-binding peptide
  MOD_RES (34), (34): Xaa is C or S
  MOD_RES (14), (15), (16), (17), (18): Xaa is A or G
  MOD_RES (19), (20), (21), (22): Xaa is A or G or is absent

SEQ ID NO: 40527 - protein, 40 aa, Artificial Sequence; identical to SEQ ID NO: 14807
  GFR-binding peptide
  MOD_RES (6), (7): Xaa is C or S
  MOD_RES (21), (22), (23), (24), (25): Xaa is A or G
  MOD_RES (26), (27), (28), (29): Xaa is A or G or is absent

SEQ ID NO: 40528 - protein, 37 aa, Artificial Sequence; identical to SEQ ID NO: 14808
  GFR-binding peptide
  MOD_RES (1), (2), (36): Xaa is C or S
  MOD_RES (16), (17), (18), (19), (20): Xaa is A or G
  MOD_RES (21), (22), (23), (24): Xaa is A or G or is absent

SEQ ID NO: 40529 - protein, 34 aa, Artificial Sequence; identical to SEQ ID NO: 16579
  GFR-binding peptide
  MOD_RES (34), (34): Xaa is C or S
  MOD_RES (14), (15), (16), (17), (18): Xaa is A or G
  MOD_RES (19), (20), (21), (22): Xaa is A or G or is absent

SEQ ID NO: 40530 - protein, 37 aa, Artificial Sequence; identical to SEQ ID NO: 7501
  GFR-binding peptide
  MOD_RES (1), (2), (34), (36): Xaa is C or S

SEQ ID NO: 40531 - protein, 37 aa, Artificial Sequence; identical to SEQ ID NO: 16580
  GFR-binding peptide
  MOD_RES (4), (5), (36): Xaa is C or S

SEQ ID NO: 40532 - protein, 31 aa, Artificial Sequence; identical to SEQ ID NO: 16581
  GFR-binding peptide
  MOD_RES (1), (1): Xaa is C or S

SEQ ID NO: 40533 - protein, 39 aa, Artificial Sequence; identical to SEQ ID NO: 9292
  GFR-binding peptide
  MOD_RES (6), (7): Xaa is C or S
  MOD_RES (21), (22), (23), (24), (25): Xaa is A or G
  MOD_RES (26), (27), (28), (29): Xaa is A or G or is absent

SEQ ID NO: 40534 - protein, 41 aa, Artificial Sequence; identical to SEQ ID NO: 14811
  GFR-binding peptide
  MOD_RES (6), (7), (41): Xaa is C or S
  MOD_RES (21), (22), (23), (24), (25): Xaa is A or G
  MOD_RES (26), (27), (28), (29): Xaa is A or G or is absent

SEQ ID NO: 40535 - protein, 44 aa, Artificial Sequence; identical to SEQ ID NO: 9294
  GFR-binding peptide
  MOD_RES (6), (7), (41), (43): Xaa is C or S
  MOD_RES (21), (22), (23), (24), (25): Xaa is A or G
  MOD_RES (26), (27), (28), (29): Xaa is A or G or is absent

SEQ ID NO: 40536 - protein, 35 aa, Artificial Sequence; identical to SEQ ID NO: 16585
  GFR-binding peptide
  MOD_RES (32), (34): Xaa is C or S

SEQ ID NO: 40537 - protein, 34 aa, Artificial Sequence; identical to SEQ ID NO: 16586
  GFR-binding peptide
  MOD_RES (2), (3): Xaa is C or S

SEQ ID NO: 40538 - protein, 40 aa, Artificial Sequence; identical to SEQ ID NO: 16587
  GFR-binding peptide
  MOD_RES (5), (6), (38), (40): Xaa is C or S

SEQ ID NO: 40539 - protein, 38 aa, Artificial Sequence; identical to SEQ ID NO: 16588
  GFR-binding peptide
  MOD_RES (3), (4), (38): Xaa is C or S
  MOD_RES (18), (19), (20), (21), (22): Xaa is A or G
  MOD_RES (23), (24), (25), (26): Xaa is A or G or is absent

SEQ ID NO: 40540 - protein, 36 aa, Artificial Sequence; identical to SEQ ID NO: 7507
  GFR-binding peptide
  MOD_RES (5), (6): Xaa is C or S

SEQ ID NO: 40541 - protein, 40 aa, Artificial Sequence; identical to SEQ ID NO: 16589
  GFR-binding peptide
  MOD_RES (5), (6), (38), (40): Xaa is C or S

SEQ ID NO: 40542 - protein, 39 aa, Artificial Sequence; identical to SEQ ID NO: 14813
  GFR-binding peptide
  MOD_RES (3), (4), (38): Xaa is C or S
  MOD_RES (18), (19), (20), (21), (22): Xaa is A or G
  MOD_RES (23), (24), (25), (26): Xaa is A or G or is absent

SEQ ID NO: 40543 - protein, 39 aa, Artificial Sequence; identical to SEQ ID NO: 14814
  GFR-binding peptide
  MOD_RES (4), (5), (36), (38): Xaa is C or S

SEQ ID NO: 40544 - protein, 34 aa, Artificial Sequence; identical to SEQ ID NO: 16591
  GFR-binding peptide
  MOD_RES (1), (2), (33): Xaa is C or S

SEQ ID NO: 40545 - protein, 40 aa, Artificial Sequence; identical to SEQ ID NO: 14815
  GFR-binding peptide
  MOD_RES (5), (6), (38), (40): Xaa is C or S

SEQ ID NO: 40546 - protein, 42 aa, Artificial Sequence; identical to SEQ ID NO: 9302
  GFR-binding peptide
  MOD_RES (6), (7), (40), (42): Xaa is C or S
  MOD_RES (21), (22), (23), (24), (25): Xaa is A or G
  MOD_RES (26), (27), (28), (29): Xaa is A or G or is absent

SEQ ID NO: 40547 - protein, 43 aa, Artificial Sequence; identical to SEQ ID NO: 14816
  GFR-binding peptide
  MOD_RES (6), (7), (41), (43): Xaa is C or S
  MOD_RES (21), (22), (23), (24), (25): Xaa is A or G
  MOD_RES (26), (27), (28), (29): Xaa is A or G or is absent

SEQ ID NO: 40548 - protein, 33 aa, Artificial Sequence; identical to SEQ ID NO: 14817
  GFR-binding peptide
  MOD_RES (14), (15), (16), (17), (18): Xaa is A or G
  MOD_RES (19), (20), (21), (22): Xaa is A or G or is absent

SEQ ID NO: 40549 - protein, 32 aa, Artificial Sequence; identical to SEQ ID NO: 14818
  GFR-binding peptide
  MOD_RES (1), (2): Xaa is C or S

SEQ ID NO: 40550 - protein, 39 aa, Artificial Sequence; identical to SEQ ID NO: 16593
  GFR-binding peptide
  MOD_RES (7), (7): Xaa is C or S
  MOD_RES (21), (22), (23), (24), (25): Xaa is A or G
  MOD_RES (26), (27), (28), (29): Xaa is A or G or is absent

SEQ ID NO: 40551 - protein, 36 aa, Artificial Sequence; identical to SEQ ID NO: 16594
  GFR-binding peptide
  MOD_RES (1), (2), (36): Xaa is C or S
  MOD_RES (16), (17), (18), (19), (20): Xaa is A or G
  MOD_RES (21), (22), (23), (24): Xaa is A or G or is absent

SEQ ID NO: 40552 - protein, 42 aa, Artificial Sequence; identical to SEQ ID NO: 14819
  GFR-binding peptide
  MOD_RES (4), (5), (39), (41): Xaa is C or S
  MOD_RES (19), (20), (21), (22), (23): Xaa is A or G
  MOD_RES (24), (25), (26), (27): Xaa is A or G or is absent

SEQ ID NO: 40553 - protein, 34 aa, Artificial Sequence; identical to SEQ ID NO: 14820
  GFR-binding peptide
  MOD_RES (2), (3): Xaa is C or S

SEQ ID NO: 40554 - protein, 37 aa, Artificial Sequence; identical to SEQ ID NO: 16595
  GFR-binding peptide
  MOD_RES (3), (4), (37): Xaa is C or S
  MOD_RES (18), (19), (20), (21), (22): Xaa is A or G
  MOD_RES (23), (24), (25), (26): Xaa is A or G or is absent

SEQ ID NO: 40555 - protein, 40 aa, Artificial Sequence; identical to SEQ ID NO: 14821
  GFR-binding peptide
  MOD_RES (7), (39): Xaa is C or S

SEQ ID NO: 40556 - protein, 38 aa, Artificial Sequence; identical to SEQ ID NO: 14822
  GFR-binding peptide
  MOD_RES (6), (7), (38): Xaa is C or S

SEQ ID NO: 40557 - protein, 41 aa, Artificial Sequence; identical to SEQ ID NO: 14823
  GFR-binding peptide
  MOD_RES (6), (7), (39), (41): Xaa is C or S

SEQ ID NO: 40558 - protein, 43 aa, Artificial Sequence; identical to SEQ ID NO: 9303
  GFR-binding peptide
  MOD_RES (6), (7), (40), (42): Xaa is C or S
  MOD_RES (21), (22), (23), (24), (25): Xaa is A or G
  MOD_RES (26), (27), (28), (29): Xaa is A or G or is absent

SEQ ID NO: 40559 - protein, 35 aa, Artificial Sequence; identical to SEQ ID NO: 14824
  GFR-binding peptide
  MOD_RES (1), (33), (35): Xaa is C or S

SEQ ID NO: 40560 - protein, 33 aa, Artificial Sequence; identical to SEQ ID NO: 9304
  GFR-binding peptide
  MOD_RES (31), (33): Xaa is C or S

SEQ ID NO: 40561 - protein, 37 aa, Artificial Sequence; identical to SEQ ID NO: 16598
  GFR-binding peptide
  MOD_RES (3), (37): Xaa is C or S
  MOD_RES (17), (18), (19), (20), (21): Xaa is A or G
  MOD_RES (22), (23), (24), (25): Xaa is A or G or is absent

SEQ ID NO: 40562 - protein, 38 aa, Artificial Sequence; identical to SEQ ID NO: 16600
  GFR-binding peptide
  MOD_RES (5), (6): Xaa is C or S
  MOD_RES (20), (21), (22), (23), (24): Xaa is A or G
  MOD_RES (25), (26), (27), (28): Xaa is A or G or is absent

SEQ ID NO: 40563 - protein, 37 aa, Artificial Sequence; identical to SEQ ID NO: 16601
  GFR-binding peptide
  MOD_RES (5), (6): Xaa is C or S

SEQ ID NO: 40564 - protein, 34 aa, Artificial Sequence; identical to SEQ ID NO: 14826
  GFR-binding peptide
  MOD_RES (31), (33): Xaa is C or S

SEQ ID NO: 40565 - protein, 40 aa, Artificial Sequence; identical to SEQ ID NO: 14827
  GFR-binding peptide
  MOD_RES (4), (5), (38), (40): Xaa is C or S
  MOD_RES (19), (20), (21), (22), (23): Xaa is A or G
  MOD_RES (24), (25), (26), (27): Xaa is A or G or is absent

SEQ ID NO: 40566 - protein, 38 aa, Artificial Sequence; identical to SEQ ID NO: 14828
  GFR-binding peptide
  MOD_RES (2), (36), (38): Xaa is C or S
  MOD_RES (16), (17), (18), (19), (20): Xaa is A or G
  MOD_RES (21), (22), (23), (24): Xaa is A or G or is absent

SEQ ID NO: 40567 - protein, 34 aa, Artificial Sequence; identical to SEQ ID NO: 16602
  GFR-binding peptide
  MOD_RES (1), (2), (34): Xaa is C or S

SEQ ID NO: 40568 - protein, 41 aa, Artificial Sequence; identical to SEQ ID NO: 16603
  GFR-binding peptide
  MOD_RES (6), (38), (40): Xaa is C or S

SEQ ID NO: 40569 - protein, 39 aa, Artificial Sequence; identical to SEQ ID NO: 16604
  GFR-binding peptide
  MOD_RES (5), (6), (38): Xaa is C or S

SEQ ID NO: 40570 - protein, 40 aa, Artificial Sequence; identical to SEQ ID NO: 14829
  GFR-binding peptide
  MOD_RES (3), (4), (38), (40): Xaa is C or S
  MOD_RES (18), (19), (20), (21), (22): Xaa is A or G
  MOD_RES (23), (24), (25), (26): Xaa is A or G or is absent

SEQ ID NO: 40571 - protein, 39 aa, Artificial Sequence; identical to SEQ ID NO: 14830
  GFR-binding peptide
  MOD_RES (5), (6): Xaa is C or S
  MOD_RES (20), (21), (22), (23), (24): Xaa is A or G
  MOD_RES (25), (26), (27), (28): Xaa is A or G or is absent

SEQ ID NO: 40572 - protein, 41 aa, Artificial Sequence; identical to SEQ ID NO: 16605
  GFR-binding peptide
  MOD_RES (6), (7), (41): Xaa is C or S
  MOD_RES (21), (22), (23), (24), (25): Xaa is A or G
  MOD_RES (26), (27), (28), (29): Xaa is A or G or is absent

SEQ ID NO: 40573 - protein, 39 aa, Artificial Sequence; identical to SEQ ID NO: 16606
  GFR-binding peptide
  MOD_RES (5), (6), (38): Xaa is C or S

SEQ ID NO: 40574 - protein, 38 aa, Artificial Sequence; identical to SEQ ID NO: 16607
  GFR-binding peptide
  MOD_RES (2), (3), (35), (37): Xaa is C or S

SEQ ID NO: 40575 - protein, 37 aa, Artificial Sequence
  GFR-binding peptide
  MOD_RES (4), (5): Xaa is C or S
  MOD_RES (19), (20), (21), (22), (23): Xaa is A or G
  MOD_RES (24), (25), (26), (27): Xaa is A or G or is absent
ASPXXVSQDLEPLTILYYXXXXXXXXXEQLSNMIVKS

SEQ ID NO: 40576 - protein, 38 aa, Artificial Sequence; identical to SEQ ID NO: 16609
  GFR-binding peptide
  MOD_RES (1), (2), (36), (38): Xaa is C or S
  MOD_RES (16), (17), (18), (19), (20): Xaa is A or G
  MOD_RES (21), (22), (23), (24): Xaa is A or G or is absent

SEQ ID NO: 40577 - protein, 38 aa, Artificial Sequence; identical to SEQ ID NO: 16610
  GFR-binding peptide
  MOD_RES (5), (6): Xaa is C or S
  MOD_RES (20), (21), (22), (23), (24): Xaa is A or G
  MOD_RES (25), (26), (27), (28): Xaa is A or G or is absent

SEQ ID NO: 40578 - protein, 36 aa, Artificial Sequence; identical to SEQ ID NO: 14831
  GFR-binding peptide
  MOD_RES (1), (2), (34), (36): Xaa is C or S

SEQ ID NO: 40579 - protein, 36 aa, Artificial Sequence; identical to SEQ ID NO: 14832
  GFR-binding peptide
  MOD_RES (3), (35): Xaa is C or S

SEQ ID NO: 40580 - protein, 39 aa, Artificial Sequence; identical to SEQ ID NO: 14833
  GFR-binding peptide
  MOD_RES (6), (7), (39): Xaa is C or S

SEQ ID NO: 40581 - protein, 36 aa, Artificial Sequence; identical to SEQ ID NO: 16612
  GFR-binding peptide
  MOD_RES (5), (6): Xaa is C or S

SEQ ID NO: 40582 - protein, 38 aa, Artificial Sequence; identical to SEQ ID NO: 7521
  GFR-binding peptide
  MOD_RES (3), (4), (38): Xaa is C or S
  MOD_RES (18), (19), (20), (21), (22): Xaa is A or G
  MOD_RES (23), (24), (25), (26): Xaa is A or G or is absent

SEQ ID NO: 40583 - protein, 34 aa, Artificial Sequence; identical to SEQ ID NO: 16613
  GFR-binding peptide
  MOD_RES (1), (1): Xaa is C or S
  MOD_RES (15), (16), (17), (18), (19): Xaa is A or G
  MOD_RES (20), (21), (22), (23): Xaa is A or G or is absent

SEQ ID NO: 40584 - protein, 35 aa, Artificial Sequence; identical to SEQ ID NO: 14835
  GFR-binding peptide
  MOD_RES (34), (34): Xaa is C or S
  MOD_RES (14), (15), (16), (17), (18): Xaa is A or G
  MOD_RES (19), (20), (21), (22): Xaa is A or G or is absent

SEQ ID NO: 40585 - protein, 34 aa, Artificial Sequence; identical to SEQ ID NO: 16614
  GFR-binding peptide
  MOD_RES (1), (2): Xaa is C or S
  MOD_RES (16), (17), (18), (19), (20): Xaa is A or G
  MOD_RES (21), (22), (23), (24): Xaa is A or G or is absent

SEQ ID NO: 40586 - protein, 39 aa, Artificial Sequence; identical to SEQ ID NO: 7522
  GFR-binding peptide
  MOD_RES (6), (7): Xaa is C or S
  MOD_RES (21), (22), (23), (24), (25): Xaa is A or G
  MOD_RES (26), (27), (28), (29): Xaa is A or G or is absent

SEQ ID NO: 40587 - protein, 40 aa, Artificial Sequence; identical to SEQ ID NO: 16615
  GFR-binding peptide
  MOD_RES (4), (5), (38), (40): Xaa is C or S
  MOD_RES (19), (20), (21), (22), (23): Xaa is A or G
  MOD_RES (24), (25), (26), (27): Xaa is A or G or is absent

SEQ ID NO: 40588 - protein, 36 aa, Artificial Sequence; identical to SEQ ID NO: 9316
  GFR-binding peptide
  MOD_RES (3), (4): Xaa is C or S
  MOD_RES (18), (19), (20), (21), (22): Xaa is A or G
  MOD_RES (23), (24), (25), (26): Xaa is A or G or is absent

SEQ ID NO: 40589 - protein, 39 aa, Artificial Sequence; identical to SEQ ID NO: 14837
  GFR-binding peptide
  MOD_RES (4), (5), (37), (39): Xaa is C or S

SEQ ID NO: 40590 - protein, 37 aa, Artificial Sequence; identical to SEQ ID NO: 16618
  GFR-binding peptide
  MOD_RES (34), (36): Xaa is C or S
  MOD_RES (14), (15), (16), (17), (18): Xaa is A or G
  MOD_RES (19), (20), (21), (22): Xaa is A or G or is absent

SEQ ID NO: 40591 - protein, 37 aa, Artificial Sequence; identical to SEQ ID NO: 9317
  GFR-binding peptide
  MOD_RES (3), (4), (37): Xaa is C or S
  MOD_RES (18), (19), (20), (21), (22): Xaa is A or G
  MOD_RES (23), (24), (25), (26): Xaa is A or G or is absent

SEQ ID NO: 40592 - protein, 39 aa, Artificial Sequence; identical to SEQ ID NO: 16620
  GFR-binding peptide
  MOD_RES (4), (38): Xaa is C or S
  MOD_RES (18), (19), (20), (21), (22): Xaa is A or G
  MOD_RES (23), (24), (25), (26): Xaa is A or G or is absent

SEQ ID NO: 40593 - protein, 39 aa, Artificial Sequence; identical to SEQ ID NO: 7527
  GFR-binding peptide
  MOD_RES (5), (6): Xaa is C or S
  MOD_RES (20), (21), (22), (23), (24): Xaa is A or G
  MOD_RES (25), (26), (27), (28): Xaa is A or G or is absent

SEQ ID NO: 40594 - protein, 37 aa, Artificial Sequence; identical to SEQ ID NO: 14839
  GFR-binding peptide
  MOD_RES (34), (36): Xaa is C or S
  MOD_RES (14), (15), (16), (17), (18): Xaa is A or G
  MOD_RES (19), (20), (21), (22): Xaa is A or G or is absent

SEQ ID NO: 40595 - protein, 38 aa, Artificial Sequence; identical to SEQ ID NO: 14840
  GFR-binding peptide
  MOD_RES (4), (5): Xaa is C or S
  MOD_RES (19), (20), (21), (22), (23): Xaa is A or G
  MOD_RES (24), (25), (26), (27): Xaa is A or G or is absent

SEQ ID NO: 40596 - protein, 42 aa, Artificial Sequence; identical to SEQ ID NO: 14841
  GFR-binding peptide
  MOD_RES (5), (6), (40), (42): Xaa is C or S
  MOD_RES (20), (21), (22), (23), (24): Xaa is A or G
  MOD_RES (25), (26), (27), (28): Xaa is A or G or is absent

SEQ ID NO: 40597 - protein, 33 aa, Artificial Sequence; identical to SEQ ID NO: 14842
  GFR-binding peptide
  MOD_RES (31), (33): Xaa is C or S

SEQ ID NO: 40598 - protein, 35 aa, Artificial Sequence; identical to SEQ ID NO: 14843
  GFR-binding peptide
  MOD_RES (1), (33), (35): Xaa is C or S

SEQ ID NO: 40599 - protein, 41 aa, Artificial Sequence; identical to SEQ ID NO: 16621
  GFR-binding peptide
  MOD_RES (4), (5), (39), (41): Xaa is C or S
  MOD_RES (19), (20), (21), (22), (23): Xaa is A or G
  MOD_RES (24), (25), (26), (27): Xaa is A or G or is absent

SEQ ID NO: 40600 - protein, 37 aa, Artificial Sequence; identical to SEQ ID NO: 14844
  GFR-binding peptide
  MOD_RES (3), (35), (37): Xaa is C or S

SEQ ID NO: 40601 - protein, 42 aa, Artificial Sequence; identical to SEQ ID NO: 14845
  GFR-binding peptide
  MOD_RES (5), (6), (39), (41): Xaa is C or S
  MOD_RES (20), (21), (22), (23), (24): Xaa is A or G
  MOD_RES (25), (26), (27), (28): Xaa is A or G or is absent

SEQ ID NO: 40602 - protein, 35 aa, Artificial Sequence; identical to SEQ ID NO: 16624
  GFR-binding peptide
  MOD_RES (32), (34): Xaa is C or S

SEQ ID NO: 40603 - protein, 41 aa, Artificial Sequence; identical to SEQ ID NO: 16625
  GFR-binding peptide
  MOD_RES (7), (41): Xaa is C or S
  MOD_RES (21), (22), (23), (24), (25): Xaa is A or G
  MOD_RES (26), (27), (28), (29): Xaa is A or G or is absent

SEQ ID NO: 40604 - protein, 35 aa, Artificial Sequence; identical to SEQ ID NO: 9324
  GFR-binding peptide
  MOD_RES (1), (33), (35): Xaa is C or S

SEQ ID NO: 40605 - protein, 34 aa, Artificial Sequence; identical to SEQ ID NO: 14846
  GFR-binding peptide
  MOD_RES (34), (34): Xaa is C or S
  MOD_RES (14), (15), (16), (17), (18): Xaa is A or G
  MOD_RES (19), (20), (21), (22): Xaa is A or G or is absent

SEQ ID NO: 40606 - protein, 43 aa, Artificial Sequence; identical to SEQ ID NO: 14847
  GFR-binding peptide
  MOD_RES (5), (6), (40), (42): Xaa is C or S
  MOD_RES (20), (21), (22), (23), (24): Xaa is A or G
  MOD_RES (25), (26), (27), (28): Xaa is A or G or is absent

SEQ ID NO: 40607 - protein, 37 aa, Artificial Sequence; identical to SEQ ID NO: 9327
  GFR-binding peptide
  MOD_RES (1), (2), (35), (37): Xaa is C or S
  MOD_RES (16), (17), (18), (19), (20): Xaa is A or G
  MOD_RES (21), (22), (23), (24): Xaa is A or G or is absent

SEQ ID NO: 40608 - protein, 35 aa, Artificial Sequence; identical to SEQ ID NO: 16628
  GFR-binding peptide
  MOD_RES (33), (35): Xaa is C or S
  MOD_RES (14), (15), (16), (17), (18): Xaa is A or G
  MOD_RES (19), (20), (21), (22): Xaa is A or G or is absent

SEQ ID NO: 40609 - protein, 37 aa, Artificial Sequence; identical to SEQ ID NO: 9328
  GFR-binding peptide
  MOD_RES (3), (4), (36): Xaa is C or S

SEQ ID NO: 40610 - protein, 35 aa, Artificial Sequence; identical to SEQ ID NO: 16630
  GFR-binding peptide
  MOD_RES (2), (3): Xaa is C or S
  MOD_RES (17), (18), (19), (20), (21): Xaa is A or G
  MOD_RES (22), (23), (24), (25): Xaa is A or G or is absent

SEQ ID NO: 40611 - protein, 32 aa, Artificial Sequence; identical to SEQ ID NO: 16631
  GFR-binding peptide
  MOD_RES (32), (32): Xaa is C or S

SEQ ID NO: 40612 - protein, 37 aa, Artificial Sequence; identical to SEQ ID NO: 14849
  GFR-binding peptide
  MOD_RES (2), (3), (36): Xaa is C or S
  MOD_RES (17), (18), (19), (20), (21): Xaa is A or G
  MOD_RES (22), (23), (24), (25): Xaa is A or G or is absent

SEQ ID NO: 40613 - protein, 42 aa, Artificial Sequence; identical to SEQ ID NO: 14850
  GFR-binding peptide
  MOD_RES (5), (6), (40), (42): Xaa is C or S
  MOD_RES (20), (21), (22), (23), (24): Xaa is A or G
  MOD_RES (25), (26), (27), (28): Xaa is A or G or is absent

SEQ ID NO: 40614 - protein, 36 aa, Artificial Sequence; identical to SEQ ID NO: 9330
  GFR-binding peptide
  MOD_RES (34), (36): Xaa is C or S
  MOD_RES (14), (15), (16), (17), (18): Xaa is A or G
  MOD_RES (19), (20), (21), (22): Xaa is A or G or is absent

SEQ ID NO: 40615 - protein, 37 aa, Artificial Sequence; identical to SEQ ID NO: 7537
  GFR-binding peptide
  MOD_RES (1), (34), (36): Xaa is C or S
  MOD_RES (15), (16), (17), (18), (19): Xaa is A or G
  MOD_RES (20), (21), (22), (23): Xaa is A or G or is absent

SEQ ID NO: 40616 - protein, 35 aa, Artificial Sequence; identical to SEQ ID NO: 9332
  GFR-binding peptide
  MOD_RES (3), (4), (35): Xaa is C or S

SEQ ID NO: 40617 - protein, 38 aa, Artificial Sequence; identical to SEQ ID NO: 16635
  GFR-binding peptide
  MOD_RES (5), (6): Xaa is C or S
  MOD_RES (20), (21), (22), (23), (24): Xaa is A or G
  MOD_RES (25), (26), (27), (28): Xaa is A or G or is absent

SEQ ID NO: 40618 - protein, 39 aa, Artificial Sequence; identical to SEQ ID NO: 16636
  GFR-binding peptide
  MOD_RES (5), (6): Xaa is C or S
  MOD_RES (20), (21), (22), (23), (24): Xaa is A or G
  MOD_RES (25), (26), (27), (28): Xaa is A or G or is absent

SEQ ID NO: 40619 - protein, 39 aa, Artificial Sequence; identical to SEQ ID NO: 7538
  GFR-binding peptide
  MOD_RES (5), (6), (37), (39): Xaa is C or S

SEQ ID NO: 40620 - protein, 40 aa, Artificial Sequence; identical to SEQ ID NO: 14853
  GFR-binding peptide
  MOD_RES (3), (4), (38), (40): Xaa is C or S
  MOD_RES (18), (19), (20), (21), (22): Xaa is A or G
  MOD_RES (23), (24), (25), (26): Xaa is A or G or is absent

SEQ ID NO: 40621 - protein, 36 aa, Artificial Sequence; identical to SEQ ID NO: 14854
  GFR-binding peptide
  MOD_RES (1), (33), (35): Xaa is C or S

SEQ ID NO: 40622 - protein, 35 aa, Artificial Sequence; identical to SEQ ID NO: 9335
  GFR-binding peptide
  MOD_RES (2), (3), (34): Xaa is C or S

SEQ ID NO: 40623 - protein, 37 aa, Artificial Sequence; identical to SEQ ID NO: 16639
  GFR-binding peptide
  MOD_RES (6), (7): Xaa is C or S

SEQ ID NO: 40624 - protein, 40 aa, Artificial Sequence; identical to SEQ ID NO: 14856
  GFR-binding peptide
  MOD_RES (3), (4), (38), (40): Xaa is C or S
  MOD_RES (18), (19), (20), (21), (22): Xaa is A or G
  MOD_RES (23), (24), (25), (26): Xaa is A or G or is absent

SEQ ID NO: 40625 - protein, 38 aa, Artificial Sequence; identical to SEQ ID NO: 7543
  GFR-binding peptide
  MOD_RES (2), (3), (37): Xaa is C or S
  MOD_RES (17), (18), (19), (20), (21): Xaa is A or G
  MOD_RES (22), (23), (24), (25): Xaa is A or G or is absent

SEQ ID NO: 40626 - protein, 35 aa, Artificial Sequence; identical to SEQ ID NO: 16641
  GFR-binding peptide
  MOD_RES (1), (35): Xaa is C or S
  MOD_RES (15), (16), (17), (18), (19): Xaa is A or G
  MOD_RES (20), (21), (22), (23): Xaa is A or G or is absent

SEQ ID NO: 40627 - protein, 38 aa, Artificial Sequence; identical to SEQ ID NO: 14859
  GFR-binding peptide
  MOD_RES (3), (4), (36), (38): Xaa is C or S

SEQ ID NO: 40628 - protein, 33 aa, Artificial Sequence; identical to SEQ ID NO: 16642
  GFR-binding peptide
  MOD_RES (1), (1): Xaa is C or S
  MOD_RES (15), (16), (17), (18), (19): Xaa is A or G
  MOD_RES (20), (21), (22), (23): Xaa is A or G or is absent

SEQ ID NO: 40629 - protein, 38 aa, Artificial Sequence; identical to SEQ ID NO: 7546
  GFR-binding peptide
  MOD_RES (1), (35), (37): Xaa is C or S
  MOD_RES (15), (16), (17), (18), (19): Xaa is A or G
  MOD_RES (20), (21), (22), (23): Xaa is A or G or is absent

SEQ ID NO: 40630 - protein, 37 aa, Artificial Sequence; identical to SEQ ID NO: 7549
  GFR-binding peptide
  MOD_RES (6), (7): Xaa is C or S

SEQ ID NO: 40631 - protein, 37 aa, Artificial Sequence; identical to SEQ ID NO: 14864
  GFR-binding peptide
  MOD_RES (1), (2), (35), (37): Xaa is C or S
  MOD_RES (16), (17), (18), (19), (20): Xaa is A or G
  MOD_RES (21), (22), (23), (24): Xaa is A or G or is absent

SEQ ID NO: 40632 - protein, 41 aa, Artificial Sequence; identical to SEQ ID NO: 7553
  GFR-binding peptide
  MOD_RES (5), (6), (40): Xaa is C or S
  MOD_RES (20), (21), (22), (23), (24): Xaa is A or G
  MOD_RES (25), (26), (27), (28): Xaa is A or G or is absent

SEQ ID NO: 40633 - protein, 31 aa, Artificial Sequence; identical to SEQ ID NO: 9343
  GFR-binding peptide

SEQ ID NO: 40634 - protein, 38 aa, Artificial Sequence; identical to SEQ ID NO: 16645
  GFR-binding peptide
  MOD_RES (2), (3), (37): Xaa is C or S
  MOD_RES (17), (18), (19), (20), (21): Xaa is A or G
  MOD_RES (22), (23), (24), (25): Xaa is A or G or is absent

SEQ ID NO: 40635 - protein, 37 aa, Artificial Sequence; identical to SEQ ID NO: 7556
  GFR-binding peptide
  MOD_RES (4), (5): Xaa is C or S
  MOD_RES (19), (20), (21), (22), (23): Xaa is A or G
  MOD_RES (24), (25), (26), (27): Xaa is A or G or is absent

SEQ ID NO: 40636 - protein, 41 aa, Artificial Sequence; identical to SEQ ID NO: 16646
  GFR-binding peptide
  MOD_RES (6), (7), (39), (41): Xaa is C or S

SEQ ID NO: 40637 - protein, 41 aa, Artificial Sequence; identical to SEQ ID NO: 14869
  GFR-binding peptide
  MOD_RES (6), (7), (41): Xaa is C or S
  MOD_RES (21), (22), (23), (24), (25): Xaa is A or G
  MOD_RES (26), (27), (28), (29): Xaa is A or G or is absent

SEQ ID NO: 40638 - protein, 40 aa, Artificial Sequence; identical to SEQ ID NO: 16647
  GFR-binding peptide
  MOD_RES (5), (6), (40): Xaa is C or S
  MOD_RES (20), (21), (22), (23), (24): Xaa is A or G
  MOD_RES (25), (26), (27), (28): Xaa is A or G or is absent

SEQ ID NO: 40639 - protein, 40 aa, Artificial Sequence; identical to SEQ ID NO: 16648
  GFR-binding peptide
  MOD_RES (5), (6), (38), (40): Xaa is C or S

SEQ ID NO: 40640 - protein, 33 aa, Artificial Sequence; identical to SEQ ID NO: 14870
  GFR-binding peptide
  MOD_RES (1), (1): Xaa is C or S
  MOD_RES (15), (16), (17), (18), (19): Xaa is A or G
  MOD_RES (20), (21), (22), (23): Xaa is A or G or is absent

SEQ ID NO: 40641 - protein, 38 aa, Artificial Sequence; identical to SEQ ID NO: 14871
  GFR-binding peptide
  MOD_RES (5), (6): Xaa is C or S
  MOD_RES (20), (21), (22), (23), (24): Xaa is A or G
  MOD_RES (25), (26), (27), (28): Xaa is A or G or is absent

SEQ ID NO: 40642 - protein, 32 aa, Artificial Sequence; identical to SEQ ID NO: 14872
  GFR-binding peptide
  MOD_RES (1), (2): Xaa is C or S

SEQ ID NO: 40643 - protein, 42 aa, Artificial Sequence; identical to SEQ ID NO: 14873
  GFR-binding peptide
  MOD_RES (5), (39), (41): Xaa is C or S
  MOD_RES (19), (20), (21), (22), (23): Xaa is A or G
  MOD_RES (24), (25), (26), (27): Xaa is A or G or is absent

SEQ ID NO: 40644 - protein, 35 aa, Artificial Sequence; identical to SEQ ID NO: 14874
  GFR-binding peptide
  MOD_RES (1), (34): Xaa is C or S
  MOD_RES (15), (16), (17), (18), (19): Xaa is A or G
  MOD_RES (20), (21), (22), (23): Xaa is A or G or is absent

SEQ ID NO: 40645 - protein, 39 aa, Artificial Sequence; identical to SEQ ID NO: 16649
  GFR-binding peptide
  MOD_RES (3), (4), (36), (38): Xaa is C or S

SEQ ID NO: 40646 - protein, 37 aa, Artificial Sequence; identical to SEQ ID NO: 14875
  GFR-binding peptide
  MOD_RES (1), (2), (36): Xaa is C or S
  MOD_RES (16), (17), (18), (19), (20): Xaa is A or G
  MOD_RES (21), (22), (23), (24): Xaa is A or G or is absent

SEQ ID NO: 40647 - protein, 36 aa, Artificial Sequence; identical to SEQ ID NO: 14879
  GFR-binding peptide
  MOD_RES (2), (3), (35): Xaa is C or S

SEQ ID NO: 40648 - protein, 33 aa, Artificial Sequence; identical to SEQ ID NO: 16652
  GFR-binding peptide
  MOD_RES (2), (3): Xaa is C or S

SEQ ID NO: 40649 - protein, 38 aa, Artificial Sequence; identical to SEQ ID NO: 14880
  GFR-binding peptide
  MOD_RES (6), (7), (38): Xaa is C or S

SEQ ID NO: 40650 - protein, 35 aa, Artificial Sequence; identical to SEQ ID NO: 14881
  GFR-binding peptide
  MOD_RES (32), (34): Xaa is C or S

SEQ ID NO: 40651 - protein, 39 aa, Artificial Sequence; identical to SEQ ID NO: 9352
  GFR-binding peptide
  MOD_RES (5), (6), (38): Xaa is C or S

SEQ ID NO: 40652 - protein, 32 aa, Artificial Sequence
  GFR-binding peptide
  MOD_RES (14), (15), (16), (17), (18): Xaa is A or G
  MOD_RES (19), (20), (21), (22): Xaa is A or G or is absent
VSQDLEPLTILYYXXXXXXXXXEQLSNMIVKS

SEQ ID NO: 40653 - protein, 40 aa, Artificial Sequence; identical to SEQ ID NO: 14882
  GFR-binding peptide
  MOD_RES (5), (6), (38), (40): Xaa is C or S

SEQ ID NO: 40654 - protein, 36 aa, Artificial Sequence; identical to SEQ ID NO: 7572
  GFR-binding peptide
  MOD_RES (34), (36): Xaa is C or S
  MOD_RES (14), (15), (16), (17), (18): Xaa is A or G
  MOD_RES (19), (20), (21), (22): Xaa is A or G or is absent

SEQ ID NO: 40655 - protein, 40 aa, Artificial Sequence; identical to SEQ ID NO: 16655
  GFR-binding peptide
  MOD_RES (5), (6), (38), (40): Xaa is C or S

SEQ ID NO: 40656 - protein, 40 aa, Artificial Sequence; identical to SEQ ID NO: 14884
  GFR-binding peptide
  MOD_RES (5), (6), (40): Xaa is C or S
  MOD_RES (20), (21), (22), (23), (24): Xaa is A or G
  MOD_RES (25), (26), (27), (28): Xaa is A or G or is absent

SEQ ID NO: 40657 - protein, 39 aa, Artificial Sequence; identical to SEQ ID NO: 16656
  GFR-binding peptide
  MOD_RES (6), (7), (39): Xaa is C or S

SEQ ID NO: 40658 - protein, 39 aa, Artificial Sequence; identical to SEQ ID NO: 16657
  GFR-binding peptide
  MOD_RES (5), (6), (38): Xaa is C or S

SEQ ID NO: 40659 - protein, 35 aa, Artificial Sequence; identical to SEQ ID NO: 9359
  GFR-binding peptide
  MOD_RES (4), (5): Xaa is C or S

SEQ ID NO: 40660 - protein, 36 aa, Artificial Sequence; identical to SEQ ID NO: 16659
  GFR-binding peptide
  MOD_RES (1), (2), (33), (35): Xaa is C or S

SEQ ID NO: 40661 - protein, 38 aa, Artificial Sequence; identical to SEQ ID NO: 9361
  GFR-binding peptide
  MOD_RES (3), (4), (38): Xaa is C or S
  MOD_RES (18), (19), (20), (21), (22): Xaa is A or G
  MOD_RES (23), (24), (25), (26): Xaa is A or G or is absent

SEQ ID NO: 40662 - protein, 36 aa, Artificial Sequence; identical to SEQ ID NO: 16661
  GFR-binding peptide
  MOD_RES (1), (33), (35): Xaa is C or S

SEQ ID NO: 40663 - protein, 33 aa, Artificial Sequence; identical to SEQ ID NO: 14886
  GFR-binding peptide
  MOD_RES (1), (2), (33): Xaa is C or S

SEQ ID NO: 40664 - protein, 42 aa, Artificial Sequence; identical to SEQ ID NO: 16663
  GFR-binding peptide
  MOD_RES (4), (5), (39), (41): Xaa is C or S
  MOD_RES (19), (20), (21), (22), (23): Xaa is A or G
  MOD_RES (24), (25), (26), (27): Xaa is A or G or is absent

SEQ ID NO: 40665 - protein, 40 aa, Artificial Sequence; identical to SEQ ID NO: 7580
  GFR-binding peptide
  MOD_RES (4), (5), (39): Xaa is C or S
  MOD_RES (19), (20), (21), (22), (23): Xaa is A or G
  MOD_RES (24), (25), (26), (27): Xaa is A or G or is absent

SEQ ID NO: 40666 - protein, 37 aa, Artificial Sequence; identical to SEQ ID NO: 14888
  GFR-binding peptide
  MOD_RES (4), (5): Xaa is C or S
  MOD_RES (19), (20), (21), (22), (23): Xaa is A or G
  MOD_RES (24), (25), (26), (27): Xaa is A or G or is absent

SEQ ID NO: 40667 - protein, 36 aa, Artificial Sequence; identical to SEQ ID NO: 16664
  GFR-binding peptide
  MOD_RES (1), (2), (33), (35): Xaa is C or S

SEQ ID NO: 40668 - protein, 38 aa, Artificial Sequence; identical to SEQ ID NO: 16666
  GFR-binding peptide
  MOD_RES (3), (4), (36), (38): Xaa is C or S

SEQ ID NO: 40669 - protein, 37 aa, Artificial Sequence; identical to SEQ ID NO: 14889
  GFR-binding peptide
  MOD_RES (1), (2), (36): Xaa is C or S
  MOD_RES (16), (17), (18), (19), (20): Xaa is A or G
  MOD_RES (21), (22), (23), (24): Xaa is A or G or is absent

SEQ ID NO: 40670 - protein, 39 aa, Artificial Sequence; identical to SEQ ID NO: 14890
  GFR-binding peptide
  MOD_RES (4), (5), (38): Xaa is C or S
  MOD_RES (19), (20), (21), (22), (23): Xaa is A or G
  MOD_RES (24), (25), (26), (27): Xaa is A or G or is absent

SEQ ID NO: 40671 - protein, 38 aa, Artificial Sequence; identical to SEQ ID NO: 16667
  GFR-binding peptide
  MOD_RES (5), (6): Xaa is C or S
  MOD_RES (20), (21), (22), (23), (24): Xaa is A or G
  MOD_RES (25), (26), (27), (28): Xaa is A or G or is absent

SEQ ID NO: 40672 - protein, 39 aa, Artificial Sequence; identical to SEQ ID NO: 7585
  GFR-binding peptide
  MOD_RES (6), (7): Xaa is C or S
  MOD_RES (21), (22), (23), (24), (25): Xaa is A or G
  MOD_RES (26), (27), (28), (29): Xaa is A or G or is absent

SEQ ID NO: 40673 - protein, 39 aa, Artificial Sequence; identical to SEQ ID NO: 16668
  GFR-binding peptide
  MOD_RES (4), (5), (37), (39): Xaa is C or S

SEQ ID NO: 40674 - protein, 39 aa, Artificial Sequence; identical to SEQ ID NO: 14892
  GFR-binding peptide
  MOD_RES (1), (2), (36), (38): Xaa is C or S
  MOD_RES (16), (17), (18), (19), (20): Xaa is A or G
  MOD_RES (21), (22), (23), (24): Xaa is A or G or is absent

SEQ ID NO: 40675 - protein, 34 aa, Artificial Sequence; identical to SEQ ID NO: 14893
  GFR-binding peptide
  MOD_RES (34), (34): Xaa is C or S
  MOD_RES (14), (15), (16), (17), (18): Xaa is A or G
  MOD_RES (19), (20), (21), (22): Xaa is A or G or is absent

SEQ ID NO: 40676 - protein, 35 aa, Artificial Sequence; identical to SEQ ID NO: 14894
  GFR-binding peptide
  MOD_RES (1), (2): Xaa is C or S
  MOD_RES (16), (17), (18), (19), (20): Xaa is A or G
  MOD_RES (21), (22), (23), (24): Xaa is A or G or is absent

SEQ ID NO: 40677 - protein, 40 aa, Artificial Sequence; identical to SEQ ID NO: 16669
  GFR-binding peptide
  MOD_RES (2), (3), (37), (39): Xaa is C or S
  MOD_RES (17), (18), (19), (20), (21): Xaa is A or G
  MOD_RES (22), (23), (24), (25): Xaa is A or G or is absent

SEQ ID NO: 40678 - protein, 44 aa, Artificial Sequence; identical to SEQ ID NO: 16670
  GFR-binding peptide
  MOD_RES (7), (41), (43): Xaa is C or S
  MOD_RES (21), (22), (23), (24), (25): Xaa is A or G
  MOD_RES (26), (27), (28), (29): Xaa is A or G or is absent

SEQ ID NO: 40679 - protein, 33 aa, Artificial Sequence; identical to SEQ ID NO: 16671
  GFR-binding peptide
  MOD_RES (32), (32): Xaa is C or S

SEQ ID NO: 40680 - protein, 39 aa, Artificial Sequence; identical to SEQ ID NO: 14896
  GFR-binding peptide
  MOD_RES (5), (6): Xaa is C or S
  MOD_RES (20), (21), (22), (23), (24): Xaa is A or G
  MOD_RES (25), (26), (27), (28): Xaa is A or G or is absent

SEQ ID NO: 40681 - protein, 35 aa, Artificial Sequence; identical to SEQ ID NO: 7592
  GFR-binding peptide
  MOD_RES (1), (2), (35): Xaa is C or S
  MOD_RES (16), (17), (18), (19), (20): Xaa is A or G
  MOD_RES (21), (22), (23), (24): Xaa is A or G or is absent

SEQ ID NO: 40682 - protein, 39 aa, Artificial Sequence; identical to SEQ ID NO: 9373
  GFR-binding peptide
  MOD_RES (4), (5), (36), (38): Xaa is C or S

SEQ ID NO: 40683 - protein, 41 aa, Artificial Sequence; identical to SEQ ID NO: 16673
  GFR-binding peptide
  MOD_RES (3), (4), (38), (40): Xaa is C or S
  MOD_RES (18), (19), (20), (21), (22): Xaa is A or G
  MOD_RES (23), (24), (25), (26): Xaa is A or G or is absent

SEQ ID NO: 40684 - protein, 42 aa, Artificial Sequence; identical to SEQ ID NO: 16674
  GFR-binding peptide
  MOD_RES (4), (5), (39), (41): Xaa is C or S
  MOD_RES (19), (20), (21), (22), (23): Xaa is A or G
  MOD_RES (24), (25), (26), (27): Xaa is A or G or is absent

SEQ ID NO: 40685 - protein, 40 aa, Artificial Sequence; identical to SEQ ID NO: 16675
  GFR-binding peptide
  MOD_RES (5), (6), (40): Xaa is C or S
  MOD_RES (20), (21), (22), (23), (24): Xaa is A or G
  MOD_RES (25), (26), (27), (28): Xaa is A or G or is absent

SEQ ID NO: 40686 - protein, 36 aa, Artificial Sequence; identical to SEQ ID NO: 16676
  GFR-binding peptide
  MOD_RES (33), (35): Xaa is C or S
  MOD_RES (14), (15), (16), (17), (18): Xaa is A or G
  MOD_RES (19), (20), (21), (22): Xaa is A or G or is absent

SEQ ID NO: 40687 - protein, 33 aa, Artificial Sequence; identical to SEQ ID NO: 16677
  GFR-binding peptide
  MOD_RES (1), (2): Xaa is C or S

SEQ ID NO: 40688 - protein, 33 aa, Artificial Sequence; identical to SEQ ID NO: 16678
  GFR-binding peptide
  MOD_RES (1), (2), (33): Xaa is C or S

SEQ ID NO: 40689 - protein, 36 aa, Artificial Sequence; identical to SEQ ID NO: 14898
  GFR-binding peptide
  MOD_RES (5), (6): Xaa is C or S

SEQ ID NO: 40690 - protein, 35 aa, Artificial Sequence; identical to SEQ ID NO: 16679
  GFR-binding peptide
  MOD_RES (3), (4), (35): Xaa is C or S

SEQ ID NO: 40691 - protein, 41 aa, Artificial Sequence; identical to SEQ ID NO: 16680
  GFR-binding peptide
  MOD_RES (5), (6), (38), (40): Xaa is C or S

SEQ ID NO: 40692 - protein, 42 aa, Artificial Sequence; identical to SEQ ID NO: 14900
  GFR-binding peptide
  MOD_RES (4), (5), (39), (41): Xaa is C or S
  MOD_RES (19), (20), (21), (22), (23): Xaa is A or G
  MOD_RES (24), (25), (26), (27): Xaa is A or G or is absent

SEQ ID NO: 40693 - protein, 40 aa, Artificial Sequence; identical to SEQ ID NO: 14901
  GFR-binding peptide
  MOD_RES (6), (7): Xaa is C or S
  MOD_RES (21), (22), (23), (24), (25): Xaa is A or G
  MOD_RES (26), (27), (28), (29): Xaa is A or G or is absent

SEQ ID NO: 40694 - protein, 43 aa, Artificial Sequence; identical to SEQ ID NO: 14902
  GFR-binding peptide
  MOD_RES (6), (40), (42): Xaa is C or S
  MOD_RES (20), (21), (22), (23), (24): Xaa is A or G
  MOD_RES (25), (26), (27), (28): Xaa is A or G or is absent

SEQ ID NO: 40695 - protein, 32 aa, Artificial Sequence; identical to SEQ ID NO: 16684
  GFR-binding peptide
  MOD_RES (14), (15), (16), (17), (18): Xaa is A or G
  MOD_RES (19), (20), (21), (22): Xaa is A or G or is absent

SEQ ID NO: 40696 - protein, 32 aa, Artificial Sequence; identical to SEQ ID NO: 14903
  GFR-binding peptide
  MOD_RES (1), (2): Xaa is C or S

SEQ ID NO: 40697 - protein, 38 aa, Artificial Sequence; identical to SEQ ID NO: 16685
  GFR-binding peptide
  MOD_RES (5), (5): Xaa is C or S
  MOD_RES (19), (20), (21), (22), (23): Xaa is A or G
  MOD_RES (24), (25), (26), (27): Xaa is A or G or is absent

SEQ ID NO: 40698 - protein, 32 aa, Artificial Sequence; identical to SEQ ID NO: 9383
  GFR-binding peptide
  MOD_RES (14), (15), (16), (17), (18): Xaa is A or G
  MOD_RES (19), (20), (21), (22): Xaa is A or G or is absent

SEQ ID NO: 40699 - protein, 35 aa, Artificial Sequence; identical to SEQ ID NO: 7603
  GFR-binding peptide
  MOD_RES (2), (3), (34): Xaa is C or S

SEQ ID NO: 40700 - protein, 40 aa, Artificial Sequence; identical to SEQ ID NO: 14907
  GFR-binding peptide
  MOD_RES (4), (5), (39): Xaa is C or S
  MOD_RES (19), (20), (21), (22), (23): Xaa is A or G
  MOD_RES (24), (25), (26), (27): Xaa is A or G or is absent

SEQ ID NO: 40701 - protein, 40 aa, Artificial Sequence; identical to SEQ ID NO: 16688
  GFR-binding peptide
  MOD_RES (5), (39): Xaa is C or S
  MOD_RES (19), (20), (21), (22), (23): Xaa is A or G
  MOD_RES (24), (25), (26), (27): Xaa is A or G or is absent

SEQ ID NO: 40702 - protein, 39 aa, Artificial Sequence; identical to SEQ ID NO: 9387
  GFR-binding peptide
  MOD_RES (4), (5), (39): Xaa is C or S
  MOD_RES (19), (20), (21), (22), (23): Xaa is A or G
  MOD_RES (24), (25), (26), (27): Xaa is A or G or is absent

SEQ ID NO: 40703 - protein, 35 aa, Artificial Sequence; identical to SEQ ID NO: 7607
  GFR-binding peptide
  MOD_RES (4), (5): Xaa is C or S

SEQ ID NO: 40704 - protein, 38 aa, Artificial Sequence; identical to SEQ ID NO: 9390
  GFR-binding peptide
  MOD_RES (1), (2), (35), (37): Xaa is C or S
  MOD_RES (16), (17), (18), (19), (20): Xaa is A or G
  MOD_RES (21), (22), (23), (24): Xaa is A or G or is absent

SEQ ID NO: 40705 - protein, 40 aa, Artificial Sequence; identical to SEQ ID NO: 16691
  GFR-binding peptide
  MOD_RES (5), (6), (38), (40): Xaa is C or S

SEQ ID NO: 40706 - protein, 37 aa, Artificial Sequence; identical to SEQ ID NO: 14909
  GFR-binding peptide
  MOD_RES (3), (4), (36): Xaa is C or S

SEQ ID NO: 40707 - protein, 35 aa, Artificial Sequence; identical to SEQ ID NO: 16692
  GFR-binding peptide
  MOD_RES (2), (3): Xaa is C or S
  MOD_RES (17), (18), (19), (20), (21): Xaa is A or G
  MOD_RES (22), (23), (24), (25): Xaa is A or G or is absent

SEQ ID NO: 40708 - protein, 33 aa, Artificial Sequence; identical to SEQ ID NO: 16693
  GFR-binding peptide
  MOD_RES (2), (3): Xaa is C or S

SEQ ID NO: 40709 - protein, 39 aa, Artificial Sequence; identical to SEQ ID NO: 16694
  GFR-binding peptide
  MOD_RES (6), (7), (39): Xaa is C or S

SEQ ID NO: 40710 - protein, 40 aa, Artificial Sequence; identical to SEQ ID NO: 14910
  GFR-binding peptide
  MOD_RES (6), (7), (39): Xaa is C or S

SEQ ID NO: 40711 - protein, 39 aa, Artificial Sequence; identical to SEQ ID NO: 16696
  GFR-binding peptide
  MOD_RES (6), (7): Xaa is C or S
  MOD_RES (21), (22), (23), (24), (25): Xaa is A or G
  MOD_RES (26), (27), (28), (29): Xaa is A or G or is absent

SEQ ID NO: 40712 - protein, 36 aa, Artificial Sequence; identical to SEQ ID NO: 14911
  GFR-binding peptide
  MOD_RES (4), (5), (36): Xaa is C or S

SEQ ID NO: 40713 - protein, 32 aa, Artificial Sequence; identical to SEQ ID NO: 7611
  GFR-binding peptide
  MOD_RES (32), (32): Xaa is C or S

SEQ ID NO: 40714 - protein, 42 aa, Artificial Sequence; identical to SEQ ID NO: 14913
  GFR-binding peptide
  MOD_RES (6), (7), (41): Xaa is C or S
  MOD_RES (21), (22), (23), (24), (25): Xaa is A or G
  MOD_RES (26), (27), (28), (29): Xaa is A or G or is absent

SEQ ID NO: 40715 - protein, 38 aa, Artificial Sequence; identical to SEQ ID NO: 14914
  GFR-binding peptide
  MOD_RES (2), (3), (37): Xaa is C or S
  MOD_RES (17), (18), (19), (20), (21): Xaa is A or G
  MOD_RES (22), (23), (24), (25): Xaa is A or G or is absent

SEQ ID NO: 40716 - protein, 33 aa, Artificial Sequence; identical to SEQ ID NO: 16698
  GFR-binding peptide
  MOD_RES (1), (33): Xaa is C or S

SEQ ID NO: 40717 - protein, 33 aa, Artificial Sequence; identical to SEQ ID NO: 14915
  GFR-binding peptide
  MOD_RES (1), (2): Xaa is C or S

SEQ ID NO: 40718 - protein, 33 aa, Artificial Sequence; identical to SEQ ID NO: 14916
  GFR-binding peptide
  MOD_RES (1), (2): Xaa is C or S

SEQ ID NO: 40719 - protein, 37 aa, Artificial Sequence; identical to SEQ ID NO: 16700
  GFR-binding peptide
  MOD_RES (2), (3), (35), (37): Xaa is C or S

SEQ ID NO: 40720 - protein, 35 aa, Artificial Sequence; identical to SEQ ID NO: 16701
  GFR-binding peptide
  MOD_RES (34), (34): Xaa is C or S
  MOD_RES (14), (15), (16), (17), (18): Xaa is A or G
  MOD_RES (19), (20), (21), (22): Xaa is A or G or is absent

SEQ ID NO: 40721 - protein, 33 aa, Artificial Sequence; identical to SEQ ID NO: 14918
  GFR-binding peptide
  MOD_RES (1), (1): Xaa is C or S
  MOD_RES (15), (16), (17), (18), (19): Xaa is A or G
  MOD_RES (20), (21), (22), (23): Xaa is A or G or is absent

SEQ ID NO: 40722 - protein, 39 aa, Artificial Sequence; identical to SEQ ID NO: 16703
  GFR-binding peptide
  MOD_RES (5), (6), (39): Xaa is C or S
  MOD_RES (20), (21), (22), (23), (24): Xaa is A or G
  MOD_RES (25), (26), (27), (28): Xaa is A or G or is absent

SEQ ID NO: 40723 - protein, 40 aa, Artificial Sequence; identical to SEQ ID NO: 16704
  GFR-binding peptide
  MOD_RES (4), (5), (37), (39): Xaa is C or S

SEQ ID NO: 40724 - protein, 40 aa, Artificial Sequence; identical to SEQ ID NO: 14919
  GFR-binding peptide
  MOD_RES (3), (4), (37), (39): Xaa is C or S
  MOD_RES (18), (19), (20), (21), (22): Xaa is A or G
  MOD_RES (23), (24), (25), (26): Xaa is A or G or is absent

SEQ ID NO: 40725 - protein, 35 aa, Artificial Sequence; identical to SEQ ID NO: 16706
  GFR-binding peptide
  MOD_RES (3), (4): Xaa is C or S

SEQ ID NO: 40726 - protein, 37 aa, Artificial Sequence; identical to SEQ ID NO: 14920
  GFR-binding peptide
  MOD_RES (5), (6): Xaa is C or S

SEQ ID NO: 40727 - protein, 33 aa, Artificial Sequence; identical to SEQ ID NO: 14921
  GFR-binding peptide
  MOD_RES (14), (15), (16), (17), (18): Xaa is A or G
  MOD_RES (19), (20), (21), (22): Xaa is A or G or is absent

SEQ ID NO: 40728 - protein, 34 aa, Artificial Sequence; identical to SEQ ID NO: 9404
  GFR-binding peptide
  MOD_RES (1), (2), (34): Xaa is C or S

SEQ ID NO: 40729 - protein, 39 aa, Artificial Sequence; identical to SEQ ID NO: 14922
  GFR-binding peptide
  MOD_RES (4), (5), (37), (39): Xaa is C or S

SEQ ID NO: 40730 - protein, 33 aa, Artificial Sequence; identical to SEQ ID NO: 16708
  GFR-binding peptide
  MOD_RES (32), (32): Xaa is C or S

SEQ ID NO: 40731 - protein, 35 aa, Artificial Sequence; identical to SEQ ID NO: 16709
  GFR-binding peptide
  MOD_RES (2), (3): Xaa is C or S
  MOD_RES (17), (18), (19), (20), (21): Xaa is A or G
  MOD_RES (22), (23), (24), (25): Xaa is A or G or is absent

SEQ ID NO: 40732 - protein, 34 aa, Artificial Sequence; identical to SEQ ID NO: 14923
  GFR-binding peptide
  MOD_RES (1), (2): Xaa is C or S
  MOD_RES (16), (17), (18), (19), (20): Xaa is A or G
  MOD_RES (21), (22), (23), (24): Xaa is A or G or is absent

SEQ ID NO: 40733 - protein, 42 aa, Artificial Sequence; identical to SEQ ID NO: 16711
  GFR-binding peptide
  MOD_RES (6), (7), (39), (41): Xaa is C or S

SEQ ID NO: 40734 - protein, 37 aa, Artificial Sequence; identical to SEQ ID NO: 9406
  GFR-binding peptide
  MOD_RES (4), (5), (36): Xaa is C or S

SEQ ID NO: 40735 - protein, 33 aa, Artificial Sequence; identical to SEQ ID NO: 14924
  GFR-binding peptide
  MOD_RES (32), (32): Xaa is C or S

SEQ ID NO: 40736 - protein, 38 aa, Artificial Sequence; identical to SEQ ID NO: 16713
  GFR-binding peptide
  MOD_RES (5), (6): Xaa is C or S
  MOD_RES (20), (21), (22), (23), (24): Xaa is A or G
  MOD_RES (25), (26), (27), (28): Xaa is A or G or is absent

SEQ ID NO: 40737 - protein, 36 aa, Artificial Sequence; identical to SEQ ID NO: 14925
  GFR-binding peptide
  MOD_RES (1), (2), (36): Xaa is C or S
  MOD_RES (16), (17), (18), (19), (20): Xaa is A or G
  MOD_RES (21), (22), (23), (24): Xaa is A or G or is absent

SEQ ID NO: 40738 - protein, 41 aa, Artificial Sequence; identical to SEQ ID NO: 14927
  GFR-binding peptide
  MOD_RES (7), (41): Xaa is C or S
  MOD_RES (21), (22), (23), (24), (25): Xaa is A or G
  MOD_RES (26), (27), (28), (29): Xaa is A or G or is absent

SEQ ID NO: 40739 - protein, 37 aa, Artificial Sequence; identical to SEQ ID NO: 16714
  GFR-binding peptide
  MOD_RES (2), (3), (37): Xaa is C or S
  MOD_RES (17), (18), (19), (20), (21): Xaa is A or G
  MOD_RES (22), (23), (24), (25): Xaa is A or G or is absent

SEQ ID NO: 40740 - protein, 43 aa, Artificial Sequence; identical to SEQ ID NO: 16716
  GFR-binding peptide
  MOD_RES (6), (7), (41), (43): Xaa is C or S
  MOD_RES (21), (22), (23), (24), (25): Xaa is A or G
  MOD_RES (26), (27), (28), (29): Xaa is A or G or is absent

SEQ ID NO: 40741 - protein, 34 aa, Artificial Sequence; identical to SEQ ID NO: 14929
  GFR-binding peptide
  MOD_RES (3), (4): Xaa is C or S

SEQ ID NO: 40742 - protein, 42 aa, Artificial Sequence; identical to SEQ ID NO: 14930
  GFR-binding peptide
  MOD_RES (6), (7), (39), (41): Xaa is C or S

SEQ ID NO: 40743 - protein, 38 aa, Artificial Sequence; identical to SEQ ID NO: 14931
  GFR-binding peptide
  MOD_RES (1), (35), (37): Xaa is C or S
  MOD_RES (15), (16), (17), (18), (19): Xaa is A or G
  MOD_RES (20), (21), (22), (23): Xaa is A or G or is absent

SEQ ID NO: 40744 - protein, 39 aa, Artificial Sequence; identical to SEQ ID NO: 14932
  GFR-binding peptide
  MOD_RES (3), (4), (36), (38): Xaa is C or S

SEQ ID NO: 40745 - protein, 34 aa, Artificial Sequence; identical to SEQ ID NO: 7626
  GFR-binding peptide
  MOD_RES (1), (2), (33): Xaa is C or S

SEQ ID NO: 40746 - protein, 36 aa, Artificial Sequence; identical to SEQ ID NO: 16717
  GFR-binding peptide
  MOD_RES (3), (4): Xaa is C or S
  MOD_RES (18), (19), (20), (21), (22): Xaa is A or G
  MOD_RES (23), (24), (25), (26): Xaa is A or G or is absent

SEQ ID NO: 40747 - protein, 32 aa, Artificial Sequence; identical to SEQ ID NO: 9416
  GFR-binding peptide
  MOD_RES (1), (32): Xaa is C or S

SEQ ID NO: 40748 - protein, 38 aa, Artificial Sequence; identical to SEQ ID NO: 14934
  GFR-binding peptide
  MOD_RES (5), (6), (37): Xaa is C or S

SEQ ID NO: 40749 - protein, 36 aa, Artificial Sequence; identical to SEQ ID NO: 7629
  GFR-binding peptide
  MOD_RES (3), (4): Xaa is C or S
  MOD_RES (18), (19), (20), (21), (22): Xaa is A or G
  MOD_RES (23), (24), (25), (26): Xaa is A or G or is absent

SEQ ID NO: 40750 - protein, 38 aa, Artificial Sequence; identical to SEQ ID NO: 14936
  GFR-binding peptide
  MOD_RES (3), (4), (36), (38): Xaa is C or S

SEQ ID NO: 40751 - protein, 33 aa, Artificial Sequence; identical to SEQ ID NO: 16720
  GFR-binding peptide
  MOD_RES (1), (1): Xaa is C or S
  MOD_RES (15), (16), (17), (18), (19): Xaa is A or G
  MOD_RES (20), (21), (22), (23): Xaa is A or G or is absent

SEQ ID NO: 40752 - protein, 39 aa, Artificial Sequence
  GFR-binding peptide
  MOD_RES (6), (7): Xaa is C or S
  MOD_RES (21), (22), (23), (24), (25): Xaa is A or G
  MOD_RES (26), (27), (28), (29): Xaa is A or G or is absent
ASASPXXVSQDLEPLTILYYXXXXXXXXXEQLSNMIVKS

SEQ ID NO: 40753 - protein, 37 aa, Artificial Sequence; identical to SEQ ID NO: 14937
  GFR-binding peptide
  MOD_RES (3), (37): Xaa is C or S
  MOD_RES (17), (18), (19), (20), (21): Xaa is A or G
  MOD_RES (22), (23), (24), (25): Xaa is A or G or is absent

SEQ ID NO: 40754 - protein, 35 aa, Artificial Sequence; identical to SEQ ID NO: 14938
  GFR-binding peptide
  MOD_RES (3), (4): Xaa is C or S

SEQ ID NO: 40755 - protein, 34 aa, Artificial Sequence; identical to SEQ ID NO: 14939
  GFR-binding peptide
  MOD_RES (1), (2): Xaa is C or S
  MOD_RES (16), (17), (18), (19), (20): Xaa is A or G
  MOD_RES (21), (22), (23), (24): Xaa is A or G or is absent

SEQ ID NO: 40756 - protein, 36 aa, Artificial Sequence; identical to SEQ ID NO: 9420
  GFR-binding peptide
  MOD_RES (2), (3): Xaa is C or S
  MOD_RES (17), (18), (19), (20), (21): Xaa is A or G
  MOD_RES (22), (23), (24), (25): Xaa is A or G or is absent

SEQ ID NO: 40757 - protein, 38 aa, Artificial Sequence; identical to SEQ ID NO: 14940
  GFR-binding peptide
  MOD_RES (2), (3), (37): Xaa is C or S
  MOD_RES (17), (18), (19), (20), (21): Xaa is A or G
  MOD_RES (22), (23), (24), (25): Xaa is A or G or is absent

SEQ ID NO: 40758 - protein, 32 aa, Artificial Sequence; identical to SEQ ID NO: 16722
  GFR-binding peptide
  MOD_RES (32), (32): Xaa is C or S

SEQ ID NO: 40759 - protein, 40 aa, Artificial Sequence; identical to SEQ ID NO: 14941
  GFR-binding peptide
  MOD_RES (6), (7), (40): Xaa is C or S
  MOD_RES (21), (22), (23), (24), (25): Xaa is A or G
  MOD_RES (26), (27), (28), (29): Xaa is A or G or is absent

SEQ ID NO: 40760 - protein, 34 aa, Artificial Sequence; identical to SEQ ID NO: 14942
  GFR-binding peptide
  MOD_RES (1), (1): Xaa is C or S
  MOD_RES (15), (16), (17), (18), (19): Xaa is A or G
  MOD_RES (20), (21), (22), (23): Xaa is A or G or is absent

SEQ ID NO: 40761 - protein, 43 aa, Artificial Sequence; identical to SEQ ID NO: 16723
  GFR-binding peptide
  MOD_RES (5), (6), (40), (42): Xaa is C or S
  MOD_RES (20), (21), (22), (23), (24): Xaa is A or G
  MOD_RES (25), (26), (27), (28): Xaa is A or G or is absent

SEQ ID NO: 40762 - protein, 35 aa, Artificial Sequence; identical to SEQ ID NO: 14943
  GFR-binding peptide
  MOD_RES (1), (2), (34): Xaa is C or S

SEQ ID NO: 40763 - protein, 37 aa, Artificial Sequence; identical to SEQ ID NO: 16724
  GFR-binding peptide
  MOD_RES (3), (35), (37): Xaa is C or S

SEQ ID NO: 40764 - protein, 35 aa, Artificial Sequence; identical to SEQ ID NO: 14944
  GFR-binding peptide
  MOD_RES (4), (5): Xaa is C or S

SEQ ID NO: 40765 - protein, 37 aa, Artificial Sequence; identical to SEQ ID NO: 14945
  GFR-binding peptide
  MOD_RES (3), (4): Xaa is C or S
  MOD_RES (18), (19), (20), (21), (22): Xaa is A or G
  MOD_RES (23), (24), (25), (26): Xaa is A or G or is absent

SEQ ID NO: 40766 - protein, 37 aa, Artificial Sequence; identical to SEQ ID NO: 14946
  GFR-binding peptide
  MOD_RES (3), (4), (35), (37): Xaa is C or S

SEQ ID NO: 40767 - protein, 34 aa, Artificial Sequence; identical to SEQ ID NO: 16725
  GFR-binding peptide
  MOD_RES (1), (2), (34): Xaa is C or S

SEQ ID NO: 40768 - protein, 37 aa, Artificial Sequence; identical to SEQ ID NO: 14947
  GFR-binding peptide
  MOD_RES (4), (5): Xaa is C or S
  MOD_RES (19), (20), (21), (22), (23): Xaa is A or G
  MOD_RES (24), (25), (26), (27): Xaa is A or G or is absent

SEQ ID NO: 40769 - protein, 39 aa, Artificial Sequence; identical to SEQ ID NO: 16726
  GFR-binding peptide
  MOD_RES (5), (6), (39): Xaa is C or S
  MOD_RES (20), (21), (22), (23), (24): Xaa is A or G
  MOD_RES (25), (26), (27), (28): Xaa is A or G or is absent

SEQ ID NO: 40770 - protein, 36 aa, Artificial Sequence; identical to SEQ ID NO: 7635
  GFR-binding peptide
  MOD_RES (2), (3), (34), (36): Xaa is C or S

SEQ ID NO: 40771 - protein, 41 aa, Artificial Sequence; identical to SEQ ID NO: 16727
  GFR-binding peptide
  MOD_RES (7), (39), (41): Xaa is C or S

SEQ ID NO: 40772 - protein, 37 aa, Artificial Sequence; identical to SEQ ID NO: 16728
  GFR-binding peptide
  MOD_RES (1), (2), (36): Xaa is C or S
  MOD_RES (16), (17), (18), (19), (20): Xaa is A or G
  MOD_RES (21), (22), (23), (24): Xaa is A or G or is absent

SEQ ID NO: 40773 - protein, 36 aa, Artificial Sequence
  GFR-binding peptide
  MOD_RES (33), (35): Xaa is C or S
  MOD_RES (14), (15), (16), (17), (18): Xaa is A or G
  MOD_RES (19), (20), (21), (22): Xaa is A or G or is absent
VSQDLEPLTILYYXXXXXXXXXEQLSNMIVKSXKXS

SEQ ID NO: 40774 - protein, 40 aa, Artificial Sequence; identical to SEQ ID NO: 16730
  GFR-binding peptide
  MOD_RES (6), (7), (40): Xaa is C or S
  MOD_RES (21), (22), (23), (24), (25): Xaa is A or G
  MOD_RES (26), (27), (28), (29): Xaa is A or G or is absent

SEQ ID NO: 40775 - protein, 31 aa, Artificial Sequence; identical to SEQ ID NO: 16732
  GFR-binding peptide

SEQ ID NO: 40776 - protein, 34 aa, Artificial Sequence; identical to SEQ ID NO: 14949
  GFR-binding peptide
  MOD_RES (32), (34): Xaa is C or S

SEQ ID NO: 40777 - protein, 34 aa, Artificial Sequence; identical to SEQ ID NO: 14950
  GFR-binding peptide
  MOD_RES (34), (34): Xaa is C or S
  MOD_RES (14), (15), (16), (17), (18): Xaa is A or G
  MOD_RES (19), (20), (21), (22): Xaa is A or G or is absent

SEQ ID NO: 40778 - protein, 38 aa, Artificial Sequence; identical to SEQ ID NO: 7639
  GFR-binding peptide
  MOD_RES (4), (5): Xaa is C or S
  MOD_RES (19), (20), (21), (22), (23): Xaa is A or G
  MOD_RES (24), (25), (26), (27): Xaa is A or G or is absent

SEQ ID NO: 40779 - protein, 38 aa, Artificial Sequence; identical to SEQ ID NO: 16733
  GFR-binding peptide
  MOD_RES (6), (7): Xaa is C or S

SEQ ID NO: 40780 - protein, 40 aa, Artificial Sequence; identical to SEQ ID NO: 7641
  GFR-binding peptide
  MOD_RES (6), (7): Xaa is C or S
  MOD_RES (21), (22), (23), (24), (25): Xaa is A or G
  MOD_RES (26), (27), (28), (29): Xaa is A or G or is absent

SEQ ID NO: 40781 - protein, 39 aa, Artificial Sequence; identical to SEQ ID NO: 16734
  GFR-binding peptide
  MOD_RES (4), (5), (39): Xaa is C or S
  MOD_RES (19), (20), (21), (22), (23): Xaa is A or G
  MOD_RES (24), (25), (26), (27): Xaa is A or G or is absent

SEQ ID NO: 40782 - protein, 38 aa, Artificial Sequence; identical to SEQ ID NO: 16737
  GFR-binding peptide
  MOD_RES (3), (4), (37): Xaa is C or S
  MOD_RES (18), (19), (20), (21), (22): Xaa is A or G
  MOD_RES (23), (24), (25), (26): Xaa is A or G or is absent

SEQ ID NO: 40783 - protein, 41 aa, Artificial Sequence; identical to SEQ ID NO: 16738
  GFR-binding peptide
  MOD_RES (6), (7), (39), (41): Xaa is C or S

SEQ ID NO: 40784 - protein, 39 aa, Artificial Sequence; identical to SEQ ID NO: 14953
  GFR-binding peptide
  MOD_RES (4), (5), (38): Xaa is C or S
  MOD_RES (19), (20), (21), (22), (23): Xaa is A or G
  MOD_RES (24), (25), (26), (27): Xaa is A or G or is absent

SEQ ID NO: 40785 - protein, 43 aa, Artificial Sequence; identical to SEQ ID NO: 16739
  GFR-binding peptide
  MOD_RES (5), (6), (40), (42): Xaa is C or S
  MOD_RES (20), (21), (22), (23), (24): Xaa is A or G
  MOD_RES (25), (26), (27), (28): Xaa is A or G or is absent

SEQ ID NO: 40786 - protein, 37 aa, Artificial Sequence; identical to SEQ ID NO: 16742
  GFR-binding peptide
  MOD_RES (1), (2), (34), (36): Xaa is C or S

SEQ ID NO: 40787 - protein, 30 aa, Artificial Sequence; identical to SEQ ID NO: 9444
  GFR-binding peptide

SEQ ID NO: 40788 - protein, 37 aa, Artificial Sequence; identical to SEQ ID NO: 14956
  GFR-binding peptide
  MOD_RES (34), (36): Xaa is C or S
  MOD_RES (14), (15), (16), (17), (18): Xaa is A or G
  MOD_RES (19), (20), (21), (22): Xaa is A or G or is absent

SEQ ID NO: 40789 - protein, 34 aa, Artificial Sequence; identical to SEQ ID NO: 14957
  GFR-binding peptide
  MOD_RES (1), (2): Xaa is C or S
  MOD_RES (16), (17), (18), (19), (20): Xaa is A or G
  MOD_RES (21), (22), (23), (24): Xaa is A or G or is absent

SEQ ID NO: 40790 - protein, 35 aa, Artificial Sequence; identical to SEQ ID NO: 16744
  GFR-binding peptide
  MOD_RES (34), (34): Xaa is C or S
  MOD_RES (14), (15), (16), (17), (18): Xaa is A or G
  MOD_RES (19), (20), (21), (22): Xaa is A or G or is absent

SEQ ID NO: 40791 - protein, 40 aa, Artificial Sequence; identical to SEQ ID NO: 14958
  GFR-binding peptide
  MOD_RES (5), (37), (39): Xaa is C or S

SEQ ID NO: 40792 - protein, 36 aa, Artificial Sequence; identical to SEQ ID NO: 16746
  GFR-binding peptide
  MOD_RES (2), (3), (35): Xaa is C or S

SEQ ID NO: 40793 - protein, 37 aa, Artificial Sequence; identical to SEQ ID NO: 16751
  GFR-binding peptide
  MOD_RES (3), (4): Xaa is C or S
  MOD_RES (18), (19), (20), (21), (22): Xaa is A or G
  MOD_RES (23), (24), (25), (26): Xaa is A or G or is absent

SEQ ID NO: 40794 - protein, 31 aa, Artificial Sequence; identical to SEQ ID NO: 16754
  GFR-binding peptide
  MOD_RES (1), (1): Xaa is C or S

SEQ ID NO: 40795 - protein, 42 aa, Artificial Sequence; identical to SEQ ID NO: 16755
  GFR-binding peptide
  MOD_RES (5), (6), (40), (42): Xaa is C or S
  MOD_RES (20), (21), (22), (23), (24): Xaa is A or G
  MOD_RES (25), (26), (27), (28): Xaa is A or G or is absent

SEQ ID NO: 40796 - protein, 33 aa, Artificial Sequence; identical to SEQ ID NO: 16756
  GFR-binding peptide
  MOD_RES (32), (32): Xaa is C or S

SEQ ID NO: 40797 - protein, 38 aa, Artificial Sequence; identical to SEQ ID NO: 16757
  GFR-binding peptide
  MOD_RES (3), (4), (35), (37): Xaa is C or S

SEQ ID NO: 40798 - protein, 39 aa, Artificial Sequence; identical to SEQ ID NO: 14962
  GFR-binding peptide
  MOD_RES (4), (5), (37), (39): Xaa is C or S

SEQ ID NO: 40799 - protein, 38 aa, Artificial Sequence; identical to SEQ ID NO: 16759
  GFR-binding peptide
  MOD_RES (5), (6), (37): Xaa is C or S

SEQ ID NO: 40800 - protein, 41 aa, Artificial Sequence; identical to SEQ ID NO: 16760
  GFR-binding peptide
  MOD_RES (5), (6), (38), (40): Xaa is C or S

SEQ ID NO: 40801 - protein, 36 aa, Artificial Sequence; identical to SEQ ID NO: 16761
  GFR-binding peptide
  MOD_RES (1), (33), (35): Xaa is C or S

SEQ ID NO: 40802 - protein, 36 aa, Artificial Sequence; identical to SEQ ID NO: 16762
  GFR-binding peptide
  MOD_RES (3), (4): Xaa is C or S
  MOD_RES (18), (19), (20), (21), (22): Xaa is A or G
  MOD_RES (23), (24), (25), (26): Xaa is A or G or is absent

SEQ ID NO: 40803 - protein, 39 aa, Artificial Sequence; identical to SEQ ID NO: 16763
  GFR-binding peptide
  MOD_RES (4), (5), (39): Xaa is C or S
  MOD_RES (19), (20), (21), (22), (23): Xaa is A or G
  MOD_RES (24), (25), (26), (27): Xaa is A or G or is absent

SEQ ID NO: 40804 - protein, 39 aa, Artificial Sequence; identical to SEQ ID NO: 14964
  GFR-binding peptide
  MOD_RES (5), (6), (38): Xaa is C or S

SEQ ID NO: 40805 - protein, 38 aa, Artificial Sequence; identical to SEQ ID NO: 7663
  GFR-binding peptide
  MOD_RES (4), (5), (36), (38): Xaa is C or S

SEQ ID NO: 40806 - protein, 35 aa, Artificial Sequence; identical to SEQ ID NO: 16764
  GFR-binding peptide
  MOD_RES (1), (2), (35): Xaa is C or S
  MOD_RES (16), (17), (18), (19), (20): Xaa is A or G
  MOD_RES (21), (22), (23), (24): Xaa is A or G or is absent

SEQ ID NO: 40807 - protein, 41 aa, Artificial Sequence; identical to SEQ ID NO: 14966
  GFR-binding peptide
  MOD_RES (6), (7), (41): Xaa is C or S
  MOD_RES (21), (22), (23), (24), (25): Xaa is A or G
  MOD_RES (26), (27), (28), (29): Xaa is A or G or is absent

SEQ ID NO: 40808 - protein, 34 aa, Artificial Sequence; identical to SEQ ID NO: 16766
  GFR-binding peptide
  MOD_RES (3), (4): Xaa is C or S

SEQ ID NO: 40809 - protein, 34 aa, Artificial Sequence; identical to SEQ ID NO: 16767
  GFR-binding peptide
  MOD_RES (1), (1): Xaa is C or S
  MOD_RES (15), (16), (17), (18), (19): Xaa is A or G
  MOD_RES (20), (21), (22), (23): Xaa is A or G or is absent

SEQ ID NO: 40810 - protein, 33 aa, Artificial Sequence; identical to SEQ ID NO: 16768
  GFR-binding peptide
  MOD_RES (1), (33): Xaa is C or S

SEQ ID NO: 40811 - protein, 37 aa, Artificial Sequence; identical to SEQ ID NO: 14967
  GFR-binding peptide
  MOD_RES (1), (2), (35), (37): Xaa is C or S
  MOD_RES (16), (17), (18), (19), (20): Xaa is A or G
  MOD_RES (21), (22), (23), (24): Xaa is A or G or is absent

SEQ ID NO: 40812 - protein, 37 aa, Artificial Sequence; identical to SEQ ID NO: 14968
  GFR-binding peptide
  MOD_RES (5), (6), (37): Xaa is C or S

SEQ ID NO: 40813 - protein, 42 aa, Artificial Sequence; identical to SEQ ID NO: 14969
  GFR-binding peptide
  MOD_RES (7), (41): Xaa is C or S
  MOD_RES (21), (22), (23), (24), (25): Xaa is A or G
  MOD_RES (26), (27), (28), (29): Xaa is A or G or is absent

SEQ ID NO: 40814 - protein, 41 aa, Artificial Sequence; identical to SEQ ID NO: 14970
  GFR-binding peptide
  MOD_RES (7), (39), (41): Xaa is C or S

SEQ ID NO: 40815 - protein, 35 aa, Artificial Sequence; identical to SEQ ID NO: 14972
  GFR-binding peptide
  MOD_RES (4), (5): Xaa is C or S

SEQ ID NO: 40816 - protein, 36 aa, Artificial Sequence; identical to SEQ ID NO: 9468
  GFR-binding peptide
  MOD_RES (3), (4), (35): Xaa is C or S

SEQ ID NO: 40817 - protein, 34 aa, Artificial Sequence; identical to SEQ ID NO: 7671
  GFR-binding peptide
  MOD_RES (32), (34): Xaa is C or S

SEQ ID NO: 40818 - protein, 39 aa, Artificial Sequence; identical to SEQ ID NO: 16772
  GFR-binding peptide
  MOD_RES (6), (7), (39): Xaa is C or S

SEQ ID NO: 40819 - protein, 35 aa, Artificial Sequence; identical to SEQ ID NO: 16773
  GFR-binding peptide
  MOD_RES (2), (3): Xaa is C or S
  MOD_RES (17), (18), (19), (20), (21): Xaa is A or G
  MOD_RES (22), (23), (24), (25): Xaa is A or G or is absent

SEQ ID NO: 40820 - protein, 40 aa, Artificial Sequence; identical to SEQ ID NO: 16774
  GFR-binding peptide
  MOD_RES (6), (38), (40): Xaa is C or S

SEQ ID NO: 40821 - protein, 35 aa, Artificial Sequence; identical to SEQ ID NO: 9474
  GFR-binding peptide
  MOD_RES (2), (3), (34): Xaa is C or S

SEQ ID NO: 40822 - protein, 39 aa, Artificial Sequence; identical to SEQ ID NO: 16777
  GFR-binding peptide
  MOD_RES (4), (5), (39): Xaa is C or S
  MOD_RES (19), (20), (21), (22), (23): Xaa is A or G
  MOD_RES (24), (25), (26), (27): Xaa is A or G or is absent

SEQ ID NO: 40823 - protein, 36 aa, Artificial Sequence; identical to SEQ ID NO: 7673
  GFR-binding peptide
  MOD_RES (2), (3), (35): Xaa is C or S

SEQ ID NO: 40824 - protein, 34 aa, Artificial Sequence; identical to SEQ ID NO: 16778
  GFR-binding peptide
  MOD_RES (1), (33): Xaa is C or S

SEQ ID NO: 40825 - protein, 33 aa, Artificial Sequence; identical to SEQ ID NO: 14975
  GFR-binding peptide
  MOD_RES (14), (15), (16), (17), (18): Xaa is A or G
  MOD_RES (19), (20), (21), (22): Xaa is A or G or is absent

SEQ ID NO: 40826 - protein, 37 aa, Artificial Sequence; identical to SEQ ID NO: 16779
  GFR-binding peptide
  MOD_RES (3), (4), (37): Xaa is C or S
  MOD_RES (18), (19), (20), (21), (22): Xaa is A or G
  MOD_RES (23), (24), (25), (26): Xaa is A or G or is absent

SEQ ID NO: 40827 - protein, 38 aa, Artificial Sequence; identical to SEQ ID NO: 14977
  GFR-binding peptide
  MOD_RES (4), (5), (37): Xaa is C or S

SEQ ID NO: 40828 - protein, 30 aa, Artificial Sequence; identical to SEQ ID NO: 14978
  GFR-binding peptide

SEQ ID NO: 40829 - protein, 42 aa, Artificial Sequence; identical to SEQ ID NO: 16780
  GFR-binding peptide
  MOD_RES (5), (6), (40), (42): Xaa is C or S
  MOD_RES (20), (21), (22), (23), (24): Xaa is A or G
  MOD_RES (25), (26), (27), (28): Xaa is A or G or is absent

SEQ ID NO: 40830 - protein, 40 aa, Artificial Sequence; identical to SEQ ID NO: 16781
  GFR-binding peptide
  MOD_RES (5), (37), (39): Xaa is C or S

SEQ ID NO: 40831 - protein, 38 aa, Artificial Sequence; identical to SEQ ID NO: 16782
  GFR-binding peptide
  MOD_RES (3), (4), (38): Xaa is C or S
  MOD_RES (18), (19), (20), (21), (22): Xaa is A or G
  MOD_RES (23), (24), (25), (26): Xaa is A or G or is absent

SEQ ID NO: 40832 - protein, 38 aa, Artificial Sequence; identical to SEQ ID NO: 14979
  GFR-binding peptide
  MOD_RES (2), (3), (36), (38): Xaa is C or S
  MOD_RES (17), (18), (19), (20), (21): Xaa is A or G
  MOD_RES (22), (23), (24), (25): Xaa is A or G or is absent

SEQ ID NO: 40833 - protein, 30 aa, Artificial Sequence; identical to SEQ ID NO: 16783
  GFR-binding peptide

SEQ ID NO: 40834 - protein, 43 aa, Artificial Sequence; identical to SEQ ID NO: 14980
  GFR-binding peptide
  MOD_RES (5), (6), (40), (42): Xaa is C or S
  MOD_RES (20), (21), (22), (23), (24): Xaa is A or G
  MOD_RES (25), (26), (27), (28): Xaa is A or G or is absent

SEQ ID NO: 40835 - protein, 37 aa, Artificial Sequence; identical to SEQ ID NO: 16784
  GFR-binding peptide
  MOD_RES (4), (5): Xaa is C or S
  MOD_RES (19), (20), (21), (22), (23): Xaa is A or G
  MOD_RES (24), (25), (26), (27): Xaa is A or G or is absent

SEQ ID NO: 40836 - protein, 35 aa, Artificial Sequence; identical to SEQ ID NO: 16785
  GFR-binding peptide
  MOD_RES (32), (34): Xaa is C or S

SEQ ID NO: 40837 - protein, 41 aa, Artificial Sequence; identical to SEQ ID NO: 9485
  GFR-binding peptide
  MOD_RES (3), (4), (38), (40): Xaa is C or S
  MOD_RES (18), (19), (20), (21), (22): Xaa is A or G
  MOD_RES (23), (24), (25), (26): Xaa is A or G or is absent

SEQ ID NO: 40838 - protein, 34 aa, Artificial Sequence; identical to SEQ ID NO: 16788
  GFR-binding peptide
  MOD_RES (32), (34): Xaa is C or S

SEQ ID NO: 40839 - protein, 36 aa, Artificial Sequence; identical to SEQ ID NO: 16789
  GFR-binding peptide
  MOD_RES (1), (2), (36): Xaa is C or S
  MOD_RES (16), (17), (18), (19), (20): Xaa is A or G
  MOD_RES (21), (22), (23), (24): Xaa is A or G or is absent

SEQ ID NO: 40840 - protein, 37 aa, Artificial Sequence; identical to SEQ ID NO: 7680
  GFR-binding peptide
  MOD_RES (1), (35), (37): Xaa is C or S
  MOD_RES (15), (16), (17), (18), (19): Xaa is A or G
  MOD_RES (20), (21), (22), (23): Xaa is A or G or is absent

SEQ ID NO: 40841 - protein, 40 aa, Artificial Sequence; identical to SEQ ID NO: 9492
  GFR-binding peptide
  MOD_RES (2), (3), (37), (39): Xaa is C or S
  MOD_RES (17), (18), (19), (20), (21): Xaa is A or G
  MOD_RES (22), (23), (24), (25): Xaa is A or G or is absent

SEQ ID NO: 40842 - protein, 35 aa, Artificial Sequence; identical to SEQ ID NO: 14982
  GFR-binding peptide
  MOD_RES (1), (2), (34): Xaa is C or S

SEQ ID NO: 40843 - protein, 35 aa, Artificial Sequence; identical to SEQ ID NO: 7682
  GFR-binding peptide
  MOD_RES (4), (5): Xaa is C or S

SEQ ID NO: 40844 - protein, 41 aa, Artificial Sequence; identical to SEQ ID NO: 7683
  GFR-binding peptide
  MOD_RES (6), (7), (40): Xaa is C or S
  MOD_RES (21), (22), (23), (24), (25): Xaa is A or G
  MOD_RES (26), (27), (28), (29): Xaa is A or G or is absent

SEQ ID NO: 40845 - protein, 39 aa, Artificial Sequence; identical to SEQ ID NO: 16792
  GFR-binding peptide
  MOD_RES (3), (37), (39): Xaa is C or S
  MOD_RES (17), (18), (19), (20), (21): Xaa is A or G
  MOD_RES (22), (23), (24), (25): Xaa is A or G or is absent

SEQ ID NO: 40846 - protein, 37 aa, Artificial Sequence; identical to SEQ ID NO: 16793
  GFR-binding peptide
  MOD_RES (3), (4): Xaa is C or S
  MOD_RES (18), (19), (20), (21), (22): Xaa is A or G
  MOD_RES (23), (24), (25), (26): Xaa is A or G or is absent

SEQ ID NO: 40847 - protein, 35 aa, Artificial Sequence; identical to SEQ ID NO: 14985
  GFR-binding peptide
  MOD_RES (33), (35): Xaa is C or S
  MOD_RES (14), (15), (16), (17), (18): Xaa is A or G
  MOD_RES (19), (20), (21), (22): Xaa is A or G or is absent

SEQ ID NO: 40848 - protein, 41 aa, Artificial Sequence; identical to SEQ ID NO: 14986
  GFR-binding peptide
  MOD_RES (3), (4), (38), (40): Xaa is C or S
  MOD_RES (18), (19), (20), (21), (22): Xaa is A or G
  MOD_RES (23), (24), (25), (26): Xaa is A or G or is absent

SEQ ID NO: 40849 - protein, 41 aa, Artificial Sequence; identical to SEQ ID NO: 14987
  GFR-binding peptide
  MOD_RES (3), (4), (38), (40): Xaa is C or S
  MOD_RES (18), (19), (20), (21), (22): Xaa is A or G
  MOD_RES (23), (24), (25), (26): Xaa is A or G or is absent

SEQ ID NO: 40850 - protein, 38 aa, Artificial Sequence; identical to SEQ ID NO: 16795
  GFR-binding peptide
  MOD_RES (5), (37): Xaa is C or S

SEQ ID NO: 40851 - protein, 37 aa, Artificial Sequence; identical to SEQ ID NO: 14988
  GFR-binding peptide
  MOD_RES (5), (6): Xaa is C or S

SEQ ID NO: 40852 - protein, 37 aa, Artificial Sequence; identical to SEQ ID NO: 14989
  GFR-binding peptide
  MOD_RES (1), (35), (37): Xaa is C or S
  MOD_RES (15), (16), (17), (18), (19): Xaa is A or G
  MOD_RES (20), (21), (22), (23): Xaa is A or G or is absent

SEQ ID NO: 40853 - protein, 34 aa, Artificial Sequence; identical to SEQ ID NO: 16797
  GFR-binding peptide
  MOD_RES (3), (4): Xaa is C or S

SEQ ID NO: 40854 - protein, 39 aa, Artificial Sequence; identical to SEQ ID NO: 7690
  GFR-binding peptide
  MOD_RES (6), (7): Xaa is C or S
  MOD_RES (21), (22), (23), (24), (25): Xaa is A or G
  MOD_RES (26), (27), (28), (29): Xaa is A or G or is absent

SEQ ID NO: 40855 - protein, 31 aa, Artificial Sequence; identical to SEQ ID NO: 14991
  GFR-binding peptide
  MOD_RES (1), (1): Xaa is C or S

SEQ ID NO: 40856 - protein, 38 aa, Artificial Sequence; identical to SEQ ID NO: 14992
  GFR-binding peptide
  MOD_RES (4), (5): Xaa is C or S
  MOD_RES (19), (20), (21), (22), (23): Xaa is A or G
  MOD_RES (24), (25), (26), (27): Xaa is A or G or is absent

SEQ ID NO: 40857 - protein, 34 aa, Artificial Sequence; identical to SEQ ID NO: 9499
  GFR-binding peptide
  MOD_RES (34), (34): Xaa is C or S
  MOD_RES (14), (15), (16), (17), (18): Xaa is A or G
  MOD_RES (19), (20), (21), (22): Xaa is A or G or is absent

SEQ ID NO: 40858 - protein, 43 aa, Artificial Sequence; identical to SEQ ID NO: 9503
  GFR-binding peptide
  MOD_RES (6), (7), (40), (42): Xaa is C or S
  MOD_RES (21), (22), (23), (24), (25): Xaa is A or G
  MOD_RES (26), (27), (28), (29): Xaa is A or G or is absent

SEQ ID NO: 40859 - protein, 35 aa, Artificial Sequence; identical to SEQ ID NO: 16801
  GFR-binding peptide
  MOD_RES (2), (3): Xaa is C or S
  MOD_RES (17), (18), (19), (20), (21): Xaa is A or G
  MOD_RES (22), (23), (24), (25): Xaa is A or G or is absent

SEQ ID NO: 40860 - protein, 41 aa, Artificial Sequence; identical to SEQ ID NO: 9504
  GFR-binding peptide
  MOD_RES (6), (7), (38), (40): Xaa is C or S

SEQ ID NO: 40861 - protein, 39 aa, Artificial Sequence; identical to SEQ ID NO: 14994
  GFR-binding peptide
  MOD_RES (2), (3), (37), (39): Xaa is C or S
  MOD_RES (17), (18), (19), (20), (21): Xaa is A or G
  MOD_RES (22), (23), (24), (25): Xaa is A or G or is absent

SEQ ID NO: 40862 - protein, 41 aa, Artificial Sequence; identical to SEQ ID NO: 16804
  GFR-binding peptide
  MOD_RES (7), (39), (41): Xaa is C or S

SEQ ID NO: 40863 - protein, 37 aa, Artificial Sequence; identical to SEQ ID NO: 16805
  GFR-binding peptide
  MOD_RES (1), (35), (37): Xaa is C or S
  MOD_RES (15), (16), (17), (18), (19): Xaa is A or G
  MOD_RES (20), (21), (22), (23): Xaa is A or G or is absent

SEQ ID NO: 40864 - protein, 38 aa, Artificial Sequence; identical to SEQ ID NO: 7698
  GFR-binding peptide
  MOD_RES (5), (6): Xaa is C or S
  MOD_RES (20), (21), (22), (23), (24): Xaa is A or G
  MOD_RES (25), (26), (27), (28): Xaa is A or G or is absent

SEQ ID NO: 40865 - protein, 38 aa, Artificial Sequence; identical to SEQ ID NO: 16806
  GFR-binding peptide
  MOD_RES (3), (4), (38): Xaa is C or S
  MOD_RES (18), (19), (20), (21), (22): Xaa is A or G
  MOD_RES (23), (24), (25), (26): Xaa is A or G or is absent

SEQ ID NO: 40866 - protein, 35 aa, Artificial Sequence; identical to SEQ ID NO: 9506
  GFR-binding peptide
  MOD_RES (1), (2), (34): Xaa is C or S

SEQ ID NO: 40867 - protein, 37 aa, Artificial Sequence; identical to SEQ ID NO: 14996
  GFR-binding peptide
  MOD_RES (1), (2), (36): Xaa is C or S
  MOD_RES (16), (17), (18), (19), (20): Xaa is A or G
  MOD_RES (21), (22), (23), (24): Xaa is A or G or is absent

SEQ ID NO: 40868 - protein, 34 aa, Artificial Sequence; identical to SEQ ID NO: 14997
  GFR-binding peptide
  MOD_RES (2), (3), (34): Xaa is C or S

SEQ ID NO: 40869 - protein, 35 aa, Artificial Sequence; identical to SEQ ID NO: 7701
  GFR-binding peptide
  MOD_RES (2), (3), (35): Xaa is C or S

SEQ ID NO: 40870 - protein, 41 aa, Artificial Sequence; identical to SEQ ID NO: 14999
  GFR-binding peptide
  MOD_RES (5), (6), (40): Xaa is C or S
  MOD_RES (20), (21), (22), (23), (24): Xaa is A or G
  MOD_RES (25), (26), (27), (28): Xaa is A or G or is absent

SEQ ID NO: 40871 - protein, 35 aa, Artificial Sequence; identical to SEQ ID NO: 7702
  GFR-binding peptide
  MOD_RES (2), (3): Xaa is C or S
  MOD_RES (17), (18), (19), (20), (21): Xaa is A or G
  MOD_RES (22), (23), (24), (25): Xaa is A or G or is absent

SEQ ID NO: 40872 - protein, 34 aa, Artificial Sequence; identical to SEQ ID NO: 16808
  GFR-binding peptide
  MOD_RES (33), (33): Xaa is C or S
  MOD_RES (14), (15), (16), (17), (18): Xaa is A or G
  MOD_RES (19), (20), (21), (22): Xaa is A or G or is absent

SEQ ID NO: 40873 - protein, 32 aa, Artificial Sequence; identical to SEQ ID NO: 15001
  GFR-binding peptide
  MOD_RES (1), (1): Xaa is C or S

SEQ ID NO: 40874 - protein, 35 aa, Artificial Sequence; identical to SEQ ID NO: 7704
  GFR-binding peptide
  MOD_RES (1), (2), (33), (35): Xaa is C or S

SEQ ID NO: 40875 - protein, 35 aa, Artificial Sequence; identical to SEQ ID NO: 15003
  GFR-binding peptide
  MOD_RES (3), (4): Xaa is C or S

SEQ ID NO: 40876 - protein, 41 aa, Artificial Sequence; identical to SEQ ID NO: 16810
  GFR-binding peptide
  MOD_RES (4), (5), (39), (41): Xaa is C or S
  MOD_RES (19), (20), (21), (22), (23): Xaa is A or G
  MOD_RES (24), (25), (26), (27): Xaa is A or G or is absent

SEQ ID NO: 40877 - protein, 39 aa, Artificial Sequence; identical to SEQ ID NO: 15004
  GFR-binding peptide
  MOD_RES (4), (36), (38): Xaa is C or S

SEQ ID NO: 40878 - protein, 35 aa, Artificial Sequence; identical to SEQ ID NO: 15005
  GFR-binding peptide
  MOD_RES (2), (3): Xaa is C or S
  MOD_RES (17), (18), (19), (20), (21): Xaa is A or G
  MOD_RES (22), (23), (24), (25): Xaa is A or G or is absent

SEQ ID NO: 40879 - protein, 32 aa, Artificial Sequence; identical to SEQ ID NO: 16811
  GFR-binding peptide
  MOD_RES (1), (1): Xaa is C or S

SEQ ID NO: 40880 - protein, 40 aa, Artificial Sequence; identical to SEQ ID NO: 16813
  GFR-binding peptide
  MOD_RES (5), (6), (38), (40): Xaa is C or S

SEQ ID NO: 40881 - protein, 34 aa, Artificial Sequence; identical to SEQ ID NO: 15006
  GFR-binding peptide
  MOD_RES (31), (33): Xaa is C or S

SEQ ID NO: 40882 - protein, 38 aa, Artificial Sequence; identical to SEQ ID NO: 16815
  GFR-binding peptide
  MOD_RES (4), (5): Xaa is C or S
  MOD_RES (19), (20), (21), (22), (23): Xaa is A or G
  MOD_RES (24), (25), (26), (27): Xaa is A or G or is absent

SEQ ID NO: 40883 - protein, 35 aa, Artificial Sequence; identical to SEQ ID NO: 16816
  GFR-binding peptide
  MOD_RES (32), (34): Xaa is C or S

SEQ ID NO: 40884 - protein, 35 aa, Artificial Sequence; identical to SEQ ID NO: 7714
  GFR-binding peptide
  MOD_RES (1), (2), (33), (35): Xaa is C or S

SEQ ID NO: 40885 - protein, 42 aa, Artificial Sequence; identical to SEQ ID NO: 9522
  GFR-binding peptide
  MOD_RES (4), (5), (39), (41): Xaa is C or S
  MOD_RES (19), (20), (21), (22), (23): Xaa is A or G
  MOD_RES (24), (25), (26), (27): Xaa is A or G or is absent

SEQ ID NO: 40886 - protein, 33 aa, Artificial Sequence; identical to SEQ ID NO: 16819
  GFR-binding peptide
  MOD_RES (1), (33): Xaa is C or S

SEQ ID NO: 40887 - protein, 34 aa, Artificial Sequence; identical to SEQ ID NO: 16821
  GFR-binding peptide
  MOD_RES (2), (3): Xaa is C or S

SEQ ID NO: 40888 - protein, 37 aa, Artificial Sequence
  GFR-binding peptide
  MOD_RES (1), (2), (35), (37): Xaa is C or S
  MOD_RES (16), (17), (18), (19), (20): Xaa is A or G
  MOD_RES (21), (22), (23), (24): Xaa is A or G or is absent
XXVSQDLEPLTILYYXXXXXXXXXEQLSNMIVKSXKX

SEQ ID NO: 40889 - protein, 36 aa, Artificial Sequence; identical to SEQ ID NO: 16822
  GFR-binding peptide
  MOD_RES (34), (36): Xaa is C or S
  MOD_RES (14), (15), (16), (17), (18): Xaa is A or G
  MOD_RES (19), (20), (21), (22): Xaa is A or G or is absent

SEQ ID NO: 40890 - protein, 39 aa, Artificial Sequence; identical to SEQ ID NO: 9525
  GFR-binding peptide
  MOD_RES (2), (3), (36), (38): Xaa is C or S
  MOD_RES (17), (18), (19), (20), (21): Xaa is A or G
  MOD_RES (22), (23), (24), (25): Xaa is A or G or is absent

SEQ ID NO: 40891 - protein, 35 aa, Artificial Sequence; identical to SEQ ID NO: 15010
  GFR-binding peptide
  MOD_RES (1), (2), (35): Xaa is C or S
  MOD_RES (16), (17), (18), (19), (20): Xaa is A or G
  MOD_RES (21), (22), (23), (24): Xaa is A or G or is absent

SEQ ID NO: 40892 - protein, 33 aa, Artificial Sequence; identical to SEQ ID NO: 16825
  GFR-binding peptide
  MOD_RES (14), (15), (16), (17), (18): Xaa is A or G
  MOD_RES (19), (20), (21), (22): Xaa is A or G or is absent

SEQ ID NO: 40893 - protein, 39 aa, Artificial Sequence; identical to SEQ ID NO: 7720
  GFR-binding peptide
  MOD_RES (3), (4), (38): Xaa is C or S
  MOD_RES (18), (19), (20), (21), (22): Xaa is A or G
  MOD_RES (23), (24), (25), (26): Xaa is A or G or is absent

SEQ ID NO: 40894 - protein, 34 aa, Artificial Sequence; identical to SEQ ID NO: 7721
  GFR-binding peptide
  MOD_RES (32), (34): Xaa is C or S

SEQ ID NO: 40895 - protein, 38 aa, Artificial Sequence; identical to SEQ ID NO: 15015
  GFR-binding peptide
  MOD_RES (5), (6), (38): Xaa is C or S

SEQ ID NO: 40896 - protein, 35 aa, Artificial Sequence; identical to SEQ ID NO: 16827
  GFR-binding peptide
  MOD_RES (3), (4): Xaa is C or S

SEQ ID NO: 40897 - protein, 39 aa, Artificial Sequence; identical to SEQ ID NO: 16828
  GFR-binding peptide
  MOD_RES (6), (7): Xaa is C or S
  MOD_RES (21), (22), (23), (24), (25): Xaa is A or G
  MOD_RES (26), (27), (28), (29): Xaa is A or G or is absent

SEQ ID NO: 40898 - protein, 40 aa, Artificial Sequence; identical to SEQ ID NO: 9532
  GFR-binding peptide
  MOD_RES (2), (3), (37), (39): Xaa is C or S
  MOD_RES (17), (18), (19), (20), (21): Xaa is A or G
  MOD_RES (22), (23), (24), (25): Xaa is A or G or is absent

SEQ ID NO: 40899 - protein, 40 aa, Artificial Sequence; identical to SEQ ID NO: 15016
  GFR-binding peptide
  MOD_RES (4), (5), (37), (39): Xaa is C or S

SEQ ID NO: 40900 - protein, 33 aa, Artificial Sequence; identical to SEQ ID NO: 15018
  GFR-binding peptide
  MOD_RES (1), (2): Xaa is C or S

SEQ ID NO: 40901 - protein, 40 aa, Artificial Sequence; identical to SEQ ID NO: 15019
  GFR-binding peptide
  MOD_RES (5), (6), (39): Xaa is C or S
  MOD_RES (20), (21), (22), (23), (24): Xaa is A or G
  MOD_RES (25), (26), (27), (28): Xaa is A or G or is absent

SEQ ID NO: 40902 - protein, 38 aa, Artificial Sequence; identical to SEQ ID NO: 15020
  GFR-binding peptide
  MOD_RES (6), (38): Xaa is C or S

SEQ ID NO: 40903 - protein, 36 aa, Artificial Sequence; identical to SEQ ID NO: 15022
  GFR-binding peptide
  MOD_RES (1), (35): Xaa is C or S
  MOD_RES (15), (16), (17), (18), (19): Xaa is A or G
  MOD_RES (20), (21), (22), (23): Xaa is A or G or is absent

SEQ ID NO: 40904 - protein, 37 aa, Artificial Sequence; identical to SEQ ID NO: 15023
  GFR-binding peptide
  MOD_RES (2), (3), (37): Xaa is C or S
  MOD_RES (17), (18), (19), (20), (21): Xaa is A or G
  MOD_RES (22), (23), (24), (25): Xaa is A or G or is absent

SEQ ID NO: 40905 - protein, 39 aa, Artificial Sequence; identical to SEQ ID NO: 7726
  GFR-binding peptide
  MOD_RES (3), (4), (36), (38): Xaa is C or S

SEQ ID NO: 40906 - protein, 38 aa, Artificial Sequence; identical to SEQ ID NO: 9536
  GFR-binding peptide
  MOD_RES (6), (7): Xaa is C or S

SEQ ID NO: 40907 - protein, 41 aa, Artificial Sequence; identical to SEQ ID NO: 15026
  GFR-binding peptide
  MOD_RES (4), (5), (39), (41): Xaa is C or S
  MOD_RES (19), (20), (21), (22), (23): Xaa is A or G
  MOD_RES (24), (25), (26), (27): Xaa is A or G or is absent

SEQ ID NO: 40908 - protein, 37 aa, Artificial Sequence; identical to SEQ ID NO: 16832
  GFR-binding peptide
  MOD_RES (2), (3), (34), (36): Xaa is C or S

SEQ ID NO: 40909 - protein, 37 aa, Artificial Sequence; identical to SEQ ID NO: 15027
  GFR-binding peptide
  MOD_RES (34), (36): Xaa is C or S
  MOD_RES (14), (15), (16), (17), (18): Xaa is A or G
  MOD_RES (19), (20), (21), (22): Xaa is A or G or is absent

SEQ ID NO: 40910 - protein, 35 aa, Artificial Sequence; identical to SEQ ID NO: 15028
  GFR-binding peptide
  MOD_RES (1), (35): Xaa is C or S
  MOD_RES (15), (16), (17), (18), (19): Xaa is A or G
  MOD_RES (20), (21), (22), (23): Xaa is A or G or is absent

SEQ ID NO: 40911 - protein, 38 aa, Artificial Sequence; identical to SEQ ID NO: 16833
  GFR-binding peptide
  MOD_RES (5), (6): Xaa is C or S
  MOD_RES (20), (21), (22), (23), (24): Xaa is A or G
  MOD_RES (25), (26), (27), (28): Xaa is A or G or is absent

SEQ ID NO: 40912 - protein, 33 aa, Artificial Sequence; identical to SEQ ID NO: 16834
  GFR-binding peptide
  MOD_RES (1), (2): Xaa is C or S

SEQ ID NO: 40913 - protein, 36 aa, Artificial Sequence; identical to SEQ ID NO: 15029
  GFR-binding peptide
  MOD_RES (34), (36): Xaa is C or S
  MOD_RES (14), (15), (16), (17), (18): Xaa is A or G
  MOD_RES (19), (20), (21), (22): Xaa is A or G or is absent

SEQ ID NO: 40914 - protein, 40 aa, Artificial Sequence; identical to SEQ ID NO: 9538
  GFR-binding peptide
  MOD_RES (5), (6), (37), (39): Xaa is C or S

SEQ ID NO: 40915 - protein, 39 aa, Artificial Sequence; identical to SEQ ID NO: 15031
  GFR-binding peptide
  MOD_RES (6), (38): Xaa is C or S

SEQ ID NO: 40916 - protein, 33 aa, Artificial Sequence; identical to SEQ ID NO: 15032
  GFR-binding peptide
  MOD_RES (3), (3): Xaa is C or S

SEQ ID NO: 40917 - protein, 38 aa, Artificial Sequence; identical to SEQ ID NO: 16838
  GFR-binding peptide
  MOD_RES (6), (7): Xaa is C or S

SEQ ID NO: 40918 - protein, 36 aa, Artificial Sequence; identical to SEQ ID NO: 15033
  GFR-binding peptide
  MOD_RES (3), (4), (36): Xaa is C or S

SEQ ID NO: 40919 - protein, 37 aa, Artificial Sequence; identical to SEQ ID NO: 16839
  GFR-binding peptide
  MOD_RES (6), (7): Xaa is C or S

SEQ ID NO: 40920 - protein, 44 aa, Artificial Sequence; identical to SEQ ID NO: 15035
  GFR-binding peptide
  MOD_RES (6), (7), (41), (43): Xaa is C or S
  MOD_RES (21), (22), (23), (24), (25): Xaa is A or G
  MOD_RES (26), (27), (28), (29): Xaa is A or G or is absent

SEQ ID NO: 40921 - protein, 41 aa, Artificial Sequence; identical to SEQ ID NO: 15036
  GFR-binding peptide
  MOD_RES (5), (6), (39), (41): Xaa is C or S
  MOD_RES (20), (21), (22), (23), (24): Xaa is A or G
  MOD_RES (25), (26), (27), (28): Xaa is A or G or is absent

SEQ ID NO: 40922 - protein, 37 aa, Artificial Sequence; identical to SEQ ID NO: 15037
  GFR-binding peptide
  MOD_RES (2), (3), (37): Xaa is C or S
  MOD_RES (17), (18), (19), (20), (21): Xaa is A or G
  MOD_RES (22), (23), (24), (25): Xaa is A or G or is absent

SEQ ID NO: 40923 - protein, 41 aa, Artificial Sequence; identical to SEQ ID NO: 15038
  GFR-binding peptide
  MOD_RES (6), (7), (41): Xaa is C or S
  MOD_RES (21), (22), (23), (24), (25): Xaa is A or G
  MOD_RES (26), (27), (28), (29): Xaa is A or G or is absent

SEQ ID NO: 40924 - protein, 41 aa, Artificial Sequence; identical to SEQ ID NO: 16840
  GFR-binding peptide
  MOD_RES (3), (4), (38), (40): Xaa is C or S
  MOD_RES (18), (19), (20), (21), (22): Xaa is A or G
  MOD_RES (23), (24), (25), (26): Xaa is A or G or is absent

SEQ ID NO: 40925 - protein, 39 aa, Artificial Sequence; identical to SEQ ID NO: 9546
  GFR-binding peptide
  MOD_RES (6), (7), (38): Xaa is C or S

SEQ ID NO: 40926 - protein, 41 aa, Artificial Sequence; identical to SEQ ID NO: 15039
  GFR-binding peptide
  MOD_RES (3), (4), (38), (40): Xaa is C or S
  MOD_RES (18), (19), (20), (21), (22): Xaa is A or G
  MOD_RES (23), (24), (25), (26): Xaa is A or G or is absent

SEQ ID NO: 40927 - protein, 36 aa, Artificial Sequence; identical to SEQ ID NO: 16842
  GFR-binding peptide
  MOD_RES (4), (4): Xaa is C or S
  MOD_RES (18), (19), (20), (21), (22): Xaa is A or G
  MOD_RES (23), (24), (25), (26): Xaa is A or G or is absent

SEQ ID NO: 40928 - protein, 39 aa, Artificial Sequence; identical to SEQ ID NO: 15041
  GFR-binding peptide
  MOD_RES (5), (6), (37), (39): Xaa is C or S

SEQ ID NO: 40929 - protein, 37 aa, Artificial Sequence; identical to SEQ ID NO: 16843
  GFR-binding peptide
  MOD_RES (5), (37): Xaa is C or S

SEQ ID NO: 40930 - protein, 34 aa, Artificial Sequence; identical to SEQ ID NO: 15043
  GFR-binding peptide
  MOD_RES (1), (1): Xaa is C or S
  MOD_RES (15), (16), (17), (18), (19): Xaa is A or G
  MOD_RES (20), (21), (22), (23): Xaa is A or G or is absent

SEQ ID NO: 40931 - protein, 35 aa, Artificial Sequence; identical to SEQ ID NO: 16845
  GFR-binding peptide
  MOD_RES (5), (5): Xaa is C or S

SEQ ID NO: 40932 - protein, 36 aa, Artificial Sequence; identical to SEQ ID NO: 16846
  GFR-binding peptide
  MOD_RES (3), (4), (36): Xaa is C or S

SEQ ID NO: 40933 - protein, 38 aa, Artificial Sequence; identical to SEQ ID NO: 16847
  GFR-binding peptide
  MOD_RES (1), (35), (37): Xaa is C or S
  MOD_RES (15), (16), (17), (18), (19): Xaa is A or G
  MOD_RES (20), (21), (22), (23): Xaa is A or G or is absent

SEQ ID NO: 40934 - protein, 34 aa, Artificial Sequence; identical to SEQ ID NO: 7743
  GFR-binding peptide
  MOD_RES (3), (4): Xaa is C or S

SEQ ID NO: 40935 - protein, 42 aa, Artificial Sequence; identical to SEQ ID NO: 16848
  GFR-binding peptide
  MOD_RES (6), (40), (42): Xaa is C or S
  MOD_RES (20), (21), (22), (23), (24): Xaa is A or G
  MOD_RES (25), (26), (27), (28): Xaa is A or G or is absent

SEQ ID NO: 40936 - protein, 38 aa, Artificial Sequence
  GFR-binding peptide
  MOD_RES (1), (2), (35), (37): Xaa is C or S
  MOD_RES (16), (17), (18), (19), (20): Xaa is A or G
  MOD_RES (21), (22), (23), (24): Xaa is A or G or is absent
XXVSQDLEPLTILYYXXXXXXXXXEQLSNMIVKSXKXS

SEQ ID NO: 40937 - protein, 40 aa, Artificial Sequence; identical to SEQ ID NO: 16849
  GFR-binding peptide
  MOD_RES (4), (5), (39): Xaa is C or S
  MOD_RES (19), (20), (21), (22), (23): Xaa is A or G
  MOD_RES (24), (25), (26), (27): Xaa is A or G or is absent

SEQ ID NO: 40938 - protein, 36 aa, Artificial Sequence; identical to SEQ ID NO: 7745
  GFR-binding peptide
  MOD_RES (2), (3), (34), (36): Xaa is C or S

SEQ ID NO: 40939 - protein, 41 aa, Artificial Sequence; identical to SEQ ID NO: 7748
  GFR-binding peptide
  MOD_RES (4), (5), (39), (41): Xaa is C or S
  MOD_RES (19), (20), (21), (22), (23): Xaa is A or G
  MOD_RES (24), (25), (26), (27): Xaa is A or G or is absent

SEQ ID NO: 40940 - protein, 39 aa, Artificial Sequence; identical to SEQ ID NO: 16850
  GFR-binding peptide
  MOD_RES (5), (6), (38): Xaa is C or S

SEQ ID NO: 40941 - protein, 42 aa, Artificial Sequence; identical to SEQ ID NO: 15047
  GFR-binding peptide
  MOD_RES (6), (7), (40), (42): Xaa is C or S
  MOD_RES (21), (22), (23), (24), (25): Xaa is A or G
  MOD_RES (26), (27), (28), (29): Xaa is A or G or is absent

SEQ ID NO: 40942 - protein, 39 aa, Artificial Sequence; identical to SEQ ID NO: 7749
  GFR-binding peptide
  MOD_RES (4), (5), (38): Xaa is C or S
  MOD_RES (19), (20), (21), (22), (23): Xaa is A or G
  MOD_RES (24), (25), (26), (27): Xaa is A or G or is absent

SEQ ID NO: 40943 - protein, 40 aa, Artificial Sequence; identical to SEQ ID NO: 15049
  GFR-binding peptide
  MOD_RES (6), (7), (40): Xaa is C or S
  MOD_RES (21), (22), (23), (24), (25): Xaa is A or G
  MOD_RES (26), (27), (28), (29): Xaa is A or G or is absent

SEQ ID NO: 40944 - protein, 35 aa, Artificial Sequence; identical to SEQ ID NO: 16851
  GFR-binding peptide
  MOD_RES (1), (2), (34): Xaa is C or S

SEQ ID NO: 40945 - protein, 34 aa, Artificial Sequence; identical to SEQ ID NO: 16852
  GFR-binding peptide
  MOD_RES (34), (34): Xaa is C or S
  MOD_RES (14), (15), (16), (17), (18): Xaa is A or G
  MOD_RES (19), (20), (21), (22): Xaa is A or G or is absent

SEQ ID NO: 40946 - protein, 34 aa, Artificial Sequence; identical to SEQ ID NO: 9559
  GFR-binding peptide
  MOD_RES (1), (32), (34): Xaa is C or S

SEQ ID NO: 40947 - protein, 36 aa, Artificial Sequence; identical to SEQ ID NO: 16855
  GFR-binding peptide
  MOD_RES (34), (36): Xaa is C or S
  MOD_RES (14), (15), (16), (17), (18): Xaa is A or G
  MOD_RES (19), (20), (21), (22): Xaa is A or G or is absent

SEQ ID NO: 40948 - protein, 38 aa, Artificial Sequence; identical to SEQ ID NO: 15051
  GFR-binding peptide
  MOD_RES (1), (35), (37): Xaa is C or S
  MOD_RES (15), (16), (17), (18), (19): Xaa is A or G
  MOD_RES (20), (21), (22), (23): Xaa is A or G or is absent

SEQ ID NO: 40949 - protein, 42 aa, Artificial Sequence; identical to SEQ ID NO: 15052
  GFR-binding peptide
  MOD_RES (4), (5), (39), (41): Xaa is C or S
  MOD_RES (19), (20), (21), (22), (23): Xaa is A or G
  MOD_RES (24), (25), (26), (27): Xaa is A or G or is absent

SEQ ID NO: 40950 - protein, 37 aa, Artificial Sequence; identical to SEQ ID NO: 16857
  GFR-binding peptide
  MOD_RES (6), (7): Xaa is C or S

SEQ ID NO: 40951 - protein, 40 aa, Artificial Sequence; identical to SEQ ID NO: 9562
  GFR-binding peptide
  MOD_RES (5), (6), (39): Xaa is C or S
  MOD_RES (20), (21), (22), (23), (24): Xaa is A or G
  MOD_RES (25), (26), (27), (28): Xaa is A or G or is absent

SEQ ID NO: 40952 - protein, 33 aa, Artificial Sequence; identical to SEQ ID NO: 16859
  GFR-binding peptide
  MOD_RES (1), (33): Xaa is C or S

SEQ ID NO: 40953 - protein, 37 aa, Artificial Sequence; identical to SEQ ID NO: 15053
  GFR-binding peptide
  MOD_RES (2), (36): Xaa is C or S
  MOD_RES (16), (17), (18), (19), (20): Xaa is A or G
  MOD_RES (21), (22), (23), (24): Xaa is A or G or is absent

SEQ ID NO: 40954 - protein, 33 aa, Artificial Sequence; identical to SEQ ID NO: 16860
  GFR-binding peptide
  MOD_RES (1), (2), (33): Xaa is C or S

SEQ ID NO: 40955 - protein, 36 aa, Artificial Sequence; identical to SEQ ID NO: 7752
  GFR-binding peptide
  MOD_RES (2), (3), (36): Xaa is C or S
  MOD_RES (17), (18), (19), (20), (21): Xaa is A or G
  MOD_RES (22), (23), (24), (25): Xaa is A or G or is absent

SEQ ID NO: 40956 - protein, 43 aa, Artificial Sequence; identical to SEQ ID NO: 16861
  GFR-binding peptide
  MOD_RES (5), (6), (40), (42): Xaa is C or S
  MOD_RES (20), (21), (22), (23), (24): Xaa is A or G
  MOD_RES (25), (26), (27), (28): Xaa is A or G or is absent

SEQ ID NO: 40957 - protein, 41 aa, Artificial Sequence; identical to SEQ ID NO: 16862
  GFR-binding peptide
  MOD_RES (6), (7), (39), (41): Xaa is C or S

SEQ ID NO: 40958 - protein, 35 aa, Artificial Sequence; identical to SEQ ID NO: 15055
  GFR-binding peptide
  MOD_RES (34), (34): Xaa is C or S
  MOD_RES (14), (15), (16), (17), (18): Xaa is A or G
  MOD_RES (19), (20), (21), (22): Xaa is A or G or is absent

SEQ ID NO: 40959 - protein, 41 aa, Artificial Sequence; identical to SEQ ID NO: 15056
  GFR-binding peptide
  MOD_RES (5), (6), (40): Xaa is C or S
  MOD_RES (20), (21), (22), (23), (24): Xaa is A or G
  MOD_RES (25), (26), (27), (28): Xaa is A or G or is absent

SEQ ID NO: 40960 - protein, 40 aa, Artificial Sequence; identical to SEQ ID NO: 16863
  GFR-binding peptide
  MOD_RES (3), (4), (37), (39): Xaa is C or S
  MOD_RES (18), (19), (20), (21), (22): Xaa is A or G
  MOD_RES (23), (24), (25), (26): Xaa is A or G or is absent

SEQ ID NO: 40961 - protein, 39 aa, Artificial Sequence; identical to SEQ ID NO: 15057
  GFR-binding peptide
  MOD_RES (4), (5), (37), (39): Xaa is C or S

SEQ ID NO: 40962 - protein, 41 aa, Artificial Sequence; identical to SEQ ID NO: 15058
  GFR-binding peptide
  MOD_RES (4), (5), (39), (41): Xaa is C or S
  MOD_RES (19), (20), (21), (22), (23): Xaa is A or G
  MOD_RES (24), (25), (26), (27): Xaa is A or G or is absent

SEQ ID NO: 40963 - protein, 40 aa, Artificial Sequence; identical to SEQ ID NO: 15059
  GFR-binding peptide
  MOD_RES (5), (6), (39): Xaa is C or S
  MOD_RES (20), (21), (22), (23), (24): Xaa is A or G
  MOD_RES (25), (26), (27), (28): Xaa is A or G or is absent

SEQ ID NO: 40964 - protein, 38 aa, Artificial Sequence; identical to SEQ ID NO: 15060
  GFR-binding peptide
  MOD_RES (3), (4), (38): Xaa is C or S
  MOD_RES (18), (19), (20), (21), (22): Xaa is A or G
  MOD_RES (23), (24), (25), (26): Xaa is A or G or is absent

SEQ ID NO: 40965 - protein, 36 aa, Artificial Sequence; identical to SEQ ID NO: 16864
  GFR-binding peptide
  MOD_RES (1), (2), (34), (36): Xaa is C or S

SEQ ID NO: 40966 - protein, 38 aa, Artificial Sequence; identical to SEQ ID NO: 15062
  GFR-binding peptide
  MOD_RES (2), (3), (37): Xaa is C or S
  MOD_RES (17), (18), (19), (20), (21): Xaa is A or G
  MOD_RES (22), (23), (24), (25): Xaa is A or G or is absent

SEQ ID NO: 40967 - protein, 34 aa, Artificial Sequence; identical to SEQ ID NO: 15063
  GFR-binding peptide
  MOD_RES (2), (3): Xaa is C or S

SEQ ID NO: 40968 - protein, 35 aa, Artificial Sequence; identical to SEQ ID NO: 16867
  GFR-binding peptide
  MOD_RES (1), (2), (35): Xaa is C or S
  MOD_RES (16), (17), (18), (19), (20): Xaa is A or G
  MOD_RES (21), (22), (23), (24): Xaa is A or G or is absent

SEQ ID NO: 40969 - protein, 39 aa, Artificial Sequence; identical to SEQ ID NO: 15064
  GFR-binding peptide
  MOD_RES (6), (6): Xaa is C or S
  MOD_RES (20), (21), (22), (23), (24): Xaa is A or G
  MOD_RES (25), (26), (27), (28): Xaa is A or G or is absent

SEQ ID NO: 40970 - protein, 34 aa, Artificial Sequence; identical to SEQ ID NO: 15065
  GFR-binding peptide
  MOD_RES (3), (4): Xaa is C or S

SEQ ID NO: 40971 - protein, 35 aa, Artificial Sequence; identical to SEQ ID NO: 16868
  GFR-binding peptide
  MOD_RES (1), (2), (35): Xaa is C or S
  MOD_RES (16), (17), (18), (19), (20): Xaa is A or G
  MOD_RES (21), (22), (23), (24): Xaa is A or G or is absent

SEQ ID NO: 40972 - protein, 33 aa, Artificial Sequence; identical to SEQ ID NO: 9572
  GFR-binding peptide
  MOD_RES (1), (1): Xaa is C or S
  MOD_RES (15), (16), (17), (18), (19): Xaa is A or G
  MOD_RES (20), (21), (22), (23): Xaa is A or G or is absent

SEQ ID NO: 40973 - protein, 38 aa, Artificial Sequence; identical to SEQ ID NO: 16870
  GFR-binding peptide
  MOD_RES (5), (6), (38): Xaa is C or S

SEQ ID NO: 40974 - protein, 38 aa, Artificial Sequence; identical to SEQ ID NO: 16871
  GFR-binding peptide
  MOD_RES (3), (4), (36), (38): Xaa is C or S

SEQ ID NO: 40975 - protein, 38 aa, Artificial Sequence; identical to SEQ ID NO: 16872
  GFR-binding peptide
  MOD_RES (6), (38): Xaa is C or S

SEQ ID NO: 40976 - protein, 34 aa, Artificial Sequence; identical to SEQ ID NO: 16873
  GFR-binding peptide
  MOD_RES (34), (34): Xaa is C or S
  MOD_RES (14), (15), (16), (17), (18): Xaa is A or G
  MOD_RES (19), (20), (21), (22): Xaa is A or G or is absent

SEQ ID NO: 40977 - protein, 36 aa, Artificial Sequence; identical to SEQ ID NO: 16874
  GFR-binding peptide
  MOD_RES (3), (4): Xaa is C or S
  MOD_RES (18), (19), (20), (21), (22): Xaa is A or G
  MOD_RES (23), (24), (25), (26): Xaa is A or G or is absent

SEQ ID NO: 40978 - protein, 40 aa, Artificial Sequence; identical to SEQ ID NO: 16875
  GFR-binding peptide
  MOD_RES (3), (4), (38), (40): Xaa is C or S
  MOD_RES (18), (19), (20), (21), (22): Xaa is A or G
  MOD_RES (23), (24), (25), (26): Xaa is A or G or is absent

SEQ ID NO: 40979 - protein, 31 aa, Artificial Sequence; identical to SEQ ID NO: 15066
  GFR-binding peptide
  MOD_RES (1), (1): Xaa is C or S

SEQ ID NO: 40980 - protein, 33 aa, Artificial Sequence; identical to SEQ ID NO: 15067
  GFR-binding peptide
  MOD_RES (1), (2): Xaa is C or S

SEQ ID NO: 40981 - protein, 34 aa, Artificial Sequence; identical to SEQ ID NO: 15070
  GFR-binding peptide
  MOD_RES (32), (34): Xaa is C or S

SEQ ID NO: 40982 - protein, 38 aa, Artificial Sequence; identical to SEQ ID NO: 9577
  GFR-binding peptide
  MOD_RES (4), (5), (37): Xaa is C or S

SEQ ID NO: 40983 - protein, 37 aa, Artificial Sequence; identical to SEQ ID NO: 16878
  GFR-binding peptide
  MOD_RES (5), (6): Xaa is C or S

SEQ ID NO: 40984 - protein, 41 aa, Artificial Sequence; identical to SEQ ID NO: 9580
  GFR-binding peptide
  MOD_RES (6), (7), (41): Xaa is C or S
  MOD_RES (21), (22), (23), (24), (25): Xaa is A or G
  MOD_RES (26), (27), (28), (29): Xaa is A or G or is absent

SEQ ID NO: 40985 - protein, 38 aa, Artificial Sequence; identical to SEQ ID NO: 15071
  GFR-binding peptide
  MOD_RES (3), (4), (36), (38): Xaa is C or S

SEQ ID NO: 40986 - protein, 38 aa, Artificial Sequence; identical to SEQ ID NO: 15072
  GFR-binding peptide
  MOD_RES (2), (3), (37): Xaa is C or S
  MOD_RES (17), (18), (19), (20), (21): Xaa is A or G
  MOD_RES (22), (23), (24), (25): Xaa is A or G or is absent

SEQ ID NO: 40987 - protein, 38 aa, Artificial Sequence; identical to SEQ ID NO: 15073
  GFR-binding peptide
  MOD_RES (1), (35), (37): Xaa is C or S
  MOD_RES (15), (16), (17), (18), (19): Xaa is A or G
  MOD_RES (20), (21), (22), (23): Xaa is A or G or is absent

SEQ ID NO: 40988 - protein, 37 aa, Artificial Sequence; identical to SEQ ID NO: 9581
  GFR-binding peptide
  MOD_RES (4), (5): Xaa is C or S
  MOD_RES (19), (20), (21), (22), (23): Xaa is A or G
  MOD_RES (24), (25), (26), (27): Xaa is A or G or is absent

SEQ ID NO: 40989 - protein, 34 aa, Artificial Sequence; identical to SEQ ID NO: 15074
  GFR-binding peptide
  MOD_RES (2), (3): Xaa is C or S

SEQ ID NO: 40990 - protein, 40 aa, Artificial Sequence; identical to SEQ ID NO: 15075
  GFR-binding peptide
  MOD_RES (4), (5), (37), (39): Xaa is C or S

SEQ ID NO: 40991 - protein, 32 aa, Artificial Sequence; identical to SEQ ID NO: 16881
  GFR-binding peptide
  MOD_RES (14), (15), (16), (17), (18): Xaa is A or G
  MOD_RES (19), (20), (21), (22): Xaa is A or G or is absent

SEQ ID NO: 40992 - protein, 40 aa, Artificial Sequence; identical to SEQ ID NO: 15076
  GFR-binding peptide
  MOD_RES (4), (5), (39): Xaa is C or S
  MOD_RES (19), (20), (21), (22), (23): Xaa is A or G
  MOD_RES (24), (25), (26), (27): Xaa is A or G or is absent

SEQ ID NO: 40993 - protein, 36 aa, Artificial Sequence; identical to SEQ ID NO: 7771
  GFR-binding peptide
  MOD_RES (4), (5), (36): Xaa is C or S

SEQ ID NO: 40994 - protein, 43 aa, Artificial Sequence; identical to SEQ ID NO: 15078
  GFR-binding peptide
  MOD_RES (5), (6), (40), (42): Xaa is C or S
  MOD_RES (20), (21), (22), (23), (24): Xaa is A or G
  MOD_RES (25), (26), (27), (28): Xaa is A or G or is absent

SEQ ID NO: 40995 - protein, 42 aa, Artificial Sequence
  GFR-binding peptide
  MOD_RES (5), (6), (39), (41): Xaa is C or S
  MOD_RES (20), (21), (22), (23), (24): Xaa is A or G
  MOD_RES (25), (26), (27), (28): Xaa is A or G or is absent
SASPXXVSQDLEPLTILYYXXXXXXXXXEQLSNMIVKSXKXS

SEQ ID NO: 40996 - protein, 38 aa, Artificial Sequence; identical to SEQ ID NO: 15079
  GFR-binding peptide
  MOD_RES (4), (5), (37): Xaa is C or S

SEQ ID NO: 40997 - protein, 37 aa, Artificial Sequence; identical to SEQ ID NO: 15080
  GFR-binding peptide
  MOD_RES (3), (4), (35), (37): Xaa is C or S

SEQ ID NO: 40998 - protein, 37 aa, Artificial Sequence; identical to SEQ ID NO: 15081
  GFR-binding peptide
  MOD_RES (34), (36): Xaa is C or S
  MOD_RES (14), (15), (16), (17), (18): Xaa is A or G
  MOD_RES (19), (20), (21), (22): Xaa is A or G or is absent

SEQ ID NO: 40999 - protein, 43 aa, Artificial Sequence; identical to SEQ ID NO: 16883
  GFR-binding peptide
  MOD_RES (6), (7), (41), (43): Xaa is C or S
  MOD_RES (21), (22), (23), (24), (25): Xaa is A or G
  MOD_RES (26), (27), (28), (29): Xaa is A or G or is absent

SEQ ID NO: 41000 - protein, 32 aa, Artificial Sequence; identical to SEQ ID NO: 9595
  GFR-binding peptide
  MOD_RES (14), (15), (16), (17), (18): Xaa is A or G
  MOD_RES (19), (20), (21), (22): Xaa is A or G or is absent

SEQ ID NO: 41001 - protein, 39 aa, Artificial Sequence; identical to SEQ ID NO: 16886
  GFR-binding peptide
  MOD_RES (4), (5), (39): Xaa is C or S
  MOD_RES (19), (20), (21), (22), (23): Xaa is A or G
  MOD_RES (24), (25), (26), (27): Xaa is A or G or is absent

SEQ ID NO: 41002 - protein, 38 aa, Artificial Sequence; identical to SEQ ID NO: 16887
  GFR-binding peptide
  MOD_RES (3), (4), (35), (37): Xaa is C or S

SEQ ID NO: 41003 - protein, 42 aa, Artificial Sequence; identical to SEQ ID NO: 9598
  GFR-binding peptide
  MOD_RES (6), (7), (40), (42): Xaa is C or S
  MOD_RES (21), (22), (23), (24), (25): Xaa is A or G
  MOD_RES (26), (27), (28), (29): Xaa is A or G or is absent

SEQ ID NO: 41004 - protein, 34 aa, Artificial Sequence; identical to SEQ ID NO: 15084
  GFR-binding peptide
  MOD_RES (1), (2), (33): Xaa is C or S

SEQ ID NO: 41005 - protein, 38 aa, Artificial Sequence; identical to SEQ ID NO: 16891
  GFR-binding peptide
  MOD_RES (2), (3), (36), (38): Xaa is C or S
  MOD_RES (17), (18), (19), (20), (21): Xaa is A or G
  MOD_RES (22), (23), (24), (25): Xaa is A or G or is absent

SEQ ID NO: 41006 - protein, 39 aa, Artificial Sequence; identical to SEQ ID NO: 15087
  GFR-binding peptide
  MOD_RES (3), (4), (36), (38): Xaa is C or S

SEQ ID NO: 41007 - protein, 39 aa, Artificial Sequence; identical to SEQ ID NO: 15088
  GFR-binding peptide
  MOD_RES (3), (4), (38): Xaa is C or S
  MOD_RES (18), (19), (20), (21), (22): Xaa is A or G
  MOD_RES (23), (24), (25), (26): Xaa is A or G or is absent

SEQ ID NO: 41008 - protein, 33 aa, Artificial Sequence; identical to SEQ ID NO: 16892
  GFR-binding peptide
  MOD_RES (1), (1): Xaa is C or S
  MOD_RES (15), (16), (17), (18), (19): Xaa is A or G
  MOD_RES (20), (21), (22), (23): Xaa is A or G or is absent

SEQ ID NO: 41009 - protein, 35 aa, Artificial Sequence; identical to SEQ ID NO: 15091
  GFR-binding peptide
  MOD_RES (3), (4), (35): Xaa is C or S

SEQ ID NO: 41010 - protein, 37 aa, Artificial Sequence; identical to SEQ ID NO: 15092
  GFR-binding peptide
  MOD_RES (5), (5): Xaa is C or S
  MOD_RES (19), (20), (21), (22), (23): Xaa is A or G
  MOD_RES (24), (25), (26), (27): Xaa is A or G or is absent

SEQ ID NO: 41011 - protein, 41 aa, Artificial Sequence; identical to SEQ ID NO: 15093
  GFR-binding peptide
  MOD_RES (5), (6), (40): Xaa is C or S
  MOD_RES (20), (21), (22), (23), (24): Xaa is A or G
  MOD_RES (25), (26), (27), (28): Xaa is A or G or is absent

SEQ ID NO: 41012 - protein, 42 aa, Artificial Sequence; identical to SEQ ID NO: 15094
  GFR-binding peptide
  MOD_RES (5), (6), (40), (42): Xaa is C or S
  MOD_RES (20), (21), (22), (23), (24): Xaa is A or G
  MOD_RES (25), (26), (27), (28): Xaa is A or G or is absent

SEQ ID NO: 41013 - protein, 37 aa, Artificial Sequence; identical to SEQ ID NO: 16893
  GFR-binding peptide
  MOD_RES (2), (3), (35), (37): Xaa is C or S

SEQ ID NO: 41014 - protein, 37 aa, Artificial Sequence; identical to SEQ ID NO: 7787
  GFR-binding peptide
  MOD_RES (1), (2), (36): Xaa is C or S
  MOD_RES (16), (17), (18), (19), (20): Xaa is A or G
  MOD_RES (21), (22), (23), (24): Xaa is A or G or is absent

SEQ ID NO: 41015 - protein, 41 aa, Artificial Sequence; identical to SEQ ID NO: 16894
  GFR-binding peptide
  MOD_RES (5), (6), (40): Xaa is C or S
  MOD_RES (20), (21), (22), (23), (24): Xaa is A or G
  MOD_RES (25), (26), (27), (28): Xaa is A or G or is absent

SEQ ID NO: 41016 - protein, 37 aa, Artificial Sequence; identical to SEQ ID NO: 16895
  GFR-binding peptide
  MOD_RES (2), (3), (35), (37): Xaa is C or S

SEQ ID NO: 41017 - protein, 34 aa, Artificial Sequence; identical to SEQ ID NO: 15096
  GFR-binding peptide
  MOD_RES (1), (33): Xaa is C or S

SEQ ID NO: 41018 - protein, 33 aa, Artificial Sequence; identical to SEQ ID NO: 16896
  GFR-binding peptide
  MOD_RES (32), (32): Xaa is C or S

SEQ ID NO: 41019 - protein, 35 aa, Artificial Sequence; identical to SEQ ID NO: 15097
  GFR-binding peptide
  MOD_RES (4), (5): Xaa is C or S

SEQ ID NO: 41020 - protein, 36 aa, Artificial Sequence; identical to SEQ ID NO: 15098
  GFR-binding peptide
  MOD_RES (1), (2), (34), (36): Xaa is C or S

SEQ ID NO: 41021 - protein, 32 aa, Artificial Sequence; identical to SEQ ID NO: 15099
  GFR-binding peptide
  MOD_RES (14), (15), (16), (17), (18): Xaa is A or G
  MOD_RES (19), (20), (21), (22): Xaa is A or G or is absent

SEQ ID NO: 41022 - protein, 39 aa, Artificial Sequence; identical to SEQ ID NO: 15100
  GFR-binding peptide
  MOD_RES (4), (5), (38): Xaa is C or S
  MOD_RES (19), (20), (21), (22), (23): Xaa is A or G
  MOD_RES (24), (25), (26), (27): Xaa is A or G or is absent

SEQ ID NO: 41023 - protein, 32 aa, Artificial Sequence; identical to SEQ ID NO: 16897
  GFR-binding peptide
  MOD_RES (14), (15), (16), (17), (18): Xaa is A or G
  MOD_RES (19), (20), (21), (22): Xaa is A or G or is absent

SEQ ID NO: 41024 - protein, 41 aa, Artificial Sequence; identical to SEQ ID NO: 7793
  GFR-binding peptide
  MOD_RES (4), (5), (39), (41): Xaa is C or S
  MOD_RES (19), (20), (21), (22), (23): Xaa is A or G
  MOD_RES (24), (25), (26), (27): Xaa is A or G or is absent

SEQ ID NO: 41025 - protein, 41 aa, Artificial Sequence; identical to SEQ ID NO: 15102
  GFR-binding peptide
  MOD_RES (6), (40): Xaa is C or S
  MOD_RES (20), (21), (22), (23), (24): Xaa is A or G
  MOD_RES (25), (26), (27), (28): Xaa is A or G or is absent

SEQ ID NO: 41026 - protein, 38 aa, Artificial Sequence; identical to SEQ ID NO: 15103
  GFR-binding peptide
  MOD_RES (2), (3), (35), (37): Xaa is C or S

SEQ ID NO: 41027 - protein, 42 aa, Artificial Sequence; identical to SEQ ID NO: 15104
  GFR-binding peptide
  MOD_RES (6), (7), (41): Xaa is C or S
  MOD_RES (21), (22), (23), (24), (25): Xaa is A or G
  MOD_RES (26), (27), (28), (29): Xaa is A or G or is absent

SEQ ID NO: 41028 - protein, 33 aa, Artificial Sequence; identical to SEQ ID NO: 15105
  GFR-binding peptide
  MOD_RES (1), (2), (33): Xaa is C or S

SEQ ID NO: 41029 - protein, 42 aa, Artificial Sequence; identical to SEQ ID NO: 9614
  GFR-binding peptide
  MOD_RES (6), (7), (41): Xaa is C or S
  MOD_RES (21), (22), (23), (24), (25): Xaa is A or G
  MOD_RES (26), (27), (28), (29): Xaa is A or G or is absent

SEQ ID NO: 41030 - protein, 37 aa, Artificial Sequence; identical to SEQ ID NO: 15106
  GFR-binding peptide
  MOD_RES (4), (5): Xaa is C or S
  MOD_RES (19), (20), (21), (22), (23): Xaa is A or G
  MOD_RES (24), (25), (26), (27): Xaa is A or G or is absent

SEQ ID NO: 41031 - protein, 37 aa, Artificial Sequence; identical to SEQ ID NO: 16900
  GFR-binding peptide
  MOD_RES (4), (36): Xaa is C or S

SEQ ID NO: 41032 - protein, 43 aa, Artificial Sequence; identical to SEQ ID NO: 15107
  GFR-binding peptide
  MOD_RES (6), (7), (40), (42): Xaa is C or S
  MOD_RES (21), (22), (23), (24), (25): Xaa is A or G
  MOD_RES (26), (27), (28), (29): Xaa is A or G or is absent

SEQ ID NO: 41033 - protein, 36 aa, Artificial Sequence; identical to SEQ ID NO: 16901
  GFR-binding peptide
  MOD_RES (2), (3): Xaa is C or S
  MOD_RES (17), (18), (19), (20), (21): Xaa is A or G
  MOD_RES (22), (23), (24), (25): Xaa is A or G or is absent

SEQ ID NO: 41034 - protein, 35 aa, Artificial Sequence; identical to SEQ ID NO: 16902
  GFR-binding peptide
  MOD_RES (1), (2): Xaa is C or S
  MOD_RES (16), (17), (18), (19), (20): Xaa is A or G
  MOD_RES (21), (22), (23), (24): Xaa is A or G or is absent

SEQ ID NO: 41035 - protein, 38 aa, Artificial Sequence; identical to SEQ ID NO: 16903
  GFR-binding peptide
  MOD_RES (5), (6), (38): Xaa is C or S

SEQ ID NO: 41036 - protein, 37 aa, Artificial Sequence; identical to SEQ ID NO: 15110
  GFR-binding peptide
  MOD_RES (4), (5): Xaa is C or S
  MOD_RES (19), (20), (21), (22), (23): Xaa is A or G
  MOD_RES (24), (25), (26), (27): Xaa is A or G or is absent

SEQ ID NO: 41037 - protein, 38 aa, Artificial Sequence; identical to SEQ ID NO: 15111
  GFR-binding peptide
  MOD_RES (3), (4), (38): Xaa is C or S
  MOD_RES (18), (19), (20), (21), (22): Xaa is A or G
  MOD_RES (23), (24), (25), (26): Xaa is A or G or is absent

SEQ ID NO: 41038 - protein, 35 aa, Artificial Sequence; identical to SEQ ID NO: 15112
  GFR-binding peptide
  MOD_RES (2), (34): Xaa is C or S

SEQ ID NO: 41039 - protein, 40 aa, Artificial Sequence; identical to SEQ ID NO: 9622
  GFR-binding peptide
  MOD_RES (4), (5), (38), (40): Xaa is C or S
  MOD_RES (19), (20), (21), (22), (23): Xaa is A or G
  MOD_RES (24), (25), (26), (27): Xaa is A or G or is absent

SEQ ID NO: 41040 - protein, 42 aa, Artificial Sequence; identical to SEQ ID NO: 16905
  GFR-binding peptide
  MOD_RES (7), (39), (41): Xaa is C or S

SEQ ID NO: 41041 - protein, 39 aa, Artificial Sequence; identical to SEQ ID NO: 16906
  GFR-binding peptide
  MOD_RES (1), (2), (36), (38): Xaa is C or S
  MOD_RES (16), (17), (18), (19), (20): Xaa is A or G
  MOD_RES (21), (22), (23), (24): Xaa is A or G or is absent

SEQ ID NO: 41042 - protein, 41 aa, Artificial Sequence; identical to SEQ ID NO: 15113
  GFR-binding peptide
  MOD_RES (3), (4), (38), (40): Xaa is C or S
  MOD_RES (18), (19), (20), (21), (22): Xaa is A or G
  MOD_RES (23), (24), (25), (26): Xaa is A or G or is absent

SEQ ID NO: 41043 - protein, 41 aa, Artificial Sequence; identical to SEQ ID NO: 16907
  GFR-binding peptide
  MOD_RES (6), (7), (41): Xaa is C or S
  MOD_RES (21), (22), (23), (24), (25): Xaa is A or G
  MOD_RES (26), (27), (28), (29): Xaa is A or G or is absent

SEQ ID NO: 41044 - protein, 38 aa, Artificial Sequence; identical to SEQ ID NO: 16909
  GFR-binding peptide
  MOD_RES (5), (6): Xaa is C or S
  MOD_RES (20), (21), (22), (23), (24): Xaa is A or G
  MOD_RES (25), (26), (27), (28): Xaa is A or G or is absent

SEQ ID NO: 41045 - protein, 38 aa, Artificial Sequence; identical to SEQ ID NO: 15114
  GFR-binding peptide
  MOD_RES (1), (2), (35), (37): Xaa is C or S
  MOD_RES (16), (17), (18), (19), (20): Xaa is A or G
  MOD_RES (21), (22), (23), (24): Xaa is A or G or is absent

SEQ ID NO: 41046 - protein, 39 aa, Artificial Sequence; identical to SEQ ID NO: 16910
  GFR-binding peptide
  MOD_RES (4), (5), (39): Xaa is C or S
  MOD_RES (19), (20), (21), (22), (23): Xaa is A or G
  MOD_RES (24), (25), (26), (27): Xaa is A or G or is absent

SEQ ID NO: 41047 - protein, 39 aa, Artificial Sequence; identical to SEQ ID NO: 16911
  GFR-binding peptide
  MOD_RES (4), (5), (37), (39): Xaa is C or S

SEQ ID NO: 41048 - protein, 38 aa, Artificial Sequence; identical to SEQ ID NO: 16913
  GFR-binding peptide
  MOD_RES (3), (4), (36), (38): Xaa is C or S

SEQ ID NO: 41049 - protein, 37 aa, Artificial Sequence; identical to SEQ ID NO: 15117
  GFR-binding peptide
  MOD_RES (4), (5): Xaa is C or S
  MOD_RES (19), (20), (21), (22), (23): Xaa is A or G
  MOD_RES (24), (25), (26), (27): Xaa is A or G or is absent

SEQ ID NO: 41050 - protein, 35 aa, Artificial Sequence; identical to SEQ ID NO: 15118
  GFR-binding peptide
  MOD_RES (3), (4): Xaa is C or S

SEQ ID NO: 41051 - protein, 34 aa, Artificial Sequence; identical to SEQ ID NO: 15119
  GFR-binding peptide
  MOD_RES (2), (2): Xaa is C or S
  MOD_RES (16), (17), (18), (19), (20): Xaa is A or G
  MOD_RES (21), (22), (23), (24): Xaa is A or G or is absent

SEQ ID NO: 41052 - protein, 40 aa, Artificial Sequence; identical to SEQ ID NO: 15120
  GFR-binding peptide
  MOD_RES (5), (6), (37), (39): Xaa is C or S

SEQ ID NO: 41053 - protein, 40 aa, Artificial Sequence; identical to SEQ ID NO: 7809
  GFR-binding peptide
  MOD_RES (5), (6), (39): Xaa is C or S
  MOD_RES (20), (21), (22), (23), (24): Xaa is A or G
  MOD_RES (25), (26), (27), (28): Xaa is A or G or is absent

SEQ ID NO: 41054 - protein, 33 aa, Artificial Sequence; identical to SEQ ID NO: 16915
  GFR-binding peptide
  MOD_RES (1), (1): Xaa is C or S
  MOD_RES (15), (16), (17), (18), (19): Xaa is A or G
  MOD_RES (20), (21), (22), (23): Xaa is A or G or is absent

SEQ ID NO: 41055 - protein, 37 aa, Artificial Sequence; identical to SEQ ID NO: 16916
  GFR-binding peptide
  MOD_RES (2), (3), (35), (37): Xaa is C or S

SEQ ID NO: 41056 - protein, 41 aa, Artificial Sequence; identical to SEQ ID NO: 15123
  GFR-binding peptide
  MOD_RES (4), (5), (39), (41): Xaa is C or S
  MOD_RES (19), (20), (21), (22), (23): Xaa is A or G
  MOD_RES (24), (25), (26), (27): Xaa is A or G or is absent

SEQ ID NO: 41057 - protein, 36 aa, Artificial Sequence; identical to SEQ ID NO: 15124
  GFR-binding peptide
  MOD_RES (2), (3), (36): Xaa is C or S
  MOD_RES (17), (18), (19), (20), (21): Xaa is A or G
  MOD_RES (22), (23), (24), (25): Xaa is A or G or is absent

SEQ ID NO: 41058 - protein, 41 aa, Artificial Sequence; identical to SEQ ID NO: 16917
  GFR-binding peptide
  MOD_RES (4), (38), (40): Xaa is C or S
  MOD_RES (18), (19), (20), (21), (22): Xaa is A or G
  MOD_RES (23), (24), (25), (26): Xaa is A or G or is absent

SEQ ID NO: 41059 - protein, 38 aa, Artificial Sequence; identical to SEQ ID NO: 7817
  GFR-binding peptide
  MOD_RES (2), (3), (35), (37): Xaa is C or S

SEQ ID NO: 41060 - protein, 39 aa, Artificial Sequence; identical to SEQ ID NO: 15127
  GFR-binding peptide
  MOD_RES (6), (7): Xaa is C or S
  MOD_RES (21), (22), (23), (24), (25): Xaa is A or G
  MOD_RES (26), (27), (28), (29): Xaa is A or G or is absent

SEQ ID NO: 41061 - protein, 36 aa, Artificial Sequence; identical to SEQ ID NO: 16919
  GFR-binding peptide
  MOD_RES (1), (2), (34), (36): Xaa is C or S

SEQ ID NO: 41062 - protein, 38 aa, Artificial Sequence; identical to SEQ ID NO: 15130
  GFR-binding peptide
  MOD_RES (4), (5), (37): Xaa is C or S

SEQ ID NO: 41063 - protein, 33 aa, Artificial Sequence; identical to SEQ ID NO: 15131
  GFR-binding peptide
  MOD_RES (1), (1): Xaa is C or S
  MOD_RES (15), (16), (17), (18), (19): Xaa is A or G
  MOD_RES (20), (21), (22), (23): Xaa is A or G or is absent

SEQ ID NO: 41064 - protein, 38 aa, Artificial Sequence; identical to SEQ ID NO: 15133
  GFR-binding peptide
  MOD_RES (3), (37): Xaa is C or S
  MOD_RES (17), (18), (19), (20), (21): Xaa is A or G
  MOD_RES (22), (23), (24), (25): Xaa is A or G or is absent

SEQ ID NO: 41065 - protein, 34 aa, Artificial Sequence; identical to SEQ ID NO: 15134
  GFR-binding peptide
  MOD_RES (1), (2): Xaa is C or S
  MOD_RES (16), (17), (18), (19), (20): Xaa is A or G
  MOD_RES (21), (22), (23), (24): Xaa is A or G or is absent

SEQ ID NO: 41066 - protein, 36 aa, Artificial Sequence; identical to SEQ ID NO: 16921
  GFR-binding peptide
  MOD_RES (4), (36): Xaa is C or S

SEQ ID NO: 41067 - protein, 39 aa, Artificial Sequence; identical to SEQ ID NO: 15135
  GFR-binding peptide
  MOD_RES (4), (5), (38): Xaa is C or S
  MOD_RES (19), (20), (21), (22), (23): Xaa is A or G
  MOD_RES (24), (25), (26), (27): Xaa is A or G or is absent

SEQ ID NO: 41068 - protein, 32 aa, Artificial Sequence; identical to SEQ ID NO: 7823
  GFR-binding peptide
  MOD_RES (31), (31): Xaa is C or S

SEQ ID NO: 41069 - protein, 39 aa, Artificial Sequence; identical to SEQ ID NO: 16923
  GFR-binding peptide
  MOD_RES (3), (4), (38): Xaa is C or S
  MOD_RES (18), (19), (20), (21), (22): Xaa is A or G
  MOD_RES (23), (24), (25), (26): Xaa is A or G or is absent

SEQ ID NO: 41070 - protein, 36 aa, Artificial Sequence; identical to SEQ ID NO: 16924
  GFR-binding peptide
  MOD_RES (1), (35): Xaa is C or S
  MOD_RES (15), (16), (17), (18), (19): Xaa is A or G
  MOD_RES (20), (21), (22), (23): Xaa is A or G or is absent

SEQ ID NO: 41071 - protein, 37 aa, Artificial Sequence; identical to SEQ ID NO: 16925
  GFR-binding peptide
  MOD_RES (6), (7): Xaa is C or S

SEQ ID NO: 41072 - protein, 41 aa, Artificial Sequence; identical to SEQ ID NO: 15138
  GFR-binding peptide
  MOD_RES (5), (6), (38), (40): Xaa is C or S

SEQ ID NO: 41073 - protein, 39 aa, Artificial Sequence; identical to SEQ ID NO: 9646
  GFR-binding peptide
  MOD_RES (2), (3), (37), (39): Xaa is C or S
  MOD_RES (17), (18), (19), (20), (21): Xaa is A or G
  MOD_RES (22), (23), (24), (25): Xaa is A or G or is absent

SEQ ID NO: 41074 - protein, 36 aa, Artificial Sequence; identical to SEQ ID NO: 15139
  GFR-binding peptide
  MOD_RES (1), (2), (35): Xaa is C or S
  MOD_RES (16), (17), (18), (19), (20): Xaa is A or G
  MOD_RES (21), (22), (23), (24): Xaa is A or G or is absent

SEQ ID NO: 41075 - protein, 40 aa, Artificial Sequence; identical to SEQ ID NO: 15141
  GFR-binding peptide
  MOD_RES (3), (4), (38), (40): Xaa is C or S
  MOD_RES (18), (19), (20), (21), (22): Xaa is A or G
  MOD_RES (23), (24), (25), (26): Xaa is A or G or is absent

SEQ ID NO: 41076 - protein, 32 aa, Artificial Sequence; identical to SEQ ID NO: 9650
  GFR-binding peptide
  MOD_RES (31), (31): Xaa is C or S

SEQ ID NO: 41077 - protein, 42 aa, Artificial Sequence; identical to SEQ ID NO: 9652
  GFR-binding peptide
  MOD_RES (6), (7), (40), (42): Xaa is C or S
  MOD_RES (21), (22), (23), (24), (25): Xaa is A or G
  MOD_RES (26), (27), (28), (29): Xaa is A or G or is absent

SEQ ID NO: 41078 - protein, 39 aa, Artificial Sequence; identical to SEQ ID NO: 15142
  GFR-binding peptide
  MOD_RES (5), (6), (38): Xaa is C or S

SEQ ID NO: 41079 - protein, 37 aa, Artificial Sequence; identical to SEQ ID NO: 16930
  GFR-binding peptide
  MOD_RES (4), (5), (37): Xaa is C or S

SEQ ID NO: 41080 - protein, 39 aa, Artificial Sequence; identical to SEQ ID NO: 7832
  GFR-binding peptide
  MOD_RES (4), (5), (39): Xaa is C or S
  MOD_RES (19), (20), (21), (22), (23): Xaa is A or G
  MOD_RES (24), (25), (26), (27): Xaa is A or G or is absent

SEQ ID NO: 41081 - protein, 41 aa, Artificial Sequence; identical to SEQ ID NO: 16931
  GFR-binding peptide
  MOD_RES (4), (5), (38), (40): Xaa is C or S
  MOD_RES (19), (20), (21), (22), (23): Xaa is A or G
  MOD_RES (24), (25), (26), (27): Xaa is A or G or is absent

SEQ ID NO: 41082 - protein, 37 aa, Artificial Sequence; identical to SEQ ID NO: 16932
  GFR-binding peptide
  MOD_RES (3), (4), (35), (37): Xaa is C or S

SEQ ID NO: 41083 - protein, 34 aa, Artificial Sequence; identical to SEQ ID NO: 16933
  GFR-binding peptide
  MOD_RES (31), (33): Xaa is C or S

SEQ ID NO: 41084 - protein, 41 aa, Artificial Sequence; identical to SEQ ID NO: 9655
  GFR-binding peptide
  MOD_RES (6), (7), (41): Xaa is C or S
  MOD_RES (21), (22), (23), (24), (25): Xaa is A or G
  MOD_RES (26), (27), (28), (29): Xaa is A or G or is absent

SEQ ID NO: 41085 - protein, 42 aa, Artificial Sequence; identical to SEQ ID NO: 16936
  GFR-binding peptide
  MOD_RES (5), (6), (40), (42): Xaa is C or S
  MOD_RES (20), (21), (22), (23), (24): Xaa is A or G
  MOD_RES (25), (26), (27), (28): Xaa is A or G or is absent

SEQ ID NO: 41086 - protein, 37 aa, Artificial Sequence; identical to SEQ ID NO: 16937
  GFR-binding peptide
  MOD_RES (1), (35), (37): Xaa is C or S
  MOD_RES (15), (16), (17), (18), (19): Xaa is A or G
  MOD_RES (20), (21), (22), (23): Xaa is A or G or is absent

SEQ ID NO: 41087 - protein, 43 aa, Artificial Sequence; identical to SEQ ID NO: 15145
  GFR-binding peptide
  MOD_RES (6), (7), (41), (43): Xaa is C or S
  MOD_RES (21), (22), (23), (24), (25): Xaa is A or G
  MOD_RES (26), (27), (28), (29): Xaa is A or G or is absent

SEQ ID NO: 41088 - protein, 33 aa, Artificial Sequence; identical to SEQ ID NO: 16938
  GFR-binding peptide
  MOD_RES (33), (33): Xaa is C or S
  MOD_RES (14), (15), (16), (17), (18): Xaa is A or G
  MOD_RES (19), (20), (21), (22): Xaa is A or G or is absent

SEQ ID NO: 41089 - protein, 40 aa, Artificial Sequence; identical to SEQ ID NO: 16939
  GFR-binding peptide
  MOD_RES (3), (4), (38), (40): Xaa is C or S
  MOD_RES (18), (19), (20), (21), (22): Xaa is A or G
  MOD_RES (23), (24), (25), (26): Xaa is A or G or is absent

SEQ ID NO: 41090 - protein, 41 aa, Artificial Sequence; identical to SEQ ID NO: 16940
  GFR-binding peptide
  MOD_RES (3), (4), (38), (40): Xaa is C or S
  MOD_RES (18), (19), (20), (21), (22): Xaa is A or G
  MOD_RES (23), (24), (25), (26): Xaa is A or G or is absent

SEQ ID NO: 41091 - protein, 35 aa, Artificial Sequence; identical to SEQ ID NO: 16941
  GFR-binding peptide
  MOD_RES (1), (35): Xaa is C or S
  MOD_RES (15), (16), (17), (18), (19): Xaa is A or G
  MOD_RES (20), (21), (22), (23): Xaa is A or G or is absent

SEQ ID NO: 41092 - protein, 36 aa, Artificial Sequence; identical to SEQ ID NO: 9661
  GFR-binding peptide
  MOD_RES (3), (4), (36): Xaa is C or S

SEQ ID NO: 41093 - protein, 39 aa, Artificial Sequence; identical to SEQ ID NO: 15146
  GFR-binding peptide
  MOD_RES (6), (6): Xaa is C or S
  MOD_RES (20), (21), (22), (23), (24): Xaa is A or G
  MOD_RES (25), (26), (27), (28): Xaa is A or G or is absent

SEQ ID NO: 41094 - protein, 38 aa, Artificial Sequence; identical to SEQ ID NO: 15147
  GFR-binding peptide
  MOD_RES (2), (3), (37): Xaa is C or S
  MOD_RES (17), (18), (19), (20), (21): Xaa is A or G
  MOD_RES (22), (23), (24), (25): Xaa is A or G or is absent

SEQ ID NO: 41095 - protein, 44 aa, Artificial Sequence; identical to SEQ ID NO: 15148
  GFR-binding peptide
  MOD_RES (6), (7), (41), (43): Xaa is C or S
  MOD_RES (21), (22), (23), (24), (25): Xaa is A or G
  MOD_RES (26), (27), (28), (29): Xaa is A or G or is absent

SEQ ID NO: 41096 - protein, 35 aa, Artificial Sequence; identical to SEQ ID NO: 16943
  GFR-binding peptide
  MOD_RES (1), (2), (34): Xaa is C or S

SEQ ID NO: 41097 - protein, 35 aa, Artificial Sequence; identical to SEQ ID NO: 16944
  GFR-binding peptide
  MOD_RES (1), (34): Xaa is C or S
  MOD_RES (15), (16), (17), (18), (19): Xaa is A or G
  MOD_RES (20), (21), (22), (23): Xaa is A or G or is absent

SEQ ID NO: 41098 - protein, 35 aa, Artificial Sequence; identical to SEQ ID NO: 16945
  GFR-binding peptide
  MOD_RES (1), (35): Xaa is C or S
  MOD_RES (15), (16), (17), (18), (19): Xaa is A or G
  MOD_RES (20), (21), (22), (23): Xaa is A or G or is absent

SEQ ID NO: 41099 - protein, 34 aa, Artificial Sequence; identical to SEQ ID NO: 15150
  GFR-binding peptide
  MOD_RES (2), (3): Xaa is C or S

SEQ ID NO: 41100 - protein, 37 aa, Artificial Sequence; identical to SEQ ID NO: 15151
  GFR-binding peptide
  MOD_RES (4), (5), (37): Xaa is C or S

SEQ ID NO: 41101 - protein, 32 aa, Artificial Sequence; identical to SEQ ID NO: 15155
  GFR-binding peptide
  MOD_RES (14), (15), (16), (17), (18): Xaa is A or G
  MOD_RES (19), (20), (21), (22): Xaa is A or G or is absent

SEQ ID NO: 41102 - protein, 40 aa, Artificial Sequence; identical to SEQ ID NO: 15156
  GFR-binding peptide
  MOD_RES (4), (38), (40): Xaa is C or S
  MOD_RES (18), (19), (20), (21), (22): Xaa is A or G
  MOD_RES (23), (24), (25), (26): Xaa is A or G or is absent

SEQ ID NO: 41103 - protein, 37 aa, Artificial Sequence; identical to SEQ ID NO: 15158
  GFR-binding peptide
  MOD_RES (4), (5): Xaa is C or S
  MOD_RES (19), (20), (21), (22), (23): Xaa is A or G
  MOD_RES (24), (25), (26), (27): Xaa is A or G or is absent

SEQ ID NO: 41104 - protein, 36 aa, Artificial Sequence; identical to SEQ ID NO: 7847
  GFR-binding peptide
  MOD_RES (3), (4): Xaa is C or S
  MOD_RES (18), (19), (20), (21), (22): Xaa is A or G
  MOD_RES (23), (24), (25), (26): Xaa is A or G or is absent

SEQ ID NO: 41105 - protein, 34 aa, Artificial Sequence; identical to SEQ ID NO: 15160
  GFR-binding peptide
  MOD_RES (1), (1): Xaa is C or S
  MOD_RES (15), (16), (17), (18), (19): Xaa is A or G
  MOD_RES (20), (21), (22), (23): Xaa is A or G or is absent

SEQ ID NO: 41106 - protein, 34 aa, Artificial Sequence; identical to SEQ ID NO: 16948
  GFR-binding peptide
  MOD_RES (2), (3): Xaa is C or S

SEQ ID NO: 41107 - protein, 42 aa, Artificial Sequence; identical to SEQ ID NO: 16949
  GFR-binding peptide
  MOD_RES (5), (6), (40), (42): Xaa is C or S
  MOD_RES (20), (21), (22), (23), (24): Xaa is A or G
  MOD_RES (25), (26), (27), (28): Xaa is A or G or is absent

SEQ ID NO: 41108 - protein, 31 aa, Artificial Sequence; identical to SEQ ID NO: 16950
  GFR-binding peptide

SEQ ID NO: 41109 - protein, 38 aa, Artificial Sequence; identical to SEQ ID NO: 15161
  GFR-binding peptide
  MOD_RES (1), (35), (37): Xaa is C or S
  MOD_RES (15), (16), (17), (18), (19): Xaa is A or G
  MOD_RES (20), (21), (22), (23): Xaa is A or G or is absent

SEQ ID NO: 41110 - protein, 40 aa, Artificial Sequence; identical to SEQ ID NO: 7854
  GFR-binding peptide
  MOD_RES (6), (7), (38), (40): Xaa is C or S

SEQ ID NO: 41111 - protein, 34 aa, Artificial Sequence; identical to SEQ ID NO: 7856
  GFR-binding peptide
  MOD_RES (1), (34): Xaa is C or S
  MOD_RES (15), (16), (17), (18), (19): Xaa is A or G
  MOD_RES (20), (21), (22), (23): Xaa is A or G or is absent

SEQ ID NO: 41112 - protein, 38 aa, Artificial Sequence; identical to SEQ ID NO: 7857
  GFR-binding peptide
  MOD_RES (6), (7), (38): Xaa is C or S

SEQ ID NO: 41113 - protein, 40 aa, Artificial Sequence; identical to SEQ ID NO: 15165
  GFR-binding peptide
  MOD_RES (2), (3), (37), (39): Xaa is C or S
  MOD_RES (17), (18), (19), (20), (21): Xaa is A or G
  MOD_RES (22), (23), (24), (25): Xaa is A or G or is absent

SEQ ID NO: 41114 - protein, 37 aa, Artificial Sequence; identical to SEQ ID NO: 15166
  GFR-binding peptide
  MOD_RES (1), (34), (36): Xaa is C or S
  MOD_RES (15), (16), (17), (18), (19): Xaa is A or G
  MOD_RES (20), (21), (22), (23): Xaa is A or G or is absent

SEQ ID NO: 41115 - protein, 39 aa, Artificial Sequence; identical to SEQ ID NO: 7860
  GFR-binding peptide
  MOD_RES (5), (6), (37), (39): Xaa is C or S

SEQ ID NO: 41116 - protein, 43 aa, Artificial Sequence; identical to SEQ ID NO: 16953
  GFR-binding peptide
  MOD_RES (7), (41), (43): Xaa is C or S
  MOD_RES (21), (22), (23), (24), (25): Xaa is A or G
  MOD_RES (26), (27), (28), (29): Xaa is A or G or is absent

SEQ ID NO: 41117 - protein, 31 aa, Artificial Sequence; identical to SEQ ID NO: 15168
  GFR-binding peptide

SEQ ID NO: 41118 - protein, 38 aa, Artificial Sequence; identical to SEQ ID NO: 16954
  GFR-binding peptide
  MOD_RES (2), (3), (36), (38): Xaa is C or S
  MOD_RES (17), (18), (19), (20), (21): Xaa is A or G
  MOD_RES (22), (23), (24), (25): Xaa is A or G or is absent

SEQ ID NO: 41119 - protein, 37 aa, Artificial Sequence; identical to SEQ ID NO: 16956
  GFR-binding peptide
  MOD_RES (4), (5): Xaa is C or S
  MOD_RES (19), (20), (21), (22), (23): Xaa is A or G
  MOD_RES (24), (25), (26), (27): Xaa is A or G or is absent

SEQ ID NO: 41120 - protein, 40 aa, Artificial Sequence; identical to SEQ ID NO: 15170
  GFR-binding peptide
  MOD_RES (6), (7), (39): Xaa is C or S

SEQ ID NO: 41121 - protein, 40 aa, Artificial Sequence; identical to SEQ ID NO: 16958
  GFR-binding peptide
  MOD_RES (3), (4), (38), (40): Xaa is C or S
  MOD_RES (18), (19), (20), (21), (22): Xaa is A or G
  MOD_RES (23), (24), (25), (26): Xaa is A or G or is absent

SEQ ID NO: 41122 - protein, 41 aa, Artificial Sequence; identical to SEQ ID NO: 7866
  GFR-binding peptide
  MOD_RES (5), (6), (40): Xaa is C or S
  MOD_RES (20), (21), (22), (23), (24): Xaa is A or G
  MOD_RES (25), (26), (27), (28): Xaa is A or G or is absent

SEQ ID NO: 41123 - protein, 34 aa, Artificial Sequence; identical to SEQ ID NO: 15173
  GFR-binding peptide
  MOD_RES (1), (34): Xaa is C or S
  MOD_RES (15), (16), (17), (18), (19): Xaa is A or G
  MOD_RES (20), (21), (22), (23): Xaa is A or G or is absent

SEQ ID NO: 41124 - protein, 33 aa, Artificial Sequence; identical to SEQ ID NO: 16959
  GFR-binding peptide
  MOD_RES (14), (15), (16), (17), (18): Xaa is A or G
  MOD_RES (19), (20), (21), (22): Xaa is A or G or is absent

SEQ ID NO: 41125 - protein, 35 aa, Artificial Sequence; identical to SEQ ID NO: 15174
  GFR-binding peptide
  MOD_RES (32), (34): Xaa is C or S

SEQ ID NO: 41126 - protein, 40 aa, Artificial Sequence; identical to SEQ ID NO: 15175
  GFR-binding peptide
  MOD_RES (6), (7), (38), (40): Xaa is C or S

SEQ ID NO: 41127 - protein, 38 aa, Artificial Sequence; identical to SEQ ID NO: 16960
  GFR-binding peptide
  MOD_RES (7), (7): Xaa is C or S

SEQ ID NO: 41128 - protein, 35 aa, Artificial Sequence; identical to SEQ ID NO: 16961
  GFR-binding peptide
  MOD_RES (1), (2), (34): Xaa is C or S

SEQ ID NO: 41129 - protein, 33 aa, Artificial Sequence; identical to SEQ ID NO: 15176
  GFR-binding peptide
  MOD_RES (1), (32): Xaa is C or S

SEQ ID NO: 41130 - protein, 32 aa, Artificial Sequence; identical to SEQ ID NO: 16962
  GFR-binding peptide
  MOD_RES (1), (1): Xaa is C or S

SEQ ID NO: 41131 - protein, 36 aa, Artificial Sequence; identical to SEQ ID NO: 16963
  GFR-binding peptide
  MOD_RES (1), (34), (36): Xaa is C or S
  MOD_RES (15), (16), (17), (18), (19): Xaa is A or G
  MOD_RES (20), (21), (22), (23): Xaa is A or G or is absent

SEQ ID NO: 41132 - protein, 38 aa, Artificial Sequence
  GFR-binding peptide
  MOD_RES (3), (4), (37): Xaa is C or S
  MOD_RES (18), (19), (20), (21), (22): Xaa is A or G
  MOD_RES (23), (24), (25), (26): Xaa is A or G or is absent
SPXXVSQDLEPLTILYYXXXXXXXXXEQLSNMIVKSXK

SEQ ID NO: 41133 - protein, 39 aa, Artificial Sequence; identical to SEQ ID NO: 16964
  GFR-binding peptide
  MOD_RES (4), (5), (38): Xaa is C or S
  MOD_RES (19), (20), (21), (22), (23): Xaa is A or G
  MOD_RES (24), (25), (26), (27): Xaa is A or G or is absent

SEQ ID NO: 41134 - protein, 36 aa, Artificial Sequence; identical to SEQ ID NO: 9683
  GFR-binding peptide
  MOD_RES (5), (6): Xaa is C or S

SEQ ID NO: 41135 - protein, 39 aa, Artificial Sequence; identical to SEQ ID NO: 16966
  GFR-binding peptide
  MOD_RES (6), (7): Xaa is C or S
  MOD_RES (21), (22), (23), (24), (25): Xaa is A or G
  MOD_RES (26), (27), (28), (29): Xaa is A or G or is absent

SEQ ID NO: 41136 - protein, 38 aa, Artificial Sequence; identical to SEQ ID NO: 16967
  GFR-binding peptide
  MOD_RES (1), (2), (36), (38): Xaa is C or S
  MOD_RES (16), (17), (18), (19), (20): Xaa is A or G
  MOD_RES (21), (22), (23), (24): Xaa is A or G or is absent

SEQ ID NO: 41137 - protein, 32 aa, Artificial Sequence; identical to SEQ ID NO: 15177
  GFR-binding peptide
  MOD_RES (1), (1): Xaa is C or S

SEQ ID NO: 41138 - protein, 36 aa, Artificial Sequence; identical to SEQ ID NO: 7875
  GFR-binding peptide
  MOD_RES (3), (4), (36): Xaa is C or S

SEQ ID NO: 41139 - protein, 39 aa, Artificial Sequence; identical to SEQ ID NO: 16969
  GFR-binding peptide
  MOD_RES (6), (7), (39): Xaa is C or S

SEQ ID NO: 41140 - protein, 34 aa, Artificial Sequence; identical to SEQ ID NO: 15180
  GFR-binding peptide
  MOD_RES (2), (3), (34): Xaa is C or S

SEQ ID NO: 41141 - protein, 37 aa, Artificial Sequence; identical to SEQ ID NO: 15182
  GFR-binding peptide
  MOD_RES (6), (7): Xaa is C or S

SEQ ID NO: 41142 - protein, 34 aa, Artificial Sequence; identical to SEQ ID NO: 16971
  GFR-binding peptide
  MOD_RES (34), (34): Xaa is C or S
  MOD_RES (14), (15), (16), (17), (18): Xaa is A or G
  MOD_RES (19), (20), (21), (22): Xaa is A or G or is absent

SEQ ID NO: 41143 - protein, 42 aa, Artificial Sequence; identical to SEQ ID NO: 16972
  GFR-binding peptide
  MOD_RES (6), (7), (41): Xaa is C or S
  MOD_RES (21), (22), (23), (24), (25): Xaa is A or G
  MOD_RES (26), (27), (28), (29): Xaa is A or G or is absent

SEQ ID NO: 41144 - protein, 37 aa, Artificial Sequence; identical to SEQ ID NO: 15183
  GFR-binding peptide
  MOD_RES (5), (6): Xaa is C or S

SEQ ID NO: 41145 - protein, 35 aa, Artificial Sequence; identical to SEQ ID NO: 15184
  GFR-binding peptide
  MOD_RES (2), (3): Xaa is C or S
  MOD_RES (17), (18), (19), (20), (21): Xaa is A or G
  MOD_RES (22), (23), (24), (25): Xaa is A or G or is absent

SEQ ID NO: 41146 - protein, 40 aa, Artificial Sequence; identical to SEQ ID NO: 16973
  GFR-binding peptide
  MOD_RES (6), (7), (40): Xaa is C or S
  MOD_RES (21), (22), (23), (24), (25): Xaa is A or G
  MOD_RES (26), (27), (28), (29): Xaa is A or G or is absent

SEQ ID NO: 41147 - protein, 39 aa, Artificial Sequence; identical to SEQ ID NO: 15185
  GFR-binding peptide
  MOD_RES (4), (5), (39): Xaa is C or S
  MOD_RES (19), (20), (21), (22), (23): Xaa is A or G
  MOD_RES (24), (25), (26), (27): Xaa is A or G or is absent

SEQ ID NO: 41148 - protein, 32 aa, Artificial Sequence; identical to SEQ ID NO: 15187
  GFR-binding peptide
  MOD_RES (1), (1): Xaa is C or S

SEQ ID NO: 41149 - protein, 31 aa, Artificial Sequence; identical to SEQ ID NO: 15188
  GFR-binding peptide

SEQ ID NO: 41150 - protein, 41 aa, Artificial Sequence; identical to SEQ ID NO: 9689
  GFR-binding peptide
  MOD_RES (6), (7), (40): Xaa is C or S
  MOD_RES (21), (22), (23), (24), (25): Xaa is A or G
  MOD_RES (26), (27), (28), (29): Xaa is A or G or is absent

SEQ ID NO: 41151 - protein, 37 aa, Artificial Sequence; identical to SEQ ID NO: 7884
  GFR-binding peptide
  MOD_RES (5), (6), (37): Xaa is C or S

SEQ ID NO: 41152 - protein, 34 aa, Artificial Sequence; identical to SEQ ID NO: 16975
  GFR-binding peptide
  MOD_RES (1), (2), (34): Xaa is C or S

SEQ ID NO: 41153 - protein, 44 aa, Artificial Sequence; identical to SEQ ID NO: 15190
  GFR-binding peptide
  MOD_RES (6), (7), (41), (43): Xaa is C or S
  MOD_RES (21), (22), (23), (24), (25): Xaa is A or G
  MOD_RES (26), (27), (28), (29): Xaa is A or G or is absent

SEQ ID NO: 41154 - protein, 37 aa, Artificial Sequence; identical to SEQ ID NO: 7888
  GFR-binding peptide
  MOD_RES (4), (5), (37): Xaa is C or S

SEQ ID NO: 41155 - protein, 37 aa, Artificial Sequence; identical to SEQ ID NO: 9690
  GFR-binding peptide
  MOD_RES (4), (5): Xaa is C or S
  MOD_RES (19), (20), (21), (22), (23): Xaa is A or G
  MOD_RES (24), (25), (26), (27): Xaa is A or G or is absent

SEQ ID NO: 41156 - protein, 36 aa, Artificial Sequence; identical to SEQ ID NO: 15193
  GFR-binding peptide
  MOD_RES (1), (35): Xaa is C or S
  MOD_RES (15), (16), (17), (18), (19): Xaa is A or G
  MOD_RES (20), (21), (22), (23): Xaa is A or G or is absent

SEQ ID NO: 41157 - protein, 38 aa, Artificial Sequence; identical to SEQ ID NO: 16978
  GFR-binding peptide
  MOD_RES (3), (4), (35), (37): Xaa is C or S

SEQ ID NO: 41158 - protein, 40 aa, Artificial Sequence; identical to SEQ ID NO: 16979
  GFR-binding peptide
  MOD_RES (5), (6), (40): Xaa is C or S
  MOD_RES (20), (21), (22), (23), (24): Xaa is A or G
  MOD_RES (25), (26), (27), (28): Xaa is A or G or is absent

SEQ ID NO: 41159 - protein, 37 aa, Artificial Sequence; identical to SEQ ID NO: 16980
  GFR-binding peptide
  MOD_RES (1), (2), (35), (37): Xaa is C or S
  MOD_RES (16), (17), (18), (19), (20): Xaa is A or G
  MOD_RES (21), (22), (23), (24): Xaa is A or G or is absent

SEQ ID NO: 41160 - protein, 39 aa, Artificial Sequence; identical to SEQ ID NO: 16981
  GFR-binding peptide
  MOD_RES (6), (7), (39): Xaa is C or S

SEQ ID NO: 41161 - protein, 38 aa, Artificial Sequence; identical to SEQ ID NO: 15194
  GFR-binding peptide
  MOD_RES (4), (5), (37): Xaa is C or S

SEQ ID NO: 41162 - protein, 36 aa, Artificial Sequence; identical to SEQ ID NO: 16982
  GFR-binding peptide
  MOD_RES (1), (2), (34), (36): Xaa is C or S

SEQ ID NO: 41163 - protein, 36 aa, Artificial Sequence; identical to SEQ ID NO: 16983
  GFR-binding peptide
  MOD_RES (3), (4): Xaa is C or S
  MOD_RES (18), (19), (20), (21), (22): Xaa is A or G
  MOD_RES (23), (24), (25), (26): Xaa is A or G or is absent

SEQ ID NO: 41164 - protein, 42 aa, Artificial Sequence; identical to SEQ ID NO: 16984
  GFR-binding peptide
  MOD_RES (5), (6), (39), (41): Xaa is C or S
  MOD_RES (20), (21), (22), (23), (24): Xaa is A or G
  MOD_RES (25), (26), (27), (28): Xaa is A or G or is absent

SEQ ID NO: 41165 - protein, 37 aa, Artificial Sequence; identical to SEQ ID NO: 15196
  GFR-binding peptide
  MOD_RES (2), (3), (35), (37): Xaa is C or S

SEQ ID NO: 41166 - protein, 30 aa, Artificial Sequence; identical to SEQ ID NO: 9695
  GFR-binding peptide

SEQ ID NO: 41167 - protein, 32 aa, Artificial Sequence; identical to SEQ ID NO: 15198
  GFR-binding peptide
  MOD_RES (14), (15), (16), (17), (18): Xaa is A or G
  MOD_RES (19), (20), (21), (22): Xaa is A or G or is absent

SEQ ID NO: 41168 - protein, 37 aa, Artificial Sequence; identical to SEQ ID NO: 15199
  GFR-binding peptide
  MOD_RES (4), (5), (36): Xaa is C or S

SEQ ID NO: 41169 - protein, 39 aa, Artificial Sequence; identical to SEQ ID NO: 16986
  GFR-binding peptide
  MOD_RES (4), (5), (38): Xaa is C or S
  MOD_RES (19), (20), (21), (22), (23): Xaa is A or G
  MOD_RES (24), (25), (26), (27): Xaa is A or G or is absent

SEQ ID NO: 41170 - protein, 37 aa, Artificial Sequence; identical to SEQ ID NO: 16987
  GFR-binding peptide
  MOD_RES (5), (6): Xaa is C or S

SEQ ID NO: 41171 - protein, 34 aa, Artificial Sequence; identical to SEQ ID NO: 16988
  GFR-binding peptide
  MOD_RES (32), (34): Xaa is C or S

SEQ ID NO: 41172 - protein, 42 aa, Artificial Sequence; identical to SEQ ID NO: 16989
  GFR-binding peptide
  MOD_RES (4), (5), (39), (41): Xaa is C or S
  MOD_RES (19), (20), (21), (22), (23): Xaa is A or G
  MOD_RES (24), (25), (26), (27): Xaa is A or G or is absent

SEQ ID NO: 41173 - protein, 33 aa, Artificial Sequence; identical to SEQ ID NO: 15200
  GFR-binding peptide
  MOD_RES (1), (1): Xaa is C or S
  MOD_RES (15), (16), (17), (18), (19): Xaa is A or G
  MOD_RES (20), (21), (22), (23): Xaa is A or G or is absent

SEQ ID NO: 41174 - protein, 33 aa, Artificial Sequence
  GFR-binding peptide
  MOD_RES (1), (1): Xaa is C or S
  MOD_RES (15), (16), (17), (18), (19): Xaa is A or G
  MOD_RES (20), (21), (22), (23): Xaa is A or G or is absent
XVSQDLEPLTILYYXXXXXXXXXEQLSNMIVKS

SEQ ID NO: 41175 - protein, 37 aa, Artificial Sequence; identical to SEQ ID NO: 16990
  GFR-binding peptide
  MOD_RES (2), (34), (36): Xaa is C or S

SEQ ID NO: 41176 - protein, 40 aa, Artificial Sequence; identical to SEQ ID NO: 7904
  GFR-binding peptide
  MOD_RES (6), (7), (40): Xaa is C or S
  MOD_RES (21), (22), (23), (24), (25): Xaa is A or G
  MOD_RES (26), (27), (28), (29): Xaa is A or G or is absent

SEQ ID NO: 41177 - protein, 33 aa, Artificial Sequence; identical to SEQ ID NO: 15202
  GFR-binding peptide
  MOD_RES (1), (1): Xaa is C or S
  MOD_RES (15), (16), (17), (18), (19): Xaa is A or G
  MOD_RES (20), (21), (22), (23): Xaa is A or G or is absent

SEQ ID NO: 41178 - protein, 40 aa, Artificial Sequence; identical to SEQ ID NO: 16991
  GFR-binding peptide
  MOD_RES (3), (4), (38), (40): Xaa is C or S
  MOD_RES (18), (19), (20), (21), (22): Xaa is A or G
  MOD_RES (23), (24), (25), (26): Xaa is A or G or is absent

SEQ ID NO: 41179 - protein, 37 aa, Artificial Sequence; identical to SEQ ID NO: 16992
  GFR-binding peptide
  MOD_RES (4), (36): Xaa is C or S

SEQ ID NO: 41180 - protein, 33 aa, Artificial Sequence; identical to SEQ ID NO: 9706
  GFR-binding peptide
  MOD_RES (31), (33): Xaa is C or S

SEQ ID NO: 41181 - protein, 39 aa, Artificial Sequence; identical to SEQ ID NO: 16994
  GFR-binding peptide
  MOD_RES (6), (7), (38): Xaa is C or S

SEQ ID NO: 41182 - protein, 39 aa, Artificial Sequence; identical to SEQ ID NO: 9708
  GFR-binding peptide
  MOD_RES (6), (7): Xaa is C or S
  MOD_RES (21), (22), (23), (24), (25): Xaa is A or G
  MOD_RES (26), (27), (28), (29): Xaa is A or G or is absent

SEQ ID NO: 41183 - protein, 39 aa, Artificial Sequence; identical to SEQ ID NO: 15203
  GFR-binding peptide
  MOD_RES (6), (6): Xaa is C or S
  MOD_RES (20), (21), (22), (23), (24): Xaa is A or G
  MOD_RES (25), (26), (27), (28): Xaa is A or G or is absent

SEQ ID NO: 41184 - protein, 40 aa, Artificial Sequence; identical to SEQ ID NO: 9709
  GFR-binding peptide
  MOD_RES (5), (6), (39): Xaa is C or S
  MOD_RES (20), (21), (22), (23), (24): Xaa is A or G
  MOD_RES (25), (26), (27), (28): Xaa is A or G or is absent

SEQ ID NO: 41185 - protein, 43 aa, Artificial Sequence; identical to SEQ ID NO: 16997
  GFR-binding peptide
  MOD_RES (6), (7), (40), (42): Xaa is C or S
  MOD_RES (21), (22), (23), (24), (25): Xaa is A or G
  MOD_RES (26), (27), (28), (29): Xaa is A or G or is absent

SEQ ID NO: 41186 - protein, 35 aa, Artificial Sequence; identical to SEQ ID NO: 16998
  GFR-binding peptide
  MOD_RES (34), (34): Xaa is C or S
  MOD_RES (14), (15), (16), (17), (18): Xaa is A or G
  MOD_RES (19), (20), (21), (22): Xaa is A or G or is absent

SEQ ID NO: 41187 - protein, 40 aa, Artificial Sequence; identical to SEQ ID NO: 15205
  GFR-binding peptide
  MOD_RES (3), (4), (37), (39): Xaa is C or S
  MOD_RES (18), (19), (20), (21), (22): Xaa is A or G
  MOD_RES (23), (24), (25), (26): Xaa is A or G or is absent

SEQ ID NO: 41188 - protein, 37 aa, Artificial Sequence; identical to SEQ ID NO: 17001
  GFR-binding peptide
  MOD_RES (1), (2), (34), (36): Xaa is C or S

SEQ ID NO: 41189 - protein, 34 aa, Artificial Sequence; identical to SEQ ID NO: 17002
  GFR-binding peptide
  MOD_RES (1), (2): Xaa is C or S
  MOD_RES (16), (17), (18), (19), (20): Xaa is A or G
  MOD_RES (21), (22), (23), (24): Xaa is A or G or is absent

SEQ ID NO: 41190 - protein, 39 aa, Artificial Sequence; identical to SEQ ID NO: 15207
  GFR-binding peptide
  MOD_RES (2), (3), (36), (38): Xaa is C or S
  MOD_RES (17), (18), (19), (20), (21): Xaa is A or G
  MOD_RES (22), (23), (24), (25): Xaa is A or G or is absent

SEQ ID NO: 41191 - protein, 35 aa, Artificial Sequence; identical to SEQ ID NO: 15208
  GFR-binding peptide
  MOD_RES (2), (3): Xaa is C or S
  MOD_RES (17), (18), (19), (20), (21): Xaa is A or G
  MOD_RES (22), (23), (24), (25): Xaa is A or G or is absent

SEQ ID NO: 41192 - protein, 34 aa, Artificial Sequence; identical to SEQ ID NO: 9718
  GFR-binding peptide
  MOD_RES (2), (3): Xaa is C or S

SEQ ID NO: 41193 - protein, 38 aa, Artificial Sequence; identical to SEQ ID NO: 15211
  GFR-binding peptide
  MOD_RES (2), (3), (35), (37): Xaa is C or S

SEQ ID NO: 41194 - protein, 37 aa, Artificial Sequence; identical to SEQ ID NO: 15212
  GFR-binding peptide
  MOD_RES (4), (5), (36): Xaa is C or S

SEQ ID NO: 41195 - protein, 35 aa, Artificial Sequence; identical to SEQ ID NO: 17004
  GFR-binding peptide
  MOD_RES (1), (2), (34): Xaa is C or S

SEQ ID NO: 41196 - protein, 38 aa, Artificial Sequence; identical to SEQ ID NO: 17005
  GFR-binding peptide
  MOD_RES (3), (4), (36), (38): Xaa is C or S

SEQ ID NO: 41197 - protein, 36 aa, Artificial Sequence; identical to SEQ ID NO: 17007
  GFR-binding peptide
  MOD_RES (4), (4): Xaa is C or S
  MOD_RES (18), (19), (20), (21), (22): Xaa is A or G
  MOD_RES (23), (24), (25), (26): Xaa is A or G or is absent

SEQ ID NO: 41198 - protein, 37 aa, Artificial Sequence; identical to SEQ ID NO: 9721
  GFR-binding peptide
  MOD_RES (4), (5), (37): Xaa is C or S

SEQ ID NO: 41199 - protein, 39 aa, Artificial Sequence; identical to SEQ ID NO: 15213
  GFR-binding peptide
  MOD_RES (4), (36), (38): Xaa is C or S

SEQ ID NO: 41200 - protein, 42 aa, Artificial Sequence; identical to SEQ ID NO: 17009
  GFR-binding peptide
  MOD_RES (6), (7), (41): Xaa is C or S
  MOD_RES (21), (22), (23), (24), (25): Xaa is A or G
  MOD_RES (26), (27), (28), (29): Xaa is A or G or is absent

SEQ ID NO: 41201 - protein, 40 aa, Artificial Sequence; identical to SEQ ID NO: 15214
  GFR-binding peptide
  MOD_RES (3), (4), (38), (40): Xaa is C or S
  MOD_RES (18), (19), (20), (21), (22): Xaa is A or G
  MOD_RES (23), (24), (25), (26): Xaa is A or G or is absent

SEQ ID NO: 41202 - protein, 34 aa, Artificial Sequence; identical to SEQ ID NO: 9724
  GFR-binding peptide
  MOD_RES (1), (2): Xaa is C or S
  MOD_RES (16), (17), (18), (19), (20): Xaa is A or G
  MOD_RES (21), (22), (23), (24): Xaa is A or G or is absent

SEQ ID NO: 41203 - protein, 38 aa, Artificial Sequence; identical to SEQ ID NO: 7925
  GFR-binding peptide
  MOD_RES (1), (35), (37): Xaa is C or S
  MOD_RES (15), (16), (17), (18), (19): Xaa is A or G
  MOD_RES (20), (21), (22), (23): Xaa is A or G or is absent

SEQ ID NO: 41204 - protein, 38 aa, Artificial Sequence; identical to SEQ ID NO: 15216
  GFR-binding peptide
  MOD_RES (2), (3), (36), (38): Xaa is C or S
  MOD_RES (17), (18), (19), (20), (21): Xaa is A or G
  MOD_RES (22), (23), (24), (25): Xaa is A or G or is absent

SEQ ID NO: 41205 - protein, 34 aa, Artificial Sequence; identical to SEQ ID NO: 15217
  GFR-binding peptide
  MOD_RES (1), (1): Xaa is C or S
  MOD_RES (15), (16), (17), (18), (19): Xaa is A or G
  MOD_RES (20), (21), (22), (23): Xaa is A or G or is absent

SEQ ID NO: 41206 - protein, 41 aa, Artificial Sequence; identical to SEQ ID NO: 15220
  GFR-binding peptide
  MOD_RES (6), (38), (40): Xaa is C or S

SEQ ID NO: 41207 - protein, 36 aa, Artificial Sequence; identical to SEQ ID NO: 15221
  GFR-binding peptide
  MOD_RES (1), (2), (33), (35): Xaa is C or S

SEQ ID NO: 41208 - protein, 34 aa, Artificial Sequence; identical to SEQ ID NO: 15223
  GFR-binding peptide
  MOD_RES (34), (34): Xaa is C or S
  MOD_RES (14), (15), (16), (17), (18): Xaa is A or G
  MOD_RES (19), (20), (21), (22): Xaa is A or G or is absent

SEQ ID NO: 41209 - protein, 40 aa, Artificial Sequence; identical to SEQ ID NO: 9731
  GFR-binding peptide
  MOD_RES (6), (7), (39): Xaa is C or S

SEQ ID NO: 41210 - protein, 36 aa, Artificial Sequence; identical to SEQ ID NO: 17013
  GFR-binding peptide
  MOD_RES (2), (3): Xaa is C or S
  MOD_RES (17), (18), (19), (20), (21): Xaa is A or G
  MOD_RES (22), (23), (24), (25): Xaa is A or G or is absent

SEQ ID NO: 41211 - protein, 43 aa, Artificial Sequence; identical to SEQ ID NO: 17014
  GFR-binding peptide
  MOD_RES (5), (6), (40), (42): Xaa is C or S
  MOD_RES (20), (21), (22), (23), (24): Xaa is A or G
  MOD_RES (25), (26), (27), (28): Xaa is A or G or is absent

SEQ ID NO: 41212 - protein, 37 aa, Artificial Sequence; identical to SEQ ID NO: 17016
  GFR-binding peptide
  MOD_RES (3), (37): Xaa is C or S
  MOD_RES (17), (18), (19), (20), (21): Xaa is A or G
  MOD_RES (22), (23), (24), (25): Xaa is A or G or is absent

SEQ ID NO: 41213 - protein, 36 aa, Artificial Sequence; identical to SEQ ID NO: 15225
  GFR-binding peptide
  MOD_RES (4), (5): Xaa is C or S

SEQ ID NO: 41214 - protein, 41 aa, Artificial Sequence; identical to SEQ ID NO: 17017
  GFR-binding peptide
  MOD_RES (4), (5), (38), (40): Xaa is C or S
  MOD_RES (19), (20), (21), (22), (23): Xaa is A or G
  MOD_RES (24), (25), (26), (27): Xaa is A or G or is absent

SEQ ID NO: 41215 - protein, 36 aa, Artificial Sequence; identical to SEQ ID NO: 17019
  GFR-binding peptide
  MOD_RES (1), (2), (36): Xaa is C or S
  MOD_RES (16), (17), (18), (19), (20): Xaa is A or G
  MOD_RES (21), (22), (23), (24): Xaa is A or G or is absent

SEQ ID NO: 41216 - protein, 38 aa, Artificial Sequence; identical to SEQ ID NO: 7934
  GFR-binding peptide
  MOD_RES (6), (7), (38): Xaa is C or S

SEQ ID NO: 41217 - protein, 37 aa, Artificial Sequence; identical to SEQ ID NO: 17020
  GFR-binding peptide
  MOD_RES (4), (5): Xaa is C or S
  MOD_RES (19), (20), (21), (22), (23): Xaa is A or G
  MOD_RES (24), (25), (26), (27): Xaa is A or G or is absent

SEQ ID NO: 41218 - protein, 40 aa, Artificial Sequence; identical to SEQ ID NO: 15227
  GFR-binding peptide
  MOD_RES (5), (6), (40): Xaa is C or S
  MOD_RES (20), (21), (22), (23), (24): Xaa is A or G
  MOD_RES (25), (26), (27), (28): Xaa is A or G or is absent

SEQ ID NO: 41219 - protein, 34 aa, Artificial Sequence; identical to SEQ ID NO: 7937
  GFR-binding peptide
  MOD_RES (2), (3): Xaa is C or S

SEQ ID NO: 41220 - protein, 36 aa, Artificial Sequence; identical to SEQ ID NO: 17021
  GFR-binding peptide
  MOD_RES (3), (4): Xaa is C or S
  MOD_RES (18), (19), (20), (21), (22): Xaa is A or G
  MOD_RES (23), (24), (25), (26): Xaa is A or G or is absent

SEQ ID NO: 41221 - protein, 40 aa, Artificial Sequence; identical to SEQ ID NO: 9741
  GFR-binding peptide
  MOD_RES (4), (5), (38), (40): Xaa is C or S
  MOD_RES (19), (20), (21), (22), (23): Xaa is A or G
  MOD_RES (24), (25), (26), (27): Xaa is A or G or is absent

SEQ ID NO: 41222 - protein, 39 aa, Artificial Sequence; identical to SEQ ID NO: 17023
  GFR-binding peptide
  MOD_RES (4), (5), (38): Xaa is C or S
  MOD_RES (19), (20), (21), (22), (23): Xaa is A or G
  MOD_RES (24), (25), (26), (27): Xaa is A or G or is absent

SEQ ID NO: 41223 - protein, 39 aa, Artificial Sequence; identical to SEQ ID NO: 17025
  GFR-binding peptide
  MOD_RES (6), (7), (39): Xaa is C or S

SEQ ID NO: 41224 - protein, 35 aa, Artificial Sequence; identical to SEQ ID NO: 15230
  GFR-binding peptide
  MOD_RES (34), (34): Xaa is C or S
  MOD_RES (14), (15), (16), (17), (18): Xaa is A or G
  MOD_RES (19), (20), (21), (22): Xaa is A or G or is absent

SEQ ID NO: 41225 - protein, 36 aa, Artificial Sequence; identical to SEQ ID NO: 17027
  GFR-binding peptide
  MOD_RES (1), (2), (33), (35): Xaa is C or S

SEQ ID NO: 41226 - protein, 36 aa, Artificial Sequence; identical to SEQ ID NO: 15231
  GFR-binding peptide
  MOD_RES (1), (2), (34), (36): Xaa is C or S

SEQ ID NO: 41227 - protein, 34 aa, Artificial Sequence; identical to SEQ ID NO: 15232
  GFR-binding peptide
  MOD_RES (1), (33): Xaa is C or S

SEQ ID NO: 41228 - protein, 35 aa, Artificial Sequence; identical to SEQ ID NO: 15233
  GFR-binding peptide
  MOD_RES (1), (2): Xaa is C or S
  MOD_RES (16), (17), (18), (19), (20): Xaa is A or G
  MOD_RES (21), (22), (23), (24): Xaa is A or G or is absent

SEQ ID NO: 41229 - protein, 38 aa, Artificial Sequence; identical to SEQ ID NO: 17030
  GFR-binding peptide
  MOD_RES (2), (3), (37): Xaa is C or S
  MOD_RES (17), (18), (19), (20), (21): Xaa is A or G
  MOD_RES (22), (23), (24), (25): Xaa is A or G or is absent

SEQ ID NO: 41230 - protein, 37 aa, Artificial Sequence; identical to SEQ ID NO: 15234
  GFR-binding peptide
  MOD_RES (1), (34), (36): Xaa is C or S
  MOD_RES (15), (16), (17), (18), (19): Xaa is A or G
  MOD_RES (20), (21), (22), (23): Xaa is A or G or is absent

SEQ ID NO: 41231 - protein, 35 aa, Artificial Sequence; identical to SEQ ID NO: 15235
  GFR-binding peptide
  MOD_RES (1), (35): Xaa is C or S
  MOD_RES (15), (16), (17), (18), (19): Xaa is A or G
  MOD_RES (20), (21), (22), (23): Xaa is A or G or is absent

SEQ ID NO: 41232 - protein, 38 aa, Artificial Sequence; identical to SEQ ID NO: 9756
  GFR-binding peptide
  MOD_RES (1), (35), (37): Xaa is C or S
  MOD_RES (15), (16), (17), (18), (19): Xaa is A or G
  MOD_RES (20), (21), (22), (23): Xaa is A or G or is absent

SEQ ID NO: 41233 - protein, 41 aa, Artificial Sequence; identical to SEQ ID NO: 7948
  GFR-binding peptide
  MOD_RES (6), (7), (38), (40): Xaa is C or S

SEQ ID NO: 41234 - protein, 32 aa, Artificial Sequence; identical to SEQ ID NO: 7949
  GFR-binding peptide
  MOD_RES (14), (15), (16), (17), (18): Xaa is A or G
  MOD_RES (19), (20), (21), (22): Xaa is A or G or is absent

SEQ ID NO: 41235 - protein, 32 aa, Artificial Sequence; identical to SEQ ID NO: 17033
  GFR-binding peptide
  MOD_RES (1), (1): Xaa is C or S

SEQ ID NO: 41236 - protein, 35 aa, Artificial Sequence; identical to SEQ ID NO: 15238
  GFR-binding peptide
  MOD_RES (2), (3): Xaa is C or S
  MOD_RES (17), (18), (19), (20), (21): Xaa is A or G
  MOD_RES (22), (23), (24), (25): Xaa is A or G or is absent

SEQ ID NO: 41237 - protein, 39 aa, Artificial Sequence; identical to SEQ ID NO: 15239
  GFR-binding peptide
  MOD_RES (6), (7): Xaa is C or S
  MOD_RES (21), (22), (23), (24), (25): Xaa is A or G
  MOD_RES (26), (27), (28), (29): Xaa is A or G or is absent

SEQ ID NO: 41238 - protein, 39 aa, Artificial Sequence; identical to SEQ ID NO: 15240
  GFR-binding peptide
  MOD_RES (6), (7): Xaa is C or S
  MOD_RES (21), (22), (23), (24), (25): Xaa is A or G
  MOD_RES (26), (27), (28), (29): Xaa is A or G or is absent

SEQ ID NO: 41239 - protein, 38 aa, Artificial Sequence; identical to SEQ ID NO: 7954
  GFR-binding peptide
  MOD_RES (2), (3), (37): Xaa is C or S
  MOD_RES (17), (18), (19), (20), (21): Xaa is A or G
  MOD_RES (22), (23), (24), (25): Xaa is A or G or is absent

SEQ ID NO: 41240 - protein, 41 aa, Artificial Sequence; identical to SEQ ID NO: 17034
  GFR-binding peptide
  MOD_RES (4), (38), (40): Xaa is C or S
  MOD_RES (18), (19), (20), (21), (22): Xaa is A or G
  MOD_RES (23), (24), (25), (26): Xaa is A or G or is absent

SEQ ID NO: 41241 - protein, 41 aa, Artificial Sequence; identical to SEQ ID NO: 17035
  GFR-binding peptide
  MOD_RES (5), (6), (40): Xaa is C or S
  MOD_RES (20), (21), (22), (23), (24): Xaa is A or G
  MOD_RES (25), (26), (27), (28): Xaa is A or G or is absent

SEQ ID NO: 41242 - protein, 35 aa, Artificial Sequence; identical to SEQ ID NO: 15242
  GFR-binding peptide
  MOD_RES (1), (2): Xaa is C or S
  MOD_RES (16), (17), (18), (19), (20): Xaa is A or G
  MOD_RES (21), (22), (23), (24): Xaa is A or G or is absent

SEQ ID NO: 41243 - protein, 39 aa, Artificial Sequence; identical to SEQ ID NO: 15243
  GFR-binding peptide
  MOD_RES (2), (3), (37), (39): Xaa is C or S
  MOD_RES (17), (18), (19), (20), (21): Xaa is A or G
  MOD_RES (22), (23), (24), (25): Xaa is A or G or is absent

SEQ ID NO: 41244 - protein, 33 aa, Artificial Sequence; identical to SEQ ID NO: 17036
  GFR-binding peptide
  MOD_RES (1), (2): Xaa is C or S

SEQ ID NO: 41245 - protein, 32 aa, Artificial Sequence; identical to SEQ ID NO: 15244
  GFR-binding peptide
  MOD_RES (1), (2): Xaa is C or S

SEQ ID NO: 41246 - protein, 38 aa, Artificial Sequence; identical to SEQ ID NO: 15245
  GFR-binding peptide
  MOD_RES (3), (4), (37): Xaa is C or S
  MOD_RES (18), (19), (20), (21), (22): Xaa is A or G
  MOD_RES (23), (24), (25), (26): Xaa is A or G or is absent

SEQ ID NO: 41247 - protein, 35 aa, Artificial Sequence; identical to SEQ ID NO: 15246
  GFR-binding peptide
  MOD_RES (1), (33), (35): Xaa is C or S

SEQ ID NO: 41248 - protein, 33 aa, Artificial Sequence; identical to SEQ ID NO: 7958
  GFR-binding peptide
  MOD_RES (1), (1): Xaa is C or S
  MOD_RES (15), (16), (17), (18), (19): Xaa is A or G
  MOD_RES (20), (21), (22), (23): Xaa is A or G or is absent

SEQ ID NO: 41249 - protein, 39 aa, Artificial Sequence; identical to SEQ ID NO: 15248
  GFR-binding peptide
  MOD_RES (3), (4), (38): Xaa is C or S
  MOD_RES (18), (19), (20), (21), (22): Xaa is A or G
  MOD_RES (23), (24), (25), (26): Xaa is A or G or is absent

SEQ ID NO: 41250 - protein, 34 aa, Artificial Sequence; identical to SEQ ID NO: 17037
  GFR-binding peptide
  MOD_RES (3), (4): Xaa is C or S

SEQ ID NO: 41251 - protein, 36 aa, Artificial Sequence; identical to SEQ ID NO: 15249
  GFR-binding peptide
  MOD_RES (2), (3), (36): Xaa is C or S
  MOD_RES (17), (18), (19), (20), (21): Xaa is A or G
  MOD_RES (22), (23), (24), (25): Xaa is A or G or is absent

SEQ ID NO: 41252 - protein, 36 aa, Artificial Sequence; identical to SEQ ID NO: 15250
  GFR-binding peptide
  MOD_RES (1), (34), (36): Xaa is C or S
  MOD_RES (15), (16), (17), (18), (19): Xaa is A or G
  MOD_RES (20), (21), (22), (23): Xaa is A or G or is absent

SEQ ID NO: 41253 - protein, 37 aa, Artificial Sequence; identical to SEQ ID NO: 7962
  GFR-binding peptide
  MOD_RES (2), (3), (37): Xaa is C or S
  MOD_RES (17), (18), (19), (20), (21): Xaa is A or G
  MOD_RES (22), (23), (24), (25): Xaa is A or G or is absent

SEQ ID NO: 41254 - protein, 37 aa, Artificial Sequence; identical to SEQ ID NO: 17038
  GFR-binding peptide
  MOD_RES (1), (2), (34), (36): Xaa is C or S

SEQ ID NO: 41255 - protein, 37 aa, Artificial Sequence; identical to SEQ ID NO: 15252
  GFR-binding peptide
  MOD_RES (2), (3), (36): Xaa is C or S
  MOD_RES (17), (18), (19), (20), (21): Xaa is A or G
  MOD_RES (22), (23), (24), (25): Xaa is A or G or is absent

SEQ ID NO: 41256 - protein, 39 aa, Artificial Sequence; identical to SEQ ID NO: 17041
  GFR-binding peptide
  MOD_RES (1), (2), (36), (38): Xaa is C or S
  MOD_RES (16), (17), (18), (19), (20): Xaa is A or G
  MOD_RES (21), (22), (23), (24): Xaa is A or G or is absent

SEQ ID NO: 41257 - protein, 31 aa, Artificial Sequence; identical to SEQ ID NO: 15253
  GFR-binding peptide
  MOD_RES (1), (1): Xaa is C or S

SEQ ID NO: 41258 - protein, 32 aa, Artificial Sequence; identical to SEQ ID NO: 7966
  GFR-binding peptide
  MOD_RES (1), (32): Xaa is C or S

SEQ ID NO: 41259 - protein, 40 aa, Artificial Sequence; identical to SEQ ID NO: 15255
  GFR-binding peptide
  MOD_RES (4), (5), (39): Xaa is C or S
  MOD_RES (19), (20), (21), (22), (23): Xaa is A or G
  MOD_RES (24), (25), (26), (27): Xaa is A or G or is absent

SEQ ID NO: 41260 - protein, 35 aa, Artificial Sequence; identical to SEQ ID NO: 9770
  GFR-binding peptide
  MOD_RES (1), (32), (34): Xaa is C or S

SEQ ID NO: 41261 - protein, 31 aa, Artificial Sequence; identical to SEQ ID NO: 7967
  GFR-binding peptide
  MOD_RES (31), (31): Xaa is C or S

SEQ ID NO: 41262 - protein, 38 aa, Artificial Sequence; identical to SEQ ID NO: 17043
  GFR-binding peptide
  MOD_RES (5), (5): Xaa is C or S
  MOD_RES (19), (20), (21), (22), (23): Xaa is A or G
  MOD_RES (24), (25), (26), (27): Xaa is A or G or is absent

SEQ ID NO: 41263 - protein, 37 aa, Artificial Sequence; identical to SEQ ID NO: 7969
  GFR-binding peptide
  MOD_RES (1), (2), (36): Xaa is C or S
  MOD_RES (16), (17), (18), (19), (20): Xaa is A or G
  MOD_RES (21), (22), (23), (24): Xaa is A or G or is absent

SEQ ID NO: 41264 - protein, 35 aa, Artificial Sequence; identical to SEQ ID NO: 15258
  GFR-binding peptide
  MOD_RES (2), (34): Xaa is C or S

SEQ ID NO: 41265 - protein, 36 aa, Artificial Sequence; identical to SEQ ID NO: 15259
  GFR-binding peptide
  MOD_RES (33), (35): Xaa is C or S
  MOD_RES (14), (15), (16), (17), (18): Xaa is A or G
  MOD_RES (19), (20), (21), (22): Xaa is A or G or is absent

SEQ ID NO: 41266 - protein, 38 aa, Artificial Sequence; identical to SEQ ID NO: 17044
  GFR-binding peptide
  MOD_RES (3), (4), (36), (38): Xaa is C or S

SEQ ID NO: 41267 - protein, 33 aa, Artificial Sequence; identical to SEQ ID NO: 9775
  GFR-binding peptide
  MOD_RES (2), (3): Xaa is C or S

SEQ ID NO: 41268 - protein, 40 aa, Artificial Sequence; identical to SEQ ID NO: 7972
  GFR-binding peptide
  MOD_RES (6), (7), (38), (40): Xaa is C or S

SEQ ID NO: 41269 - protein, 40 aa, Artificial Sequence; identical to SEQ ID NO: 23256
  GFR-binding peptide
  MOD_RES (1), (3), (38), (39): Xaa is C or S
  MOD_RES (16), (17), (18), (19), (20): Xaa is A or G
  MOD_RES (21), (22), (23), (24): Xaa is A or G or is absent

SEQ ID NO: 41270 - protein, 36 aa, Artificial Sequence; identical to SEQ ID NO: 23259
  GFR-binding peptide
  MOD_RES (2), (36): Xaa is C or S
  MOD_RES (14), (15), (16), (17), (18): Xaa is A or G
  MOD_RES (19), (20), (21), (22): Xaa is A or G or is absent

SEQ ID NO: 41271 - protein, 34 aa, Artificial Sequence
  GFR-binding peptide
  MOD_RES (2), (2): Xaa is C or S
  MOD_RES (13), (14), (15), (16), (17): Xaa is A or G
  MOD_RES (18), (19), (20), (21): Xaa is A or G or is absent
GXEEVIMEYQKYXXXXXXXXXIYLMSIPSTKVPA

SEQ ID NO: 41272 - protein, 35 aa, Artificial Sequence; identical to SEQ ID NO: 23260
  GFR-binding peptide
  MOD_RES (1), (33), (34): Xaa is C or S

SEQ ID NO: 41273 - protein, 38 aa, Artificial Sequence
  GFR-binding peptide
  MOD_RES (2), (33), (34): Xaa is C or S
GXEEVIMEYQKYLLVRGNDIYLMSIPSTKVPAXXTSPV

SEQ ID NO: 41274 - protein, 35 aa, Artificial Sequence
  GFR-binding peptide
  MOD_RES (31), (32): Xaa is C or S
EEVIMEYQKYLLVRGNDIYLMSIPSTKVPAXXTSP

SEQ ID NO: 41275 - protein, 42 aa, Artificial Sequence; identical to SEQ ID NO: 24275
  GFR-binding peptide
  MOD_RES (2), (36), (37): Xaa is C or S
  MOD_RES (14), (15), (16), (17), (18): Xaa is A or G
  MOD_RES (19), (20), (21), (22): Xaa is A or G or is absent

SEQ ID NO: 41276 - protein, 41 aa, Artificial Sequence; identical to SEQ ID NO: 23264
  GFR-binding peptide
  MOD_RES (2), (4), (39), (40): Xaa is C or S
  MOD_RES (17), (18), (19), (20), (21): Xaa is A or G
  MOD_RES (22), (23), (24), (25): Xaa is A or G or is absent

SEQ ID NO: 41277 - protein, 35 aa, Artificial Sequence; identical to SEQ ID NO: 25291
  GFR-binding peptide
  MOD_RES (31), (32): Xaa is C or S

SEQ ID NO: 41278 - protein, 39 aa, Artificial Sequence; identical to SEQ ID NO: 26318
  GFR-binding peptide
  MOD_RES (1), (33), (34): Xaa is C or S

SEQ ID NO: 41279 - protein, 32 aa, Artificial Sequence; identical to SEQ ID NO: 23267
  GFR-binding peptide
  MOD_RES (31), (32): Xaa is C or S

SEQ ID NO: 41280 - protein, 41 aa, Artificial Sequence; identical to SEQ ID NO: 26320
  GFR-binding peptide
  MOD_RES (2), (36), (37): Xaa is C or S
  MOD_RES (14), (15), (16), (17), (18): Xaa is A or G
  MOD_RES (19), (20), (21), (22): Xaa is A or G or is absent

SEQ ID NO: 41281 - protein, 32 aa, Artificial Sequence
  GFR-binding peptide
  MOD_RES (2), (2): Xaa is C or S
GXEEVIMEYQKYLLVRGNDIYLMSIPSTKVPA

SEQ ID NO: 41282 - protein, 34 aa, Artificial Sequence; identical to SEQ ID NO: 24283
  GFR-binding peptide
  MOD_RES (1), (3): Xaa is C or S

SEQ ID NO: 41283 - protein, 40 aa, Artificial Sequence; identical to SEQ ID NO: 23268
  GFR-binding peptide
  MOD_RES (2), (4), (39), (40): Xaa is C or S
  MOD_RES (17), (18), (19), (20), (21): Xaa is A or G
  MOD_RES (22), (23), (24), (25): Xaa is A or G or is absent

SEQ ID NO: 41284 - protein, 40 aa, Artificial Sequence
  GFR-binding peptide
  MOD_RES (1), (3), (36), (37): Xaa is C or S
  MOD_RES (14), (15), (16), (17), (18): Xaa is A or G
  MOD_RES (19), (20), (21), (22): Xaa is A or G or is absent
XGXEEVIMEYQKYXXXXXXXXXIYLMSIPSTKVPAXXTSP

SEQ ID NO: 41285 - protein, 33 aa, Artificial Sequence; identical to SEQ ID NO: 26325
  GFR-binding peptide
  MOD_RES (12), (13), (14), (15), (16): Xaa is A or G
  MOD_RES (17), (18), (19), (20): Xaa is A or G or is absent

SEQ ID NO: 41286 - protein, 39 aa, Artificial Sequence
  GFR-binding peptide
  MOD_RES (34), (35): Xaa is C or S
  MOD_RES (12), (13), (14), (15), (16): Xaa is A or G
  MOD_RES (17), (18), (19), (20): Xaa is A or G or is absent
RDVVMGEYQKYXXXXXXXXXIYLMSIPSMKTPTXXPGAS

SEQ ID NO: 41287 - protein, 36 aa, Artificial Sequence; identical to SEQ ID NO: 26328
  GFR-binding peptide
  MOD_RES (31), (32): Xaa is C or S

SEQ ID NO: 41288 - protein, 39 aa, Artificial Sequence; identical to SEQ ID NO: 23274
  GFR-binding peptide
  MOD_RES (2), (36): Xaa is C or S
  MOD_RES (14), (15), (16), (17), (18): Xaa is A or G
  MOD_RES (19), (20), (21), (22): Xaa is A or G or is absent

SEQ ID NO: 41289 - protein, 36 aa, Artificial Sequence; identical to SEQ ID NO: 26335
  GFR-binding peptide
  MOD_RES (1), (3), (35), (36): Xaa is C or S

SEQ ID NO: 41290 - protein, 32 aa, Artificial Sequence
  GFR-binding peptide
  MOD_RES (1), (32): Xaa is C or S
XEEVIMEYQKYLLVRGNDIYLMSIPSTKVPAX

SEQ ID NO: 41291 - protein, 36 aa, Artificial Sequence; identical to SEQ ID NO: 23279
  GFR-binding peptide
  MOD_RES (33), (34): Xaa is C or S
  MOD_RES (11), (12), (13), (14), (15): Xaa is A or G
  MOD_RES (16), (17), (18), (19): Xaa is A or G or is absent

SEQ ID NO: 41292 - protein, 42 aa, Artificial Sequence; identical to SEQ ID NO: 23281
  GFR-binding peptide
  MOD_RES (1), (3), (37), (38): Xaa is C or S
  MOD_RES (15), (16), (17), (18), (19): Xaa is A or G
  MOD_RES (20), (21), (22), (23): Xaa is A or G or is absent

SEQ ID NO: 41293 - protein, 36 aa, Artificial Sequence; identical to SEQ ID NO: 23282
  GFR-binding peptide
  MOD_RES (31), (32): Xaa is C or S

SEQ ID NO: 41294 - protein, 38 aa, Artificial Sequence; identical to SEQ ID NO: 23283
  GFR-binding peptide
  MOD_RES (33), (34): Xaa is C or S
  MOD_RES (11), (12), (13), (14), (15): Xaa is A or G
  MOD_RES (16), (17), (18), (19): Xaa is A or G or is absent

SEQ ID NO: 41295 - protein, 39 aa, Artificial Sequence; identical to SEQ ID NO: 24295
  GFR-binding peptide
  MOD_RES (2), (4), (36), (37): Xaa is C or S

SEQ ID NO: 41296 - protein, 37 aa, Artificial Sequence; identical to SEQ ID NO: 24296
  GFR-binding peptide
  MOD_RES (2), (34), (35): Xaa is C or S

SEQ ID NO: 41297 - protein, 34 aa, Artificial Sequence; identical to SEQ ID NO: 24297
  GFR-binding peptide
  MOD_RES (34), (34): Xaa is C or S
  MOD_RES (12), (13), (14), (15), (16): Xaa is A or G
  MOD_RES (17), (18), (19), (20): Xaa is A or G or is absent

SEQ ID NO: 41298 - protein, 38 aa, Artificial Sequence; identical to SEQ ID NO: 25308
  GFR-binding peptide
  MOD_RES (32), (32): Xaa is C or S

SEQ ID NO: 41299 - protein, 37 aa, Artificial Sequence; identical to SEQ ID NO: 25309
  GFR-binding peptide
  MOD_RES (1), (35), (36): Xaa is C or S
  MOD_RES (13), (14), (15), (16), (17): Xaa is A or G
  MOD_RES (18), (19), (20), (21): Xaa is A or G or is absent

SEQ ID NO: 41300 - protein, 41 aa, Artificial Sequence; identical to SEQ ID NO: 26346
  GFR-binding peptide
  MOD_RES (2), (4), (38), (39): Xaa is C or S
  MOD_RES (16), (17), (18), (19), (20): Xaa is A or G
  MOD_RES (21), (22), (23), (24): Xaa is A or G or is absent

SEQ ID NO: 41301 - protein, 39 aa, Artificial Sequence; identical to SEQ ID NO: 25314
  GFR-binding peptide
  MOD_RES (34), (35): Xaa is C or S
  MOD_RES (12), (13), (14), (15), (16): Xaa is A or G
  MOD_RES (17), (18), (19), (20): Xaa is A or G or is absent

SEQ ID NO: 41302 - protein, 35 aa, Artificial Sequence; identical to SEQ ID NO: 26349
  GFR-binding peptide
  MOD_RES (2), (34), (35): Xaa is C or S

SEQ ID NO: 41303 - protein, 39 aa, Artificial Sequence; identical to SEQ ID NO: 24307
  GFR-binding peptide
  MOD_RES (1), (34), (35): Xaa is C or S

SEQ ID NO: 41304 - protein, 39 aa, Artificial Sequence; identical to SEQ ID NO: 26350
  GFR-binding peptide
  MOD_RES (2), (34), (35): Xaa is C or S

SEQ ID NO: 41305 - protein, 33 aa, Artificial Sequence
  GFR-binding peptide
  MOD_RES (1), (33): Xaa is C or S
XRDVVMGEYQKYIIQQKDNIYLMSIPSMKTPTX

SEQ ID NO: 41306 - protein, 32 aa, Artificial Sequence; identical to SEQ ID NO: 26354
  GFR-binding peptide

SEQ ID NO: 41307 - protein, 38 aa, Artificial Sequence; identical to SEQ ID NO: 24311
  GFR-binding peptide
  MOD_RES (2), (36), (37): Xaa is C or S
  MOD_RES (14), (15), (16), (17), (18): Xaa is A or G
  MOD_RES (19), (20), (21), (22): Xaa is A or G or is absent

SEQ ID NO: 41308 - protein, 42 aa, Artificial Sequence; identical to SEQ ID NO: 26355
  GFR-binding peptide
  MOD_RES (1), (3), (37), (38): Xaa is C or S
  MOD_RES (15), (16), (17), (18), (19): Xaa is A or G
  MOD_RES (20), (21), (22), (23): Xaa is A or G or is absent

SEQ ID NO: 41309 - protein, 35 aa, Artificial Sequence
  GFR-binding peptide
  MOD_RES (2), (33), (34): Xaa is C or S
GXEEVIMEYQKYLLVRGNDIYLMSIPSTKVPAXXT

SEQ ID NO: 41310 - protein, 34 aa, Artificial Sequence; identical to SEQ ID NO: 23300
  GFR-binding peptide
  MOD_RES (2), (34): Xaa is C or S

SEQ ID NO: 41311 - protein, 37 aa, Artificial Sequence
  GFR-binding peptide
  MOD_RES (1), (3), (34), (35): Xaa is C or S
XGXEEVIMEYQKYLLVRGNDIYLMSIPSTKVPAXXTS

SEQ ID NO: 41312 - protein, 42 aa, Artificial Sequence; identical to SEQ ID NO: 26356
  GFR-binding peptide
  MOD_RES (2), (4), (39), (40): Xaa is C or S
  MOD_RES (17), (18), (19), (20), (21): Xaa is A or G
  MOD_RES (22), (23), (24), (25): Xaa is A or G or is absent

SEQ ID NO: 41313 - protein, 36 aa, Artificial Sequence; identical to SEQ ID NO: 24314
  GFR-binding peptide
  MOD_RES (31), (32): Xaa is C or S

SEQ ID NO: 41314 - protein, 33 aa, Artificial Sequence
  GFR-binding peptide
  MOD_RES (33), (33): Xaa is C or S
  MOD_RES (11), (12), (13), (14), (15): Xaa is A or G
  MOD_RES (16), (17), (18), (19): Xaa is A or G or is absent
DVVMGEYQKYXXXXXXXXXIYLMSIPSMKTPTX

SEQ ID NO: 41315 - protein, 38 aa, Artificial Sequence; identical to SEQ ID NO: 24317
  GFR-binding peptide
  MOD_RES (2), (37), (38): Xaa is C or S
  MOD_RES (15), (16), (17), (18), (19): Xaa is A or G
  MOD_RES (20), (21), (22), (23): Xaa is A or G or is absent

SEQ ID NO: 41316 - protein, 37 aa, Artificial Sequence; identical to SEQ ID NO: 23304
  GFR-binding peptide
  MOD_RES (34), (35): Xaa is C or S
  MOD_RES (12), (13), (14), (15), (16): Xaa is A or G
  MOD_RES (17), (18), (19), (20): Xaa is A or G or is absent

SEQ ID NO: 41317 - protein, 38 aa, Artificial Sequence; identical to SEQ ID NO: 23309
  GFR-binding peptide
  MOD_RES (2), (4), (36): Xaa is C or S

SEQ ID NO: 41318 - protein, 37 aa, Artificial Sequence
  GFR-binding peptide
  MOD_RES (2), (36), (37): Xaa is C or S
  MOD_RES (14), (15), (16), (17), (18): Xaa is A or G
  MOD_RES (19), (20), (21), (22): Xaa is A or G or is absent
GXRDVVMGEYQKYXXXXXXXXXIYLMSIPSMKTPTXX

SEQ ID NO: 41319 - protein, 37 aa, Artificial Sequence; identical to SEQ ID NO: 25319
  GFR-binding peptide
  MOD_RES (33), (34): Xaa is C or S
  MOD_RES (11), (12), (13), (14), (15): Xaa is A or G
  MOD_RES (16), (17), (18), (19): Xaa is A or G or is absent

SEQ ID NO: 41320 - protein, 32 aa, Artificial Sequence; identical to SEQ ID NO: 26364
  GFR-binding peptide
  MOD_RES (31), (32): Xaa is C or S

SEQ ID NO: 41321 - protein, 33 aa, Artificial Sequence; identical to SEQ ID NO: 25321
  GFR-binding peptide
  MOD_RES (12), (13), (14), (15), (16): Xaa is A or G
  MOD_RES (17), (18), (19), (20): Xaa is A or G or is absent

SEQ ID NO: 41322 - protein, 38 aa, Artificial Sequence; identical to SEQ ID NO: 23312
  GFR-binding peptide
  MOD_RES (2), (4), (38): Xaa is C or S
  MOD_RES (16), (17), (18), (19), (20): Xaa is A or G
  MOD_RES (21), (22), (23), (24): Xaa is A or G or is absent

SEQ ID NO: 41323 - protein, 41 aa, Artificial Sequence; identical to SEQ ID NO: 23313
  GFR-binding peptide
  MOD_RES (1), (3), (35), (36): Xaa is C or S

SEQ ID NO: 41324 - protein, 36 aa, Artificial Sequence; identical to SEQ ID NO: 26367
  GFR-binding peptide
  MOD_RES (2), (34), (35): Xaa is C or S

SEQ ID NO: 41325 - protein, 41 aa, Artificial Sequence; identical to SEQ ID NO: 26369
  GFR-binding peptide
  MOD_RES (2), (36), (37): Xaa is C or S
  MOD_RES (14), (15), (16), (17), (18): Xaa is A or G
  MOD_RES (19), (20), (21), (22): Xaa is A or G or is absent

SEQ ID NO: 41326 - protein, 39 aa, Artificial Sequence; identical to SEQ ID NO: 26370
  GFR-binding peptide
  MOD_RES (2), (4), (38), (39): Xaa is C or S
  MOD_RES (16), (17), (18), (19), (20): Xaa is A or G
  MOD_RES (21), (22), (23), (24): Xaa is A or G or is absent

SEQ ID NO: 41327 - protein, 36 aa, Artificial Sequence
  GFR-binding peptide
  MOD_RES (1), (33), (34): Xaa is C or S
XRDVVMGEYQKYIIQQKDNIYLMSIPSMKTPTXXPG

SEQ ID NO: 41328 - protein, 33 aa, Artificial Sequence
  GFR-binding peptide
  MOD_RES (32), (33): Xaa is C or S
RDVVMGEYQKYIIQQKDNIYLMSIPSMKTPTXX

SEQ ID NO: 41329 - protein, 34 aa, Artificial Sequence
  GFR-binding peptide
  MOD_RES (33), (34): Xaa is C or S
  MOD_RES (11), (12), (13), (14), (15): Xaa is A or G
  MOD_RES (16), (17), (18), (19): Xaa is A or G or is absent
DVVMGEYQKYXXXXXXXXXIYLMSIPSMKTPTXX

SEQ ID NO: 41330 - protein, 39 aa, Artificial Sequence; identical to SEQ ID NO: 26380
  GFR-binding peptide
  MOD_RES (33), (34): Xaa is C or S
  MOD_RES (11), (12), (13), (14), (15): Xaa is A or G
  MOD_RES (16), (17), (18), (19): Xaa is A or G or is absent

SEQ ID NO: 41331 - protein, 35 aa, Artificial Sequence; identical to SEQ ID NO: 26381
  GFR-binding peptide
  MOD_RES (1), (33): Xaa is C or S

SEQ ID NO: 41332 - protein, 36 aa, Artificial Sequence
  GFR-binding peptide
  MOD_RES (1), (3), (36): Xaa is C or S
  MOD_RES (14), (15), (16), (17), (18): Xaa is A or G
  MOD_RES (19), (20), (21), (22): Xaa is A or G or is absent
XGXEEVIMEYQKYXXXXXXXXXIYLMSIPSTKVPAX

SEQ ID NO: 41333 - protein, 36 aa, Artificial Sequence
  GFR-binding peptide
  MOD_RES (33), (34): Xaa is C or S
  MOD_RES (11), (12), (13), (14), (15): Xaa is A or G
  MOD_RES (16), (17), (18), (19): Xaa is A or G or is absent
EEVIMEYQKYXXXXXXXXXIYLMSIPSTKVPAXXTS

SEQ ID NO: 41334 - protein, 37 aa, Artificial Sequence; identical to SEQ ID NO: 24331
  GFR-binding peptide
  MOD_RES (2), (34), (35): Xaa is C or S

SEQ ID NO: 41335 - protein, 35 aa, Artificial Sequence; identical to SEQ ID NO: 26384
  GFR-binding peptide
  MOD_RES (1), (35): Xaa is C or S
  MOD_RES (13), (14), (15), (16), (17): Xaa is A or G
  MOD_RES (18), (19), (20), (21): Xaa is A or G or is absent

SEQ ID NO: 41336 - protein, 41 aa, Artificial Sequence; identical to SEQ ID NO: 23324
  GFR-binding peptide
  MOD_RES (1), (3), (35), (36): Xaa is C or S

SEQ ID NO: 41337 - protein, 38 aa, Artificial Sequence; identical to SEQ ID NO: 25327
  GFR-binding peptide
  MOD_RES (32), (33): Xaa is C or S

SEQ ID NO: 41338 - protein, 41 aa, Artificial Sequence; identical to SEQ ID NO: 26386
  GFR-binding peptide
  MOD_RES (1), (3), (37), (38): Xaa is C or S
  MOD_RES (15), (16), (17), (18), (19): Xaa is A or G
  MOD_RES (20), (21), (22), (23): Xaa is A or G or is absent

SEQ ID NO: 41339 - protein, 34 aa, Artificial Sequence; identical to SEQ ID NO: 25329
  GFR-binding peptide
  MOD_RES (1), (3): Xaa is C or S

SEQ ID NO: 41340 - protein, 36 aa, Artificial Sequence; identical to SEQ ID NO: 23326
  GFR-binding peptide
  MOD_RES (2), (36): Xaa is C or S
  MOD_RES (14), (15), (16), (17), (18): Xaa is A or G
  MOD_RES (19), (20), (21), (22): Xaa is A or G or is absent

SEQ ID NO: 41341 - protein, 42 aa, Artificial Sequence; identical to SEQ ID NO: 23327
  GFR-binding peptide
  MOD_RES (2), (36), (37): Xaa is C or S
  MOD_RES (14), (15), (16), (17), (18): Xaa is A or G
  MOD_RES (19), (20), (21), (22): Xaa is A or G or is absent

SEQ ID NO: 41342 - protein, 36 aa, Artificial Sequence; identical to SEQ ID NO: 23328
  GFR-binding peptide
  MOD_RES (31), (31): Xaa is C or S

SEQ ID NO: 41343 - protein, 39 aa, Artificial Sequence; identical to SEQ ID NO: 24334
  GFR-binding peptide
  MOD_RES (34), (35): Xaa is C or S
  MOD_RES (12), (13), (14), (15), (16): Xaa is A or G
  MOD_RES (17), (18), (19), (20): Xaa is A or G or is absent

SEQ ID NO: 41344 - protein, 41 aa, Artificial Sequence; identical to SEQ ID NO: 25332
  GFR-binding peptide
  MOD_RES (1), (3), (35), (36): Xaa is C or S

SEQ ID NO: 41345 - protein, 40 aa, Artificial Sequence; identical to SEQ ID NO: 26391
  GFR-binding peptide
  MOD_RES (34), (35): Xaa is C or S
  MOD_RES (12), (13), (14), (15), (16): Xaa is A or G
  MOD_RES (17), (18), (19), (20): Xaa is A or G or is absent

SEQ ID NO: 41346 - protein, 32 aa, Artificial Sequence; identical to SEQ ID NO: 25333
  GFR-binding peptide
  MOD_RES (1), (1): Xaa is C or S

SEQ ID NO: 41347 - protein, 39 aa, Artificial Sequence; identical to SEQ ID NO: 26394
  GFR-binding peptide
  MOD_RES (1), (36), (37): Xaa is C or S
  MOD_RES (14), (15), (16), (17), (18): Xaa is A or G
  MOD_RES (19), (20), (21), (22): Xaa is A or G or is absent

SEQ ID NO: 41348 - protein, 36 aa, Artificial Sequence; identical to SEQ ID NO: 23336
  GFR-binding peptide
  MOD_RES (34), (35): Xaa is C or S
  MOD_RES (12), (13), (14), (15), (16): Xaa is A or G
  MOD_RES (17), (18), (19), (20): Xaa is A or G or is absent

SEQ ID NO: 41349 - protein, 42 aa, Artificial Sequence; identical to SEQ ID NO: 25335
  GFR-binding peptide
  MOD_RES (2), (4), (36), (37): Xaa is C or S

SEQ ID NO: 41350 - protein, 36 aa, Artificial Sequence; identical to SEQ ID NO: 23338
  GFR-binding peptide
  MOD_RES (31), (32): Xaa is C or S

SEQ ID NO: 41351 - protein, 39 aa, Artificial Sequence
  GFR-binding peptide
  MOD_RES (2), (34), (35): Xaa is C or S
GXRDVVMGEYQKYIIQQKDNIYLMSIPSMKTPTXXPGAS

SEQ ID NO: 41352 - protein, 35 aa, Artificial Sequence; identical to SEQ ID NO: 25337
  GFR-binding peptide
  MOD_RES (32), (32): Xaa is C or S

SEQ ID NO: 41353 - protein, 38 aa, Artificial Sequence; identical to SEQ ID NO: 26396
  GFR-binding peptide
  MOD_RES (33), (34): Xaa is C or S
  MOD_RES (11), (12), (13), (14), (15): Xaa is A or G
  MOD_RES (16), (17), (18), (19): Xaa is A or G or is absent

SEQ ID NO: 41354 - protein, 43 aa, Artificial Sequence; identical to SEQ ID NO: 26398
  GFR-binding peptide
  MOD_RES (1), (3), (38), (39): Xaa is C or S
  MOD_RES (16), (17), (18), (19), (20): Xaa is A or G
  MOD_RES (21), (22), (23), (24): Xaa is A or G or is absent

SEQ ID NO: 41355 - protein, 36 aa, Artificial Sequence; identical to SEQ ID NO: 24347
  GFR-binding peptide
  MOD_RES (1), (3): Xaa is C or S
  MOD_RES (15), (16), (17), (18), (19): Xaa is A or G
  MOD_RES (20), (21), (22), (23): Xaa is A or G or is absent

SEQ ID NO: 41356 - protein, 33 aa, Artificial Sequence; identical to SEQ ID NO: 26401
  GFR-binding peptide
  MOD_RES (1), (33): Xaa is C or S

SEQ ID NO: 41357 - protein, 36 aa, Artificial Sequence; identical to SEQ ID NO: 25346
  GFR-binding peptide
  MOD_RES (32), (33): Xaa is C or S

SEQ ID NO: 41358 - protein, 34 aa, Artificial Sequence; identical to SEQ ID NO: 26403
  GFR-binding peptide
  MOD_RES (31), (32): Xaa is C or S

SEQ ID NO: 41359 - protein, 37 aa, Artificial Sequence; identical to SEQ ID NO: 26404
  GFR-binding peptide
  MOD_RES (1), (3), (35), (36): Xaa is C or S

SEQ ID NO: 41360 - protein, 37 aa, Artificial Sequence; identical to SEQ ID NO: 24353
  GFR-binding peptide
  MOD_RES (31), (32): Xaa is C or S

SEQ ID NO: 41361 - protein, 39 aa, Artificial Sequence; identical to SEQ ID NO: 24355
  GFR-binding peptide
  MOD_RES (1), (35), (36): Xaa is C or S
  MOD_RES (13), (14), (15), (16), (17): Xaa is A or G
  MOD_RES (18), (19), (20), (21): Xaa is A or G or is absent

SEQ ID NO: 41362 - protein, 40 aa, Artificial Sequence; identical to SEQ ID NO: 25349
  GFR-binding peptide
  MOD_RES (1), (3), (35), (36): Xaa is C or S

SEQ ID NO: 41363 - protein, 34 aa, Artificial Sequence; identical to SEQ ID NO: 26408
  GFR-binding peptide
  MOD_RES (33), (33): Xaa is C or S
  MOD_RES (11), (12), (13), (14), (15): Xaa is A or G
  MOD_RES (16), (17), (18), (19): Xaa is A or G or is absent

SEQ ID NO: 41364 - protein, 33 aa, Artificial Sequence; identical to SEQ ID NO: 25356
  GFR-binding peptide
  MOD_RES (2), (2): Xaa is C or S

SEQ ID NO: 41365 - protein, 42 aa, Artificial Sequence; identical to SEQ ID NO: 26418
  GFR-binding peptide
  MOD_RES (1), (3), (37): Xaa is C or S
  MOD_RES (15), (16), (17), (18), (19): Xaa is A or G
  MOD_RES (20), (21), (22), (23): Xaa is A or G or is absent

SEQ ID NO: 41366 - protein, 32 aa, Artificial Sequence; identical to SEQ ID NO: 24364
  GFR-binding peptide
  MOD_RES (11), (12), (13), (14), (15): Xaa is A or G
  MOD_RES (16), (17), (18), (19): Xaa is A or G or is absent

SEQ ID NO: 41367 - protein, 33 aa, Artificial Sequence; identical to SEQ ID NO: 23351
  GFR-binding peptide
  MOD_RES (2), (2): Xaa is C or S

SEQ ID NO: 41368 - protein, 37 aa, Artificial Sequence; identical to SEQ ID NO: 24366
  GFR-binding peptide
  MOD_RES (33), (34): Xaa is C or S
  MOD_RES (11), (12), (13), (14), (15): Xaa is A or G
  MOD_RES (16), (17), (18), (19): Xaa is A or G or is absent

SEQ ID NO: 41369 - protein, 34 aa, Artificial Sequence; identical to SEQ ID NO: 25366
  GFR-binding peptide
  MOD_RES (34), (34): Xaa is C or S
  MOD_RES (12), (13), (14), (15), (16): Xaa is A or G
  MOD_RES (17), (18), (19), (20): Xaa is A or G or is absent

SEQ ID NO: 41370 - protein, 32 aa, Artificial Sequence; identical to SEQ ID NO: 25371
  GFR-binding peptide
  MOD_RES (11), (12), (13), (14), (15): Xaa is A or G
  MOD_RES (16), (17), (18), (19): Xaa is A or G or is absent

SEQ ID NO: 41371 - protein, 35 aa, Artificial Sequence
  GFR-binding peptide
  MOD_RES (1), (3): Xaa is C or S
  MOD_RES (14), (15), (16), (17), (18): Xaa is A or G
  MOD_RES (19), (20), (21), (22): Xaa is A or G or is absent
XGXEEVIMEYQKYXXXXXXXXXIYLMSIPSTKVPA

SEQ ID NO: 41372 - protein, 36 aa, Artificial Sequence
  GFR-binding peptide
  MOD_RES (1), (32), (33): Xaa is C or S
XEEVIMEYQKYLLVRGNDIYLMSIPSTKVPAXXTSP

SEQ ID NO: 41373 - protein, 38 aa, Artificial Sequence; identical to SEQ ID NO: 25375
  GFR-binding peptide
  MOD_RES (2), (4), (36), (37): Xaa is C or S

SEQ ID NO: 41374 - protein, 39 aa, Artificial Sequence; identical to SEQ ID NO: 23365
  GFR-binding peptide
  MOD_RES (2), (4), (36), (37): Xaa is C or S

SEQ ID NO: 41375 - protein, 41 aa, Artificial Sequence
  GFR-binding peptide
  MOD_RES (2), (4), (36), (37): Xaa is C or S
SXGXRDVVMGEYQKYIIQQKDNIYLMSIPSMKTPTXXPGAS

SEQ ID NO: 41376 - protein, 40 aa, Artificial Sequence; identical to SEQ ID NO: 25381
  GFR-binding peptide
  MOD_RES (1), (34), (35): Xaa is C or S

SEQ ID NO: 41377 - protein, 39 aa, Artificial Sequence; identical to SEQ ID NO: 25382
  GFR-binding peptide
  MOD_RES (2), (36), (37): Xaa is C or S
  MOD_RES (14), (15), (16), (17), (18): Xaa is A or G
  MOD_RES (19), (20), (21), (22): Xaa is A or G or is absent

SEQ ID NO: 41378 - protein, 38 aa, Artificial Sequence
  GFR-binding peptide
  MOD_RES (1), (3), (36), (37): Xaa is C or S
  MOD_RES (14), (15), (16), (17), (18): Xaa is A or G
  MOD_RES (19), (20), (21), (22): Xaa is A or G or is absent
XGXEEVIMEYQKYXXXXXXXXXIYLMSIPSTKVPAXXT

SEQ ID NO: 41379 - protein, 42 aa, Artificial Sequence
  GFR-binding peptide
  MOD_RES (2), (4), (38), (39): Xaa is C or S
  MOD_RES (16), (17), (18), (19), (20): Xaa is A or G
  MOD_RES (21), (22), (23), (24): Xaa is A or G or is absent
SXGXRDVVMGEYQKYXXXXXXXXXIYLMSIPSMKTPTXXPGA

SEQ ID NO: 41380 - protein, 39 aa, Artificial Sequence; identical to SEQ ID NO: 23373
  GFR-binding peptide
  MOD_RES (1), (35), (36): Xaa is C or S
  MOD_RES (13), (14), (15), (16), (17): Xaa is A or G
  MOD_RES (18), (19), (20), (21): Xaa is A or G or is absent

SEQ ID NO: 41381 - protein, 34 aa, Artificial Sequence; identical to SEQ ID NO: 23374
  GFR-binding peptide
  MOD_RES (1), (3): Xaa is C or S

SEQ ID NO: 41382 - protein, 39 aa, Artificial Sequence; identical to SEQ ID NO: 26444
  GFR-binding peptide
  MOD_RES (2), (4), (36), (37): Xaa is C or S

SEQ ID NO: 41383 - protein, 41 aa, Artificial Sequence; identical to SEQ ID NO: 24373
  GFR-binding peptide
  MOD_RES (2), (4), (38), (39): Xaa is C or S
  MOD_RES (16), (17), (18), (19), (20): Xaa is A or G
  MOD_RES (21), (22), (23), (24): Xaa is A or G or is absent

SEQ ID NO: 41384 - protein, 38 aa, Artificial Sequence; identical to SEQ ID NO: 26445
  GFR-binding peptide
  MOD_RES (1), (3), (35): Xaa is C or S

SEQ ID NO: 41385 - protein, 31 aa, Artificial Sequence; identical to SEQ ID NO: 26446
  GFR-binding peptide

SEQ ID NO: 41386 - protein, 37 aa, Artificial Sequence
  GFR-binding peptide
  MOD_RES (2), (4), (37): Xaa is C or S
  MOD_RES (15), (16), (17), (18), (19): Xaa is A or G
  MOD_RES (20), (21), (22), (23): Xaa is A or G or is absent
LXGXEEVIMEYQKYXXXXXXXXXIYLMSIPSTKVPAX

SEQ ID NO: 41387 - protein, 44 aa, Artificial Sequence; identical to SEQ ID NO: 24375
  GFR-binding peptide
  MOD_RES (2), (4), (38): Xaa is C or S
  MOD_RES (16), (17), (18), (19), (20): Xaa is A or G
  MOD_RES (21), (22), (23), (24): Xaa is A or G or is absent

SEQ ID NO: 41388 - protein, 37 aa, Artificial Sequence; identical to SEQ ID NO: 25389
  GFR-binding peptide
  MOD_RES (31), (32): Xaa is C or S

SEQ ID NO: 41389 - protein, 36 aa, Artificial Sequence; identical to SEQ ID NO: 23376
  GFR-binding peptide
  MOD_RES (2), (34), (35): Xaa is C or S

SEQ ID NO: 41390 - protein, 38 aa, Artificial Sequence; identical to SEQ ID NO: 25395
  GFR-binding peptide
  MOD_RES (34), (35): Xaa is C or S
  MOD_RES (12), (13), (14), (15), (16): Xaa is A or G
  MOD_RES (17), (18), (19), (20): Xaa is A or G or is absent

SEQ ID NO: 41391 - protein, 42 aa, Artificial Sequence; identical to SEQ ID NO: 24379
  GFR-binding peptide
  MOD_RES (2), (4), (38), (39): Xaa is C or S
  MOD_RES (16), (17), (18), (19), (20): Xaa is A or G
  MOD_RES (21), (22), (23), (24): Xaa is A or G or is absent

SEQ ID NO: 41392 - protein, 44 aa, Artificial Sequence; identical to SEQ ID NO: 24380
  GFR-binding peptide
  MOD_RES (2), (4), (38), (39): Xaa is C or S
  MOD_RES (16), (17), (18), (19), (20): Xaa is A or G
  MOD_RES (21), (22), (23), (24): Xaa is A or G or is absent

SEQ ID NO: 41393 - protein, 33 aa, Artificial Sequence; identical to SEQ ID NO: 26450
  GFR-binding peptide
  MOD_RES (12), (13), (14), (15), (16): Xaa is A or G
  MOD_RES (17), (18), (19), (20): Xaa is A or G or is absent

SEQ ID NO: 41394 - protein, 40 aa, Artificial Sequence; identical to SEQ ID NO: 26451
  GFR-binding peptide
  MOD_RES (1), (35), (36): Xaa is C or S
  MOD_RES (13), (14), (15), (16), (17): Xaa is A or G
  MOD_RES (18), (19), (20), (21): Xaa is A or G or is absent

SEQ ID NO: 41395 - protein, 38 aa, Artificial Sequence; identical to SEQ ID NO: 26453
  GFR-binding peptide
  MOD_RES (32), (33): Xaa is C or S

SEQ ID NO: 41396 - protein, 43 aa, Artificial Sequence; identical to SEQ ID NO: 24386
  GFR-binding peptide
  MOD_RES (2), (4), (38), (39): Xaa is C or S
  MOD_RES (16), (17), (18), (19), (20): Xaa is A or G
  MOD_RES (21), (22), (23), (24): Xaa is A or G or is absent

SEQ ID NO: 41397 - protein, 32 aa, Artificial Sequence; identical to SEQ ID NO: 23384
  GFR-binding peptide
  MOD_RES (11), (12), (13), (14), (15): Xaa is A or G
  MOD_RES (16), (17), (18), (19): Xaa is A or G or is absent

SEQ ID NO: 41398 - protein, 31 aa, Artificial Sequence; identical to SEQ ID NO: 23386
  GFR-binding peptide

SEQ ID NO: 41399 - protein, 40 aa, Artificial Sequence
  GFR-binding peptide
  MOD_RES (1), (34), (35): Xaa is C or S
  MOD_RES (12), (13), (14), (15), (16): Xaa is A or G
  MOD_RES (17), (18), (19), (20): Xaa is A or G or is absent
XEEVIMEYQKYXXXXXXXXXIYLMSIPSTKVPAXXTSPVR

SEQ ID NO: 41400 - protein, 37 aa, Artificial Sequence; identical to SEQ ID NO: 24389
  GFR-binding peptide
  MOD_RES (1), (33), (34): Xaa is C or S

SEQ ID NO: 41401 - protein, 39 aa, Artificial Sequence; identical to SEQ ID NO: 23388
  GFR-binding peptide
  MOD_RES (2), (4), (38), (39): Xaa is C or S
  MOD_RES (16), (17), (18), (19), (20): Xaa is A or G
  MOD_RES (21), (22), (23), (24): Xaa is A or G or is absent

SEQ ID NO: 41402 - protein, 35 aa, Artificial Sequence; identical to SEQ ID NO: 23390
  GFR-binding peptide
  MOD_RES (1), (35): Xaa is C or S
  MOD_RES (13), (14), (15), (16), (17): Xaa is A or G
  MOD_RES (18), (19), (20), (21): Xaa is A or G or is absent

SEQ ID NO: 41403 - protein, 34 aa, Artificial Sequence; identical to SEQ ID NO: 23394
  GFR-binding peptide
  MOD_RES (31), (32): Xaa is C or S

SEQ ID NO: 41404 - protein, 37 aa, Artificial Sequence; identical to SEQ ID NO: 26461
  GFR-binding peptide
  MOD_RES (1), (33), (34): Xaa is C or S

SEQ ID NO: 41405 - protein, 35 aa, Artificial Sequence
  GFR-binding peptide
  MOD_RES (1), (3), (35): Xaa is C or S
XGXRDVVMGEYQKYIIQQKDNIYLMSIPSMKTPTX

SEQ ID NO: 41406 - protein, 33 aa, Artificial Sequence; identical to SEQ ID NO: 24396
  GFR-binding peptide
  MOD_RES (31), (32): Xaa is C or S

SEQ ID NO: 41407 - protein, 36 aa, Artificial Sequence; identical to SEQ ID NO: 26462
  GFR-binding peptide
  MOD_RES (34), (35): Xaa is C or S
  MOD_RES (12), (13), (14), (15), (16): Xaa is A or G
  MOD_RES (17), (18), (19), (20): Xaa is A or G or is absent

SEQ ID NO: 41408 - protein, 34 aa, Artificial Sequence; identical to SEQ ID NO: 26463
  GFR-binding peptide
  MOD_RES (34), (34): Xaa is C or S
  MOD_RES (12), (13), (14), (15), (16): Xaa is A or G
  MOD_RES (17), (18), (19), (20): Xaa is A or G or is absent

SEQ ID NO: 41409 - protein, 40 aa, Artificial Sequence; identical to SEQ ID NO: 23401
  GFR-binding peptide
  MOD_RES (2), (36): Xaa is C or S
  MOD_RES (14), (15), (16), (17), (18): Xaa is A or G
  MOD_RES (19), (20), (21), (22): Xaa is A or G or is absent

SEQ ID NO: 41410 - protein, 38 aa, Artificial Sequence; identical to SEQ ID NO: 24399
  GFR-binding peptide
  MOD_RES (1), (3), (36), (37): Xaa is C or S

SEQ ID NO: 41411 - protein, 31 aa, Artificial Sequence; identical to SEQ ID NO: 24403
  GFR-binding peptide

SEQ ID NO: 41412 - protein, 39 aa, Artificial Sequence; identical to SEQ ID NO: 23405
  GFR-binding peptide
  MOD_RES (1), (3), (37), (38): Xaa is C or S
  MOD_RES (15), (16), (17), (18), (19): Xaa is A or G
  MOD_RES (20), (21), (22), (23): Xaa is A or G or is absent

SEQ ID NO: 41413 - protein, 42 aa, Artificial Sequence; identical to SEQ ID NO: 26465
  GFR-binding peptide
  MOD_RES (2), (36), (37): Xaa is C or S
  MOD_RES (14), (15), (16), (17), (18): Xaa is A or G
  MOD_RES (19), (20), (21), (22): Xaa is A or G or is absent

SEQ ID NO: 41414 - protein, 40 aa, Artificial Sequence; identical to SEQ ID NO: 24404
  GFR-binding peptide
  MOD_RES (2), (36), (37): Xaa is C or S
  MOD_RES (14), (15), (16), (17), (18): Xaa is A or G
  MOD_RES (19), (20), (21), (22): Xaa is A or G or is absent

SEQ ID NO: 41415 - protein, 37 aa, Artificial Sequence; identical to SEQ ID NO: 23406
  GFR-binding peptide
  MOD_RES (34), (35): Xaa is C or S
  MOD_RES (12), (13), (14), (15), (16): Xaa is A or G
  MOD_RES (17), (18), (19), (20): Xaa is A or G or is absent

SEQ ID NO: 41416 - protein, 38 aa, Artificial Sequence; identical to SEQ ID NO: 26467
  GFR-binding peptide
  MOD_RES (2), (34), (35): Xaa is C or S

SEQ ID NO: 41417 - protein, 38 aa, Artificial Sequence; identical to SEQ ID NO: 24405
  GFR-binding peptide
  MOD_RES (33), (34): Xaa is C or S
  MOD_RES (11), (12), (13), (14), (15): Xaa is A or G
  MOD_RES (16), (17), (18), (19): Xaa is A or G or is absent

SEQ ID NO: 41418 - protein, 38 aa, Artificial Sequence; identical to SEQ ID NO: 23408
  GFR-binding peptide
  MOD_RES (1), (3), (35), (36): Xaa is C or S

SEQ ID NO: 41419 - protein, 33 aa, Artificial Sequence; identical to SEQ ID NO: 26472
  GFR-binding peptide
  MOD_RES (12), (13), (14), (15), (16): Xaa is A or G
  MOD_RES (17), (18), (19), (20): Xaa is A or G or is absent

SEQ ID NO: 41420 - protein, 38 aa, Artificial Sequence; identical to SEQ ID NO: 25424
  GFR-binding peptide
  MOD_RES (1), (35), (36): Xaa is C or S
  MOD_RES (13), (14), (15), (16), (17): Xaa is A or G
  MOD_RES (18), (19), (20), (21): Xaa is A or G or is absent

SEQ ID NO: 41421 - protein, 39 aa, Artificial Sequence; identical to SEQ ID NO: 24410
  GFR-binding peptide
  MOD_RES (2), (36), (37): Xaa is C or S
  MOD_RES (14), (15), (16), (17), (18): Xaa is A or G
  MOD_RES (19), (20), (21), (22): Xaa is A or G or is absent

SEQ ID NO: 41422 - protein, 38 aa, Artificial Sequence
  GFR-binding peptide
  MOD_RES (2), (4), (37), (38): Xaa is C or S
  MOD_RES (15), (16), (17), (18), (19): Xaa is A or G
  MOD_RES (20), (21), (22), (23): Xaa is A or G or is absent
LXGXEEVIMEYQKYXXXXXXXXXIYLMSIPSTKVPAXX

SEQ ID NO: 41423 - protein, 36 aa, Artificial Sequence; identical to SEQ ID NO: 24411
  GFR-binding peptide
  MOD_RES (2), (36): Xaa is C or S
  MOD_RES (14), (15), (16), (17), (18): Xaa is A or G
  MOD_RES (19), (20), (21), (22): Xaa is A or G or is absent

SEQ ID NO: 41424 - protein, 37 aa, Artificial Sequence; identical to SEQ ID NO: 25426
  GFR-binding peptide
  MOD_RES (1), (3), (35), (36): Xaa is C or S

SEQ ID NO: 41425 - protein, 38 aa, Artificial Sequence; identical to SEQ ID NO: 24414
  GFR-binding peptide
  MOD_RES (34), (35): Xaa is C or S
  MOD_RES (12), (13), (14), (15), (16): Xaa is A or G
  MOD_RES (17), (18), (19), (20): Xaa is A or G or is absent

SEQ ID NO: 41426 - protein, 43 aa, Artificial Sequence
  GFR-binding peptide
  MOD_RES (2), (4), (37), (38): Xaa is C or S
  MOD_RES (15), (16), (17), (18), (19): Xaa is A or G
  MOD_RES (20), (21), (22), (23): Xaa is A or G or is absent
LXGXEEVIMEYQKYXXXXXXXXXIYLMSIPSTKVPAXXTSPVR

SEQ ID NO: 41427 - protein, 32 aa, Artificial Sequence; identical to SEQ ID NO: 23414
  GFR-binding peptide
  MOD_RES (11), (12), (13), (14), (15): Xaa is A or G
  MOD_RES (16), (17), (18), (19): Xaa is A or G or is absent

SEQ ID NO: 41428 - protein, 33 aa, Artificial Sequence; identical to SEQ ID NO: 26479
  GFR-binding peptide
  MOD_RES (1), (33): Xaa is C or S

SEQ ID NO: 41429 - protein, 35 aa, Artificial Sequence; identical to SEQ ID NO: 24417
  GFR-binding peptide
  MOD_RES (1), (35): Xaa is C or S
  MOD_RES (13), (14), (15), (16), (17): Xaa is A or G
  MOD_RES (18), (19), (20), (21): Xaa is A or G or is absent

SEQ ID NO: 41430 - protein, 42 aa, Artificial Sequence; identical to SEQ ID NO: 25428
  GFR-binding peptide
  MOD_RES (2), (36), (37): Xaa is C or S
  MOD_RES (14), (15), (16), (17), (18): Xaa is A or G
  MOD_RES (19), (20), (21), (22): Xaa is A or G or is absent

SEQ ID NO: 41431 - protein, 32 aa, Artificial Sequence; identical to SEQ ID NO: 23416
  GFR-binding peptide
  MOD_RES (31), (32): Xaa is C or S

SEQ ID NO: 41432 - protein, 41 aa, Artificial Sequence; identical to SEQ ID NO: 24419
  GFR-binding peptide
  MOD_RES (2), (4), (36), (37): Xaa is C or S

SEQ ID NO: 41433 - protein, 40 aa, Artificial Sequence; identical to SEQ ID NO: 25429
  GFR-binding peptide
  MOD_RES (1), (3), (35), (36): Xaa is C or S

SEQ ID NO: 41434 - protein, 37 aa, Artificial Sequence; identical to SEQ ID NO: 24425
  GFR-binding peptide
  MOD_RES (1), (3): Xaa is C or S
  MOD_RES (16), (17), (18), (19), (20): Xaa is A or G
  MOD_RES (21), (22), (23), (24): Xaa is A or G or is absent

SEQ ID NO: 41435 - protein, 31 aa, Artificial Sequence; identical to SEQ ID NO: 25431
  GFR-binding peptide
  MOD_RES (31), (31): Xaa is C or S

SEQ ID NO: 41436 - protein, 39 aa, Artificial Sequence; identical to SEQ ID NO: 25434
  GFR-binding peptide
  MOD_RES (2), (36), (37): Xaa is C or S
  MOD_RES (14), (15), (16), (17), (18): Xaa is A or G
  MOD_RES (19), (20), (21), (22): Xaa is A or G or is absent

SEQ ID NO: 41437 - protein, 37 aa, Artificial Sequence
  GFR-binding peptide
  MOD_RES (1), (3), (36), (37): Xaa is C or S
  MOD_RES (14), (15), (16), (17), (18): Xaa is A or G
  MOD_RES (19), (20), (21), (22): Xaa is A or G or is absent
XGXEEVIMEYQKYXXXXXXXXXIYLMSIPSTKVPAXX

SEQ ID NO: 41438 - protein, 38 aa, Artificial Sequence; identical to SEQ ID NO: 24429
  GFR-binding peptide
  MOD_RES (2), (34), (35): Xaa is C or S

SEQ ID NO: 41439 - protein, 31 aa, Artificial Sequence; identical to SEQ ID NO: 25437
  GFR-binding peptide
  MOD_RES (31), (31): Xaa is C or S

SEQ ID NO: 41440 - protein, 32 aa, Artificial Sequence; identical to SEQ ID NO: 26494
  GFR-binding peptide
  MOD_RES (1), (1): Xaa is C or S

SEQ ID NO: 41441 - protein, 41 aa, Artificial Sequence; identical to SEQ ID NO: 23425
  GFR-binding peptide
  MOD_RES (2), (4), (36), (37): Xaa is C or S

SEQ ID NO: 41442 - protein, 41 aa, Artificial Sequence; identical to SEQ ID NO: 23426
  GFR-binding peptide
  MOD_RES (2), (36), (37): Xaa is C or S
  MOD_RES (14), (15), (16), (17), (18): Xaa is A or G
  MOD_RES (19), (20), (21), (22): Xaa is A or G or is absent

SEQ ID NO: 41443 - protein, 36 aa, Artificial Sequence; identical to SEQ ID NO: 23427
  GFR-binding peptide
  MOD_RES (33), (34): Xaa is C or S
  MOD_RES (11), (12), (13), (14), (15): Xaa is A or G
  MOD_RES (16), (17), (18), (19): Xaa is A or G or is absent

SEQ ID NO: 41444 - protein, 33 aa, Artificial Sequence; identical to SEQ ID NO: 25439
  GFR-binding peptide
  MOD_RES (33), (33): Xaa is C or S
  MOD_RES (11), (12), (13), (14), (15): Xaa is A or G
  MOD_RES (16), (17), (18), (19): Xaa is A or G or is absent

SEQ ID NO: 41445 - protein, 37 aa, Artificial Sequence; identical to SEQ ID NO: 24431
  GFR-binding peptide
  MOD_RES (1), (35), (36): Xaa is C or S
  MOD_RES (13), (14), (15), (16), (17): Xaa is A or G
  MOD_RES (18), (19), (20), (21): Xaa is A or G or is absent

SEQ ID NO: 41446 - protein, 37 aa, Artificial Sequence; identical to SEQ ID NO: 23429
  GFR-binding peptide
  MOD_RES (31), (32): Xaa is C or S

SEQ ID NO: 41447 - protein, 35 aa, Artificial Sequence; identical to SEQ ID NO: 23431
  GFR-binding peptide
  MOD_RES (33), (34): Xaa is C or S
  MOD_RES (11), (12), (13), (14), (15): Xaa is A or G
  MOD_RES (16), (17), (18), (19): Xaa is A or G or is absent

SEQ ID NO: 41448 - protein, 39 aa, Artificial Sequence; identical to SEQ ID NO: 26503
  GFR-binding peptide
  MOD_RES (2), (34), (35): Xaa is C or S

SEQ ID NO: 41449 - protein, 41 aa, Artificial Sequence; identical to SEQ ID NO: 25444
  GFR-binding peptide
  MOD_RES (1), (3), (38), (39): Xaa is C or S
  MOD_RES (16), (17), (18), (19), (20): Xaa is A or G
  MOD_RES (21), (22), (23), (24): Xaa is A or G or is absent

SEQ ID NO: 41450 - protein, 33 aa, Artificial Sequence; identical to SEQ ID NO: 23434
  GFR-binding peptide
  MOD_RES (12), (13), (14), (15), (16): Xaa is A or G
  MOD_RES (17), (18), (19), (20): Xaa is A or G or is absent

SEQ ID NO: 41451 - protein, 40 aa, Artificial Sequence; identical to SEQ ID NO: 24433
  GFR-binding peptide
  MOD_RES (1), (3), (35), (36): Xaa is C or S

SEQ ID NO: 41452 - protein, 37 aa, Artificial Sequence; identical to SEQ ID NO: 24435
  GFR-binding peptide
  MOD_RES (1), (3), (37): Xaa is C or S
  MOD_RES (15), (16), (17), (18), (19): Xaa is A or G
  MOD_RES (20), (21), (22), (23): Xaa is A or G or is absent

SEQ ID NO: 41453 - protein, 32 aa, Artificial Sequence
  GFR-binding peptide
  MOD_RES (1), (1): Xaa is C or S
XRDVVMGEYQKYIIQQKDNIYLMSIPSMKTPT

SEQ ID NO: 41454 - protein, 36 aa, Artificial Sequence; identical to SEQ ID NO: 25449
  GFR-binding peptide
  MOD_RES (1), (3), (35), (36): Xaa is C or S

SEQ ID NO: 41455 - protein, 36 aa, Artificial Sequence; identical to SEQ ID NO: 23436
  GFR-binding peptide
  MOD_RES (2), (4), (36): Xaa is C or S

SEQ ID NO: 41456 - protein, 35 aa, Artificial Sequence; identical to SEQ ID NO: 25454
  GFR-binding peptide
  MOD_RES (33), (34): Xaa is C or S
  MOD_RES (11), (12), (13), (14), (15): Xaa is A or G
  MOD_RES (16), (17), (18), (19): Xaa is A or G or is absent

SEQ ID NO: 41457 - protein, 39 aa, Artificial Sequence; identical to SEQ ID NO: 23441
  GFR-binding peptide
  MOD_RES (1), (3), (36), (37): Xaa is C or S

SEQ ID NO: 41458 - protein, 37 aa, Artificial Sequence
  GFR-binding peptide
  MOD_RES (1), (32), (33): Xaa is C or S
XEEVIMEYQKYLLVRGNDIYLMSIPSTKVPAXXTSPV

SEQ ID NO: 41459 - protein, 30 aa, Artificial Sequence
  GFR-binding peptide
DVVMGEYQKYIIQQKDNIYLMSIPSMKTPT

SEQ ID NO: 41460 - protein, 35 aa, Artificial Sequence; identical to SEQ ID NO: 25457
  GFR-binding peptide
  MOD_RES (33), (33): Xaa is C or S
  MOD_RES (11), (12), (13), (14), (15): Xaa is A or G
  MOD_RES (16), (17), (18), (19): Xaa is A or G or is absent

SEQ ID NO: 41461 - protein, 36 aa, Artificial Sequence; identical to SEQ ID NO: 25458
  GFR-binding peptide
  MOD_RES (1), (3): Xaa is C or S
  MOD_RES (15), (16), (17), (18), (19): Xaa is A or G
  MOD_RES (20), (21), (22), (23): Xaa is A or G or is absent

SEQ ID NO: 41462 - protein, 33 aa, Artificial Sequence; identical to SEQ ID NO: 25460
  GFR-binding peptide
  MOD_RES (1), (33): Xaa is C or S

SEQ ID NO: 41463 - protein, 34 aa, Artificial Sequence; identical to SEQ ID NO: 26517
  GFR-binding peptide
  MOD_RES (1), (1): Xaa is C or S
  MOD_RES (13), (14), (15), (16), (17): Xaa is A or G
  MOD_RES (18), (19), (20), (21): Xaa is A or G or is absent

SEQ ID NO: 41464 - protein, 39 aa, Artificial Sequence
  GFR-binding peptide
  MOD_RES (2), (4), (38), (39): Xaa is C or S
  MOD_RES (16), (17), (18), (19), (20): Xaa is A or G
  MOD_RES (21), (22), (23), (24): Xaa is A or G or is absent
SXGXRDVVMGEYQKYXXXXXXXXXIYLMSIPSMKTPTXX

SEQ ID NO: 41465 - protein, 35 aa, Artificial Sequence; identical to SEQ ID NO: 23452
  GFR-binding peptide
  MOD_RES (2), (2): Xaa is C or S
  MOD_RES (14), (15), (16), (17), (18): Xaa is A or G
  MOD_RES (19), (20), (21), (22): Xaa is A or G or is absent

SEQ ID NO: 41466 - protein, 36 aa, Artificial Sequence; identical to SEQ ID NO: 24451
  GFR-binding peptide
  MOD_RES (2), (34): Xaa is C or S

SEQ ID NO: 41467 - protein, 35 aa, Artificial Sequence; identical to SEQ ID NO: 23457
  GFR-binding peptide
  MOD_RES (2), (34): Xaa is C or S

SEQ ID NO: 41468 - protein, 34 aa, Artificial Sequence; identical to SEQ ID NO: 25468
  GFR-binding peptide
  MOD_RES (32), (33): Xaa is C or S

SEQ ID NO: 41469 - protein, 40 aa, Artificial Sequence; identical to SEQ ID NO: 25472
  GFR-binding peptide
  MOD_RES (2), (36), (37): Xaa is C or S
  MOD_RES (14), (15), (16), (17), (18): Xaa is A or G
  MOD_RES (19), (20), (21), (22): Xaa is A or G or is absent

SEQ ID NO: 41470 - protein, 39 aa, Artificial Sequence; identical to SEQ ID NO: 26526
  GFR-binding peptide
  MOD_RES (1), (3), (35): Xaa is C or S

SEQ ID NO: 41471 - protein, 35 aa, Artificial Sequence; identical to SEQ ID NO: 26530
  GFR-binding peptide
  MOD_RES (32), (33): Xaa is C or S

SEQ ID NO: 41472 - protein, 40 aa, Artificial Sequence
  GFR-binding peptide
  MOD_RES (1), (35), (36): Xaa is C or S
  MOD_RES (13), (14), (15), (16), (17): Xaa is A or G
  MOD_RES (18), (19), (20), (21): Xaa is A or G or is absent
XRDVVMGEYQKYXXXXXXXXXIYLMSIPSMKTPTXXPGAS

SEQ ID NO: 41473 - protein, 32 aa, Artificial Sequence
  GFR-binding peptide
  MOD_RES (31), (32): Xaa is C or S
EEVIMEYQKYLLVRGNDIYLMSIPSTKVPAXX

SEQ ID NO: 41474 - protein, 37 aa, Artificial Sequence
  GFR-binding peptide
  MOD_RES (2), (35), (36): Xaa is C or S
  MOD_RES (13), (14), (15), (16), (17): Xaa is A or G
  MOD_RES (18), (19), (20), (21): Xaa is A or G or is absent
GXEEVIMEYQKYXXXXXXXXXIYLMSIPSTKVPAXXT

SEQ ID NO: 41475 - protein, 34 aa, Artificial Sequence; identical to SEQ ID NO: 25481
  GFR-binding peptide
  MOD_RES (1), (33), (34): Xaa is C or S

SEQ ID NO: 41476 - protein, 40 aa, Artificial Sequence; identical to SEQ ID NO: 25482
  GFR-binding peptide
  MOD_RES (1), (35), (36): Xaa is C or S
  MOD_RES (13), (14), (15), (16), (17): Xaa is A or G
  MOD_RES (18), (19), (20), (21): Xaa is A or G or is absent

SEQ ID NO: 41477 - protein, 36 aa, Artificial Sequence; identical to SEQ ID NO: 24464
  GFR-binding peptide
  MOD_RES (1), (33), (34): Xaa is C or S

SEQ ID NO: 41478 - protein, 36 aa, Artificial Sequence; identical to SEQ ID NO: 26533
  GFR-binding peptide
  MOD_RES (1), (3), (35), (36): Xaa is C or S

SEQ ID NO: 41479 - protein, 40 aa, Artificial Sequence
  GFR-binding peptide
  MOD_RES (2), (34), (35): Xaa is C or S
GXSRVVMNEYQKYIVNSSDDIYLVSIPSLKTPAXXPKPVH

SEQ ID NO: 41480 - protein, 38 aa, Artificial Sequence; identical to SEQ ID NO: 25486
  GFR-binding peptide
  MOD_RES (1), (3), (37), (38): Xaa is C or S
  MOD_RES (15), (16), (17), (18), (19): Xaa is A or G
  MOD_RES (20), (21), (22), (23): Xaa is A or G or is absent

SEQ ID NO: 41481 - protein, 35 aa, Artificial Sequence
  GFR-binding peptide
  MOD_RES (2), (34), (35): Xaa is C or S
GXRDVVMGEYQKYIIQQKDNIYLMSIPSMKTPTXX

SEQ ID NO: 41482 - protein, 35 aa, Artificial Sequence
  GFR-binding peptide
  MOD_RES (31), (32): Xaa is C or S
DVVMGEYQKYIIQQKDNIYLMSIPSMKTPTXXPGA

SEQ ID NO: 41483 - protein, 34 aa, Artificial Sequence; identical to SEQ ID NO: 25487
  GFR-binding peptide
  MOD_RES (32), (33): Xaa is C or S

SEQ ID NO: 41484 - protein, 37 aa, Artificial Sequence; identical to SEQ ID NO: 25489
  GFR-binding peptide
  MOD_RES (31), (32): Xaa is C or S

SEQ ID NO: 41485 - protein, 32 aa, Artificial Sequence; identical to SEQ ID NO: 23472
  GFR-binding peptide
  MOD_RES (31), (32): Xaa is C or S

SEQ ID NO: 41486 - protein, 43 aa, Artificial Sequence; identical to SEQ ID NO: 23474
  GFR-binding peptide
  MOD_RES (1), (3), (37), (38): Xaa is C or S
  MOD_RES (15), (16), (17), (18), (19): Xaa is A or G
  MOD_RES (20), (21), (22), (23): Xaa is A or G or is absent

SEQ ID NO: 41487 - protein, 41 aa, Artificial Sequence
  GFR-binding peptide
  MOD_RES (1), (35), (36): Xaa is C or S
  MOD_RES (13), (14), (15), (16), (17): Xaa is A or G
  MOD_RES (18), (19), (20), (21): Xaa is A or G or is absent
XSRVVMNEYQKYXXXXXXXXXIYLVSIPSLKTPAXXPKPVH

SEQ ID NO: 41488 - protein, 33 aa, Artificial Sequence
  GFR-binding peptide
  MOD_RES (1), (3): Xaa is C or S
XGXEEVIMEYQKYLLVRGNDIYLMSIPSTKVPA

SEQ ID NO: 41489 - protein, 39 aa, Artificial Sequence; identical to SEQ ID NO: 25498
  GFR-binding peptide
  MOD_RES (34), (34): Xaa is C or S
  MOD_RES (12), (13), (14), (15), (16): Xaa is A or G
  MOD_RES (17), (18), (19), (20): Xaa is A or G or is absent

SEQ ID NO: 41490 - protein, 35 aa, Artificial Sequence; identical to SEQ ID NO: 25499
  GFR-binding peptide
  MOD_RES (2), (35): Xaa is C or S

SEQ ID NO: 41491 - protein, 35 aa, Artificial Sequence; identical to SEQ ID NO: 26540
  GFR-binding peptide
  MOD_RES (1), (3), (35): Xaa is C or S

SEQ ID NO: 41492 - protein, 34 aa, Artificial Sequence; identical to SEQ ID NO: 25500
  GFR-binding peptide
  MOD_RES (34), (34): Xaa is C or S
  MOD_RES (12), (13), (14), (15), (16): Xaa is A or G
  MOD_RES (17), (18), (19), (20): Xaa is A or G or is absent

SEQ ID NO: 41493 - protein, 39 aa, Artificial Sequence; identical to SEQ ID NO: 23478
  GFR-binding peptide
  MOD_RES (1), (3), (35), (36): Xaa is C or S

SEQ ID NO: 41494 - protein, 40 aa, Artificial Sequence; identical to SEQ ID NO: 23480
  GFR-binding peptide
  MOD_RES (35), (36): Xaa is C or S
  MOD_RES (13), (14), (15), (16), (17): Xaa is A or G
  MOD_RES (18), (19), (20), (21): Xaa is A or G or is absent

SEQ ID NO: 41495 - protein, 39 aa, Artificial Sequence; identical to SEQ ID NO: 23482
  GFR-binding peptide
  MOD_RES (1), (35), (36): Xaa is C or S
  MOD_RES (13), (14), (15), (16), (17): Xaa is A or G
  MOD_RES (18), (19), (20), (21): Xaa is A or G or is absent

SEQ ID NO: 41496 - protein, 40 aa, Artificial Sequence; identical to SEQ ID NO: 25505
  GFR-binding peptide
  MOD_RES (2), (34), (35): Xaa is C or S

SEQ ID NO: 41497 - protein, 41 aa, Artificial Sequence; identical to SEQ ID NO: 24477
  GFR-binding peptide
  MOD_RES (2), (4), (36), (37): Xaa is C or S

SEQ ID NO: 41498 - protein, 42 aa, Artificial Sequence; identical to SEQ ID NO: 24478
  GFR-binding peptide
  MOD_RES (1), (3), (37), (38): Xaa is C or S
  MOD_RES (15), (16), (17), (18), (19): Xaa is A or G
  MOD_RES (20), (21), (22), (23): Xaa is A or G or is absent

SEQ ID NO: 41499 - protein, 37 aa, Artificial Sequence; identical to SEQ ID NO: 23486
  GFR-binding peptide
  MOD_RES (2), (36), (37): Xaa is C or S
  MOD_RES (14), (15), (16), (17), (18): Xaa is A or G
  MOD_RES (19), (20), (21), (22): Xaa is A or G or is absent

SEQ ID NO: 41500 - protein, 40 aa, Artificial Sequence; identical to SEQ ID NO: 25507
  GFR-binding peptide
  MOD_RES (2), (34), (35): Xaa is C or S

SEQ ID NO: 41501 - protein, 37 aa, Artificial Sequence; identical to SEQ ID NO: 26547
  GFR-binding peptide
  MOD_RES (2), (4): Xaa is C or S
  MOD_RES (16), (17), (18), (19), (20): Xaa is A or G
  MOD_RES (21), (22), (23), (24): Xaa is A or G or is absent

SEQ ID NO: 41502 - protein, 32 aa, Artificial Sequence; identical to SEQ ID NO: 26551
  GFR-binding peptide
  MOD_RES (11), (12), (13), (14), (15): Xaa is A or G
  MOD_RES (16), (17), (18), (19): Xaa is A or G or is absent

SEQ ID NO: 41503 - protein, 34 aa, Artificial Sequence; identical to SEQ ID NO: 23490
  GFR-binding peptide
  MOD_RES (31), (32): Xaa is C or S

SEQ ID NO: 41504 - protein, 34 aa, Artificial Sequence; identical to SEQ ID NO: 25511
  GFR-binding peptide
  MOD_RES (1), (33), (34): Xaa is C or S

SEQ ID NO: 41505 - protein, 35 aa, Artificial Sequence; identical to SEQ ID NO: 25515
  GFR-binding peptide
  MOD_RES (2), (4): Xaa is C or S

SEQ ID NO: 41506 - protein, 36 aa, Artificial Sequence; identical to SEQ ID NO: 24485
  GFR-binding peptide
  MOD_RES (1), (33), (34): Xaa is C or S

SEQ ID NO: 41507 - protein, 40 aa, Artificial Sequence; identical to SEQ ID NO: 24490
  GFR-binding peptide
  MOD_RES (2), (4), (36), (37): Xaa is C or S

SEQ ID NO: 41508 - protein, 37 aa, Artificial Sequence; identical to SEQ ID NO: 23497
  GFR-binding peptide
  MOD_RES (34), (35): Xaa is C or S
  MOD_RES (12), (13), (14), (15), (16): Xaa is A or G
  MOD_RES (17), (18), (19), (20): Xaa is A or G or is absent

SEQ ID NO: 41509 - protein, 35 aa, Artificial Sequence; identical to SEQ ID NO: 25522
  GFR-binding peptide
  MOD_RES (1), (3), (35): Xaa is C or S

SEQ ID NO: 41510 - protein, 39 aa, Artificial Sequence; identical to SEQ ID NO: 23502
  GFR-binding peptide
  MOD_RES (2), (36), (37): Xaa is C or S
  MOD_RES (14), (15), (16), (17), (18): Xaa is A or G
  MOD_RES (19), (20), (21), (22): Xaa is A or G or is absent

SEQ ID NO: 41511 - protein, 44 aa, Artificial Sequence; identical to SEQ ID NO: 25524
  GFR-binding peptide
  MOD_RES (2), (4), (38), (39): Xaa is C or S
  MOD_RES (16), (17), (18), (19), (20): Xaa is A or G
  MOD_RES (21), (22), (23), (24): Xaa is A or G or is absent

SEQ ID NO: 41512 - protein, 37 aa, Artificial Sequence; identical to SEQ ID NO: 24501
  GFR-binding peptide
  MOD_RES (1), (35), (36): Xaa is C or S
  MOD_RES (13), (14), (15), (16), (17): Xaa is A or G
  MOD_RES (18), (19), (20), (21): Xaa is A or G or is absent

SEQ ID NO: 41513 - protein, 37 aa, Artificial Sequence
  GFR-binding peptide
  MOD_RES (2), (34), (35): Xaa is C or S
GXRDVVMGEYQKYIIQQKDNIYLMSIPSMKTPTXXPG

SEQ ID NO: 41514 - protein, 41 aa, Artificial Sequence; identical to SEQ ID NO: 25530
  GFR-binding peptide
  MOD_RES (1), (3), (35), (36): Xaa is C or S

SEQ ID NO: 41515 - protein, 33 aa, Artificial Sequence; identical to SEQ ID NO: 26558
  GFR-binding peptide
  MOD_RES (33), (33): Xaa is C or S
  MOD_RES (11), (12), (13), (14), (15): Xaa is A or G
  MOD_RES (16), (17), (18), (19): Xaa is A or G or is absent

SEQ ID NO: 41516 - protein, 40 aa, Artificial Sequence; identical to SEQ ID NO: 23505
  GFR-binding peptide
  MOD_RES (1), (35): Xaa is C or S
  MOD_RES (13), (14), (15), (16), (17): Xaa is A or G
  MOD_RES (18), (19), (20), (21): Xaa is A or G or is absent

SEQ ID NO: 41517 - protein, 39 aa, Artificial Sequence; identical to SEQ ID NO: 26559
  GFR-binding peptide
  MOD_RES (1), (33), (34): Xaa is C or S

SEQ ID NO: 41518 - protein, 41 aa, Artificial Sequence; identical to SEQ ID NO: 25532
  GFR-binding peptide
  MOD_RES (2), (36): Xaa is C or S
  MOD_RES (14), (15), (16), (17), (18): Xaa is A or G
  MOD_RES (19), (20), (21), (22): Xaa is A or G or is absent

SEQ ID NO: 41519 - protein, 34 aa, Artificial Sequence
  GFR-binding peptide
  MOD_RES (32), (33): Xaa is C or S
RDVVMGEYQKYIIQQKDNIYLMSIPSMKTPTXXP

SEQ ID NO: 41520 - protein, 36 aa, Artificial Sequence; identical to SEQ ID NO: 23506
  GFR-binding peptide
  MOD_RES (34), (34): Xaa is C or S
  MOD_RES (12), (13), (14), (15), (16): Xaa is A or G
  MOD_RES (17), (18), (19), (20): Xaa is A or G or is absent

SEQ ID NO: 41521 - protein, 35 aa, Artificial Sequence; identical to SEQ ID NO: 25533
  GFR-binding peptide
  MOD_RES (31), (32): Xaa is C or S

SEQ ID NO: 41522 - protein, 38 aa, Artificial Sequence; identical to SEQ ID NO: 25538
  GFR-binding peptide
  MOD_RES (34), (35): Xaa is C or S
  MOD_RES (12), (13), (14), (15), (16): Xaa is A or G
  MOD_RES (17), (18), (19), (20): Xaa is A or G or is absent

SEQ ID NO: 41523 - protein, 33 aa, Artificial Sequence; identical to SEQ ID NO: 26564
  GFR-binding peptide
  MOD_RES (31), (31): Xaa is C or S

SEQ ID NO: 41524 - protein, 37 aa, Artificial Sequence
  GFR-binding peptide
  MOD_RES (1), (35), (36): Xaa is C or S
  MOD_RES (13), (14), (15), (16), (17): Xaa is A or G
  MOD_RES (18), (19), (20), (21): Xaa is A or G or is absent
XRDVVMGEYQKYXXXXXXXXXIYLMSIPSMKTPTXXP

SEQ ID NO: 41525 - protein, 40 aa, Artificial Sequence; identical to SEQ ID NO: 23509
  GFR-binding peptide
  MOD_RES (2), (4), (38), (39): Xaa is C or S
  MOD_RES (16), (17), (18), (19), (20): Xaa is A or G
  MOD_RES (21), (22), (23), (24): Xaa is A or G or is absent

SEQ ID NO: 41526 - protein, 41 aa, Artificial Sequence
  GFR-binding peptide
  MOD_RES (1), (3), (35), (36): Xaa is C or S
XGXRDVVMGEYQKYIIQQKDNIYLMSIPSMKTPTXXPGASG

SEQ ID NO: 41527 - protein, 43 aa, Artificial Sequence; identical to SEQ ID NO: 26567
  GFR-binding peptide
  MOD_RES (1), (3), (37), (38): Xaa is C or S
  MOD_RES (15), (16), (17), (18), (19): Xaa is A or G
  MOD_RES (20), (21), (22), (23): Xaa is A or G or is absent

SEQ ID NO: 41528 - protein, 34 aa, Artificial Sequence; identical to SEQ ID NO: 25542
  GFR-binding peptide
  MOD_RES (31), (31): Xaa is C or S

SEQ ID NO: 41529 - protein, 40 aa, Artificial Sequence; identical to SEQ ID NO: 23512
  GFR-binding peptide
  MOD_RES (34), (35): Xaa is C or S
  MOD_RES (12), (13), (14), (15), (16): Xaa is A or G
  MOD_RES (17), (18), (19), (20): Xaa is A or G or is absent

SEQ ID NO: 41530 - protein, 40 aa, Artificial Sequence; identical to SEQ ID NO: 24518
  GFR-binding peptide
  MOD_RES (2), (4), (38), (39): Xaa is C or S
  MOD_RES (16), (17), (18), (19), (20): Xaa is A or G
  MOD_RES (21), (22), (23), (24): Xaa is A or G or is absent

SEQ ID NO: 41531 - protein, 39 aa, Artificial Sequence; identical to SEQ ID NO: 26572
  GFR-binding peptide
  MOD_RES (2), (4), (36), (37): Xaa is C or S

SEQ ID NO: 41532 - protein, 38 aa, Artificial Sequence; identical to SEQ ID NO: 26573
  GFR-binding peptide
  MOD_RES (2), (4), (36), (37): Xaa is C or S

SEQ ID NO: 41533 - protein, 35 aa, Artificial Sequence; identical to SEQ ID NO: 25548
  GFR-binding peptide
  MOD_RES (34), (35): Xaa is C or S
  MOD_RES (12), (13), (14), (15), (16): Xaa is A or G
  MOD_RES (17), (18), (19), (20): Xaa is A or G or is absent

SEQ ID NO: 41534 - protein, 36 aa, Artificial Sequence; identical to SEQ ID NO: 26576
  GFR-binding peptide
  MOD_RES (33), (33): Xaa is C or S
  MOD_RES (11), (12), (13), (14), (15): Xaa is A or G
  MOD_RES (16), (17), (18), (19): Xaa is A or G or is absent

SEQ ID NO: 41535 - protein, 36 aa, Artificial Sequence; identical to SEQ ID NO: 23521
  GFR-binding peptide
  MOD_RES (33), (34): Xaa is C or S
  MOD_RES (11), (12), (13), (14), (15): Xaa is A or G
  MOD_RES (16), (17), (18), (19): Xaa is A or G or is absent

SEQ ID NO: 41536 - protein, 41 aa, Artificial Sequence; identical to SEQ ID NO: 23524
  GFR-binding peptide
  MOD_RES (2), (4), (36), (37): Xaa is C or S

SEQ ID NO: 41537 - protein, 41 aa, Artificial Sequence; identical to SEQ ID NO: 25553
  GFR-binding peptide
  MOD_RES (2), (4), (36): Xaa is C or S

SEQ ID NO: 41538 - protein, 33 aa, Artificial Sequence
  GFR-binding peptide
  MOD_RES (31), (32): Xaa is C or S
EEVIMEYQKYLLVRGNDIYLMSIPSTKVPAXXT

SEQ ID NO: 41539 - protein, 39 aa, Artificial Sequence; identical to SEQ ID NO: 23530
  GFR-binding peptide
  MOD_RES (1), (33), (34): Xaa is C or S

SEQ ID NO: 41540 - protein, 36 aa, Artificial Sequence; identical to SEQ ID NO: 24529
  GFR-binding peptide
  MOD_RES (1), (3), (35), (36): Xaa is C or S

SEQ ID NO: 41541 - protein, 36 aa, Artificial Sequence; identical to SEQ ID NO: 24530
  GFR-binding peptide
  MOD_RES (34), (35): Xaa is C or S
  MOD_RES (12), (13), (14), (15), (16): Xaa is A or G
  MOD_RES (17), (18), (19), (20): Xaa is A or G or is absent

SEQ ID NO: 41542 - protein, 34 aa, Artificial Sequence; identical to SEQ ID NO: 25558
  GFR-binding peptide
  MOD_RES (1), (3): Xaa is C or S

SEQ ID NO: 41543 - protein, 34 aa, Artificial Sequence; identical to SEQ ID NO: 26586
  GFR-binding peptide
  MOD_RES (1), (1): Xaa is C or S
  MOD_RES (13), (14), (15), (16), (17): Xaa is A or G
  MOD_RES (18), (19), (20), (21): Xaa is A or G or is absent

SEQ ID NO: 41544 - protein, 40 aa, Artificial Sequence; identical to SEQ ID NO: 23534
  GFR-binding peptide
  MOD_RES (1), (3), (35), (36): Xaa is C or S

SEQ ID NO: 41545 - protein, 42 aa, Artificial Sequence; identical to SEQ ID NO: 23535
  GFR-binding peptide
  MOD_RES (2), (36): Xaa is C or S
  MOD_RES (14), (15), (16), (17), (18): Xaa is A or G
  MOD_RES (19), (20), (21), (22): Xaa is A or G or is absent

SEQ ID NO: 41546 - protein, 34 aa, Artificial Sequence
  GFR-binding peptide
  MOD_RES (1), (3): Xaa is C or S
XGXRDVVMGEYQKYIIQQKDNIYLMSIPSMKTPT

SEQ ID NO: 41547 - protein, 41 aa, Artificial Sequence; identical to SEQ ID NO: 24535
  GFR-binding peptide
  MOD_RES (2), (4), (38): Xaa is C or S
  MOD_RES (16), (17), (18), (19), (20): Xaa is A or G
  MOD_RES (21), (22), (23), (24): Xaa is A or G or is absent

SEQ ID NO: 41548 - protein, 38 aa, Artificial Sequence
  GFR-binding peptide
  MOD_RES (1), (3), (34), (35): Xaa is C or S
XGXEEVIMEYQKYLLVRGNDIYLMSIPSTKVPAXXTSP

SEQ ID NO: 41549 - protein, 37 aa, Artificial Sequence
  GFR-binding peptide
  MOD_RES (1), (3), (37): Xaa is C or S
  MOD_RES (15), (16), (17), (18), (19): Xaa is A or G
  MOD_RES (20), (21), (22), (23): Xaa is A or G or is absent
XGXRDVVMGEYQKYXXXXXXXXXIYLMSIPSMKTPTX

SEQ ID NO: 41550 - protein, 40 aa, Artificial Sequence; identical to SEQ ID NO: 24536
  GFR-binding peptide
  MOD_RES (2), (36), (37): Xaa is C or S
  MOD_RES (14), (15), (16), (17), (18): Xaa is A or G
  MOD_RES (19), (20), (21), (22): Xaa is A or G or is absent

SEQ ID NO: 41551 - protein, 37 aa, Artificial Sequence; identical to SEQ ID NO: 23544
  GFR-binding peptide
  MOD_RES (1), (3), (35): Xaa is C or S

SEQ ID NO: 41552 - protein, 37 aa, Artificial Sequence; identical to SEQ ID NO: 23547
  GFR-binding peptide
  MOD_RES (2), (4), (36), (37): Xaa is C or S

SEQ ID NO: 41553 - protein, 34 aa, Artificial Sequence; identical to SEQ ID NO: 23549
  GFR-binding peptide
  MOD_RES (33), (34): Xaa is C or S
  MOD_RES (11), (12), (13), (14), (15): Xaa is A or G
  MOD_RES (16), (17), (18), (19): Xaa is A or G or is absent

SEQ ID NO: 41554 - protein, 39 aa, Artificial Sequence
  GFR-binding peptide
  MOD_RES (33), (34): Xaa is C or S
  MOD_RES (11), (12), (13), (14), (15): Xaa is A or G
  MOD_RES (16), (17), (18), (19): Xaa is A or G or is absent
DVVMGEYQKYXXXXXXXXXIYLMSIPSMKTPTXXPGASG

SEQ ID NO: 41555 - protein, 36 aa, Artificial Sequence; identical to SEQ ID NO: 26594
  GFR-binding peptide
  MOD_RES (1), (3): Xaa is C or S
  MOD_RES (15), (16), (17), (18), (19): Xaa is A or G
  MOD_RES (20), (21), (22), (23): Xaa is A or G or is absent

SEQ ID NO: 41556 - protein, 37 aa, Artificial Sequence; identical to SEQ ID NO: 26597
  GFR-binding peptide
  MOD_RES (1), (33), (34): Xaa is C or S

SEQ ID NO: 41557 - protein, 38 aa, Artificial Sequence; identical to SEQ ID NO: 24543
  GFR-binding peptide
  MOD_RES (2), (36): Xaa is C or S
  MOD_RES (14), (15), (16), (17), (18): Xaa is A or G
  MOD_RES (19), (20), (21), (22): Xaa is A or G or is absent

SEQ ID NO: 41558 - protein, 36 aa, Artificial Sequence; identical to SEQ ID NO: 23552
  GFR-binding peptide
  MOD_RES (2), (4), (36): Xaa is C or S

SEQ ID NO: 41559 - protein, 36 aa, Artificial Sequence; identical to SEQ ID NO: 24546
  GFR-binding peptide
  MOD_RES (1), (3), (35): Xaa is C or S

SEQ ID NO: 41560 - protein, 37 aa, Artificial Sequence
  GFR-binding peptide
  MOD_RES (1), (33), (34): Xaa is C or S
XRDVVMGEYQKYIIQQKDNIYLMSIPSMKTPTXXPGA

SEQ ID NO: 41561 - protein, 36 aa, Artificial Sequence; identical to SEQ ID NO: 24549
  GFR-binding peptide
  MOD_RES (1), (35), (36): Xaa is C or S
  MOD_RES (13), (14), (15), (16), (17): Xaa is A or G
  MOD_RES (18), (19), (20), (21): Xaa is A or G or is absent

SEQ ID NO: 41562 - protein, 39 aa, Artificial Sequence; identical to SEQ ID NO: 25578
  GFR-binding peptide
  MOD_RES (2), (4), (36), (37): Xaa is C or S

SEQ ID NO: 41563 - protein, 39 aa, Artificial Sequence; identical to SEQ ID NO: 23556
  GFR-binding peptide
  MOD_RES (2), (4), (36), (37): Xaa is C or S

SEQ ID NO: 41564 - protein, 35 aa, Artificial Sequence; identical to SEQ ID NO: 23558
  GFR-binding peptide
  MOD_RES (1), (33), (34): Xaa is C or S

SEQ ID NO: 41565 - protein, 41 aa, Artificial Sequence; identical to SEQ ID NO: 26600
  GFR-binding peptide
  MOD_RES (1), (3), (37), (38): Xaa is C or S
  MOD_RES (15), (16), (17), (18), (19): Xaa is A or G
  MOD_RES (20), (21), (22), (23): Xaa is A or G or is absent

SEQ ID NO: 41566 - protein, 39 aa, Artificial Sequence; identical to SEQ ID NO: 23562
  GFR-binding peptide
  MOD_RES (2), (4), (38), (39): Xaa is C or S
  MOD_RES (16), (17), (18), (19), (20): Xaa is A or G
  MOD_RES (21), (22), (23), (24): Xaa is A or G or is absent

SEQ ID NO: 41567 - protein, 35 aa, Artificial Sequence; identical to SEQ ID NO: 25581
  GFR-binding peptide
  MOD_RES (32), (33): Xaa is C or S

SEQ ID NO: 41568 - protein, 37 aa, Artificial Sequence; identical to SEQ ID NO: 24552
  GFR-binding peptide
  MOD_RES (34), (35): Xaa is C or S
  MOD_RES (12), (13), (14), (15), (16): Xaa is A or G
  MOD_RES (17), (18), (19), (20): Xaa is A or G or is absent

SEQ ID NO: 41569 - protein, 34 aa, Artificial Sequence
  GFR-binding peptide
  MOD_RES (2), (4): Xaa is C or S
LXGXEEVIMEYQKYLLVRGNDIYLMSIPSTKVPA

SEQ ID NO: 41570 - protein, 34 aa, Artificial Sequence; identical to SEQ ID NO: 24553
  GFR-binding peptide
  MOD_RES (32), (33): Xaa is C or S

SEQ ID NO: 41571 - protein, 38 aa, Artificial Sequence; identical to SEQ ID NO: 26603
  GFR-binding peptide
  MOD_RES (1), (33), (34): Xaa is C or S

SEQ ID NO: 41572 - protein, 44 aa, Artificial Sequence; identical to SEQ ID NO: 26604
  GFR-binding peptide
  MOD_RES (2), (4), (39), (40): Xaa is C or S
  MOD_RES (17), (18), (19), (20), (21): Xaa is A or G
  MOD_RES (22), (23), (24), (25): Xaa is A or G or is absent

SEQ ID NO: 41573 - protein, 41 aa, Artificial Sequence; identical to SEQ ID NO: 23566
  GFR-binding peptide
  MOD_RES (1), (35), (36): Xaa is C or S
  MOD_RES (13), (14), (15), (16), (17): Xaa is A or G
  MOD_RES (18), (19), (20), (21): Xaa is A or G or is absent

SEQ ID NO: 41574 - protein, 42 aa, Artificial Sequence; identical to SEQ ID NO: 24555
  GFR-binding peptide
  MOD_RES (2), (36), (37): Xaa is C or S
  MOD_RES (14), (15), (16), (17), (18): Xaa is A or G
  MOD_RES (19), (20), (21), (22): Xaa is A or G or is absent

SEQ ID NO: 41575 - protein, 36 aa, Artificial Sequence
  GFR-binding peptide
  MOD_RES (32), (33): Xaa is C or S
RDVVMGEYQKYIIQQKDNIYLMSIPSMKTPTXXPGA

SEQ ID NO: 41576 - protein, 38 aa, Artificial Sequence
  GFR-binding peptide
  MOD_RES (1), (34), (35): Xaa is C or S
  MOD_RES (12), (13), (14), (15), (16): Xaa is A or G
  MOD_RES (17), (18), (19), (20): Xaa is A or G or is absent
XEEVIMEYQKYXXXXXXXXXIYLMSIPSTKVPAXXTSP

SEQ ID NO: 41577 - protein, 37 aa, Artificial Sequence; identical to SEQ ID NO: 23567
  GFR-binding peptide
  MOD_RES (1), (35): Xaa is C or S
  MOD_RES (13), (14), (15), (16), (17): Xaa is A or G
  MOD_RES (18), (19), (20), (21): Xaa is A or G or is absent

SEQ ID NO: 41578 - protein, 34 aa, Artificial Sequence; identical to SEQ ID NO: 23568
  GFR-binding peptide
  MOD_RES (31), (32): Xaa is C or S

SEQ ID NO: 41579 - protein, 41 aa, Artificial Sequence; identical to SEQ ID NO: 25590
  GFR-binding peptide
  MOD_RES (1), (35), (36): Xaa is C or S
  MOD_RES (13), (14), (15), (16), (17): Xaa is A or G
  MOD_RES (18), (19), (20), (21): Xaa is A or G or is absent

SEQ ID NO: 41580 - protein, 36 aa, Artificial Sequence; identical to SEQ ID NO: 23569
  GFR-binding peptide
  MOD_RES (2), (4), (36): Xaa is C or S

SEQ ID NO: 41581 - protein, 37 aa, Artificial Sequence; identical to SEQ ID NO: 25592
  GFR-binding peptide
  MOD_RES (2), (4): Xaa is C or S
  MOD_RES (16), (17), (18), (19), (20): Xaa is A or G
  MOD_RES (21), (22), (23), (24): Xaa is A or G or is absent

SEQ ID NO: 41582 - protein, 37 aa, Artificial Sequence; identical to SEQ ID NO: 25594
  GFR-binding peptide
  MOD_RES (2), (36), (37): Xaa is C or S
  MOD_RES (14), (15), (16), (17), (18): Xaa is A or G
  MOD_RES (19), (20), (21), (22): Xaa is A or G or is absent

SEQ ID NO: 41583 - protein, 36 aa, Artificial Sequence; identical to SEQ ID NO: 23573
  GFR-binding peptide
  MOD_RES (33), (34): Xaa is C or S
  MOD_RES (11), (12), (13), (14), (15): Xaa is A or G
  MOD_RES (16), (17), (18), (19): Xaa is A or G or is absent

SEQ ID NO: 41584 - protein, 36 aa, Artificial Sequence; identical to SEQ ID NO: 26612
  GFR-binding peptide
  MOD_RES (2), (36): Xaa is C or S
  MOD_RES (14), (15), (16), (17), (18): Xaa is A or G
  MOD_RES (19), (20), (21), (22): Xaa is A or G or is absent

SEQ ID NO: 41585 - protein, 38 aa, Artificial Sequence; identical to SEQ ID NO: 24569
  GFR-binding peptide
  MOD_RES (2), (4), (38): Xaa is C or S
  MOD_RES (16), (17), (18), (19), (20): Xaa is A or G
  MOD_RES (21), (22), (23), (24): Xaa is A or G or is absent

SEQ ID NO: 41586 - protein, 42 aa, Artificial Sequence; identical to SEQ ID NO: 26614
  GFR-binding peptide
  MOD_RES (2), (4), (38), (39): Xaa is C or S
  MOD_RES (16), (17), (18), (19), (20): Xaa is A or G
  MOD_RES (21), (22), (23), (24): Xaa is A or G or is absent

SEQ ID NO: 41587 - protein, 35 aa, Artificial Sequence; identical to SEQ ID NO: 24572
  GFR-binding peptide
  MOD_RES (32), (33): Xaa is C or S

SEQ ID NO: 41588 - protein, 37 aa, Artificial Sequence; identical to SEQ ID NO: 25598
  GFR-binding peptide
  MOD_RES (32), (33): Xaa is C or S

SEQ ID NO: 41589 - protein, 34 aa, Artificial Sequence
  GFR-binding peptide
  MOD_RES (1), (34): Xaa is C or S
  MOD_RES (12), (13), (14), (15), (16): Xaa is A or G
  MOD_RES (17), (18), (19), (20): Xaa is A or G or is absent
XEEVIMEYQKYXXXXXXXXXIYLMSIPSTKVPAX

SEQ ID NO: 41590 - protein, 39 aa, Artificial Sequence; identical to SEQ ID NO: 23582
  GFR-binding peptide
  MOD_RES (2), (36), (37): Xaa is C or S
  MOD_RES (14), (15), (16), (17), (18): Xaa is A or G
  MOD_RES (19), (20), (21), (22): Xaa is A or G or is absent

SEQ ID NO: 41591 - protein, 36 aa, Artificial Sequence; identical to SEQ ID NO: 26623
  GFR-binding peptide
  MOD_RES (1), (3), (35), (36): Xaa is C or S

SEQ ID NO: 41592 - protein, 34 aa, Artificial Sequence; identical to SEQ ID NO: 24576
  GFR-binding peptide
  MOD_RES (1), (1): Xaa is C or S
  MOD_RES (13), (14), (15), (16), (17): Xaa is A or G
  MOD_RES (18), (19), (20), (21): Xaa is A or G or is absent

SEQ ID NO: 41593 - protein, 41 aa, Artificial Sequence; identical to SEQ ID NO: 24577
  GFR-binding peptide
  MOD_RES (2), (4), (38), (39): Xaa is C or S
  MOD_RES (16), (17), (18), (19), (20): Xaa is A or G
  MOD_RES (21), (22), (23), (24): Xaa is A or G or is absent

SEQ ID NO: 41594 - protein, 36 aa, Artificial Sequence; identical to SEQ ID NO: 23591
  GFR-binding peptide
  MOD_RES (2), (36): Xaa is C or S
  MOD_RES (14), (15), (16), (17), (18): Xaa is A or G
  MOD_RES (19), (20), (21), (22): Xaa is A or G or is absent

SEQ ID NO: 41595 - protein, 37 aa, Artificial Sequence; identical to SEQ ID NO: 23592
  GFR-binding peptide
  MOD_RES (2), (4), (36), (37): Xaa is C or S

SEQ ID NO: 41596 - protein, 38 aa, Artificial Sequence; identical to SEQ ID NO: 25602
  GFR-binding peptide
  MOD_RES (1), (3), (37), (38): Xaa is C or S
  MOD_RES (15), (16), (17), (18), (19): Xaa is A or G
  MOD_RES (20), (21), (22), (23): Xaa is A or G or is absent

SEQ ID NO: 41597 - protein, 36 aa, Artificial Sequence
  GFR-binding peptide
  MOD_RES (1), (3), (34), (35): Xaa is C or S
XGXEEVIMEYQKYLLVRGNDIYLMSIPSTKVPAXXT

SEQ ID NO: 41598 - protein, 38 aa, Artificial Sequence; identical to SEQ ID NO: 26628
  GFR-binding peptide
  MOD_RES (1), (33), (34): Xaa is C or S

SEQ ID NO: 41599 - protein, 41 aa, Artificial Sequence; identical to SEQ ID NO: 25604
  GFR-binding peptide
  MOD_RES (1), (35): Xaa is C or S
  MOD_RES (13), (14), (15), (16), (17): Xaa is A or G
  MOD_RES (18), (19), (20), (21): Xaa is A or G or is absent

SEQ ID NO: 41600 - protein, 38 aa, Artificial Sequence; identical to SEQ ID NO: 23597
  GFR-binding peptide
  MOD_RES (1), (35), (36): Xaa is C or S
  MOD_RES (13), (14), (15), (16), (17): Xaa is A or G
  MOD_RES (18), (19), (20), (21): Xaa is A or G or is absent

SEQ ID NO: 41601 - protein, 38 aa, Artificial Sequence
  GFR-binding peptide
  MOD_RES (34), (35): Xaa is C or S
  MOD_RES (12), (13), (14), (15), (16): Xaa is A or G
  MOD_RES (17), (18), (19), (20): Xaa is A or G or is absent
RDVVMGEYQKYXXXXXXXXXIYLMSIPSMKTPTXXPGA

SEQ ID NO: 41602 - protein, 40 aa, Artificial Sequence
  GFR-binding peptide
  MOD_RES (2), (4), (35), (36): Xaa is C or S
LXGXEEVIMEYQKYLLVRGNDIYLMSIPSTKVPAXXTSPV

SEQ ID NO: 41603 - protein, 36 aa, Artificial Sequence
  GFR-binding peptide
  MOD_RES (31), (32): Xaa is C or S
DVVMGEYQKYIIQQKDNIYLMSIPSMKTPTXXPGAS

SEQ ID NO: 41604 - protein, 34 aa, Artificial Sequence; identical to SEQ ID NO: 26633
  GFR-binding peptide
  MOD_RES (1), (33), (34): Xaa is C or S

SEQ ID NO: 41605 - protein, 39 aa, Artificial Sequence; identical to SEQ ID NO: 23601
  GFR-binding peptide
  MOD_RES (2), (34), (35): Xaa is C or S

SEQ ID NO: 41606 - protein, 38 aa, Artificial Sequence; identical to SEQ ID NO: 25607
  GFR-binding peptide
  MOD_RES (2), (4), (38): Xaa is C or S
  MOD_RES (16), (17), (18), (19), (20): Xaa is A or G
  MOD_RES (21), (22), (23), (24): Xaa is A or G or is absent

SEQ ID NO: 41607 - protein, 35 aa, Artificial Sequence; identical to SEQ ID NO: 25609
  GFR-binding peptide
  MOD_RES (2), (34), (35): Xaa is C or S

SEQ ID NO: 41608 - protein, 35 aa, Artificial Sequence; identical to SEQ ID NO: 23602
  GFR-binding peptide
  MOD_RES (33), (34): Xaa is C or S
  MOD_RES (11), (12), (13), (14), (15): Xaa is A or G
  MOD_RES (16), (17), (18), (19): Xaa is A or G or is absent

SEQ ID NO: 41609 - protein, 44 aa, Artificial Sequence; identical to SEQ ID NO: 24586
  GFR-binding peptide
  MOD_RES (1), (3), (38), (39): Xaa is C or S
  MOD_RES (16), (17), (18), (19), (20): Xaa is A or G
  MOD_RES (21), (22), (23), (24): Xaa is A or G or is absent

SEQ ID NO: 41610 - protein, 34 aa, Artificial Sequence; identical to SEQ ID NO: 24590
  GFR-binding peptide
  MOD_RES (1), (3): Xaa is C or S

SEQ ID NO: 41611 - protein, 34 aa, Artificial Sequence; identical to SEQ ID NO: 25611
  GFR-binding peptide
  MOD_RES (1), (33), (34): Xaa is C or S

SEQ ID NO: 41612 - protein, 40 aa, Artificial Sequence; identical to SEQ ID NO: 24591
  GFR-binding peptide
  MOD_RES (2), (34): Xaa is C or S

SEQ ID NO: 41613 - protein, 38 aa, Artificial Sequence; identical to SEQ ID NO: 26636
  GFR-binding peptide
  MOD_RES (2), (36), (37): Xaa is C or S
  MOD_RES (14), (15), (16), (17), (18): Xaa is A or G
  MOD_RES (19), (20), (21), (22): Xaa is A or G or is absent

SEQ ID NO: 41614 - protein, 38 aa, Artificial Sequence; identical to SEQ ID NO: 24594
  GFR-binding peptide
  MOD_RES (32), (33): Xaa is C or S

SEQ ID NO: 41615 - protein, 36 aa, Artificial Sequence; identical to SEQ ID NO: 23606
  GFR-binding peptide
  MOD_RES (32), (32): Xaa is C or S

SEQ ID NO: 41616 - protein, 36 aa, Artificial Sequence; identical to SEQ ID NO: 25614
  GFR-binding peptide
  MOD_RES (2), (36): Xaa is C or S
  MOD_RES (14), (15), (16), (17), (18): Xaa is A or G
  MOD_RES (19), (20), (21), (22): Xaa is A or G or is absent

SEQ ID NO: 41617 - protein, 36 aa, Artificial Sequence; identical to SEQ ID NO: 24595
  GFR-binding peptide
  MOD_RES (33), (34): Xaa is C or S

SEQ ID NO: 41618 - protein, 37 aa, Artificial Sequence; identical to SEQ ID NO: 26641
  GFR-binding peptide
  MOD_RES (33), (34): Xaa is C or S
  MOD_RES (11), (12), (13), (14), (15): Xaa is A or G
  MOD_RES (16), (17), (18), (19): Xaa is A or G or is absent

SEQ ID NO: 41619 - protein, 38 aa, Artificial Sequence; identical to SEQ ID NO: 25616
  GFR-binding peptide
  MOD_RES (1), (35): Xaa is C or S
  MOD_RES (13), (14), (15), (16), (17): Xaa is A or G
  MOD_RES (18), (19), (20), (21): Xaa is A or G or is absent

SEQ ID NO: 41620 - protein, 34 aa, Artificial Sequence; identical to SEQ ID NO: 23611
  GFR-binding peptide
  MOD_RES (32), (33): Xaa is C or S

SEQ ID NO: 41621 - protein, 39 aa, Artificial Sequence; identical to SEQ ID NO: 24603
  GFR-binding peptide
  MOD_RES (2), (4), (37), (38): Xaa is C or S

SEQ ID NO: 41622 - protein, 44 aa, Artificial Sequence
  GFR-binding peptide
  MOD_RES (2), (4), (38), (39): Xaa is C or S
  MOD_RES (16), (17), (18), (19), (20): Xaa is A or G
  MOD_RES (21), (22), (23), (24): Xaa is A or G or is absent
SXGXRDVVMGEYQKYXXXXXXXXXIYLMSIPSMKTPTXXPGASG

SEQ ID NO: 41623 - protein, 41 aa, Artificial Sequence; identical to SEQ ID NO: 26644
  GFR-binding peptide
  MOD_RES (2), (37), (38): Xaa is C or S
  MOD_RES (15), (16), (17), (18), (19): Xaa is A or G
  MOD_RES (20), (21), (22), (23): Xaa is A or G or is absent

SEQ ID NO: 41624 - protein, 34 aa, Artificial Sequence; identical to SEQ ID NO: 25619
  GFR-binding peptide
  MOD_RES (34), (34): Xaa is C or S
  MOD_RES (12), (13), (14), (15), (16): Xaa is A or G
  MOD_RES (17), (18), (19), (20): Xaa is A or G or is absent

SEQ ID NO: 41625 - protein, 35 aa, Artificial Sequence; identical to SEQ ID NO: 24605
  GFR-binding peptide
  MOD_RES (2), (34), (35): Xaa is C or S

SEQ ID NO: 41626 - protein, 38 aa, Artificial Sequence
  GFR-binding peptide
  MOD_RES (1), (3), (35), (36): Xaa is C or S
XGXRDVVMGEYQKYIIQQKDNIYLMSIPSMKTPTXXPG

SEQ ID NO: 41627 - protein, 41 aa, Artificial Sequence; identical to SEQ ID NO: 23614
  GFR-binding peptide
  MOD_RES (2), (36), (37): Xaa is C or S
  MOD_RES (14), (15), (16), (17), (18): Xaa is A or G
  MOD_RES (19), (20), (21), (22): Xaa is A or G or is absent

SEQ ID NO: 41628 - protein, 36 aa, Artificial Sequence
  GFR-binding peptide
  MOD_RES (1), (35), (36): Xaa is C or S
  MOD_RES (13), (14), (15), (16), (17): Xaa is A or G
  MOD_RES (18), (19), (20), (21): Xaa is A or G or is absent
XRDVVMGEYQKYXXXXXXXXXIYLMSIPSMKTPTXX

SEQ ID NO: 41629 - protein, 41 aa, Artificial Sequence; identical to SEQ ID NO: 24606
  GFR-binding peptide
  MOD_RES (1), (35), (36): Xaa is C or S
  MOD_RES (13), (14), (15), (16), (17): Xaa is A or G
  MOD_RES (18), (19), (20), (21): Xaa is A or G or is absent

SEQ ID NO: 41630 - protein, 39 aa, Artificial Sequence; identical to SEQ ID NO: 25622
  GFR-binding peptide
  MOD_RES (33), (34): Xaa is C or S
  MOD_RES (11), (12), (13), (14), (15): Xaa is A or G
  MOD_RES (16), (17), (18), (19): Xaa is A or G or is absent

SEQ ID NO: 41631 - protein, 41 aa, Artificial Sequence; identical to SEQ ID NO: 23619
  GFR-binding peptide
  MOD_RES (2), (4), (37), (38): Xaa is C or S

SEQ ID NO: 41632 - protein, 40 aa, Artificial Sequence; identical to SEQ ID NO: 24610
  GFR-binding peptide
  MOD_RES (1), (3), (35): Xaa is C or S

SEQ ID NO: 41633 - protein, 31 aa, Artificial Sequence
  GFR-binding peptide
RDVVMGEYQKYIIQQKDNIYLMSIPSMKTPT

SEQ ID NO: 41634 - protein, 44 aa, Artificial Sequence
  GFR-binding peptide
  MOD_RES (2), (4), (38), (39): Xaa is C or S
  MOD_RES (16), (17), (18), (19), (20): Xaa is A or G
  MOD_RES (21), (22), (23), (24): Xaa is A or G or is absent
RXGXSEVVMDEYQKYXXXXXXXXXIYLISIPSLRTPVXXTPPTS

SEQ ID NO: 41635 - protein, 39 aa, Artificial Sequence; identical to SEQ ID NO: 25630
  GFR-binding peptide
  MOD_RES (33), (34): Xaa is C or S
  MOD_RES (11), (12), (13), (14), (15): Xaa is A or G
  MOD_RES (16), (17), (18), (19): Xaa is A or G or is absent

SEQ ID NO: 41636 - protein, 35 aa, Artificial Sequence; identical to SEQ ID NO: 24612
  GFR-binding peptide
  MOD_RES (1), (3), (35): Xaa is C or S

SEQ ID NO: 41637 - protein, 43 aa, Artificial Sequence; identical to SEQ ID NO: 26654
  GFR-binding peptide
  MOD_RES (2), (4), (38), (39): Xaa is C or S
  MOD_RES (16), (17), (18), (19), (20): Xaa is A or G
  MOD_RES (21), (22), (23), (24): Xaa is A or G or is absent

SEQ ID NO: 41638 - protein, 34 aa, Artificial Sequence; identical to SEQ ID NO: 23625
  GFR-binding peptide
  MOD_RES (1), (1): Xaa is C or S
  MOD_RES (13), (14), (15), (16), (17): Xaa is A or G
  MOD_RES (18), (19), (20), (21): Xaa is A or G or is absent

SEQ ID NO: 41639 - protein, 42 aa, Artificial Sequence; identical to SEQ ID NO: 23626
  GFR-binding peptide
  MOD_RES (2), (4), (37), (38): Xaa is C or S

SEQ ID NO: 41640 - protein, 42 aa, Artificial Sequence
  GFR-binding peptide
  MOD_RES (2), (36), (37): Xaa is C or S
  MOD_RES (14), (15), (16), (17), (18): Xaa is A or G
  MOD_RES (19), (20), (21), (22): Xaa is A or G or is absent
GXSRVVMNEYQKYXXXXXXXXXIYLVSIPSLKTPAXXPKPVH

SEQ ID NO: 41641 - protein, 34 aa, Artificial Sequence; identical to SEQ ID NO: 25639
  GFR-binding peptide
  MOD_RES (32), (33): Xaa is C or S

SEQ ID NO: 41642 - protein, 36 aa, Artificial Sequence
  GFR-binding peptide
  MOD_RES (2), (4), (35), (36): Xaa is C or S
LXGXEEVIMEYQKYLLVRGNDIYLMSIPSTKVPAXX

SEQ ID NO: 41643 - protein, 41 aa, Artificial Sequence; identical to SEQ ID NO: 26661
  GFR-binding peptide
  MOD_RES (2), (4), (36), (37): Xaa is C or S

SEQ ID NO: 41644 - protein, 37 aa, Artificial Sequence; identical to SEQ ID NO: 25643
  GFR-binding peptide
  MOD_RES (2), (4), (36), (37): Xaa is C or S

SEQ ID NO: 41645 - protein, 40 aa, Artificial Sequence
  GFR-binding peptide
  MOD_RES (2), (4), (36), (37): Xaa is C or S
SXGXRDVVMGEYQKYIIQQKDNIYLMSIPSMKTPTXXPGA

SEQ ID NO: 41646 - protein, 36 aa, Artificial Sequence
  GFR-binding peptide
  MOD_RES (2), (34), (35): Xaa is C or S
GXRDVVMGEYQKYIIQQKDNIYLMSIPSMKTPTXXP

SEQ ID NO: 41647 - protein, 39 aa, Artificial Sequence; identical to SEQ ID NO: 23632
  GFR-binding peptide
  MOD_RES (34), (35): Xaa is C or S
  MOD_RES (12), (13), (14), (15), (16): Xaa is A or G
  MOD_RES (17), (18), (19), (20): Xaa is A or G or is absent

SEQ ID NO: 41648 - protein, 36 aa, Artificial Sequence; identical to SEQ ID NO: 25648
  GFR-binding peptide
  MOD_RES (34), (35): Xaa is C or S
  MOD_RES (12), (13), (14), (15), (16): Xaa is A or G
  MOD_RES (17), (18), (19), (20): Xaa is A or G or is absent

SEQ ID NO: 41649 - protein, 40 aa, Artificial Sequence; identical to SEQ ID NO: 26667
  GFR-binding peptide
  MOD_RES (2), (4), (36), (37): Xaa is C or S

SEQ ID NO: 41650 - protein, 40 aa, Artificial Sequence; identical to SEQ ID NO: 23633
  GFR-binding peptide
  MOD_RES (1), (3), (35), (36): Xaa is C or S

SEQ ID NO: 41651 - protein, 33 aa, Artificial Sequence; identical to SEQ ID NO: 26670
  GFR-binding peptide
  MOD_RES (12), (13), (14), (15), (16): Xaa is A or G
  MOD_RES (17), (18), (19), (20): Xaa is A or G or is absent

SEQ ID NO: 41652 - protein, 36 aa, Artificial Sequence; identical to SEQ ID NO: 25650
  GFR-binding peptide
  MOD_RES (1), (35), (36): Xaa is C or S
  MOD_RES (13), (14), (15), (16), (17): Xaa is A or G
  MOD_RES (18), (19), (20), (21): Xaa is A or G or is absent

SEQ ID NO: 41653 - protein, 37 aa, Artificial Sequence; identical to SEQ ID NO: 25652
  GFR-binding peptide
  MOD_RES (33), (34): Xaa is C or S

SEQ ID NO: 41654 - protein, 37 aa, Artificial Sequence; identical to SEQ ID NO: 23638
  GFR-binding peptide
  MOD_RES (2), (4), (36): Xaa is C or S

SEQ ID NO: 41655 - protein, 42 aa, Artificial Sequence; identical to SEQ ID NO: 25653
  GFR-binding peptide
  MOD_RES (1), (3), (37), (38): Xaa is C or S
  MOD_RES (15), (16), (17), (18), (19): Xaa is A or G
  MOD_RES (20), (21), (22), (23): Xaa is A or G or is absent

SEQ ID NO: 41656 - protein, 37 aa, Artificial Sequence; identical to SEQ ID NO: 23639
  GFR-binding peptide
  MOD_RES (1), (3), (37): Xaa is C or S
  MOD_RES (15), (16), (17), (18), (19): Xaa is A or G
  MOD_RES (20), (21), (22), (23): Xaa is A or G or is absent

SEQ ID NO: 41657 - protein, 39 aa, Artificial Sequence
  GFR-binding peptide
  MOD_RES (2), (4), (37), (38): Xaa is C or S
  MOD_RES (15), (16), (17), (18), (19): Xaa is A or G
  MOD_RES (20), (21), (22), (23): Xaa is A or G or is absent
LXGXEEVIMEYQKYXXXXXXXXXIYLMSIPSTKVPAXXT

SEQ ID NO: 41658 - protein, 40 aa, Artificial Sequence; identical to SEQ ID NO: 25656
  GFR-binding peptide
  MOD_RES (1), (35), (36): Xaa is C or S
  MOD_RES (13), (14), (15), (16), (17): Xaa is A or G
  MOD_RES (18), (19), (20), (21): Xaa is A or G or is absent

SEQ ID NO: 41659 - protein, 37 aa, Artificial Sequence; identical to SEQ ID NO: 23645
  GFR-binding peptide
  MOD_RES (32), (33): Xaa is C or S

SEQ ID NO: 41660 - protein, 36 aa, Artificial Sequence
  GFR-binding peptide
  MOD_RES (1), (34), (35): Xaa is C or S
  MOD_RES (12), (13), (14), (15), (16): Xaa is A or G
  MOD_RES (17), (18), (19), (20): Xaa is A or G or is absent
XEEVIMEYQKYXXXXXXXXXIYLMSIPSTKVPAXXT

SEQ ID NO: 41661 - protein, 34 aa, Artificial Sequence
  GFR-binding peptide
  MOD_RES (1), (32), (33): Xaa is C or S
XEEVIMEYQKYLLVRGNDIYLMSIPSTKVPAXXT

SEQ ID NO: 41662 - protein, 40 aa, Artificial Sequence; identical to SEQ ID NO: 24634
  GFR-binding peptide
  MOD_RES (1), (35), (36): Xaa is C or S
  MOD_RES (13), (14), (15), (16), (17): Xaa is A or G
  MOD_RES (18), (19), (20), (21): Xaa is A or G or is absent

SEQ ID NO: 41663 - protein, 33 aa, Artificial Sequence; identical to SEQ ID NO: 26679
  GFR-binding peptide
  MOD_RES (32), (33): Xaa is C or S

SEQ ID NO: 41664 - protein, 35 aa, Artificial Sequence; identical to SEQ ID NO: 25660
  GFR-binding peptide
  MOD_RES (2), (34), (35): Xaa is C or S

SEQ ID NO: 41665 - protein, 34 aa, Artificial Sequence; identical to SEQ ID NO: 25661
  GFR-binding peptide
  MOD_RES (33), (34): Xaa is C or S
  MOD_RES (11), (12), (13), (14), (15): Xaa is A or G
  MOD_RES (16), (17), (18), (19): Xaa is A or G or is absent

SEQ ID NO: 41666 - protein, 40 aa, Artificial Sequence; identical to SEQ ID NO: 24639
  GFR-binding peptide
  MOD_RES (2), (36), (37): Xaa is C or S
  MOD_RES (14), (15), (16), (17), (18): Xaa is A or G
  MOD_RES (19), (20), (21), (22): Xaa is A or G or is absent

SEQ ID NO: 41667 - protein, 37 aa, Artificial Sequence; identical to SEQ ID NO: 24640
  GFR-binding peptide
  MOD_RES (1), (33), (34): Xaa is C or S

SEQ ID NO: 41668 - protein, 33 aa, Artificial Sequence; identical to SEQ ID NO: 26681
  GFR-binding peptide
  MOD_RES (1), (1): Xaa is C or S

SEQ ID NO: 41669 - protein, 39 aa, Artificial Sequence; identical to SEQ ID NO: 23656
  GFR-binding peptide
  MOD_RES (33), (33): Xaa is C or S
  MOD_RES (11), (12), (13), (14), (15): Xaa is A or G
  MOD_RES (16), (17), (18), (19): Xaa is A or G or is absent

SEQ ID NO: 41670 - protein, 36 aa, Artificial Sequence; identical to SEQ ID NO: 26683
  GFR-binding peptide
  MOD_RES (1), (36): Xaa is C or S
  MOD_RES (14), (15), (16), (17), (18): Xaa is A or G
  MOD_RES (19), (20), (21), (22): Xaa is A or G or is absent

SEQ ID NO: 41671 - protein, 38 aa, Artificial Sequence; identical to SEQ ID NO: 24644
  GFR-binding peptide
  MOD_RES (33), (34): Xaa is C or S

SEQ ID NO: 41672 - protein, 42 aa, Artificial Sequence
  GFR-binding peptide
  MOD_RES (2), (4), (37), (38): Xaa is C or S
  MOD_RES (15), (16), (17), (18), (19): Xaa is A or G
  MOD_RES (20), (21), (22), (23): Xaa is A or G or is absent
LXGXEEVIMEYQKYXXXXXXXXXIYLMSIPSTKVPAXXTSPV

SEQ ID NO: 41673 - protein, 43 aa, Artificial Sequence; identical to SEQ ID NO: 25674
  GFR-binding peptide
  MOD_RES (2), (4), (37), (38): Xaa is C or S

SEQ ID NO: 41674 - protein, 38 aa, Artificial Sequence; identical to SEQ ID NO: 25675
  GFR-binding peptide
  MOD_RES (2), (4): Xaa is C or S
  MOD_RES (17), (18), (19), (20), (21): Xaa is A or G
  MOD_RES (22), (23), (24), (25): Xaa is A or G or is absent

SEQ ID NO: 41675 - protein, 36 aa, Artificial Sequence; identical to SEQ ID NO: 23664
  GFR-binding peptide
  MOD_RES (1), (35), (36): Xaa is C or S
  MOD_RES (13), (14), (15), (16), (17): Xaa is A or G
  MOD_RES (18), (19), (20), (21): Xaa is A or G or is absent

SEQ ID NO: 41676 - protein, 35 aa, Artificial Sequence; identical to SEQ ID NO: 26694
  GFR-binding peptide
  MOD_RES (32), (33): Xaa is C or S

SEQ ID NO: 41677 - protein, 39 aa, Artificial Sequence; identical to SEQ ID NO: 25676
  GFR-binding peptide
  MOD_RES (1), (3), (37), (38): Xaa is C or S
  MOD_RES (15), (16), (17), (18), (19): Xaa is A or G
  MOD_RES (20), (21), (22), (23): Xaa is A or G or is absent

SEQ ID NO: 41678 - protein, 35 aa, Artificial Sequence; identical to SEQ ID NO: 26695
  GFR-binding peptide
  MOD_RES (33), (34): Xaa is C or S

SEQ ID NO: 41679 - protein, 37 aa, Artificial Sequence; identical to SEQ ID NO: 24657
  GFR-binding peptide
  MOD_RES (2), (4), (37): Xaa is C or S

SEQ ID NO: 41680 - protein, 42 aa, Artificial Sequence; identical to SEQ ID NO: 23666
  GFR-binding peptide
  MOD_RES (2), (4), (38), (39): Xaa is C or S
  MOD_RES (16), (17), (18), (19), (20): Xaa is A or G
  MOD_RES (21), (22), (23), (24): Xaa is A or G or is absent

SEQ ID NO: 41681 - protein, 38 aa, Artificial Sequence; identical to SEQ ID NO: 25679
  GFR-binding peptide
  MOD_RES (2), (4), (36), (37): Xaa is C or S

SEQ ID NO: 41682 - protein, 43 aa, Artificial Sequence; identical to SEQ ID NO: 25680
  GFR-binding peptide
  MOD_RES (2), (4), (38): Xaa is C or S
  MOD_RES (16), (17), (18), (19), (20): Xaa is A or G
  MOD_RES (21), (22), (23), (24): Xaa is A or G or is absent

SEQ ID NO: 41683 - protein, 35 aa, Artificial Sequence
  GFR-binding peptide
  MOD_RES (1), (3), (34), (35): Xaa is C or S
XGXEEVIMEYQKYLLVRGNDIYLMSIPSTKVPAXX

SEQ ID NO: 41684 - protein, 38 aa, Artificial Sequence; identical to SEQ ID NO: 24660
  GFR-binding peptide
  MOD_RES (32), (33): Xaa is C or S

SEQ ID NO: 41685 - protein, 41 aa, Artificial Sequence; identical to SEQ ID NO: 24661
  GFR-binding peptide
  MOD_RES (2), (36), (37): Xaa is C or S
  MOD_RES (14), (15), (16), (17), (18): Xaa is A or G
  MOD_RES (19), (20), (21), (22): Xaa is A or G or is absent

SEQ ID NO: 41686 - protein, 35 aa, Artificial Sequence; identical to SEQ ID NO: 23671
  GFR-binding peptide
  MOD_RES (2), (4): Xaa is C or S

SEQ ID NO: 41687 - protein, 41 aa, Artificial Sequence; identical to SEQ ID NO: 25683
  GFR-binding peptide
  MOD_RES (2), (36), (37): Xaa is C or S
  MOD_RES (14), (15), (16), (17), (18): Xaa is A or G
  MOD_RES (19), (20), (21), (22): Xaa is A or G or is absent

SEQ ID NO: 41688 - protein, 32 aa, Artificial Sequence; identical to SEQ ID NO: 24663
  GFR-binding peptide
  MOD_RES (31), (32): Xaa is C or S

SEQ ID NO: 41689 - protein, 39 aa, Artificial Sequence; identical to SEQ ID NO: 25684
  GFR-binding peptide
  MOD_RES (2), (34), (35): Xaa is C or S

SEQ ID NO: 41690 - protein, 37 aa, Artificial Sequence; identical to SEQ ID NO: 25685
  GFR-binding peptide
  MOD_RES (1), (33), (34): Xaa is C or S

SEQ ID NO: 41691 - protein, 32 aa, Artificial Sequence; identical to SEQ ID NO: 24668
  GFR-binding peptide
  MOD_RES (1), (1): Xaa is C or S

SEQ ID NO: 41692 - protein, 39 aa, Artificial Sequence; identical to SEQ ID NO: 26703
  GFR-binding peptide
  MOD_RES (1), (35), (36): Xaa is C or S
  MOD_RES (13), (14), (15), (16), (17): Xaa is A or G
  MOD_RES (18), (19), (20), (21): Xaa is A or G or is absent

SEQ ID NO: 41693 - protein, 42 aa, Artificial Sequence; identical to SEQ ID NO: 26705
  GFR-binding peptide
  MOD_RES (2), (4), (36): Xaa is C or S

SEQ ID NO: 41694 - protein, 30 aa, Artificial Sequence; identical to SEQ ID NO: 26706
  GFR-binding peptide

SEQ ID NO: 41695 - protein, 40 aa, Artificial Sequence; identical to SEQ ID NO: 26707
  GFR-binding peptide
  MOD_RES (1), (3), (37), (38): Xaa is C or S
  MOD_RES (15), (16), (17), (18), (19): Xaa is A or G
  MOD_RES (20), (21), (22), (23): Xaa is A or G or is absent

SEQ ID NO: 41696 - protein, 37 aa, Artificial Sequence
  GFR-binding peptide
  MOD_RES (2), (4), (35), (36): Xaa is C or S
LXGXEEVIMEYQKYLLVRGNDIYLMSIPSTKVPAXXT

SEQ ID NO: 41697 - protein, 34 aa, Artificial Sequence; identical to SEQ ID NO: 24672
  GFR-binding peptide
  MOD_RES (33), (34): Xaa is C or S
  MOD_RES (11), (12), (13), (14), (15): Xaa is A or G
  MOD_RES (16), (17), (18), (19): Xaa is A or G or is absent

SEQ ID NO: 41698 - protein, 37 aa, Artificial Sequence; identical to SEQ ID NO: 23679
  GFR-binding peptide
  MOD_RES (1), (35), (36): Xaa is C or S
  MOD_RES (13), (14), (15), (16), (17): Xaa is A or G
  MOD_RES (18), (19), (20), (21): Xaa is A or G or is absent

SEQ ID NO: 41699 - protein, 38 aa, Artificial Sequence
  GFR-binding peptide
  MOD_RES (2), (4), (38): Xaa is C or S
  MOD_RES (16), (17), (18), (19), (20): Xaa is A or G
  MOD_RES (21), (22), (23), (24): Xaa is A or G or is absent
SXGXRDVVMGEYQKYXXXXXXXXXIYLMSIPSMKTPTX

SEQ ID NO: 41700 - protein, 41 aa, Artificial Sequence
  GFR-binding peptide
  MOD_RES (1), (35), (36): Xaa is C or S
  MOD_RES (13), (14), (15), (16), (17): Xaa is A or G
  MOD_RES (18), (19), (20), (21): Xaa is A or G or is absent
XRDVVMGEYQKYXXXXXXXXXIYLMSIPSMKTPTXXPGASG

SEQ ID NO: 41701 - protein, 37 aa, Artificial Sequence; identical to SEQ ID NO: 25697
  GFR-binding peptide
  MOD_RES (34), (35): Xaa is C or S
  MOD_RES (12), (13), (14), (15), (16): Xaa is A or G
  MOD_RES (17), (18), (19), (20): Xaa is A or G or is absent

SEQ ID NO: 41702 - protein, 38 aa, Artificial Sequence; identical to SEQ ID NO: 26715
  GFR-binding peptide
  MOD_RES (1), (33): Xaa is C or S

SEQ ID NO: 41703 - protein, 37 aa, Artificial Sequence; identical to SEQ ID NO: 25702
  GFR-binding peptide
  MOD_RES (1), (35), (36): Xaa is C or S
  MOD_RES (13), (14), (15), (16), (17): Xaa is A or G
  MOD_RES (18), (19), (20), (21): Xaa is A or G or is absent

SEQ ID NO: 41704 - protein, 30 aa, Artificial Sequence; identical to SEQ ID NO: 26716
  GFR-binding peptide

SEQ ID NO: 41705 - protein, 41 aa, Artificial Sequence; identical to SEQ ID NO: 24680
  GFR-binding peptide
  MOD_RES (2), (4), (36), (37): Xaa is C or S

SEQ ID NO: 41706 - protein, 38 aa, Artificial Sequence; identical to SEQ ID NO: 24681
  GFR-binding peptide
  MOD_RES (33), (33): Xaa is C or S
  MOD_RES (11), (12), (13), (14), (15): Xaa is A or G
  MOD_RES (16), (17), (18), (19): Xaa is A or G or is absent

SEQ ID NO: 41707 - protein, 31 aa, Artificial Sequence; identical to SEQ ID NO: 24683
  GFR-binding peptide
  MOD_RES (31), (31): Xaa is C or S

SEQ ID NO: 41708 - protein, 35 aa, Artificial Sequence; identical to SEQ ID NO: 25709
  GFR-binding peptide
  MOD_RES (2), (2): Xaa is C or S
  MOD_RES (14), (15), (16), (17), (18): Xaa is A or G
  MOD_RES (19), (20), (21), (22): Xaa is A or G or is absent

SEQ ID NO: 41709 - protein, 32 aa, Artificial Sequence; identical to SEQ ID NO: 24686
  GFR-binding peptide
  MOD_RES (31), (32): Xaa is C or S

SEQ ID NO: 41710 - protein, 34 aa, Artificial Sequence; identical to SEQ ID NO: 26729
  GFR-binding peptide
  MOD_RES (1), (3): Xaa is C or S

SEQ ID NO: 41711 - protein, 31 aa, Artificial Sequence; identical to SEQ ID NO: 25713
  GFR-binding peptide
  MOD_RES (31), (31): Xaa is C or S

SEQ ID NO: 41712 - protein, 34 aa, Artificial Sequence; identical to SEQ ID NO: 24691
  GFR-binding peptide
  MOD_RES (33), (34): Xaa is C or S

SEQ ID NO: 41713 - protein, 35 aa, Artificial Sequence; identical to SEQ ID NO: 26730
  GFR-binding peptide
  MOD_RES (1), (35): Xaa is C or S
  MOD_RES (13), (14), (15), (16), (17): Xaa is A or G
  MOD_RES (18), (19), (20), (21): Xaa is A or G or is absent

SEQ ID NO: 41714 - protein, 33 aa, Artificial Sequence; identical to SEQ ID NO: 26736
  GFR-binding peptide
  MOD_RES (2), (2): Xaa is C or S

SEQ ID NO: 41715 - protein, 39 aa, Artificial Sequence; identical to SEQ ID NO: 24696
  GFR-binding peptide
  MOD_RES (2), (4), (38), (39): Xaa is C or S
  MOD_RES (16), (17), (18), (19), (20): Xaa is A or G
  MOD_RES (21), (22), (23), (24): Xaa is A or G or is absent

SEQ ID NO: 41716 - protein, 34 aa, Artificial Sequence; identical to SEQ ID NO: 26740
  GFR-binding peptide
  MOD_RES (31), (32): Xaa is C or S

SEQ ID NO: 41717 - protein, 36 aa, Artificial Sequence; identical to SEQ ID NO: 26742
  GFR-binding peptide
  MOD_RES (1), (33), (34): Xaa is C or S

SEQ ID NO: 41718 - protein, 37 aa, Artificial Sequence; identical to SEQ ID NO: 24705
  GFR-binding peptide
  MOD_RES (2), (36), (37): Xaa is C or S
  MOD_RES (14), (15), (16), (17), (18): Xaa is A or G
  MOD_RES (19), (20), (21), (22): Xaa is A or G or is absent

SEQ ID NO: 41719 - protein, 33 aa, Artificial Sequence
  GFR-binding peptide
  MOD_RES (31), (32): Xaa is C or S
DVVMGEYQKYIIQQKDNIYLMSIPSMKTPTXXP

SEQ ID NO: 41720 - protein, 34 aa, Artificial Sequence; identical to SEQ ID NO: 23710
  GFR-binding peptide
  MOD_RES (32), (33): Xaa is C or S

SEQ ID NO: 41721 - protein, 33 aa, Artificial Sequence; identical to SEQ ID NO: 24707
  GFR-binding peptide
  MOD_RES (31), (32): Xaa is C or S

SEQ ID NO: 41722 - protein, 36 aa, Artificial Sequence; identical to SEQ ID NO: 24708
  GFR-binding peptide
  MOD_RES (1), (35), (36): Xaa is C or S
  MOD_RES (13), (14), (15), (16), (17): Xaa is A or G
  MOD_RES (18), (19), (20), (21): Xaa is A or G or is absent

SEQ ID NO: 41723 - protein, 39 aa, Artificial Sequence; identical to SEQ ID NO: 25724
  GFR-binding peptide
  MOD_RES (1), (35), (36): Xaa is C or S
  MOD_RES (13), (14), (15), (16), (17): Xaa is A or G
  MOD_RES (18), (19), (20), (21): Xaa is A or G or is absent

SEQ ID NO: 41724 - protein, 36 aa, Artificial Sequence; identical to SEQ ID NO: 26752
  GFR-binding peptide
  MOD_RES (1), (3): Xaa is C or S
  MOD_RES (15), (16), (17), (18), (19): Xaa is A or G
  MOD_RES (20), (21), (22), (23): Xaa is A or G or is absent

SEQ ID NO: 41725 - protein, 32 aa, Artificial Sequence
  GFR-binding peptide
  MOD_RES (11), (12), (13), (14), (15): Xaa is A or G
  MOD_RES (16), (17), (18), (19): Xaa is A or G or is absent
DVVMGEYQKYXXXXXXXXXIYLMSIPSMKTPT

SEQ ID NO: 41726 - protein, 31 aa, Artificial Sequence
  GFR-binding peptide
  MOD_RES (31), (31): Xaa is C or S
DVVMGEYQKYIIQQKDNIYLMSIPSMKTPTX

SEQ ID NO: 41727 - protein, 40 aa, Artificial Sequence
  GFR-binding peptide
  MOD_RES (2), (36), (37): Xaa is C or S
  MOD_RES (14), (15), (16), (17), (18): Xaa is A or G
  MOD_RES (19), (20), (21), (22): Xaa is A or G or is absent
GXRDVVMGEYQKYXXXXXXXXXIYLMSIPSMKTPTXXPGA

SEQ ID NO: 41728 - protein, 34 aa, Artificial Sequence; identical to SEQ ID NO: 25728
  GFR-binding peptide
  MOD_RES (32), (33): Xaa is C or S

SEQ ID NO: 41729 - protein, 36 aa, Artificial Sequence; identical to SEQ ID NO: 25731
  GFR-binding peptide
  MOD_RES (2), (4), (36): Xaa is C or S

SEQ ID NO: 41730 - protein, 40 aa, Artificial Sequence; identical to SEQ ID NO: 26757
  GFR-binding peptide
  MOD_RES (2), (4), (38), (39): Xaa is C or S
  MOD_RES (16), (17), (18), (19), (20): Xaa is A or G
  MOD_RES (21), (22), (23), (24): Xaa is A or G or is absent

SEQ ID NO: 41731 - protein, 34 aa, Artificial Sequence
  GFR-binding peptide
  MOD_RES (2), (34): Xaa is C or S
GXRDVVMGEYQKYIIQQKDNIYLMSIPSMKTPTX

SEQ ID NO: 41732 - protein, 36 aa, Artificial Sequence; identical to SEQ ID NO: 26758
  GFR-binding peptide
  MOD_RES (1), (3): Xaa is C or S
  MOD_RES (15), (16), (17), (18), (19): Xaa is A or G
  MOD_RES (20), (21), (22), (23): Xaa is A or G or is absent

SEQ ID NO: 41733 - protein, 33 aa, Artificial Sequence
  GFR-binding peptide
  MOD_RES (1), (32), (33): Xaa is C or S
XEEVIMEYQKYLLVRGNDIYLMSIPSTKVPAXX

SEQ ID NO: 41734 - protein, 38 aa, Artificial Sequence; identical to SEQ ID NO: 24723
  GFR-binding peptide
  MOD_RES (1), (3), (38): Xaa is C or S
  MOD_RES (16), (17), (18), (19), (20): Xaa is A or G
  MOD_RES (21), (22), (23), (24): Xaa is A or G or is absent

SEQ ID NO: 41735 - protein, 34 aa, Artificial Sequence
  GFR-binding peptide
  MOD_RES (31), (32): Xaa is C or S
DVVMGEYQKYIIQQKDNIYLMSIPSMKTPTXXPG

SEQ ID NO: 41736 - protein, 33 aa, Artificial Sequence; identical to SEQ ID NO: 24724
  GFR-binding peptide
  MOD_RES (2), (2): Xaa is C or S

SEQ ID NO: 41737 - protein, 41 aa, Artificial Sequence; identical to SEQ ID NO: 26765
  GFR-binding peptide
  MOD_RES (1), (3), (35), (36): Xaa is C or S

SEQ ID NO: 41738 - protein, 40 aa, Artificial Sequence; identical to SEQ ID NO: 24726
  GFR-binding peptide
  MOD_RES (2), (4), (38), (39): Xaa is C or S
  MOD_RES (16), (17), (18), (19), (20): Xaa is A or G
  MOD_RES (21), (22), (23), (24): Xaa is A or G or is absent

SEQ ID NO: 41739 - protein, 31 aa, Artificial Sequence; identical to SEQ ID NO: 25744
  GFR-binding peptide
  MOD_RES (31), (31): Xaa is C or S

SEQ ID NO: 41740 - protein, 33 aa, Artificial Sequence; identical to SEQ ID NO: 25748
  GFR-binding peptide
  MOD_RES (1), (33): Xaa is C or S

SEQ ID NO: 41741 - protein, 42 aa, Artificial Sequence
  GFR-binding peptide
  MOD_RES (2), (4), (36), (37): Xaa is C or S
SXGXRDVVMGEYQKYIIQQKDNIYLMSIPSMKTPTXXPGASG

SEQ ID NO: 41742 - protein, 44 aa, Artificial Sequence
  GFR-binding peptide
  MOD_RES (2), (4), (38), (39): Xaa is C or S
  MOD_RES (16), (17), (18), (19), (20): Xaa is A or G
  MOD_RES (21), (22), (23), (24): Xaa is A or G or is absent
HXGXSRVVMNEYQKYXXXXXXXXXIYLVSIPSLKTPAXXPKPVH

SEQ ID NO: 41743 - protein, 41 aa, Artificial Sequence; identical to SEQ ID NO: 25753
  GFR-binding peptide
  MOD_RES (1), (3), (36), (37): Xaa is C or S

SEQ ID NO: 41744 - protein, 42 aa, Artificial Sequence; identical to SEQ ID NO: 26785
  GFR-binding peptide
  MOD_RES (2), (37), (38): Xaa is C or S
  MOD_RES (15), (16), (17), (18), (19): Xaa is A or G
  MOD_RES (20), (21), (22), (23): Xaa is A or G or is absent

SEQ ID NO: 41745 - protein, 37 aa, Artificial Sequence
  GFR-binding peptide
  MOD_RES (1), (3), (35), (36): Xaa is C or S
XGXRDVVMGEYQKYIIQQKDNIYLMSIPSMKTPTXXP

SEQ ID NO: 41746 - protein, 37 aa, Artificial Sequence; identical to SEQ ID NO: 24741
  GFR-binding peptide
  MOD_RES (33), (34): Xaa is C or S
  MOD_RES (11), (12), (13), (14), (15): Xaa is A or G
  MOD_RES (16), (17), (18), (19): Xaa is A or G or is absent

SEQ ID NO: 41747 - protein, 38 aa, Artificial Sequence; identical to SEQ ID NO: 24742
  GFR-binding peptide
  MOD_RES (2), (4), (36), (37): Xaa is C or S

SEQ ID NO: 41748 - protein, 41 aa, Artificial Sequence; identical to SEQ ID NO: 25761
  GFR-binding peptide
  MOD_RES (2), (4), (38), (39): Xaa is C or S
  MOD_RES (16), (17), (18), (19), (20): Xaa is A or G
  MOD_RES (21), (22), (23), (24): Xaa is A or G or is absent

SEQ ID NO: 41749 - protein, 36 aa, Artificial Sequence; identical to SEQ ID NO: 24747
  GFR-binding peptide
  MOD_RES (31), (32): Xaa is C or S

SEQ ID NO: 41750 - protein, 40 aa, Artificial Sequence; identical to SEQ ID NO: 26790
  GFR-binding peptide
  MOD_RES (2), (34), (35): Xaa is C or S

SEQ ID NO: 41751 - protein, 34 aa, Artificial Sequence; identical to SEQ ID NO: 23732
  GFR-binding peptide
  MOD_RES (31), (32): Xaa is C or S

SEQ ID NO: 41752 - protein, 36 aa, Artificial Sequence
  GFR-binding peptide
  MOD_RES (34), (35): Xaa is C or S
  MOD_RES (12), (13), (14), (15), (16): Xaa is A or G
  MOD_RES (17), (18), (19), (20): Xaa is A or G or is absent
RDVVMGEYQKYXXXXXXXXXIYLMSIPSMKTPTXXP

SEQ ID NO: 41753 - protein, 38 aa, Artificial Sequence; identical to SEQ ID NO: 26795
  GFR-binding peptide
  MOD_RES (32), (33): Xaa is C or S

SEQ ID NO: 41754 - protein, 36 aa, Artificial Sequence; identical to SEQ ID NO: 25766
  GFR-binding peptide
  MOD_RES (1), (33), (34): Xaa is C or S

SEQ ID NO: 41755 - protein, 38 aa, Artificial Sequence; identical to SEQ ID NO: 25768
  GFR-binding peptide
  MOD_RES (2), (34), (35): Xaa is C or S

SEQ ID NO: 41756 - protein, 37 aa, Artificial Sequence; identical to SEQ ID NO: 25769
  GFR-binding peptide
  MOD_RES (32), (32): Xaa is C or S

SEQ ID NO: 41757 - protein, 39 aa, Artificial Sequence
  GFR-binding peptide
  MOD_RES (2), (4), (36), (37): Xaa is C or S
SXGXRDVVMGEYQKYIIQQKDNIYLMSIPSMKTPTXXPG

SEQ ID NO: 41758 - protein, 39 aa, Artificial Sequence
  GFR-binding peptide
  MOD_RES (33), (34): Xaa is C or S
  MOD_RES (11), (12), (13), (14), (15): Xaa is A or G
  MOD_RES (16), (17), (18), (19): Xaa is A or G or is absent
EEVIMEYQKYXXXXXXXXXIYLMSIPSTKVPAXXTSPVR

SEQ ID NO: 41759 - protein, 39 aa, Artificial Sequence; identical to SEQ ID NO: 26801
  GFR-binding peptide
  MOD_RES (1), (3), (37), (38): Xaa is C or S
  MOD_RES (15), (16), (17), (18), (19): Xaa is A or G
  MOD_RES (20), (21), (22), (23): Xaa is A or G or is absent

SEQ ID NO: 41760 - protein, 43 aa, Artificial Sequence; identical to SEQ ID NO: 23745
  GFR-binding peptide
  MOD_RES (2), (4), (38), (39): Xaa is C or S
  MOD_RES (16), (17), (18), (19), (20): Xaa is A or G
  MOD_RES (21), (22), (23), (24): Xaa is A or G or is absent

SEQ ID NO: 41761 - protein, 42 aa, Artificial Sequence; identical to SEQ ID NO: 23746
  GFR-binding peptide
  MOD_RES (2), (4), (38), (39): Xaa is C or S
  MOD_RES (16), (17), (18), (19), (20): Xaa is A or G
  MOD_RES (21), (22), (23), (24): Xaa is A or G or is absent

SEQ ID NO: 41762 - protein, 31 aa, Artificial Sequence; identical to SEQ ID NO: 26804
  GFR-binding peptide

SEQ ID NO: 41763 - protein, 36 aa, Artificial Sequence; identical to SEQ ID NO: 25772
  GFR-binding peptide
  MOD_RES (2), (35), (36): Xaa is C or S

SEQ ID NO: 41764 - protein, 37 aa, Artificial Sequence; identical to SEQ ID NO: 23750
  GFR-binding peptide
  MOD_RES (34), (35): Xaa is C or S
  MOD_RES (12), (13), (14), (15), (16): Xaa is A or G
  MOD_RES (17), (18), (19), (20): Xaa is A or G or is absent

SEQ ID NO: 41765 - protein, 39 aa, Artificial Sequence
  GFR-binding peptide
  MOD_RES (1), (33), (34): Xaa is C or S
XSRVVMNEYQKYIVNSSDDIYLVSIPSLKTPAXXPKPVH

SEQ ID NO: 41766 - protein, 32 aa, Artificial Sequence; identical to SEQ ID NO: 25777
  GFR-binding peptide
  MOD_RES (1), (1): Xaa is C or S

SEQ ID NO: 41767 - protein, 36 aa, Artificial Sequence; identical to SEQ ID NO: 23755
  GFR-binding peptide
  MOD_RES (1), (3), (35), (36): Xaa is C or S

SEQ ID NO: 41768 - protein, 43 aa, Artificial Sequence; identical to SEQ ID NO: 23756
  GFR-binding peptide
  MOD_RES (2), (4), (38), (39): Xaa is C or S
  MOD_RES (16), (17), (18), (19), (20): Xaa is A or G
  MOD_RES (21), (22), (23), (24): Xaa is A or G or is absent

SEQ ID NO: 41769 - protein, 37 aa, Artificial Sequence; identical to SEQ ID NO: 24773
  GFR-binding peptide
  MOD_RES (1), (3), (35), (36): Xaa is C or S

SEQ ID NO: 41770 - protein, 40 aa, Artificial Sequence; identical to SEQ ID NO: 25780
  GFR-binding peptide
  MOD_RES (2), (4), (38), (39): Xaa is C or S
  MOD_RES (16), (17), (18), (19), (20): Xaa is A or G
  MOD_RES (21), (22), (23), (24): Xaa is A or G or is absent

SEQ ID NO: 41771 - protein, 41 aa, Artificial Sequence; identical to SEQ ID NO: 26812
  GFR-binding peptide
  MOD_RES (1), (3), (37), (38): Xaa is C or S
  MOD_RES (15), (16), (17), (18), (19): Xaa is A or G
  MOD_RES (20), (21), (22), (23): Xaa is A or G or is absent

SEQ ID NO: 41772 - protein, 34 aa, Artificial Sequence; identical to SEQ ID NO: 26816
  GFR-binding peptide
  MOD_RES (1), (33), (34): Xaa is C or S

SEQ ID NO: 41773 - protein, 40 aa, Artificial Sequence
  GFR-binding peptide
  MOD_RES (2), (35), (36): Xaa is C or S
  MOD_RES (13), (14), (15), (16), (17): Xaa is A or G
  MOD_RES (18), (19), (20), (21): Xaa is A or G or is absent
GXEEVIMEYQKYXXXXXXXXXIYLMSIPSTKVPAXXTSPV

SEQ ID NO: 41774 - protein, 34 aa, Artificial Sequence
  GFR-binding peptide
  MOD_RES (34), (34): Xaa is C or S
  MOD_RES (12), (13), (14), (15), (16): Xaa is A or G
  MOD_RES (17), (18), (19), (20): Xaa is A or G or is absent
RDVVMGEYQKYXXXXXXXXXIYLMSIPSMKTPTX

SEQ ID NO: 41775 - protein, 39 aa, Artificial Sequence; identical to SEQ ID NO: 24782
  GFR-binding peptide
  MOD_RES (1), (3), (37): Xaa is C or S
  MOD_RES (15), (16), (17), (18), (19): Xaa is A or G
  MOD_RES (20), (21), (22), (23): Xaa is A or G or is absent

SEQ ID NO: 41776 - protein, 38 aa, Artificial Sequence; identical to SEQ ID NO: 23767
  GFR-binding peptide
  MOD_RES (33), (34): Xaa is C or S
  MOD_RES (11), (12), (13), (14), (15): Xaa is A or G
  MOD_RES (16), (17), (18), (19): Xaa is A or G or is absent

SEQ ID NO: 41777 - protein, 33 aa, Artificial Sequence
  GFR-binding peptide
  MOD_RES (2), (2): Xaa is C or S
GXRDVVMGEYQKYIIQQKDNIYLMSIPSMKTPT

SEQ ID NO: 41778 - protein, 35 aa, Artificial Sequence; identical to SEQ ID NO: 26820
  GFR-binding peptide
  MOD_RES (2), (2): Xaa is C or S
  MOD_RES (14), (15), (16), (17), (18): Xaa is A or G
  MOD_RES (19), (20), (21), (22): Xaa is A or G or is absent

SEQ ID NO: 41779 - protein, 39 aa, Artificial Sequence
  GFR-binding peptide
  MOD_RES (2), (4), (35), (36): Xaa is C or S
LXGXEEVIMEYQKYLLVRGNDIYLMSIPSTKVPAXXTSP

SEQ ID NO: 41780 - protein, 36 aa, Artificial Sequence
  GFR-binding peptide
  MOD_RES (2), (4), (36): Xaa is C or S
SXGXRDVVMGEYQKYIIQQKDNIYLMSIPSMKTPTX

SEQ ID NO: 41781 - protein, 41 aa, Artificial Sequence; identical to SEQ ID NO: 24790
  GFR-binding peptide
  MOD_RES (1), (3), (37), (38): Xaa is C or S
  MOD_RES (15), (16), (17), (18), (19): Xaa is A or G
  MOD_RES (20), (21), (22), (23): Xaa is A or G or is absent

SEQ ID NO: 41782 - protein, 34 aa, Artificial Sequence; identical to SEQ ID NO: 23771
  GFR-binding peptide
  MOD_RES (1), (1): Xaa is C or S
  MOD_RES (13), (14), (15), (16), (17): Xaa is A or G
  MOD_RES (18), (19), (20), (21): Xaa is A or G or is absent

SEQ ID NO: 41783 - protein, 34 aa, Artificial Sequence; identical to SEQ ID NO: 25787
  GFR-binding peptide
  MOD_RES (2), (34): Xaa is C or S

SEQ ID NO: 41784 - protein, 38 aa, Artificial Sequence; identical to SEQ ID NO: 26824
  GFR-binding peptide
  MOD_RES (33), (34): Xaa is C or S
  MOD_RES (11), (12), (13), (14), (15): Xaa is A or G
  MOD_RES (16), (17), (18), (19): Xaa is A or G or is absent

SEQ ID NO: 41785 - protein, 42 aa, Artificial Sequence; identical to SEQ ID NO: 23773
  GFR-binding peptide
  MOD_RES (2), (4), (36), (37): Xaa is C or S

SEQ ID NO: 41786 - protein, 36 aa, Artificial Sequence; identical to SEQ ID NO: 25790
  GFR-binding peptide
  MOD_RES (2), (4), (36): Xaa is C or S

SEQ ID NO: 41787 - protein, 41 aa, Artificial Sequence; identical to SEQ ID NO: 23774
  GFR-binding peptide
  MOD_RES (1), (35), (36): Xaa is C or S
  MOD_RES (13), (14), (15), (16), (17): Xaa is A or G
  MOD_RES (18), (19), (20), (21): Xaa is A or G or is absent

SEQ ID NO: 41788 - protein, 37 aa, Artificial Sequence; identical to SEQ ID NO: 25792
  GFR-binding peptide
  MOD_RES (1), (33): Xaa is C or S

SEQ ID NO: 41789 - protein, 35 aa, Artificial Sequence; identical to SEQ ID NO: 24794
  GFR-binding peptide
  MOD_RES (35), (35): Xaa is C or S
  MOD_RES (13), (14), (15), (16), (17): Xaa is A or G
  MOD_RES (18), (19), (20), (21): Xaa is A or G or is absent

SEQ ID NO: 41790 - protein, 41 aa, Artificial Sequence
  GFR-binding peptide
  MOD_RES (1), (3), (37), (38): Xaa is C or S
  MOD_RES (15), (16), (17), (18), (19): Xaa is A or G
  MOD_RES (20), (21), (22), (23): Xaa is A or G or is absent
XGXRDVVMGEYQKYXXXXXXXXXIYLMSIPSMKTPTXXPGA

SEQ ID NO: 41791 - protein, 34 aa, Artificial Sequence; identical to SEQ ID NO: 23779
  GFR-binding peptide
  MOD_RES (2), (34): Xaa is C or S

SEQ ID NO: 41792 - protein, 38 aa, Artificial Sequence; identical to SEQ ID NO: 24802
  GFR-binding peptide
  MOD_RES (2), (4), (38): Xaa is C or S
  MOD_RES (16), (17), (18), (19), (20): Xaa is A or G
  MOD_RES (21), (22), (23), (24): Xaa is A or G or is absent

SEQ ID NO: 41793 - protein, 37 aa, Artificial Sequence; identical to SEQ ID NO: 24804
  GFR-binding peptide
  MOD_RES (1), (3), (35), (36): Xaa is C or S

SEQ ID NO: 41794 - protein, 39 aa, Artificial Sequence; identical to SEQ ID NO: 25800
  GFR-binding peptide
  MOD_RES (1), (3), (35), (36): Xaa is C or S

SEQ ID NO: 41795 - protein, 36 aa, Artificial Sequence; identical to SEQ ID NO: 23782
  GFR-binding peptide
  MOD_RES (2), (34), (35): Xaa is C or S

SEQ ID NO: 41796 - protein, 37 aa, Artificial Sequence; identical to SEQ ID NO: 24808
  GFR-binding peptide
  MOD_RES (1), (3), (37): Xaa is C or S
  MOD_RES (15), (16), (17), (18), (19): Xaa is A or G
  MOD_RES (20), (21), (22), (23): Xaa is A or G or is absent

SEQ ID NO: 41797 - protein, 40 aa, Artificial Sequence
  GFR-binding peptide
  MOD_RES (1), (3), (37), (38): Xaa is C or S
  MOD_RES (15), (16), (17), (18), (19): Xaa is A or G
  MOD_RES (20), (21), (22), (23): Xaa is A or G or is absent
XGXRDVVMGEYQKYXXXXXXXXXIYLMSIPSMKTPTXXPG

SEQ ID NO: 41798 - protein, 39 aa, Artificial Sequence
  GFR-binding peptide
  MOD_RES (1), (3), (36), (37): Xaa is C or S
  MOD_RES (14), (15), (16), (17), (18): Xaa is A or G
  MOD_RES (19), (20), (21), (22): Xaa is A or G or is absent
XGXEEVIMEYQKYXXXXXXXXXIYLMSIPSTKVPAXXTS

SEQ ID NO: 41799 - protein, 31 aa, Artificial Sequence
  GFR-binding peptide
  MOD_RES (31), (31): Xaa is C or S
EEVIMEYQKYLLVRGNDIYLMSIPSTKVPAX

SEQ ID NO: 41800 - protein, 40 aa, Artificial Sequence; identical to SEQ ID NO: 25812
  GFR-binding peptide
  MOD_RES (2), (36), (37): Xaa is C or S
  MOD_RES (14), (15), (16), (17), (18): Xaa is A or G
  MOD_RES (19), (20), (21), (22): Xaa is A or G or is absent

SEQ ID NO: 41801 - protein, 40 aa, Artificial Sequence; identical to SEQ ID NO: 23796
  GFR-binding peptide
  MOD_RES (2), (4), (36), (37): Xaa is C or S

SEQ ID NO: 41802 - protein, 31 aa, Artificial Sequence; identical to SEQ ID NO: 24818
  GFR-binding peptide

SEQ ID NO: 41803 - protein, 36 aa, Artificial Sequence; identical to SEQ ID NO: 26845
  GFR-binding peptide
  MOD_RES (2), (4): Xaa is C or S

SEQ ID NO: 41804 - protein, 36 aa, Artificial Sequence; identical to SEQ ID NO: 23800
  GFR-binding peptide
  MOD_RES (31), (32): Xaa is C or S

SEQ ID NO: 41805 - protein, 37 aa, Artificial Sequence
  GFR-binding peptide
  MOD_RES (2), (4): Xaa is C or S
  MOD_RES (16), (17), (18), (19), (20): Xaa is A or G
  MOD_RES (21), (22), (23), (24): Xaa is A or G or is absent
SXGXRDVVMGEYQKYXXXXXXXXXIYLMSIPSMKTPT

SEQ ID NO: 41806 - protein, 38 aa, Artificial Sequence
  GFR-binding peptide
  MOD_RES (2), (4), (35), (36): Xaa is C or S
LXGXEEVIMEYQKYLLVRGNDIYLMSIPSTKVPAXXTS

SEQ ID NO: 41807 - protein, 39 aa, Artificial Sequence
  GFR-binding peptide
  MOD_RES (1), (3), (35), (36): Xaa is C or S
XGXRDVVMGEYQKYIIQQKDNIYLMSIPSMKTPTXXPGA

SEQ ID NO: 41808 - protein, 39 aa, Artificial Sequence; identical to SEQ ID NO: 25822
  GFR-binding peptide
  MOD_RES (1), (3), (35), (36): Xaa is C or S

SEQ ID NO: 41809 - protein, 36 aa, Artificial Sequence
  GFR-binding peptide
  MOD_RES (2), (4): Xaa is C or S
  MOD_RES (15), (16), (17), (18), (19): Xaa is A or G
  MOD_RES (20), (21), (22), (23): Xaa is A or G or is absent
LXGXEEVIMEYQKYXXXXXXXXXIYLMSIPSTKVPA

SEQ ID NO: 41810 - protein, 37 aa, Artificial Sequence
  GFR-binding peptide
  MOD_RES (31), (32): Xaa is C or S
EEVIMEYQKYLLVRGNDIYLMSIPSTKVPAXXTSPVR

SEQ ID NO: 41811 - protein, 42 aa, Artificial Sequence; identical to SEQ ID NO: 24828
  GFR-binding peptide
  MOD_RES (2), (4), (38), (39): Xaa is C or S
  MOD_RES (16), (17), (18), (19), (20): Xaa is A or G
  MOD_RES (21), (22), (23), (24): Xaa is A or G or is absent

SEQ ID NO: 41812 - protein, 34 aa, Artificial Sequence; identical to SEQ ID NO: 26857
  GFR-binding peptide
  MOD_RES (1), (33): Xaa is C or S

SEQ ID NO: 41813 - protein, 41 aa, Artificial Sequence
  GFR-binding peptide
  MOD_RES (2), (4), (35), (36): Xaa is C or S
LXGXEEVIMEYQKYLLVRGNDIYLMSIPSTKVPAXXTSPVR

SEQ ID NO: 41814 - protein, 32 aa, Artificial Sequence
  GFR-binding peptide
  MOD_RES (31), (32): Xaa is C or S
DVVMGEYQKYIIQQKDNIYLMSIPSMKTPTXX

SEQ ID NO: 41815 - protein, 43 aa, Artificial Sequence; identical to SEQ ID NO: 25826
  GFR-binding peptide
  MOD_RES (1), (3), (37), (38): Xaa is C or S
  MOD_RES (15), (16), (17), (18), (19): Xaa is A or G
  MOD_RES (20), (21), (22), (23): Xaa is A or G or is absent

SEQ ID NO: 41816 - protein, 35 aa, Artificial Sequence; identical to SEQ ID NO: 24835
  GFR-binding peptide
  MOD_RES (1), (1): Xaa is C or S
  MOD_RES (14), (15), (16), (17), (18): Xaa is A or G
  MOD_RES (19), (20), (21), (22): Xaa is A or G or is absent

SEQ ID NO: 41817 - protein, 38 aa, Artificial Sequence; identical to SEQ ID NO: 23814
  GFR-binding peptide
  MOD_RES (33), (34): Xaa is C or S
  MOD_RES (11), (12), (13), (14), (15): Xaa is A or G
  MOD_RES (16), (17), (18), (19): Xaa is A or G or is absent

SEQ ID NO: 41818 - protein, 34 aa, Artificial Sequence
  GFR-binding peptide
  MOD_RES (31), (32): Xaa is C or S
EEVIMEYQKYLLVRGNDIYLMSIPSTKVPAXXTS

SEQ ID NO: 41819 - protein, 35 aa, Artificial Sequence; identical to SEQ ID NO: 23818
  GFR-binding peptide
  MOD_RES (1), (33), (34): Xaa is C or S

SEQ ID NO: 41820 - protein, 39 aa, Artificial Sequence
  GFR-binding peptide
  MOD_RES (33), (34): Xaa is C or S
  MOD_RES (11), (12), (13), (14), (15): Xaa is A or G
  MOD_RES (16), (17), (18), (19): Xaa is A or G or is absent
RVVMNEYQKYXXXXXXXXXIYLVSIPSLKTPAXXPKPVH

SEQ ID NO: 41821 - protein, 38 aa, Artificial Sequence; identical to SEQ ID NO: 25831
  GFR-binding peptide
  MOD_RES (1), (3), (35), (36): Xaa is C or S

SEQ ID NO: 41822 - protein, 40 aa, Artificial Sequence; identical to SEQ ID NO: 26866
  GFR-binding peptide
  MOD_RES (1), (3), (37), (38): Xaa is C or S
  MOD_RES (15), (16), (17), (18), (19): Xaa is A or G
  MOD_RES (20), (21), (22), (23): Xaa is A or G or is absent

SEQ ID NO: 41823 - protein, 36 aa, Artificial Sequence
  GFR-binding peptide
  MOD_RES (31), (32): Xaa is C or S
EEVIMEYQKYLLVRGNDIYLMSIPSTKVPAXXTSPV

SEQ ID NO: 41824 - protein, 38 aa, Artificial Sequence; identical to SEQ ID NO: 23821
  GFR-binding peptide
  MOD_RES (2), (36), (37): Xaa is C or S
  MOD_RES (14), (15), (16), (17), (18): Xaa is A or G
  MOD_RES (19), (20), (21), (22): Xaa is A or G or is absent

SEQ ID NO: 41825 - protein, 40 aa, Artificial Sequence; identical to SEQ ID NO: 23822
  GFR-binding peptide
  MOD_RES (2), (4), (36), (37): Xaa is C or S

SEQ ID NO: 41826 - protein, 37 aa, Artificial Sequence; identical to SEQ ID NO: 26869
  GFR-binding peptide
  MOD_RES (32), (33): Xaa is C or S

SEQ ID NO: 41827 - protein, 40 aa, Artificial Sequence; identical to SEQ ID NO: 23825
  GFR-binding peptide
  MOD_RES (34), (34): Xaa is C or S
  MOD_RES (12), (13), (14), (15), (16): Xaa is A or G
  MOD_RES (17), (18), (19), (20): Xaa is A or G or is absent

SEQ ID NO: 41828 - protein, 35 aa, Artificial Sequence; identical to SEQ ID NO: 25837
  GFR-binding peptide
  MOD_RES (34), (35): Xaa is C or S
  MOD_RES (12), (13), (14), (15), (16): Xaa is A or G
  MOD_RES (17), (18), (19), (20): Xaa is A or G or is absent

SEQ ID NO: 41829 - protein, 30 aa, Artificial Sequence
  GFR-binding peptide
EEVIMEYQKYLLVRGNDIYLMSIPSTKVPA

SEQ ID NO: 41830 - protein, 36 aa, Artificial Sequence; identical to SEQ ID NO: 26872
  GFR-binding peptide
  MOD_RES (33), (34): Xaa is C or S
  MOD_RES (11), (12), (13), (14), (15): Xaa is A or G
  MOD_RES (16), (17), (18), (19): Xaa is A or G or is absent

SEQ ID NO: 41831 - protein, 43 aa, Artificial Sequence
  GFR-binding peptide
  MOD_RES (1), (3), (37), (38): Xaa is C or S
  MOD_RES (15), (16), (17), (18), (19): Xaa is A or G
  MOD_RES (20), (21), (22), (23): Xaa is A or G or is absent
XGXRDVVMGEYQKYXXXXXXXXXIYLMSIPSMKTPTXXPGASG

SEQ ID NO: 41832 - protein, 40 aa, Artificial Sequence; identical to SEQ ID NO: 26874
  GFR-binding peptide
  MOD_RES (34), (35): Xaa is C or S
  MOD_RES (12), (13), (14), (15), (16): Xaa is A or G
  MOD_RES (17), (18), (19), (20): Xaa is A or G or is absent

SEQ ID NO: 41833 - protein, 41 aa, Artificial Sequence; identical to SEQ ID NO: 24843
  GFR-binding peptide
  MOD_RES (1), (36), (37): Xaa is C or S
  MOD_RES (14), (15), (16), (17), (18): Xaa is A or G
  MOD_RES (19), (20), (21), (22): Xaa is A or G or is absent

SEQ ID NO: 41834 - protein, 43 aa, Artificial Sequence; identical to SEQ ID NO: 23828
  GFR-binding peptide
  MOD_RES (1), (3), (37), (38): Xaa is C or S
  MOD_RES (15), (16), (17), (18), (19): Xaa is A or G
  MOD_RES (20), (21), (22), (23): Xaa is A or G or is absent

SEQ ID NO: 41835 - protein, 38 aa, Artificial Sequence; identical to SEQ ID NO: 25840
  GFR-binding peptide
  MOD_RES (1), (3), (37), (38): Xaa is C or S
  MOD_RES (15), (16), (17), (18), (19): Xaa is A or G
  MOD_RES (20), (21), (22), (23): Xaa is A or G or is absent

SEQ ID NO: 41836 - protein, 33 aa, Artificial Sequence; identical to SEQ ID NO: 24845
  GFR-binding peptide
  MOD_RES (2), (2): Xaa is C or S

SEQ ID NO: 41837 - protein, 37 aa, Artificial Sequence
  GFR-binding peptide
  MOD_RES (33), (34): Xaa is C or S
  MOD_RES (11), (12), (13), (14), (15): Xaa is A or G
  MOD_RES (16), (17), (18), (19): Xaa is A or G or is absent
EEVIMEYQKYXXXXXXXXXIYLMSIPSTKVPAXXTSP

SEQ ID NO: 41838 - protein, 38 aa, Artificial Sequence; identical to SEQ ID NO: 26877
  GFR-binding peptide
  MOD_RES (2), (4), (38): Xaa is C or S
  MOD_RES (16), (17), (18), (19), (20): Xaa is A or G
  MOD_RES (21), (22), (23), (24): Xaa is A or G or is absent

SEQ ID NO: 41839 - protein, 35 aa, Artificial Sequence; identical to SEQ ID NO: 23830
  GFR-binding peptide
  MOD_RES (34), (35): Xaa is C or S
  MOD_RES (12), (13), (14), (15), (16): Xaa is A or G
  MOD_RES (17), (18), (19), (20): Xaa is A or G or is absent

SEQ ID NO: 41840 - protein, 34 aa, Artificial Sequence; identical to SEQ ID NO: 23831
  GFR-binding peptide
  MOD_RES (13), (14), (15), (16), (17): Xaa is A or G
  MOD_RES (18), (19), (20), (21): Xaa is A or G or is absent

SEQ ID NO: 41841 - protein, 35 aa, Artificial Sequence
  GFR-binding peptide
  MOD_RES (1), (33), (34): Xaa is C or S
XRDVVMGEYQKYIIQQKDNIYLMSIPSMKTPTXXP

SEQ ID NO: 41842 - protein, 37 aa, Artificial Sequence
  GFR-binding peptide
  MOD_RES (2), (33), (34): Xaa is C or S
GXEEVIMEYQKYLLVRGNDIYLMSIPSTKVPAXXTSP

SEQ ID NO: 41843 - protein, 40 aa, Artificial Sequence; identical to SEQ ID NO: 24850
  GFR-binding peptide
  MOD_RES (2), (4), (36), (37): Xaa is C or S

SEQ ID NO: 41844 - protein, 35 aa, Artificial Sequence; identical to SEQ ID NO: 25847
  GFR-binding peptide
  MOD_RES (34), (35): Xaa is C or S
  MOD_RES (12), (13), (14), (15), (16): Xaa is A or G
  MOD_RES (17), (18), (19), (20): Xaa is A or G or is absent

SEQ ID NO: 41845 - protein, 42 aa, Artificial Sequence; identical to SEQ ID NO: 25848
  GFR-binding peptide
  MOD_RES (2), (4), (38), (39): Xaa is C or S
  MOD_RES (16), (17), (18), (19), (20): Xaa is A or G
  MOD_RES (21), (22), (23), (24): Xaa is A or G or is absent

SEQ ID NO: 41846 - protein, 38 aa, Artificial Sequence; identical to SEQ ID NO: 25850
  GFR-binding peptide
  MOD_RES (1), (3), (35), (36): Xaa is C or S

SEQ ID NO: 41847 - protein, 35 aa, Artificial Sequence; identical to SEQ ID NO: 23841
  GFR-binding peptide
  MOD_RES (1), (33), (34): Xaa is C or S

SEQ ID NO: 41848 - protein, 38 aa, Artificial Sequence; identical to SEQ ID NO: 24862
  GFR-binding peptide
  MOD_RES (1), (3), (35), (36): Xaa is C or S

SEQ ID NO: 41849 - protein, 32 aa, Artificial Sequence; identical to SEQ ID NO: 25856
  GFR-binding peptide
  MOD_RES (32), (32): Xaa is C or S

SEQ ID NO: 41850 - protein, 36 aa, Artificial Sequence; identical to SEQ ID NO: 24865
  GFR-binding peptide
  MOD_RES (1), (3): Xaa is C or S
  MOD_RES (15), (16), (17), (18), (19): Xaa is A or G
  MOD_RES (20), (21), (22), (23): Xaa is A or G or is absent

SEQ ID NO: 41851 - protein, 36 aa, Artificial Sequence; identical to SEQ ID NO: 25857
  GFR-binding peptide
  MOD_RES (1), (34), (35): Xaa is C or S

SEQ ID NO: 41852 - protein, 38 aa, Artificial Sequence; identical to SEQ ID NO: 25858
  GFR-binding peptide
  MOD_RES (1), (33), (34): Xaa is C or S

SEQ ID NO: 41853 - protein, 39 aa, Artificial Sequence; identical to SEQ ID NO: 26889
  GFR-binding peptide
  MOD_RES (34), (35): Xaa is C or S
  MOD_RES (12), (13), (14), (15), (16): Xaa is A or G
  MOD_RES (17), (18), (19), (20): Xaa is A or G or is absent

SEQ ID NO: 41854 - protein, 35 aa, Artificial Sequence; identical to SEQ ID NO: 24866
  GFR-binding peptide
  MOD_RES (31), (31): Xaa is C or S

SEQ ID NO: 41855 - protein, 37 aa, Artificial Sequence; identical to SEQ ID NO: 23843
  GFR-binding peptide
  MOD_RES (2), (36), (37): Xaa is C or S
  MOD_RES (14), (15), (16), (17), (18): Xaa is A or G
  MOD_RES (19), (20), (21), (22): Xaa is A or G or is absent

SEQ ID NO: 41856 - protein, 35 aa, Artificial Sequence; identical to SEQ ID NO: 26894
  GFR-binding peptide
  MOD_RES (33), (34): Xaa is C or S
  MOD_RES (11), (12), (13), (14), (15): Xaa is A or G
  MOD_RES (16), (17), (18), (19): Xaa is A or G or is absent

SEQ ID NO: 41857 - protein, 40 aa, Artificial Sequence; identical to SEQ ID NO: 23848
  GFR-binding peptide
  MOD_RES (1), (3), (35), (36): Xaa is C or S

SEQ ID NO: 41858 - protein, 37 aa, Artificial Sequence; identical to SEQ ID NO: 23849
  GFR-binding peptide
  MOD_RES (2), (35), (36): Xaa is C or S

SEQ ID NO: 41859 - protein, 33 aa, Artificial Sequence; identical to SEQ ID NO: 26896
  GFR-binding peptide
  MOD_RES (2), (2): Xaa is C or S

SEQ ID NO: 41860 - protein, 37 aa, Artificial Sequence; identical to SEQ ID NO: 26897
  GFR-binding peptide
  MOD_RES (2), (4), (36), (37): Xaa is C or S

SEQ ID NO: 41861 - protein, 40 aa, Artificial Sequence; identical to SEQ ID NO: 26898
  GFR-binding peptide
  MOD_RES (2), (34), (35): Xaa is C or S

SEQ ID NO: 41862 - protein, 36 aa, Artificial Sequence
  GFR-binding peptide
  MOD_RES (2), (35), (36): Xaa is C or S
  MOD_RES (13), (14), (15), (16), (17): Xaa is A or G
  MOD_RES (18), (19), (20), (21): Xaa is A or G or is absent
GXEEVIMEYQKYXXXXXXXXXIYLMSIPSTKVPAXX

SEQ ID NO: 41863 - protein, 37 aa, Artificial Sequence; identical to SEQ ID NO: 23850
  GFR-binding peptide
  MOD_RES (32), (33): Xaa is C or S

SEQ ID NO: 41864 - protein, 39 aa, Artificial Sequence; identical to SEQ ID NO: 24873
  GFR-binding peptide
  MOD_RES (34), (35): Xaa is C or S
  MOD_RES (12), (13), (14), (15), (16): Xaa is A or G
  MOD_RES (17), (18), (19), (20): Xaa is A or G or is absent

SEQ ID NO: 41865 - protein, 35 aa, Artificial Sequence
  GFR-binding peptide
  MOD_RES (2), (4), (35): Xaa is C or S
LXGXEEVIMEYQKYLLVRGNDIYLMSIPSTKVPAX

SEQ ID NO: 41866 - protein, 35 aa, Artificial Sequence
  GFR-binding peptide
  MOD_RES (2), (4): Xaa is C or S
SXGXRDVVMGEYQKYIIQQKDNIYLMSIPSMKTPT

SEQ ID NO: 41867 - protein, 33 aa, Artificial Sequence; identical to SEQ ID NO: 25866
  GFR-binding peptide
  MOD_RES (32), (33): Xaa is C or S

SEQ ID NO: 41868 - protein, 37 aa, Artificial Sequence; identical to SEQ ID NO: 26903
  GFR-binding peptide
  MOD_RES (2), (36), (37): Xaa is C or S
  MOD_RES (14), (15), (16), (17), (18): Xaa is A or G
  MOD_RES (19), (20), (21), (22): Xaa is A or G or is absent

SEQ ID NO: 41869 - protein, 41 aa, Artificial Sequence; identical to SEQ ID NO: 23854
  GFR-binding peptide
  MOD_RES (2), (4), (36), (37): Xaa is C or S

SEQ ID NO: 41870 - protein, 40 aa, Artificial Sequence
  GFR-binding peptide
  MOD_RES (1), (3), (34), (35): Xaa is C or S
XGXEEVIMEYQKYLLVRGNDIYLMSIPSTKVPAXXTSPVR

SEQ ID NO: 41871 - protein, 41 aa, Artificial Sequence; identical to SEQ ID NO: 26910
  GFR-binding peptide
  MOD_RES (2), (4), (38), (39): Xaa is C or S
  MOD_RES (16), (17), (18), (19), (20): Xaa is A or G
  MOD_RES (21), (22), (23), (24): Xaa is A or G or is absent

SEQ ID NO: 41872 - protein, 41 aa, Artificial Sequence; identical to SEQ ID NO: 24883
  GFR-binding peptide
  MOD_RES (2), (35), (36): Xaa is C or S

SEQ ID NO: 41873 - protein, 36 aa, Artificial Sequence
  GFR-binding peptide
  MOD_RES (2), (36): Xaa is C or S
  MOD_RES (14), (15), (16), (17), (18): Xaa is A or G
  MOD_RES (19), (20), (21), (22): Xaa is A or G or is absent
GXRDVVMGEYQKYXXXXXXXXXIYLMSIPSMKTPTX

SEQ ID NO: 41874 - protein, 38 aa, Artificial Sequence; identical to SEQ ID NO: 25874
  GFR-binding peptide
  MOD_RES (34), (35): Xaa is C or S
  MOD_RES (12), (13), (14), (15), (16): Xaa is A or G
  MOD_RES (17), (18), (19), (20): Xaa is A or G or is absent

SEQ ID NO: 41875 - protein, 39 aa, Artificial Sequence; identical to SEQ ID NO: 23860
  GFR-binding peptide
  MOD_RES (2), (37), (38): Xaa is C or S
  MOD_RES (15), (16), (17), (18), (19): Xaa is A or G
  MOD_RES (20), (21), (22), (23): Xaa is A or G or is absent

SEQ ID NO: 41876 - protein, 42 aa, Artificial Sequence; identical to SEQ ID NO: 25875
  GFR-binding peptide
  MOD_RES (2), (4), (38): Xaa is C or S
  MOD_RES (16), (17), (18), (19), (20): Xaa is A or G
  MOD_RES (21), (22), (23), (24): Xaa is A or G or is absent

SEQ ID NO: 41877 - protein, 40 aa, Artificial Sequence; identical to SEQ ID NO: 25878
  GFR-binding peptide
  MOD_RES (1), (3), (36), (37): Xaa is C or S

SEQ ID NO: 41878 - protein, 38 aa, Artificial Sequence; identical to SEQ ID NO: 24889
  GFR-binding peptide
  MOD_RES (2), (36), (37): Xaa is C or S
  MOD_RES (14), (15), (16), (17), (18): Xaa is A or G
  MOD_RES (19), (20), (21), (22): Xaa is A or G or is absent

SEQ ID NO: 41879 - protein, 40 aa, Artificial Sequence; identical to SEQ ID NO: 24891
  GFR-binding peptide
  MOD_RES (1), (3), (37): Xaa is C or S
  MOD_RES (15), (16), (17), (18), (19): Xaa is A or G
  MOD_RES (20), (21), (22), (23): Xaa is A or G or is absent

SEQ ID NO: 41880 - protein, 36 aa, Artificial Sequence; identical to SEQ ID NO: 26914
  GFR-binding peptide
  MOD_RES (1), (3): Xaa is C or S
  MOD_RES (15), (16), (17), (18), (19): Xaa is A or G
  MOD_RES (20), (21), (22), (23): Xaa is A or G or is absent

SEQ ID NO: 41881 - protein, 40 aa, Artificial Sequence; identical to SEQ ID NO: 23867
  GFR-binding peptide
  MOD_RES (34), (35): Xaa is C or S
  MOD_RES (12), (13), (14), (15), (16): Xaa is A or G
  MOD_RES (17), (18), (19), (20): Xaa is A or G or is absent

SEQ ID NO: 41882 - protein, 35 aa, Artificial Sequence; identical to SEQ ID NO: 26915
  GFR-binding peptide
  MOD_RES (2), (2): Xaa is C or S
  MOD_RES (14), (15), (16), (17), (18): Xaa is A or G
  MOD_RES (19), (20), (21), (22): Xaa is A or G or is absent

SEQ ID NO: 41883 - protein, 36 aa, Artificial Sequence; identical to SEQ ID NO: 25883
  GFR-binding peptide
  MOD_RES (34), (35): Xaa is C or S
  MOD_RES (12), (13), (14), (15), (16): Xaa is A or G
  MOD_RES (17), (18), (19), (20): Xaa is A or G or is absent

SEQ ID NO: 41884 - protein, 40 aa, Artificial Sequence; identical to SEQ ID NO: 24897
  GFR-binding peptide
  MOD_RES (2), (34), (35): Xaa is C or S

SEQ ID NO: 41885 - protein, 39 aa, Artificial Sequence
  GFR-binding peptide
  MOD_RES (2), (35), (36): Xaa is C or S
  MOD_RES (13), (14), (15), (16), (17): Xaa is A or G
  MOD_RES (18), (19), (20), (21): Xaa is A or G or is absent
GXEEVIMEYQKYXXXXXXXXXIYLMSIPSTKVPAXXTSP

SEQ ID NO: 41886 - protein, 40 aa, Artificial Sequence; identical to SEQ ID NO: 24902
  GFR-binding peptide
  MOD_RES (2), (4), (36): Xaa is C or S

SEQ ID NO: 41887 - protein, 42 aa, Artificial Sequence
  GFR-binding peptide
  MOD_RES (2), (36), (37): Xaa is C or S
  MOD_RES (14), (15), (16), (17), (18): Xaa is A or G
  MOD_RES (19), (20), (21), (22): Xaa is A or G or is absent
GXRDVVMGEYQKYXXXXXXXXXIYLMSIPSMKTPTXXPGASG

SEQ ID NO: 41888 - protein, 37 aa, Artificial Sequence; identical to SEQ ID NO: 23873
  GFR-binding peptide
  MOD_RES (32), (33): Xaa is C or S

SEQ ID NO: 41889 - protein, 38 aa, Artificial Sequence; identical to SEQ ID NO: 26922
  GFR-binding peptide
  MOD_RES (1), (3), (35), (36): Xaa is C or S

SEQ ID NO: 41890 - protein, 37 aa, Artificial Sequence; identical to SEQ ID NO: 26923
  GFR-binding peptide
  MOD_RES (31), (31): Xaa is C or S

SEQ ID NO: 41891 - protein, 39 aa, Artificial Sequence; identical to SEQ ID NO: 25893
  GFR-binding peptide
  MOD_RES (2), (36), (37): Xaa is C or S
  MOD_RES (14), (15), (16), (17), (18): Xaa is A or G
  MOD_RES (19), (20), (21), (22): Xaa is A or G or is absent

SEQ ID NO: 41892 - protein, 36 aa, Artificial Sequence; identical to SEQ ID NO: 23876
  GFR-binding peptide
  MOD_RES (33), (34): Xaa is C or S
  MOD_RES (11), (12), (13), (14), (15): Xaa is A or G
  MOD_RES (16), (17), (18), (19): Xaa is A or G or is absent

SEQ ID NO: 41893 - protein, 37 aa, Artificial Sequence
  GFR-binding peptide
  MOD_RES (33), (34): Xaa is C or S
  MOD_RES (11), (12), (13), (14), (15): Xaa is A or G
  MOD_RES (16), (17), (18), (19): Xaa is A or G or is absent
DVVMGEYQKYXXXXXXXXXIYLMSIPSMKTPTXXPGA

SEQ ID NO: 41894 - protein, 44 aa, Artificial Sequence; identical to SEQ ID NO: 24911
  GFR-binding peptide
  MOD_RES (2), (4), (38), (39): Xaa is C or S
  MOD_RES (16), (17), (18), (19), (20): Xaa is A or G
  MOD_RES (21), (22), (23), (24): Xaa is A or G or is absent

SEQ ID NO: 41895 - protein, 38 aa, Artificial Sequence; identical to SEQ ID NO: 24912
  GFR-binding peptide
  MOD_RES (2), (34), (35): Xaa is C or S

SEQ ID NO: 41896 - protein, 37 aa, Artificial Sequence; identical to SEQ ID NO: 25894
  GFR-binding peptide
  MOD_RES (35), (36): Xaa is C or S
  MOD_RES (13), (14), (15), (16), (17): Xaa is A or G
  MOD_RES (18), (19), (20), (21): Xaa is A or G or is absent

SEQ ID NO: 41897 - protein, 43 aa, Artificial Sequence; identical to SEQ ID NO: 23881
  GFR-binding peptide
  MOD_RES (2), (4), (38), (39): Xaa is C or S
  MOD_RES (16), (17), (18), (19), (20): Xaa is A or G
  MOD_RES (21), (22), (23), (24): Xaa is A or G or is absent

SEQ ID NO: 41898 - protein, 35 aa, Artificial Sequence; identical to SEQ ID NO: 26926
  GFR-binding peptide
  MOD_RES (1), (33), (34): Xaa is C or S

SEQ ID NO: 41899 - protein, 41 aa, Artificial Sequence; identical to SEQ ID NO: 25896
  GFR-binding peptide
  MOD_RES (1), (35), (36): Xaa is C or S
  MOD_RES (13), (14), (15), (16), (17): Xaa is A or G
  MOD_RES (18), (19), (20), (21): Xaa is A or G or is absent

SEQ ID NO: 41900 - protein, 37 aa, Artificial Sequence; identical to SEQ ID NO: 23884
  GFR-binding peptide
  MOD_RES (1), (35), (36): Xaa is C or S
  MOD_RES (13), (14), (15), (16), (17): Xaa is A or G
  MOD_RES (18), (19), (20), (21): Xaa is A or G or is absent

SEQ ID NO: 41901 - protein, 43 aa, Artificial Sequence; identical to SEQ ID NO: 24914
  GFR-binding peptide
  MOD_RES (1), (3), (37), (38): Xaa is C or S
  MOD_RES (15), (16), (17), (18), (19): Xaa is A or G
  MOD_RES (20), (21), (22), (23): Xaa is A or G or is absent

SEQ ID NO: 41902 - protein, 35 aa, Artificial Sequence; identical to SEQ ID NO: 26930
  GFR-binding peptide
  MOD_RES (1), (33), (34): Xaa is C or S

SEQ ID NO: 41903 - protein, 35 aa, Artificial Sequence; identical to SEQ ID NO: 23888
  GFR-binding peptide
  MOD_RES (32), (33): Xaa is C or S

SEQ ID NO: 41904 - protein, 40 aa, Artificial Sequence; identical to SEQ ID NO: 23891
  GFR-binding peptide
  MOD_RES (2), (36), (37): Xaa is C or S
  MOD_RES (14), (15), (16), (17), (18): Xaa is A or G
  MOD_RES (19), (20), (21), (22): Xaa is A or G or is absent

SEQ ID NO: 41905 - protein, 34 aa, Artificial Sequence; identical to SEQ ID NO: 24921
  GFR-binding peptide
  MOD_RES (2), (2): Xaa is C or S

SEQ ID NO: 41906 - protein, 39 aa, Artificial Sequence
  GFR-binding peptide
  MOD_RES (1), (35), (36): Xaa is C or S
  MOD_RES (13), (14), (15), (16), (17): Xaa is A or G
  MOD_RES (18), (19), (20), (21): Xaa is A or G or is absent
XRDVVMGEYQKYXXXXXXXXXIYLMSIPSMKTPTXXPGA

SEQ ID NO: 41907 - protein, 35 aa, Artificial Sequence; identical to SEQ ID NO: 24923
  GFR-binding peptide
  MOD_RES (2), (34), (35): Xaa is C or S

SEQ ID NO: 41908 - protein, 41 aa, Artificial Sequence; identical to SEQ ID NO: 26935
  GFR-binding peptide
  MOD_RES (1), (3), (37), (38): Xaa is C or S
  MOD_RES (15), (16), (17), (18), (19): Xaa is A or G
  MOD_RES (20), (21), (22), (23): Xaa is A or G or is absent

SEQ ID NO: 41909 - protein, 32 aa, Artificial Sequence; identical to SEQ ID NO: 26936
  GFR-binding peptide
  MOD_RES (1), (1): Xaa is C or S

SEQ ID NO: 41910 - protein, 38 aa, Artificial Sequence; identical to SEQ ID NO: 24927
  GFR-binding peptide
  MOD_RES (34), (35): Xaa is C or S
  MOD_RES (12), (13), (14), (15), (16): Xaa is A or G
  MOD_RES (17), (18), (19), (20): Xaa is A or G or is absent

SEQ ID NO: 41911 - protein, 32 aa, Artificial Sequence; identical to SEQ ID NO: 25914
  GFR-binding peptide
  MOD_RES (31), (32): Xaa is C or S

SEQ ID NO: 41912 - protein, 35 aa, Artificial Sequence; identical to SEQ ID NO: 23896
  GFR-binding peptide
  MOD_RES (33), (34): Xaa is C or S
  MOD_RES (11), (12), (13), (14), (15): Xaa is A or G
  MOD_RES (16), (17), (18), (19): Xaa is A or G or is absent

SEQ ID NO: 41913 - protein, 42 aa, Artificial Sequence
  GFR-binding peptide
  MOD_RES (1), (3), (37), (38): Xaa is C or S
  MOD_RES (15), (16), (17), (18), (19): Xaa is A or G
  MOD_RES (20), (21), (22), (23): Xaa is A or G or is absent
XGXRDVVMGEYQKYXXXXXXXXXIYLMSIPSMKTPTXXPGAS

SEQ ID NO: 41914 - protein, 37 aa, Artificial Sequence; identical to SEQ ID NO: 23898
  GFR-binding peptide
  MOD_RES (1), (3), (37): Xaa is C or S
  MOD_RES (15), (16), (17), (18), (19): Xaa is A or G
  MOD_RES (20), (21), (22), (23): Xaa is A or G or is absent

SEQ ID NO: 41915 - protein, 32 aa, Artificial Sequence; identical to SEQ ID NO: 25915
  GFR-binding peptide
  MOD_RES (32), (32): Xaa is C or S

SEQ ID NO: 41916 - protein, 32 aa, Artificial Sequence; identical to SEQ ID NO: 26938
  GFR-binding peptide
  MOD_RES (32), (32): Xaa is C or S

SEQ ID NO: 41917 - protein, 37 aa, Artificial Sequence; identical to SEQ ID NO: 26940
  GFR-binding peptide
  MOD_RES (1), (3), (37): Xaa is C or S
  MOD_RES (15), (16), (17), (18), (19): Xaa is A or G
  MOD_RES (20), (21), (22), (23): Xaa is A or G or is absent

SEQ ID NO: 41918 - protein, 38 aa, Artificial Sequence; identical to SEQ ID NO: 24933
  GFR-binding peptide
  MOD_RES (1), (35), (36): Xaa is C or S
  MOD_RES (13), (14), (15), (16), (17): Xaa is A or G
  MOD_RES (18), (19), (20), (21): Xaa is A or G or is absent

SEQ ID NO: 41919 - protein, 39 aa, Artificial Sequence; identical to SEQ ID NO: 25917
  GFR-binding peptide
  MOD_RES (2), (34), (35): Xaa is C or S

SEQ ID NO: 41920 - protein, 31 aa, Artificial Sequence; identical to SEQ ID NO: 25920
  GFR-binding peptide

SEQ ID NO: 41921 - protein, 36 aa, Artificial Sequence; identical to SEQ ID NO: 24937
  GFR-binding peptide
  MOD_RES (32), (33): Xaa is C or S

SEQ ID NO: 41922 - protein, 37 aa, Artificial Sequence; identical to SEQ ID NO: 24940
  GFR-binding peptide
  MOD_RES (33), (34): Xaa is C or S
  MOD_RES (11), (12), (13), (14), (15): Xaa is A or G
  MOD_RES (16), (17), (18), (19): Xaa is A or G or is absent

SEQ ID NO: 41923 - protein, 40 aa, Artificial Sequence
  GFR-binding peptide
  MOD_RES (1), (3), (35), (36): Xaa is C or S
XGXRDVVMGEYQKYIIQQKDNIYLMSIPSMKTPTXXPGAS

SEQ ID NO: 41924 - protein, 31 aa, Artificial Sequence; identical to SEQ ID NO: 24944
  GFR-binding peptide

SEQ ID NO: 41925 - protein, 33 aa, Artificial Sequence
  GFR-binding peptide
  MOD_RES (33), (33): Xaa is C or S
  MOD_RES (11), (12), (13), (14), (15): Xaa is A or G
  MOD_RES (16), (17), (18), (19): Xaa is A or G or is absent
EEVIMEYQKYXXXXXXXXXIYLMSIPSTKVPAX

SEQ ID NO: 41926 - protein, 38 aa, Artificial Sequence; identical to SEQ ID NO: 26946
  GFR-binding peptide
  MOD_RES (33), (34): Xaa is C or S
  MOD_RES (11), (12), (13), (14), (15): Xaa is A or G
  MOD_RES (16), (17), (18), (19): Xaa is A or G or is absent

SEQ ID NO: 41927 - protein, 41 aa, Artificial Sequence
  GFR-binding peptide
  MOD_RES (1), (3), (36), (37): Xaa is C or S
  MOD_RES (14), (15), (16), (17), (18): Xaa is A or G
  MOD_RES (19), (20), (21), (22): Xaa is A or G or is absent
XGXEEVIMEYQKYXXXXXXXXXIYLMSIPSTKVPAXXTSPV

SEQ ID NO: 41928 - protein, 34 aa, Artificial Sequence; identical to SEQ ID NO: 26949
  GFR-binding peptide
  MOD_RES (1), (1): Xaa is C or S
  MOD_RES (13), (14), (15), (16), (17): Xaa is A or G
  MOD_RES (18), (19), (20), (21): Xaa is A or G or is absent

SEQ ID NO: 41929 - protein, 35 aa, Artificial Sequence; identical to SEQ ID NO: 23913
  GFR-binding peptide
  MOD_RES (32), (33): Xaa is C or S

SEQ ID NO: 41930 - protein, 36 aa, Artificial Sequence; identical to SEQ ID NO: 26950
  GFR-binding peptide
  MOD_RES (32), (33): Xaa is C or S

SEQ ID NO: 41931 - protein, 37 aa, Artificial Sequence; identical to SEQ ID NO: 25933
  GFR-binding peptide
  MOD_RES (2), (34), (35): Xaa is C or S

SEQ ID NO: 41932 - protein, 37 aa, Artificial Sequence; identical to SEQ ID NO: 23917
  GFR-binding peptide
  MOD_RES (1), (35), (36): Xaa is C or S
  MOD_RES (13), (14), (15), (16), (17): Xaa is A or G
  MOD_RES (18), (19), (20), (21): Xaa is A or G or is absent

SEQ ID NO: 41933 - protein, 37 aa, Artificial Sequence; identical to SEQ ID NO: 23922
  GFR-binding peptide
  MOD_RES (2), (4): Xaa is C or S
  MOD_RES (16), (17), (18), (19), (20): Xaa is A or G
  MOD_RES (21), (22), (23), (24): Xaa is A or G or is absent

SEQ ID NO: 41934 - protein, 37 aa, Artificial Sequence; identical to SEQ ID NO: 24956
  GFR-binding peptide
  MOD_RES (2), (4): Xaa is C or S
  MOD_RES (16), (17), (18), (19), (20): Xaa is A or G
  MOD_RES (21), (22), (23), (24): Xaa is A or G or is absent

SEQ ID NO: 41935 - protein, 38 aa, Artificial Sequence; identical to SEQ ID NO: 25940
  GFR-binding peptide
  MOD_RES (1), (3), (37), (38): Xaa is C or S
  MOD_RES (15), (16), (17), (18), (19): Xaa is A or G
  MOD_RES (20), (21), (22), (23): Xaa is A or G or is absent

SEQ ID NO: 41936 - protein, 37 aa, Artificial Sequence; identical to SEQ ID NO: 23923
  GFR-binding peptide
  MOD_RES (2), (34), (35): Xaa is C or S

SEQ ID NO: 41937 - protein, 35 aa, Artificial Sequence; identical to SEQ ID NO: 23925
  GFR-binding peptide
  MOD_RES (1), (3), (35): Xaa is C or S

SEQ ID NO: 41938 - protein, 38 aa, Artificial Sequence; identical to SEQ ID NO: 26959
  GFR-binding peptide
  MOD_RES (2), (36), (37): Xaa is C or S
  MOD_RES (14), (15), (16), (17), (18): Xaa is A or G
  MOD_RES (19), (20), (21), (22): Xaa is A or G or is absent

SEQ ID NO: 41939 - protein, 35 aa, Artificial Sequence; identical to SEQ ID NO: 23927
  GFR-binding peptide
  MOD_RES (31), (32): Xaa is C or S

SEQ ID NO: 41940 - protein, 39 aa, Artificial Sequence; identical to SEQ ID NO: 26961
  GFR-binding peptide
  MOD_RES (1), (3), (35), (36): Xaa is C or S

SEQ ID NO: 41941 - protein, 35 aa, Artificial Sequence; identical to SEQ ID NO: 24960
  GFR-binding peptide
  MOD_RES (2), (2): Xaa is C or S
  MOD_RES (14), (15), (16), (17), (18): Xaa is A or G
  MOD_RES (19), (20), (21), (22): Xaa is A or G or is absent

SEQ ID NO: 41942 - protein, 37 aa, Artificial Sequence
  GFR-binding peptide
  MOD_RES (31), (32): Xaa is C or S
DVVMGEYQKYIIQQKDNIYLMSIPSMKTPTXXPGASG

SEQ ID NO: 41943 - protein, 30 aa, Artificial Sequence; identical to SEQ ID NO: 24964
  GFR-binding peptide

SEQ ID NO: 41944 - protein, 39 aa, Artificial Sequence; identical to SEQ ID NO: 23932
  GFR-binding peptide
  MOD_RES (1), (35): Xaa is C or S
  MOD_RES (13), (14), (15), (16), (17): Xaa is A or G
  MOD_RES (18), (19), (20), (21): Xaa is A or G or is absent

SEQ ID NO: 41945 - protein, 37 aa, Artificial Sequence; identical to SEQ ID NO: 24966
  GFR-binding peptide
  MOD_RES (2), (34), (35): Xaa is C or S

SEQ ID NO: 41946 - protein, 36 aa, Artificial Sequence; identical to SEQ ID NO: 23934
  GFR-binding peptide
  MOD_RES (1), (33), (34): Xaa is C or S

SEQ ID NO: 41947 - protein, 39 aa, Artificial Sequence
  GFR-binding peptide
  MOD_RES (1), (3), (34), (35): Xaa is C or S
XGXEEVIMEYQKYLLVRGNDIYLMSIPSTKVPAXXTSPV

SEQ ID NO: 41948 - protein, 31 aa, Artificial Sequence; identical to SEQ ID NO: 25948
  GFR-binding peptide
  MOD_RES (31), (31): Xaa is C or S

SEQ ID NO: 41949 - protein, 36 aa, Artificial Sequence; identical to SEQ ID NO: 23935
  GFR-binding peptide
  MOD_RES (1), (3), (35), (36): Xaa is C or S

SEQ ID NO: 41950 - protein, 35 aa, Artificial Sequence
  GFR-binding peptide
  MOD_RES (1), (34), (35): Xaa is C or S
  MOD_RES (12), (13), (14), (15), (16): Xaa is A or G
  MOD_RES (17), (18), (19), (20): Xaa is A or G or is absent
XEEVIMEYQKYXXXXXXXXXIYLMSIPSTKVPAXX

SEQ ID NO: 41951 - protein, 39 aa, Artificial Sequence; identical to SEQ ID NO: 23937
  GFR-binding peptide
  MOD_RES (1), (3), (37), (38): Xaa is C or S
  MOD_RES (15), (16), (17), (18), (19): Xaa is A or G
  MOD_RES (20), (21), (22), (23): Xaa is A or G or is absent

SEQ ID NO: 41952 - protein, 35 aa, Artificial Sequence
  GFR-binding peptide
  MOD_RES (2), (35): Xaa is C or S
  MOD_RES (13), (14), (15), (16), (17): Xaa is A or G
  MOD_RES (18), (19), (20), (21): Xaa is A or G or is absent
GXEEVIMEYQKYXXXXXXXXXIYLMSIPSTKVPAX

SEQ ID NO: 41953 - protein, 40 aa, Artificial Sequence; identical to SEQ ID NO: 24971
  GFR-binding peptide
  MOD_RES (2), (4), (38): Xaa is C or S
  MOD_RES (16), (17), (18), (19), (20): Xaa is A or G
  MOD_RES (21), (22), (23), (24): Xaa is A or G or is absent

SEQ ID NO: 41954 - protein, 37 aa, Artificial Sequence; identical to SEQ ID NO: 26968
  GFR-binding peptide
  MOD_RES (34), (34): Xaa is C or S
  MOD_RES (12), (13), (14), (15), (16): Xaa is A or G
  MOD_RES (17), (18), (19), (20): Xaa is A or G or is absent

SEQ ID NO: 41955 - protein, 44 aa, Artificial Sequence; identical to SEQ ID NO: 23938
  GFR-binding peptide
  MOD_RES (2), (4), (38), (39): Xaa is C or S
  MOD_RES (16), (17), (18), (19), (20): Xaa is A or G
  MOD_RES (21), (22), (23), (24): Xaa is A or G or is absent

SEQ ID NO: 41956 - protein, 39 aa, Artificial Sequence; identical to SEQ ID NO: 25953
  GFR-binding peptide
  MOD_RES (1), (33), (34): Xaa is C or S

SEQ ID NO: 41957 - protein, 38 aa, Artificial Sequence
  GFR-binding peptide
  MOD_RES (32), (33): Xaa is C or S
SRVVMNEYQKYIVNSSDDIYLVSIPSLKTPAXXPKPVH

SEQ ID NO: 41958 - protein, 35 aa, Artificial Sequence; identical to SEQ ID NO: 24977
  GFR-binding peptide
  MOD_RES (2), (4): Xaa is C or S

SEQ ID NO: 41959 - protein, 37 aa, Artificial Sequence; identical to SEQ ID NO: 23944
  GFR-binding peptide
  MOD_RES (33), (33): Xaa is C or S
  MOD_RES (11), (12), (13), (14), (15): Xaa is A or G
  MOD_RES (16), (17), (18), (19): Xaa is A or G or is absent

SEQ ID NO: 41960 - protein, 37 aa, Artificial Sequence; identical to SEQ ID NO: 23946
  GFR-binding peptide
  MOD_RES (1), (3), (35), (36): Xaa is C or S

SEQ ID NO: 41961 - protein, 37 aa, Artificial Sequence; identical to SEQ ID NO: 25959
  GFR-binding peptide
  MOD_RES (2), (36): Xaa is C or S
  MOD_RES (14), (15), (16), (17), (18): Xaa is A or G
  MOD_RES (19), (20), (21), (22): Xaa is A or G or is absent

SEQ ID NO: 41962 - protein, 35 aa, Artificial Sequence; identical to SEQ ID NO: 26979
  GFR-binding peptide
  MOD_RES (1), (35): Xaa is C or S
  MOD_RES (13), (14), (15), (16), (17): Xaa is A or G
  MOD_RES (18), (19), (20), (21): Xaa is A or G or is absent

SEQ ID NO: 41963 - protein, 42 aa, Artificial Sequence; identical to SEQ ID NO: 23949
  GFR-binding peptide
  MOD_RES (1), (36), (37): Xaa is C or S
  MOD_RES (14), (15), (16), (17), (18): Xaa is A or G
  MOD_RES (19), (20), (21), (22): Xaa is A or G or is absent

SEQ ID NO: 41964 - protein, 39 aa, Artificial Sequence; identical to SEQ ID NO: 23952
  GFR-binding peptide
  MOD_RES (1), (3), (38), (39): Xaa is C or S
  MOD_RES (16), (17), (18), (19), (20): Xaa is A or G
  MOD_RES (21), (22), (23), (24): Xaa is A or G or is absent

SEQ ID NO: 41965 - protein, 38 aa, Artificial Sequence; identical to SEQ ID NO: 26985
  GFR-binding peptide
  MOD_RES (1), (3), (37), (38): Xaa is C or S
  MOD_RES (15), (16), (17), (18), (19): Xaa is A or G
  MOD_RES (20), (21), (22), (23): Xaa is A or G or is absent

SEQ ID NO: 41966 - protein, 40 aa, Artificial Sequence
  GFR-binding peptide
  MOD_RES (2), (34), (35): Xaa is C or S
GXRDVVMGEYQKYIIQQKDNIYLMSIPSMKTPTXXPGASG

SEQ ID NO: 41967 - protein, 41 aa, Artificial Sequence; identical to SEQ ID NO: 25962
  GFR-binding peptide
  MOD_RES (1), (3), (37), (38): Xaa is C or S
  MOD_RES (15), (16), (17), (18), (19): Xaa is A or G
  MOD_RES (20), (21), (22), (23): Xaa is A or G or is absent

SEQ ID NO: 41968 - protein, 35 aa, Artificial Sequence; identical to SEQ ID NO: 25964
  GFR-binding peptide
  MOD_RES (2), (4): Xaa is C or S

SEQ ID NO: 41969 - protein, 33 aa, Artificial Sequence; identical to SEQ ID NO: 25965
  GFR-binding peptide
  MOD_RES (33), (33): Xaa is C or S

SEQ ID NO: 41970 - protein, 36 aa, Artificial Sequence; identical to SEQ ID NO: 24987
  GFR-binding peptide
  MOD_RES (31), (32): Xaa is C or S

SEQ ID NO: 41971 - protein, 34 aa, Artificial Sequence
  GFR-binding peptide
  MOD_RES (1), (3), (34): Xaa is C or S
XGXEEVIMEYQKYLLVRGNDIYLMSIPSTKVPAX

SEQ ID NO: 41972 - protein, 39 aa, Artificial Sequence
  GFR-binding peptide
  MOD_RES (2), (33), (34): Xaa is C or S
GXEEVIMEYQKYLLVRGNDIYLMSIPSTKVPAXXTSPVR

SEQ ID NO: 41973 - protein, 36 aa, Artificial Sequence
  GFR-binding peptide
  MOD_RES (1), (3), (35), (36): Xaa is C or S
XGXRDVVMGEYQKYIIQQKDNIYLMSIPSMKTPTXX

SEQ ID NO: 41974 - protein, 33 aa, Artificial Sequence; identical to SEQ ID NO: 23959
  GFR-binding peptide
  MOD_RES (32), (33): Xaa is C or S

SEQ ID NO: 41975 - protein, 33 aa, Artificial Sequence; identical to SEQ ID NO: 25971
  GFR-binding peptide
  MOD_RES (31), (32): Xaa is C or S

SEQ ID NO: 41976 - protein, 38 aa, Artificial Sequence; identical to SEQ ID NO: 23961
  GFR-binding peptide
  MOD_RES (1), (35), (36): Xaa is C or S
  MOD_RES (13), (14), (15), (16), (17): Xaa is A or G
  MOD_RES (18), (19), (20), (21): Xaa is A or G or is absent

SEQ ID NO: 41977 - protein, 35 aa, Artificial Sequence; identical to SEQ ID NO: 24993
  GFR-binding peptide
  MOD_RES (1), (35): Xaa is C or S
  MOD_RES (13), (14), (15), (16), (17): Xaa is A or G
  MOD_RES (18), (19), (20), (21): Xaa is A or G or is absent

SEQ ID NO: 41978 - protein, 41 aa, Artificial Sequence
  GFR-binding peptide
  MOD_RES (1), (3), (35), (36): Xaa is C or S
XGXSRVVMNEYQKYIVNSSDDIYLVSIPSLKTPAXXPKPVH

SEQ ID NO: 41979 - protein, 33 aa, Artificial Sequence; identical to SEQ ID NO: 24997
  GFR-binding peptide
  MOD_RES (12), (13), (14), (15), (16): Xaa is A or G
  MOD_RES (17), (18), (19), (20): Xaa is A or G or is absent

SEQ ID NO: 41980 - protein, 30 aa, Artificial Sequence; identical to SEQ ID NO: 27001
  GFR-binding peptide

SEQ ID NO: 41981 - protein, 35 aa, Artificial Sequence; identical to SEQ ID NO: 27003
  GFR-binding peptide
  MOD_RES (33), (34): Xaa is C or S
  MOD_RES (11), (12), (13), (14), (15): Xaa is A or G
  MOD_RES (16), (17), (18), (19): Xaa is A or G or is absent

SEQ ID NO: 41982 - protein, 35 aa, Artificial Sequence; identical to SEQ ID NO: 25980
  GFR-binding peptide
  MOD_RES (34), (35): Xaa is C or S
  MOD_RES (12), (13), (14), (15), (16): Xaa is A or G
  MOD_RES (17), (18), (19), (20): Xaa is A or G or is absent

SEQ ID NO: 41983 - protein, 32 aa, Artificial Sequence
  GFR-binding peptide
  MOD_RES (11), (12), (13), (14), (15): Xaa is A or G
  MOD_RES (16), (17), (18), (19): Xaa is A or G or is absent
EEVIMEYQKYXXXXXXXXXIYLMSIPSTKVPA

SEQ ID NO: 41984 - protein, 39 aa, Artificial Sequence; identical to SEQ ID NO: 23967
  GFR-binding peptide
  MOD_RES (34), (35): Xaa is C or S
  MOD_RES (12), (13), (14), (15), (16): Xaa is A or G
  MOD_RES (17), (18), (19), (20): Xaa is A or G or is absent

SEQ ID NO: 41985 - protein, 37 aa, Artificial Sequence; identical to SEQ ID NO: 27007
  GFR-binding peptide
  MOD_RES (31), (32): Xaa is C or S

SEQ ID NO: 41986 - protein, 33 aa, Artificial Sequence
  GFR-binding peptide
  MOD_RES (12), (13), (14), (15), (16): Xaa is A or G
  MOD_RES (17), (18), (19), (20): Xaa is A or G or is absent
RDVVMGEYQKYXXXXXXXXXIYLMSIPSMKTPT

SEQ ID NO: 41987 - protein, 40 aa, Artificial Sequence; identical to SEQ ID NO: 25002
  GFR-binding peptide
  MOD_RES (1), (35), (36): Xaa is C or S
  MOD_RES (13), (14), (15), (16), (17): Xaa is A or G
  MOD_RES (18), (19), (20), (21): Xaa is A or G or is absent

SEQ ID NO: 41988 - protein, 41 aa, Artificial Sequence; identical to SEQ ID NO: 25986
  GFR-binding peptide
  MOD_RES (1), (35), (36): Xaa is C or S
  MOD_RES (13), (14), (15), (16), (17): Xaa is A or G
  MOD_RES (18), (19), (20), (21): Xaa is A or G or is absent

SEQ ID NO: 41989 - protein, 35 aa, Artificial Sequence
  GFR-binding peptide
  MOD_RES (1), (32), (33): Xaa is C or S
XEEVIMEYQKYLLVRGNDIYLMSIPSTKVPAXXTS

SEQ ID NO: 41990 - protein, 39 aa, Artificial Sequence; identical to SEQ ID NO: 23970
  GFR-binding peptide
  MOD_RES (1), (3), (37), (38): Xaa is C or S
  MOD_RES (15), (16), (17), (18), (19): Xaa is A or G
  MOD_RES (20), (21), (22), (23): Xaa is A or G or is absent

SEQ ID NO: 41991 - protein, 38 aa, Artificial Sequence; identical to SEQ ID NO: 25005
  GFR-binding peptide
  MOD_RES (1), (3), (37), (38): Xaa is C or S
  MOD_RES (15), (16), (17), (18), (19): Xaa is A or G
  MOD_RES (20), (21), (22), (23): Xaa is A or G or is absent

SEQ ID NO: 41992 - protein, 38 aa, Artificial Sequence
  GFR-binding peptide
  MOD_RES (33), (34): Xaa is C or S
  MOD_RES (11), (12), (13), (14), (15): Xaa is A or G
  MOD_RES (16), (17), (18), (19): Xaa is A or G or is absent
EEVIMEYQKYXXXXXXXXXIYLMSIPSTKVPAXXTSPV

SEQ ID NO: 41993 - protein, 32 aa, Artificial Sequence; identical to SEQ ID NO: 25006
  GFR-binding peptide
  MOD_RES (11), (12), (13), (14), (15): Xaa is A or G
  MOD_RES (16), (17), (18), (19): Xaa is A or G or is absent

SEQ ID NO: 41994 - protein, 41 aa, Artificial Sequence
  GFR-binding peptide
  MOD_RES (2), (4), (38), (39): Xaa is C or S
  MOD_RES (16), (17), (18), (19), (20): Xaa is A or G
  MOD_RES (21), (22), (23), (24): Xaa is A or G or is absent
SXGXRDVVMGEYQKYXXXXXXXXXIYLMSIPSMKTPTXXPG

SEQ ID NO: 41995 - protein, 35 aa, Artificial Sequence
  GFR-binding peptide
  MOD_RES (33), (34): Xaa is C or S
  MOD_RES (11), (12), (13), (14), (15): Xaa is A or G
  MOD_RES (16), (17), (18), (19): Xaa is A or G or is absent
DVVMGEYQKYXXXXXXXXXIYLMSIPSMKTPTXXP

SEQ ID NO: 41996 - protein, 33 aa, Artificial Sequence; identical to SEQ ID NO: 25993
  GFR-binding peptide
  MOD_RES (32), (33): Xaa is C or S

SEQ ID NO: 41997 - protein, 42 aa, Artificial Sequence; identical to SEQ ID NO: 23972
  GFR-binding peptide
  MOD_RES (1), (3), (38), (39): Xaa is C or S
  MOD_RES (16), (17), (18), (19), (20): Xaa is A or G
  MOD_RES (21), (22), (23), (24): Xaa is A or G or is absent

SEQ ID NO: 41998 - protein, 33 aa, Artificial Sequence; identical to SEQ ID NO: 25012
  GFR-binding peptide
  MOD_RES (33), (33): Xaa is C or S
  MOD_RES (11), (12), (13), (14), (15): Xaa is A or G
  MOD_RES (16), (17), (18), (19): Xaa is A or G or is absent

SEQ ID NO: 41999 - protein, 35 aa, Artificial Sequence; identical to SEQ ID NO: 25013
  GFR-binding peptide
  MOD_RES (1), (3), (35): Xaa is C or S

SEQ ID NO: 42000 - protein, 31 aa, Artificial Sequence
  GFR-binding peptide
  MOD_RES (1), (1): Xaa is C or S
XEEVIMEYQKYLLVRGNDIYLMSIPSTKVPA

SEQ ID NO: 42001 - protein, 33 aa, Artificial Sequence
  GFR-binding peptide
  MOD_RES (1), (1): Xaa is C or S
  MOD_RES (12), (13), (14), (15), (16): Xaa is A or G
  MOD_RES (17), (18), (19), (20): Xaa is A or G or is absent
XEEVIMEYQKYXXXXXXXXXIYLMSIPSTKVPA

SEQ ID NO: 42002 - protein, 32 aa, Artificial Sequence; identical to SEQ ID NO: 25014
  GFR-binding peptide
  MOD_RES (11), (12), (13), (14), (15): Xaa is A or G
  MOD_RES (16), (17), (18), (19): Xaa is A or G or is absent

SEQ ID NO: 42003 - protein, 33 aa, Artificial Sequence; identical to SEQ ID NO: 25016
  GFR-binding peptide
  MOD_RES (33), (33): Xaa is C or S
  MOD_RES (11), (12), (13), (14), (15): Xaa is A or G
  MOD_RES (16), (17), (18), (19): Xaa is A or G or is absent

SEQ ID NO: 42004 - protein, 37 aa, Artificial Sequence
  GFR-binding peptide
  MOD_RES (34), (35): Xaa is C or S
  MOD_RES (12), (13), (14), (15), (16): Xaa is A or G
  MOD_RES (17), (18), (19), (20): Xaa is A or G or is absent
RDVVMGEYQKYXXXXXXXXXIYLMSIPSMKTPTXXPG

SEQ ID NO: 42005 - protein, 37 aa, Artificial Sequence; identical to SEQ ID NO: 23980
  GFR-binding peptide
  MOD_RES (32), (33): Xaa is C or S

SEQ ID NO: 42006 - protein, 39 aa, Artificial Sequence; identical to SEQ ID NO: 25018
  GFR-binding peptide
  MOD_RES (35), (36): Xaa is C or S
  MOD_RES (13), (14), (15), (16), (17): Xaa is A or G
  MOD_RES (18), (19), (20), (21): Xaa is A or G or is absent

SEQ ID NO: 42007 - protein, 39 aa, Artificial Sequence; identical to SEQ ID NO: 27014
  GFR-binding peptide
  MOD_RES (33), (34): Xaa is C or S
  MOD_RES (11), (12), (13), (14), (15): Xaa is A or G
  MOD_RES (16), (17), (18), (19): Xaa is A or G or is absent

SEQ ID NO: 42008 - protein, 37 aa, Artificial Sequence; identical to SEQ ID NO: 25021
  GFR-binding peptide
  MOD_RES (32), (33): Xaa is C or S

SEQ ID NO: 42009 - protein, 40 aa, Artificial Sequence
  GFR-binding peptide
  MOD_RES (2), (4), (38), (39): Xaa is C or S
  MOD_RES (16), (17), (18), (19), (20): Xaa is A or G
  MOD_RES (21), (22), (23), (24): Xaa is A or G or is absent
SXGXRDVVMGEYQKYXXXXXXXXXIYLMSIPSMKTPTXXP

SEQ ID NO: 42010 - protein, 38 aa, Artificial Sequence; identical to SEQ ID NO: 25024
  GFR-binding peptide
  MOD_RES (2), (34), (35): Xaa is C or S

SEQ ID NO: 42011 - protein, 39 aa, Artificial Sequence; identical to SEQ ID NO: 25026
  GFR-binding peptide
  MOD_RES (2), (34), (35): Xaa is C or S

SEQ ID NO: 42012 - protein, 33 aa, Artificial Sequence; identical to SEQ ID NO: 26009
  GFR-binding peptide
  MOD_RES (33), (33): Xaa is C or S
  MOD_RES (11), (12), (13), (14), (15): Xaa is A or G
  MOD_RES (16), (17), (18), (19): Xaa is A or G or is absent

SEQ ID NO: 42013 - protein, 31 aa, Artificial Sequence; identical to SEQ ID NO: 23990
  GFR-binding peptide
  MOD_RES (31), (31): Xaa is C or S

SEQ ID NO: 42014 - protein, 40 aa, Artificial Sequence; identical to SEQ ID NO: 23991
  GFR-binding peptide
  MOD_RES (2), (34), (35): Xaa is C or S

SEQ ID NO: 42015 - protein, 41 aa, Artificial Sequence
  GFR-binding peptide
  MOD_RES (2), (35), (36): Xaa is C or S
  MOD_RES (13), (14), (15), (16), (17): Xaa is A or G
  MOD_RES (18), (19), (20), (21): Xaa is A or G or is absent
GXEEVIMEYQKYXXXXXXXXXIYLMSIPSTKVPAXXTSPVR

SEQ ID NO: 42016 - protein, 40 aa, Artificial Sequence; identical to SEQ ID NO: 25033
  GFR-binding peptide
  MOD_RES (2), (37), (38): Xaa is C or S
  MOD_RES (15), (16), (17), (18), (19): Xaa is A or G
  MOD_RES (20), (21), (22), (23): Xaa is A or G or is absent

SEQ ID NO: 42017 - protein, 35 aa, Artificial Sequence; identical to SEQ ID NO: 25035
  GFR-binding peptide
  MOD_RES (32), (33): Xaa is C or S

SEQ ID NO: 42018 - protein, 33 aa, Artificial Sequence; identical to SEQ ID NO: 27032
  GFR-binding peptide
  MOD_RES (1), (33): Xaa is C or S

SEQ ID NO: 42019 - protein, 38 aa, Artificial Sequence; identical to SEQ ID NO: 27035
  GFR-binding peptide
  MOD_RES (1), (34), (35): Xaa is C or S

SEQ ID NO: 42020 - protein, 40 aa, Artificial Sequence; identical to SEQ ID NO: 26025
  GFR-binding peptide
  MOD_RES (34), (35): Xaa is C or S
  MOD_RES (12), (13), (14), (15), (16): Xaa is A or G
  MOD_RES (17), (18), (19), (20): Xaa is A or G or is absent

SEQ ID NO: 42021 - protein, 37 aa, Artificial Sequence
  GFR-binding peptide
  MOD_RES (1), (34), (35): Xaa is C or S
  MOD_RES (12), (13), (14), (15), (16): Xaa is A or G
  MOD_RES (17), (18), (19), (20): Xaa is A or G or is absent
XEEVIMEYQKYXXXXXXXXXIYLMSIPSTKVPAXXTS

SEQ ID NO: 42022 - protein, 38 aa, Artificial Sequence
  GFR-binding peptide
  MOD_RES (1), (33), (34): Xaa is C or S
XRDVVMGEYQKYIIQQKDNIYLMSIPSMKTPTXXPGAS

SEQ ID NO: 42023 - protein, 37 aa, Artificial Sequence; identical to SEQ ID NO: 26028
  GFR-binding peptide
  MOD_RES (1), (3), (37): Xaa is C or S
  MOD_RES (15), (16), (17), (18), (19): Xaa is A or G
  MOD_RES (20), (21), (22), (23): Xaa is A or G or is absent

SEQ ID NO: 42024 - protein, 42 aa, Artificial Sequence; identical to SEQ ID NO: 27037
  GFR-binding peptide
  MOD_RES (2), (36), (37): Xaa is C or S
  MOD_RES (14), (15), (16), (17), (18): Xaa is A or G
  MOD_RES (19), (20), (21), (22): Xaa is A or G or is absent

SEQ ID NO: 42025 - protein, 42 aa, Artificial Sequence; identical to SEQ ID NO: 24001
  GFR-binding peptide
  MOD_RES (2), (4), (36), (37): Xaa is C or S

SEQ ID NO: 42026 - protein, 41 aa, Artificial Sequence
  GFR-binding peptide
  MOD_RES (2), (4), (37), (38): Xaa is C or S
  MOD_RES (15), (16), (17), (18), (19): Xaa is A or G
  MOD_RES (20), (21), (22), (23): Xaa is A or G or is absent
LXGXEEVIMEYQKYXXXXXXXXXIYLMSIPSTKVPAXXTSP

SEQ ID NO: 42027 - protein, 39 aa, Artificial Sequence; identical to SEQ ID NO: 25044
  GFR-binding peptide
  MOD_RES (1), (3), (37), (38): Xaa is C or S
  MOD_RES (15), (16), (17), (18), (19): Xaa is A or G
  MOD_RES (20), (21), (22), (23): Xaa is A or G or is absent

SEQ ID NO: 42028 - protein, 43 aa, Artificial Sequence; identical to SEQ ID NO: 25049
  GFR-binding peptide
  MOD_RES (2), (4), (38), (39): Xaa is C or S
  MOD_RES (16), (17), (18), (19), (20): Xaa is A or G
  MOD_RES (21), (22), (23), (24): Xaa is A or G or is absent

SEQ ID NO: 42029 - protein, 38 aa, Artificial Sequence
  GFR-binding peptide
  MOD_RES (2), (34), (35): Xaa is C or S
GXRDVVMGEYQKYIIQQKDNIYLMSIPSMKTPTXXPGA

SEQ ID NO: 42030 - protein, 40 aa, Artificial Sequence; identical to SEQ ID NO: 24007
  GFR-binding peptide
  MOD_RES (2), (4), (38), (39): Xaa is C or S
  MOD_RES (16), (17), (18), (19), (20): Xaa is A or G
  MOD_RES (21), (22), (23), (24): Xaa is A or G or is absent

SEQ ID NO: 42031 - protein, 37 aa, Artificial Sequence
  GFR-binding peptide
  MOD_RES (2), (4), (36), (37): Xaa is C or S
SXGXRDVVMGEYQKYIIQQKDNIYLMSIPSMKTPTXX

SEQ ID NO: 42032 - protein, 40 aa, Artificial Sequence; identical to SEQ ID NO: 24010
  GFR-binding peptide
  MOD_RES (1), (3), (35), (36): Xaa is C or S

SEQ ID NO: 42033 - protein, 41 aa, Artificial Sequence; identical to SEQ ID NO: 25055
  GFR-binding peptide
  MOD_RES (2), (4), (38), (39): Xaa is C or S
  MOD_RES (16), (17), (18), (19), (20): Xaa is A or G
  MOD_RES (21), (22), (23), (24): Xaa is A or G or is absent

SEQ ID NO: 42034 - protein, 36 aa, Artificial Sequence; identical to SEQ ID NO: 27047
  GFR-binding peptide
  MOD_RES (34), (35): Xaa is C or S
  MOD_RES (12), (13), (14), (15), (16): Xaa is A or G
  MOD_RES (17), (18), (19), (20): Xaa is A or G or is absent

SEQ ID NO: 42035 - protein, 37 aa, Artificial Sequence; identical to SEQ ID NO: 24012
  GFR-binding peptide
  MOD_RES (1), (3), (35), (36): Xaa is C or S

SEQ ID NO: 42036 - protein, 44 aa, Artificial Sequence; identical to SEQ ID NO: 26043
  GFR-binding peptide
  MOD_RES (2), (4), (38), (39): Xaa is C or S
  MOD_RES (16), (17), (18), (19), (20): Xaa is A or G
  MOD_RES (21), (22), (23), (24): Xaa is A or G or is absent

SEQ ID NO: 42037 - protein, 39 aa, Artificial Sequence; identical to SEQ ID NO: 25056
  GFR-binding peptide
  MOD_RES (2), (4), (38), (39): Xaa is C or S
  MOD_RES (16), (17), (18), (19), (20): Xaa is A or G
  MOD_RES (21), (22), (23), (24): Xaa is A or G or is absent

SEQ ID NO: 42038 - protein, 39 aa, Artificial Sequence; identical to SEQ ID NO: 24013
  GFR-binding peptide
  MOD_RES (2), (4), (38), (39): Xaa is C or S
  MOD_RES (16), (17), (18), (19), (20): Xaa is A or G
  MOD_RES (21), (22), (23), (24): Xaa is A or G or is absent

SEQ ID NO: 42039 - protein, 33 aa, Artificial Sequence; identical to SEQ ID NO: 27048
  GFR-binding peptide
  MOD_RES (2), (2): Xaa is C or S

SEQ ID NO: 42040 - protein, 43 aa, Artificial Sequence; identical to SEQ ID NO: 27050
  GFR-binding peptide
  MOD_RES (1), (3), (37), (38): Xaa is C or S
  MOD_RES (15), (16), (17), (18), (19): Xaa is A or G
  MOD_RES (20), (21), (22), (23): Xaa is A or G or is absent

SEQ ID NO: 42041 - protein, 40 aa, Artificial Sequence; identical to SEQ ID NO: 26047
  GFR-binding peptide
  MOD_RES (1), (3), (37), (38): Xaa is C or S
  MOD_RES (15), (16), (17), (18), (19): Xaa is A or G
  MOD_RES (20), (21), (22), (23): Xaa is A or G or is absent

SEQ ID NO: 42042 - protein, 40 aa, Artificial Sequence; identical to SEQ ID NO: 25057
  GFR-binding peptide
  MOD_RES (1), (35), (36): Xaa is C or S
  MOD_RES (13), (14), (15), (16), (17): Xaa is A or G
  MOD_RES (18), (19), (20), (21): Xaa is A or G or is absent

SEQ ID NO: 42043 - protein, 35 aa, Artificial Sequence
  GFR-binding peptide
  MOD_RES (1), (35): Xaa is C or S
  MOD_RES (13), (14), (15), (16), (17): Xaa is A or G
  MOD_RES (18), (19), (20), (21): Xaa is A or G or is absent
XRDVVMGEYQKYXXXXXXXXXIYLMSIPSMKTPTX

SEQ ID NO: 42044 - protein, 38 aa, Artificial Sequence; identical to SEQ ID NO: 25059
  GFR-binding peptide
  MOD_RES (2), (34), (35): Xaa is C or S

SEQ ID NO: 42045 - protein, 40 aa, Artificial Sequence; identical to SEQ ID NO: 25060
  GFR-binding peptide
  MOD_RES (1), (36), (37): Xaa is C or S
  MOD_RES (14), (15), (16), (17), (18): Xaa is A or G
  MOD_RES (19), (20), (21), (22): Xaa is A or G or is absent

SEQ ID NO: 42046 - protein, 39 aa, Artificial Sequence; identical to SEQ ID NO: 24018
  GFR-binding peptide
  MOD_RES (1), (33): Xaa is C or S

SEQ ID NO: 42047 - protein, 34 aa, Artificial Sequence; identical to SEQ ID NO: 26051
  GFR-binding peptide
  MOD_RES (1), (33), (34): Xaa is C or S

SEQ ID NO: 42048 - protein, 39 aa, Artificial Sequence
  GFR-binding peptide
  MOD_RES (1), (34), (35): Xaa is C or S
  MOD_RES (12), (13), (14), (15), (16): Xaa is A or G
  MOD_RES (17), (18), (19), (20): Xaa is A or G or is absent
XEEVIMEYQKYXXXXXXXXXIYLMSIPSTKVPAXXTSPV

SEQ ID NO: 42049 - protein, 39 aa, Artificial Sequence; identical to SEQ ID NO: 24019
  GFR-binding peptide
  MOD_RES (34), (35): Xaa is C or S
  MOD_RES (12), (13), (14), (15), (16): Xaa is A or G
  MOD_RES (17), (18), (19), (20): Xaa is A or G or is absent

SEQ ID NO: 42050 - protein, 33 aa, Artificial Sequence; identical to SEQ ID NO: 26054
  GFR-binding peptide
  MOD_RES (31), (32): Xaa is C or S

SEQ ID NO: 42051 - protein, 36 aa, Artificial Sequence; identical to SEQ ID NO: 25064
  GFR-binding peptide
  MOD_RES (32), (33): Xaa is C or S

SEQ ID NO: 42052 - protein, 34 aa, Artificial Sequence; identical to SEQ ID NO: 27058
  GFR-binding peptide
  MOD_RES (2), (34): Xaa is C or S

SEQ ID NO: 42053 - protein, 42 aa, Artificial Sequence; identical to SEQ ID NO: 25066
  GFR-binding peptide
  MOD_RES (1), (3), (37), (38): Xaa is C or S
  MOD_RES (15), (16), (17), (18), (19): Xaa is A or G
  MOD_RES (20), (21), (22), (23): Xaa is A or G or is absent

SEQ ID NO: 42054 - protein, 36 aa, Artificial Sequence; identical to SEQ ID NO: 27061
  GFR-binding peptide
  MOD_RES (34), (35): Xaa is C or S
  MOD_RES (12), (13), (14), (15), (16): Xaa is A or G
  MOD_RES (17), (18), (19), (20): Xaa is A or G or is absent

SEQ ID NO: 42055 - protein, 33 aa, Artificial Sequence; identical to SEQ ID NO: 26060
  GFR-binding peptide
  MOD_RES (31), (32): Xaa is C or S

SEQ ID NO: 42056 - protein, 39 aa, Artificial Sequence; identical to SEQ ID NO: 26061
  GFR-binding peptide
  MOD_RES (2), (36), (37): Xaa is C or S
  MOD_RES (14), (15), (16), (17), (18): Xaa is A or G
  MOD_RES (19), (20), (21), (22): Xaa is A or G or is absent

SEQ ID NO: 42057 - protein, 38 aa, Artificial Sequence; identical to SEQ ID NO: 24026
  GFR-binding peptide
  MOD_RES (1), (3), (37): Xaa is C or S
  MOD_RES (15), (16), (17), (18), (19): Xaa is A or G
  MOD_RES (20), (21), (22), (23): Xaa is A or G or is absent

SEQ ID NO: 42058 - protein, 37 aa, Artificial Sequence; identical to SEQ ID NO: 25071
  GFR-binding peptide
  MOD_RES (1), (33), (34): Xaa is C or S

SEQ ID NO: 42059 - protein, 37 aa, Artificial Sequence; identical to SEQ ID NO: 26064
  GFR-binding peptide
  MOD_RES (1), (3), (35), (36): Xaa is C or S

SEQ ID NO: 42060 - protein, 37 aa, Artificial Sequence; identical to SEQ ID NO: 25077
  GFR-binding peptide
  MOD_RES (33), (34): Xaa is C or S
  MOD_RES (11), (12), (13), (14), (15): Xaa is A or G
  MOD_RES (16), (17), (18), (19): Xaa is A or G or is absent

SEQ ID NO: 42061 - protein, 36 aa, Artificial Sequence; identical to SEQ ID NO: 24030
  GFR-binding peptide
  MOD_RES (2), (4), (36): Xaa is C or S

SEQ ID NO: 42062 - protein, 39 aa, Artificial Sequence; identical to SEQ ID NO: 25081
  GFR-binding peptide
  MOD_RES (33), (34): Xaa is C or S
  MOD_RES (11), (12), (13), (14), (15): Xaa is A or G
  MOD_RES (16), (17), (18), (19): Xaa is A or G or is absent

SEQ ID NO: 42063 - protein, 32 aa, Artificial Sequence; identical to SEQ ID NO: 24034
  GFR-binding peptide
  MOD_RES (32), (32): Xaa is C or S

SEQ ID NO: 42064 - protein, 36 aa, Artificial Sequence; identical to SEQ ID NO: 27073
  GFR-binding peptide
  MOD_RES (1), (35), (36): Xaa is C or S
  MOD_RES (13), (14), (15), (16), (17): Xaa is A or G
  MOD_RES (18), (19), (20), (21): Xaa is A or G or is absent

SEQ ID NO: 42065 - protein, 37 aa, Artificial Sequence; identical to SEQ ID NO: 27074
  GFR-binding peptide
  MOD_RES (33), (34): Xaa is C or S
  MOD_RES (11), (12), (13), (14), (15): Xaa is A or G
  MOD_RES (16), (17), (18), (19): Xaa is A or G or is absent

SEQ ID NO: 42066 - protein, 33 aa, Artificial Sequence; identical to SEQ ID NO: 27076
  GFR-binding peptide
  MOD_RES (1), (33): Xaa is C or S

SEQ ID NO: 42067 - protein, 37 aa, Artificial Sequence
  GFR-binding peptide
  MOD_RES (31), (32): Xaa is C or S
RVVMNEYQKYIVNSSDDIYLVSIPSLKTPAXXPKPVH

SEQ ID NO: 42068 - protein, 40 aa, Artificial Sequence
  GFR-binding peptide
  MOD_RES (2), (4), (37), (38): Xaa is C or S
  MOD_RES (15), (16), (17), (18), (19): Xaa is A or G
  MOD_RES (20), (21), (22), (23): Xaa is A or G or is absent
LXGXEEVIMEYQKYXXXXXXXXXIYLMSIPSTKVPAXXTS

SEQ ID NO: 42069 - protein, 35 aa, Artificial Sequence
  GFR-binding peptide
  MOD_RES (33), (34): Xaa is C or S
  MOD_RES (11), (12), (13), (14), (15): Xaa is A or G
  MOD_RES (16), (17), (18), (19): Xaa is A or G or is absent
EEVIMEYQKYXXXXXXXXXIYLMSIPSTKVPAXXT

SEQ ID NO: 42070 - protein, 32 aa, Artificial Sequence; identical to SEQ ID NO: 24043
  GFR-binding peptide
  MOD_RES (32), (32): Xaa is C or S

SEQ ID NO: 42071 - protein, 35 aa, Artificial Sequence; identical to SEQ ID NO: 26078
  GFR-binding peptide
  MOD_RES (1), (3), (35): Xaa is C or S

SEQ ID NO: 42072 - protein, 43 aa, Artificial Sequence; identical to SEQ ID NO: 26079
  GFR-binding peptide
  MOD_RES (2), (4), (38), (39): Xaa is C or S
  MOD_RES (16), (17), (18), (19), (20): Xaa is A or G
  MOD_RES (21), (22), (23), (24): Xaa is A or G or is absent

SEQ ID NO: 42073 - protein, 40 aa, Artificial Sequence
  GFR-binding peptide
  MOD_RES (34), (35): Xaa is C or S
  MOD_RES (12), (13), (14), (15), (16): Xaa is A or G
  MOD_RES (17), (18), (19), (20): Xaa is A or G or is absent
SRVVMNEYQKYXXXXXXXXXIYLVSIPSLKTPAXXPKPVH

SEQ ID NO: 42074 - protein, 41 aa, Artificial Sequence
  GFR-binding peptide
  MOD_RES (2), (36), (37): Xaa is C or S
  MOD_RES (14), (15), (16), (17), (18): Xaa is A or G
  MOD_RES (19), (20), (21), (22): Xaa is A or G or is absent
GXRDVVMGEYQKYXXXXXXXXXIYLMSIPSMKTPTXXPGAS

SEQ ID NO: 42075 - protein, 33 aa, Artificial Sequence; identical to SEQ ID NO: 24051
  GFR-binding peptide
  MOD_RES (32), (33): Xaa is C or S

SEQ ID NO: 42076 - protein, 37 aa, Artificial Sequence; identical to SEQ ID NO: 24052
  GFR-binding peptide
  MOD_RES (1), (33), (34): Xaa is C or S

SEQ ID NO: 42077 - protein, 39 aa, Artificial Sequence
  GFR-binding peptide
  MOD_RES (1), (33), (34): Xaa is C or S
XRDVVMGEYQKYIIQQKDNIYLMSIPSMKTPTXXPGASG

SEQ ID NO: 42078 - protein, 39 aa, Artificial Sequence; identical to SEQ ID NO: 24053
  GFR-binding peptide
  MOD_RES (1), (35), (36): Xaa is C or S
  MOD_RES (13), (14), (15), (16), (17): Xaa is A or G
  MOD_RES (18), (19), (20), (21): Xaa is A or G or is absent

SEQ ID NO: 42079 - protein, 37 aa, Artificial Sequence; identical to SEQ ID NO: 24057
  GFR-binding peptide
  MOD_RES (2), (4), (36), (37): Xaa is C or S

SEQ ID NO: 42080 - protein, 34 aa, Artificial Sequence; identical to SEQ ID NO: 27095
  GFR-binding peptide
  MOD_RES (34), (34): Xaa is C or S
  MOD_RES (12), (13), (14), (15), (16): Xaa is A or G
  MOD_RES (17), (18), (19), (20): Xaa is A or G or is absent

SEQ ID NO: 42081 - protein, 36 aa, Artificial Sequence; identical to SEQ ID NO: 26083
  GFR-binding peptide
  MOD_RES (32), (33): Xaa is C or S

SEQ ID NO: 42082 - protein, 34 aa, Artificial Sequence; identical to SEQ ID NO: 25093
  GFR-binding peptide
  MOD_RES (34), (34): Xaa is C or S
  MOD_RES (12), (13), (14), (15), (16): Xaa is A or G
  MOD_RES (17), (18), (19), (20): Xaa is A or G or is absent

SEQ ID NO: 42083 - protein, 40 aa, Artificial Sequence; identical to SEQ ID NO: 27100
  GFR-binding peptide
  MOD_RES (1), (3), (37), (38): Xaa is C or S
  MOD_RES (15), (16), (17), (18), (19): Xaa is A or G
  MOD_RES (20), (21), (22), (23): Xaa is A or G or is absent

SEQ ID NO: 42084 - protein, 34 aa, Artificial Sequence; identical to SEQ ID NO: 27101
  GFR-binding peptide
  MOD_RES (1), (34): Xaa is C or S

SEQ ID NO: 42085 - protein, 36 aa, Artificial Sequence; identical to SEQ ID NO: 24063
  GFR-binding peptide
  MOD_RES (2), (34), (35): Xaa is C or S

SEQ ID NO: 42086 - protein, 32 aa, Artificial Sequence; identical to SEQ ID NO: 26091
  GFR-binding peptide
  MOD_RES (32), (32): Xaa is C or S

SEQ ID NO: 42087 - protein, 42 aa, Artificial Sequence; identical to SEQ ID NO: 24068
  GFR-binding peptide
  MOD_RES (2), (4), (38), (39): Xaa is C or S
  MOD_RES (16), (17), (18), (19), (20): Xaa is A or G
  MOD_RES (21), (22), (23), (24): Xaa is A or G or is absent

SEQ ID NO: 42088 - protein, 41 aa, Artificial Sequence; identical to SEQ ID NO: 26092
  GFR-binding peptide
  MOD_RES (1), (3), (37): Xaa is C or S
  MOD_RES (15), (16), (17), (18), (19): Xaa is A or G
  MOD_RES (20), (21), (22), (23): Xaa is A or G or is absent

SEQ ID NO: 42089 - protein, 40 aa, Artificial Sequence; identical to SEQ ID NO: 24070
  GFR-binding peptide
  MOD_RES (2), (4), (36), (37): Xaa is C or S

SEQ ID NO: 42090 - protein, 33 aa, Artificial Sequence; identical to SEQ ID NO: 27107
  GFR-binding peptide
  MOD_RES (31), (32): Xaa is C or S

SEQ ID NO: 42091 - protein, 39 aa, Artificial Sequence; identical to SEQ ID NO: 25100
  GFR-binding peptide
  MOD_RES (2), (34), (35): Xaa is C or S

SEQ ID NO: 42092 - protein, 40 aa, Artificial Sequence; identical to SEQ ID NO: 25102
  GFR-binding peptide
  MOD_RES (1), (3), (37), (38): Xaa is C or S
  MOD_RES (15), (16), (17), (18), (19): Xaa is A or G
  MOD_RES (20), (21), (22), (23): Xaa is A or G or is absent

SEQ ID NO: 42093 - protein, 32 aa, Artificial Sequence; identical to SEQ ID NO: 27111
  GFR-binding peptide
  MOD_RES (1), (1): Xaa is C or S

SEQ ID NO: 42094 - protein, 38 aa, Artificial Sequence; identical to SEQ ID NO: 24076
  GFR-binding peptide
  MOD_RES (2), (35), (36): Xaa is C or S

SEQ ID NO: 42095 - protein, 38 aa, Artificial Sequence; identical to SEQ ID NO: 27112
  GFR-binding peptide
  MOD_RES (1), (33), (34): Xaa is C or S

SEQ ID NO: 42096 - protein, 32 aa, Artificial Sequence; identical to SEQ ID NO: 26100
  GFR-binding peptide
  MOD_RES (1), (1): Xaa is C or S

SEQ ID NO: 42097 - protein, 36 aa, Artificial Sequence; identical to SEQ ID NO: 27118
  GFR-binding peptide
  MOD_RES (32), (33): Xaa is C or S

SEQ ID NO: 42098 - protein, 40 aa, Artificial Sequence; identical to SEQ ID NO: 27120
  GFR-binding peptide
  MOD_RES (1), (3), (37), (38): Xaa is C or S
  MOD_RES (15), (16), (17), (18), (19): Xaa is A or G
  MOD_RES (20), (21), (22), (23): Xaa is A or G or is absent

SEQ ID NO: 42099 - protein, 41 aa, Artificial Sequence; identical to SEQ ID NO: 26103
  GFR-binding peptide
  MOD_RES (1), (3), (35), (36): Xaa is C or S

SEQ ID NO: 42100 - protein, 33 aa, Artificial Sequence; identical to SEQ ID NO: 27122
  GFR-binding peptide
  MOD_RES (32), (32): Xaa is C or S

SEQ ID NO: 42101 - protein, 33 aa, Artificial Sequence; identical to SEQ ID NO: 27124
  GFR-binding peptide
  MOD_RES (33), (33): Xaa is C or S
  MOD_RES (11), (12), (13), (14), (15): Xaa is A or G
  MOD_RES (16), (17), (18), (19): Xaa is A or G or is absent

SEQ ID NO: 42102 - protein, 38 aa, Artificial Sequence; identical to SEQ ID NO: 27126
  GFR-binding peptide
  MOD_RES (2), (4), (38): Xaa is C or S
  MOD_RES (16), (17), (18), (19), (20): Xaa is A or G
  MOD_RES (21), (22), (23), (24): Xaa is A or G or is absent

SEQ ID NO: 42103 - protein, 35 aa, Artificial Sequence; identical to SEQ ID NO: 24084
  GFR-binding peptide
  MOD_RES (2), (4): Xaa is C or S

SEQ ID NO: 42104 - protein, 37 aa, Artificial Sequence; identical to SEQ ID NO: 25116
  GFR-binding peptide
  MOD_RES (2), (4): Xaa is C or S
  MOD_RES (16), (17), (18), (19), (20): Xaa is A or G
  MOD_RES (21), (22), (23), (24): Xaa is A or G or is absent

SEQ ID NO: 42105 - protein, 34 aa, Artificial Sequence; identical to SEQ ID NO: 26113
  GFR-binding peptide
  MOD_RES (2), (34): Xaa is C or S

SEQ ID NO: 42106 - protein, 40 aa, Artificial Sequence
  GFR-binding peptide
  MOD_RES (34), (35): Xaa is C or S
  MOD_RES (12), (13), (14), (15), (16): Xaa is A or G
  MOD_RES (17), (18), (19), (20): Xaa is A or G or is absent
RDVVMGEYQKYXXXXXXXXXIYLMSIPSMKTPTXXPGASG

SEQ ID NO: 42107 - protein, 32 aa, Artificial Sequence
  GFR-binding peptide
  MOD_RES (32), (32): Xaa is C or S
RDVVMGEYQKYIIQQKDNIYLMSIPSMKTPTX

SEQ ID NO: 42108 - protein, 33 aa, Artificial Sequence; identical to SEQ ID NO: 27139
  GFR-binding peptide
  MOD_RES (32), (33): Xaa is C or S

SEQ ID NO: 42109 - protein, 38 aa, Artificial Sequence; identical to SEQ ID NO: 26115
  GFR-binding peptide
  MOD_RES (34), (35): Xaa is C or S
  MOD_RES (12), (13), (14), (15), (16): Xaa is A or G
  MOD_RES (17), (18), (19), (20): Xaa is A or G or is absent

SEQ ID NO: 42110 - protein, 40 aa, Artificial Sequence; identical to SEQ ID NO: 24092
  GFR-binding peptide
  MOD_RES (2), (34), (35): Xaa is C or S

SEQ ID NO: 42111 - protein, 36 aa, Artificial Sequence; identical to SEQ ID NO: 24093
  GFR-binding peptide
  MOD_RES (1), (35), (36): Xaa is C or S
  MOD_RES (13), (14), (15), (16), (17): Xaa is A or G
  MOD_RES (18), (19), (20), (21): Xaa is A or G or is absent

SEQ ID NO: 42112 - protein, 39 aa, Artificial Sequence; identical to SEQ ID NO: 26118
  GFR-binding peptide
  MOD_RES (1), (3), (35), (36): Xaa is C or S

SEQ ID NO: 42113 - protein, 38 aa, Artificial Sequence; identical to SEQ ID NO: 26121
  GFR-binding peptide
  MOD_RES (34), (34): Xaa is C or S
  MOD_RES (12), (13), (14), (15), (16): Xaa is A or G
  MOD_RES (17), (18), (19), (20): Xaa is A or G or is absent

SEQ ID NO: 42114 - protein, 38 aa, Artificial Sequence; identical to SEQ ID NO: 24095
  GFR-binding peptide
  MOD_RES (2), (4), (36), (37): Xaa is C or S

SEQ ID NO: 42115 - protein, 34 aa, Artificial Sequence; identical to SEQ ID NO: 25125
  GFR-binding peptide
  MOD_RES (33), (34): Xaa is C or S
  MOD_RES (11), (12), (13), (14), (15): Xaa is A or G
  MOD_RES (16), (17), (18), (19): Xaa is A or G or is absent

SEQ ID NO: 42116 - protein, 36 aa, Artificial Sequence; identical to SEQ ID NO: 26123
  GFR-binding peptide
  MOD_RES (2), (4), (36): Xaa is C or S

SEQ ID NO: 42117 - protein, 34 aa, Artificial Sequence; identical to SEQ ID NO: 26125
  GFR-binding peptide
  MOD_RES (2), (34): Xaa is C or S

SEQ ID NO: 42118 - protein, 38 aa, Artificial Sequence; identical to SEQ ID NO: 24104
  GFR-binding peptide
  MOD_RES (32), (33): Xaa is C or S

SEQ ID NO: 42119 - protein, 43 aa, Artificial Sequence; identical to SEQ ID NO: 27148
  GFR-binding peptide
  MOD_RES (1), (3), (37): Xaa is C or S
  MOD_RES (15), (16), (17), (18), (19): Xaa is A or G
  MOD_RES (20), (21), (22), (23): Xaa is A or G or is absent

SEQ ID NO: 42120 - protein, 39 aa, Artificial Sequence; identical to SEQ ID NO: 25132
  GFR-binding peptide
  MOD_RES (1), (35), (36): Xaa is C or S
  MOD_RES (13), (14), (15), (16), (17): Xaa is A or G
  MOD_RES (18), (19), (20), (21): Xaa is A or G or is absent

SEQ ID NO: 42121 - protein, 30 aa, Artificial Sequence; identical to SEQ ID NO: 26127
  GFR-binding peptide

SEQ ID NO: 42122 - protein, 40 aa, Artificial Sequence; identical to SEQ ID NO: 25133
  GFR-binding peptide
  MOD_RES (2), (4), (37), (38): Xaa is C or S

SEQ ID NO: 42123 - protein, 37 aa, Artificial Sequence; identical to SEQ ID NO: 27152
  GFR-binding peptide
  MOD_RES (2), (34): Xaa is C or S

SEQ ID NO: 42124 - protein, 37 aa, Artificial Sequence; identical to SEQ ID NO: 24106
  GFR-binding peptide
  MOD_RES (2), (36), (37): Xaa is C or S
  MOD_RES (14), (15), (16), (17), (18): Xaa is A or G
  MOD_RES (19), (20), (21), (22): Xaa is A or G or is absent

SEQ ID NO: 42125 - protein, 40 aa, Artificial Sequence; identical to SEQ ID NO: 24108
  GFR-binding peptide
  MOD_RES (2), (36), (37): Xaa is C or S
  MOD_RES (14), (15), (16), (17), (18): Xaa is A or G
  MOD_RES (19), (20), (21), (22): Xaa is A or G or is absent

SEQ ID NO: 42126 - protein, 36 aa, Artificial Sequence; identical to SEQ ID NO: 27156
  GFR-binding peptide
  MOD_RES (2), (34), (35): Xaa is C or S

SEQ ID NO: 42127 - protein, 32 aa, Artificial Sequence; identical to SEQ ID NO: 26132
  GFR-binding peptide
  MOD_RES (31), (31): Xaa is C or S

SEQ ID NO: 42128 - protein, 43 aa, Artificial Sequence
  GFR-binding peptide
  MOD_RES (1), (3), (37), (38): Xaa is C or S
  MOD_RES (15), (16), (17), (18), (19): Xaa is A or G
  MOD_RES (20), (21), (22), (23): Xaa is A or G or is absent
XGXSRVVMNEYQKYXXXXXXXXXIYLVSIPSLKTPAXXPKPVH

SEQ ID NO: 42129 - protein, 36 aa, Artificial Sequence; identical to SEQ ID NO: 25141
  GFR-binding peptide
  MOD_RES (1), (3), (36): Xaa is C or S

SEQ ID NO: 42130 - protein, 41 aa, Artificial Sequence; identical to SEQ ID NO: 27162
  GFR-binding peptide
  MOD_RES (35), (36): Xaa is C or S
  MOD_RES (13), (14), (15), (16), (17): Xaa is A or G
  MOD_RES (18), (19), (20), (21): Xaa is A or G or is absent

SEQ ID NO: 42131 - protein, 35 aa, Artificial Sequence; identical to SEQ ID NO: 27163
  GFR-binding peptide
  MOD_RES (1), (35): Xaa is C or S
  MOD_RES (13), (14), (15), (16), (17): Xaa is A or G
  MOD_RES (18), (19), (20), (21): Xaa is A or G or is absent

SEQ ID NO: 42132 - protein, 39 aa, Artificial Sequence; identical to SEQ ID NO: 25145
  GFR-binding peptide
  MOD_RES (2), (4), (38): Xaa is C or S
  MOD_RES (16), (17), (18), (19), (20): Xaa is A or G
  MOD_RES (21), (22), (23), (24): Xaa is A or G or is absent

SEQ ID NO: 42133 - protein, 38 aa, Artificial Sequence; identical to SEQ ID NO: 26138
  GFR-binding peptide
  MOD_RES (32), (33): Xaa is C or S

SEQ ID NO: 42134 - protein, 38 aa, Artificial Sequence; identical to SEQ ID NO: 26141
  GFR-binding peptide
  MOD_RES (1), (35), (36): Xaa is C or S
  MOD_RES (13), (14), (15), (16), (17): Xaa is A or G
  MOD_RES (18), (19), (20), (21): Xaa is A or G or is absent

SEQ ID NO: 42135 - protein, 36 aa, Artificial Sequence; identical to SEQ ID NO: 27166
  GFR-binding peptide
  MOD_RES (2), (2): Xaa is C or S
  MOD_RES (15), (16), (17), (18), (19): Xaa is A or G
  MOD_RES (20), (21), (22), (23): Xaa is A or G or is absent

SEQ ID NO: 42136 - protein, 36 aa, Artificial Sequence; identical to SEQ ID NO: 27167
  GFR-binding peptide
  MOD_RES (1), (33): Xaa is C or S

SEQ ID NO: 42137 - protein, 39 aa, Artificial Sequence; identical to SEQ ID NO: 27168
  GFR-binding peptide
  MOD_RES (1), (3), (35), (36): Xaa is C or S

SEQ ID NO: 42138 - protein, 38 aa, Artificial Sequence
  GFR-binding peptide
  MOD_RES (2), (36), (37): Xaa is C or S
  MOD_RES (14), (15), (16), (17), (18): Xaa is A or G
  MOD_RES (19), (20), (21), (22): Xaa is A or G or is absent
GXRDVVMGEYQKYXXXXXXXXXIYLMSIPSMKTPTXXP

SEQ ID NO: 42139 - protein, 35 aa, Artificial Sequence; identical to SEQ ID NO: 24125
  GFR-binding peptide
  MOD_RES (2), (2): Xaa is C or S
  MOD_RES (14), (15), (16), (17), (18): Xaa is A or G
  MOD_RES (19), (20), (21), (22): Xaa is A or G or is absent

SEQ ID NO: 42140 - protein, 39 aa, Artificial Sequence; identical to SEQ ID NO: 27170
  GFR-binding peptide
  MOD_RES (1), (33), (34): Xaa is C or S

SEQ ID NO: 42141 - protein, 38 aa, Artificial Sequence; identical to SEQ ID NO: 24128
  GFR-binding peptide
  MOD_RES (2), (4), (36), (37): Xaa is C or S

SEQ ID NO: 42142 - protein, 33 aa, Artificial Sequence
  GFR-binding peptide
  MOD_RES (2), (33): Xaa is C or S
GXEEVIMEYQKYLLVRGNDIYLMSIPSTKVPAX

SEQ ID NO: 42143 - protein, 34 aa, Artificial Sequence
  GFR-binding peptide
  MOD_RES (1), (1): Xaa is C or S
  MOD_RES (13), (14), (15), (16), (17): Xaa is A or G
  MOD_RES (18), (19), (20), (21): Xaa is A or G or is absent
XRDVVMGEYQKYXXXXXXXXXIYLMSIPSMKTPT

SEQ ID NO: 42144 - protein, 33 aa, Artificial Sequence; identical to SEQ ID NO: 26153
  GFR-binding peptide
  MOD_RES (33), (33): Xaa is C or S
  MOD_RES (11), (12), (13), (14), (15): Xaa is A or G
  MOD_RES (16), (17), (18), (19): Xaa is A or G or is absent

SEQ ID NO: 42145 - protein, 34 aa, Artificial Sequence; identical to SEQ ID NO: 25158
  GFR-binding peptide
  MOD_RES (32), (32): Xaa is C or S

SEQ ID NO: 42146 - protein, 38 aa, Artificial Sequence
  GFR-binding peptide
  MOD_RES (1), (3), (37), (38): Xaa is C or S
  MOD_RES (15), (16), (17), (18), (19): Xaa is A or G
  MOD_RES (20), (21), (22), (23): Xaa is A or G or is absent
XGXRDVVMGEYQKYXXXXXXXXXIYLMSIPSMKTPTXX

SEQ ID NO: 42147 - protein, 36 aa, Artificial Sequence; identical to SEQ ID NO: 26156
  GFR-binding peptide
  MOD_RES (1), (35): Xaa is C or S
  MOD_RES (13), (14), (15), (16), (17): Xaa is A or G
  MOD_RES (18), (19), (20), (21): Xaa is A or G or is absent

SEQ ID NO: 42148 - protein, 45 aa, Artificial Sequence; identical to SEQ ID NO: 24131
  GFR-binding peptide
  MOD_RES (2), (4), (39), (40): Xaa is C or S
  MOD_RES (17), (18), (19), (20), (21): Xaa is A or G
  MOD_RES (22), (23), (24), (25): Xaa is A or G or is absent

SEQ ID NO: 42149 - protein, 40 aa, Artificial Sequence; identical to SEQ ID NO: 24133
  GFR-binding peptide
  MOD_RES (2), (35), (36): Xaa is C or S

SEQ ID NO: 42150 - protein, 41 aa, Artificial Sequence; identical to SEQ ID NO: 24135
  GFR-binding peptide
  MOD_RES (1), (3), (37), (38): Xaa is C or S
  MOD_RES (15), (16), (17), (18), (19): Xaa is A or G
  MOD_RES (20), (21), (22), (23): Xaa is A or G or is absent

SEQ ID NO: 42151 - protein, 34 aa, Artificial Sequence; identical to SEQ ID NO: 26159
  GFR-binding peptide
  MOD_RES (2), (34): Xaa is C or S

SEQ ID NO: 42152 - protein, 35 aa, Artificial Sequence; identical to SEQ ID NO: 27182
  GFR-binding peptide
  MOD_RES (34), (34): Xaa is C or S
  MOD_RES (12), (13), (14), (15), (16): Xaa is A or G
  MOD_RES (17), (18), (19), (20): Xaa is A or G or is absent

SEQ ID NO: 42153 - protein, 35 aa, Artificial Sequence; identical to SEQ ID NO: 27183
  GFR-binding peptide
  MOD_RES (1), (3): Xaa is C or S

SEQ ID NO: 42154 - protein, 35 aa, Artificial Sequence; identical to SEQ ID NO: 25162
  GFR-binding peptide
  MOD_RES (31), (32): Xaa is C or S

SEQ ID NO: 42155 - protein, 42 aa, Artificial Sequence; identical to SEQ ID NO: 26164
  GFR-binding peptide
  MOD_RES (2), (36), (37): Xaa is C or S
  MOD_RES (14), (15), (16), (17), (18): Xaa is A or G
  MOD_RES (19), (20), (21), (22): Xaa is A or G or is absent

SEQ ID NO: 42156 - protein, 40 aa, Artificial Sequence; identical to SEQ ID NO: 26165
  GFR-binding peptide
  MOD_RES (1), (35), (36): Xaa is C or S
  MOD_RES (13), (14), (15), (16), (17): Xaa is A or G
  MOD_RES (18), (19), (20), (21): Xaa is A or G or is absent

SEQ ID NO: 42157 - protein, 38 aa, Artificial Sequence; identical to SEQ ID NO: 26166
  GFR-binding peptide
  MOD_RES (34), (35): Xaa is C or S
  MOD_RES (12), (13), (14), (15), (16): Xaa is A or G
  MOD_RES (17), (18), (19), (20): Xaa is A or G or is absent

SEQ ID NO: 42158 - protein, 34 aa, Artificial Sequence; identical to SEQ ID NO: 27186
  GFR-binding peptide
  MOD_RES (1), (1): Xaa is C or S
  MOD_RES (13), (14), (15), (16), (17): Xaa is A or G
  MOD_RES (18), (19), (20), (21): Xaa is A or G or is absent

SEQ ID NO: 42159 - protein, 42 aa, Artificial Sequence; identical to SEQ ID NO: 26169
  GFR-binding peptide
  MOD_RES (2), (4), (36), (37): Xaa is C or S

SEQ ID NO: 42160 - protein, 38 aa, Artificial Sequence; identical to SEQ ID NO: 24139
  GFR-binding peptide
  MOD_RES (2), (34), (35): Xaa is C or S

SEQ ID NO: 42161 - protein, 39 aa, Artificial Sequence; identical to SEQ ID NO: 27190
  GFR-binding peptide
  MOD_RES (1), (33), (34): Xaa is C or S

SEQ ID NO: 42162 - protein, 33 aa, Artificial Sequence; identical to SEQ ID NO: 26171
  GFR-binding peptide
  MOD_RES (31), (32): Xaa is C or S

SEQ ID NO: 42163 - protein, 39 aa, Artificial Sequence; identical to SEQ ID NO: 27191
  GFR-binding peptide
  MOD_RES (1), (3), (37), (38): Xaa is C or S
  MOD_RES (15), (16), (17), (18), (19): Xaa is A or G
  MOD_RES (20), (21), (22), (23): Xaa is A or G or is absent

SEQ ID NO: 42164 - protein, 36 aa, Artificial Sequence; identical to SEQ ID NO: 27192
  GFR-binding peptide
  MOD_RES (2), (34), (35): Xaa is C or S

SEQ ID NO: 42165 - protein, 38 aa, Artificial Sequence
  GFR-binding peptide
  MOD_RES (32), (33): Xaa is C or S
RDVVMGEYQKYIIQQKDNIYLMSIPSMKTPTXXPGASG

SEQ ID NO: 42166 - protein, 35 aa, Artificial Sequence; identical to SEQ ID NO: 26176
  GFR-binding peptide
  MOD_RES (31), (32): Xaa is C or S

SEQ ID NO: 42167 - protein, 35 aa, Artificial Sequence
  GFR-binding peptide
  MOD_RES (2), (2): Xaa is C or S
  MOD_RES (14), (15), (16), (17), (18): Xaa is A or G
  MOD_RES (19), (20), (21), (22): Xaa is A or G or is absent
GXRDVVMGEYQKYXXXXXXXXXIYLMSIPSMKTPT

SEQ ID NO: 42168 - protein, 44 aa, Artificial Sequence; identical to SEQ ID NO: 25173
  GFR-binding peptide
  MOD_RES (2), (4), (38), (39): Xaa is C or S
  MOD_RES (16), (17), (18), (19), (20): Xaa is A or G
  MOD_RES (21), (22), (23), (24): Xaa is A or G or is absent

SEQ ID NO: 42169 - protein, 39 aa, Artificial Sequence; identical to SEQ ID NO: 26179
  GFR-binding peptide
  MOD_RES (2), (4), (38), (39): Xaa is C or S
  MOD_RES (16), (17), (18), (19), (20): Xaa is A or G
  MOD_RES (21), (22), (23), (24): Xaa is A or G or is absent

SEQ ID NO: 42170 - protein, 44 aa, Artificial Sequence; identical to SEQ ID NO: 25174
  GFR-binding peptide
  MOD_RES (2), (4), (38), (39): Xaa is C or S
  MOD_RES (16), (17), (18), (19), (20): Xaa is A or G
  MOD_RES (21), (22), (23), (24): Xaa is A or G or is absent

SEQ ID NO: 42171 - protein, 37 aa, Artificial Sequence; identical to SEQ ID NO: 24143
  GFR-binding peptide
  MOD_RES (2), (4): Xaa is C or S
  MOD_RES (16), (17), (18), (19), (20): Xaa is A or G
  MOD_RES (21), (22), (23), (24): Xaa is A or G or is absent

SEQ ID NO: 42172 - protein, 37 aa, Artificial Sequence; identical to SEQ ID NO: 26182
  GFR-binding peptide
  MOD_RES (2), (36), (37): Xaa is C or S
  MOD_RES (14), (15), (16), (17), (18): Xaa is A or G
  MOD_RES (19), (20), (21), (22): Xaa is A or G or is absent

SEQ ID NO: 42173 - protein, 37 aa, Artificial Sequence; identical to SEQ ID NO: 25177
  GFR-binding peptide
  MOD_RES (2), (37): Xaa is C or S
  MOD_RES (15), (16), (17), (18), (19): Xaa is A or G
  MOD_RES (20), (21), (22), (23): Xaa is A or G or is absent

SEQ ID NO: 42174 - protein, 35 aa, Artificial Sequence; identical to SEQ ID NO: 26183
  GFR-binding peptide
  MOD_RES (2), (2): Xaa is C or S
  MOD_RES (14), (15), (16), (17), (18): Xaa is A or G
  MOD_RES (19), (20), (21), (22): Xaa is A or G or is absent

SEQ ID NO: 42175 - protein, 35 aa, Artificial Sequence; identical to SEQ ID NO: 25180
  GFR-binding peptide
  MOD_RES (34), (35): Xaa is C or S
  MOD_RES (12), (13), (14), (15), (16): Xaa is A or G
  MOD_RES (17), (18), (19), (20): Xaa is A or G or is absent

SEQ ID NO: 42176 - protein, 35 aa, Artificial Sequence; identical to SEQ ID NO: 26184
  GFR-binding peptide
  MOD_RES (2), (4): Xaa is C or S

SEQ ID NO: 42177 - protein, 40 aa, Artificial Sequence; identical to SEQ ID NO: 25181
  GFR-binding peptide
  MOD_RES (2), (4), (38), (39): Xaa is C or S
  MOD_RES (16), (17), (18), (19), (20): Xaa is A or G
  MOD_RES (21), (22), (23), (24): Xaa is A or G or is absent

SEQ ID NO: 42178 - protein, 33 aa, Artificial Sequence; identical to SEQ ID NO: 26188
  GFR-binding peptide
  MOD_RES (32), (33): Xaa is C or S

SEQ ID NO: 42179 - protein, 37 aa, Artificial Sequence; identical to SEQ ID NO: 24155
  GFR-binding peptide
  MOD_RES (1), (3), (36), (37): Xaa is C or S

SEQ ID NO: 42180 - protein, 43 aa, Artificial Sequence
  GFR-binding peptide
  MOD_RES (2), (4), (38), (39): Xaa is C or S
  MOD_RES (16), (17), (18), (19), (20): Xaa is A or G
  MOD_RES (21), (22), (23), (24): Xaa is A or G or is absent
SXGXRDVVMGEYQKYXXXXXXXXXIYLMSIPSMKTPTXXPGAS

SEQ ID NO: 42181 - protein, 35 aa, Artificial Sequence; identical to SEQ ID NO: 27207
  GFR-binding peptide
  MOD_RES (1), (3), (35): Xaa is C or S

SEQ ID NO: 42182 - protein, 38 aa, Artificial Sequence; identical to SEQ ID NO: 24158
  GFR-binding peptide
  MOD_RES (2), (36), (37): Xaa is C or S
  MOD_RES (14), (15), (16), (17), (18): Xaa is A or G
  MOD_RES (19), (20), (21), (22): Xaa is A or G or is absent

SEQ ID NO: 42183 - protein, 37 aa, Artificial Sequence; identical to SEQ ID NO: 25186
  GFR-binding peptide
  MOD_RES (1), (34), (35): Xaa is C or S

SEQ ID NO: 42184 - protein, 38 aa, Artificial Sequence; identical to SEQ ID NO: 26198
  GFR-binding peptide
  MOD_RES (1), (33), (34): Xaa is C or S

SEQ ID NO: 42185 - protein, 35 aa, Artificial Sequence; identical to SEQ ID NO: 24159
  GFR-binding peptide
  MOD_RES (2), (34), (35): Xaa is C or S

SEQ ID NO: 42186 - protein, 35 aa, Artificial Sequence
  GFR-binding peptide
  MOD_RES (32), (33): Xaa is C or S
RDVVMGEYQKYIIQQKDNIYLMSIPSMKTPTXXPG

SEQ ID NO: 42187 - protein, 38 aa, Artificial Sequence
  GFR-binding peptide
  MOD_RES (2), (4), (36), (37): Xaa is C or S
SXGXRDVVMGEYQKYIIQQKDNIYLMSIPSMKTPTXXP

SEQ ID NO: 42188 - protein, 39 aa, Artificial Sequence; identical to SEQ ID NO: 24162
  GFR-binding peptide
  MOD_RES (33), (34): Xaa is C or S
  MOD_RES (11), (12), (13), (14), (15): Xaa is A or G
  MOD_RES (16), (17), (18), (19): Xaa is A or G or is absent

SEQ ID NO: 42189 - protein, 35 aa, Artificial Sequence; identical to SEQ ID NO: 25190
  GFR-binding peptide
  MOD_RES (2), (34), (35): Xaa is C or S

SEQ ID NO: 42190 - protein, 34 aa, Artificial Sequence; identical to SEQ ID NO: 27212
  GFR-binding peptide
  MOD_RES (1), (33), (34): Xaa is C or S

SEQ ID NO: 42191 - protein, 43 aa, Artificial Sequence; identical to SEQ ID NO: 25193
  GFR-binding peptide
  MOD_RES (2), (4), (39), (40): Xaa is C or S
  MOD_RES (17), (18), (19), (20), (21): Xaa is A or G
  MOD_RES (22), (23), (24), (25): Xaa is A or G or is absent

SEQ ID NO: 42192 - protein, 41 aa, Artificial Sequence; identical to SEQ ID NO: 27214
  GFR-binding peptide
  MOD_RES (2), (4), (38), (39): Xaa is C or S
  MOD_RES (16), (17), (18), (19), (20): Xaa is A or G
  MOD_RES (21), (22), (23), (24): Xaa is A or G or is absent

SEQ ID NO: 42193 - protein, 41 aa, Artificial Sequence; identical to SEQ ID NO: 26204
  GFR-binding peptide
  MOD_RES (1), (35), (36): Xaa is C or S
  MOD_RES (13), (14), (15), (16), (17): Xaa is A or G
  MOD_RES (18), (19), (20), (21): Xaa is A or G or is absent

SEQ ID NO: 42194 - protein, 35 aa, Artificial Sequence
  GFR-binding peptide
  MOD_RES (34), (35): Xaa is C or S
  MOD_RES (12), (13), (14), (15), (16): Xaa is A or G
  MOD_RES (17), (18), (19), (20): Xaa is A or G or is absent
RDVVMGEYQKYXXXXXXXXXIYLMSIPSMKTPTXX

SEQ ID NO: 42195 - protein, 34 aa, Artificial Sequence
  GFR-binding peptide
  MOD_RES (2), (33), (34): Xaa is C or S
GXEEVIMEYQKYLLVRGNDIYLMSIPSTKVPAXX

SEQ ID NO: 42196 - protein, 37 aa, Artificial Sequence; identical to SEQ ID NO: 25201
  GFR-binding peptide
  MOD_RES (2), (4), (36), (37): Xaa is C or S

SEQ ID NO: 42197 - protein, 35 aa, Artificial Sequence; identical to SEQ ID NO: 27221
  GFR-binding peptide
  MOD_RES (2), (4): Xaa is C or S

SEQ ID NO: 42198 - protein, 35 aa, Artificial Sequence; identical to SEQ ID NO: 26211
  GFR-binding peptide
  MOD_RES (1), (34), (35): Xaa is C or S

SEQ ID NO: 42199 - protein, 38 aa, Artificial Sequence; identical to SEQ ID NO: 24178
  GFR-binding peptide
  MOD_RES (1), (33), (34): Xaa is C or S

SEQ ID NO: 42200 - protein, 39 aa, Artificial Sequence
  GFR-binding peptide
  MOD_RES (2), (36), (37): Xaa is C or S
  MOD_RES (14), (15), (16), (17), (18): Xaa is A or G
  MOD_RES (19), (20), (21), (22): Xaa is A or G or is absent
GXRDVVMGEYQKYXXXXXXXXXIYLMSIPSMKTPTXXPG

SEQ ID NO: 42201 - protein, 38 aa, Artificial Sequence
  GFR-binding peptide
  MOD_RES (2), (35), (36): Xaa is C or S
  MOD_RES (13), (14), (15), (16), (17): Xaa is A or G
  MOD_RES (18), (19), (20), (21): Xaa is A or G or is absent
GXEEVIMEYQKYXXXXXXXXXIYLMSIPSTKVPAXXTS

SEQ ID NO: 42202 - protein, 42 aa, Artificial Sequence; identical to SEQ ID NO: 25217
  GFR-binding peptide
  MOD_RES (2), (4), (36), (37): Xaa is C or S

SEQ ID NO: 42203 - protein, 33 aa, Artificial Sequence; identical to SEQ ID NO: 24186
  GFR-binding peptide
  MOD_RES (1), (33): Xaa is C or S

SEQ ID NO: 42204 - protein, 40 aa, Artificial Sequence; identical to SEQ ID NO: 26229
  GFR-binding peptide
  MOD_RES (34), (35): Xaa is C or S
  MOD_RES (12), (13), (14), (15), (16): Xaa is A or G
  MOD_RES (17), (18), (19), (20): Xaa is A or G or is absent

SEQ ID NO: 42205 - protein, 39 aa, Artificial Sequence; identical to SEQ ID NO: 24193
  GFR-binding peptide
  MOD_RES (1), (3), (35), (36): Xaa is C or S

SEQ ID NO: 42206 - protein, 37 aa, Artificial Sequence; identical to SEQ ID NO: 26230
  GFR-binding peptide
  MOD_RES (2), (4): Xaa is C or S
  MOD_RES (16), (17), (18), (19), (20): Xaa is A or G
  MOD_RES (21), (22), (23), (24): Xaa is A or G or is absent

SEQ ID NO: 42207 - protein, 38 aa, Artificial Sequence; identical to SEQ ID NO: 24195
  GFR-binding peptide
  MOD_RES (2), (4), (38): Xaa is C or S
  MOD_RES (16), (17), (18), (19), (20): Xaa is A or G
  MOD_RES (21), (22), (23), (24): Xaa is A or G or is absent

SEQ ID NO: 42208 - protein, 39 aa, Artificial Sequence; identical to SEQ ID NO: 26232
  GFR-binding peptide
  MOD_RES (1), (33), (34): Xaa is C or S

SEQ ID NO: 42209 - protein, 35 aa, Artificial Sequence; identical to SEQ ID NO: 27247
  GFR-binding peptide
  MOD_RES (34), (35): Xaa is C or S
  MOD_RES (12), (13), (14), (15), (16): Xaa is A or G
  MOD_RES (17), (18), (19), (20): Xaa is A or G or is absent

SEQ ID NO: 42210 - protein, 39 aa, Artificial Sequence; identical to SEQ ID NO: 26235
  GFR-binding peptide
  MOD_RES (33), (34): Xaa is C or S
  MOD_RES (11), (12), (13), (14), (15): Xaa is A or G
  MOD_RES (16), (17), (18), (19): Xaa is A or G or is absent

SEQ ID NO: 42211 - protein, 37 aa, Artificial Sequence; identical to SEQ ID NO: 25226
  GFR-binding peptide
  MOD_RES (2), (34), (35): Xaa is C or S

SEQ ID NO: 42212 - protein, 38 aa, Artificial Sequence
  GFR-binding peptide
  MOD_RES (1), (32), (33): Xaa is C or S
XEEVIMEYQKYLLVRGNDIYLMSIPSTKVPAXXTSPVR

SEQ ID NO: 42213 - protein, 39 aa, Artificial Sequence; identical to SEQ ID NO: 27251
  GFR-binding peptide
  MOD_RES (2), (4), (36): Xaa is C or S

SEQ ID NO: 42214 - protein, 38 aa, Artificial Sequence; identical to SEQ ID NO: 24201
  GFR-binding peptide
  MOD_RES (1), (3), (35), (36): Xaa is C or S

SEQ ID NO: 42215 - protein, 36 aa, Artificial Sequence
  GFR-binding peptide
  MOD_RES (1), (3): Xaa is C or S
  MOD_RES (15), (16), (17), (18), (19): Xaa is A or G
  MOD_RES (20), (21), (22), (23): Xaa is A or G or is absent
XGXRDVVMGEYQKYXXXXXXXXXIYLMSIPSMKTPT

SEQ ID NO: 42216 - protein, 38 aa, Artificial Sequence; identical to SEQ ID NO: 24205
  GFR-binding peptide
  MOD_RES (1), (35), (36): Xaa is C or S
  MOD_RES (13), (14), (15), (16), (17): Xaa is A or G
  MOD_RES (18), (19), (20), (21): Xaa is A or G or is absent

SEQ ID NO: 42217 - protein, 38 aa, Artificial Sequence; identical to SEQ ID NO: 27255
  GFR-binding peptide
  MOD_RES (35), (36): Xaa is C or S
  MOD_RES (13), (14), (15), (16), (17): Xaa is A or G
  MOD_RES (18), (19), (20), (21): Xaa is A or G or is absent

SEQ ID NO: 42218 - protein, 36 aa, Artificial Sequence
  GFR-binding peptide
  MOD_RES (33), (34): Xaa is C or S
  MOD_RES (11), (12), (13), (14), (15): Xaa is A or G
  MOD_RES (16), (17), (18), (19): Xaa is A or G or is absent
DVVMGEYQKYXXXXXXXXXIYLMSIPSMKTPTXXPG

SEQ ID NO: 42219 - protein, 36 aa, Artificial Sequence; identical to SEQ ID NO: 26239
  GFR-binding peptide
  MOD_RES (1), (33), (34): Xaa is C or S

SEQ ID NO: 42220 - protein, 36 aa, Artificial Sequence; identical to SEQ ID NO: 26246
  GFR-binding peptide
  MOD_RES (2), (34), (35): Xaa is C or S

SEQ ID NO: 42221 - protein, 41 aa, Artificial Sequence; identical to SEQ ID NO: 26247
  GFR-binding peptide
  MOD_RES (1), (3), (35): Xaa is C or S

SEQ ID NO: 42222 - protein, 36 aa, Artificial Sequence; identical to SEQ ID NO: 24215
  GFR-binding peptide
  MOD_RES (1), (35), (36): Xaa is C or S
  MOD_RES (13), (14), (15), (16), (17): Xaa is A or G
  MOD_RES (18), (19), (20), (21): Xaa is A or G or is absent

SEQ ID NO: 42223 - protein, 37 aa, Artificial Sequence; identical to SEQ ID NO: 24216
  GFR-binding peptide
  MOD_RES (31), (32): Xaa is C or S

SEQ ID NO: 42224 - protein, 39 aa, Artificial Sequence; identical to SEQ ID NO: 24217
  GFR-binding peptide
  MOD_RES (33), (34): Xaa is C or S

SEQ ID NO: 42225 - protein, 32 aa, Artificial Sequence; identical to SEQ ID NO: 24220
  GFR-binding peptide
  MOD_RES (32), (32): Xaa is C or S

SEQ ID NO: 42226 - protein, 38 aa, Artificial Sequence; identical to SEQ ID NO: 27268
  GFR-binding peptide
  MOD_RES (1), (35), (36): Xaa is C or S
  MOD_RES (13), (14), (15), (16), (17): Xaa is A or G
  MOD_RES (18), (19), (20), (21): Xaa is A or G or is absent

SEQ ID NO: 42227 - protein, 36 aa, Artificial Sequence; identical to SEQ ID NO: 25237
  GFR-binding peptide
  MOD_RES (1), (33), (34): Xaa is C or S

SEQ ID NO: 42228 - protein, 42 aa, Artificial Sequence
  GFR-binding peptide
  MOD_RES (2), (4), (36), (37): Xaa is C or S
HXGXSRVVMNEYQKYIVNSSDDIYLVSIPSLKTPAXXPKPVH

SEQ ID NO: 42229 - protein, 39 aa, Artificial Sequence
  GFR-binding peptide
  MOD_RES (1), (3), (37), (38): Xaa is C or S
  MOD_RES (15), (16), (17), (18), (19): Xaa is A or G
  MOD_RES (20), (21), (22), (23): Xaa is A or G or is absent
XGXRDVVMGEYQKYXXXXXXXXXIYLMSIPSMKTPTXXP

SEQ ID NO: 42230 - protein, 34 aa, Artificial Sequence
  GFR-binding peptide
  MOD_RES (1), (33), (34): Xaa is C or S
XRDVVMGEYQKYIIQQKDNIYLMSIPSMKTPTXX

SEQ ID NO: 42231 - protein, 41 aa, Artificial Sequence; identical to SEQ ID NO: 27270
  GFR-binding peptide
  MOD_RES (1), (3), (35), (36): Xaa is C or S

SEQ ID NO: 42232 - protein, 39 aa, Artificial Sequence; identical to SEQ ID NO: 27271
  GFR-binding peptide
  MOD_RES (2), (35), (36): Xaa is C or S

SEQ ID NO: 42233 - protein, 36 aa, Artificial Sequence; identical to SEQ ID NO: 26255
  GFR-binding peptide
  MOD_RES (35), (36): Xaa is C or S
  MOD_RES (13), (14), (15), (16), (17): Xaa is A or G
  MOD_RES (18), (19), (20), (21): Xaa is A or G or is absent

SEQ ID NO: 42234 - protein, 38 aa, Artificial Sequence; identical to SEQ ID NO: 25243
  GFR-binding peptide
  MOD_RES (1), (3), (37), (38): Xaa is C or S
  MOD_RES (15), (16), (17), (18), (19): Xaa is A or G
  MOD_RES (20), (21), (22), (23): Xaa is A or G or is absent

SEQ ID NO: 42235 - protein, 35 aa, Artificial Sequence; identical to SEQ ID NO: 24226
  GFR-binding peptide
  MOD_RES (1), (33), (34): Xaa is C or S

SEQ ID NO: 42236 - protein, 43 aa, Artificial Sequence; identical to SEQ ID NO: 24229
  GFR-binding peptide
  MOD_RES (2), (37), (38): Xaa is C or S
  MOD_RES (15), (16), (17), (18), (19): Xaa is A or G
  MOD_RES (20), (21), (22), (23): Xaa is A or G or is absent

SEQ ID NO: 42237 - protein, 35 aa, Artificial Sequence; identical to SEQ ID NO: 24230
  GFR-binding peptide
  MOD_RES (33), (34): Xaa is C or S
  MOD_RES (11), (12), (13), (14), (15): Xaa is A or G
  MOD_RES (16), (17), (18), (19): Xaa is A or G or is absent

SEQ ID NO: 42238 - protein, 38 aa, Artificial Sequence; identical to SEQ ID NO: 27281
  GFR-binding peptide
  MOD_RES (2), (4), (36), (37): Xaa is C or S

SEQ ID NO: 42239 - protein, 43 aa, Artificial Sequence; identical to SEQ ID NO: 25252
  GFR-binding peptide
  MOD_RES (1), (3), (37), (38): Xaa is C or S
  MOD_RES (15), (16), (17), (18), (19): Xaa is A or G
  MOD_RES (20), (21), (22), (23): Xaa is A or G or is absent

SEQ ID NO: 42240 - protein, 40 aa, Artificial Sequence; identical to SEQ ID NO: 26265
  GFR-binding peptide
  MOD_RES (34), (35): Xaa is C or S
  MOD_RES (12), (13), (14), (15), (16): Xaa is A or G
  MOD_RES (17), (18), (19), (20): Xaa is A or G or is absent

SEQ ID NO: 42241 - protein, 38 aa, Artificial Sequence; identical to SEQ ID NO: 27286
  GFR-binding peptide
  MOD_RES (1), (3), (35), (36): Xaa is C or S

SEQ ID NO: 42242 - protein, 42 aa, Artificial Sequence; identical to SEQ ID NO: 27288
  GFR-binding peptide
  MOD_RES (1), (3), (37), (38): Xaa is C or S
  MOD_RES (15), (16), (17), (18), (19): Xaa is A or G
  MOD_RES (20), (21), (22), (23): Xaa is A or G or is absent

SEQ ID NO: 42243 - protein, 40 aa, Artificial Sequence; identical to SEQ ID NO: 24233
  GFR-binding peptide
  MOD_RES (1), (3), (37), (38): Xaa is C or S
  MOD_RES (15), (16), (17), (18), (19): Xaa is A or G
  MOD_RES (20), (21), (22), (23): Xaa is A or G or is absent

SEQ ID NO: 42244 - protein, 36 aa, Artificial Sequence; identical to SEQ ID NO: 25253
  GFR-binding peptide
  MOD_RES (2), (36): Xaa is C or S
  MOD_RES (14), (15), (16), (17), (18): Xaa is A or G
  MOD_RES (19), (20), (21), (22): Xaa is A or G or is absent

SEQ ID NO: 42245 - protein, 34 aa, Artificial Sequence; identical to SEQ ID NO: 25255
  GFR-binding peptide
  MOD_RES (1), (3): Xaa is C or S

SEQ ID NO: 42246 - protein, 38 aa, Artificial Sequence; identical to SEQ ID NO: 26273
  GFR-binding peptide
  MOD_RES (2), (36), (37): Xaa is C or S
  MOD_RES (14), (15), (16), (17), (18): Xaa is A or G
  MOD_RES (19), (20), (21), (22): Xaa is A or G or is absent

SEQ ID NO: 42247 - protein, 37 aa, Artificial Sequence; identical to SEQ ID NO: 27294
  GFR-binding peptide
  MOD_RES (2), (4), (36), (37): Xaa is C or S

SEQ ID NO: 42248 - protein, 38 aa, Artificial Sequence; identical to SEQ ID NO: 27295
  GFR-binding peptide
  MOD_RES (2), (4), (37), (38): Xaa is C or S

SEQ ID NO: 42249 - protein, 34 aa, Artificial Sequence; identical to SEQ ID NO: 26278
  GFR-binding peptide
  MOD_RES (33), (34): Xaa is C or S
  MOD_RES (11), (12), (13), (14), (15): Xaa is A or G
  MOD_RES (16), (17), (18), (19): Xaa is A or G or is absent

SEQ ID NO: 42250 - protein, 36 aa, Artificial Sequence; identical to SEQ ID NO: 27297
  GFR-binding peptide
  MOD_RES (32), (33): Xaa is C or S

SEQ ID NO: 42251 - protein, 42 aa, Artificial Sequence
  GFR-binding peptide
  MOD_RES (1), (3), (36), (37): Xaa is C or S
  MOD_RES (14), (15), (16), (17), (18): Xaa is A or G
  MOD_RES (19), (20), (21), (22): Xaa is A or G or is absent
XGXEEVIMEYQKYXXXXXXXXXIYLMSIPSTKVPAXXTSPVR

SEQ ID NO: 42252 - protein, 38 aa, Artificial Sequence; identical to SEQ ID NO: 24243
  GFR-binding peptide
  MOD_RES (1), (36), (37): Xaa is C or S
  MOD_RES (14), (15), (16), (17), (18): Xaa is A or G
  MOD_RES (19), (20), (21), (22): Xaa is A or G or is absent

SEQ ID NO: 42253 - protein, 37 aa, Artificial Sequence; identical to SEQ ID NO: 24244
  GFR-binding peptide
  MOD_RES (34), (35): Xaa is C or S
  MOD_RES (12), (13), (14), (15), (16): Xaa is A or G
  MOD_RES (17), (18), (19), (20): Xaa is A or G or is absent

SEQ ID NO: 42254 - protein, 40 aa, Artificial Sequence; identical to SEQ ID NO: 25266
  GFR-binding peptide
  MOD_RES (2), (4), (36), (37): Xaa is C or S

SEQ ID NO: 42255 - protein, 42 aa, Artificial Sequence; identical to SEQ ID NO: 24245
  GFR-binding peptide
  MOD_RES (1), (3), (36), (37): Xaa is C or S

SEQ ID NO: 42256 - protein, 34 aa, Artificial Sequence; identical to SEQ ID NO: 26282
  GFR-binding peptide
  MOD_RES (33), (34): Xaa is C or S
  MOD_RES (11), (12), (13), (14), (15): Xaa is A or G
  MOD_RES (16), (17), (18), (19): Xaa is A or G or is absent

SEQ ID NO: 42257 - protein, 34 aa, Artificial Sequence; identical to SEQ ID NO: 27300
  GFR-binding peptide
  MOD_RES (31), (32): Xaa is C or S

SEQ ID NO: 42258 - protein, 30 aa, Artificial Sequence; identical to SEQ ID NO: 27301
  GFR-binding peptide

SEQ ID NO: 42259 - protein, 38 aa, Artificial Sequence; identical to SEQ ID NO: 24248
  GFR-binding peptide
  MOD_RES (1), (33), (34): Xaa is C or S

SEQ ID NO: 42260 - protein, 36 aa, Artificial Sequence
  GFR-binding peptide
  MOD_RES (2), (33), (34): Xaa is C or S
GXEEVIMEYQKYLLVRGNDIYLMSIPSTKVPAXXTS

SEQ ID NO: 42261 - protein, 38 aa, Artificial Sequence
  GFR-binding peptide
  MOD_RES (1), (35), (36): Xaa is C or S
  MOD_RES (13), (14), (15), (16), (17): Xaa is A or G
  MOD_RES (18), (19), (20), (21): Xaa is A or G or is absent
XRDVVMGEYQKYXXXXXXXXXIYLMSIPSMKTPTXXPG

SEQ ID NO: 42262 - protein, 37 aa, Artificial Sequence; identical to SEQ ID NO: 25271
  GFR-binding peptide
  MOD_RES (2), (34), (35): Xaa is C or S

SEQ ID NO: 42263 - protein, 37 aa, Artificial Sequence; identical to SEQ ID NO: 24251
  GFR-binding peptide
  MOD_RES (31), (32): Xaa is C or S

SEQ ID NO: 42264 - protein, 37 aa, Artificial Sequence; identical to SEQ ID NO: 26287
  GFR-binding peptide
  MOD_RES (1), (36), (37): Xaa is C or S
  MOD_RES (14), (15), (16), (17), (18): Xaa is A or G
  MOD_RES (19), (20), (21), (22): Xaa is A or G or is absent

SEQ ID NO: 42265 - protein, 35 aa, Artificial Sequence; identical to SEQ ID NO: 26288
  GFR-binding peptide
  MOD_RES (31), (32): Xaa is C or S

SEQ ID NO: 42266 - protein, 37 aa, Artificial Sequence; identical to SEQ ID NO: 26292
  GFR-binding peptide
  MOD_RES (1), (3), (37): Xaa is C or S
  MOD_RES (15), (16), (17), (18), (19): Xaa is A or G
  MOD_RES (20), (21), (22), (23): Xaa is A or G or is absent

SEQ ID NO: 42267 - protein, 39 aa, Artificial Sequence; identical to SEQ ID NO: 25274
  GFR-binding peptide
  MOD_RES (2), (34): Xaa is C or S

SEQ ID NO: 42268 - protein, 38 aa, Artificial Sequence
  GFR-binding peptide
  MOD_RES (33), (34): Xaa is C or S
  MOD_RES (11), (12), (13), (14), (15): Xaa is A or G
  MOD_RES (16), (17), (18), (19): Xaa is A or G or is absent
DVVMGEYQKYXXXXXXXXXIYLMSIPSMKTPTXXPGAS

SEQ ID NO: 42269 - protein, 39 aa, Artificial Sequence; identical to SEQ ID NO: 26293
  GFR-binding peptide
  MOD_RES (2), (4), (39): Xaa is C or S
  MOD_RES (17), (18), (19), (20), (21): Xaa is A or G
  MOD_RES (22), (23), (24), (25): Xaa is A or G or is absent

SEQ ID NO: 42270 - protein, 38 aa, Artificial Sequence; identical to SEQ ID NO: 27306
  GFR-binding peptide
  MOD_RES (2), (34): Xaa is C or S

SEQ ID NO: 42271 - protein, 36 aa, Artificial Sequence; identical to SEQ ID NO: 24255
  GFR-binding peptide
  MOD_RES (33), (34): Xaa is C or S
  MOD_RES (11), (12), (13), (14), (15): Xaa is A or G
  MOD_RES (16), (17), (18), (19): Xaa is A or G or is absent

SEQ ID NO: 42272 - protein, 42 aa, Artificial Sequence; identical to SEQ ID NO: 26296
  GFR-binding peptide
  MOD_RES (1), (3), (37), (38): Xaa is C or S
  MOD_RES (15), (16), (17), (18), (19): Xaa is A or G
  MOD_RES (20), (21), (22), (23): Xaa is A or G or is absent

SEQ ID NO: 42273 - protein, 35 aa, Artificial Sequence; identical to SEQ ID NO: 24258
  GFR-binding peptide
  MOD_RES (31), (32): Xaa is C or S

SEQ ID NO: 42274 - protein, 41 aa, Artificial Sequence; identical to SEQ ID NO: 24260
  GFR-binding peptide
  MOD_RES (2), (36), (37): Xaa is C or S
  MOD_RES (14), (15), (16), (17), (18): Xaa is A or G
  MOD_RES (19), (20), (21), (22): Xaa is A or G or is absent

SEQ ID NO: 42275 - protein, 42 aa, Artificial Sequence; identical to SEQ ID NO: 24262
  GFR-binding peptide
  MOD_RES (2), (4), (36), (37): Xaa is C or S

SEQ ID NO: 42276 - protein, 34 aa, Artificial Sequence
  GFR-binding peptide
  MOD_RES (33), (34): Xaa is C or S
  MOD_RES (11), (12), (13), (14), (15): Xaa is A or G
  MOD_RES (16), (17), (18), (19): Xaa is A or G or is absent
EEVIMEYQKYXXXXXXXXXIYLMSIPSTKVPAXX

SEQ ID NO: 42277 - protein, 34 aa, Artificial Sequence; identical to SEQ ID NO: 25283
  GFR-binding peptide
  MOD_RES (33), (34): Xaa is C or S
  MOD_RES (11), (12), (13), (14), (15): Xaa is A or G
  MOD_RES (16), (17), (18), (19): Xaa is A or G or is absent

SEQ ID NO: 42278 - protein, 37 aa, Artificial Sequence
  GFR-binding peptide
  MOD_RES (32), (33): Xaa is C or S
RDVVMGEYQKYIIQQKDNIYLMSIPSMKTPTXXPGAS

SEQ ID NO: 42279 - protein, 39 aa, Artificial Sequence; identical to SEQ ID NO: 27319
  GFR-binding peptide
  MOD_RES (2), (4), (36), (37): Xaa is C or S

SEQ ID NO: 42280 - protein, 40 aa, Artificial Sequence; identical to SEQ ID NO: 27321
  GFR-binding peptide
  MOD_RES (2), (3), (38), (40): Xaa is C or S
  MOD_RES (17), (18), (19), (20), (21): Xaa is A or G
  MOD_RES (22), (23), (24), (25): Xaa is A or G or is absent

SEQ ID NO: 42281 - protein, 36 aa, Artificial Sequence; identical to SEQ ID NO: 27324
  GFR-binding peptide
  MOD_RES (1), (35): Xaa is C or S
  MOD_RES (15), (16), (17), (18), (19): Xaa is A or G
  MOD_RES (20), (21), (22), (23): Xaa is A or G or is absent

SEQ ID NO: 42282 - protein, 34 aa, Artificial Sequence
  GFR-binding peptide
  MOD_RES (33), (33): Xaa is C or S
  MOD_RES (14), (15), (16), (17), (18): Xaa is A or G
  MOD_RES (19), (20), (21), (22): Xaa is A or G or is absent
APVKTSPISMLYIXXXXXXXXXYKQYEMIVEEXG

SEQ ID NO: 42283 - protein, 35 aa, Artificial Sequence; identical to SEQ ID NO: 27325
  GFR-binding peptide
  MOD_RES (2), (3), (35): Xaa is C or S

SEQ ID NO: 42284 - protein, 38 aa, Artificial Sequence
  GFR-binding peptide
  MOD_RES (5), (6), (37): Xaa is C or S
VPSTXXAPVKTSPISMLYIDNGRVLLYKQYEMIVEEXG

SEQ ID NO: 42285 - protein, 35 aa, Artificial Sequence
  GFR-binding peptide
  MOD_RES (4), (5): Xaa is C or S
PSTXXAPVKTSPISMLYIDNGRVLLYKQYEMIVEE

SEQ ID NO: 42286 - protein, 42 aa, Artificial Sequence; identical to SEQ ID NO: 28291
  GFR-binding peptide
  MOD_RES (6), (7), (41): Xaa is C or S
  MOD_RES (21), (22), (23), (24), (25): Xaa is A or G
  MOD_RES (26), (27), (28), (29): Xaa is A or G or is absent

SEQ ID NO: 42287 - protein, 41 aa, Artificial Sequence; identical to SEQ ID NO: 27329
  GFR-binding peptide
  MOD_RES (2), (3), (38), (40): Xaa is C or S
  MOD_RES (17), (18), (19), (20), (21): Xaa is A or G
  MOD_RES (22), (23), (24), (25): Xaa is A or G or is absent

SEQ ID NO: 42288 - protein, 35 aa, Artificial Sequence; identical to SEQ ID NO: 29259
  GFR-binding peptide
  MOD_RES (4), (5): Xaa is C or S

SEQ ID NO: 42289 - protein, 39 aa, Artificial Sequence; identical to SEQ ID NO: 30243
  GFR-binding peptide
  MOD_RES (6), (7), (39): Xaa is C or S

SEQ ID NO: 42290 - protein, 32 aa, Artificial Sequence; identical to SEQ ID NO: 27332
  GFR-binding peptide
  MOD_RES (1), (2): Xaa is C or S

SEQ ID NO: 42291 - protein, 41 aa, Artificial Sequence; identical to SEQ ID NO: 30245
  GFR-binding peptide
  MOD_RES (5), (6), (40): Xaa is C or S
  MOD_RES (20), (21), (22), (23), (24): Xaa is A or G
  MOD_RES (25), (26), (27), (28): Xaa is A or G or is absent

SEQ ID NO: 42292 - protein, 32 aa, Artificial Sequence
  GFR-binding peptide
  MOD_RES (31), (31): Xaa is C or S
APVKTSPISMLYIDNGRVLLYKQYEMIVEEXG

SEQ ID NO: 42293 - protein, 34 aa, Artificial Sequence; identical to SEQ ID NO: 28299
  GFR-binding peptide
  MOD_RES (32), (34): Xaa is C or S

SEQ ID NO: 42294 - protein, 40 aa, Artificial Sequence; identical to SEQ ID NO: 27333
  GFR-binding peptide
  MOD_RES (1), (2), (37), (39): Xaa is C or S
  MOD_RES (16), (17), (18), (19), (20): Xaa is A or G
  MOD_RES (21), (22), (23), (24): Xaa is A or G or is absent

SEQ ID NO: 42295 - protein, 40 aa, Artificial Sequence
  GFR-binding peptide
  MOD_RES (4), (5), (38), (40): Xaa is C or S
  MOD_RES (19), (20), (21), (22), (23): Xaa is A or G
  MOD_RES (24), (25), (26), (27): Xaa is A or G or is absent
PSTXXAPVKTSPISMLYIXXXXXXXXXYKQYEMIVEEXGX

SEQ ID NO: 42296 - protein, 33 aa, Artificial Sequence; identical to SEQ ID NO: 30250
  GFR-binding peptide
  MOD_RES (14), (15), (16), (17), (18): Xaa is A or G
  MOD_RES (19), (20), (21), (22): Xaa is A or G or is absent

SEQ ID NO: 42297 - protein, 39 aa, Artificial Sequence
  GFR-binding peptide
  MOD_RES (5), (6): Xaa is C or S
  MOD_RES (20), (21), (22), (23), (24): Xaa is A or G
  MOD_RES (25), (26), (27), (28): Xaa is A or G or is absent
SAGPXXTPTKMSPISMLYIXXXXXXXXXYKQYEGMVVDR

SEQ ID NO: 42298 - protein, 36 aa, Artificial Sequence; identical to SEQ ID NO: 30253
  GFR-binding peptide
  MOD_RES (5), (6): Xaa is C or S

SEQ ID NO: 42299 - protein, 39 aa, Artificial Sequence; identical to SEQ ID NO: 27339
  GFR-binding peptide
  MOD_RES (4), (38): Xaa is C or S
  MOD_RES (18), (19), (20), (21), (22): Xaa is A or G
  MOD_RES (23), (24), (25), (26): Xaa is A or G or is absent

SEQ ID NO: 42300 - protein, 36 aa, Artificial Sequence; identical to SEQ ID NO: 30260
  GFR-binding peptide
  MOD_RES (1), (2), (34), (36): Xaa is C or S

SEQ ID NO: 42301 - protein, 32 aa, Artificial Sequence
  GFR-binding peptide
  MOD_RES (1), (32): Xaa is C or S
XAPVKTSPISMLYIDNGRVLLYKQYEMIVEEX

SEQ ID NO: 42302 - protein, 36 aa, Artificial Sequence; identical to SEQ ID NO: 27343
  GFR-binding peptide
  MOD_RES (3), (4): Xaa is C or S
  MOD_RES (18), (19), (20), (21), (22): Xaa is A or G
  MOD_RES (23), (24), (25), (26): Xaa is A or G or is absent

SEQ ID NO: 42303 - protein, 42 aa, Artificial Sequence; identical to SEQ ID NO: 27344
  GFR-binding peptide
  MOD_RES (5), (6), (40), (42): Xaa is C or S
  MOD_RES (20), (21), (22), (23), (24): Xaa is A or G
  MOD_RES (25), (26), (27), (28): Xaa is A or G or is absent

SEQ ID NO: 42304 - protein, 36 aa, Artificial Sequence; identical to SEQ ID NO: 27345
  GFR-binding peptide
  MOD_RES (5), (6): Xaa is C or S

SEQ ID NO: 42305 - protein, 38 aa, Artificial Sequence; identical to SEQ ID NO: 27346
  GFR-binding peptide
  MOD_RES (5), (6): Xaa is C or S
  MOD_RES (20), (21), (22), (23), (24): Xaa is A or G
  MOD_RES (25), (26), (27), (28): Xaa is A or G or is absent

SEQ ID NO: 42306 - protein, 39 aa, Artificial Sequence; identical to SEQ ID NO: 28311
  GFR-binding peptide
  MOD_RES (3), (4), (36), (38): Xaa is C or S

SEQ ID NO: 42307 - protein, 37 aa, Artificial Sequence; identical to SEQ ID NO: 28312
  GFR-binding peptide
  MOD_RES (3), (4), (36): Xaa is C or S

SEQ ID NO: 42308 - protein, 34 aa, Artificial Sequence; identical to SEQ ID NO: 28313
  GFR-binding peptide
  MOD_RES (1), (1): Xaa is C or S
  MOD_RES (15), (16), (17), (18), (19): Xaa is A or G
  MOD_RES (20), (21), (22), (23): Xaa is A or G or is absent

SEQ ID NO: 42309 - protein, 38 aa, Artificial Sequence; identical to SEQ ID NO: 29275
  GFR-binding peptide
  MOD_RES (7), (7): Xaa is C or S

SEQ ID NO: 42310 - protein, 37 aa, Artificial Sequence; identical to SEQ ID NO: 29276
  GFR-binding peptide
  MOD_RES (2), (3), (37): Xaa is C or S
  MOD_RES (17), (18), (19), (20), (21): Xaa is A or G
  MOD_RES (22), (23), (24), (25): Xaa is A or G or is absent

SEQ ID NO: 42311 - protein, 41 aa, Artificial Sequence; identical to SEQ ID NO: 30271
  GFR-binding peptide
  MOD_RES (3), (4), (38), (40): Xaa is C or S
  MOD_RES (18), (19), (20), (21), (22): Xaa is A or G
  MOD_RES (23), (24), (25), (26): Xaa is A or G or is absent

SEQ ID NO: 42312 - protein, 39 aa, Artificial Sequence; identical to SEQ ID NO: 29281
  GFR-binding peptide
  MOD_RES (5), (6): Xaa is C or S
  MOD_RES (20), (21), (22), (23), (24): Xaa is A or G
  MOD_RES (25), (26), (27), (28): Xaa is A or G or is absent

SEQ ID NO: 42313 - protein, 35 aa, Artificial Sequence; identical to SEQ ID NO: 30273
  GFR-binding peptide
  MOD_RES (1), (2), (34): Xaa is C or S

SEQ ID NO: 42314 - protein, 39 aa, Artificial Sequence; identical to SEQ ID NO: 28323
  GFR-binding peptide
  MOD_RES (5), (6), (39): Xaa is C or S

SEQ ID NO: 42315 - protein, 39 aa, Artificial Sequence; identical to SEQ ID NO: 30274
  GFR-binding peptide
  MOD_RES (5), (6), (38): Xaa is C or S

SEQ ID NO: 42316 - protein, 33 aa, Artificial Sequence
  GFR-binding peptide
  MOD_RES (1), (33): Xaa is C or S
XTPTKMSPISMLYINDKQQIIYKQYEGMVVDRX

SEQ ID NO: 42317 - protein, 32 aa, Artificial Sequence; identical to SEQ ID NO: 30278
  GFR-binding peptide

SEQ ID NO: 42318 - protein, 38 aa, Artificial Sequence; identical to SEQ ID NO: 28327
  GFR-binding peptide
  MOD_RES (2), (3), (37): Xaa is C or S
  MOD_RES (17), (18), (19), (20), (21): Xaa is A or G
  MOD_RES (22), (23), (24), (25): Xaa is A or G or is absent

SEQ ID NO: 42319 - protein, 42 aa, Artificial Sequence; identical to SEQ ID NO: 30279
  GFR-binding peptide
  MOD_RES (5), (6), (40), (42): Xaa is C or S
  MOD_RES (20), (21), (22), (23), (24): Xaa is A or G
  MOD_RES (25), (26), (27), (28): Xaa is A or G or is absent

SEQ ID NO: 42320 - protein, 35 aa, Artificial Sequence
  GFR-binding peptide
  MOD_RES (2), (3), (34): Xaa is C or S
TXXAPVKTSPISMLYIDNGRVLLYKQYEMIVEEXG

SEQ ID NO: 42321 - protein, 34 aa, Artificial Sequence; identical to SEQ ID NO: 27362
  GFR-binding peptide
  MOD_RES (1), (33): Xaa is C or S

SEQ ID NO: 42322 - protein, 37 aa, Artificial Sequence
  GFR-binding peptide
  MOD_RES (3), (4), (35), (37): Xaa is C or S
STXXAPVKTSPISMLYIDNGRVLLYKQYEMIVEEXGX

SEQ ID NO: 42323 - protein, 42 aa, Artificial Sequence; identical to SEQ ID NO: 30280
  GFR-binding peptide
  MOD_RES (3), (4), (39), (41): Xaa is C or S
  MOD_RES (18), (19), (20), (21), (22): Xaa is A or G
  MOD_RES (23), (24), (25), (26): Xaa is A or G or is absent

SEQ ID NO: 42324 - protein, 36 aa, Artificial Sequence; identical to SEQ ID NO: 28328
  GFR-binding peptide
  MOD_RES (5), (6): Xaa is C or S

SEQ ID NO: 42325 - protein, 33 aa, Artificial Sequence
  GFR-binding peptide
  MOD_RES (1), (1): Xaa is C or S
  MOD_RES (15), (16), (17), (18), (19): Xaa is A or G
  MOD_RES (20), (21), (22), (23): Xaa is A or G or is absent
XTPTKMSPISMLYIXXXXXXXXXYKQYEGMVVD

SEQ ID NO: 42326 - protein, 38 aa, Artificial Sequence; identical to SEQ ID NO: 28331
  GFR-binding peptide
  MOD_RES (1), (2), (37): Xaa is C or S
  MOD_RES (16), (17), (18), (19), (20): Xaa is A or G
  MOD_RES (21), (22), (23), (24): Xaa is A or G or is absent

SEQ ID NO: 42327 - protein, 37 aa, Artificial Sequence; identical to SEQ ID NO: 27366
  GFR-binding peptide
  MOD_RES (3), (4): Xaa is C or S
  MOD_RES (18), (19), (20), (21), (22): Xaa is A or G
  MOD_RES (23), (24), (25), (26): Xaa is A or G or is absent

SEQ ID NO: 42328 - protein, 38 aa, Artificial Sequence; identical to SEQ ID NO: 27370
  GFR-binding peptide
  MOD_RES (3), (35), (37): Xaa is C or S

SEQ ID NO: 42329 - protein, 37 aa, Artificial Sequence
  GFR-binding peptide
  MOD_RES (1), (2), (36): Xaa is C or S
  MOD_RES (16), (17), (18), (19), (20): Xaa is A or G
  MOD_RES (21), (22), (23), (24): Xaa is A or G or is absent
XXTPTKMSPISMLYIXXXXXXXXXYKQYEGMVVDRXG

SEQ ID NO: 42330 - protein, 37 aa, Artificial Sequence; identical to SEQ ID NO: 29286
  GFR-binding peptide
  MOD_RES (4), (5): Xaa is C or S
  MOD_RES (19), (20), (21), (22), (23): Xaa is A or G
  MOD_RES (24), (25), (26), (27): Xaa is A or G or is absent

SEQ ID NO: 42331 - protein, 32 aa, Artificial Sequence; identical to SEQ ID NO: 30288
  GFR-binding peptide
  MOD_RES (1), (2): Xaa is C or S

SEQ ID NO: 42332 - protein, 33 aa, Artificial Sequence; identical to SEQ ID NO: 29288
  GFR-binding peptide
  MOD_RES (14), (15), (16), (17), (18): Xaa is A or G
  MOD_RES (19), (20), (21), (22): Xaa is A or G or is absent

SEQ ID NO: 42333 - protein, 38 aa, Artificial Sequence; identical to SEQ ID NO: 27373
  GFR-binding peptide
  MOD_RES (1), (35), (37): Xaa is C or S
  MOD_RES (15), (16), (17), (18), (19): Xaa is A or G
  MOD_RES (20), (21), (22), (23): Xaa is A or G or is absent

SEQ ID NO: 42334 - protein, 41 aa, Artificial Sequence; identical to SEQ ID NO: 27374
  GFR-binding peptide
  MOD_RES (6), (7), (39), (41): Xaa is C or S

SEQ ID NO: 42335 - protein, 36 aa, Artificial Sequence; identical to SEQ ID NO: 30291
  GFR-binding peptide
  MOD_RES (2), (3), (35): Xaa is C or S

SEQ ID NO: 42336 - protein, 41 aa, Artificial Sequence; identical to SEQ ID NO: 30292
  GFR-binding peptide
  MOD_RES (5), (6), (40): Xaa is C or S
  MOD_RES (20), (21), (22), (23), (24): Xaa is A or G
  MOD_RES (25), (26), (27), (28): Xaa is A or G or is absent

SEQ ID NO: 42337 - protein, 39 aa, Artificial Sequence; identical to SEQ ID NO: 30293
  GFR-binding peptide
  MOD_RES (1), (2), (36), (38): Xaa is C or S
  MOD_RES (16), (17), (18), (19), (20): Xaa is A or G
  MOD_RES (21), (22), (23), (24): Xaa is A or G or is absent

SEQ ID NO: 42338 - protein, 36 aa, Artificial Sequence
  GFR-binding peptide
  MOD_RES (3), (4), (36): Xaa is C or S
GPXXTPTKMSPISMLYINDKQQIIYKQYEGMVVDRX

SEQ ID NO: 42339 - protein, 33 aa, Artificial Sequence
  GFR-binding peptide
  MOD_RES (1), (2): Xaa is C or S
XXTPTKMSPISMLYINDKQQIIYKQYEGMVVDR

SEQ ID NO: 42340 - protein, 34 aa, Artificial Sequence
  GFR-binding peptide
  MOD_RES (1), (2): Xaa is C or S
  MOD_RES (16), (17), (18), (19), (20): Xaa is A or G
  MOD_RES (21), (22), (23), (24): Xaa is A or G or is absent
XXTPTKMSPISMLYIXXXXXXXXXYKQYEGMVVD

SEQ ID NO: 42341 - protein, 39 aa, Artificial Sequence; identical to SEQ ID NO: 30303
  GFR-binding peptide
  MOD_RES (6), (7): Xaa is C or S
  MOD_RES (21), (22), (23), (24), (25): Xaa is A or G
  MOD_RES (26), (27), (28), (29): Xaa is A or G or is absent

SEQ ID NO: 42342 - protein, 35 aa, Artificial Sequence; identical to SEQ ID NO: 30304
  GFR-binding peptide
  MOD_RES (3), (35): Xaa is C or S

SEQ ID NO: 42343 - protein, 36 aa, Artificial Sequence
  GFR-binding peptide
  MOD_RES (1), (34), (36): Xaa is C or S
  MOD_RES (15), (16), (17), (18), (19): Xaa is A or G
  MOD_RES (20), (21), (22), (23): Xaa is A or G or is absent
XAPVKTSPISMLYIXXXXXXXXXYKQYEMIVEEXGX

SEQ ID NO: 42344 - protein, 36 aa, Artificial Sequence
  GFR-binding peptide
  MOD_RES (3), (4): Xaa is C or S
  MOD_RES (18), (19), (20), (21), (22): Xaa is A or G
  MOD_RES (23), (24), (25), (26): Xaa is A or G or is absent
STXXAPVKTSPISMLYIXXXXXXXXXYKQYEMIVEE

SEQ ID NO: 42345 - protein, 37 aa, Artificial Sequence; identical to SEQ ID NO: 28345
  GFR-binding peptide
  MOD_RES (3), (4), (36): Xaa is C or S

SEQ ID NO: 42346 - protein, 35 aa, Artificial Sequence; identical to SEQ ID NO: 30307
  GFR-binding peptide
  MOD_RES (1), (35): Xaa is C or S
  MOD_RES (15), (16), (17), (18), (19): Xaa is A or G
  MOD_RES (20), (21), (22), (23): Xaa is A or G or is absent

SEQ ID NO: 42347 - protein, 41 aa, Artificial Sequence; identical to SEQ ID NO: 27385
  GFR-binding peptide
  MOD_RES (6), (7), (39), (41): Xaa is C or S

SEQ ID NO: 42348 - protein, 38 aa, Artificial Sequence; identical to SEQ ID NO: 29294
  GFR-binding peptide
  MOD_RES (6), (7): Xaa is C or S

SEQ ID NO: 42349 - protein, 41 aa, Artificial Sequence; identical to SEQ ID NO: 30309
  GFR-binding peptide
  MOD_RES (4), (5), (39), (41): Xaa is C or S
  MOD_RES (19), (20), (21), (22), (23): Xaa is A or G
  MOD_RES (24), (25), (26), (27): Xaa is A or G or is absent

SEQ ID NO: 42350 - protein, 36 aa, Artificial Sequence; identical to SEQ ID NO: 27387
  GFR-binding peptide
  MOD_RES (1), (35): Xaa is C or S
  MOD_RES (15), (16), (17), (18), (19): Xaa is A or G
  MOD_RES (20), (21), (22), (23): Xaa is A or G or is absent

SEQ ID NO: 42351 - protein, 42 aa, Artificial Sequence; identical to SEQ ID NO: 27388
  GFR-binding peptide
  MOD_RES (6), (7), (41): Xaa is C or S
  MOD_RES (21), (22), (23), (24), (25): Xaa is A or G
  MOD_RES (26), (27), (28), (29): Xaa is A or G or is absent

SEQ ID NO: 42352 - protein, 36 aa, Artificial Sequence; identical to SEQ ID NO: 27389
  GFR-binding peptide
  MOD_RES (6), (6): Xaa is C or S

SEQ ID NO: 42353 - protein, 39 aa, Artificial Sequence; identical to SEQ ID NO: 28348
  GFR-binding peptide
  MOD_RES (5), (6): Xaa is C or S
  MOD_RES (20), (21), (22), (23), (24): Xaa is A or G
  MOD_RES (25), (26), (27), (28): Xaa is A or G or is absent

SEQ ID NO: 42354 - protein, 41 aa, Artificial Sequence; identical to SEQ ID NO: 29298
  GFR-binding peptide
  MOD_RES (6), (7), (39), (41): Xaa is C or S

SEQ ID NO: 42355 - protein, 40 aa, Artificial Sequence; identical to SEQ ID NO: 30314
  GFR-binding peptide
  MOD_RES (6), (7): Xaa is C or S
  MOD_RES (21), (22), (23), (24), (25): Xaa is A or G
  MOD_RES (26), (27), (28), (29): Xaa is A or G or is absent

SEQ ID NO: 42356 - protein, 32 aa, Artificial Sequence; identical to SEQ ID NO: 29299
  GFR-binding peptide
  MOD_RES (32), (32): Xaa is C or S

SEQ ID NO: 42357 - protein, 39 aa, Artificial Sequence; identical to SEQ ID NO: 30317
  GFR-binding peptide
  MOD_RES (3), (4), (39): Xaa is C or S
  MOD_RES (18), (19), (20), (21), (22): Xaa is A or G
  MOD_RES (23), (24), (25), (26): Xaa is A or G or is absent

SEQ ID NO: 42358 - protein, 36 aa, Artificial Sequence; identical to SEQ ID NO: 27396
  GFR-binding peptide
  MOD_RES (2), (3): Xaa is C or S
  MOD_RES (17), (18), (19), (20), (21): Xaa is A or G
  MOD_RES (22), (23), (24), (25): Xaa is A or G or is absent

SEQ ID NO: 42359 - protein, 42 aa, Artificial Sequence; identical to SEQ ID NO: 29301
  GFR-binding peptide
  MOD_RES (6), (7), (39), (41): Xaa is C or S

SEQ ID NO: 42360 - protein, 39 aa, Artificial Sequence
  GFR-binding peptide
  MOD_RES (5), (6), (38): Xaa is C or S
SAGPXXTPTKMSPISMLYINDKQQIIYKQYEGMVVDRXG

SEQ ID NO: 42361 - protein, 35 aa, Artificial Sequence; identical to SEQ ID NO: 29303
  GFR-binding peptide
  MOD_RES (4), (4): Xaa is C or S

SEQ ID NO: 42362 - protein, 38 aa, Artificial Sequence; identical to SEQ ID NO: 30319
  GFR-binding peptide
  MOD_RES (5), (6): Xaa is C or S
  MOD_RES (20), (21), (22), (23), (24): Xaa is A or G
  MOD_RES (25), (26), (27), (28): Xaa is A or G or is absent

SEQ ID NO: 42363 - protein, 43 aa, Artificial Sequence; identical to SEQ ID NO: 30321
  GFR-binding peptide
  MOD_RES (5), (6), (41), (43): Xaa is C or S
  MOD_RES (20), (21), (22), (23), (24): Xaa is A or G
  MOD_RES (25), (26), (27), (28): Xaa is A or G or is absent

SEQ ID NO: 42364 - protein, 36 aa, Artificial Sequence; identical to SEQ ID NO: 28361
  GFR-binding peptide
  MOD_RES (34), (36): Xaa is C or S
  MOD_RES (14), (15), (16), (17), (18): Xaa is A or G
  MOD_RES (19), (20), (21), (22): Xaa is A or G or is absent

SEQ ID NO: 42365 - protein, 33 aa, Artificial Sequence; identical to SEQ ID NO: 30324
  GFR-binding peptide
  MOD_RES (1), (33): Xaa is C or S

SEQ ID NO: 42366 - protein, 36 aa, Artificial Sequence; identical to SEQ ID NO: 29311
  GFR-binding peptide
  MOD_RES (4), (5): Xaa is C or S

SEQ ID NO: 42367 - protein, 34 aa, Artificial Sequence; identical to SEQ ID NO: 30325
  GFR-binding peptide
  MOD_RES (3), (4): Xaa is C or S

SEQ ID NO: 42368 - protein, 37 aa, Artificial Sequence; identical to SEQ ID NO: 28367
  GFR-binding peptide
  MOD_RES (6), (7): Xaa is C or S

SEQ ID NO: 42369 - protein, 39 aa, Artificial Sequence; identical to SEQ ID NO: 28369
  GFR-binding peptide
  MOD_RES (4), (5), (39): Xaa is C or S
  MOD_RES (19), (20), (21), (22), (23): Xaa is A or G
  MOD_RES (24), (25), (26), (27): Xaa is A or G or is absent

SEQ ID NO: 42370 - protein, 34 aa, Artificial Sequence; identical to SEQ ID NO: 30328
  GFR-binding peptide
  MOD_RES (2), (2): Xaa is C or S
  MOD_RES (16), (17), (18), (19), (20): Xaa is A or G
  MOD_RES (21), (22), (23), (24): Xaa is A or G or is absent

SEQ ID NO: 42371 - protein, 33 aa, Artificial Sequence; identical to SEQ ID NO: 29320
  GFR-binding peptide
  MOD_RES (32), (32): Xaa is C or S

SEQ ID NO: 42372 - protein, 42 aa, Artificial Sequence; identical to SEQ ID NO: 30337
  GFR-binding peptide
  MOD_RES (6), (40), (42): Xaa is C or S
  MOD_RES (20), (21), (22), (23), (24): Xaa is A or G
  MOD_RES (25), (26), (27), (28): Xaa is A or G or is absent

SEQ ID NO: 42373 - protein, 32 aa, Artificial Sequence; identical to SEQ ID NO: 28377
  GFR-binding peptide
  MOD_RES (14), (15), (16), (17), (18): Xaa is A or G
  MOD_RES (19), (20), (21), (22): Xaa is A or G or is absent

SEQ ID NO: 42374 - protein, 33 aa, Artificial Sequence; identical to SEQ ID NO: 27410
  GFR-binding peptide
  MOD_RES (32), (32): Xaa is C or S

SEQ ID NO: 42375 - protein, 37 aa, Artificial Sequence; identical to SEQ ID NO: 28379
  GFR-binding peptide
  MOD_RES (4), (5): Xaa is C or S
  MOD_RES (19), (20), (21), (22), (23): Xaa is A or G
  MOD_RES (24), (25), (26), (27): Xaa is A or G or is absent

SEQ ID NO: 42376 - protein, 34 aa, Artificial Sequence; identical to SEQ ID NO: 29329
  GFR-binding peptide
  MOD_RES (1), (1): Xaa is C or S
  MOD_RES (15), (16), (17), (18), (19): Xaa is A or G
  MOD_RES (20), (21), (22), (23): Xaa is A or G or is absent

SEQ ID NO: 42377 - protein, 32 aa, Artificial Sequence; identical to SEQ ID NO: 29334
  GFR-binding peptide
  MOD_RES (14), (15), (16), (17), (18): Xaa is A or G
  MOD_RES (19), (20), (21), (22): Xaa is A or G or is absent

SEQ ID NO: 42378 - protein, 35 aa, Artificial Sequence
  GFR-binding peptide
  MOD_RES (33), (35): Xaa is C or S
  MOD_RES (14), (15), (16), (17), (18): Xaa is A or G
  MOD_RES (19), (20), (21), (22): Xaa is A or G or is absent
APVKTSPISMLYIXXXXXXXXXYKQYEMIVEEXGX

SEQ ID NO: 42379 - protein, 36 aa, Artificial Sequence
  GFR-binding peptide
  MOD_RES (4), (5), (36): Xaa is C or S
PSTXXAPVKTSPISMLYIDNGRVLLYKQYEMIVEEX

SEQ ID NO: 42380 - protein, 38 aa, Artificial Sequence; identical to SEQ ID NO: 29338
  GFR-binding peptide
  MOD_RES (2), (3), (35), (37): Xaa is C or S

SEQ ID NO: 42381 - protein, 39 aa, Artificial Sequence; identical to SEQ ID NO: 27424
  GFR-binding peptide
  MOD_RES (3), (4), (36), (38): Xaa is C or S

SEQ ID NO: 42382 - protein, 41 aa, Artificial Sequence
  GFR-binding peptide
  MOD_RES (5), (6), (38), (40): Xaa is C or S
SAGPXXTPTKMSPISMLYINDKQQIIYKQYEGMVVDRXGXS

SEQ ID NO: 42383 - protein, 40 aa, Artificial Sequence; identical to SEQ ID NO: 29344
  GFR-binding peptide
  MOD_RES (6), (7), (40): Xaa is C or S

SEQ ID NO: 42384 - protein, 39 aa, Artificial Sequence; identical to SEQ ID NO: 29345
  GFR-binding peptide
  MOD_RES (3), (4), (38): Xaa is C or S
  MOD_RES (18), (19), (20), (21), (22): Xaa is A or G
  MOD_RES (23), (24), (25), (26): Xaa is A or G or is absent

SEQ ID NO: 42385 - protein, 38 aa, Artificial Sequence
  GFR-binding peptide
  MOD_RES (2), (3), (36), (38): Xaa is C or S
  MOD_RES (17), (18), (19), (20), (21): Xaa is A or G
  MOD_RES (22), (23), (24), (25): Xaa is A or G or is absent
TXXAPVKTSPISMLYIXXXXXXXXXYKQYEMIVEEXGX

SEQ ID NO: 42386 - protein, 42 aa, Artificial Sequence
  GFR-binding peptide
  MOD_RES (4), (5), (39), (41): Xaa is C or S
  MOD_RES (19), (20), (21), (22), (23): Xaa is A or G
  MOD_RES (24), (25), (26), (27): Xaa is A or G or is absent
AGPXXTPTKMSPISMLYIXXXXXXXXXYKQYEGMVVDRXGXS

SEQ ID NO: 42387 - protein, 39 aa, Artificial Sequence; identical to SEQ ID NO: 27432
  GFR-binding peptide
  MOD_RES (4), (5), (39): Xaa is C or S
  MOD_RES (19), (20), (21), (22), (23): Xaa is A or G
  MOD_RES (24), (25), (26), (27): Xaa is A or G or is absent

SEQ ID NO: 42388 - protein, 34 aa, Artificial Sequence; identical to SEQ ID NO: 27433
  GFR-binding peptide
  MOD_RES (32), (34): Xaa is C or S

SEQ ID NO: 42389 - protein, 39 aa, Artificial Sequence; identical to SEQ ID NO: 30363
  GFR-binding peptide
  MOD_RES (3), (4), (36), (38): Xaa is C or S

SEQ ID NO: 42390 - protein, 41 aa, Artificial Sequence; identical to SEQ ID NO: 28386
  GFR-binding peptide
  MOD_RES (3), (4), (38), (40): Xaa is C or S
  MOD_RES (18), (19), (20), (21), (22): Xaa is A or G
  MOD_RES (23), (24), (25), (26): Xaa is A or G or is absent

SEQ ID NO: 42391 - protein, 38 aa, Artificial Sequence; identical to SEQ ID NO: 30364
  GFR-binding peptide
  MOD_RES (4), (36), (38): Xaa is C or S

SEQ ID NO: 42392 - protein, 31 aa, Artificial Sequence; identical to SEQ ID NO: 30365
  GFR-binding peptide

SEQ ID NO: 42393 - protein, 37 aa, Artificial Sequence
  GFR-binding peptide
  MOD_RES (1), (34), (36): Xaa is C or S
  MOD_RES (15), (16), (17), (18), (19): Xaa is A or G
  MOD_RES (20), (21), (22), (23): Xaa is A or G or is absent
XAPVKTSPISMLYIXXXXXXXXXYKQYEMIVEEXGXL

SEQ ID NO: 42394 - protein, 44 aa, Artificial Sequence; identical to SEQ ID NO: 28388
  GFR-binding peptide
  MOD_RES (7), (41), (43): Xaa is C or S
  MOD_RES (21), (22), (23), (24), (25): Xaa is A or G
  MOD_RES (26), (27), (28), (29): Xaa is A or G or is absent

SEQ ID NO: 42395 - protein, 37 aa, Artificial Sequence; identical to SEQ ID NO: 29352
  GFR-binding peptide
  MOD_RES (6), (7): Xaa is C or S

SEQ ID NO: 42396 - protein, 36 aa, Artificial Sequence; identical to SEQ ID NO: 27435
  GFR-binding peptide
  MOD_RES (2), (3), (35): Xaa is C or S

SEQ ID NO: 42397 - protein, 38 aa, Artificial Sequence; identical to SEQ ID NO: 29357
  GFR-binding peptide
  MOD_RES (4), (5): Xaa is C or S
  MOD_RES (19), (20), (21), (22), (23): Xaa is A or G
  MOD_RES (24), (25), (26), (27): Xaa is A or G or is absent

SEQ ID NO: 42398 - protein, 42 aa, Artificial Sequence; identical to SEQ ID NO: 28391
  GFR-binding peptide
  MOD_RES (4), (5), (39), (41): Xaa is C or S
  MOD_RES (19), (20), (21), (22), (23): Xaa is A or G
  MOD_RES (24), (25), (26), (27): Xaa is A or G or is absent

SEQ ID NO: 42399 - protein, 44 aa, Artificial Sequence; identical to SEQ ID NO: 28392
  GFR-binding peptide
  MOD_RES (6), (7), (41), (43): Xaa is C or S
  MOD_RES (21), (22), (23), (24), (25): Xaa is A or G
  MOD_RES (26), (27), (28), (29): Xaa is A or G or is absent

SEQ ID NO: 42400 - protein, 33 aa, Artificial Sequence; identical to SEQ ID NO: 30369
  GFR-binding peptide
  MOD_RES (14), (15), (16), (17), (18): Xaa is A or G
  MOD_RES (19), (20), (21), (22): Xaa is A or G or is absent

SEQ ID NO: 42401 - protein, 40 aa, Artificial Sequence; identical to SEQ ID NO: 30370
  GFR-binding peptide
  MOD_RES (5), (6), (40): Xaa is C or S
  MOD_RES (20), (21), (22), (23), (24): Xaa is A or G
  MOD_RES (25), (26), (27), (28): Xaa is A or G or is absent

SEQ ID NO: 42402 - protein, 38 aa, Artificial Sequence; identical to SEQ ID NO: 30372
  GFR-binding peptide
  MOD_RES (6), (7): Xaa is C or S

SEQ ID NO: 42403 - protein, 43 aa, Artificial Sequence; identical to SEQ ID NO: 28398
  GFR-binding peptide
  MOD_RES (5), (6), (40), (42): Xaa is C or S
  MOD_RES (20), (21), (22), (23), (24): Xaa is A or G
  MOD_RES (25), (26), (27), (28): Xaa is A or G or is absent

SEQ ID NO: 42404 - protein, 32 aa, Artificial Sequence; identical to SEQ ID NO: 27443
  GFR-binding peptide
  MOD_RES (14), (15), (16), (17), (18): Xaa is A or G
  MOD_RES (19), (20), (21), (22): Xaa is A or G or is absent

SEQ ID NO: 42405 - protein, 31 aa, Artificial Sequence; identical to SEQ ID NO: 27445
  GFR-binding peptide

SEQ ID NO: 42406 - protein, 40 aa, Artificial Sequence
  GFR-binding peptide
  MOD_RES (6), (7), (40): Xaa is C or S
  MOD_RES (21), (22), (23), (24), (25): Xaa is A or G
  MOD_RES (26), (27), (28), (29): Xaa is A or G or is absent
RVPSTXXAPVKTSPISMLYIXXXXXXXXXYKQYEMIVEEX

SEQ ID NO: 42407 - protein, 37 aa, Artificial Sequence; identical to SEQ ID NO: 28401
  GFR-binding peptide
  MOD_RES (4), (5), (37): Xaa is C or S

SEQ ID NO: 42408 - protein, 39 aa, Artificial Sequence; identical to SEQ ID NO: 27447
  GFR-binding peptide
  MOD_RES (1), (2), (36), (38): Xaa is C or S
  MOD_RES (16), (17), (18), (19), (20): Xaa is A or G
  MOD_RES (21), (22), (23), (24): Xaa is A or G or is absent

SEQ ID NO: 42409 - protein, 35 aa, Artificial Sequence; identical to SEQ ID NO: 27449
  GFR-binding peptide
  MOD_RES (1), (35): Xaa is C or S
  MOD_RES (15), (16), (17), (18), (19): Xaa is A or G
  MOD_RES (20), (21), (22), (23): Xaa is A or G or is absent

SEQ ID NO: 42410 - protein, 34 aa, Artificial Sequence; identical to SEQ ID NO: 27453
  GFR-binding peptide
  MOD_RES (3), (4): Xaa is C or S

SEQ ID NO: 42411 - protein, 37 aa, Artificial Sequence; identical to SEQ ID NO: 30380
  GFR-binding peptide
  MOD_RES (4), (5), (37): Xaa is C or S

SEQ ID NO: 42412 - protein, 35 aa, Artificial Sequence
  GFR-binding peptide
  MOD_RES (1), (33), (35): Xaa is C or S
XTPTKMSPISMLYINDKQQIIYKQYEGMVVDRXGX

SEQ ID NO: 42413 - protein, 33 aa, Artificial Sequence; identical to SEQ ID NO: 28408
  GFR-binding peptide
  MOD_RES (2), (3): Xaa is C or S

SEQ ID NO: 42414 - protein, 36 aa, Artificial Sequence; identical to SEQ ID NO: 30381
  GFR-binding peptide
  MOD_RES (2), (3): Xaa is C or S
  MOD_RES (17), (18), (19), (20), (21): Xaa is A or G
  MOD_RES (22), (23), (24), (25): Xaa is A or G or is absent

SEQ ID NO: 42415 - protein, 34 aa, Artificial Sequence; identical to SEQ ID NO: 30382
  GFR-binding peptide
  MOD_RES (1), (1): Xaa is C or S
  MOD_RES (15), (16), (17), (18), (19): Xaa is A or G
  MOD_RES (20), (21), (22), (23): Xaa is A or G or is absent

SEQ ID NO: 42416 - protein, 40 aa, Artificial Sequence; identical to SEQ ID NO: 27460
  GFR-binding peptide
  MOD_RES (5), (39): Xaa is C or S
  MOD_RES (19), (20), (21), (22), (23): Xaa is A or G
  MOD_RES (24), (25), (26), (27): Xaa is A or G or is absent

SEQ ID NO: 42417 - protein, 38 aa, Artificial Sequence; identical to SEQ ID NO: 28411
  GFR-binding peptide
  MOD_RES (2), (3), (36), (38): Xaa is C or S

SEQ ID NO: 42418 - protein, 31 aa, Artificial Sequence; identical to SEQ ID NO: 28415
  GFR-binding peptide

SEQ ID NO: 42419 - protein, 39 aa, Artificial Sequence; identical to SEQ ID NO: 27464
  GFR-binding peptide
  MOD_RES (2), (3), (37), (39): Xaa is C or S
  MOD_RES (17), (18), (19), (20), (21): Xaa is A or G
  MOD_RES (22), (23), (24), (25): Xaa is A or G or is absent

SEQ ID NO: 42420 - protein, 42 aa, Artificial Sequence; identical to SEQ ID NO: 30384
  GFR-binding peptide
  MOD_RES (6), (7), (41): Xaa is C or S
  MOD_RES (21), (22), (23), (24), (25): Xaa is A or G
  MOD_RES (26), (27), (28), (29): Xaa is A or G or is absent

SEQ ID NO: 42421 - protein, 40 aa, Artificial Sequence; identical to SEQ ID NO: 28416
  GFR-binding peptide
  MOD_RES (4), (5), (39): Xaa is C or S
  MOD_RES (19), (20), (21), (22), (23): Xaa is A or G
  MOD_RES (24), (25), (26), (27): Xaa is A or G or is absent

SEQ ID NO: 42422 - protein, 37 aa, Artificial Sequence; identical to SEQ ID NO: 27465
  GFR-binding peptide
  MOD_RES (3), (4): Xaa is C or S
  MOD_RES (18), (19), (20), (21), (22): Xaa is A or G
  MOD_RES (23), (24), (25), (26): Xaa is A or G or is absent

SEQ ID NO: 42423 - protein, 38 aa, Artificial Sequence; identical to SEQ ID NO: 30386
  GFR-binding peptide
  MOD_RES (4), (5), (37): Xaa is C or S

SEQ ID NO: 42424 - protein, 38 aa, Artificial Sequence; identical to SEQ ID NO: 28417
  GFR-binding peptide
  MOD_RES (5), (6): Xaa is C or S
  MOD_RES (20), (21), (22), (23), (24): Xaa is A or G
  MOD_RES (25), (26), (27), (28): Xaa is A or G or is absent

SEQ ID NO: 42425 - protein, 38 aa, Artificial Sequence; identical to SEQ ID NO: 27467
  GFR-binding peptide
  MOD_RES (3), (4), (36), (38): Xaa is C or S

SEQ ID NO: 42426 - protein, 33 aa, Artificial Sequence; identical to SEQ ID NO: 30391
  GFR-binding peptide
  MOD_RES (14), (15), (16), (17), (18): Xaa is A or G
  MOD_RES (19), (20), (21), (22): Xaa is A or G or is absent

SEQ ID NO: 42427 - protein, 38 aa, Artificial Sequence; identical to SEQ ID NO: 29386
  GFR-binding peptide
  MOD_RES (3), (4), (38): Xaa is C or S
  MOD_RES (18), (19), (20), (21), (22): Xaa is A or G
  MOD_RES (23), (24), (25), (26): Xaa is A or G or is absent

SEQ ID NO: 42428 - protein, 39 aa, Artificial Sequence; identical to SEQ ID NO: 28422
  GFR-binding peptide
  MOD_RES (3), (4), (38): Xaa is C or S
  MOD_RES (18), (19), (20), (21), (22): Xaa is A or G
  MOD_RES (23), (24), (25), (26): Xaa is A or G or is absent

SEQ ID NO: 42429 - protein, 38 aa, Artificial Sequence
  GFR-binding peptide
  MOD_RES (1), (2), (35), (37): Xaa is C or S
  MOD_RES (16), (17), (18), (19), (20): Xaa is A or G
  MOD_RES (21), (22), (23), (24): Xaa is A or G or is absent
XXAPVKTSPISMLYIXXXXXXXXXYKQYEMIVEEXGXL

SEQ ID NO: 42430 - protein, 36 aa, Artificial Sequence; identical to SEQ ID NO: 28423
  GFR-binding peptide
  MOD_RES (1), (35): Xaa is C or S
  MOD_RES (15), (16), (17), (18), (19): Xaa is A or G
  MOD_RES (20), (21), (22), (23): Xaa is A or G or is absent

SEQ ID NO: 42431 - protein, 37 aa, Artificial Sequence; identical to SEQ ID NO: 29388
  GFR-binding peptide
  MOD_RES (2), (3), (35), (37): Xaa is C or S

SEQ ID NO: 42432 - protein, 38 aa, Artificial Sequence; identical to SEQ ID NO: 28426
  GFR-binding peptide
  MOD_RES (4), (5): Xaa is C or S
  MOD_RES (19), (20), (21), (22), (23): Xaa is A or G
  MOD_RES (24), (25), (26), (27): Xaa is A or G or is absent

SEQ ID NO: 42433 - protein, 43 aa, Artificial Sequence
  GFR-binding peptide
  MOD_RES (6), (7), (40), (42): Xaa is C or S
  MOD_RES (21), (22), (23), (24), (25): Xaa is A or G
  MOD_RES (26), (27), (28), (29): Xaa is A or G or is absent
RVPSTXXAPVKTSPISMLYIXXXXXXXXXYKQYEMIVEEXGXL

SEQ ID NO: 42434 - protein, 32 aa, Artificial Sequence; identical to SEQ ID NO: 27473
  GFR-binding peptide
  MOD_RES (14), (15), (16), (17), (18): Xaa is A or G
  MOD_RES (19), (20), (21), (22): Xaa is A or G or is absent

SEQ ID NO: 42435 - protein, 33 aa, Artificial Sequence; identical to SEQ ID NO: 30398
  GFR-binding peptide
  MOD_RES (1), (33): Xaa is C or S

SEQ ID NO: 42436 - protein, 35 aa, Artificial Sequence; identical to SEQ ID NO: 28429
  GFR-binding peptide
  MOD_RES (1), (35): Xaa is C or S
  MOD_RES (15), (16), (17), (18), (19): Xaa is A or G
  MOD_RES (20), (21), (22), (23): Xaa is A or G or is absent

SEQ ID NO: 42437 - protein, 42 aa, Artificial Sequence; identical to SEQ ID NO: 29390
  GFR-binding peptide
  MOD_RES (6), (7), (41): Xaa is C or S
  MOD_RES (21), (22), (23), (24), (25): Xaa is A or G
  MOD_RES (26), (27), (28), (29): Xaa is A or G or is absent

SEQ ID NO: 42438 - protein, 41 aa, Artificial Sequence; identical to SEQ ID NO: 28431
  GFR-binding peptide
  MOD_RES (5), (6), (38), (40): Xaa is C or S

SEQ ID NO: 42439 - protein, 40 aa, Artificial Sequence; identical to SEQ ID NO: 29391
  GFR-binding peptide
  MOD_RES (5), (6), (38), (40): Xaa is C or S

SEQ ID NO: 42440 - protein, 37 aa, Artificial Sequence; identical to SEQ ID NO: 28436
  GFR-binding peptide
  MOD_RES (35), (37): Xaa is C or S
  MOD_RES (14), (15), (16), (17), (18): Xaa is A or G
  MOD_RES (19), (20), (21), (22): Xaa is A or G or is absent

SEQ ID NO: 42441 - protein, 31 aa, Artificial Sequence; identical to SEQ ID NO: 29393
  GFR-binding peptide
  MOD_RES (1), (1): Xaa is C or S

SEQ ID NO: 42442 - protein, 39 aa, Artificial Sequence; identical to SEQ ID NO: 29395
  GFR-binding peptide
  MOD_RES (3), (4), (38): Xaa is C or S
  MOD_RES (18), (19), (20), (21), (22): Xaa is A or G
  MOD_RES (23), (24), (25), (26): Xaa is A or G or is absent

SEQ ID NO: 42443 - protein, 37 aa, Artificial Sequence
  GFR-binding peptide
  MOD_RES (1), (2), (35), (37): Xaa is C or S
  MOD_RES (16), (17), (18), (19), (20): Xaa is A or G
  MOD_RES (21), (22), (23), (24): Xaa is A or G or is absent
XXAPVKTSPISMLYIXXXXXXXXXYKQYEMIVEEXGX

SEQ ID NO: 42444 - protein, 38 aa, Artificial Sequence; identical to SEQ ID NO: 28440
  GFR-binding peptide
  MOD_RES (4), (5), (37): Xaa is C or S

SEQ ID NO: 42445 - protein, 41 aa, Artificial Sequence; identical to SEQ ID NO: 27483
  GFR-binding peptide
  MOD_RES (5), (6), (38), (40): Xaa is C or S

SEQ ID NO: 42446 - protein, 41 aa, Artificial Sequence; identical to SEQ ID NO: 27484
  GFR-binding peptide
  MOD_RES (5), (6), (40): Xaa is C or S
  MOD_RES (20), (21), (22), (23), (24): Xaa is A or G
  MOD_RES (25), (26), (27), (28): Xaa is A or G or is absent

SEQ ID NO: 42447 - protein, 36 aa, Artificial Sequence; identical to SEQ ID NO: 27485
  GFR-binding peptide
  MOD_RES (3), (4): Xaa is C or S
  MOD_RES (18), (19), (20), (21), (22): Xaa is A or G
  MOD_RES (23), (24), (25), (26): Xaa is A or G or is absent

SEQ ID NO: 42448 - protein, 33 aa, Artificial Sequence; identical to SEQ ID NO: 29399
  GFR-binding peptide
  MOD_RES (1), (1): Xaa is C or S
  MOD_RES (15), (16), (17), (18), (19): Xaa is A or G
  MOD_RES (20), (21), (22), (23): Xaa is A or G or is absent

SEQ ID NO: 42449 - protein, 37 aa, Artificial Sequence; identical to SEQ ID NO: 28442
  GFR-binding peptide
  MOD_RES (2), (3), (37): Xaa is C or S
  MOD_RES (17), (18), (19), (20), (21): Xaa is A or G
  MOD_RES (22), (23), (24), (25): Xaa is A or G or is absent

SEQ ID NO: 42450 - protein, 35 aa, Artificial Sequence; identical to SEQ ID NO: 27487
  GFR-binding peptide
  MOD_RES (2), (3): Xaa is C or S
  MOD_RES (17), (18), (19), (20), (21): Xaa is A or G
  MOD_RES (22), (23), (24), (25): Xaa is A or G or is absent

SEQ ID NO: 42451 - protein, 39 aa, Artificial Sequence; identical to SEQ ID NO: 30419
  GFR-binding peptide
  MOD_RES (5), (6), (38): Xaa is C or S

SEQ ID NO: 42452 - protein, 41 aa, Artificial Sequence; identical to SEQ ID NO: 29403
  GFR-binding peptide
  MOD_RES (3), (4), (39), (41): Xaa is C or S
  MOD_RES (18), (19), (20), (21), (22): Xaa is A or G
  MOD_RES (23), (24), (25), (26): Xaa is A or G or is absent

SEQ ID NO: 42453 - protein, 33 aa, Artificial Sequence; identical to SEQ ID NO: 27490
  GFR-binding peptide
  MOD_RES (14), (15), (16), (17), (18): Xaa is A or G
  MOD_RES (19), (20), (21), (22): Xaa is A or G or is absent

SEQ ID NO: 42454 - protein, 40 aa, Artificial Sequence; identical to SEQ ID NO: 28444
  GFR-binding peptide
  MOD_RES (5), (6), (38), (40): Xaa is C or S

SEQ ID NO: 42455 - protein, 37 aa, Artificial Sequence; identical to SEQ ID NO: 28446
  GFR-binding peptide
  MOD_RES (1), (35), (37): Xaa is C or S
  MOD_RES (15), (16), (17), (18), (19): Xaa is A or G
  MOD_RES (20), (21), (22), (23): Xaa is A or G or is absent

SEQ ID NO: 42456 - protein, 32 aa, Artificial Sequence
  GFR-binding peptide
  MOD_RES (32), (32): Xaa is C or S
TPTKMSPISMLYINDKQQIIYKQYEGMVVDRX

SEQ ID NO: 42457 - protein, 36 aa, Artificial Sequence; identical to SEQ ID NO: 29408
  GFR-binding peptide
  MOD_RES (1), (2), (34), (36): Xaa is C or S

SEQ ID NO: 42458 - protein, 35 aa, Artificial Sequence; identical to SEQ ID NO: 29413
  GFR-binding peptide
  MOD_RES (2), (3): Xaa is C or S
  MOD_RES (17), (18), (19), (20), (21): Xaa is A or G
  MOD_RES (22), (23), (24), (25): Xaa is A or G or is absent

SEQ ID NO: 42459 - protein, 39 aa, Artificial Sequence; identical to SEQ ID NO: 27496
  GFR-binding peptide
  MOD_RES (3), (4), (37), (39): Xaa is C or S

SEQ ID NO: 42460 - protein, 37 aa, Artificial Sequence
  GFR-binding peptide
  MOD_RES (5), (6), (37): Xaa is C or S
VPSTXXAPVKTSPISMLYIDNGRVLLYKQYEMIVEEX

SEQ ID NO: 42461 - protein, 30 aa, Artificial Sequence
  GFR-binding peptide
TPTKMSPISMLYINDKQQIIYKQYEGMVVD

SEQ ID NO: 42462 - protein, 35 aa, Artificial Sequence; identical to SEQ ID NO: 29416
  GFR-binding peptide
  MOD_RES (3), (3): Xaa is C or S
  MOD_RES (17), (18), (19), (20), (21): Xaa is A or G
  MOD_RES (22), (23), (24), (25): Xaa is A or G or is absent

SEQ ID NO: 42463 - protein, 36 aa, Artificial Sequence; identical to SEQ ID NO: 29417
  GFR-binding peptide
  MOD_RES (34), (36): Xaa is C or S
  MOD_RES (14), (15), (16), (17), (18): Xaa is A or G
  MOD_RES (19), (20), (21), (22): Xaa is A or G or is absent

SEQ ID NO: 42464 - protein, 33 aa, Artificial Sequence; identical to SEQ ID NO: 29419
  GFR-binding peptide
  MOD_RES (1), (33): Xaa is C or S

SEQ ID NO: 42465 - protein, 34 aa, Artificial Sequence; identical to SEQ ID NO: 30431
  GFR-binding peptide
  MOD_RES (34), (34): Xaa is C or S
  MOD_RES (14), (15), (16), (17), (18): Xaa is A or G
  MOD_RES (19), (20), (21), (22): Xaa is A or G or is absent

SEQ ID NO: 42466 - protein, 39 aa, Artificial Sequence
  GFR-binding peptide
  MOD_RES (1), (2), (36), (38): Xaa is C or S
  MOD_RES (16), (17), (18), (19), (20): Xaa is A or G
  MOD_RES (21), (22), (23), (24): Xaa is A or G or is absent
XXTPTKMSPISMLYIXXXXXXXXXYKQYEGMVVDRXGXS

SEQ ID NO: 42467 - protein, 35 aa, Artificial Sequence; identical to SEQ ID NO: 27507
  GFR-binding peptide
  MOD_RES (34), (34): Xaa is C or S
  MOD_RES (14), (15), (16), (17), (18): Xaa is A or G
  MOD_RES (19), (20), (21), (22): Xaa is A or G or is absent

SEQ ID NO: 42468 - protein, 36 aa, Artificial Sequence; identical to SEQ ID NO: 28461
  GFR-binding peptide
  MOD_RES (3), (35): Xaa is C or S

SEQ ID NO: 42469 - protein, 35 aa, Artificial Sequence; identical to SEQ ID NO: 27512
  GFR-binding peptide
  MOD_RES (2), (34): Xaa is C or S

SEQ ID NO: 42470 - protein, 34 aa, Artificial Sequence; identical to SEQ ID NO: 29426
  GFR-binding peptide
  MOD_RES (2), (3): Xaa is C or S

SEQ ID NO: 42471 - protein, 40 aa, Artificial Sequence; identical to SEQ ID NO: 29430
  GFR-binding peptide
  MOD_RES (4), (5), (39): Xaa is C or S
  MOD_RES (19), (20), (21), (22), (23): Xaa is A or G
  MOD_RES (24), (25), (26), (27): Xaa is A or G or is absent

SEQ ID NO: 42472 - protein, 39 aa, Artificial Sequence; identical to SEQ ID NO: 30439
  GFR-binding peptide
  MOD_RES (5), (37), (39): Xaa is C or S

SEQ ID NO: 42473 - protein, 40 aa, Artificial Sequence
  GFR-binding peptide
  MOD_RES (5), (6), (40): Xaa is C or S
  MOD_RES (20), (21), (22), (23), (24): Xaa is A or G
  MOD_RES (25), (26), (27), (28): Xaa is A or G or is absent
SAGPXXTPTKMSPISMLYIXXXXXXXXXYKQYEGMVVDRX

SEQ ID NO: 42474 - protein, 32 aa, Artificial Sequence
  GFR-binding peptide
  MOD_RES (1), (2): Xaa is C or S
XXAPVKTSPISMLYIDNGRVLLYKQYEMIVEE

SEQ ID NO: 42475 - protein, 37 aa, Artificial Sequence
  GFR-binding peptide
  MOD_RES (2), (3), (36): Xaa is C or S
  MOD_RES (17), (18), (19), (20), (21): Xaa is A or G
  MOD_RES (22), (23), (24), (25): Xaa is A or G or is absent
TXXAPVKTSPISMLYIXXXXXXXXXYKQYEMIVEEXG

SEQ ID NO: 42476 - protein, 34 aa, Artificial Sequence; identical to SEQ ID NO: 29439
  GFR-binding peptide
  MOD_RES (1), (2), (34): Xaa is C or S

SEQ ID NO: 42477 - protein, 40 aa, Artificial Sequence; identical to SEQ ID NO: 29440
  GFR-binding peptide
  MOD_RES (5), (6), (40): Xaa is C or S
  MOD_RES (20), (21), (22), (23), (24): Xaa is A or G
  MOD_RES (25), (26), (27), (28): Xaa is A or G or is absent

SEQ ID NO: 42478 - protein, 36 aa, Artificial Sequence; identical to SEQ ID NO: 28474
  GFR-binding peptide
  MOD_RES (3), (4), (36): Xaa is C or S

SEQ ID NO: 42479 - protein, 36 aa, Artificial Sequence; identical to SEQ ID NO: 30445
  GFR-binding peptide
  MOD_RES (1), (2), (34), (36): Xaa is C or S

SEQ ID NO: 42480 - protein, 40 aa, Artificial Sequence
  GFR-binding peptide
  MOD_RES (6), (7), (39): Xaa is C or S
HVPKPXXAPTKLSPISVLYIDDSSNVIYKQYENMVVRSXG

SEQ ID NO: 42481 - protein, 38 aa, Artificial Sequence; identical to SEQ ID NO: 29443
  GFR-binding peptide
  MOD_RES (1), (2), (36), (38): Xaa is C or S
  MOD_RES (16), (17), (18), (19), (20): Xaa is A or G
  MOD_RES (21), (22), (23), (24): Xaa is A or G or is absent

SEQ ID NO: 42482 - protein, 35 aa, Artificial Sequence
  GFR-binding peptide
  MOD_RES (1), (2), (34): Xaa is C or S
XXTPTKMSPISMLYINDKQQIIYKQYEGMVVDRXG

SEQ ID NO: 42483 - protein, 35 aa, Artificial Sequence
  GFR-binding peptide
  MOD_RES (4), (5): Xaa is C or S
AGPXXTPTKMSPISMLYINDKQQIIYKQYEGMVVD

SEQ ID NO: 42484 - protein, 34 aa, Artificial Sequence; identical to SEQ ID NO: 29444
  GFR-binding peptide
  MOD_RES (2), (3): Xaa is C or S

SEQ ID NO: 42485 - protein, 37 aa, Artificial Sequence; identical to SEQ ID NO: 29446
  GFR-binding peptide
  MOD_RES (6), (7): Xaa is C or S

SEQ ID NO: 42486 - protein, 32 aa, Artificial Sequence; identical to SEQ ID NO: 27527
  GFR-binding peptide
  MOD_RES (1), (2): Xaa is C or S

SEQ ID NO: 42487 - protein, 43 aa, Artificial Sequence; identical to SEQ ID NO: 27529
  GFR-binding peptide
  MOD_RES (6), (7), (41), (43): Xaa is C or S
  MOD_RES (21), (22), (23), (24), (25): Xaa is A or G
  MOD_RES (26), (27), (28), (29): Xaa is A or G or is absent

SEQ ID NO: 42488 - protein, 41 aa, Artificial Sequence
  GFR-binding peptide
  MOD_RES (6), (7), (41): Xaa is C or S
  MOD_RES (21), (22), (23), (24), (25): Xaa is A or G
  MOD_RES (26), (27), (28), (29): Xaa is A or G or is absent
HVPKPXXAPTKLSPISVLYIXXXXXXXXXYKQYENMVVRSX

SEQ ID NO: 42489 - protein, 33 aa, Artificial Sequence
  GFR-binding peptide
  MOD_RES (31), (33): Xaa is C or S
APVKTSPISMLYIDNGRVLLYKQYEMIVEEXGX

SEQ ID NO: 42490 - protein, 39 aa, Artificial Sequence; identical to SEQ ID NO: 29455
  GFR-binding peptide
  MOD_RES (6), (6): Xaa is C or S
  MOD_RES (20), (21), (22), (23), (24): Xaa is A or G
  MOD_RES (25), (26), (27), (28): Xaa is A or G or is absent

SEQ ID NO: 42491 - protein, 35 aa, Artificial Sequence; identical to SEQ ID NO: 29456
  GFR-binding peptide
  MOD_RES (1), (34): Xaa is C or S

SEQ ID NO: 42492 - protein, 35 aa, Artificial Sequence; identical to SEQ ID NO: 30452
  GFR-binding peptide
  MOD_RES (1), (33), (35): Xaa is C or S

SEQ ID NO: 42493 - protein, 34 aa, Artificial Sequence; identical to SEQ ID NO: 29457
  GFR-binding peptide
  MOD_RES (1), (1): Xaa is C or S
  MOD_RES (15), (16), (17), (18), (19): Xaa is A or G
  MOD_RES (20), (21), (22), (23): Xaa is A or G or is absent

SEQ ID NO: 42494 - protein, 39 aa, Artificial Sequence; identical to SEQ ID NO: 27533
  GFR-binding peptide
  MOD_RES (4), (5), (37), (39): Xaa is C or S

SEQ ID NO: 42495 - protein, 40 aa, Artificial Sequence; identical to SEQ ID NO: 27535
  GFR-binding peptide
  MOD_RES (5), (6): Xaa is C or S
  MOD_RES (20), (21), (22), (23), (24): Xaa is A or G
  MOD_RES (25), (26), (27), (28): Xaa is A or G or is absent

SEQ ID NO: 42496 - protein, 39 aa, Artificial Sequence; identical to SEQ ID NO: 27537
  GFR-binding peptide
  MOD_RES (4), (5), (39): Xaa is C or S
  MOD_RES (19), (20), (21), (22), (23): Xaa is A or G
  MOD_RES (24), (25), (26), (27): Xaa is A or G or is absent

SEQ ID NO: 42497 - protein, 40 aa, Artificial Sequence; identical to SEQ ID NO: 29462
  GFR-binding peptide
  MOD_RES (6), (7), (39): Xaa is C or S

SEQ ID NO: 42498 - protein, 41 aa, Artificial Sequence; identical to SEQ ID NO: 28486
  GFR-binding peptide
  MOD_RES (5), (6), (38), (40): Xaa is C or S

SEQ ID NO: 42499 - protein, 42 aa, Artificial Sequence; identical to SEQ ID NO: 28487
  GFR-binding peptide
  MOD_RES (5), (6), (40), (42): Xaa is C or S
  MOD_RES (20), (21), (22), (23), (24): Xaa is A or G
  MOD_RES (25), (26), (27), (28): Xaa is A or G or is absent

SEQ ID NO: 42500 - protein, 37 aa, Artificial Sequence; identical to SEQ ID NO: 27541
  GFR-binding peptide
  MOD_RES (1), (2), (36): Xaa is C or S
  MOD_RES (16), (17), (18), (19), (20): Xaa is A or G
  MOD_RES (21), (22), (23), (24): Xaa is A or G or is absent

SEQ ID NO: 42501 - protein, 40 aa, Artificial Sequence; identical to SEQ ID NO: 29464
  GFR-binding peptide
  MOD_RES (6), (7), (39): Xaa is C or S

SEQ ID NO: 42502 - protein, 37 aa, Artificial Sequence; identical to SEQ ID NO: 30459
  GFR-binding peptide
  MOD_RES (34), (36): Xaa is C or S
  MOD_RES (14), (15), (16), (17), (18): Xaa is A or G
  MOD_RES (19), (20), (21), (22): Xaa is A or G or is absent

SEQ ID NO: 42503 - protein, 32 aa, Artificial Sequence; identical to SEQ ID NO: 30463
  GFR-binding peptide
  MOD_RES (14), (15), (16), (17), (18): Xaa is A or G
  MOD_RES (19), (20), (21), (22): Xaa is A or G or is absent

SEQ ID NO: 42504 - protein, 34 aa, Artificial Sequence; identical to SEQ ID NO: 27545
  GFR-binding peptide
  MOD_RES (3), (4): Xaa is C or S

SEQ ID NO: 42505 - protein, 34 aa, Artificial Sequence; identical to SEQ ID NO: 29468
  GFR-binding peptide
  MOD_RES (1), (2), (34): Xaa is C or S

SEQ ID NO: 42506 - protein, 35 aa, Artificial Sequence; identical to SEQ ID NO: 29472
  GFR-binding peptide
  MOD_RES (32), (34): Xaa is C or S

SEQ ID NO: 42507 - protein, 36 aa, Artificial Sequence; identical to SEQ ID NO: 28494
  GFR-binding peptide
  MOD_RES (3), (4), (36): Xaa is C or S

SEQ ID NO: 42508 - protein, 40 aa, Artificial Sequence; identical to SEQ ID NO: 28499
  GFR-binding peptide
  MOD_RES (4), (5), (37), (39): Xaa is C or S

SEQ ID NO: 42509 - protein, 37 aa, Artificial Sequence; identical to SEQ ID NO: 27552
  GFR-binding peptide
  MOD_RES (3), (4): Xaa is C or S
  MOD_RES (18), (19), (20), (21), (22): Xaa is A or G
  MOD_RES (23), (24), (25), (26): Xaa is A or G or is absent

SEQ ID NO: 42510 - protein, 35 aa, Artificial Sequence; identical to SEQ ID NO: 29478
  GFR-binding peptide
  MOD_RES (1), (33), (35): Xaa is C or S

SEQ ID NO: 42511 - protein, 39 aa, Artificial Sequence; identical to SEQ ID NO: 27556
  GFR-binding peptide
  MOD_RES (3), (4), (38): Xaa is C or S
  MOD_RES (18), (19), (20), (21), (22): Xaa is A or G
  MOD_RES (23), (24), (25), (26): Xaa is A or G or is absent

SEQ ID NO: 42512 - protein, 44 aa, Artificial Sequence; identical to SEQ ID NO: 29480
  GFR-binding peptide
  MOD_RES (6), (7), (41), (43): Xaa is C or S
  MOD_RES (21), (22), (23), (24), (25): Xaa is A or G
  MOD_RES (26), (27), (28), (29): Xaa is A or G or is absent

SEQ ID NO: 42513 - protein, 37 aa, Artificial Sequence; identical to SEQ ID NO: 28510
  GFR-binding peptide
  MOD_RES (2), (3), (37): Xaa is C or S
  MOD_RES (17), (18), (19), (20), (21): Xaa is A or G
  MOD_RES (22), (23), (24), (25): Xaa is A or G or is absent

SEQ ID NO: 42514 - protein, 37 aa, Artificial Sequence
  GFR-binding peptide
  MOD_RES (3), (4), (36): Xaa is C or S
GPXXTPTKMSPISMLYINDKQQIIYKQYEGMVVDRXG

SEQ ID NO: 42515 - protein, 41 aa, Artificial Sequence; identical to SEQ ID NO: 29486
  GFR-binding peptide
  MOD_RES (6), (7), (39), (41): Xaa is C or S

SEQ ID NO: 42516 - protein, 33 aa, Artificial Sequence; identical to SEQ ID NO: 30470
  GFR-binding peptide
  MOD_RES (1), (1): Xaa is C or S
  MOD_RES (15), (16), (17), (18), (19): Xaa is A or G
  MOD_RES (20), (21), (22), (23): Xaa is A or G or is absent

SEQ ID NO: 42517 - protein, 40 aa, Artificial Sequence; identical to SEQ ID NO: 27559
  GFR-binding peptide
  MOD_RES (6), (40): Xaa is C or S
  MOD_RES (20), (21), (22), (23), (24): Xaa is A or G
  MOD_RES (25), (26), (27), (28): Xaa is A or G or is absent

SEQ ID NO: 42518 - protein, 39 aa, Artificial Sequence; identical to SEQ ID NO: 30471
  GFR-binding peptide
  MOD_RES (6), (7), (39): Xaa is C or S

SEQ ID NO: 42519 - protein, 41 aa, Artificial Sequence; identical to SEQ ID NO: 29488
  GFR-binding peptide
  MOD_RES (6), (40): Xaa is C or S
  MOD_RES (20), (21), (22), (23), (24): Xaa is A or G
  MOD_RES (25), (26), (27), (28): Xaa is A or G or is absent

SEQ ID NO: 42520 - protein, 34 aa, Artificial Sequence
  GFR-binding peptide
  MOD_RES (2), (3): Xaa is C or S
PXXTPTKMSPISMLYINDKQQIIYKQYEGMVVDR

SEQ ID NO: 42521 - protein, 36 aa, Artificial Sequence; identical to SEQ ID NO: 27560
  GFR-binding peptide
  MOD_RES (3), (3): Xaa is C or S
  MOD_RES (17), (18), (19), (20), (21): Xaa is A or G
  MOD_RES (22), (23), (24), (25): Xaa is A or G or is absent

SEQ ID NO: 42522 - protein, 38 aa, Artificial Sequence; identical to SEQ ID NO: 29493
  GFR-binding peptide
  MOD_RES (4), (5): Xaa is C or S
  MOD_RES (19), (20), (21), (22), (23): Xaa is A or G
  MOD_RES (24), (25), (26), (27): Xaa is A or G or is absent

SEQ ID NO: 42523 - protein, 33 aa, Artificial Sequence; identical to SEQ ID NO: 30476
  GFR-binding peptide
  MOD_RES (3), (3): Xaa is C or S

SEQ ID NO: 42524 - protein, 37 aa, Artificial Sequence
  GFR-binding peptide
  MOD_RES (2), (3), (37): Xaa is C or S
  MOD_RES (17), (18), (19), (20), (21): Xaa is A or G
  MOD_RES (22), (23), (24), (25): Xaa is A or G or is absent
PXXTPTKMSPISMLYIXXXXXXXXXYKQYEGMVVDRX

SEQ ID NO: 42525 - protein, 40 aa, Artificial Sequence; identical to SEQ ID NO: 27563
  GFR-binding peptide
  MOD_RES (2), (3), (37), (39): Xaa is C or S
  MOD_RES (17), (18), (19), (20), (21): Xaa is A or G
  MOD_RES (22), (23), (24), (25): Xaa is A or G or is absent

SEQ ID NO: 42526 - protein, 41 aa, Artificial Sequence
  GFR-binding peptide
  MOD_RES (6), (7), (39), (41): Xaa is C or S
GSAGPXXTPTKMSPISMLYINDKQQIIYKQYEGMVVDRXGX

SEQ ID NO: 42527 - protein, 43 aa, Artificial Sequence; identical to SEQ ID NO: 30479
  GFR-binding peptide
  MOD_RES (6), (7), (41), (43): Xaa is C or S
  MOD_RES (21), (22), (23), (24), (25): Xaa is A or G
  MOD_RES (26), (27), (28), (29): Xaa is A or G or is absent

SEQ ID NO: 42528 - protein, 34 aa, Artificial Sequence; identical to SEQ ID NO: 29497
  GFR-binding peptide
  MOD_RES (4), (4): Xaa is C or S

SEQ ID NO: 42529 - protein, 40 aa, Artificial Sequence; identical to SEQ ID NO: 27566
  GFR-binding peptide
  MOD_RES (6), (7): Xaa is C or S
  MOD_RES (21), (22), (23), (24), (25): Xaa is A or G
  MOD_RES (26), (27), (28), (29): Xaa is A or G or is absent

SEQ ID NO: 42530 - protein, 40 aa, Artificial Sequence; identical to SEQ ID NO: 28525
  GFR-binding peptide
  MOD_RES (2), (3), (37), (39): Xaa is C or S
  MOD_RES (17), (18), (19), (20), (21): Xaa is A or G
  MOD_RES (22), (23), (24), (25): Xaa is A or G or is absent

SEQ ID NO: 42531 - protein, 39 aa, Artificial Sequence; identical to SEQ ID NO: 30484
  GFR-binding peptide
  MOD_RES (3), (4), (36), (38): Xaa is C or S

SEQ ID NO: 42532 - protein, 38 aa, Artificial Sequence; identical to SEQ ID NO: 30485
  GFR-binding peptide
  MOD_RES (2), (3), (35), (37): Xaa is C or S

SEQ ID NO: 42533 - protein, 35 aa, Artificial Sequence; identical to SEQ ID NO: 29503
  GFR-binding peptide
  MOD_RES (1), (2): Xaa is C or S
  MOD_RES (16), (17), (18), (19), (20): Xaa is A or G
  MOD_RES (21), (22), (23), (24): Xaa is A or G or is absent

SEQ ID NO: 42534 - protein, 36 aa, Artificial Sequence; identical to SEQ ID NO: 30487
  GFR-binding peptide
  MOD_RES (4), (4): Xaa is C or S
  MOD_RES (18), (19), (20), (21), (22): Xaa is A or G
  MOD_RES (23), (24), (25), (26): Xaa is A or G or is absent

SEQ ID NO: 42535 - protein, 36 aa, Artificial Sequence; identical to SEQ ID NO: 27575
  GFR-binding peptide
  MOD_RES (3), (4): Xaa is C or S
  MOD_RES (18), (19), (20), (21), (22): Xaa is A or G
  MOD_RES (23), (24), (25), (26): Xaa is A or G or is absent

SEQ ID NO: 42536 - protein, 41 aa, Artificial Sequence; identical to SEQ ID NO: 29508
  GFR-binding peptide
  MOD_RES (6), (38), (40): Xaa is C or S

SEQ ID NO: 42537 - protein, 33 aa, Artificial Sequence
  GFR-binding peptide
  MOD_RES (2), (3): Xaa is C or S
TXXAPVKTSPISMLYIDNGRVLLYKQYEMIVEE

SEQ ID NO: 42538 - protein, 36 aa, Artificial Sequence; identical to SEQ ID NO: 28535
  GFR-binding peptide
  MOD_RES (1), (2), (34), (36): Xaa is C or S

SEQ ID NO: 42539 - protein, 36 aa, Artificial Sequence; identical to SEQ ID NO: 28536
  GFR-binding peptide
  MOD_RES (2), (3): Xaa is C or S
  MOD_RES (17), (18), (19), (20), (21): Xaa is A or G
  MOD_RES (22), (23), (24), (25): Xaa is A or G or is absent

SEQ ID NO: 42540 - protein, 34 aa, Artificial Sequence; identical to SEQ ID NO: 29513
  GFR-binding peptide
  MOD_RES (32), (34): Xaa is C or S

SEQ ID NO: 42541 - protein, 34 aa, Artificial Sequence; identical to SEQ ID NO: 30497
  GFR-binding peptide
  MOD_RES (34), (34): Xaa is C or S
  MOD_RES (14), (15), (16), (17), (18): Xaa is A or G
  MOD_RES (19), (20), (21), (22): Xaa is A or G or is absent

SEQ ID NO: 42542 - protein, 40 aa, Artificial Sequence; identical to SEQ ID NO: 27586
  GFR-binding peptide
  MOD_RES (5), (6), (38), (40): Xaa is C or S

SEQ ID NO: 42543 - protein, 42 aa, Artificial Sequence; identical to SEQ ID NO: 27587
  GFR-binding peptide
  MOD_RES (7), (41): Xaa is C or S
  MOD_RES (21), (22), (23), (24), (25): Xaa is A or G
  MOD_RES (26), (27), (28), (29): Xaa is A or G or is absent

SEQ ID NO: 42544 - protein, 34 aa, Artificial Sequence
  GFR-binding peptide
  MOD_RES (32), (34): Xaa is C or S
TPTKMSPISMLYINDKQQIIYKQYEGMVVDRXGX

SEQ ID NO: 42545 - protein, 41 aa, Artificial Sequence; identical to SEQ ID NO: 28541
  GFR-binding peptide
  MOD_RES (4), (38), (40): Xaa is C or S
  MOD_RES (18), (19), (20), (21), (22): Xaa is A or G
  MOD_RES (23), (24), (25), (26): Xaa is A or G or is absent

SEQ ID NO: 42546 - protein, 38 aa, Artificial Sequence
  GFR-binding peptide
  MOD_RES (4), (5), (36), (38): Xaa is C or S
PSTXXAPVKTSPISMLYIDNGRVLLYKQYEMIVEEXGX

SEQ ID NO: 42547 - protein, 37 aa, Artificial Sequence
  GFR-binding peptide
  MOD_RES (1), (35), (37): Xaa is C or S
  MOD_RES (15), (16), (17), (18), (19): Xaa is A or G
  MOD_RES (20), (21), (22), (23): Xaa is A or G or is absent
XTPTKMSPISMLYIXXXXXXXXXYKQYEGMVVDRXGX

SEQ ID NO: 42548 - protein, 40 aa, Artificial Sequence; identical to SEQ ID NO: 28542
  GFR-binding peptide
  MOD_RES (4), (5), (39): Xaa is C or S
  MOD_RES (19), (20), (21), (22), (23): Xaa is A or G
  MOD_RES (24), (25), (26), (27): Xaa is A or G or is absent

SEQ ID NO: 42549 - protein, 37 aa, Artificial Sequence; identical to SEQ ID NO: 27595
  GFR-binding peptide
  MOD_RES (3), (35), (37): Xaa is C or S

SEQ ID NO: 42550 - protein, 34 aa, Artificial Sequence; identical to SEQ ID NO: 27599
  GFR-binding peptide
  MOD_RES (1), (2): Xaa is C or S
  MOD_RES (16), (17), (18), (19), (20): Xaa is A or G
  MOD_RES (21), (22), (23), (24): Xaa is A or G or is absent

SEQ ID NO: 42551 - protein, 39 aa, Artificial Sequence
  GFR-binding peptide
  MOD_RES (6), (7): Xaa is C or S
  MOD_RES (21), (22), (23), (24), (25): Xaa is A or G
  MOD_RES (26), (27), (28), (29): Xaa is A or G or is absent
GSAGPXXTPTKMSPISMLYIXXXXXXXXXYKQYEGMVVD

SEQ ID NO: 42552 - protein, 36 aa, Artificial Sequence; identical to SEQ ID NO: 30505
  GFR-binding peptide
  MOD_RES (34), (36): Xaa is C or S
  MOD_RES (14), (15), (16), (17), (18): Xaa is A or G
  MOD_RES (19), (20), (21), (22): Xaa is A or G or is absent

SEQ ID NO: 42553 - protein, 37 aa, Artificial Sequence; identical to SEQ ID NO: 30508
  GFR-binding peptide
  MOD_RES (4), (5), (37): Xaa is C or S

SEQ ID NO: 42554 - protein, 38 aa, Artificial Sequence; identical to SEQ ID NO: 28548
  GFR-binding peptide
  MOD_RES (3), (37): Xaa is C or S
  MOD_RES (17), (18), (19), (20), (21): Xaa is A or G
  MOD_RES (22), (23), (24), (25): Xaa is A or G or is absent

SEQ ID NO: 42555 - protein, 36 aa, Artificial Sequence; identical to SEQ ID NO: 27601
  GFR-binding peptide
  MOD_RES (1), (33), (35): Xaa is C or S

SEQ ID NO: 42556 - protein, 36 aa, Artificial Sequence; identical to SEQ ID NO: 28551
  GFR-binding peptide
  MOD_RES (2), (34), (36): Xaa is C or S

SEQ ID NO: 42557 - protein, 37 aa, Artificial Sequence
  GFR-binding peptide
  MOD_RES (4), (5), (37): Xaa is C or S
AGPXXTPTKMSPISMLYINDKQQIIYKQYEGMVVDRX

SEQ ID NO: 42558 - protein, 36 aa, Artificial Sequence; identical to SEQ ID NO: 28554
  GFR-binding peptide
  MOD_RES (1), (2), (36): Xaa is C or S
  MOD_RES (16), (17), (18), (19), (20): Xaa is A or G
  MOD_RES (21), (22), (23), (24): Xaa is A or G or is absent

SEQ ID NO: 42559 - protein, 39 aa, Artificial Sequence; identical to SEQ ID NO: 29533
  GFR-binding peptide
  MOD_RES (3), (4), (36), (38): Xaa is C or S

SEQ ID NO: 42560 - protein, 39 aa, Artificial Sequence; identical to SEQ ID NO: 27603
  GFR-binding peptide
  MOD_RES (3), (4), (36), (38): Xaa is C or S

SEQ ID NO: 42561 - protein, 35 aa, Artificial Sequence; identical to SEQ ID NO: 27605
  GFR-binding peptide
  MOD_RES (2), (3), (35): Xaa is C or S

SEQ ID NO: 42562 - protein, 41 aa, Artificial Sequence; identical to SEQ ID NO: 30511
  GFR-binding peptide
  MOD_RES (4), (5), (39), (41): Xaa is C or S
  MOD_RES (19), (20), (21), (22), (23): Xaa is A or G
  MOD_RES (24), (25), (26), (27): Xaa is A or G or is absent

SEQ ID NO: 42563 - protein, 39 aa, Artificial Sequence; identical to SEQ ID NO: 27609
  GFR-binding peptide
  MOD_RES (1), (2), (36), (38): Xaa is C or S
  MOD_RES (16), (17), (18), (19), (20): Xaa is A or G
  MOD_RES (21), (22), (23), (24): Xaa is A or G or is absent

SEQ ID NO: 42564 - protein, 35 aa, Artificial Sequence; identical to SEQ ID NO: 29536
  GFR-binding peptide
  MOD_RES (3), (4): Xaa is C or S

SEQ ID NO: 42565 - protein, 37 aa, Artificial Sequence; identical to SEQ ID NO: 28557
  GFR-binding peptide
  MOD_RES (3), (4): Xaa is C or S
  MOD_RES (18), (19), (20), (21), (22): Xaa is A or G
  MOD_RES (23), (24), (25), (26): Xaa is A or G or is absent

SEQ ID NO: 42566 - protein, 34 aa, Artificial Sequence
  GFR-binding peptide
  MOD_RES (31), (33): Xaa is C or S
APVKTSPISMLYIDNGRVLLYKQYEMIVEEXGXL

SEQ ID NO: 42567 - protein, 34 aa, Artificial Sequence; identical to SEQ ID NO: 28558
  GFR-binding peptide
  MOD_RES (2), (3): Xaa is C or S

SEQ ID NO: 42568 - protein, 44 aa, Artificial Sequence; identical to SEQ ID NO: 30514
  GFR-binding peptide
  MOD_RES (5), (6), (41), (43): Xaa is C or S
  MOD_RES (20), (21), (22), (23), (24): Xaa is A or G
  MOD_RES (25), (26), (27), (28): Xaa is A or G or is absent

SEQ ID NO: 42569 - protein, 41 aa, Artificial Sequence; identical to SEQ ID NO: 27613
  GFR-binding peptide
  MOD_RES (6), (7), (41): Xaa is C or S
  MOD_RES (21), (22), (23), (24), (25): Xaa is A or G
  MOD_RES (26), (27), (28), (29): Xaa is A or G or is absent

SEQ ID NO: 42570 - protein, 42 aa, Artificial Sequence; identical to SEQ ID NO: 28560
  GFR-binding peptide
  MOD_RES (6), (7), (41): Xaa is C or S
  MOD_RES (21), (22), (23), (24), (25): Xaa is A or G
  MOD_RES (26), (27), (28), (29): Xaa is A or G or is absent

SEQ ID NO: 42571 - protein, 36 aa, Artificial Sequence
  GFR-binding peptide
  MOD_RES (4), (5): Xaa is C or S
AGPXXTPTKMSPISMLYINDKQQIIYKQYEGMVVDR

SEQ ID NO: 42572 - protein, 38 aa, Artificial Sequence
  GFR-binding peptide
  MOD_RES (4), (5), (38): Xaa is C or S
  MOD_RES (19), (20), (21), (22), (23): Xaa is A or G
  MOD_RES (24), (25), (26), (27): Xaa is A or G or is absent
PSTXXAPVKTSPISMLYIXXXXXXXXXYKQYEMIVEEX

SEQ ID NO: 42573 - protein, 37 aa, Artificial Sequence; identical to SEQ ID NO: 27614
  GFR-binding peptide
  MOD_RES (3), (37): Xaa is C or S
  MOD_RES (17), (18), (19), (20), (21): Xaa is A or G
  MOD_RES (22), (23), (24), (25): Xaa is A or G or is absent

SEQ ID NO: 42574 - protein, 41 aa, Artificial Sequence; identical to SEQ ID NO: 29544
  GFR-binding peptide
  MOD_RES (6), (7), (41): Xaa is C or S
  MOD_RES (21), (22), (23), (24), (25): Xaa is A or G
  MOD_RES (26), (27), (28), (29): Xaa is A or G or is absent

SEQ ID NO: 42575 - protein, 36 aa, Artificial Sequence; identical to SEQ ID NO: 27615
  GFR-binding peptide
  MOD_RES (1), (33), (35): Xaa is C or S

SEQ ID NO: 42576 - protein, 37 aa, Artificial Sequence; identical to SEQ ID NO: 29546
  GFR-binding peptide
  MOD_RES (34), (36): Xaa is C or S
  MOD_RES (14), (15), (16), (17), (18): Xaa is A or G
  MOD_RES (19), (20), (21), (22): Xaa is A or G or is absent

SEQ ID NO: 42577 - protein, 37 aa, Artificial Sequence; identical to SEQ ID NO: 29548
  GFR-binding peptide
  MOD_RES (1), (2), (36): Xaa is C or S
  MOD_RES (16), (17), (18), (19), (20): Xaa is A or G
  MOD_RES (21), (22), (23), (24): Xaa is A or G or is absent

SEQ ID NO: 42578 - protein, 36 aa, Artificial Sequence; identical to SEQ ID NO: 27619
  GFR-binding peptide
  MOD_RES (3), (4): Xaa is C or S
  MOD_RES (18), (19), (20), (21), (22): Xaa is A or G
  MOD_RES (23), (24), (25), (26): Xaa is A or G or is absent

SEQ ID NO: 42579 - protein, 36 aa, Artificial Sequence; identical to SEQ ID NO: 30522
  GFR-binding peptide
  MOD_RES (1), (35): Xaa is C or S
  MOD_RES (15), (16), (17), (18), (19): Xaa is A or G
  MOD_RES (20), (21), (22), (23): Xaa is A or G or is absent

SEQ ID NO: 42580 - protein, 38 aa, Artificial Sequence; identical to SEQ ID NO: 28573
  GFR-binding peptide
  MOD_RES (1), (35), (37): Xaa is C or S
  MOD_RES (15), (16), (17), (18), (19): Xaa is A or G
  MOD_RES (20), (21), (22), (23): Xaa is A or G or is absent

SEQ ID NO: 42581 - protein, 42 aa, Artificial Sequence; identical to SEQ ID NO: 30524
  GFR-binding peptide
  MOD_RES (4), (5), (39), (41): Xaa is C or S
  MOD_RES (19), (20), (21), (22), (23): Xaa is A or G
  MOD_RES (24), (25), (26), (27): Xaa is A or G or is absent

SEQ ID NO: 42582 - protein, 35 aa, Artificial Sequence; identical to SEQ ID NO: 28576
  GFR-binding peptide
  MOD_RES (3), (4): Xaa is C or S

SEQ ID NO: 42583 - protein, 37 aa, Artificial Sequence; identical to SEQ ID NO: 29552
  GFR-binding peptide
  MOD_RES (5), (6): Xaa is C or S

SEQ ID NO: 42584 - protein, 34 aa, Artificial Sequence
  GFR-binding peptide
  MOD_RES (1), (34): Xaa is C or S
  MOD_RES (15), (16), (17), (18), (19): Xaa is A or G
  MOD_RES (20), (21), (22), (23): Xaa is A or G or is absent
XAPVKTSPISMLYIXXXXXXXXXYKQYEMIVEEX

SEQ ID NO: 42585 - protein, 39 aa, Artificial Sequence; identical to SEQ ID NO: 27628
  GFR-binding peptide
  MOD_RES (3), (4), (38): Xaa is C or S
  MOD_RES (18), (19), (20), (21), (22): Xaa is A or G
  MOD_RES (23), (24), (25), (26): Xaa is A or G or is absent

SEQ ID NO: 42586 - protein, 36 aa, Artificial Sequence; identical to SEQ ID NO: 30533
  GFR-binding peptide
  MOD_RES (1), (2), (34), (36): Xaa is C or S

SEQ ID NO: 42587 - protein, 34 aa, Artificial Sequence; identical to SEQ ID NO: 28579
  GFR-binding peptide
  MOD_RES (34), (34): Xaa is C or S
  MOD_RES (14), (15), (16), (17), (18): Xaa is A or G
  MOD_RES (19), (20), (21), (22): Xaa is A or G or is absent

SEQ ID NO: 42588 - protein, 41 aa, Artificial Sequence; identical to SEQ ID NO: 28580
  GFR-binding peptide
  MOD_RES (3), (4), (38), (40): Xaa is C or S
  MOD_RES (18), (19), (20), (21), (22): Xaa is A or G
  MOD_RES (23), (24), (25), (26): Xaa is A or G or is absent

SEQ ID NO: 42589 - protein, 36 aa, Artificial Sequence; identical to SEQ ID NO: 27637
  GFR-binding peptide
  MOD_RES (1), (35): Xaa is C or S
  MOD_RES (15), (16), (17), (18), (19): Xaa is A or G
  MOD_RES (20), (21), (22), (23): Xaa is A or G or is absent

SEQ ID NO: 42590 - protein, 37 aa, Artificial Sequence; identical to SEQ ID NO: 27638
  GFR-binding peptide
  MOD_RES (1), (2), (34), (36): Xaa is C or S

SEQ ID NO: 42591 - protein, 38 aa, Artificial Sequence; identical to SEQ ID NO: 29555
  GFR-binding peptide
  MOD_RES (1), (2), (36), (38): Xaa is C or S
  MOD_RES (16), (17), (18), (19), (20): Xaa is A or G
  MOD_RES (21), (22), (23), (24): Xaa is A or G or is absent

SEQ ID NO: 42592 - protein, 36 aa, Artificial Sequence
  GFR-binding peptide
  MOD_RES (2), (3), (34), (36): Xaa is C or S
TXXAPVKTSPISMLYIDNGRVLLYKQYEMIVEEXGX

SEQ ID NO: 42593 - protein, 38 aa, Artificial Sequence; identical to SEQ ID NO: 30538
  GFR-binding peptide
  MOD_RES (5), (6), (38): Xaa is C or S

SEQ ID NO: 42594 - protein, 41 aa, Artificial Sequence; identical to SEQ ID NO: 29557
  GFR-binding peptide
  MOD_RES (7), (41): Xaa is C or S
  MOD_RES (21), (22), (23), (24), (25): Xaa is A or G
  MOD_RES (26), (27), (28), (29): Xaa is A or G or is absent

SEQ ID NO: 42595 - protein, 38 aa, Artificial Sequence; identical to SEQ ID NO: 27642
  GFR-binding peptide
  MOD_RES (3), (4), (38): Xaa is C or S
  MOD_RES (18), (19), (20), (21), (22): Xaa is A or G
  MOD_RES (23), (24), (25), (26): Xaa is A or G or is absent

SEQ ID NO: 42596 - protein, 38 aa, Artificial Sequence
  GFR-binding peptide
  MOD_RES (4), (5): Xaa is C or S
  MOD_RES (19), (20), (21), (22), (23): Xaa is A or G
  MOD_RES (24), (25), (26), (27): Xaa is A or G or is absent
AGPXXTPTKMSPISMLYIXXXXXXXXXYKQYEGMVVDR

SEQ ID NO: 42597 - protein, 40 aa, Artificial Sequence
  GFR-binding peptide
  MOD_RES (5), (6), (37), (39): Xaa is C or S
VPSTXXAPVKTSPISMLYIDNGRVLLYKQYEMIVEEXGXL

SEQ ID NO: 42598 - protein, 36 aa, Artificial Sequence
  GFR-binding peptide
  MOD_RES (5), (6): Xaa is C or S
SAGPXXTPTKMSPISMLYINDKQQIIYKQYEGMVVD

SEQ ID NO: 42599 - protein, 34 aa, Artificial Sequence; identical to SEQ ID NO: 30543
  GFR-binding peptide
  MOD_RES (1), (2), (34): Xaa is C or S

SEQ ID NO: 42600 - protein, 39 aa, Artificial Sequence; identical to SEQ ID NO: 27646
  GFR-binding peptide
  MOD_RES (5), (6), (38): Xaa is C or S

SEQ ID NO: 42601 - protein, 38 aa, Artificial Sequence; identical to SEQ ID NO: 29560
  GFR-binding peptide
  MOD_RES (1), (35), (37): Xaa is C or S
  MOD_RES (15), (16), (17), (18), (19): Xaa is A or G
  MOD_RES (20), (21), (22), (23): Xaa is A or G or is absent

SEQ ID NO: 42602 - protein, 35 aa, Artificial Sequence; identical to SEQ ID NO: 29562
  GFR-binding peptide
  MOD_RES (1), (2), (34): Xaa is C or S

SEQ ID NO: 42603 - protein, 35 aa, Artificial Sequence; identical to SEQ ID NO: 27647
  GFR-binding peptide
  MOD_RES (2), (3): Xaa is C or S
  MOD_RES (17), (18), (19), (20), (21): Xaa is A or G
  MOD_RES (22), (23), (24), (25): Xaa is A or G or is absent

SEQ ID NO: 42604 - protein, 44 aa, Artificial Sequence; identical to SEQ ID NO: 28589
  GFR-binding peptide
  MOD_RES (6), (7), (42), (44): Xaa is C or S
  MOD_RES (21), (22), (23), (24), (25): Xaa is A or G
  MOD_RES (26), (27), (28), (29): Xaa is A or G or is absent

SEQ ID NO: 42605 - protein, 34 aa, Artificial Sequence; identical to SEQ ID NO: 28593
  GFR-binding peptide
  MOD_RES (32), (34): Xaa is C or S

SEQ ID NO: 42606 - protein, 34 aa, Artificial Sequence; identical to SEQ ID NO: 29564
  GFR-binding peptide
  MOD_RES (1), (2), (34): Xaa is C or S

SEQ ID NO: 42607 - protein, 40 aa, Artificial Sequence; identical to SEQ ID NO: 28594
  GFR-binding peptide
  MOD_RES (7), (39): Xaa is C or S

SEQ ID NO: 42608 - protein, 38 aa, Artificial Sequence; identical to SEQ ID NO: 30546
  GFR-binding peptide
  MOD_RES (2), (3), (37): Xaa is C or S
  MOD_RES (17), (18), (19), (20), (21): Xaa is A or G
  MOD_RES (22), (23), (24), (25): Xaa is A or G or is absent

SEQ ID NO: 42609 - protein, 38 aa, Artificial Sequence; identical to SEQ ID NO: 28597
  GFR-binding peptide
  MOD_RES (6), (7): Xaa is C or S

SEQ ID NO: 42610 - protein, 36 aa, Artificial Sequence; identical to SEQ ID NO: 27650
  GFR-binding peptide
  MOD_RES (5), (5): Xaa is C or S

SEQ ID NO: 42611 - protein, 36 aa, Artificial Sequence; identical to SEQ ID NO: 29566
  GFR-binding peptide
  MOD_RES (1), (35): Xaa is C or S
  MOD_RES (15), (16), (17), (18), (19): Xaa is A or G
  MOD_RES (20), (21), (22), (23): Xaa is A or G or is absent

SEQ ID NO: 42612 - protein, 36 aa, Artificial Sequence; identical to SEQ ID NO: 28598
  GFR-binding peptide
  MOD_RES (3), (4): Xaa is C or S

SEQ ID NO: 42613 - protein, 37 aa, Artificial Sequence; identical to SEQ ID NO: 30551
  GFR-binding peptide
  MOD_RES (4), (5): Xaa is C or S
  MOD_RES (19), (20), (21), (22), (23): Xaa is A or G
  MOD_RES (24), (25), (26), (27): Xaa is A or G or is absent

SEQ ID NO: 42614 - protein, 38 aa, Artificial Sequence; identical to SEQ ID NO: 29568
  GFR-binding peptide
  MOD_RES (4), (38): Xaa is C or S
  MOD_RES (18), (19), (20), (21), (22): Xaa is A or G
  MOD_RES (23), (24), (25), (26): Xaa is A or G or is absent

SEQ ID NO: 42615 - protein, 34 aa, Artificial Sequence; identical to SEQ ID NO: 27655
  GFR-binding peptide
  MOD_RES (2), (3): Xaa is C or S

SEQ ID NO: 42616 - protein, 39 aa, Artificial Sequence; identical to SEQ ID NO: 28605
  GFR-binding peptide
  MOD_RES (2), (3), (36), (38): Xaa is C or S

SEQ ID NO: 42617 - protein, 44 aa, Artificial Sequence
  GFR-binding peptide
  MOD_RES (6), (7), (41), (43): Xaa is C or S
  MOD_RES (21), (22), (23), (24), (25): Xaa is A or G
  MOD_RES (26), (27), (28), (29): Xaa is A or G or is absent
GSAGPXXTPTKMSPISMLYIXXXXXXXXXYKQYEGMVVDRXGXS

SEQ ID NO: 42618 - protein, 41 aa, Artificial Sequence; identical to SEQ ID NO: 30554
  GFR-binding peptide
  MOD_RES (4), (5), (40): Xaa is C or S
  MOD_RES (19), (20), (21), (22), (23): Xaa is A or G
  MOD_RES (24), (25), (26), (27): Xaa is A or G or is absent

SEQ ID NO: 42619 - protein, 34 aa, Artificial Sequence; identical to SEQ ID NO: 29571
  GFR-binding peptide
  MOD_RES (1), (1): Xaa is C or S
  MOD_RES (15), (16), (17), (18), (19): Xaa is A or G
  MOD_RES (20), (21), (22), (23): Xaa is A or G or is absent

SEQ ID NO: 42620 - protein, 35 aa, Artificial Sequence; identical to SEQ ID NO: 28607
  GFR-binding peptide
  MOD_RES (1), (2), (34): Xaa is C or S

SEQ ID NO: 42621 - protein, 38 aa, Artificial Sequence
  GFR-binding peptide
  MOD_RES (3), (4), (36), (38): Xaa is C or S
GPXXTPTKMSPISMLYINDKQQIIYKQYEGMVVDRXGX

SEQ ID NO: 42622 - protein, 41 aa, Artificial Sequence; identical to SEQ ID NO: 27658
  GFR-binding peptide
  MOD_RES (5), (6), (40): Xaa is C or S
  MOD_RES (20), (21), (22), (23), (24): Xaa is A or G
  MOD_RES (25), (26), (27), (28): Xaa is A or G or is absent

SEQ ID NO: 42623 - protein, 36 aa, Artificial Sequence
  GFR-binding peptide
  MOD_RES (1), (2), (36): Xaa is C or S
  MOD_RES (16), (17), (18), (19), (20): Xaa is A or G
  MOD_RES (21), (22), (23), (24): Xaa is A or G or is absent
XXTPTKMSPISMLYIXXXXXXXXXYKQYEGMVVDRX

SEQ ID NO: 42624 - protein, 41 aa, Artificial Sequence; identical to SEQ ID NO: 28608
  GFR-binding peptide
  MOD_RES (6), (7), (41): Xaa is C or S
  MOD_RES (21), (22), (23), (24), (25): Xaa is A or G
  MOD_RES (26), (27), (28), (29): Xaa is A or G or is absent

SEQ ID NO: 42625 - protein, 39 aa, Artificial Sequence; identical to SEQ ID NO: 29574
  GFR-binding peptide
  MOD_RES (6), (7): Xaa is C or S
  MOD_RES (21), (22), (23), (24), (25): Xaa is A or G
  MOD_RES (26), (27), (28), (29): Xaa is A or G or is absent

SEQ ID NO: 42626 - protein, 41 aa, Artificial Sequence; identical to SEQ ID NO: 27663
  GFR-binding peptide
  MOD_RES (4), (5), (38), (40): Xaa is C or S

SEQ ID NO: 42627 - protein, 40 aa, Artificial Sequence; identical to SEQ ID NO: 28612
  GFR-binding peptide
  MOD_RES (6), (38), (40): Xaa is C or S

SEQ ID NO: 42628 - protein, 31 aa, Artificial Sequence
  GFR-binding peptide
TPTKMSPISMLYINDKQQIIYKQYEGMVVDR

SEQ ID NO: 42629 - protein, 44 aa, Artificial Sequence
  GFR-binding peptide
  MOD_RES (6), (7), (41), (43): Xaa is C or S
  MOD_RES (21), (22), (23), (24), (25): Xaa is A or G
  MOD_RES (26), (27), (28), (29): Xaa is A or G or is absent
STPPTXXVPTRLSPISILYIXXXXXXXXXYKQYEDMVVESXGXR

SEQ ID NO: 42630 - protein, 39 aa, Artificial Sequence; identical to SEQ ID NO: 29581
  GFR-binding peptide
  MOD_RES (6), (7): Xaa is C or S
  MOD_RES (21), (22), (23), (24), (25): Xaa is A or G
  MOD_RES (26), (27), (28), (29): Xaa is A or G or is absent

SEQ ID NO: 42631 - protein, 35 aa, Artificial Sequence; identical to SEQ ID NO: 28614
  GFR-binding peptide
  MOD_RES (1), (33), (35): Xaa is C or S

SEQ ID NO: 42632 - protein, 43 aa, Artificial Sequence; identical to SEQ ID NO: 30564
  GFR-binding peptide
  MOD_RES (5), (6), (40), (42): Xaa is C or S
  MOD_RES (20), (21), (22), (23), (24): Xaa is A or G
  MOD_RES (25), (26), (27), (28): Xaa is A or G or is absent

SEQ ID NO: 42633 - protein, 34 aa, Artificial Sequence; identical to SEQ ID NO: 27668
  GFR-binding peptide
  MOD_RES (34), (34): Xaa is C or S
  MOD_RES (14), (15), (16), (17), (18): Xaa is A or G
  MOD_RES (19), (20), (21), (22): Xaa is A or G or is absent

SEQ ID NO: 42634 - protein, 42 aa, Artificial Sequence; identical to SEQ ID NO: 27669
  GFR-binding peptide
  MOD_RES (5), (6), (39), (41): Xaa is C or S

SEQ ID NO: 42635 - protein, 42 aa, Artificial Sequence
  GFR-binding peptide
  MOD_RES (6), (7), (41): Xaa is C or S
  MOD_RES (21), (22), (23), (24), (25): Xaa is A or G
  MOD_RES (26), (27), (28), (29): Xaa is A or G or is absent
HVPKPXXAPTKLSPISVLYIXXXXXXXXXYKQYENMVVRSXG

SEQ ID NO: 42636 - protein, 34 aa, Artificial Sequence; identical to SEQ ID NO: 29590
  GFR-binding peptide
  MOD_RES (2), (3): Xaa is C or S

SEQ ID NO: 42637 - protein, 36 aa, Artificial Sequence
  GFR-binding peptide
  MOD_RES (1), (2), (33), (35): Xaa is C or S
XXAPVKTSPISMLYIDNGRVLLYKQYEMIVEEXGXL

SEQ ID NO: 42638 - protein, 41 aa, Artificial Sequence; identical to SEQ ID NO: 30571
  GFR-binding peptide
  MOD_RES (5), (6), (38), (40): Xaa is C or S

SEQ ID NO: 42639 - protein, 37 aa, Artificial Sequence; identical to SEQ ID NO: 29594
  GFR-binding peptide
  MOD_RES (1), (2), (34), (36): Xaa is C or S

SEQ ID NO: 42640 - protein, 40 aa, Artificial Sequence
  GFR-binding peptide
  MOD_RES (4), (5), (37), (39): Xaa is C or S
AGPXXTPTKMSPISMLYINDKQQIIYKQYEGMVVDRXGXS

SEQ ID NO: 42641 - protein, 36 aa, Artificial Sequence
  GFR-binding peptide
  MOD_RES (2), (3), (35): Xaa is C or S
PXXTPTKMSPISMLYINDKQQIIYKQYEGMVVDRXG

SEQ ID NO: 42642 - protein, 39 aa, Artificial Sequence; identical to SEQ ID NO: 27675
  GFR-binding peptide
  MOD_RES (5), (6): Xaa is C or S
  MOD_RES (20), (21), (22), (23), (24): Xaa is A or G
  MOD_RES (25), (26), (27), (28): Xaa is A or G or is absent

SEQ ID NO: 42643 - protein, 36 aa, Artificial Sequence; identical to SEQ ID NO: 29598
  GFR-binding peptide
  MOD_RES (2), (3): Xaa is C or S
  MOD_RES (17), (18), (19), (20), (21): Xaa is A or G
  MOD_RES (22), (23), (24), (25): Xaa is A or G or is absent

SEQ ID NO: 42644 - protein, 40 aa, Artificial Sequence; identical to SEQ ID NO: 30577
  GFR-binding peptide
  MOD_RES (4), (5), (37), (39): Xaa is C or S

SEQ ID NO: 42645 - protein, 40 aa, Artificial Sequence; identical to SEQ ID NO: 27676
  GFR-binding peptide
  MOD_RES (5), (6), (38), (40): Xaa is C or S

SEQ ID NO: 42646 - protein, 33 aa, Artificial Sequence; identical to SEQ ID NO: 30580
  GFR-binding peptide
  MOD_RES (14), (15), (16), (17), (18): Xaa is A or G
  MOD_RES (19), (20), (21), (22): Xaa is A or G or is absent

SEQ ID NO: 42647 - protein, 36 aa, Artificial Sequence; identical to SEQ ID NO: 29599
  GFR-binding peptide
  MOD_RES (1), (2), (36): Xaa is C or S
  MOD_RES (16), (17), (18), (19), (20): Xaa is A or G
  MOD_RES (21), (22), (23), (24): Xaa is A or G or is absent

SEQ ID NO: 42648 - protein, 37 aa, Artificial Sequence; identical to SEQ ID NO: 29601
  GFR-binding peptide
  MOD_RES (4), (5): Xaa is C or S

SEQ ID NO: 42649 - protein, 37 aa, Artificial Sequence; identical to SEQ ID NO: 27681
  GFR-binding peptide
  MOD_RES (2), (34), (36): Xaa is C or S

SEQ ID NO: 42650 - protein, 42 aa, Artificial Sequence; identical to SEQ ID NO: 29602
  GFR-binding peptide
  MOD_RES (5), (6), (40), (42): Xaa is C or S
  MOD_RES (20), (21), (22), (23), (24): Xaa is A or G
  MOD_RES (25), (26), (27), (28): Xaa is A or G or is absent

SEQ ID NO: 42651 - protein, 37 aa, Artificial Sequence; identical to SEQ ID NO: 27682
  GFR-binding peptide
  MOD_RES (1), (35), (37): Xaa is C or S
  MOD_RES (15), (16), (17), (18), (19): Xaa is A or G
  MOD_RES (20), (21), (22), (23): Xaa is A or G or is absent

SEQ ID NO: 42652 - protein, 39 aa, Artificial Sequence
  GFR-binding peptide
  MOD_RES (2), (3), (36), (38): Xaa is C or S
  MOD_RES (17), (18), (19), (20), (21): Xaa is A or G
  MOD_RES (22), (23), (24), (25): Xaa is A or G or is absent
TXXAPVKTSPISMLYIXXXXXXXXXYKQYEMIVEEXGXL

SEQ ID NO: 42653 - protein, 40 aa, Artificial Sequence; identical to SEQ ID NO: 29605
  GFR-binding peptide
  MOD_RES (5), (6), (40): Xaa is C or S
  MOD_RES (20), (21), (22), (23), (24): Xaa is A or G
  MOD_RES (25), (26), (27), (28): Xaa is A or G or is absent

SEQ ID NO: 42654 - protein, 37 aa, Artificial Sequence; identical to SEQ ID NO: 27688
  GFR-binding peptide
  MOD_RES (5), (6): Xaa is C or S

SEQ ID NO: 42655 - protein, 36 aa, Artificial Sequence
  GFR-binding peptide
  MOD_RES (2), (3), (36): Xaa is C or S
  MOD_RES (17), (18), (19), (20), (21): Xaa is A or G
  MOD_RES (22), (23), (24), (25): Xaa is A or G or is absent
TXXAPVKTSPISMLYIXXXXXXXXXYKQYEMIVEEX

SEQ ID NO: 42656 - protein, 34 aa, Artificial Sequence
  GFR-binding peptide
  MOD_RES (2), (3), (34): Xaa is C or S
TXXAPVKTSPISMLYIDNGRVLLYKQYEMIVEEX

SEQ ID NO: 42657 - protein, 40 aa, Artificial Sequence; identical to SEQ ID NO: 28635
  GFR-binding peptide
  MOD_RES (5), (6), (40): Xaa is C or S
  MOD_RES (20), (21), (22), (23), (24): Xaa is A or G
  MOD_RES (25), (26), (27), (28): Xaa is A or G or is absent

SEQ ID NO: 42658 - protein, 34 aa, Artificial Sequence; identical to SEQ ID NO: 29609
  GFR-binding peptide
  MOD_RES (1), (2): Xaa is C or S
  MOD_RES (16), (17), (18), (19), (20): Xaa is A or G
  MOD_RES (21), (22), (23), (24): Xaa is A or G or is absent

SEQ ID NO: 42659 - protein, 40 aa, Artificial Sequence; identical to SEQ ID NO: 28640
  GFR-binding peptide
  MOD_RES (4), (5), (39): Xaa is C or S
  MOD_RES (19), (20), (21), (22), (23): Xaa is A or G
  MOD_RES (24), (25), (26), (27): Xaa is A or G or is absent

SEQ ID NO: 42660 - protein, 37 aa, Artificial Sequence; identical to SEQ ID NO: 28641
  GFR-binding peptide
  MOD_RES (4), (5), (37): Xaa is C or S

SEQ ID NO: 42661 - protein, 33 aa, Artificial Sequence; identical to SEQ ID NO: 30590
  GFR-binding peptide
  MOD_RES (33), (33): Xaa is C or S

SEQ ID NO: 42662 - protein, 39 aa, Artificial Sequence; identical to SEQ ID NO: 27699
  GFR-binding peptide
  MOD_RES (7), (7): Xaa is C or S
  MOD_RES (21), (22), (23), (24), (25): Xaa is A or G
  MOD_RES (26), (27), (28), (29): Xaa is A or G or is absent

SEQ ID NO: 42663 - protein, 36 aa, Artificial Sequence; identical to SEQ ID NO: 30592
  GFR-binding peptide
  MOD_RES (1), (36): Xaa is C or S
  MOD_RES (15), (16), (17), (18), (19): Xaa is A or G
  MOD_RES (20), (21), (22), (23): Xaa is A or G or is absent

SEQ ID NO: 42664 - protein, 38 aa, Artificial Sequence; identical to SEQ ID NO: 28645
  GFR-binding peptide
  MOD_RES (5), (6): Xaa is C or S

SEQ ID NO: 42665 - protein, 42 aa, Artificial Sequence
  GFR-binding peptide
  MOD_RES (5), (6), (39), (41): Xaa is C or S
  MOD_RES (20), (21), (22), (23), (24): Xaa is A or G
  MOD_RES (25), (26), (27), (28): Xaa is A or G or is absent
VPSTXXAPVKTSPISMLYIXXXXXXXXXYKQYEMIVEEXGXL

SEQ ID NO: 42666 - protein, 43 aa, Artificial Sequence; identical to SEQ ID NO: 29622
  GFR-binding peptide
  MOD_RES (6), (7), (40), (42): Xaa is C or S

SEQ ID NO: 42667 - protein, 38 aa, Artificial Sequence; identical to SEQ ID NO: 29623
  GFR-binding peptide
  MOD_RES (35), (37): Xaa is C or S
  MOD_RES (14), (15), (16), (17), (18): Xaa is A or G
  MOD_RES (19), (20), (21), (22): Xaa is A or G or is absent

SEQ ID NO: 42668 - protein, 36 aa, Artificial Sequence; identical to SEQ ID NO: 27707
  GFR-binding peptide
  MOD_RES (1), (2), (36): Xaa is C or S
  MOD_RES (16), (17), (18), (19), (20): Xaa is A or G
  MOD_RES (21), (22), (23), (24): Xaa is A or G or is absent

SEQ ID NO: 42669 - protein, 35 aa, Artificial Sequence; identical to SEQ ID NO: 30603
  GFR-binding peptide
  MOD_RES (3), (4): Xaa is C or S

SEQ ID NO: 42670 - protein, 39 aa, Artificial Sequence; identical to SEQ ID NO: 29624
  GFR-binding peptide
  MOD_RES (2), (3), (37), (39): Xaa is C or S
  MOD_RES (17), (18), (19), (20), (21): Xaa is A or G
  MOD_RES (22), (23), (24), (25): Xaa is A or G or is absent

SEQ ID NO: 42671 - protein, 35 aa, Artificial Sequence; identical to SEQ ID NO: 30604
  GFR-binding peptide
  MOD_RES (2), (3): Xaa is C or S

SEQ ID NO: 42672 - protein, 37 aa, Artificial Sequence; identical to SEQ ID NO: 28657
  GFR-binding peptide
  MOD_RES (1), (34), (36): Xaa is C or S

SEQ ID NO: 42673 - protein, 42 aa, Artificial Sequence; identical to SEQ ID NO: 27709
  GFR-binding peptide
  MOD_RES (4), (5), (39), (41): Xaa is C or S
  MOD_RES (19), (20), (21), (22), (23): Xaa is A or G
  MOD_RES (24), (25), (26), (27): Xaa is A or G or is absent

SEQ ID NO: 42674 - protein, 43 aa, Artificial Sequence; identical to SEQ ID NO: 29627
  GFR-binding peptide
  MOD_RES (6), (40), (42): Xaa is C or S
  MOD_RES (20), (21), (22), (23), (24): Xaa is A or G
  MOD_RES (25), (26), (27), (28): Xaa is A or G or is absent

SEQ ID NO: 42675 - protein, 35 aa, Artificial Sequence
  GFR-binding peptide
  MOD_RES (1), (2), (33), (35): Xaa is C or S
XXAPVKTSPISMLYIDNGRVLLYKQYEMIVEEXGX

SEQ ID NO: 42676 - protein, 38 aa, Artificial Sequence; identical to SEQ ID NO: 28660
  GFR-binding peptide
  MOD_RES (6), (7): Xaa is C or S

SEQ ID NO: 42677 - protein, 41 aa, Artificial Sequence; identical to SEQ ID NO: 28661
  GFR-binding peptide
  MOD_RES (5), (6), (40): Xaa is C or S
  MOD_RES (20), (21), (22), (23), (24): Xaa is A or G
  MOD_RES (25), (26), (27), (28): Xaa is A or G or is absent

SEQ ID NO: 42678 - protein, 41 aa, Artificial Sequence; identical to SEQ ID NO: 29630
  GFR-binding peptide
  MOD_RES (5), (6), (40): Xaa is C or S
  MOD_RES (20), (21), (22), (23), (24): Xaa is A or G
  MOD_RES (25), (26), (27), (28): Xaa is A or G or is absent

SEQ ID NO: 42679 - protein, 32 aa, Artificial Sequence; identical to SEQ ID NO: 28663
  GFR-binding peptide
  MOD_RES (1), (2): Xaa is C or S

SEQ ID NO: 42680 - protein, 39 aa, Artificial Sequence; identical to SEQ ID NO: 29631
  GFR-binding peptide
  MOD_RES (5), (6), (38): Xaa is C or S

SEQ ID NO: 42681 - protein, 32 aa, Artificial Sequence; identical to SEQ ID NO: 28668
  GFR-binding peptide
  MOD_RES (32), (32): Xaa is C or S

SEQ ID NO: 42682 - protein, 39 aa, Artificial Sequence; identical to SEQ ID NO: 30612
  GFR-binding peptide
  MOD_RES (4), (5), (39): Xaa is C or S
  MOD_RES (19), (20), (21), (22), (23): Xaa is A or G
  MOD_RES (24), (25), (26), (27): Xaa is A or G or is absent

SEQ ID NO: 42683 - protein, 42 aa, Artificial Sequence; identical to SEQ ID NO: 30614
  GFR-binding peptide
  MOD_RES (7), (39), (41): Xaa is C or S

SEQ ID NO: 42684 - protein, 40 aa, Artificial Sequence; identical to SEQ ID NO: 30615
  GFR-binding peptide
  MOD_RES (3), (4), (38), (40): Xaa is C or S
  MOD_RES (18), (19), (20), (21), (22): Xaa is A or G
  MOD_RES (23), (24), (25), (26): Xaa is A or G or is absent

SEQ ID NO: 42685 - protein, 37 aa, Artificial Sequence
  GFR-binding peptide
  MOD_RES (2), (3), (34), (36): Xaa is C or S
TXXAPVKTSPISMLYIDNGRVLLYKQYEMIVEEXGXL

SEQ ID NO: 42686 - protein, 34 aa, Artificial Sequence; identical to SEQ ID NO: 28672
  GFR-binding peptide
  MOD_RES (1), (2): Xaa is C or S
  MOD_RES (16), (17), (18), (19), (20): Xaa is A or G
  MOD_RES (21), (22), (23), (24): Xaa is A or G or is absent

SEQ ID NO: 42687 - protein, 37 aa, Artificial Sequence; identical to SEQ ID NO: 27720
  GFR-binding peptide
  MOD_RES (2), (3), (37): Xaa is C or S
  MOD_RES (17), (18), (19), (20), (21): Xaa is A or G
  MOD_RES (22), (23), (24), (25): Xaa is A or G or is absent

SEQ ID NO: 42688 - protein, 38 aa, Artificial Sequence
  GFR-binding peptide
  MOD_RES (1), (35), (37): Xaa is C or S
  MOD_RES (15), (16), (17), (18), (19): Xaa is A or G
  MOD_RES (20), (21), (22), (23): Xaa is A or G or is absent
XTPTKMSPISMLYIXXXXXXXXXYKQYEGMVVDRXGXS

SEQ ID NO: 42689 - protein, 41 aa, Artificial Sequence
  GFR-binding peptide
  MOD_RES (6), (7), (41): Xaa is C or S
  MOD_RES (21), (22), (23), (24), (25): Xaa is A or G
  MOD_RES (26), (27), (28), (29): Xaa is A or G or is absent
GSAGPXXTPTKMSPISMLYIXXXXXXXXXYKQYEGMVVDRX

SEQ ID NO: 42690 - protein, 37 aa, Artificial Sequence; identical to SEQ ID NO: 29643
  GFR-binding peptide
  MOD_RES (3), (4): Xaa is C or S
  MOD_RES (18), (19), (20), (21), (22): Xaa is A or G
  MOD_RES (23), (24), (25), (26): Xaa is A or G or is absent

SEQ ID NO: 42691 - protein, 38 aa, Artificial Sequence; identical to SEQ ID NO: 30623
  GFR-binding peptide
  MOD_RES (6), (38): Xaa is C or S

SEQ ID NO: 42692 - protein, 37 aa, Artificial Sequence; identical to SEQ ID NO: 29647
  GFR-binding peptide
  MOD_RES (2), (3), (37): Xaa is C or S
  MOD_RES (17), (18), (19), (20), (21): Xaa is A or G
  MOD_RES (22), (23), (24), (25): Xaa is A or G or is absent

SEQ ID NO: 42693 - protein, 30 aa, Artificial Sequence; identical to SEQ ID NO: 30624
  GFR-binding peptide

SEQ ID NO: 42694 - protein, 41 aa, Artificial Sequence; identical to SEQ ID NO: 28680
  GFR-binding peptide
  MOD_RES (5), (6), (38), (40): Xaa is C or S

SEQ ID NO: 42695 - protein, 38 aa, Artificial Sequence; identical to SEQ ID NO: 28681
  GFR-binding peptide
  MOD_RES (6), (6): Xaa is C or S
  MOD_RES (20), (21), (22), (23), (24): Xaa is A or G
  MOD_RES (25), (26), (27), (28): Xaa is A or G or is absent

SEQ ID NO: 42696 - protein, 31 aa, Artificial Sequence; identical to SEQ ID NO: 28683
  GFR-binding peptide
  MOD_RES (1), (1): Xaa is C or S

SEQ ID NO: 42697 - protein, 35 aa, Artificial Sequence; identical to SEQ ID NO: 29654
  GFR-binding peptide
  MOD_RES (34), (34): Xaa is C or S
  MOD_RES (14), (15), (16), (17), (18): Xaa is A or G
  MOD_RES (19), (20), (21), (22): Xaa is A or G or is absent

SEQ ID NO: 42698 - protein, 32 aa, Artificial Sequence; identical to SEQ ID NO: 28686
  GFR-binding peptide
  MOD_RES (1), (2): Xaa is C or S

SEQ ID NO: 42699 - protein, 34 aa, Artificial Sequence; identical to SEQ ID NO: 30636
  GFR-binding peptide
  MOD_RES (32), (34): Xaa is C or S

SEQ ID NO: 42700 - protein, 31 aa, Artificial Sequence; identical to SEQ ID NO: 29658
  GFR-binding peptide
  MOD_RES (1), (1): Xaa is C or S

SEQ ID NO: 42701 - protein, 34 aa, Artificial Sequence; identical to SEQ ID NO: 28691
  GFR-binding peptide
  MOD_RES (1), (2): Xaa is C or S

SEQ ID NO: 42702 - protein, 35 aa, Artificial Sequence; identical to SEQ ID NO: 30637
  GFR-binding peptide
  MOD_RES (1), (35): Xaa is C or S
  MOD_RES (15), (16), (17), (18), (19): Xaa is A or G
  MOD_RES (20), (21), (22), (23): Xaa is A or G or is absent

SEQ ID NO: 42703 - protein, 33 aa, Artificial Sequence; identical to SEQ ID NO: 30643
  GFR-binding peptide
  MOD_RES (32), (32): Xaa is C or S

SEQ ID NO: 42704 - protein, 39 aa, Artificial Sequence; identical to SEQ ID NO: 28696
  GFR-binding peptide
  MOD_RES (1), (2), (36), (38): Xaa is C or S
  MOD_RES (16), (17), (18), (19), (20): Xaa is A or G
  MOD_RES (21), (22), (23), (24): Xaa is A or G or is absent

SEQ ID NO: 42705 - protein, 34 aa, Artificial Sequence; identical to SEQ ID NO: 30647
  GFR-binding peptide
  MOD_RES (3), (4): Xaa is C or S

SEQ ID NO: 42706 - protein, 36 aa, Artificial Sequence; identical to SEQ ID NO: 30649
  GFR-binding peptide
  MOD_RES (3), (4), (36): Xaa is C or S

SEQ ID NO: 42707 - protein, 37 aa, Artificial Sequence; identical to SEQ ID NO: 28705
  GFR-binding peptide
  MOD_RES (1), (2), (36): Xaa is C or S
  MOD_RES (16), (17), (18), (19), (20): Xaa is A or G
  MOD_RES (21), (22), (23), (24): Xaa is A or G or is absent

SEQ ID NO: 42708 - protein, 33 aa, Artificial Sequence
  GFR-binding peptide
  MOD_RES (2), (3): Xaa is C or S
PXXTPTKMSPISMLYINDKQQIIYKQYEGMVVD

SEQ ID NO: 42709 - protein, 34 aa, Artificial Sequence; identical to SEQ ID NO: 27750
  GFR-binding peptide
  MOD_RES (2), (3): Xaa is C or S

SEQ ID NO: 42710 - protein, 33 aa, Artificial Sequence; identical to SEQ ID NO: 28707
  GFR-binding peptide
  MOD_RES (2), (3): Xaa is C or S

SEQ ID NO: 42711 - protein, 36 aa, Artificial Sequence; identical to SEQ ID NO: 28708
  GFR-binding peptide
  MOD_RES (1), (2), (36): Xaa is C or S
  MOD_RES (16), (17), (18), (19), (20): Xaa is A or G
  MOD_RES (21), (22), (23), (24): Xaa is A or G or is absent

SEQ ID NO: 42712 - protein, 39 aa, Artificial Sequence; identical to SEQ ID NO: 29669
  GFR-binding peptide
  MOD_RES (4), (5), (39): Xaa is C or S
  MOD_RES (19), (20), (21), (22), (23): Xaa is A or G
  MOD_RES (24), (25), (26), (27): Xaa is A or G or is absent

SEQ ID NO: 42713 - protein, 36 aa, Artificial Sequence; identical to SEQ ID NO: 30659
  GFR-binding peptide
  MOD_RES (34), (36): Xaa is C or S
  MOD_RES (14), (15), (16), (17), (18): Xaa is A or G
  MOD_RES (19), (20), (21), (22): Xaa is A or G or is absent

SEQ ID NO: 42714 - protein, 32 aa, Artificial Sequence
  GFR-binding peptide
  MOD_RES (14), (15), (16), (17), (18): Xaa is A or G
  MOD_RES (19), (20), (21), (22): Xaa is A or G or is absent
TPTKMSPISMLYIXXXXXXXXXYKQYEGMVVD

SEQ ID NO: 42715 - protein, 31 aa, Artificial Sequence
  GFR-binding peptide
  MOD_RES (1), (1): Xaa is C or S
XTPTKMSPISMLYINDKQQIIYKQYEGMVVD

SEQ ID NO: 42716 - protein, 40 aa, Artificial Sequence
  GFR-binding peptide
  MOD_RES (4), (5), (39): Xaa is C or S
  MOD_RES (19), (20), (21), (22), (23): Xaa is A or G
  MOD_RES (24), (25), (26), (27): Xaa is A or G or is absent
AGPXXTPTKMSPISMLYIXXXXXXXXXYKQYEGMVVDRXG

SEQ ID NO: 42717 - protein, 36 aa, Artificial Sequence; identical to SEQ ID NO: 29675
  GFR-binding peptide
  MOD_RES (1), (33), (35): Xaa is C or S

SEQ ID NO: 42718 - protein, 40 aa, Artificial Sequence; identical to SEQ ID NO: 30664
  GFR-binding peptide
  MOD_RES (2), (3), (37), (39): Xaa is C or S
  MOD_RES (17), (18), (19), (20), (21): Xaa is A or G
  MOD_RES (22), (23), (24), (25): Xaa is A or G or is absent

SEQ ID NO: 42719 - protein, 34 aa, Artificial Sequence
  GFR-binding peptide
  MOD_RES (1), (33): Xaa is C or S
XTPTKMSPISMLYINDKQQIIYKQYEGMVVDRXG

SEQ ID NO: 42720 - protein, 36 aa, Artificial Sequence; identical to SEQ ID NO: 30665
  GFR-binding peptide
  MOD_RES (34), (36): Xaa is C or S
  MOD_RES (14), (15), (16), (17), (18): Xaa is A or G
  MOD_RES (19), (20), (21), (22): Xaa is A or G or is absent

SEQ ID NO: 42721 - protein, 33 aa, Artificial Sequence
  GFR-binding peptide
  MOD_RES (1), (2), (33): Xaa is C or S
XXAPVKTSPISMLYIDNGRVLLYKQYEMIVEEX

SEQ ID NO: 42722 - protein, 38 aa, Artificial Sequence; identical to SEQ ID NO: 28722
  GFR-binding peptide
  MOD_RES (1), (36), (38): Xaa is C or S
  MOD_RES (15), (16), (17), (18), (19): Xaa is A or G
  MOD_RES (20), (21), (22), (23): Xaa is A or G or is absent

SEQ ID NO: 42723 - protein, 34 aa, Artificial Sequence
  GFR-binding peptide
  MOD_RES (3), (4): Xaa is C or S
GPXXTPTKMSPISMLYINDKQQIIYKQYEGMVVD

SEQ ID NO: 42724 - protein, 33 aa, Artificial Sequence; identical to SEQ ID NO: 28723
  GFR-binding peptide
  MOD_RES (32), (32): Xaa is C or S

SEQ ID NO: 42725 - protein, 41 aa, Artificial Sequence; identical to SEQ ID NO: 30672
  GFR-binding peptide
  MOD_RES (6), (7), (39), (41): Xaa is C or S

SEQ ID NO: 42726 - protein, 40 aa, Artificial Sequence; identical to SEQ ID NO: 28725
  GFR-binding peptide
  MOD_RES (2), (3), (37), (39): Xaa is C or S
  MOD_RES (17), (18), (19), (20), (21): Xaa is A or G
  MOD_RES (22), (23), (24), (25): Xaa is A or G or is absent

SEQ ID NO: 42727 - protein, 31 aa, Artificial Sequence; identical to SEQ ID NO: 29688
  GFR-binding peptide
  MOD_RES (1), (1): Xaa is C or S

SEQ ID NO: 42728 - protein, 33 aa, Artificial Sequence; identical to SEQ ID NO: 29692
  GFR-binding peptide
  MOD_RES (1), (33): Xaa is C or S

SEQ ID NO: 42729 - protein, 42 aa, Artificial Sequence
  GFR-binding peptide
  MOD_RES (6), (7), (39), (41): Xaa is C or S
GSAGPXXTPTKMSPISMLYINDKQQIIYKQYEGMVVDRXGXS

SEQ ID NO: 42730 - protein, 44 aa, Artificial Sequence
  GFR-binding peptide
  MOD_RES (6), (7), (41), (43): Xaa is C or S
  MOD_RES (21), (22), (23), (24), (25): Xaa is A or G
  MOD_RES (26), (27), (28), (29): Xaa is A or G or is absent
HVPKPXXAPTKLSPISVLYIXXXXXXXXXYKQYENMVVRSXGXH

SEQ ID NO: 42731 - protein, 41 aa, Artificial Sequence; identical to SEQ ID NO: 29697
  GFR-binding peptide
  MOD_RES (5), (6), (39), (41): Xaa is C or S

SEQ ID NO: 42732 - protein, 42 aa, Artificial Sequence; identical to SEQ ID NO: 30692
  GFR-binding peptide
  MOD_RES (5), (6), (41): Xaa is C or S
  MOD_RES (20), (21), (22), (23), (24): Xaa is A or G
  MOD_RES (25), (26), (27), (28): Xaa is A or G or is absent

SEQ ID NO: 42733 - protein, 37 aa, Artificial Sequence
  GFR-binding peptide
  MOD_RES (2), (3), (35), (37): Xaa is C or S
PXXTPTKMSPISMLYINDKQQIIYKQYEGMVVDRXGX

SEQ ID NO: 42734 - protein, 37 aa, Artificial Sequence; identical to SEQ ID NO: 28740
  GFR-binding peptide
  MOD_RES (4), (5): Xaa is C or S
  MOD_RES (19), (20), (21), (22), (23): Xaa is A or G
  MOD_RES (24), (25), (26), (27): Xaa is A or G or is absent

SEQ ID NO: 42735 - protein, 38 aa, Artificial Sequence; identical to SEQ ID NO: 28741
  GFR-binding peptide
  MOD_RES (2), (3), (35), (37): Xaa is C or S

SEQ ID NO: 42736 - protein, 41 aa, Artificial Sequence; identical to SEQ ID NO: 29705
  GFR-binding peptide
  MOD_RES (3), (4), (38), (40): Xaa is C or S
  MOD_RES (18), (19), (20), (21), (22): Xaa is A or G
  MOD_RES (23), (24), (25), (26): Xaa is A or G or is absent

SEQ ID NO: 42737 - protein, 36 aa, Artificial Sequence; identical to SEQ ID NO: 28746
  GFR-binding peptide
  MOD_RES (5), (6): Xaa is C or S

SEQ ID NO: 42738 - protein, 34 aa, Artificial Sequence; identical to SEQ ID NO: 27772
  GFR-binding peptide
  MOD_RES (3), (4): Xaa is C or S

SEQ ID NO: 42739 - protein, 36 aa, Artificial Sequence
  GFR-binding peptide
  MOD_RES (2), (3): Xaa is C or S
  MOD_RES (17), (18), (19), (20), (21): Xaa is A or G
  MOD_RES (22), (23), (24), (25): Xaa is A or G or is absent
PXXTPTKMSPISMLYIXXXXXXXXXYKQYEGMVVDR

SEQ ID NO: 42740 - protein, 38 aa, Artificial Sequence; identical to SEQ ID NO: 30701
  GFR-binding peptide
  MOD_RES (6), (7): Xaa is C or S

SEQ ID NO: 42741 - protein, 36 aa, Artificial Sequence; identical to SEQ ID NO: 29710
  GFR-binding peptide
  MOD_RES (3), (4), (36): Xaa is C or S

SEQ ID NO: 42742 - protein, 38 aa, Artificial Sequence; identical to SEQ ID NO: 29712
  GFR-binding peptide
  MOD_RES (4), (5), (37): Xaa is C or S

SEQ ID NO: 42743 - protein, 37 aa, Artificial Sequence; identical to SEQ ID NO: 29713
  GFR-binding peptide
  MOD_RES (6), (6): Xaa is C or S

SEQ ID NO: 42744 - protein, 39 aa, Artificial Sequence
  GFR-binding peptide
  MOD_RES (3), (4), (36), (38): Xaa is C or S
GPXXTPTKMSPISMLYINDKQQIIYKQYEGMVVDRXGXS

SEQ ID NO: 42745 - protein, 39 aa, Artificial Sequence
  GFR-binding peptide
  MOD_RES (6), (7): Xaa is C or S
  MOD_RES (21), (22), (23), (24), (25): Xaa is A or G
  MOD_RES (26), (27), (28), (29): Xaa is A or G or is absent
RVPSTXXAPVKTSPISMLYIXXXXXXXXXYKQYEMIVEE

SEQ ID NO: 42746 - protein, 39 aa, Artificial Sequence; identical to SEQ ID NO: 30707
  GFR-binding peptide
  MOD_RES (2), (3), (37), (39): Xaa is C or S
  MOD_RES (17), (18), (19), (20), (21): Xaa is A or G
  MOD_RES (22), (23), (24), (25): Xaa is A or G or is absent

SEQ ID NO: 42747 - protein, 43 aa, Artificial Sequence; identical to SEQ ID NO: 27784
  GFR-binding peptide
  MOD_RES (5), (6), (40), (42): Xaa is C or S
  MOD_RES (20), (21), (22), (23), (24): Xaa is A or G
  MOD_RES (25), (26), (27), (28): Xaa is A or G or is absent

SEQ ID NO: 42748 - protein, 42 aa, Artificial Sequence; identical to SEQ ID NO: 27785
  GFR-binding peptide
  MOD_RES (4), (5), (39), (41): Xaa is C or S
  MOD_RES (19), (20), (21), (22), (23): Xaa is A or G
  MOD_RES (24), (25), (26), (27): Xaa is A or G or is absent

SEQ ID NO: 42749 - protein, 31 aa, Artificial Sequence; identical to SEQ ID NO: 30710
  GFR-binding peptide

SEQ ID NO: 42750 - protein, 36 aa, Artificial Sequence; identical to SEQ ID NO: 29716
  GFR-binding peptide
  MOD_RES (1), (2), (35): Xaa is C or S

SEQ ID NO: 42751 - protein, 37 aa, Artificial Sequence; identical to SEQ ID NO: 27789
  GFR-binding peptide
  MOD_RES (3), (4): Xaa is C or S
  MOD_RES (18), (19), (20), (21), (22): Xaa is A or G
  MOD_RES (23), (24), (25), (26): Xaa is A or G or is absent

SEQ ID NO: 42752 - protein, 39 aa, Artificial Sequence
  GFR-binding peptide
  MOD_RES (6), (7), (39): Xaa is C or S
HVPKPXXAPTKLSPISVLYIDDSSNVIYKQYENMVVRSX

SEQ ID NO: 42753 - protein, 32 aa, Artificial Sequence; identical to SEQ ID NO: 29721
  GFR-binding peptide
  MOD_RES (32), (32): Xaa is C or S

SEQ ID NO: 42754 - protein, 43 aa, Artificial Sequence; identical to SEQ ID NO: 27794
  GFR-binding peptide
  MOD_RES (5), (6), (40), (42): Xaa is C or S
  MOD_RES (20), (21), (22), (23), (24): Xaa is A or G
  MOD_RES (25), (26), (27), (28): Xaa is A or G or is absent

SEQ ID NO: 42755 - protein, 37 aa, Artificial Sequence; identical to SEQ ID NO: 28770
  GFR-binding peptide
  MOD_RES (2), (3), (35), (37): Xaa is C or S

SEQ ID NO: 42756 - protein, 40 aa, Artificial Sequence; identical to SEQ ID NO: 29724
  GFR-binding peptide
  MOD_RES (2), (3), (37), (39): Xaa is C or S
  MOD_RES (17), (18), (19), (20), (21): Xaa is A or G
  MOD_RES (22), (23), (24), (25): Xaa is A or G or is absent

SEQ ID NO: 42757 - protein, 41 aa, Artificial Sequence; identical to SEQ ID NO: 30718
  GFR-binding peptide
  MOD_RES (4), (5), (39), (41): Xaa is C or S
  MOD_RES (19), (20), (21), (22), (23): Xaa is A or G
  MOD_RES (24), (25), (26), (27): Xaa is A or G or is absent

SEQ ID NO: 42758 - protein, 34 aa, Artificial Sequence; identical to SEQ ID NO: 30722
  GFR-binding peptide
  MOD_RES (1), (2), (34): Xaa is C or S

SEQ ID NO: 42759 - protein, 40 aa, Artificial Sequence
  GFR-binding peptide
  MOD_RES (5), (6), (39): Xaa is C or S
  MOD_RES (20), (21), (22), (23), (24): Xaa is A or G
  MOD_RES (25), (26), (27), (28): Xaa is A or G or is absent
VPSTXXAPVKTSPISMLYIXXXXXXXXXYKQYEMIVEEXG

SEQ ID NO: 42760 - protein, 34 aa, Artificial Sequence
  GFR-binding peptide
  MOD_RES (1), (1): Xaa is C or S
  MOD_RES (15), (16), (17), (18), (19): Xaa is A or G
  MOD_RES (20), (21), (22), (23): Xaa is A or G or is absent
XTPTKMSPISMLYIXXXXXXXXXYKQYEGMVVDR

SEQ ID NO: 42761 - protein, 39 aa, Artificial Sequence; identical to SEQ ID NO: 28779
  GFR-binding peptide
  MOD_RES (3), (37), (39): Xaa is C or S
  MOD_RES (17), (18), (19), (20), (21): Xaa is A or G
  MOD_RES (22), (23), (24), (25): Xaa is A or G or is absent

SEQ ID NO: 42762 - protein, 38 aa, Artificial Sequence; identical to SEQ ID NO: 27805
  GFR-binding peptide
  MOD_RES (5), (6): Xaa is C or S
  MOD_RES (20), (21), (22), (23), (24): Xaa is A or G
  MOD_RES (25), (26), (27), (28): Xaa is A or G or is absent

SEQ ID NO: 42763 - protein, 33 aa, Artificial Sequence
  GFR-binding peptide
  MOD_RES (32), (32): Xaa is C or S
TPTKMSPISMLYINDKQQIIYKQYEGMVVDRXG

SEQ ID NO: 42764 - protein, 35 aa, Artificial Sequence; identical to SEQ ID NO: 30726
  GFR-binding peptide
  MOD_RES (34), (34): Xaa is C or S
  MOD_RES (14), (15), (16), (17), (18): Xaa is A or G
  MOD_RES (19), (20), (21), (22): Xaa is A or G or is absent

SEQ ID NO: 42765 - protein, 39 aa, Artificial Sequence
  GFR-binding peptide
  MOD_RES (4), (5), (36), (38): Xaa is C or S
PSTXXAPVKTSPISMLYIDNGRVLLYKQYEMIVEEXGXL

SEQ ID NO: 42766 - protein, 36 aa, Artificial Sequence
  GFR-binding peptide
  MOD_RES (1), (33), (35): Xaa is C or S
XTPTKMSPISMLYINDKQQIIYKQYEGMVVDRXGXS

SEQ ID NO: 42767 - protein, 41 aa, Artificial Sequence; identical to SEQ ID NO: 28787
  GFR-binding peptide
  MOD_RES (4), (5), (39), (41): Xaa is C or S
  MOD_RES (19), (20), (21), (22), (23): Xaa is A or G
  MOD_RES (24), (25), (26), (27): Xaa is A or G or is absent

SEQ ID NO: 42768 - protein, 34 aa, Artificial Sequence; identical to SEQ ID NO: 27809
  GFR-binding peptide
  MOD_RES (34), (34): Xaa is C or S
  MOD_RES (14), (15), (16), (17), (18): Xaa is A or G
  MOD_RES (19), (20), (21), (22): Xaa is A or G or is absent

SEQ ID NO: 42769 - protein, 38 aa, Artificial Sequence; identical to SEQ ID NO: 30730
  GFR-binding peptide
  MOD_RES (5), (6): Xaa is C or S
  MOD_RES (20), (21), (22), (23), (24): Xaa is A or G
  MOD_RES (25), (26), (27), (28): Xaa is A or G or is absent

SEQ ID NO: 42770 - protein, 36 aa, Artificial Sequence; identical to SEQ ID NO: 29732
  GFR-binding peptide
  MOD_RES (1), (33), (35): Xaa is C or S

SEQ ID NO: 42771 - protein, 41 aa, Artificial Sequence; identical to SEQ ID NO: 27811
  GFR-binding peptide
  MOD_RES (6), (7), (41): Xaa is C or S
  MOD_RES (21), (22), (23), (24), (25): Xaa is A or G
  MOD_RES (26), (27), (28), (29): Xaa is A or G or is absent

SEQ ID NO: 42772 - protein, 37 aa, Artificial Sequence; identical to SEQ ID NO: 29734
  GFR-binding peptide
  MOD_RES (5), (37): Xaa is C or S

SEQ ID NO: 42773 - protein, 35 aa, Artificial Sequence; identical to SEQ ID NO: 28791
  GFR-binding peptide
  MOD_RES (1), (1): Xaa is C or S
  MOD_RES (15), (16), (17), (18), (19): Xaa is A or G
  MOD_RES (20), (21), (22), (23): Xaa is A or G or is absent

SEQ ID NO: 42774 - protein, 41 aa, Artificial Sequence
  GFR-binding peptide
  MOD_RES (4), (5), (39), (41): Xaa is C or S
  MOD_RES (19), (20), (21), (22), (23): Xaa is A or G
  MOD_RES (24), (25), (26), (27): Xaa is A or G or is absent
AGPXXTPTKMSPISMLYIXXXXXXXXXYKQYEGMVVDRXGX

SEQ ID NO: 42775 - protein, 34 aa, Artificial Sequence; identical to SEQ ID NO: 27815
  GFR-binding peptide
  MOD_RES (1), (33): Xaa is C or S

SEQ ID NO: 42776 - protein, 38 aa, Artificial Sequence; identical to SEQ ID NO: 28798
  GFR-binding peptide
  MOD_RES (1), (35), (37): Xaa is C or S
  MOD_RES (15), (16), (17), (18), (19): Xaa is A or G
  MOD_RES (20), (21), (22), (23): Xaa is A or G or is absent

SEQ ID NO: 42777 - protein, 37 aa, Artificial Sequence; identical to SEQ ID NO: 28800
  GFR-binding peptide
  MOD_RES (2), (3), (35), (37): Xaa is C or S

SEQ ID NO: 42778 - protein, 39 aa, Artificial Sequence; identical to SEQ ID NO: 29742
  GFR-binding peptide
  MOD_RES (4), (5), (37), (39): Xaa is C or S

SEQ ID NO: 42779 - protein, 36 aa, Artificial Sequence; identical to SEQ ID NO: 27818
  GFR-binding peptide
  MOD_RES (2), (3), (35): Xaa is C or S

SEQ ID NO: 42780 - protein, 37 aa, Artificial Sequence; identical to SEQ ID NO: 28804
  GFR-binding peptide
  MOD_RES (1), (35), (37): Xaa is C or S
  MOD_RES (15), (16), (17), (18), (19): Xaa is A or G
  MOD_RES (20), (21), (22), (23): Xaa is A or G or is absent

SEQ ID NO: 42781 - protein, 40 aa, Artificial Sequence
  GFR-binding peptide
  MOD_RES (3), (4), (38), (40): Xaa is C or S
  MOD_RES (18), (19), (20), (21), (22): Xaa is A or G
  MOD_RES (23), (24), (25), (26): Xaa is A or G or is absent
GPXXTPTKMSPISMLYIXXXXXXXXXYKQYEGMVVDRXGX

SEQ ID NO: 42782 - protein, 39 aa, Artificial Sequence
  GFR-binding peptide
  MOD_RES (3), (4), (37), (39): Xaa is C or S
  MOD_RES (18), (19), (20), (21), (22): Xaa is A or G
  MOD_RES (23), (24), (25), (26): Xaa is A or G or is absent
STXXAPVKTSPISMLYIXXXXXXXXXYKQYEMIVEEXGX

SEQ ID NO: 42783 - protein, 31 aa, Artificial Sequence
  GFR-binding peptide
  MOD_RES (1), (1): Xaa is C or S
XAPVKTSPISMLYIDNGRVLLYKQYEMIVEE

SEQ ID NO: 42784 - protein, 40 aa, Artificial Sequence; identical to SEQ ID NO: 29754
  GFR-binding peptide
  MOD_RES (4), (5), (39): Xaa is C or S
  MOD_RES (19), (20), (21), (22), (23): Xaa is A or G
  MOD_RES (24), (25), (26), (27): Xaa is A or G or is absent

SEQ ID NO: 42785 - protein, 40 aa, Artificial Sequence; identical to SEQ ID NO: 27831
  GFR-binding peptide
  MOD_RES (4), (5), (37), (39): Xaa is C or S

SEQ ID NO: 42786 - protein, 31 aa, Artificial Sequence; identical to SEQ ID NO: 28814
  GFR-binding peptide

SEQ ID NO: 42787 - protein, 36 aa, Artificial Sequence; identical to SEQ ID NO: 30751
  GFR-binding peptide
  MOD_RES (33), (35): Xaa is C or S

SEQ ID NO: 42788 - protein, 36 aa, Artificial Sequence; identical to SEQ ID NO: 27835
  GFR-binding peptide
  MOD_RES (5), (6): Xaa is C or S

SEQ ID NO: 42789 - protein, 37 aa, Artificial Sequence
  GFR-binding peptide
  MOD_RES (34), (36): Xaa is C or S
  MOD_RES (14), (15), (16), (17), (18): Xaa is A or G
  MOD_RES (19), (20), (21), (22): Xaa is A or G or is absent
TPTKMSPISMLYIXXXXXXXXXYKQYEGMVVDRXGXS

SEQ ID NO: 42790 - protein, 38 aa, Artificial Sequence
  GFR-binding peptide
  MOD_RES (3), (4), (35), (37): Xaa is C or S
STXXAPVKTSPISMLYIDNGRVLLYKQYEMIVEEXGXL

SEQ ID NO: 42791 - protein, 39 aa, Artificial Sequence
  GFR-binding peptide
  MOD_RES (4), (5), (37), (39): Xaa is C or S
AGPXXTPTKMSPISMLYINDKQQIIYKQYEGMVVDRXGX

SEQ ID NO: 42792 - protein, 36 aa, Artificial Sequence
  GFR-binding peptide
  MOD_RES (33), (35): Xaa is C or S
  MOD_RES (14), (15), (16), (17), (18): Xaa is A or G
  MOD_RES (19), (20), (21), (22): Xaa is A or G or is absent
APVKTSPISMLYIXXXXXXXXXYKQYEMIVEEXGXL

SEQ ID NO: 42793 - protein, 37 aa, Artificial Sequence
  GFR-binding peptide
  MOD_RES (6), (7): Xaa is C or S
RVPSTXXAPVKTSPISMLYIDNGRVLLYKQYEMIVEE

SEQ ID NO: 42794 - protein, 42 aa, Artificial Sequence; identical to SEQ ID NO: 28824
  GFR-binding peptide
  MOD_RES (4), (5), (39), (41): Xaa is C or S
  MOD_RES (19), (20), (21), (22), (23): Xaa is A or G
  MOD_RES (24), (25), (26), (27): Xaa is A or G or is absent

SEQ ID NO: 42795 - protein, 34 aa, Artificial Sequence; identical to SEQ ID NO: 30763
  GFR-binding peptide
  MOD_RES (2), (34): Xaa is C or S

SEQ ID NO: 42796 - protein, 41 aa, Artificial Sequence
  GFR-binding peptide
  MOD_RES (6), (7), (38), (40): Xaa is C or S
RVPSTXXAPVKTSPISMLYIDNGRVLLYKQYEMIVEEXGXL

SEQ ID NO: 42797 - protein, 32 aa, Artificial Sequence
  GFR-binding peptide
  MOD_RES (1), (2): Xaa is C or S
XXTPTKMSPISMLYINDKQQIIYKQYEGMVVD

SEQ ID NO: 42798 - protein, 43 aa, Artificial Sequence; identical to SEQ ID NO: 29766
  GFR-binding peptide
  MOD_RES (6), (7), (41), (43): Xaa is C or S
  MOD_RES (21), (22), (23), (24), (25): Xaa is A or G
  MOD_RES (26), (27), (28), (29): Xaa is A or G or is absent

SEQ ID NO: 42799 - protein, 35 aa, Artificial Sequence; identical to SEQ ID NO: 28831
  GFR-binding peptide
  MOD_RES (35), (35): Xaa is C or S
  MOD_RES (14), (15), (16), (17), (18): Xaa is A or G
  MOD_RES (19), (20), (21), (22): Xaa is A or G or is absent

SEQ ID NO: 42800 - protein, 38 aa, Artificial Sequence; identical to SEQ ID NO: 27848
  GFR-binding peptide
  MOD_RES (5), (6): Xaa is C or S
  MOD_RES (20), (21), (22), (23), (24): Xaa is A or G
  MOD_RES (25), (26), (27), (28): Xaa is A or G or is absent

SEQ ID NO: 42801 - protein, 34 aa, Artificial Sequence
  GFR-binding peptide
  MOD_RES (3), (4): Xaa is C or S
STXXAPVKTSPISMLYIDNGRVLLYKQYEMIVEE

SEQ ID NO: 42802 - protein, 35 aa, Artificial Sequence; identical to SEQ ID NO: 27852
  GFR-binding peptide
  MOD_RES (2), (3), (35): Xaa is C or S

SEQ ID NO: 42803 - protein, 39 aa, Artificial Sequence
  GFR-binding peptide
  MOD_RES (6), (7): Xaa is C or S
  MOD_RES (21), (22), (23), (24), (25): Xaa is A or G
  MOD_RES (26), (27), (28), (29): Xaa is A or G or is absent
HVPKPXXAPTKLSPISVLYIXXXXXXXXXYKQYENMVVR

SEQ ID NO: 42804 - protein, 38 aa, Artificial Sequence; identical to SEQ ID NO: 29771
  GFR-binding peptide
  MOD_RES (3), (4), (36), (38): Xaa is C or S

SEQ ID NO: 42805 - protein, 40 aa, Artificial Sequence; identical to SEQ ID NO: 30771
  GFR-binding peptide
  MOD_RES (3), (4), (38), (40): Xaa is C or S
  MOD_RES (18), (19), (20), (21), (22): Xaa is A or G
  MOD_RES (23), (24), (25), (26): Xaa is A or G or is absent

SEQ ID NO: 42806 - protein, 36 aa, Artificial Sequence
  GFR-binding peptide
  MOD_RES (5), (6): Xaa is C or S
VPSTXXAPVKTSPISMLYIDNGRVLLYKQYEMIVEE

SEQ ID NO: 42807 - protein, 38 aa, Artificial Sequence; identical to SEQ ID NO: 27855
  GFR-binding peptide
  MOD_RES (2), (3), (37): Xaa is C or S
  MOD_RES (17), (18), (19), (20), (21): Xaa is A or G
  MOD_RES (22), (23), (24), (25): Xaa is A or G or is absent

SEQ ID NO: 42808 - protein, 40 aa, Artificial Sequence; identical to SEQ ID NO: 27856
  GFR-binding peptide
  MOD_RES (4), (5), (37), (39): Xaa is C or S

SEQ ID NO: 42809 - protein, 37 aa, Artificial Sequence; identical to SEQ ID NO: 30774
  GFR-binding peptide
  MOD_RES (5), (6): Xaa is C or S

SEQ ID NO: 42810 - protein, 40 aa, Artificial Sequence; identical to SEQ ID NO: 27859
  GFR-binding peptide
  MOD_RES (7), (7): Xaa is C or S
  MOD_RES (21), (22), (23), (24), (25): Xaa is A or G
  MOD_RES (26), (27), (28), (29): Xaa is A or G or is absent

SEQ ID NO: 42811 - protein, 35 aa, Artificial Sequence; identical to SEQ ID NO: 29777
  GFR-binding peptide
  MOD_RES (1), (2): Xaa is C or S
  MOD_RES (16), (17), (18), (19), (20): Xaa is A or G
  MOD_RES (21), (22), (23), (24): Xaa is A or G or is absent

SEQ ID NO: 42812 - protein, 30 aa, Artificial Sequence
  GFR-binding peptide
APVKTSPISMLYIDNGRVLLYKQYEMIVEE

SEQ ID NO: 42813 - protein, 36 aa, Artificial Sequence; identical to SEQ ID NO: 30776
  GFR-binding peptide
  MOD_RES (3), (4): Xaa is C or S
  MOD_RES (18), (19), (20), (21), (22): Xaa is A or G
  MOD_RES (23), (24), (25), (26): Xaa is A or G or is absent

SEQ ID NO: 42814 - protein, 43 aa, Artificial Sequence
  GFR-binding peptide
  MOD_RES (6), (7), (41), (43): Xaa is C or S
  MOD_RES (21), (22), (23), (24), (25): Xaa is A or G
  MOD_RES (26), (27), (28), (29): Xaa is A or G or is absent
GSAGPXXTPTKMSPISMLYIXXXXXXXXXYKQYEGMVVDRXGX

SEQ ID NO: 42815 - protein, 40 aa, Artificial Sequence; identical to SEQ ID NO: 30778
  GFR-binding peptide
  MOD_RES (6), (7): Xaa is C or S
  MOD_RES (21), (22), (23), (24), (25): Xaa is A or G
  MOD_RES (26), (27), (28), (29): Xaa is A or G or is absent

SEQ ID NO: 42816 - protein, 41 aa, Artificial Sequence; identical to SEQ ID NO: 28839
  GFR-binding peptide
  MOD_RES (5), (6), (41): Xaa is C or S
  MOD_RES (20), (21), (22), (23), (24): Xaa is A or G
  MOD_RES (25), (26), (27), (28): Xaa is A or G or is absent

SEQ ID NO: 42817 - protein, 43 aa, Artificial Sequence; identical to SEQ ID NO: 27862
  GFR-binding peptide
  MOD_RES (6), (7), (41), (43): Xaa is C or S
  MOD_RES (21), (22), (23), (24), (25): Xaa is A or G
  MOD_RES (26), (27), (28), (29): Xaa is A or G or is absent

SEQ ID NO: 42818 - protein, 38 aa, Artificial Sequence; identical to SEQ ID NO: 29780
  GFR-binding peptide
  MOD_RES (1), (2), (36), (38): Xaa is C or S
  MOD_RES (16), (17), (18), (19), (20): Xaa is A or G
  MOD_RES (21), (22), (23), (24): Xaa is A or G or is absent

SEQ ID NO: 42819 - protein, 37 aa, Artificial Sequence
  GFR-binding peptide
  MOD_RES (4), (5): Xaa is C or S
  MOD_RES (19), (20), (21), (22), (23): Xaa is A or G
  MOD_RES (24), (25), (26), (27): Xaa is A or G or is absent
PSTXXAPVKTSPISMLYIXXXXXXXXXYKQYEMIVEE

SEQ ID NO: 42820 - protein, 38 aa, Artificial Sequence; identical to SEQ ID NO: 30780
  GFR-binding peptide
  MOD_RES (1), (35), (37): Xaa is C or S
  MOD_RES (15), (16), (17), (18), (19): Xaa is A or G
  MOD_RES (20), (21), (22), (23): Xaa is A or G or is absent

SEQ ID NO: 42821 - protein, 35 aa, Artificial Sequence; identical to SEQ ID NO: 27863
  GFR-binding peptide
  MOD_RES (1), (2): Xaa is C or S
  MOD_RES (16), (17), (18), (19), (20): Xaa is A or G
  MOD_RES (21), (22), (23), (24): Xaa is A or G or is absent

SEQ ID NO: 42822 - protein, 34 aa, Artificial Sequence; identical to SEQ ID NO: 27864
  GFR-binding peptide
  MOD_RES (14), (15), (16), (17), (18): Xaa is A or G
  MOD_RES (19), (20), (21), (22): Xaa is A or G or is absent

SEQ ID NO: 42823 - protein, 35 aa, Artificial Sequence
  GFR-binding peptide
  MOD_RES (2), (3), (35): Xaa is C or S
PXXTPTKMSPISMLYINDKQQIIYKQYEGMVVDRX

SEQ ID NO: 42824 - protein, 37 aa, Artificial Sequence
  GFR-binding peptide
  MOD_RES (4), (5), (36): Xaa is C or S
PSTXXAPVKTSPISMLYIDNGRVLLYKQYEMIVEEXG

SEQ ID NO: 42825 - protein, 40 aa, Artificial Sequence; identical to SEQ ID NO: 28845
  GFR-binding peptide
  MOD_RES (4), (5), (37), (39): Xaa is C or S

SEQ ID NO: 42826 - protein, 35 aa, Artificial Sequence; identical to SEQ ID NO: 29787
  GFR-binding peptide
  MOD_RES (1), (2): Xaa is C or S
  MOD_RES (16), (17), (18), (19), (20): Xaa is A or G
  MOD_RES (21), (22), (23), (24): Xaa is A or G or is absent

SEQ ID NO: 42827 - protein, 42 aa, Artificial Sequence; identical to SEQ ID NO: 29788
  GFR-binding peptide
  MOD_RES (4), (5), (39), (41): Xaa is C or S
  MOD_RES (19), (20), (21), (22), (23): Xaa is A or G
  MOD_RES (24), (25), (26), (27): Xaa is A or G or is absent

SEQ ID NO: 42828 - protein, 38 aa, Artificial Sequence; identical to SEQ ID NO: 28856
  GFR-binding peptide
  MOD_RES (3), (4), (36), (38): Xaa is C or S

SEQ ID NO: 42829 - protein, 36 aa, Artificial Sequence; identical to SEQ ID NO: 28859
  GFR-binding peptide
  MOD_RES (34), (36): Xaa is C or S
  MOD_RES (14), (15), (16), (17), (18): Xaa is A or G
  MOD_RES (19), (20), (21), (22): Xaa is A or G or is absent

SEQ ID NO: 42830 - protein, 36 aa, Artificial Sequence; identical to SEQ ID NO: 29795
  GFR-binding peptide
  MOD_RES (2), (3), (36): Xaa is C or S

SEQ ID NO: 42831 - protein, 38 aa, Artificial Sequence; identical to SEQ ID NO: 29796
  GFR-binding peptide
  MOD_RES (5), (6), (38): Xaa is C or S

SEQ ID NO: 42832 - protein, 39 aa, Artificial Sequence; identical to SEQ ID NO: 30792
  GFR-binding peptide
  MOD_RES (5), (6): Xaa is C or S
  MOD_RES (20), (21), (22), (23), (24): Xaa is A or G
  MOD_RES (25), (26), (27), (28): Xaa is A or G or is absent

SEQ ID NO: 42833 - protein, 35 aa, Artificial Sequence; identical to SEQ ID NO: 28860
  GFR-binding peptide
  MOD_RES (5), (5): Xaa is C or S

SEQ ID NO: 42834 - protein, 37 aa, Artificial Sequence; identical to SEQ ID NO: 27875
  GFR-binding peptide
  MOD_RES (1), (2), (36): Xaa is C or S
  MOD_RES (16), (17), (18), (19), (20): Xaa is A or G
  MOD_RES (21), (22), (23), (24): Xaa is A or G or is absent

SEQ ID NO: 42835 - protein, 35 aa, Artificial Sequence; identical to SEQ ID NO: 30797
  GFR-binding peptide
  MOD_RES (2), (3): Xaa is C or S
  MOD_RES (17), (18), (19), (20), (21): Xaa is A or G
  MOD_RES (22), (23), (24), (25): Xaa is A or G or is absent

SEQ ID NO: 42836 - protein, 40 aa, Artificial Sequence; identical to SEQ ID NO: 27879
  GFR-binding peptide
  MOD_RES (5), (6), (38), (40): Xaa is C or S

SEQ ID NO: 42837 - protein, 37 aa, Artificial Sequence; identical to SEQ ID NO: 27880
  GFR-binding peptide
  MOD_RES (2), (3), (36): Xaa is C or S

SEQ ID NO: 42838 - protein, 33 aa, Artificial Sequence; identical to SEQ ID NO: 30799
  GFR-binding peptide
  MOD_RES (32), (32): Xaa is C or S

SEQ ID NO: 42839 - protein, 37 aa, Artificial Sequence; identical to SEQ ID NO: 30800
  GFR-binding peptide
  MOD_RES (1), (2), (34), (36): Xaa is C or S

SEQ ID NO: 42840 - protein, 40 aa, Artificial Sequence; identical to SEQ ID NO: 30801
  GFR-binding peptide
  MOD_RES (6), (7), (39): Xaa is C or S

SEQ ID NO: 42841 - protein, 36 aa, Artificial Sequence
  GFR-binding peptide
  MOD_RES (1), (2), (35): Xaa is C or S
  MOD_RES (16), (17), (18), (19), (20): Xaa is A or G
  MOD_RES (21), (22), (23), (24): Xaa is A or G or is absent
XXAPVKTSPISMLYIXXXXXXXXXYKQYEMIVEEXG

SEQ ID NO: 42842 - protein, 37 aa, Artificial Sequence; identical to SEQ ID NO: 27881
  GFR-binding peptide
  MOD_RES (5), (6): Xaa is C or S

SEQ ID NO: 42843 - protein, 39 aa, Artificial Sequence; identical to SEQ ID NO: 28867
  GFR-binding peptide
  MOD_RES (5), (6): Xaa is C or S
  MOD_RES (20), (21), (22), (23), (24): Xaa is A or G
  MOD_RES (25), (26), (27), (28): Xaa is A or G or is absent

SEQ ID NO: 42844 - protein, 35 aa, Artificial Sequence
  GFR-binding peptide
  MOD_RES (1), (32), (34): Xaa is C or S
XAPVKTSPISMLYIDNGRVLLYKQYEMIVEEXGXL

SEQ ID NO: 42845 - protein, 35 aa, Artificial Sequence
  GFR-binding peptide
  MOD_RES (32), (34): Xaa is C or S
TPTKMSPISMLYINDKQQIIYKQYEGMVVDRXGXS

SEQ ID NO: 42846 - protein, 33 aa, Artificial Sequence; identical to SEQ ID NO: 29804
  GFR-binding peptide
  MOD_RES (1), (2): Xaa is C or S

SEQ ID NO: 42847 - protein, 37 aa, Artificial Sequence; identical to SEQ ID NO: 30806
  GFR-binding peptide
  MOD_RES (1), (2), (36): Xaa is C or S
  MOD_RES (16), (17), (18), (19), (20): Xaa is A or G
  MOD_RES (21), (22), (23), (24): Xaa is A or G or is absent

SEQ ID NO: 42848 - protein, 41 aa, Artificial Sequence; identical to SEQ ID NO: 27885
  GFR-binding peptide
  MOD_RES (5), (6), (38), (40): Xaa is C or S

SEQ ID NO: 42849 - protein, 40 aa, Artificial Sequence
  GFR-binding peptide
  MOD_RES (6), (7), (38), (40): Xaa is C or S
RVPSTXXAPVKTSPISMLYIDNGRVLLYKQYEMIVEEXGX

SEQ ID NO: 42850 - protein, 41 aa, Artificial Sequence; identical to SEQ ID NO: 30813
  GFR-binding peptide
  MOD_RES (3), (4), (38), (40): Xaa is C or S
  MOD_RES (18), (19), (20), (21), (22): Xaa is A or G
  MOD_RES (23), (24), (25), (26): Xaa is A or G or is absent

SEQ ID NO: 42851 - protein, 41 aa, Artificial Sequence; identical to SEQ ID NO: 28876
  GFR-binding peptide
  MOD_RES (6), (7), (40): Xaa is C or S

SEQ ID NO: 42852 - protein, 36 aa, Artificial Sequence
  GFR-binding peptide
  MOD_RES (1), (35): Xaa is C or S
  MOD_RES (15), (16), (17), (18), (19): Xaa is A or G
  MOD_RES (20), (21), (22), (23): Xaa is A or G or is absent
XTPTKMSPISMLYIXXXXXXXXXYKQYEGMVVDRXG

SEQ ID NO: 42853 - protein, 38 aa, Artificial Sequence; identical to SEQ ID NO: 29812
  GFR-binding peptide
  MOD_RES (4), (5): Xaa is C or S
  MOD_RES (19), (20), (21), (22), (23): Xaa is A or G
  MOD_RES (24), (25), (26), (27): Xaa is A or G or is absent

SEQ ID NO: 42854 - protein, 39 aa, Artificial Sequence; identical to SEQ ID NO: 27891
  GFR-binding peptide
  MOD_RES (2), (3), (38): Xaa is C or S
  MOD_RES (17), (18), (19), (20), (21): Xaa is A or G
  MOD_RES (22), (23), (24), (25): Xaa is A or G or is absent

SEQ ID NO: 42855 - protein, 42 aa, Artificial Sequence; identical to SEQ ID NO: 29813
  GFR-binding peptide
  MOD_RES (5), (39), (41): Xaa is C or S
  MOD_RES (19), (20), (21), (22), (23): Xaa is A or G
  MOD_RES (24), (25), (26), (27): Xaa is A or G or is absent

SEQ ID NO: 42856 - protein, 40 aa, Artificial Sequence; identical to SEQ ID NO: 29816
  GFR-binding peptide
  MOD_RES (4), (5), (38), (40): Xaa is C or S

SEQ ID NO: 42857 - protein, 38 aa, Artificial Sequence; identical to SEQ ID NO: 28882
  GFR-binding peptide
  MOD_RES (2), (3), (37): Xaa is C or S
  MOD_RES (17), (18), (19), (20), (21): Xaa is A or G
  MOD_RES (22), (23), (24), (25): Xaa is A or G or is absent

SEQ ID NO: 42858 - protein, 40 aa, Artificial Sequence; identical to SEQ ID NO: 28884
  GFR-binding peptide
  MOD_RES (4), (38), (40): Xaa is C or S
  MOD_RES (18), (19), (20), (21), (22): Xaa is A or G
  MOD_RES (23), (24), (25), (26): Xaa is A or G or is absent

SEQ ID NO: 42859 - protein, 36 aa, Artificial Sequence; identical to SEQ ID NO: 30816
  GFR-binding peptide
  MOD_RES (34), (36): Xaa is C or S
  MOD_RES (14), (15), (16), (17), (18): Xaa is A or G
  MOD_RES (19), (20), (21), (22): Xaa is A or G or is absent

SEQ ID NO: 42860 - protein, 40 aa, Artificial Sequence; identical to SEQ ID NO: 27898
  GFR-binding peptide
  MOD_RES (6), (7): Xaa is C or S
  MOD_RES (21), (22), (23), (24), (25): Xaa is A or G
  MOD_RES (26), (27), (28), (29): Xaa is A or G or is absent

SEQ ID NO: 42861 - protein, 35 aa, Artificial Sequence; identical to SEQ ID NO: 30817
  GFR-binding peptide
  MOD_RES (34), (34): Xaa is C or S
  MOD_RES (14), (15), (16), (17), (18): Xaa is A or G
  MOD_RES (19), (20), (21), (22): Xaa is A or G or is absent

SEQ ID NO: 42862 - protein, 36 aa, Artificial Sequence; identical to SEQ ID NO: 29821
  GFR-binding peptide
  MOD_RES (2), (3): Xaa is C or S
  MOD_RES (17), (18), (19), (20), (21): Xaa is A or G
  MOD_RES (22), (23), (24), (25): Xaa is A or G or is absent

SEQ ID NO: 42863 - protein, 40 aa, Artificial Sequence; identical to SEQ ID NO: 28890
  GFR-binding peptide
  MOD_RES (6), (7), (39): Xaa is C or S

SEQ ID NO: 42864 - protein, 39 aa, Artificial Sequence
  GFR-binding peptide
  MOD_RES (4), (5), (38): Xaa is C or S
  MOD_RES (19), (20), (21), (22), (23): Xaa is A or G
  MOD_RES (24), (25), (26), (27): Xaa is A or G or is absent
PSTXXAPVKTSPISMLYIXXXXXXXXXYKQYEMIVEEXG

SEQ ID NO: 42865 - protein, 40 aa, Artificial Sequence; identical to SEQ ID NO: 28895
  GFR-binding peptide
  MOD_RES (5), (37), (39): Xaa is C or S

SEQ ID NO: 42866 - protein, 42 aa, Artificial Sequence
  GFR-binding peptide
  MOD_RES (6), (7), (41): Xaa is C or S
  MOD_RES (21), (22), (23), (24), (25): Xaa is A or G
  MOD_RES (26), (27), (28), (29): Xaa is A or G or is absent
GSAGPXXTPTKMSPISMLYIXXXXXXXXXYKQYEGMVVDRXG

SEQ ID NO: 42867 - protein, 37 aa, Artificial Sequence; identical to SEQ ID NO: 27904
  GFR-binding peptide
  MOD_RES (5), (6): Xaa is C or S

SEQ ID NO: 42868 - protein, 38 aa, Artificial Sequence; identical to SEQ ID NO: 30824
  GFR-binding peptide
  MOD_RES (3), (4), (36), (38): Xaa is C or S

SEQ ID NO: 42869 - protein, 37 aa, Artificial Sequence; identical to SEQ ID NO: 30825
  GFR-binding peptide
  MOD_RES (7), (7): Xaa is C or S

SEQ ID NO: 42870 - protein, 39 aa, Artificial Sequence; identical to SEQ ID NO: 29831
  GFR-binding peptide
  MOD_RES (3), (4), (38): Xaa is C or S
  MOD_RES (18), (19), (20), (21), (22): Xaa is A or G
  MOD_RES (23), (24), (25), (26): Xaa is A or G or is absent

SEQ ID NO: 42871 - protein, 36 aa, Artificial Sequence; identical to SEQ ID NO: 27907
  GFR-binding peptide
  MOD_RES (3), (4): Xaa is C or S
  MOD_RES (18), (19), (20), (21), (22): Xaa is A or G
  MOD_RES (23), (24), (25), (26): Xaa is A or G or is absent

SEQ ID NO: 42872 - protein, 37 aa, Artificial Sequence
  GFR-binding peptide
  MOD_RES (4), (5): Xaa is C or S
  MOD_RES (19), (20), (21), (22), (23): Xaa is A or G
  MOD_RES (24), (25), (26), (27): Xaa is A or G or is absent
AGPXXTPTKMSPISMLYIXXXXXXXXXYKQYEGMVVD

SEQ ID NO: 42873 - protein, 44 aa, Artificial Sequence; identical to SEQ ID NO: 28904
  GFR-binding peptide
  MOD_RES (6), (7), (41), (43): Xaa is C or S
  MOD_RES (21), (22), (23), (24), (25): Xaa is A or G
  MOD_RES (26), (27), (28), (29): Xaa is A or G or is absent

SEQ ID NO: 42874 - protein, 38 aa, Artificial Sequence; identical to SEQ ID NO: 28905
  GFR-binding peptide
  MOD_RES (4), (5), (37): Xaa is C or S

SEQ ID NO: 42875 - protein, 37 aa, Artificial Sequence; identical to SEQ ID NO: 29832
  GFR-binding peptide
  MOD_RES (2), (3): Xaa is C or S
  MOD_RES (17), (18), (19), (20), (21): Xaa is A or G
  MOD_RES (22), (23), (24), (25): Xaa is A or G or is absent

SEQ ID NO: 42876 - protein, 43 aa, Artificial Sequence; identical to SEQ ID NO: 27912
  GFR-binding peptide
  MOD_RES (5), (6), (40), (42): Xaa is C or S
  MOD_RES (20), (21), (22), (23), (24): Xaa is A or G
  MOD_RES (25), (26), (27), (28): Xaa is A or G or is absent

SEQ ID NO: 42877 - protein, 35 aa, Artificial Sequence; identical to SEQ ID NO: 30828
  GFR-binding peptide
  MOD_RES (2), (3), (35): Xaa is C or S

SEQ ID NO: 42878 - protein, 41 aa, Artificial Sequence; identical to SEQ ID NO: 29834
  GFR-binding peptide
  MOD_RES (6), (7), (41): Xaa is C or S
  MOD_RES (21), (22), (23), (24), (25): Xaa is A or G
  MOD_RES (26), (27), (28), (29): Xaa is A or G or is absent

SEQ ID NO: 42879 - protein, 37 aa, Artificial Sequence; identical to SEQ ID NO: 27915
  GFR-binding peptide
  MOD_RES (2), (3), (37): Xaa is C or S
  MOD_RES (17), (18), (19), (20), (21): Xaa is A or G
  MOD_RES (22), (23), (24), (25): Xaa is A or G or is absent

SEQ ID NO: 42880 - protein, 43 aa, Artificial Sequence; identical to SEQ ID NO: 28907
  GFR-binding peptide
  MOD_RES (6), (7), (41), (43): Xaa is C or S
  MOD_RES (21), (22), (23), (24), (25): Xaa is A or G
  MOD_RES (26), (27), (28), (29): Xaa is A or G or is absent

SEQ ID NO: 42881 - protein, 35 aa, Artificial Sequence; identical to SEQ ID NO: 30831
  GFR-binding peptide
  MOD_RES (2), (3), (35): Xaa is C or S

SEQ ID NO: 42882 - protein, 35 aa, Artificial Sequence; identical to SEQ ID NO: 27919
  GFR-binding peptide
  MOD_RES (3), (4): Xaa is C or S

SEQ ID NO: 42883 - protein, 40 aa, Artificial Sequence; identical to SEQ ID NO: 27922
  GFR-binding peptide
  MOD_RES (4), (5), (39): Xaa is C or S
  MOD_RES (19), (20), (21), (22), (23): Xaa is A or G
  MOD_RES (24), (25), (26), (27): Xaa is A or G or is absent

SEQ ID NO: 42884 - protein, 34 aa, Artificial Sequence; identical to SEQ ID NO: 28914
  GFR-binding peptide
  MOD_RES (33), (33): Xaa is C or S

SEQ ID NO: 42885 - protein, 39 aa, Artificial Sequence
  GFR-binding peptide
  MOD_RES (4), (5), (39): Xaa is C or S
  MOD_RES (19), (20), (21), (22), (23): Xaa is A or G
  MOD_RES (24), (25), (26), (27): Xaa is A or G or is absent
AGPXXTPTKMSPISMLYIXXXXXXXXXYKQYEGMVVDRX

SEQ ID NO: 42886 - protein, 35 aa, Artificial Sequence; identical to SEQ ID NO: 28916
  GFR-binding peptide
  MOD_RES (1), (2), (34): Xaa is C or S

SEQ ID NO: 42887 - protein, 41 aa, Artificial Sequence; identical to SEQ ID NO: 30836
  GFR-binding peptide
  MOD_RES (4), (5), (39), (41): Xaa is C or S
  MOD_RES (19), (20), (21), (22), (23): Xaa is A or G
  MOD_RES (24), (25), (26), (27): Xaa is A or G or is absent

SEQ ID NO: 42888 - protein, 32 aa, Artificial Sequence; identical to SEQ ID NO: 30837
  GFR-binding peptide
  MOD_RES (32), (32): Xaa is C or S

SEQ ID NO: 42889 - protein, 38 aa, Artificial Sequence; identical to SEQ ID NO: 28920
  GFR-binding peptide
  MOD_RES (4), (5): Xaa is C or S
  MOD_RES (19), (20), (21), (22), (23): Xaa is A or G
  MOD_RES (24), (25), (26), (27): Xaa is A or G or is absent

SEQ ID NO: 42890 - protein, 32 aa, Artificial Sequence; identical to SEQ ID NO: 29851
  GFR-binding peptide
  MOD_RES (1), (2): Xaa is C or S

SEQ ID NO: 42891 - protein, 35 aa, Artificial Sequence; identical to SEQ ID NO: 27927
  GFR-binding peptide
  MOD_RES (2), (3): Xaa is C or S
  MOD_RES (17), (18), (19), (20), (21): Xaa is A or G
  MOD_RES (22), (23), (24), (25): Xaa is A or G or is absent

SEQ ID NO: 42892 - protein, 42 aa, Artificial Sequence
  GFR-binding peptide
  MOD_RES (5), (6), (40), (42): Xaa is C or S
  MOD_RES (20), (21), (22), (23), (24): Xaa is A or G
  MOD_RES (25), (26), (27), (28): Xaa is A or G or is absent
SAGPXXTPTKMSPISMLYIXXXXXXXXXYKQYEGMVVDRXGX

SEQ ID NO: 42893 - protein, 37 aa, Artificial Sequence; identical to SEQ ID NO: 27929
  GFR-binding peptide
  MOD_RES (1), (35), (37): Xaa is C or S
  MOD_RES (15), (16), (17), (18), (19): Xaa is A or G
  MOD_RES (20), (21), (22), (23): Xaa is A or G or is absent

SEQ ID NO: 42894 - protein, 32 aa, Artificial Sequence; identical to SEQ ID NO: 29852
  GFR-binding peptide
  MOD_RES (1), (1): Xaa is C or S

SEQ ID NO: 42895 - protein, 32 aa, Artificial Sequence; identical to SEQ ID NO: 30839
  GFR-binding peptide
  MOD_RES (1), (1): Xaa is C or S

SEQ ID NO: 42896 - protein, 37 aa, Artificial Sequence; identical to SEQ ID NO: 30841
  GFR-binding peptide
  MOD_RES (1), (35), (37): Xaa is C or S
  MOD_RES (15), (16), (17), (18), (19): Xaa is A or G
  MOD_RES (20), (21), (22), (23): Xaa is A or G or is absent

SEQ ID NO: 42897 - protein, 38 aa, Artificial Sequence; identical to SEQ ID NO: 28925
  GFR-binding peptide
  MOD_RES (3), (4), (38): Xaa is C or S
  MOD_RES (18), (19), (20), (21), (22): Xaa is A or G
  MOD_RES (23), (24), (25), (26): Xaa is A or G or is absent

SEQ ID NO: 42898 - protein, 39 aa, Artificial Sequence; identical to SEQ ID NO: 29854
  GFR-binding peptide
  MOD_RES (5), (6), (38): Xaa is C or S

SEQ ID NO: 42899 - protein, 31 aa, Artificial Sequence; identical to SEQ ID NO: 29857
  GFR-binding peptide

SEQ ID NO: 42900 - protein, 36 aa, Artificial Sequence; identical to SEQ ID NO: 28929
  GFR-binding peptide
  MOD_RES (4), (5): Xaa is C or S

SEQ ID NO: 42901 - protein, 37 aa, Artificial Sequence; identical to SEQ ID NO: 28932
  GFR-binding peptide
  MOD_RES (4), (5): Xaa is C or S
  MOD_RES (19), (20), (21), (22), (23): Xaa is A or G
  MOD_RES (24), (25), (26), (27): Xaa is A or G or is absent

SEQ ID NO: 42902 - protein, 40 aa, Artificial Sequence
  GFR-binding peptide
  MOD_RES (5), (6), (38), (40): Xaa is C or S
SAGPXXTPTKMSPISMLYINDKQQIIYKQYEGMVVDRXGX

SEQ ID NO: 42903 - protein, 33 aa, Artificial Sequence
  GFR-binding peptide
  MOD_RES (1), (1): Xaa is C or S
  MOD_RES (15), (16), (17), (18), (19): Xaa is A or G
  MOD_RES (20), (21), (22), (23): Xaa is A or G or is absent
XAPVKTSPISMLYIXXXXXXXXXYKQYEMIVEE

SEQ ID NO: 42904 - protein, 38 aa, Artificial Sequence; identical to SEQ ID NO: 30847
  GFR-binding peptide
  MOD_RES (5), (6): Xaa is C or S
  MOD_RES (20), (21), (22), (23), (24): Xaa is A or G
  MOD_RES (25), (26), (27), (28): Xaa is A or G or is absent

SEQ ID NO: 42905 - protein, 41 aa, Artificial Sequence
  GFR-binding peptide
  MOD_RES (5), (6), (39), (41): Xaa is C or S
  MOD_RES (20), (21), (22), (23), (24): Xaa is A or G
  MOD_RES (25), (26), (27), (28): Xaa is A or G or is absent
VPSTXXAPVKTSPISMLYIXXXXXXXXXYKQYEMIVEEXGX

SEQ ID NO: 42906 - protein, 34 aa, Artificial Sequence; identical to SEQ ID NO: 30850
  GFR-binding peptide
  MOD_RES (34), (34): Xaa is C or S
  MOD_RES (14), (15), (16), (17), (18): Xaa is A or G
  MOD_RES (19), (20), (21), (22): Xaa is A or G or is absent

SEQ ID NO: 42907 - protein, 35 aa, Artificial Sequence; identical to SEQ ID NO: 27944
  GFR-binding peptide
  MOD_RES (3), (4): Xaa is C or S

SEQ ID NO: 42908 - protein, 36 aa, Artificial Sequence; identical to SEQ ID NO: 30851
  GFR-binding peptide
  MOD_RES (4), (5): Xaa is C or S

SEQ ID NO: 42909 - protein, 37 aa, Artificial Sequence; identical to SEQ ID NO: 29870
  GFR-binding peptide
  MOD_RES (3), (4), (36): Xaa is C or S

SEQ ID NO: 42910 - protein, 37 aa, Artificial Sequence; identical to SEQ ID NO: 27948
  GFR-binding peptide
  MOD_RES (2), (3), (37): Xaa is C or S
  MOD_RES (17), (18), (19), (20), (21): Xaa is A or G
  MOD_RES (22), (23), (24), (25): Xaa is A or G or is absent

SEQ ID NO: 42911 - protein, 37 aa, Artificial Sequence; identical to SEQ ID NO: 27952
  GFR-binding peptide
  MOD_RES (34), (36): Xaa is C or S
  MOD_RES (14), (15), (16), (17), (18): Xaa is A or G
  MOD_RES (19), (20), (21), (22): Xaa is A or G or is absent

SEQ ID NO: 42912 - protein, 37 aa, Artificial Sequence; identical to SEQ ID NO: 28945
  GFR-binding peptide
  MOD_RES (34), (36): Xaa is C or S
  MOD_RES (14), (15), (16), (17), (18): Xaa is A or G
  MOD_RES (19), (20), (21), (22): Xaa is A or G or is absent

SEQ ID NO: 42913 - protein, 38 aa, Artificial Sequence; identical to SEQ ID NO: 29877
  GFR-binding peptide
  MOD_RES (1), (2), (36), (38): Xaa is C or S
  MOD_RES (16), (17), (18), (19), (20): Xaa is A or G
  MOD_RES (21), (22), (23), (24): Xaa is A or G or is absent

SEQ ID NO: 42914 - protein, 37 aa, Artificial Sequence; identical to SEQ ID NO: 27953
  GFR-binding peptide
  MOD_RES (3), (4), (36): Xaa is C or S

SEQ ID NO: 42915 - protein, 35 aa, Artificial Sequence; identical to SEQ ID NO: 27955
  GFR-binding peptide
  MOD_RES (1), (33), (35): Xaa is C or S

SEQ ID NO: 42916 - protein, 38 aa, Artificial Sequence; identical to SEQ ID NO: 30859
  GFR-binding peptide
  MOD_RES (2), (3), (37): Xaa is C or S
  MOD_RES (17), (18), (19), (20), (21): Xaa is A or G
  MOD_RES (22), (23), (24), (25): Xaa is A or G or is absent

SEQ ID NO: 42917 - protein, 35 aa, Artificial Sequence; identical to SEQ ID NO: 27957
  GFR-binding peptide
  MOD_RES (4), (5): Xaa is C or S

SEQ ID NO: 42918 - protein, 39 aa, Artificial Sequence; identical to SEQ ID NO: 30861
  GFR-binding peptide
  MOD_RES (4), (5), (37), (39): Xaa is C or S

SEQ ID NO: 42919 - protein, 35 aa, Artificial Sequence; identical to SEQ ID NO: 28948
  GFR-binding peptide
  MOD_RES (34), (34): Xaa is C or S
  MOD_RES (14), (15), (16), (17), (18): Xaa is A or G
  MOD_RES (19), (20), (21), (22): Xaa is A or G or is absent

SEQ ID NO: 42920 - protein, 37 aa, Artificial Sequence
  GFR-binding peptide
  MOD_RES (6), (7): Xaa is C or S
GSAGPXXTPTKMSPISMLYINDKQQIIYKQYEGMVVD

SEQ ID NO: 42921 - protein, 30 aa, Artificial Sequence; identical to SEQ ID NO: 28952
  GFR-binding peptide

SEQ ID NO: 42922 - protein, 39 aa, Artificial Sequence; identical to SEQ ID NO: 27962
  GFR-binding peptide
  MOD_RES (5), (39): Xaa is C or S
  MOD_RES (19), (20), (21), (22), (23): Xaa is A or G
  MOD_RES (24), (25), (26), (27): Xaa is A or G or is absent

SEQ ID NO: 42923 - protein, 37 aa, Artificial Sequence; identical to SEQ ID NO: 28954
  GFR-binding peptide
  MOD_RES (3), (4), (36): Xaa is C or S

SEQ ID NO: 42924 - protein, 39 aa, Artificial Sequence
  GFR-binding peptide
  MOD_RES (5), (6), (37), (39): Xaa is C or S
VPSTXXAPVKTSPISMLYIDNGRVLLYKQYEMIVEEXGX

SEQ ID NO: 42925 - protein, 31 aa, Artificial Sequence; identical to SEQ ID NO: 29885
  GFR-binding peptide
  MOD_RES (1), (1): Xaa is C or S

SEQ ID NO: 42926 - protein, 36 aa, Artificial Sequence; identical to SEQ ID NO: 27964
  GFR-binding peptide
  MOD_RES (1), (2), (34), (36): Xaa is C or S

SEQ ID NO: 42927 - protein, 35 aa, Artificial Sequence
  GFR-binding peptide
  MOD_RES (1), (2), (35): Xaa is C or S
  MOD_RES (16), (17), (18), (19), (20): Xaa is A or G
  MOD_RES (21), (22), (23), (24): Xaa is A or G or is absent
XXAPVKTSPISMLYIXXXXXXXXXYKQYEMIVEEX

SEQ ID NO: 42928 - protein, 39 aa, Artificial Sequence; identical to SEQ ID NO: 27966
  GFR-binding peptide
  MOD_RES (2), (3), (37), (39): Xaa is C or S
  MOD_RES (17), (18), (19), (20), (21): Xaa is A or G
  MOD_RES (22), (23), (24), (25): Xaa is A or G or is absent

SEQ ID NO: 42929 - protein, 35 aa, Artificial Sequence
  GFR-binding peptide
  MOD_RES (1), (34): Xaa is C or S
  MOD_RES (15), (16), (17), (18), (19): Xaa is A or G
  MOD_RES (20), (21), (22), (23): Xaa is A or G or is absent
XAPVKTSPISMLYIXXXXXXXXXYKQYEMIVEEXG

SEQ ID NO: 42930 - protein, 40 aa, Artificial Sequence; identical to SEQ ID NO: 28959
  GFR-binding peptide
  MOD_RES (3), (37), (39): Xaa is C or S
  MOD_RES (17), (18), (19), (20), (21): Xaa is A or G
  MOD_RES (22), (23), (24), (25): Xaa is A or G or is absent

SEQ ID NO: 42931 - protein, 37 aa, Artificial Sequence; identical to SEQ ID NO: 30868
  GFR-binding peptide
  MOD_RES (4), (4): Xaa is C or S
  MOD_RES (18), (19), (20), (21), (22): Xaa is A or G
  MOD_RES (23), (24), (25), (26): Xaa is A or G or is absent

SEQ ID NO: 42932 - protein, 44 aa, Artificial Sequence; identical to SEQ ID NO: 27967
  GFR-binding peptide
  MOD_RES (6), (7), (41), (43): Xaa is C or S
  MOD_RES (21), (22), (23), (24), (25): Xaa is A or G
  MOD_RES (26), (27), (28), (29): Xaa is A or G or is absent

SEQ ID NO: 42933 - protein, 39 aa, Artificial Sequence; identical to SEQ ID NO: 29890
  GFR-binding peptide
  MOD_RES (6), (7), (39): Xaa is C or S

SEQ ID NO: 42934 - protein, 38 aa, Artificial Sequence
  GFR-binding peptide
  MOD_RES (6), (7): Xaa is C or S
HVPKPXXAPTKLSPISVLYIDDSSNVIYKQYENMVVRS

SEQ ID NO: 42935 - protein, 35 aa, Artificial Sequence; identical to SEQ ID NO: 28964
  GFR-binding peptide
  MOD_RES (32), (34): Xaa is C or S

SEQ ID NO: 42936 - protein, 37 aa, Artificial Sequence; identical to SEQ ID NO: 27973
  GFR-binding peptide
  MOD_RES (5), (5): Xaa is C or S
  MOD_RES (19), (20), (21), (22), (23): Xaa is A or G
  MOD_RES (24), (25), (26), (27): Xaa is A or G or is absent

SEQ ID NO: 42937 - protein, 37 aa, Artificial Sequence; identical to SEQ ID NO: 27975
  GFR-binding peptide
  MOD_RES (2), (3), (35), (37): Xaa is C or S

SEQ ID NO: 42938 - protein, 37 aa, Artificial Sequence; identical to SEQ ID NO: 29896
  GFR-binding peptide
  MOD_RES (2), (36): Xaa is C or S
  MOD_RES (16), (17), (18), (19), (20): Xaa is A or G
  MOD_RES (21), (22), (23), (24): Xaa is A or G or is absent

SEQ ID NO: 42939 - protein, 35 aa, Artificial Sequence; identical to SEQ ID NO: 30879
  GFR-binding peptide
  MOD_RES (1), (35): Xaa is C or S
  MOD_RES (15), (16), (17), (18), (19): Xaa is A or G
  MOD_RES (20), (21), (22), (23): Xaa is A or G or is absent

SEQ ID NO: 42940 - protein, 42 aa, Artificial Sequence; identical to SEQ ID NO: 27978
  GFR-binding peptide
  MOD_RES (6), (7), (42): Xaa is C or S
  MOD_RES (21), (22), (23), (24), (25): Xaa is A or G
  MOD_RES (26), (27), (28), (29): Xaa is A or G or is absent

SEQ ID NO: 42941 - protein, 39 aa, Artificial Sequence; identical to SEQ ID NO: 27981
  GFR-binding peptide
  MOD_RES (1), (2), (37), (39): Xaa is C or S
  MOD_RES (16), (17), (18), (19), (20): Xaa is A or G
  MOD_RES (21), (22), (23), (24): Xaa is A or G or is absent

SEQ ID NO: 42942 - protein, 38 aa, Artificial Sequence; identical to SEQ ID NO: 30884
  GFR-binding peptide
  MOD_RES (1), (2), (36), (38): Xaa is C or S
  MOD_RES (16), (17), (18), (19), (20): Xaa is A or G
  MOD_RES (21), (22), (23), (24): Xaa is A or G or is absent

SEQ ID NO: 42943 - protein, 40 aa, Artificial Sequence
  GFR-binding peptide
  MOD_RES (6), (7), (39): Xaa is C or S
GSAGPXXTPTKMSPISMLYINDKQQIIYKQYEGMVVDRXG

SEQ ID NO: 42944 - protein, 41 aa, Artificial Sequence; identical to SEQ ID NO: 29899
  GFR-binding peptide
  MOD_RES (4), (5), (39), (41): Xaa is C or S
  MOD_RES (19), (20), (21), (22), (23): Xaa is A or G
  MOD_RES (24), (25), (26), (27): Xaa is A or G or is absent

SEQ ID NO: 42945 - protein, 35 aa, Artificial Sequence; identical to SEQ ID NO: 29901
  GFR-binding peptide
  MOD_RES (32), (34): Xaa is C or S

SEQ ID NO: 42946 - protein, 33 aa, Artificial Sequence; identical to SEQ ID NO: 29902
  GFR-binding peptide
  MOD_RES (1), (1): Xaa is C or S

SEQ ID NO: 42947 - protein, 36 aa, Artificial Sequence; identical to SEQ ID NO: 28974
  GFR-binding peptide
  MOD_RES (5), (6): Xaa is C or S

SEQ ID NO: 42948 - protein, 34 aa, Artificial Sequence
  GFR-binding peptide
  MOD_RES (1), (32), (34): Xaa is C or S
XAPVKTSPISMLYIDNGRVLLYKQYEMIVEEXGX

SEQ ID NO: 42949 - protein, 39 aa, Artificial Sequence
  GFR-binding peptide
  MOD_RES (6), (7), (38): Xaa is C or S
RVPSTXXAPVKTSPISMLYIDNGRVLLYKQYEMIVEEXG

SEQ ID NO: 42950 - protein, 36 aa, Artificial Sequence
  GFR-binding peptide
  MOD_RES (1), (2), (34), (36): Xaa is C or S
XXTPTKMSPISMLYINDKQQIIYKQYEGMVVDRXGX

SEQ ID NO: 42951 - protein, 33 aa, Artificial Sequence; identical to SEQ ID NO: 27988
  GFR-binding peptide
  MOD_RES (1), (2): Xaa is C or S

SEQ ID NO: 42952 - protein, 33 aa, Artificial Sequence; identical to SEQ ID NO: 29908
  GFR-binding peptide
  MOD_RES (2), (3): Xaa is C or S

SEQ ID NO: 42953 - protein, 38 aa, Artificial Sequence; identical to SEQ ID NO: 27990
  GFR-binding peptide
  MOD_RES (3), (4), (38): Xaa is C or S
  MOD_RES (18), (19), (20), (21), (22): Xaa is A or G
  MOD_RES (23), (24), (25), (26): Xaa is A or G or is absent

SEQ ID NO: 42954 - protein, 35 aa, Artificial Sequence; identical to SEQ ID NO: 28980
  GFR-binding peptide
  MOD_RES (1), (35): Xaa is C or S
  MOD_RES (15), (16), (17), (18), (19): Xaa is A or G
  MOD_RES (20), (21), (22), (23): Xaa is A or G or is absent

SEQ ID NO: 42955 - protein, 41 aa, Artificial Sequence
  GFR-binding peptide
  MOD_RES (6), (7), (39), (41): Xaa is C or S
HVPKPXXAPTKLSPISVLYIDDSSNVIYKQYENMVVRSXGX

SEQ ID NO: 42956 - protein, 33 aa, Artificial Sequence; identical to SEQ ID NO: 28984
  GFR-binding peptide
  MOD_RES (14), (15), (16), (17), (18): Xaa is A or G
  MOD_RES (19), (20), (21), (22): Xaa is A or G or is absent

SEQ ID NO: 42957 - protein, 30 aa, Artificial Sequence; identical to SEQ ID NO: 30898
  GFR-binding peptide

SEQ ID NO: 42958 - protein, 35 aa, Artificial Sequence; identical to SEQ ID NO: 30900
  GFR-binding peptide
  MOD_RES (2), (3): Xaa is C or S
  MOD_RES (17), (18), (19), (20), (21): Xaa is A or G
  MOD_RES (22), (23), (24), (25): Xaa is A or G or is absent

SEQ ID NO: 42959 - protein, 35 aa, Artificial Sequence; identical to SEQ ID NO: 29917
  GFR-binding peptide
  MOD_RES (1), (2): Xaa is C or S
  MOD_RES (16), (17), (18), (19), (20): Xaa is A or G
  MOD_RES (21), (22), (23), (24): Xaa is A or G or is absent

SEQ ID NO: 42960 - protein, 32 aa, Artificial Sequence
  GFR-binding peptide
  MOD_RES (14), (15), (16), (17), (18): Xaa is A or G
  MOD_RES (19), (20), (21), (22): Xaa is A or G or is absent
APVKTSPISMLYIXXXXXXXXXYKQYEMIVEE

SEQ ID NO: 42961 - protein, 39 aa, Artificial Sequence; identical to SEQ ID NO: 27996
  GFR-binding peptide
  MOD_RES (5), (6): Xaa is C or S
  MOD_RES (20), (21), (22), (23), (24): Xaa is A or G
  MOD_RES (25), (26), (27), (28): Xaa is A or G or is absent

SEQ ID NO: 42962 - protein, 37 aa, Artificial Sequence; identical to SEQ ID NO: 30904
  GFR-binding peptide
  MOD_RES (6), (7): Xaa is C or S

SEQ ID NO: 42963 - protein, 33 aa, Artificial Sequence
  GFR-binding peptide
  MOD_RES (14), (15), (16), (17), (18): Xaa is A or G
  MOD_RES (19), (20), (21), (22): Xaa is A or G or is absent
TPTKMSPISMLYIXXXXXXXXXYKQYEGMVVDR

SEQ ID NO: 42964 - protein, 40 aa, Artificial Sequence; identical to SEQ ID NO: 28989
  GFR-binding peptide
  MOD_RES (5), (6), (40): Xaa is C or S
  MOD_RES (20), (21), (22), (23), (24): Xaa is A or G
  MOD_RES (25), (26), (27), (28): Xaa is A or G or is absent

SEQ ID NO: 42965 - protein, 41 aa, Artificial Sequence; identical to SEQ ID NO: 29923
  GFR-binding peptide
  MOD_RES (6), (7), (41): Xaa is C or S
  MOD_RES (21), (22), (23), (24), (25): Xaa is A or G
  MOD_RES (26), (27), (28), (29): Xaa is A or G or is absent

SEQ ID NO: 42966 - protein, 35 aa, Artificial Sequence
  GFR-binding peptide
  MOD_RES (3), (4), (35): Xaa is C or S
STXXAPVKTSPISMLYIDNGRVLLYKQYEMIVEEX

SEQ ID NO: 42967 - protein, 39 aa, Artificial Sequence; identical to SEQ ID NO: 27999
  GFR-binding peptide
  MOD_RES (2), (3), (37), (39): Xaa is C or S
  MOD_RES (17), (18), (19), (20), (21): Xaa is A or G
  MOD_RES (22), (23), (24), (25): Xaa is A or G or is absent

SEQ ID NO: 42968 - protein, 38 aa, Artificial Sequence; identical to SEQ ID NO: 28992
  GFR-binding peptide
  MOD_RES (1), (2), (36), (38): Xaa is C or S
  MOD_RES (16), (17), (18), (19), (20): Xaa is A or G
  MOD_RES (21), (22), (23), (24): Xaa is A or G or is absent

SEQ ID NO: 42969 - protein, 38 aa, Artificial Sequence
  GFR-binding peptide
  MOD_RES (5), (6): Xaa is C or S
  MOD_RES (20), (21), (22), (23), (24): Xaa is A or G
  MOD_RES (25), (26), (27), (28): Xaa is A or G or is absent
VPSTXXAPVKTSPISMLYIXXXXXXXXXYKQYEMIVEE

SEQ ID NO: 42970 - protein, 32 aa, Artificial Sequence; identical to SEQ ID NO: 28993
  GFR-binding peptide
  MOD_RES (14), (15), (16), (17), (18): Xaa is A or G
  MOD_RES (19), (20), (21), (22): Xaa is A or G or is absent

SEQ ID NO: 42971 - protein, 41 aa, Artificial Sequence
  GFR-binding peptide
  MOD_RES (3), (4), (38), (40): Xaa is C or S
  MOD_RES (18), (19), (20), (21), (22): Xaa is A or G
  MOD_RES (23), (24), (25), (26): Xaa is A or G or is absent
GPXXTPTKMSPISMLYIXXXXXXXXXYKQYEGMVVDRXGXS

SEQ ID NO: 42972 - protein, 35 aa, Artificial Sequence
  GFR-binding peptide
  MOD_RES (2), (3): Xaa is C or S
  MOD_RES (17), (18), (19), (20), (21): Xaa is A or G
  MOD_RES (22), (23), (24), (25): Xaa is A or G or is absent
PXXTPTKMSPISMLYIXXXXXXXXXYKQYEGMVVD

SEQ ID NO: 42973 - protein, 33 aa, Artificial Sequence; identical to SEQ ID NO: 29930
  GFR-binding peptide
  MOD_RES (1), (2): Xaa is C or S

SEQ ID NO: 42974 - protein, 42 aa, Artificial Sequence; identical to SEQ ID NO: 28001
  GFR-binding peptide
  MOD_RES (4), (5), (40), (42): Xaa is C or S
  MOD_RES (19), (20), (21), (22), (23): Xaa is A or G
  MOD_RES (24), (25), (26), (27): Xaa is A or G or is absent

SEQ ID NO: 42975 - protein, 33 aa, Artificial Sequence; identical to SEQ ID NO: 28999
  GFR-binding peptide
  MOD_RES (1), (1): Xaa is C or S
  MOD_RES (15), (16), (17), (18), (19): Xaa is A or G
  MOD_RES (20), (21), (22), (23): Xaa is A or G or is absent

SEQ ID NO: 42976 - protein, 35 aa, Artificial Sequence; identical to SEQ ID NO: 29000
  GFR-binding peptide
  MOD_RES (1), (33), (35): Xaa is C or S

SEQ ID NO: 42977 - protein, 31 aa, Artificial Sequence
  GFR-binding peptide
  MOD_RES (31), (31): Xaa is C or S
APVKTSPISMLYIDNGRVLLYKQYEMIVEEX

SEQ ID NO: 42978 - protein, 33 aa, Artificial Sequence
  GFR-binding peptide
  MOD_RES (33), (33): Xaa is C or S
  MOD_RES (14), (15), (16), (17), (18): Xaa is A or G
  MOD_RES (19), (20), (21), (22): Xaa is A or G or is absent
APVKTSPISMLYIXXXXXXXXXYKQYEMIVEEX

SEQ ID NO: 42979 - protein, 32 aa, Artificial Sequence; identical to SEQ ID NO: 29001
  GFR-binding peptide
  MOD_RES (14), (15), (16), (17), (18): Xaa is A or G
  MOD_RES (19), (20), (21), (22): Xaa is A or G or is absent

SEQ ID NO: 42980 - protein, 33 aa, Artificial Sequence; identical to SEQ ID NO: 29003
  GFR-binding peptide
  MOD_RES (1), (1): Xaa is C or S
  MOD_RES (15), (16), (17), (18), (19): Xaa is A or G
  MOD_RES (20), (21), (22), (23): Xaa is A or G or is absent

SEQ ID NO: 42981 - protein, 37 aa, Artificial Sequence
  GFR-binding peptide
  MOD_RES (3), (4): Xaa is C or S
  MOD_RES (18), (19), (20), (21), (22): Xaa is A or G
  MOD_RES (23), (24), (25), (26): Xaa is A or G or is absent
GPXXTPTKMSPISMLYIXXXXXXXXXYKQYEGMVVDR

SEQ ID NO: 42982 - protein, 37 aa, Artificial Sequence; identical to SEQ ID NO: 28008
  GFR-binding peptide
  MOD_RES (5), (6): Xaa is C or S

SEQ ID NO: 42983 - protein, 39 aa, Artificial Sequence; identical to SEQ ID NO: 29005
  GFR-binding peptide
  MOD_RES (4), (5): Xaa is C or S
  MOD_RES (19), (20), (21), (22), (23): Xaa is A or G
  MOD_RES (24), (25), (26), (27): Xaa is A or G or is absent

SEQ ID NO: 42984 - protein, 39 aa, Artificial Sequence; identical to SEQ ID NO: 30911
  GFR-binding peptide
  MOD_RES (6), (7): Xaa is C or S
  MOD_RES (21), (22), (23), (24), (25): Xaa is A or G
  MOD_RES (26), (27), (28), (29): Xaa is A or G or is absent

SEQ ID NO: 42985 - protein, 40 aa, Artificial Sequence
  GFR-binding peptide
  MOD_RES (2), (3), (37), (39): Xaa is C or S
  MOD_RES (17), (18), (19), (20), (21): Xaa is A or G
  MOD_RES (22), (23), (24), (25): Xaa is A or G or is absent
PXXTPTKMSPISMLYIXXXXXXXXXYKQYEGMVVDRXGXS

SEQ ID NO: 42986 - protein, 39 aa, Artificial Sequence; identical to SEQ ID NO: 29011
  GFR-binding peptide
  MOD_RES (5), (6), (38): Xaa is C or S

SEQ ID NO: 42987 - protein, 33 aa, Artificial Sequence; identical to SEQ ID NO: 29946
  GFR-binding peptide
  MOD_RES (1), (1): Xaa is C or S
  MOD_RES (15), (16), (17), (18), (19): Xaa is A or G
  MOD_RES (20), (21), (22), (23): Xaa is A or G or is absent

SEQ ID NO: 42988 - protein, 31 aa, Artificial Sequence; identical to SEQ ID NO: 28016
  GFR-binding peptide
  MOD_RES (1), (1): Xaa is C or S

SEQ ID NO: 42989 - protein, 40 aa, Artificial Sequence; identical to SEQ ID NO: 28017
  GFR-binding peptide
  MOD_RES (6), (7), (39): Xaa is C or S

SEQ ID NO: 42990 - protein, 41 aa, Artificial Sequence
  GFR-binding peptide
  MOD_RES (6), (7), (40): Xaa is C or S
  MOD_RES (21), (22), (23), (24), (25): Xaa is A or G
  MOD_RES (26), (27), (28), (29): Xaa is A or G or is absent
RVPSTXXAPVKTSPISMLYIXXXXXXXXXYKQYEMIVEEXG

SEQ ID NO: 42991 - protein, 40 aa, Artificial Sequence; identical to SEQ ID NO: 29018
  GFR-binding peptide
  MOD_RES (3), (4), (39): Xaa is C or S
  MOD_RES (18), (19), (20), (21), (22): Xaa is A or G
  MOD_RES (23), (24), (25), (26): Xaa is A or G or is absent

SEQ ID NO: 42992 - protein, 35 aa, Artificial Sequence; identical to SEQ ID NO: 29020
  GFR-binding peptide
  MOD_RES (3), (4): Xaa is C or S

SEQ ID NO: 42993 - protein, 33 aa, Artificial Sequence; identical to SEQ ID NO: 30928
  GFR-binding peptide
  MOD_RES (1), (33): Xaa is C or S

SEQ ID NO: 42994 - protein, 38 aa, Artificial Sequence; identical to SEQ ID NO: 30931
  GFR-binding peptide
  MOD_RES (4), (5), (38): Xaa is C or S

SEQ ID NO: 42995 - protein, 40 aa, Artificial Sequence; identical to SEQ ID NO: 29962
  GFR-binding peptide
  MOD_RES (6), (7): Xaa is C or S
  MOD_RES (21), (22), (23), (24), (25): Xaa is A or G
  MOD_RES (26), (27), (28), (29): Xaa is A or G or is absent

SEQ ID NO: 42996 - protein, 37 aa, Artificial Sequence
  GFR-binding peptide
  MOD_RES (3), (4), (37): Xaa is C or S
  MOD_RES (18), (19), (20), (21), (22): Xaa is A or G
  MOD_RES (23), (24), (25), (26): Xaa is A or G or is absent
STXXAPVKTSPISMLYIXXXXXXXXXYKQYEMIVEEX

SEQ ID NO: 42997 - protein, 38 aa, Artificial Sequence
  GFR-binding peptide
  MOD_RES (5), (6), (38): Xaa is C or S
SAGPXXTPTKMSPISMLYINDKQQIIYKQYEGMVVDRX

SEQ ID NO: 42998 - protein, 37 aa, Artificial Sequence; identical to SEQ ID NO: 29965
  GFR-binding peptide
  MOD_RES (1), (35), (37): Xaa is C or S
  MOD_RES (15), (16), (17), (18), (19): Xaa is A or G
  MOD_RES (20), (21), (22), (23): Xaa is A or G or is absent

SEQ ID NO: 42999 - protein, 42 aa, Artificial Sequence; identical to SEQ ID NO: 30933
  GFR-binding peptide
  MOD_RES (6), (7), (41): Xaa is C or S
  MOD_RES (21), (22), (23), (24), (25): Xaa is A or G
  MOD_RES (26), (27), (28), (29): Xaa is A or G or is absent

SEQ ID NO: 43000 - protein, 42 aa, Artificial Sequence; identical to SEQ ID NO: 28027
  GFR-binding peptide
  MOD_RES (6), (7), (39), (41): Xaa is C or S

SEQ ID NO: 43001 - protein, 41 aa, Artificial Sequence
  GFR-binding peptide
  MOD_RES (4), (5), (38), (40): Xaa is C or S
  MOD_RES (19), (20), (21), (22), (23): Xaa is A or G
  MOD_RES (24), (25), (26), (27): Xaa is A or G or is absent
PSTXXAPVKTSPISMLYIXXXXXXXXXYKQYEMIVEEXGXL

SEQ ID NO: 43002 - protein, 39 aa, Artificial Sequence; identical to SEQ ID NO: 29028
  GFR-binding peptide
  MOD_RES (2), (3), (37), (39): Xaa is C or S
  MOD_RES (17), (18), (19), (20), (21): Xaa is A or G
  MOD_RES (22), (23), (24), (25): Xaa is A or G or is absent

SEQ ID NO: 43003 - protein, 43 aa, Artificial Sequence; identical to SEQ ID NO: 29033
  GFR-binding peptide
  MOD_RES (5), (6), (40), (42): Xaa is C or S
  MOD_RES (20), (21), (22), (23), (24): Xaa is A or G
  MOD_RES (25), (26), (27), (28): Xaa is A or G or is absent

SEQ ID NO: 43004 - protein, 38 aa, Artificial Sequence
  GFR-binding peptide
  MOD_RES (4), (5), (37): Xaa is C or S
AGPXXTPTKMSPISMLYINDKQQIIYKQYEGMVVDRXG

SEQ ID NO: 43005 - protein, 40 aa, Artificial Sequence; identical to SEQ ID NO: 28033
  GFR-binding peptide
  MOD_RES (2), (3), (37), (39): Xaa is C or S
  MOD_RES (17), (18), (19), (20), (21): Xaa is A or G
  MOD_RES (22), (23), (24), (25): Xaa is A or G or is absent

SEQ ID NO: 43006 - protein, 37 aa, Artificial Sequence
  GFR-binding peptide
  MOD_RES (1), (2), (34), (36): Xaa is C or S
XXTPTKMSPISMLYINDKQQIIYKQYEGMVVDRXGXS

SEQ ID NO: 43007 - protein, 40 aa, Artificial Sequence; identical to SEQ ID NO: 28036
  GFR-binding peptide
  MOD_RES (5), (6), (38), (40): Xaa is C or S

SEQ ID NO: 43008 - protein, 41 aa, Artificial Sequence; identical to SEQ ID NO: 29039
  GFR-binding peptide
  MOD_RES (3), (4), (38), (40): Xaa is C or S
  MOD_RES (18), (19), (20), (21), (22): Xaa is A or G
  MOD_RES (23), (24), (25), (26): Xaa is A or G or is absent

SEQ ID NO: 43009 - protein, 36 aa, Artificial Sequence; identical to SEQ ID NO: 30943
  GFR-binding peptide
  MOD_RES (2), (3): Xaa is C or S
  MOD_RES (17), (18), (19), (20), (21): Xaa is A or G
  MOD_RES (22), (23), (24), (25): Xaa is A or G or is absent

SEQ ID NO: 43010 - protein, 37 aa, Artificial Sequence; identical to SEQ ID NO: 28038
  GFR-binding peptide
  MOD_RES (2), (3), (35), (37): Xaa is C or S

SEQ ID NO: 43011 - protein, 44 aa, Artificial Sequence; identical to SEQ ID NO: 29980
  GFR-binding peptide
  MOD_RES (6), (7), (41), (43): Xaa is C or S
  MOD_RES (21), (22), (23), (24), (25): Xaa is A or G
  MOD_RES (26), (27), (28), (29): Xaa is A or G or is absent

SEQ ID NO: 43012 - protein, 39 aa, Artificial Sequence; identical to SEQ ID NO: 29040
  GFR-binding peptide
  MOD_RES (1), (2), (36), (38): Xaa is C or S
  MOD_RES (16), (17), (18), (19), (20): Xaa is A or G
  MOD_RES (21), (22), (23), (24): Xaa is A or G or is absent

SEQ ID NO: 43013 - protein, 39 aa, Artificial Sequence; identical to SEQ ID NO: 28039
  GFR-binding peptide
  MOD_RES (1), (2), (36), (38): Xaa is C or S
  MOD_RES (16), (17), (18), (19), (20): Xaa is A or G
  MOD_RES (21), (22), (23), (24): Xaa is A or G or is absent

SEQ ID NO: 43014 - protein, 33 aa, Artificial Sequence; identical to SEQ ID NO: 30944
  GFR-binding peptide
  MOD_RES (32), (32): Xaa is C or S

SEQ ID NO: 43015 - protein, 43 aa, Artificial Sequence; identical to SEQ ID NO: 30946
  GFR-binding peptide
  MOD_RES (6), (7), (41), (43): Xaa is C or S
  MOD_RES (21), (22), (23), (24), (25): Xaa is A or G
  MOD_RES (26), (27), (28), (29): Xaa is A or G or is absent

SEQ ID NO: 43016 - protein, 40 aa, Artificial Sequence; identical to SEQ ID NO: 29984
  GFR-binding peptide
  MOD_RES (3), (4), (38), (40): Xaa is C or S
  MOD_RES (18), (19), (20), (21), (22): Xaa is A or G
  MOD_RES (23), (24), (25), (26): Xaa is A or G or is absent

SEQ ID NO: 43017 - protein, 40 aa, Artificial Sequence; identical to SEQ ID NO: 29041
  GFR-binding peptide
  MOD_RES (5), (6), (40): Xaa is C or S
  MOD_RES (20), (21), (22), (23), (24): Xaa is A or G
  MOD_RES (25), (26), (27), (28): Xaa is A or G or is absent

SEQ ID NO: 43018 - protein, 35 aa, Artificial Sequence
  GFR-binding peptide
  MOD_RES (1), (35): Xaa is C or S
  MOD_RES (15), (16), (17), (18), (19): Xaa is A or G
  MOD_RES (20), (21), (22), (23): Xaa is A or G or is absent
XTPTKMSPISMLYIXXXXXXXXXYKQYEGMVVDRX

SEQ ID NO: 43019 - protein, 38 aa, Artificial Sequence; identical to SEQ ID NO: 29043
  GFR-binding peptide
  MOD_RES (4), (5), (37): Xaa is C or S

SEQ ID NO: 43020 - protein, 40 aa, Artificial Sequence; identical to SEQ ID NO: 29044
  GFR-binding peptide
  MOD_RES (4), (5), (40): Xaa is C or S
  MOD_RES (19), (20), (21), (22), (23): Xaa is A or G
  MOD_RES (24), (25), (26), (27): Xaa is A or G or is absent

SEQ ID NO: 43021 - protein, 39 aa, Artificial Sequence; identical to SEQ ID NO: 28044
  GFR-binding peptide
  MOD_RES (7), (39): Xaa is C or S

SEQ ID NO: 43022 - protein, 34 aa, Artificial Sequence; identical to SEQ ID NO: 29988
  GFR-binding peptide
  MOD_RES (1), (2), (34): Xaa is C or S

SEQ ID NO: 43023 - protein, 39 aa, Artificial Sequence
  GFR-binding peptide
  MOD_RES (5), (6), (39): Xaa is C or S
  MOD_RES (20), (21), (22), (23), (24): Xaa is A or G
  MOD_RES (25), (26), (27), (28): Xaa is A or G or is absent
VPSTXXAPVKTSPISMLYIXXXXXXXXXYKQYEMIVEEX

SEQ ID NO: 43024 - protein, 39 aa, Artificial Sequence; identical to SEQ ID NO: 28045
  GFR-binding peptide
  MOD_RES (5), (6): Xaa is C or S
  MOD_RES (20), (21), (22), (23), (24): Xaa is A or G
  MOD_RES (25), (26), (27), (28): Xaa is A or G or is absent

SEQ ID NO: 43025 - protein, 36 aa, Artificial Sequence; identical to SEQ ID NO: 29048
  GFR-binding peptide
  MOD_RES (4), (5): Xaa is C or S

SEQ ID NO: 43026 - protein, 34 aa, Artificial Sequence; identical to SEQ ID NO: 30953
  GFR-binding peptide
  MOD_RES (1), (33): Xaa is C or S

SEQ ID NO: 43027 - protein, 42 aa, Artificial Sequence; identical to SEQ ID NO: 29050
  GFR-binding peptide
  MOD_RES (5), (6), (40), (42): Xaa is C or S
  MOD_RES (20), (21), (22), (23), (24): Xaa is A or G
  MOD_RES (25), (26), (27), (28): Xaa is A or G or is absent

SEQ ID NO: 43028 - protein, 36 aa, Artificial Sequence; identical to SEQ ID NO: 30956
  GFR-binding peptide
  MOD_RES (2), (3): Xaa is C or S
  MOD_RES (17), (18), (19), (20), (21): Xaa is A or G
  MOD_RES (22), (23), (24), (25): Xaa is A or G or is absent

SEQ ID NO: 43029 - protein, 33 aa, Artificial Sequence; identical to SEQ ID NO: 29996
  GFR-binding peptide
  MOD_RES (2), (3): Xaa is C or S

SEQ ID NO: 43030 - protein, 39 aa, Artificial Sequence; identical to SEQ ID NO: 29997
  GFR-binding peptide
  MOD_RES (3), (4), (38): Xaa is C or S
  MOD_RES (18), (19), (20), (21), (22): Xaa is A or G
  MOD_RES (23), (24), (25), (26): Xaa is A or G or is absent

SEQ ID NO: 43031 - protein, 38 aa, Artificial Sequence; identical to SEQ ID NO: 28052
  GFR-binding peptide
  MOD_RES (2), (36), (38): Xaa is C or S
  MOD_RES (16), (17), (18), (19), (20): Xaa is A or G
  MOD_RES (21), (22), (23), (24): Xaa is A or G or is absent

SEQ ID NO: 43032 - protein, 37 aa, Artificial Sequence; identical to SEQ ID NO: 29055
  GFR-binding peptide
  MOD_RES (4), (5), (37): Xaa is C or S

SEQ ID NO: 43033 - protein, 37 aa, Artificial Sequence; identical to SEQ ID NO: 30000
  GFR-binding peptide
  MOD_RES (2), (3), (35), (37): Xaa is C or S

SEQ ID NO: 43034 - protein, 37 aa, Artificial Sequence; identical to SEQ ID NO: 29061
  GFR-binding peptide
  MOD_RES (4), (5): Xaa is C or S
  MOD_RES (19), (20), (21), (22), (23): Xaa is A or G
  MOD_RES (24), (25), (26), (27): Xaa is A or G or is absent

SEQ ID NO: 43035 - protein, 36 aa, Artificial Sequence; identical to SEQ ID NO: 28056
  GFR-binding peptide
  MOD_RES (1), (33), (35): Xaa is C or S

SEQ ID NO: 43036 - protein, 39 aa, Artificial Sequence; identical to SEQ ID NO: 29065
  GFR-binding peptide
  MOD_RES (6), (7): Xaa is C or S
  MOD_RES (21), (22), (23), (24), (25): Xaa is A or G
  MOD_RES (26), (27), (28), (29): Xaa is A or G or is absent

SEQ ID NO: 43037 - protein, 32 aa, Artificial Sequence; identical to SEQ ID NO: 28060
  GFR-binding peptide
  MOD_RES (1), (1): Xaa is C or S

SEQ ID NO: 43038 - protein, 36 aa, Artificial Sequence; identical to SEQ ID NO: 30967
  GFR-binding peptide
  MOD_RES (1), (2), (36): Xaa is C or S
  MOD_RES (16), (17), (18), (19), (20): Xaa is A or G
  MOD_RES (21), (22), (23), (24): Xaa is A or G or is absent

SEQ ID NO: 43039 - protein, 37 aa, Artificial Sequence; identical to SEQ ID NO: 30968
  GFR-binding peptide
  MOD_RES (4), (5): Xaa is C or S
  MOD_RES (19), (20), (21), (22), (23): Xaa is A or G
  MOD_RES (24), (25), (26), (27): Xaa is A or G or is absent

SEQ ID NO: 43040 - protein, 37 aa, Artificial Sequence
  GFR-binding peptide
  MOD_RES (6), (7): Xaa is C or S
HVPKPXXAPTKLSPISVLYIDDSSNVIYKQYENMVVR

SEQ ID NO: 43041 - protein, 40 aa, Artificial Sequence
  GFR-binding peptide
  MOD_RES (3), (4), (37), (39): Xaa is C or S
  MOD_RES (18), (19), (20), (21), (22): Xaa is A or G
  MOD_RES (23), (24), (25), (26): Xaa is A or G or is absent
STXXAPVKTSPISMLYIXXXXXXXXXYKQYEMIVEEXGXL

SEQ ID NO: 43042 - protein, 35 aa, Artificial Sequence
  GFR-binding peptide
  MOD_RES (2), (3): Xaa is C or S
  MOD_RES (17), (18), (19), (20), (21): Xaa is A or G
  MOD_RES (22), (23), (24), (25): Xaa is A or G or is absent
TXXAPVKTSPISMLYIXXXXXXXXXYKQYEMIVEE

SEQ ID NO: 43043 - protein, 32 aa, Artificial Sequence; identical to SEQ ID NO: 28069
  GFR-binding peptide
  MOD_RES (1), (1): Xaa is C or S

SEQ ID NO: 43044 - protein, 43 aa, Artificial Sequence; identical to SEQ ID NO: 30013
  GFR-binding peptide
  MOD_RES (5), (6), (40), (42): Xaa is C or S
  MOD_RES (20), (21), (22), (23), (24): Xaa is A or G
  MOD_RES (25), (26), (27), (28): Xaa is A or G or is absent

SEQ ID NO: 43045 - protein, 40 aa, Artificial Sequence
  GFR-binding peptide
  MOD_RES (6), (7): Xaa is C or S
  MOD_RES (21), (22), (23), (24), (25): Xaa is A or G
  MOD_RES (26), (27), (28), (29): Xaa is A or G or is absent
HVPKPXXAPTKLSPISVLYIXXXXXXXXXYKQYENMVVRS

SEQ ID NO: 43046 - protein, 41 aa, Artificial Sequence
  GFR-binding peptide
  MOD_RES (5), (6), (40): Xaa is C or S
  MOD_RES (20), (21), (22), (23), (24): Xaa is A or G
  MOD_RES (25), (26), (27), (28): Xaa is A or G or is absent
SAGPXXTPTKMSPISMLYIXXXXXXXXXYKQYEGMVVDRXG

SEQ ID NO: 43047 - protein, 33 aa, Artificial Sequence; identical to SEQ ID NO: 28077
  GFR-binding peptide
  MOD_RES (1), (2): Xaa is C or S

SEQ ID NO: 43048 - protein, 37 aa, Artificial Sequence; identical to SEQ ID NO: 28078
  GFR-binding peptide
  MOD_RES (4), (5), (37): Xaa is C or S

SEQ ID NO: 43049 - protein, 39 aa, Artificial Sequence
  GFR-binding peptide
  MOD_RES (6), (7), (39): Xaa is C or S
GSAGPXXTPTKMSPISMLYINDKQQIIYKQYEGMVVDRX

SEQ ID NO: 43050 - protein, 39 aa, Artificial Sequence; identical to SEQ ID NO: 28079
  GFR-binding peptide
  MOD_RES (4), (5), (39): Xaa is C or S
  MOD_RES (19), (20), (21), (22), (23): Xaa is A or G
  MOD_RES (24), (25), (26), (27): Xaa is A or G or is absent

SEQ ID NO: 43051 - protein, 37 aa, Artificial Sequence; identical to SEQ ID NO: 28083
  GFR-binding peptide
  MOD_RES (1), (2), (34), (36): Xaa is C or S

SEQ ID NO: 43052 - protein, 34 aa, Artificial Sequence; identical to SEQ ID NO: 30988
  GFR-binding peptide
  MOD_RES (1), (1): Xaa is C or S
  MOD_RES (15), (16), (17), (18), (19): Xaa is A or G
  MOD_RES (20), (21), (22), (23): Xaa is A or G or is absent

SEQ ID NO: 43053 - protein, 36 aa, Artificial Sequence; identical to SEQ ID NO: 30017
  GFR-binding peptide
  MOD_RES (4), (5): Xaa is C or S

SEQ ID NO: 43054 - protein, 34 aa, Artificial Sequence; identical to SEQ ID NO: 29076
  GFR-binding peptide
  MOD_RES (1), (1): Xaa is C or S
  MOD_RES (15), (16), (17), (18), (19): Xaa is A or G
  MOD_RES (20), (21), (22), (23): Xaa is A or G or is absent

SEQ ID NO: 43055 - protein, 40 aa, Artificial Sequence; identical to SEQ ID NO: 30993
  GFR-binding peptide
  MOD_RES (3), (4), (38), (40): Xaa is C or S
  MOD_RES (18), (19), (20), (21), (22): Xaa is A or G
  MOD_RES (23), (24), (25), (26): Xaa is A or G or is absent

SEQ ID NO: 43056 - protein, 34 aa, Artificial Sequence; identical to SEQ ID NO: 30994
  GFR-binding peptide
  MOD_RES (1), (34): Xaa is C or S

SEQ ID NO: 43057 - protein, 36 aa, Artificial Sequence; identical to SEQ ID NO: 28089
  GFR-binding peptide
  MOD_RES (2), (3), (35): Xaa is C or S

SEQ ID NO: 43058 - protein, 32 aa, Artificial Sequence; identical to SEQ ID NO: 30025
  GFR-binding peptide
  MOD_RES (1), (1): Xaa is C or S

SEQ ID NO: 43059 - protein, 42 aa, Artificial Sequence; identical to SEQ ID NO: 28094
  GFR-binding peptide
  MOD_RES (4), (5), (39), (41): Xaa is C or S
  MOD_RES (19), (20), (21), (22), (23): Xaa is A or G
  MOD_RES (24), (25), (26), (27): Xaa is A or G or is absent

SEQ ID NO: 43060 - protein, 41 aa, Artificial Sequence; identical to SEQ ID NO: 30026
  GFR-binding peptide
  MOD_RES (5), (39), (41): Xaa is C or S
  MOD_RES (19), (20), (21), (22), (23): Xaa is A or G
  MOD_RES (24), (25), (26), (27): Xaa is A or G or is absent

SEQ ID NO: 43061 - protein, 33 aa, Artificial Sequence; identical to SEQ ID NO: 30999
  GFR-binding peptide
  MOD_RES (2), (3): Xaa is C or S

SEQ ID NO: 43062 - protein, 40 aa, Artificial Sequence; identical to SEQ ID NO: 29082
  GFR-binding peptide
  MOD_RES (3), (4), (38), (40): Xaa is C or S
  MOD_RES (18), (19), (20), (21), (22): Xaa is A or G
  MOD_RES (23), (24), (25), (26): Xaa is A or G or is absent

SEQ ID NO: 43063 - protein, 32 aa, Artificial Sequence; identical to SEQ ID NO: 31003
  GFR-binding peptide
  MOD_RES (32), (32): Xaa is C or S

SEQ ID NO: 43064 - protein, 38 aa, Artificial Sequence; identical to SEQ ID NO: 28100
  GFR-binding peptide
  MOD_RES (3), (4), (37): Xaa is C or S

SEQ ID NO: 43065 - protein, 38 aa, Artificial Sequence; identical to SEQ ID NO: 31004
  GFR-binding peptide
  MOD_RES (5), (6), (38): Xaa is C or S

SEQ ID NO: 43066 - protein, 32 aa, Artificial Sequence; identical to SEQ ID NO: 30033
  GFR-binding peptide
  MOD_RES (32), (32): Xaa is C or S

SEQ ID NO: 43067 - protein, 40 aa, Artificial Sequence; identical to SEQ ID NO: 31011
  GFR-binding peptide
  MOD_RES (3), (4), (38), (40): Xaa is C or S
  MOD_RES (18), (19), (20), (21), (22): Xaa is A or G
  MOD_RES (23), (24), (25), (26): Xaa is A or G or is absent

SEQ ID NO: 43068 - protein, 41 aa, Artificial Sequence; identical to SEQ ID NO: 30036
  GFR-binding peptide
  MOD_RES (6), (7), (39), (41): Xaa is C or S

SEQ ID NO: 43069 - protein, 33 aa, Artificial Sequence; identical to SEQ ID NO: 31013
  GFR-binding peptide
  MOD_RES (2), (2): Xaa is C or S

SEQ ID NO: 43070 - protein, 33 aa, Artificial Sequence; identical to SEQ ID NO: 31015
  GFR-binding peptide
  MOD_RES (1), (1): Xaa is C or S
  MOD_RES (15), (16), (17), (18), (19): Xaa is A or G
  MOD_RES (20), (21), (22), (23): Xaa is A or G or is absent

SEQ ID NO: 43071 - protein, 38 aa, Artificial Sequence; identical to SEQ ID NO: 31017
  GFR-binding peptide
  MOD_RES (1), (35), (37): Xaa is C or S
  MOD_RES (15), (16), (17), (18), (19): Xaa is A or G
  MOD_RES (20), (21), (22), (23): Xaa is A or G or is absent

SEQ ID NO: 43072 - protein, 35 aa, Artificial Sequence; identical to SEQ ID NO: 28108
  GFR-binding peptide
  MOD_RES (32), (34): Xaa is C or S

SEQ ID NO: 43073 - protein, 37 aa, Artificial Sequence; identical to SEQ ID NO: 29094
  GFR-binding peptide
  MOD_RES (34), (36): Xaa is C or S
  MOD_RES (14), (15), (16), (17), (18): Xaa is A or G
  MOD_RES (19), (20), (21), (22): Xaa is A or G or is absent

SEQ ID NO: 43074 - protein, 34 aa, Artificial Sequence; identical to SEQ ID NO: 30046
  GFR-binding peptide
  MOD_RES (1), (33): Xaa is C or S

SEQ ID NO: 43075 - protein, 40 aa, Artificial Sequence
  GFR-binding peptide
  MOD_RES (6), (7): Xaa is C or S
  MOD_RES (21), (22), (23), (24), (25): Xaa is A or G
  MOD_RES (26), (27), (28), (29): Xaa is A or G or is absent
GSAGPXXTPTKMSPISMLYIXXXXXXXXXYKQYEGMVVDR

SEQ ID NO: 43076 - protein, 32 aa, Artificial Sequence
  GFR-binding peptide
  MOD_RES (1), (1): Xaa is C or S
XTPTKMSPISMLYINDKQQIIYKQYEGMVVDR

SEQ ID NO: 43077 - protein, 33 aa, Artificial Sequence; identical to SEQ ID NO: 31030
  GFR-binding peptide
  MOD_RES (1), (2): Xaa is C or S

SEQ ID NO: 43078 - protein, 38 aa, Artificial Sequence; identical to SEQ ID NO: 30048
  GFR-binding peptide
  MOD_RES (4), (5): Xaa is C or S
  MOD_RES (19), (20), (21), (22), (23): Xaa is A or G
  MOD_RES (24), (25), (26), (27): Xaa is A or G or is absent

SEQ ID NO: 43079 - protein, 40 aa, Artificial Sequence; identical to SEQ ID NO: 28116
  GFR-binding peptide
  MOD_RES (6), (7), (39): Xaa is C or S

SEQ ID NO: 43080 - protein, 36 aa, Artificial Sequence; identical to SEQ ID NO: 28117
  GFR-binding peptide
  MOD_RES (1), (2), (36): Xaa is C or S
  MOD_RES (16), (17), (18), (19), (20): Xaa is A or G
  MOD_RES (21), (22), (23), (24): Xaa is A or G or is absent

SEQ ID NO: 43081 - protein, 39 aa, Artificial Sequence; identical to SEQ ID NO: 30051
  GFR-binding peptide
  MOD_RES (4), (5), (37), (39): Xaa is C or S

SEQ ID NO: 43082 - protein, 38 aa, Artificial Sequence; identical to SEQ ID NO: 30054
  GFR-binding peptide
  MOD_RES (5), (5): Xaa is C or S
  MOD_RES (19), (20), (21), (22), (23): Xaa is A or G
  MOD_RES (24), (25), (26), (27): Xaa is A or G or is absent

SEQ ID NO: 43083 - protein, 38 aa, Artificial Sequence; identical to SEQ ID NO: 28119
  GFR-binding peptide
  MOD_RES (2), (3), (35), (37): Xaa is C or S

SEQ ID NO: 43084 - protein, 34 aa, Artificial Sequence; identical to SEQ ID NO: 29102
  GFR-binding peptide
  MOD_RES (1), (2): Xaa is C or S
  MOD_RES (16), (17), (18), (19), (20): Xaa is A or G
  MOD_RES (21), (22), (23), (24): Xaa is A or G or is absent

SEQ ID NO: 43085 - protein, 36 aa, Artificial Sequence; identical to SEQ ID NO: 30055
  GFR-binding peptide
  MOD_RES (1), (33), (35): Xaa is C or S

SEQ ID NO: 43086 - protein, 34 aa, Artificial Sequence; identical to SEQ ID NO: 30057
  GFR-binding peptide
  MOD_RES (1), (33): Xaa is C or S

SEQ ID NO: 43087 - protein, 38 aa, Artificial Sequence; identical to SEQ ID NO: 28128
  GFR-binding peptide
  MOD_RES (6), (7): Xaa is C or S

SEQ ID NO: 43088 - protein, 43 aa, Artificial Sequence; identical to SEQ ID NO: 31038
  GFR-binding peptide
  MOD_RES (7), (41), (43): Xaa is C or S
  MOD_RES (21), (22), (23), (24), (25): Xaa is A or G
  MOD_RES (26), (27), (28), (29): Xaa is A or G or is absent

SEQ ID NO: 43089 - protein, 39 aa, Artificial Sequence; identical to SEQ ID NO: 29108
  GFR-binding peptide
  MOD_RES (4), (5), (39): Xaa is C or S
  MOD_RES (19), (20), (21), (22), (23): Xaa is A or G
  MOD_RES (24), (25), (26), (27): Xaa is A or G or is absent

SEQ ID NO: 43090 - protein, 30 aa, Artificial Sequence; identical to SEQ ID NO: 30059
  GFR-binding peptide

SEQ ID NO: 43091 - protein, 40 aa, Artificial Sequence; identical to SEQ ID NO: 29109
  GFR-binding peptide
  MOD_RES (3), (4), (37), (39): Xaa is C or S

SEQ ID NO: 43092 - protein, 37 aa, Artificial Sequence; identical to SEQ ID NO: 31042
  GFR-binding peptide
  MOD_RES (4), (36): Xaa is C or S

SEQ ID NO: 43093 - protein, 37 aa, Artificial Sequence; identical to SEQ ID NO: 28130
  GFR-binding peptide
  MOD_RES (1), (2), (36): Xaa is C or S
  MOD_RES (16), (17), (18), (19), (20): Xaa is A or G
  MOD_RES (21), (22), (23), (24): Xaa is A or G or is absent

SEQ ID NO: 43094 - protein, 40 aa, Artificial Sequence; identical to SEQ ID NO: 28132
  GFR-binding peptide
  MOD_RES (4), (5), (39): Xaa is C or S
  MOD_RES (19), (20), (21), (22), (23): Xaa is A or G
  MOD_RES (24), (25), (26), (27): Xaa is A or G or is absent

SEQ ID NO: 43095 - protein, 36 aa, Artificial Sequence; identical to SEQ ID NO: 31046
  GFR-binding peptide
  MOD_RES (2), (3), (35): Xaa is C or S

SEQ ID NO: 43096 - protein, 32 aa, Artificial Sequence; identical to SEQ ID NO: 30064
  GFR-binding peptide
  MOD_RES (2), (2): Xaa is C or S

SEQ ID NO: 43097 - protein, 43 aa, Artificial Sequence
  GFR-binding peptide
  MOD_RES (6), (7), (41), (43): Xaa is C or S
  MOD_RES (21), (22), (23), (24), (25): Xaa is A or G
  MOD_RES (26), (27), (28), (29): Xaa is A or G or is absent
HVPKPXXAPTKLSPISVLYIXXXXXXXXXYKQYENMVVRSXGX

SEQ ID NO: 43098 - protein, 36 aa, Artificial Sequence; identical to SEQ ID NO: 29117
  GFR-binding peptide
  MOD_RES (1), (34), (36): Xaa is C or S

SEQ ID NO: 43099 - protein, 41 aa, Artificial Sequence; identical to SEQ ID NO: 31052
  GFR-binding peptide
  MOD_RES (6), (7): Xaa is C or S
  MOD_RES (21), (22), (23), (24), (25): Xaa is A or G
  MOD_RES (26), (27), (28), (29): Xaa is A or G or is absent

SEQ ID NO: 43100 - protein, 35 aa, Artificial Sequence; identical to SEQ ID NO: 31053
  GFR-binding peptide
  MOD_RES (1), (35): Xaa is C or S
  MOD_RES (15), (16), (17), (18), (19): Xaa is A or G
  MOD_RES (20), (21), (22), (23): Xaa is A or G or is absent

SEQ ID NO: 43101 - protein, 39 aa, Artificial Sequence; identical to SEQ ID NO: 29121
  GFR-binding peptide
  MOD_RES (2), (36), (38): Xaa is C or S
  MOD_RES (16), (17), (18), (19), (20): Xaa is A or G
  MOD_RES (21), (22), (23), (24): Xaa is A or G or is absent

SEQ ID NO: 43102 - protein, 38 aa, Artificial Sequence; identical to SEQ ID NO: 30072
  GFR-binding peptide
  MOD_RES (3), (4), (38): Xaa is C or S
  MOD_RES (18), (19), (20), (21), (22): Xaa is A or G
  MOD_RES (23), (24), (25), (26): Xaa is A or G or is absent

SEQ ID NO: 43103 - protein, 36 aa, Artificial Sequence; identical to SEQ ID NO: 31056
  GFR-binding peptide
  MOD_RES (35), (35): Xaa is C or S
  MOD_RES (14), (15), (16), (17), (18): Xaa is A or G
  MOD_RES (19), (20), (21), (22): Xaa is A or G or is absent

SEQ ID NO: 43104 - protein, 36 aa, Artificial Sequence; identical to SEQ ID NO: 31057
  GFR-binding peptide
  MOD_RES (4), (36): Xaa is C or S

SEQ ID NO: 43105 - protein, 39 aa, Artificial Sequence; identical to SEQ ID NO: 31058
  GFR-binding peptide
  MOD_RES (4), (5), (37), (39): Xaa is C or S

SEQ ID NO: 43106 - protein, 38 aa, Artificial Sequence
  GFR-binding peptide
  MOD_RES (2), (3), (37): Xaa is C or S
  MOD_RES (17), (18), (19), (20), (21): Xaa is A or G
  MOD_RES (22), (23), (24), (25): Xaa is A or G or is absent
PXXTPTKMSPISMLYIXXXXXXXXXYKQYEGMVVDRXG

SEQ ID NO: 43107 - protein, 35 aa, Artificial Sequence; identical to SEQ ID NO: 28148
  GFR-binding peptide
  MOD_RES (34), (34): Xaa is C or S
  MOD_RES (14), (15), (16), (17), (18): Xaa is A or G
  MOD_RES (19), (20), (21), (22): Xaa is A or G or is absent

SEQ ID NO: 43108 - protein, 39 aa, Artificial Sequence; identical to SEQ ID NO: 31060
  GFR-binding peptide
  MOD_RES (6), (7), (39): Xaa is C or S

SEQ ID NO: 43109 - protein, 38 aa, Artificial Sequence; identical to SEQ ID NO: 28151
  GFR-binding peptide
  MOD_RES (2), (3), (35), (37): Xaa is C or S

SEQ ID NO: 43110 - protein, 33 aa, Artificial Sequence
  GFR-binding peptide
  MOD_RES (1), (32): Xaa is C or S
XAPVKTSPISMLYIDNGRVLLYKQYEMIVEEXG

SEQ ID NO: 43111 - protein, 34 aa, Artificial Sequence
  GFR-binding peptide
  MOD_RES (34), (34): Xaa is C or S
  MOD_RES (14), (15), (16), (17), (18): Xaa is A or G
  MOD_RES (19), (20), (21), (22): Xaa is A or G or is absent
TPTKMSPISMLYIXXXXXXXXXYKQYEGMVVDRX

SEQ ID NO: 43112 - protein, 33 aa, Artificial Sequence; identical to SEQ ID NO: 30084
  GFR-binding peptide
  MOD_RES (1), (1): Xaa is C or S
  MOD_RES (15), (16), (17), (18), (19): Xaa is A or G
  MOD_RES (20), (21), (22), (23): Xaa is A or G or is absent

SEQ ID NO: 43113 - protein, 34 aa, Artificial Sequence; identical to SEQ ID NO: 29134
  GFR-binding peptide
  MOD_RES (3), (3): Xaa is C or S

SEQ ID NO: 43114 - protein, 38 aa, Artificial Sequence
  GFR-binding peptide
  MOD_RES (1), (2), (36), (38): Xaa is C or S
  MOD_RES (16), (17), (18), (19), (20): Xaa is A or G
  MOD_RES (21), (22), (23), (24): Xaa is A or G or is absent
XXTPTKMSPISMLYIXXXXXXXXXYKQYEGMVVDRXGX

SEQ ID NO: 43115 - protein, 36 aa, Artificial Sequence; identical to SEQ ID NO: 30087
  GFR-binding peptide
  MOD_RES (2), (36): Xaa is C or S
  MOD_RES (16), (17), (18), (19), (20): Xaa is A or G
  MOD_RES (21), (22), (23), (24): Xaa is A or G or is absent

SEQ ID NO: 43116 - protein, 45 aa, Artificial Sequence; identical to SEQ ID NO: 28154
  GFR-binding peptide
  MOD_RES (6), (7), (42), (44): Xaa is C or S
  MOD_RES (21), (22), (23), (24), (25): Xaa is A or G
  MOD_RES (26), (27), (28), (29): Xaa is A or G or is absent

SEQ ID NO: 43117 - protein, 40 aa, Artificial Sequence; identical to SEQ ID NO: 28156
  GFR-binding peptide
  MOD_RES (5), (6), (39): Xaa is C or S

SEQ ID NO: 43118 - protein, 41 aa, Artificial Sequence; identical to SEQ ID NO: 28158
  GFR-binding peptide
  MOD_RES (4), (5), (39), (41): Xaa is C or S
  MOD_RES (19), (20), (21), (22), (23): Xaa is A or G
  MOD_RES (24), (25), (26), (27): Xaa is A or G or is absent

SEQ ID NO: 43119 - protein, 34 aa, Artificial Sequence; identical to SEQ ID NO: 30090
  GFR-binding peptide
  MOD_RES (1), (33): Xaa is C or S

SEQ ID NO: 43120 - protein, 35 aa, Artificial Sequence; identical to SEQ ID NO: 31072
  GFR-binding peptide
  MOD_RES (2), (2): Xaa is C or S
  MOD_RES (16), (17), (18), (19), (20): Xaa is A or G
  MOD_RES (21), (22), (23), (24): Xaa is A or G or is absent

SEQ ID NO: 43121 - protein, 35 aa, Artificial Sequence; identical to SEQ ID NO: 31073
  GFR-binding peptide
  MOD_RES (33), (35): Xaa is C or S

SEQ ID NO: 43122 - protein, 35 aa, Artificial Sequence; identical to SEQ ID NO: 29138
  GFR-binding peptide
  MOD_RES (4), (5): Xaa is C or S

SEQ ID NO: 43123 - protein, 42 aa, Artificial Sequence; identical to SEQ ID NO: 30094
  GFR-binding peptide
  MOD_RES (6), (7), (41): Xaa is C or S
  MOD_RES (21), (22), (23), (24), (25): Xaa is A or G
  MOD_RES (26), (27), (28), (29): Xaa is A or G or is absent

SEQ ID NO: 43124 - protein, 40 aa, Artificial Sequence; identical to SEQ ID NO: 30095
  GFR-binding peptide
  MOD_RES (5), (6), (40): Xaa is C or S
  MOD_RES (20), (21), (22), (23), (24): Xaa is A or G
  MOD_RES (25), (26), (27), (28): Xaa is A or G or is absent

SEQ ID NO: 43125 - protein, 38 aa, Artificial Sequence; identical to SEQ ID NO: 30096
  GFR-binding peptide
  MOD_RES (4), (5): Xaa is C or S
  MOD_RES (19), (20), (21), (22), (23): Xaa is A or G
  MOD_RES (24), (25), (26), (27): Xaa is A or G or is absent

SEQ ID NO: 43126 - protein, 34 aa, Artificial Sequence; identical to SEQ ID NO: 31076
  GFR-binding peptide
  MOD_RES (34), (34): Xaa is C or S
  MOD_RES (14), (15), (16), (17), (18): Xaa is A or G
  MOD_RES (19), (20), (21), (22): Xaa is A or G or is absent

SEQ ID NO: 43127 - protein, 42 aa, Artificial Sequence; identical to SEQ ID NO: 30099
  GFR-binding peptide
  MOD_RES (6), (7), (39), (41): Xaa is C or S

SEQ ID NO: 43128 - protein, 38 aa, Artificial Sequence; identical to SEQ ID NO: 28161
  GFR-binding peptide
  MOD_RES (4), (5), (37): Xaa is C or S

SEQ ID NO: 43129 - protein, 39 aa, Artificial Sequence; identical to SEQ ID NO: 31077
  GFR-binding peptide
  MOD_RES (6), (7), (39): Xaa is C or S

SEQ ID NO: 43130 - protein, 33 aa, Artificial Sequence; identical to SEQ ID NO: 30101
  GFR-binding peptide
  MOD_RES (2), (3): Xaa is C or S

SEQ ID NO: 43131 - protein, 39 aa, Artificial Sequence; identical to SEQ ID NO: 31078
  GFR-binding peptide
  MOD_RES (2), (3), (37), (39): Xaa is C or S
  MOD_RES (17), (18), (19), (20), (21): Xaa is A or G
  MOD_RES (22), (23), (24), (25): Xaa is A or G or is absent

SEQ ID NO: 43132 - protein, 36 aa, Artificial Sequence; identical to SEQ ID NO: 31079
  GFR-binding peptide
  MOD_RES (2), (3), (35): Xaa is C or S

SEQ ID NO: 43133 - protein, 38 aa, Artificial Sequence
  GFR-binding peptide
  MOD_RES (6), (7): Xaa is C or S
GSAGPXXTPTKMSPISMLYINDKQQIIYKQYEGMVVDR

SEQ ID NO: 43134 - protein, 35 aa, Artificial Sequence; identical to SEQ ID NO: 30106
  GFR-binding peptide
  MOD_RES (4), (5): Xaa is C or S

SEQ ID NO: 43135 - protein, 35 aa, Artificial Sequence
  GFR-binding peptide
  MOD_RES (34), (34): Xaa is C or S
  MOD_RES (14), (15), (16), (17), (18): Xaa is A or G
  MOD_RES (19), (20), (21), (22): Xaa is A or G or is absent
TPTKMSPISMLYIXXXXXXXXXYKQYEGMVVDRXG

SEQ ID NO: 43136 - protein, 44 aa, Artificial Sequence; identical to SEQ ID NO: 29149
  GFR-binding peptide
  MOD_RES (6), (7), (41), (43): Xaa is C or S
  MOD_RES (21), (22), (23), (24), (25): Xaa is A or G
  MOD_RES (26), (27), (28), (29): Xaa is A or G or is absent

SEQ ID NO: 43137 - protein, 39 aa, Artificial Sequence; identical to SEQ ID NO: 30109
  GFR-binding peptide
  MOD_RES (1), (2), (36), (38): Xaa is C or S
  MOD_RES (16), (17), (18), (19), (20): Xaa is A or G
  MOD_RES (21), (22), (23), (24): Xaa is A or G or is absent

SEQ ID NO: 43138 - protein, 44 aa, Artificial Sequence; identical to SEQ ID NO: 29150
  GFR-binding peptide
  MOD_RES (6), (7), (41), (43): Xaa is C or S
  MOD_RES (21), (22), (23), (24), (25): Xaa is A or G
  MOD_RES (26), (27), (28), (29): Xaa is A or G or is absent

SEQ ID NO: 43139 - protein, 37 aa, Artificial Sequence; identical to SEQ ID NO: 28165
  GFR-binding peptide
  MOD_RES (34), (36): Xaa is C or S
  MOD_RES (14), (15), (16), (17), (18): Xaa is A or G
  MOD_RES (19), (20), (21), (22): Xaa is A or G or is absent

SEQ ID NO: 43140 - protein, 37 aa, Artificial Sequence; identical to SEQ ID NO: 30112
  GFR-binding peptide
  MOD_RES (1), (2), (36): Xaa is C or S
  MOD_RES (16), (17), (18), (19), (20): Xaa is A or G
  MOD_RES (21), (22), (23), (24): Xaa is A or G or is absent

SEQ ID NO: 43141 - protein, 37 aa, Artificial Sequence; identical to SEQ ID NO: 29152
  GFR-binding peptide
  MOD_RES (1), (36): Xaa is C or S
  MOD_RES (15), (16), (17), (18), (19): Xaa is A or G
  MOD_RES (20), (21), (22), (23): Xaa is A or G or is absent

SEQ ID NO: 43142 - protein, 35 aa, Artificial Sequence; identical to SEQ ID NO: 30113
  GFR-binding peptide
  MOD_RES (34), (34): Xaa is C or S
  MOD_RES (14), (15), (16), (17), (18): Xaa is A or G
  MOD_RES (19), (20), (21), (22): Xaa is A or G or is absent

SEQ ID NO: 43143 - protein, 35 aa, Artificial Sequence; identical to SEQ ID NO: 29155
  GFR-binding peptide
  MOD_RES (1), (2): Xaa is C or S
  MOD_RES (16), (17), (18), (19), (20): Xaa is A or G
  MOD_RES (21), (22), (23), (24): Xaa is A or G or is absent

SEQ ID NO: 43144 - protein, 35 aa, Artificial Sequence; identical to SEQ ID NO: 30114
  GFR-binding peptide
  MOD_RES (32), (34): Xaa is C or S

SEQ ID NO: 43145 - protein, 40 aa, Artificial Sequence; identical to SEQ ID NO: 29156
  GFR-binding peptide
  MOD_RES (2), (3), (37), (39): Xaa is C or S
  MOD_RES (17), (18), (19), (20), (21): Xaa is A or G
  MOD_RES (22), (23), (24), (25): Xaa is A or G or is absent

SEQ ID NO: 43146 - protein, 33 aa, Artificial Sequence; identical to SEQ ID NO: 30118
  GFR-binding peptide
  MOD_RES (1), (2): Xaa is C or S

SEQ ID NO: 43147 - protein, 37 aa, Artificial Sequence; identical to SEQ ID NO: 28175
  GFR-binding peptide
  MOD_RES (1), (2), (35), (37): Xaa is C or S

SEQ ID NO: 43148 - protein, 43 aa, Artificial Sequence
  GFR-binding peptide
  MOD_RES (5), (6), (40), (42): Xaa is C or S
  MOD_RES (20), (21), (22), (23), (24): Xaa is A or G
  MOD_RES (25), (26), (27), (28): Xaa is A or G or is absent
SAGPXXTPTKMSPISMLYIXXXXXXXXXYKQYEGMVVDRXGXS

SEQ ID NO: 43149 - protein, 35 aa, Artificial Sequence; identical to SEQ ID NO: 31093
  GFR-binding peptide
  MOD_RES (1), (33), (35): Xaa is C or S

SEQ ID NO: 43150 - protein, 38 aa, Artificial Sequence; identical to SEQ ID NO: 28178
  GFR-binding peptide
  MOD_RES (2), (3), (37): Xaa is C or S
  MOD_RES (17), (18), (19), (20), (21): Xaa is A or G
  MOD_RES (22), (23), (24), (25): Xaa is A or G or is absent

SEQ ID NO: 43151 - protein, 37 aa, Artificial Sequence; identical to SEQ ID NO: 29161
  GFR-binding peptide
  MOD_RES (3), (4), (37): Xaa is C or S

SEQ ID NO: 43152 - protein, 38 aa, Artificial Sequence; identical to SEQ ID NO: 30127
  GFR-binding peptide
  MOD_RES (5), (6), (38): Xaa is C or S

SEQ ID NO: 43153 - protein, 35 aa, Artificial Sequence; identical to SEQ ID NO: 28179
  GFR-binding peptide
  MOD_RES (1), (2), (34): Xaa is C or S

SEQ ID NO: 43154 - protein, 35 aa, Artificial Sequence
  GFR-binding peptide
  MOD_RES (3), (4): Xaa is C or S
GPXXTPTKMSPISMLYINDKQQIIYKQYEGMVVDR

SEQ ID NO: 43155 - protein, 38 aa, Artificial Sequence
  GFR-binding peptide
  MOD_RES (2), (3), (35), (37): Xaa is C or S
PXXTPTKMSPISMLYINDKQQIIYKQYEGMVVDRXGXS

SEQ ID NO: 43156 - protein, 39 aa, Artificial Sequence; identical to SEQ ID NO: 28182
  GFR-binding peptide
  MOD_RES (6), (7): Xaa is C or S
  MOD_RES (21), (22), (23), (24), (25): Xaa is A or G
  MOD_RES (26), (27), (28), (29): Xaa is A or G or is absent

SEQ ID NO: 43157 - protein, 35 aa, Artificial Sequence; identical to SEQ ID NO: 29165
  GFR-binding peptide
  MOD_RES (1), (2), (34): Xaa is C or S

SEQ ID NO: 43158 - protein, 43 aa, Artificial Sequence; identical to SEQ ID NO: 29168
  GFR-binding peptide
  MOD_RES (4), (5), (40), (42): Xaa is C or S
  MOD_RES (19), (20), (21), (22), (23): Xaa is A or G
  MOD_RES (24), (25), (26), (27): Xaa is A or G or is absent

SEQ ID NO: 43159 - protein, 41 aa, Artificial Sequence; identical to SEQ ID NO: 31099
  GFR-binding peptide
  MOD_RES (3), (4), (38), (40): Xaa is C or S
  MOD_RES (18), (19), (20), (21), (22): Xaa is A or G
  MOD_RES (23), (24), (25), (26): Xaa is A or G or is absent

SEQ ID NO: 43160 - protein, 41 aa, Artificial Sequence; identical to SEQ ID NO: 30133
  GFR-binding peptide
  MOD_RES (6), (7), (41): Xaa is C or S
  MOD_RES (21), (22), (23), (24), (25): Xaa is A or G
  MOD_RES (26), (27), (28), (29): Xaa is A or G or is absent

SEQ ID NO: 43161 - protein, 35 aa, Artificial Sequence
  GFR-binding peptide
  MOD_RES (1), (2): Xaa is C or S
  MOD_RES (16), (17), (18), (19), (20): Xaa is A or G
  MOD_RES (21), (22), (23), (24): Xaa is A or G or is absent
XXTPTKMSPISMLYIXXXXXXXXXYKQYEGMVVDR

SEQ ID NO: 43162 - protein, 34 aa, Artificial Sequence
  GFR-binding peptide
  MOD_RES (1), (2), (33): Xaa is C or S
XXAPVKTSPISMLYIDNGRVLLYKQYEMIVEEXG

SEQ ID NO: 43163 - protein, 37 aa, Artificial Sequence; identical to SEQ ID NO: 29175
  GFR-binding peptide
  MOD_RES (1), (2), (34), (36): Xaa is C or S

SEQ ID NO: 43164 - protein, 35 aa, Artificial Sequence; identical to SEQ ID NO: 31105
  GFR-binding peptide
  MOD_RES (32), (34): Xaa is C or S

SEQ ID NO: 43165 - protein, 35 aa, Artificial Sequence; identical to SEQ ID NO: 30140
  GFR-binding peptide
  MOD_RES (1), (2), (35): Xaa is C or S

SEQ ID NO: 43166 - protein, 38 aa, Artificial Sequence; identical to SEQ ID NO: 28198
  GFR-binding peptide
  MOD_RES (5), (6), (38): Xaa is C or S

SEQ ID NO: 43167 - protein, 39 aa, Artificial Sequence
  GFR-binding peptide
  MOD_RES (3), (4), (38): Xaa is C or S
  MOD_RES (18), (19), (20), (21), (22): Xaa is A or G
  MOD_RES (23), (24), (25), (26): Xaa is A or G or is absent
GPXXTPTKMSPISMLYIXXXXXXXXXYKQYEGMVVDRXG

SEQ ID NO: 43168 - protein, 38 aa, Artificial Sequence
  GFR-binding peptide
  MOD_RES (3), (4), (37): Xaa is C or S
  MOD_RES (18), (19), (20), (21), (22): Xaa is A or G
  MOD_RES (23), (24), (25), (26): Xaa is A or G or is absent
STXXAPVKTSPISMLYIXXXXXXXXXYKQYEMIVEEXG

SEQ ID NO: 43169 - protein, 42 aa, Artificial Sequence; identical to SEQ ID NO: 29191
  GFR-binding peptide
  MOD_RES (6), (7), (39), (41): Xaa is C or S

SEQ ID NO: 43170 - protein, 33 aa, Artificial Sequence; identical to SEQ ID NO: 28206
  GFR-binding peptide
  MOD_RES (1), (33): Xaa is C or S

SEQ ID NO: 43171 - protein, 40 aa, Artificial Sequence; identical to SEQ ID NO: 30157
  GFR-binding peptide
  MOD_RES (6), (7): Xaa is C or S
  MOD_RES (21), (22), (23), (24), (25): Xaa is A or G
  MOD_RES (26), (27), (28), (29): Xaa is A or G or is absent

SEQ ID NO: 43172 - protein, 39 aa, Artificial Sequence; identical to SEQ ID NO: 28213
  GFR-binding peptide
  MOD_RES (4), (5), (37), (39): Xaa is C or S

SEQ ID NO: 43173 - protein, 37 aa, Artificial Sequence; identical to SEQ ID NO: 30158
  GFR-binding peptide
  MOD_RES (34), (36): Xaa is C or S
  MOD_RES (14), (15), (16), (17), (18): Xaa is A or G
  MOD_RES (19), (20), (21), (22): Xaa is A or G or is absent

SEQ ID NO: 43174 - protein, 38 aa, Artificial Sequence; identical to SEQ ID NO: 28215
  GFR-binding peptide
  MOD_RES (1), (35), (37): Xaa is C or S
  MOD_RES (15), (16), (17), (18), (19): Xaa is A or G
  MOD_RES (20), (21), (22), (23): Xaa is A or G or is absent

SEQ ID NO: 43175 - protein, 39 aa, Artificial Sequence; identical to SEQ ID NO: 30160
  GFR-binding peptide
  MOD_RES (6), (7), (39): Xaa is C or S

SEQ ID NO: 43176 - protein, 35 aa, Artificial Sequence; identical to SEQ ID NO: 31129
  GFR-binding peptide
  MOD_RES (1), (2): Xaa is C or S
  MOD_RES (16), (17), (18), (19), (20): Xaa is A or G
  MOD_RES (21), (22), (23), (24): Xaa is A or G or is absent

SEQ ID NO: 43177 - protein, 39 aa, Artificial Sequence; identical to SEQ ID NO: 30163
  GFR-binding peptide
  MOD_RES (6), (7): Xaa is C or S
  MOD_RES (21), (22), (23), (24), (25): Xaa is A or G
  MOD_RES (26), (27), (28), (29): Xaa is A or G or is absent

SEQ ID NO: 43178 - protein, 38 aa, Artificial Sequence
  GFR-binding peptide
  MOD_RES (6), (7), (38): Xaa is C or S
RVPSTXXAPVKTSPISMLYIDNGRVLLYKQYEMIVEEX

SEQ ID NO: 43179 - protein, 39 aa, Artificial Sequence; identical to SEQ ID NO: 31133
  GFR-binding peptide
  MOD_RES (4), (36), (38): Xaa is C or S

SEQ ID NO: 43180 - protein, 38 aa, Artificial Sequence; identical to SEQ ID NO: 28220
  GFR-binding peptide
  MOD_RES (3), (4), (36), (38): Xaa is C or S

SEQ ID NO: 43181 - protein, 36 aa, Artificial Sequence
  GFR-binding peptide
  MOD_RES (34), (36): Xaa is C or S
  MOD_RES (14), (15), (16), (17), (18): Xaa is A or G
  MOD_RES (19), (20), (21), (22): Xaa is A or G or is absent
TPTKMSPISMLYIXXXXXXXXXYKQYEGMVVDRXGX

SEQ ID NO: 43182 - protein, 38 aa, Artificial Sequence; identical to SEQ ID NO: 28224
  GFR-binding peptide
  MOD_RES (3), (4), (38): Xaa is C or S
  MOD_RES (18), (19), (20), (21), (22): Xaa is A or G
  MOD_RES (23), (24), (25), (26): Xaa is A or G or is absent

SEQ ID NO: 43183 - protein, 38 aa, Artificial Sequence; identical to SEQ ID NO: 31137
  GFR-binding peptide
  MOD_RES (3), (4): Xaa is C or S
  MOD_RES (18), (19), (20), (21), (22): Xaa is A or G
  MOD_RES (23), (24), (25), (26): Xaa is A or G or is absent

SEQ ID NO: 43184 - protein, 36 aa, Artificial Sequence
  GFR-binding peptide
  MOD_RES (3), (4): Xaa is C or S
  MOD_RES (18), (19), (20), (21), (22): Xaa is A or G
  MOD_RES (23), (24), (25), (26): Xaa is A or G or is absent
GPXXTPTKMSPISMLYIXXXXXXXXXYKQYEGMVVD

SEQ ID NO: 43185 - protein, 36 aa, Artificial Sequence; identical to SEQ ID NO: 30167
  GFR-binding peptide
  MOD_RES (3), (4), (36): Xaa is C or S

SEQ ID NO: 43186 - protein, 41 aa, Artificial Sequence; identical to SEQ ID NO: 30173
  GFR-binding peptide
  MOD_RES (7), (39), (41): Xaa is C or S

SEQ ID NO: 43187 - protein, 36 aa, Artificial Sequence; identical to SEQ ID NO: 28233
  GFR-binding peptide
  MOD_RES (1), (2), (36): Xaa is C or S
  MOD_RES (16), (17), (18), (19), (20): Xaa is A or G
  MOD_RES (21), (22), (23), (24): Xaa is A or G or is absent

SEQ ID NO: 43188 - protein, 37 aa, Artificial Sequence; identical to SEQ ID NO: 28234
  GFR-binding peptide
  MOD_RES (6), (7): Xaa is C or S

SEQ ID NO: 43189 - protein, 39 aa, Artificial Sequence; identical to SEQ ID NO: 28235
  GFR-binding peptide
  MOD_RES (6), (7): Xaa is C or S

SEQ ID NO: 43190 - protein, 32 aa, Artificial Sequence; identical to SEQ ID NO: 28238
  GFR-binding peptide
  MOD_RES (1), (1): Xaa is C or S

SEQ ID NO: 43191 - protein, 38 aa, Artificial Sequence; identical to SEQ ID NO: 31150
  GFR-binding peptide
  MOD_RES (3), (4), (38): Xaa is C or S
  MOD_RES (18), (19), (20), (21), (22): Xaa is A or G
  MOD_RES (23), (24), (25), (26): Xaa is A or G or is absent

SEQ ID NO: 43192 - protein, 36 aa, Artificial Sequence; identical to SEQ ID NO: 29206
  GFR-binding peptide
  MOD_RES (3), (4), (36): Xaa is C or S

SEQ ID NO: 43193 - protein, 42 aa, Artificial Sequence
  GFR-binding peptide
  MOD_RES (6), (7), (39), (41): Xaa is C or S
HVPKPXXAPTKLSPISVLYIDDSSNVIYKQYENMVVRSXGXH

SEQ ID NO: 43194 - protein, 39 aa, Artificial Sequence
  GFR-binding peptide
  MOD_RES (2), (3), (37), (39): Xaa is C or S
  MOD_RES (17), (18), (19), (20), (21): Xaa is A or G
  MOD_RES (22), (23), (24), (25): Xaa is A or G or is absent
PXXTPTKMSPISMLYIXXXXXXXXXYKQYEGMVVDRXGX

SEQ ID NO: 43195 - protein, 34 aa, Artificial Sequence
  GFR-binding peptide
  MOD_RES (1), (2), (34): Xaa is C or S
XXTPTKMSPISMLYINDKQQIIYKQYEGMVVDRX

SEQ ID NO: 43196 - protein, 39 aa, Artificial Sequence; identical to SEQ ID NO: 31152
  GFR-binding peptide
  MOD_RES (4), (5), (38): Xaa is C or S

SEQ ID NO: 43197 - protein, 36 aa, Artificial Sequence; identical to SEQ ID NO: 30181
  GFR-binding peptide
  MOD_RES (1), (2): Xaa is C or S
  MOD_RES (16), (17), (18), (19), (20): Xaa is A or G
  MOD_RES (21), (22), (23), (24): Xaa is A or G or is absent

SEQ ID NO: 43198 - protein, 38 aa, Artificial Sequence; identical to SEQ ID NO: 29212
  GFR-binding peptide
  MOD_RES (1), (2), (36), (38): Xaa is C or S
  MOD_RES (16), (17), (18), (19), (20): Xaa is A or G
  MOD_RES (21), (22), (23), (24): Xaa is A or G or is absent

SEQ ID NO: 43199 - protein, 35 aa, Artificial Sequence; identical to SEQ ID NO: 28244
  GFR-binding peptide
  MOD_RES (2), (3), (35): Xaa is C or S

SEQ ID NO: 43200 - protein, 43 aa, Artificial Sequence; identical to SEQ ID NO: 28247
  GFR-binding peptide
  MOD_RES (6), (7), (42): Xaa is C or S
  MOD_RES (21), (22), (23), (24), (25): Xaa is A or G
  MOD_RES (26), (27), (28), (29): Xaa is A or G or is absent

SEQ ID NO: 43201 - protein, 35 aa, Artificial Sequence; identical to SEQ ID NO: 28248
  GFR-binding peptide
  MOD_RES (2), (3): Xaa is C or S
  MOD_RES (17), (18), (19), (20), (21): Xaa is A or G
  MOD_RES (22), (23), (24), (25): Xaa is A or G or is absent

SEQ ID NO: 43202 - protein, 38 aa, Artificial Sequence; identical to SEQ ID NO: 31162
  GFR-binding peptide
  MOD_RES (2), (3), (35), (37): Xaa is C or S

SEQ ID NO: 43203 - protein, 43 aa, Artificial Sequence; identical to SEQ ID NO: 29221
  GFR-binding peptide
  MOD_RES (6), (7), (41), (43): Xaa is C or S
  MOD_RES (21), (22), (23), (24), (25): Xaa is A or G
  MOD_RES (26), (27), (28), (29): Xaa is A or G or is absent

SEQ ID NO: 43204 - protein, 40 aa, Artificial Sequence; identical to SEQ ID NO: 30191
  GFR-binding peptide
  MOD_RES (6), (7): Xaa is C or S
  MOD_RES (21), (22), (23), (24), (25): Xaa is A or G
  MOD_RES (26), (27), (28), (29): Xaa is A or G or is absent

SEQ ID NO: 43205 - protein, 38 aa, Artificial Sequence; identical to SEQ ID NO: 31166
  GFR-binding peptide
  MOD_RES (3), (4), (36), (38): Xaa is C or S

SEQ ID NO: 43206 - protein, 42 aa, Artificial Sequence; identical to SEQ ID NO: 31168
  GFR-binding peptide
  MOD_RES (5), (6), (40), (42): Xaa is C or S
  MOD_RES (20), (21), (22), (23), (24): Xaa is A or G
  MOD_RES (25), (26), (27), (28): Xaa is A or G or is absent

SEQ ID NO: 43207 - protein, 40 aa, Artificial Sequence; identical to SEQ ID NO: 28251
  GFR-binding peptide
  MOD_RES (3), (4), (38), (40): Xaa is C or S
  MOD_RES (18), (19), (20), (21), (22): Xaa is A or G
  MOD_RES (23), (24), (25), (26): Xaa is A or G or is absent

SEQ ID NO: 43208 - protein, 36 aa, Artificial Sequence; identical to SEQ ID NO: 29222
  GFR-binding peptide
  MOD_RES (1), (35): Xaa is C or S
  MOD_RES (15), (16), (17), (18), (19): Xaa is A or G
  MOD_RES (20), (21), (22), (23): Xaa is A or G or is absent

SEQ ID NO: 43209 - protein, 34 aa, Artificial Sequence; identical to SEQ ID NO: 29224
  GFR-binding peptide
  MOD_RES (32), (34): Xaa is C or S

SEQ ID NO: 43210 - protein, 38 aa, Artificial Sequence; identical to SEQ ID NO: 30199
  GFR-binding peptide
  MOD_RES (2), (3), (37): Xaa is C or S
  MOD_RES (17), (18), (19), (20), (21): Xaa is A or G
  MOD_RES (22), (23), (24), (25): Xaa is A or G or is absent

SEQ ID NO: 43211 - protein, 37 aa, Artificial Sequence; identical to SEQ ID NO: 31174
  GFR-binding peptide
  MOD_RES (1), (2), (34), (36): Xaa is C or S

SEQ ID NO: 43212 - protein, 38 aa, Artificial Sequence; identical to SEQ ID NO: 31175
  GFR-binding peptide
  MOD_RES (1), (2), (35), (37): Xaa is C or S

SEQ ID NO: 43213 - protein, 34 aa, Artificial Sequence; identical to SEQ ID NO: 30204
  GFR-binding peptide
  MOD_RES (1), (2): Xaa is C or S
  MOD_RES (16), (17), (18), (19), (20): Xaa is A or G
  MOD_RES (21), (22), (23), (24): Xaa is A or G or is absent

SEQ ID NO: 43214 - protein, 36 aa, Artificial Sequence; identical to SEQ ID NO: 31177
  GFR-binding peptide
  MOD_RES (4), (5): Xaa is C or S

SEQ ID NO: 43215 - protein, 42 aa, Artificial Sequence
  GFR-binding peptide
  MOD_RES (6), (7), (40), (42): Xaa is C or S
  MOD_RES (21), (22), (23), (24), (25): Xaa is A or G
  MOD_RES (26), (27), (28), (29): Xaa is A or G or is absent
RVPSTXXAPVKTSPISMLYIXXXXXXXXXYKQYEMIVEEXGX

SEQ ID NO: 43216 - protein, 38 aa, Artificial Sequence; identical to SEQ ID NO: 28261
  GFR-binding peptide
  MOD_RES (2), (3), (38): Xaa is C or S
  MOD_RES (17), (18), (19), (20), (21): Xaa is A or G
  MOD_RES (22), (23), (24), (25): Xaa is A or G or is absent

SEQ ID NO: 43217 - protein, 37 aa, Artificial Sequence; identical to SEQ ID NO: 28262
  GFR-binding peptide
  MOD_RES (3), (4): Xaa is C or S
  MOD_RES (18), (19), (20), (21), (22): Xaa is A or G
  MOD_RES (23), (24), (25), (26): Xaa is A or G or is absent

SEQ ID NO: 43218 - protein, 40 aa, Artificial Sequence; identical to SEQ ID NO: 29235
  GFR-binding peptide
  MOD_RES (4), (5), (37), (39): Xaa is C or S

SEQ ID NO: 43219 - protein, 42 aa, Artificial Sequence; identical to SEQ ID NO: 28263
  GFR-binding peptide
  MOD_RES (6), (7), (40), (42): Xaa is C or S

SEQ ID NO: 43220 - protein, 34 aa, Artificial Sequence; identical to SEQ ID NO: 30208
  GFR-binding peptide
  MOD_RES (1), (2): Xaa is C or S
  MOD_RES (16), (17), (18), (19), (20): Xaa is A or G
  MOD_RES (21), (22), (23), (24): Xaa is A or G or is absent

SEQ ID NO: 43221 - protein, 34 aa, Artificial Sequence; identical to SEQ ID NO: 31180
  GFR-binding peptide
  MOD_RES (3), (4): Xaa is C or S

SEQ ID NO: 43222 - protein, 30 aa, Artificial Sequence; identical to SEQ ID NO: 31181
  GFR-binding peptide

SEQ ID NO: 43223 - protein, 38 aa, Artificial Sequence; identical to SEQ ID NO: 28265
  GFR-binding peptide
  MOD_RES (5), (6), (38): Xaa is C or S

SEQ ID NO: 43224 - protein, 36 aa, Artificial Sequence
  GFR-binding peptide
  MOD_RES (3), (4), (35): Xaa is C or S
STXXAPVKTSPISMLYIDNGRVLLYKQYEMIVEEXG

SEQ ID NO: 43225 - protein, 38 aa, Artificial Sequence
  GFR-binding peptide
  MOD_RES (3), (4), (38): Xaa is C or S
  MOD_RES (18), (19), (20), (21), (22): Xaa is A or G
  MOD_RES (23), (24), (25), (26): Xaa is A or G or is absent
GPXXTPTKMSPISMLYIXXXXXXXXXYKQYEGMVVDRX

SEQ ID NO: 43226 - protein, 37 aa, Artificial Sequence; identical to SEQ ID NO: 29240
  GFR-binding peptide
  MOD_RES (3), (4), (36): Xaa is C or S

SEQ ID NO: 43227 - protein, 37 aa, Artificial Sequence; identical to SEQ ID NO: 28268
  GFR-binding peptide
  MOD_RES (6), (7): Xaa is C or S

SEQ ID NO: 43228 - protein, 37 aa, Artificial Sequence; identical to SEQ ID NO: 30213
  GFR-binding peptide
  MOD_RES (1), (2), (37): Xaa is C or S
  MOD_RES (16), (17), (18), (19), (20): Xaa is A or G
  MOD_RES (21), (22), (23), (24): Xaa is A or G or is absent

SEQ ID NO: 43229 - protein, 35 aa, Artificial Sequence; identical to SEQ ID NO: 30214
  GFR-binding peptide
  MOD_RES (4), (5): Xaa is C or S

SEQ ID NO: 43230 - protein, 37 aa, Artificial Sequence; identical to SEQ ID NO: 30218
  GFR-binding peptide
  MOD_RES (1), (35), (37): Xaa is C or S
  MOD_RES (15), (16), (17), (18), (19): Xaa is A or G
  MOD_RES (20), (21), (22), (23): Xaa is A or G or is absent

SEQ ID NO: 43231 - protein, 39 aa, Artificial Sequence; identical to SEQ ID NO: 29243
  GFR-binding peptide
  MOD_RES (6), (38): Xaa is C or S

SEQ ID NO: 43232 - protein, 38 aa, Artificial Sequence
  GFR-binding peptide
  MOD_RES (5), (6): Xaa is C or S
  MOD_RES (20), (21), (22), (23), (24): Xaa is A or G
  MOD_RES (25), (26), (27), (28): Xaa is A or G or is absent
SAGPXXTPTKMSPISMLYIXXXXXXXXXYKQYEGMVVD

SEQ ID NO: 43233 - protein, 39 aa, Artificial Sequence; identical to SEQ ID NO: 30219
  GFR-binding peptide
  MOD_RES (1), (36), (38): Xaa is C or S
  MOD_RES (15), (16), (17), (18), (19): Xaa is A or G
  MOD_RES (20), (21), (22), (23): Xaa is A or G or is absent

SEQ ID NO: 43234 - protein, 38 aa, Artificial Sequence; identical to SEQ ID NO: 31186
  GFR-binding peptide
  MOD_RES (5), (37): Xaa is C or S

SEQ ID NO: 43235 - protein, 36 aa, Artificial Sequence; identical to SEQ ID NO: 28272
  GFR-binding peptide
  MOD_RES (3), (4): Xaa is C or S
  MOD_RES (18), (19), (20), (21), (22): Xaa is A or G
  MOD_RES (23), (24), (25), (26): Xaa is A or G or is absent

SEQ ID NO: 43236 - protein, 42 aa, Artificial Sequence; identical to SEQ ID NO: 30222
  GFR-binding peptide
  MOD_RES (5), (6), (40), (42): Xaa is C or S
  MOD_RES (20), (21), (22), (23), (24): Xaa is A or G
  MOD_RES (25), (26), (27), (28): Xaa is A or G or is absent

SEQ ID NO: 43237 - protein, 35 aa, Artificial Sequence; identical to SEQ ID NO: 28275
  GFR-binding peptide
  MOD_RES (4), (5): Xaa is C or S

SEQ ID NO: 43238 - protein, 41 aa, Artificial Sequence; identical to SEQ ID NO: 28277
  GFR-binding peptide
  MOD_RES (5), (6), (40): Xaa is C or S
  MOD_RES (20), (21), (22), (23), (24): Xaa is A or G
  MOD_RES (25), (26), (27), (28): Xaa is A or G or is absent

SEQ ID NO: 43239 - protein, 42 aa, Artificial Sequence; identical to SEQ ID NO: 28279
  GFR-binding peptide
  MOD_RES (6), (7), (39), (41): Xaa is C or S

SEQ ID NO: 43240 - protein, 34 aa, Artificial Sequence
  GFR-binding peptide
  MOD_RES (1), (2): Xaa is C or S
  MOD_RES (16), (17), (18), (19), (20): Xaa is A or G
  MOD_RES (21), (22), (23), (24): Xaa is A or G or is absent
XXAPVKTSPISMLYIXXXXXXXXXYKQYEMIVEE

SEQ ID NO: 43241 - protein, 34 aa, Artificial Sequence; identical to SEQ ID NO: 29252
  GFR-binding peptide
  MOD_RES (1), (2): Xaa is C or S
  MOD_RES (16), (17), (18), (19), (20): Xaa is A or G
  MOD_RES (21), (22), (23), (24): Xaa is A or G or is absent

SEQ ID NO: 43242 - protein, 37 aa, Artificial Sequence
  GFR-binding peptide
  MOD_RES (5), (6): Xaa is C or S
SAGPXXTPTKMSPISMLYINDKQQIIYKQYEGMVVDR

SEQ ID NO: 43243 - protein, 43 aa, Artificial Sequence
  GFR-binding peptide
  MOD_RES (2), (4), (38), (39): Xaa is C or S
  MOD_RES (16), (17), (18), (19), (20): Xaa is A or G
  MOD_RES (21), (22), (23), (24): Xaa is A or G or is absent
RXGXGEVVMEPYVKLXXXXXXXXXFFLMSLSSLETPVXXAKPI

SEQ ID NO: 43244 - protein, 35 aa, Artificial Sequence
  GFR-binding peptide
  MOD_RES (2), (4): Xaa is C or S
HXGXARVVMNPYVKLIVNSSDDFFLVSLSSLQTPA

SEQ ID NO: 43245 - protein, 40 aa, Artificial Sequence
  GFR-binding peptide
  MOD_RES (1), (3), (36), (37): Xaa is C or S
  MOD_RES (14), (15), (16), (17), (18): Xaa is A or G
  MOD_RES (19), (20), (21), (22): Xaa is A or G or is absent
XKXSRVIMPYVKLXXXXXXXXXFFLISLSSLAQPVXXPAA

SEQ ID NO: 43246 - protein, 37 aa, Artificial Sequence
  GFR-binding peptide
  MOD_RES (31), (32): Xaa is C or S
DVVMGPYVKLIIQQKDNFFLMSLSSMKTPTXXPGASG

SEQ ID NO: 43247 - protein, 38 aa, Artificial Sequence
  GFR-binding peptide
  MOD_RES (1), (3), (37), (38): Xaa is C or S
  MOD_RES (15), (16), (17), (18), (19): Xaa is A or G
  MOD_RES (20), (21), (22), (23): Xaa is A or G or is absent
XGXSRVVMNPYVKLXXXXXXXXXFFLVSLSSLKTPAXX

SEQ ID NO: 43248 - protein, 39 aa, Artificial Sequence
  GFR-binding peptide
  MOD_RES (1), (3), (37), (38): Xaa is C or S
  MOD_RES (15), (16), (17), (18), (19): Xaa is A or G
  MOD_RES (20), (21), (22), (23): Xaa is A or G or is absent
XGXRDVVMGPYVKLXXXXXXXXXFFLMSLSSMKTPTXXP

SEQ ID NO: 43249 - protein, 36 aa, Artificial Sequence
  GFR-binding peptide
  MOD_RES (1), (3): Xaa is C or S
  MOD_RES (15), (16), (17), (18), (19): Xaa is A or G
  MOD_RES (20), (21), (22), (23): Xaa is A or G or is absent
XGXSEVVMDPYVKLXXXXXXXXXFFLISLSSLRTPV

SEQ ID NO: 43250 - protein, 38 aa, Artificial Sequence
  GFR-binding peptide
  MOD_RES (1), (3), (34), (35): Xaa is C or S
XKXSRVIMPYVKLVKPKRGVLFFISLSSLAQPVXXPAA

SEQ ID NO: 43251 - protein, 37 aa, Artificial Sequence
  GFR-binding peptide
  MOD_RES (33), (34): Xaa is C or S
  MOD_RES (11), (12), (13), (14), (15): Xaa is A or G
  MOD_RES (16), (17), (18), (19): Xaa is A or G or is absent
SVAMGPYVKLXXXXXXXXXFFLISLSSLKTPVXXAKS

SEQ ID NO: 43252 - protein, 43 aa, Artificial Sequence
  GFR-binding peptide
  MOD_RES (1), (3), (37): Xaa is C or S
  MOD_RES (15), (16), (17), (18), (19): Xaa is A or G
  MOD_RES (20), (21), (22), (23): Xaa is A or G or is absent
XGXSRVVMNPYVKLXXXXXXXXXFFLVSLSSLKTPAXTPKTVH

SEQ ID NO: 43253 - protein, 39 aa, Artificial Sequence
  GFR-binding peptide
  MOD_RES (34), (34): Xaa is C or S
KNHQLFPYVKLHQGQHPKIRFFLMSLSSEETPVXELGED

SEQ ID NO: 43254 - protein, 36 aa, Artificial Sequence
  GFR-binding peptide
  MOD_RES (1), (35), (36): Xaa is C or S
  MOD_RES (13), (14), (15), (16), (17): Xaa is A or G
  MOD_RES (18), (19), (20), (21): Xaa is A or G or is absent
XSEVTMNPYVKLXXXXXXXXXFFLISLSSMKEPVXX

SEQ ID NO: 43255 - protein, 40 aa, Artificial Sequence
  GFR-binding peptide
  MOD_RES (1), (3), (37): Xaa is C or S
  MOD_RES (15), (16), (17), (18), (19): Xaa is A or G
  MOD_RES (20), (21), (22), (23): Xaa is A or G or is absent
XEXKNHQLFPYVKLXXXXXXXXXFFLMSLSSEETPVXELG

SEQ ID NO: 43256 - protein, 41 aa, Artificial Sequence
  GFR-binding peptide
  MOD_RES (2), (36): Xaa is C or S
  MOD_RES (14), (15), (16), (17), (18): Xaa is A or G
  MOD_RES (19), (20), (21), (22): Xaa is A or G or is absent
EXKNHQLFPYVKLXXXXXXXXXFFLMSLSSEETPVXELGED

SEQ ID NO: 43257 - protein, 44 aa, Artificial Sequence
  GFR-binding peptide
  MOD_RES (2), (4), (38), (39): Xaa is C or S
  MOD_RES (16), (17), (18), (19), (20): Xaa is A or G
  MOD_RES (21), (22), (23), (24): Xaa is A or G or is absent
HXGXARVVMNPYVKLXXXXXXXXXFFLVSLSSLQTPAXXPKPVT

SEQ ID NO: 43258 - protein, 30 aa, Artificial Sequence
  GFR-binding peptide
EVVMEPYVKLVVKDYEDFFLMSLSSLETPV

SEQ ID NO: 43259 - protein, 39 aa, Artificial Sequence
  GFR-binding peptide
  MOD_RES (1), (3), (38), (39): Xaa is C or S
  MOD_RES (16), (17), (18), (19), (20): Xaa is A or G
  MOD_RES (21), (22), (23), (24): Xaa is A or G or is absent
XGXEAVSMGEPYVKLXXXXXXXXXFFLVSLSSLKTPVXX

SEQ ID NO: 43260 - protein, 35 aa, Artificial Sequence
  GFR-binding peptide
  MOD_RES (1), (32), (33): Xaa is C or S
XSKVIMPYVKLIKPTKGILFFISLSSLDQSVXXPS

SEQ ID NO: 43261 - protein, 33 aa, Artificial Sequence
  GFR-binding peptide
  MOD_RES (1), (1): Xaa is C or S
  MOD_RES (12), (13), (14), (15), (16): Xaa is A or G
  MOD_RES (17), (18), (19), (20): Xaa is A or G or is absent
XEEVIMPYVKLXXXXXXXXXFFLMSLSSTKVPA

SEQ ID NO: 43262 - protein, 40 aa, Artificial Sequence
  GFR-binding peptide
  MOD_RES (1), (3), (36), (37): Xaa is C or S
  MOD_RES (14), (15), (16), (17), (18): Xaa is A or G
  MOD_RES (19), (20), (21), (22): Xaa is A or G or is absent
XKXSKVIMPYVKLXXXXXXXXXFFLISLSSLDQSVXXPSA

SEQ ID NO: 43263 - protein, 38 aa, Artificial Sequence
  GFR-binding peptide
  MOD_RES (2), (4), (36), (37): Xaa is C or S
RXAXSEVTMNPYVKLVVNKNEDFFLISLSSMKEPVXXP

SEQ ID NO: 43264 - protein, 34 aa, Artificial Sequence
  GFR-binding peptide
  MOD_RES (2), (2): Xaa is C or S
  MOD_RES (13), (14), (15), (16), (17): Xaa is A or G
  MOD_RES (18), (19), (20), (21): Xaa is A or G or is absent
KXSKVVMPYVKLXXXXXXXXXFFLISLSSLDQPV

SEQ ID NO: 43265 - protein, 35 aa, Artificial Sequence
  GFR-binding peptide
  MOD_RES (2), (35): Xaa is C or S
GXEAVSMGEPYVKLTPVGMDDFFLVSLSSLKTPVX

SEQ ID NO: 43266 - protein, 39 aa, Artificial Sequence
  GFR-binding peptide
  MOD_RES (33), (34): Xaa is C or S
  MOD_RES (11), (12), (13), (14), (15): Xaa is A or G
  MOD_RES (16), (17), (18), (19): Xaa is A or G or is absent
SVAMGPYVKLXXXXXXXXXFFLISLSSLKTPVXXAKSAK

SEQ ID NO: 43267 - protein, 40 aa, Artificial Sequence
  GFR-binding peptide
  MOD_RES (2), (4), (38), (39): Xaa is C or S
  MOD_RES (16), (17), (18), (19), (20): Xaa is A or G
  MOD_RES (21), (22), (23), (24): Xaa is A or G or is absent
RXGXESVAMGPYVKLXXXXXXXXXFFLISLSSLKTPVXXA

SEQ ID NO: 43268 - protein, 37 aa, Artificial Sequence
  GFR-binding peptide
  MOD_RES (31), (32): Xaa is C or S
RVVMNPYVKLIVNSSDDFFLVSLSSLQTPAXXPKPVT

SEQ ID NO: 43269 - protein, 44 aa, Artificial Sequence
  GFR-binding peptide
  MOD_RES (2), (4), (38), (39): Xaa is C or S
  MOD_RES (16), (17), (18), (19), (20): Xaa is A or G
  MOD_RES (21), (22), (23), (24): Xaa is A or G or is absent
RXGXGEVVMDPYVKLXXXXXXXXXFFLMSLSSLETPVXXAKPIK

SEQ ID NO: 43270 - protein, 40 aa, Artificial Sequence
  GFR-binding peptide
  MOD_RES (1), (35), (36): Xaa is C or S
  MOD_RES (13), (14), (15), (16), (17): Xaa is A or G
  MOD_RES (18), (19), (20), (21): Xaa is A or G or is absent
XESVAMGPYVKLXXXXXXXXXFFLISLSSLKTPVXXAKSA

SEQ ID NO: 43271 - protein, 38 aa, Artificial Sequence
  GFR-binding peptide
  MOD_RES (32), (32): Xaa is C or S
SRVVMNPYVKLIVNSSDDFFLVSLSSLKTPAXTPKTVH

SEQ ID NO: 43272 - protein, 37 aa, Artificial Sequence
  GFR-binding peptide
  MOD_RES (1), (3), (37): Xaa is C or S
  MOD_RES (15), (16), (17), (18), (19): Xaa is A or G
  MOD_RES (20), (21), (22), (23): Xaa is A or G or is absent
XGXRDVVMGPYVKLXXXXXXXXXFFLMSLSSMKTPTX

SEQ ID NO: 43273 - protein, 41 aa, Artificial Sequence
  GFR-binding peptide
  MOD_RES (1), (3), (37), (38): Xaa is C or S
  MOD_RES (15), (16), (17), (18), (19): Xaa is A or G
  MOD_RES (20), (21), (22), (23): Xaa is A or G or is absent
XGXAEVVMDPYVKLXXXXXXXXXFFLISLSSLRAPVXXSAP

SEQ ID NO: 43274 - protein, 40 aa, Artificial Sequence
  GFR-binding peptide
  MOD_RES (2), (35), (36): Xaa is C or S
GXEAVSMGEPYVKLTPVGMDDFFLVSLSSLKTPVXXAKGV

SEQ ID NO: 43275 - protein, 36 aa, Artificial Sequence
  GFR-binding peptide
  MOD_RES (2), (34), (35): Xaa is C or S
AXSEVTMNPYVKLVVNKNEDFFLISLSSMKEPVXXP

SEQ ID NO: 43276 - protein, 37 aa, Artificial Sequence
  GFR-binding peptide
  MOD_RES (34), (34): Xaa is C or S
  MOD_RES (12), (13), (14), (15), (16): Xaa is A or G
  MOD_RES (17), (18), (19), (20): Xaa is A or G or is absent
SRVVMNPYVKLXXXXXXXXXFFLVSLSSLKTPAXTPK

SEQ ID NO: 43277 - protein, 36 aa, Artificial Sequence
  GFR-binding peptide
  MOD_RES (2), (33), (34): Xaa is C or S
KXSRVIMPYVKLVKPKRGVLFFISLSSLAQPVXXPA

SEQ ID NO: 43278 - protein, 36 aa, Artificial Sequence
  GFR-binding peptide
  MOD_RES (2), (35), (36): Xaa is C or S
GXEAVSMGEPYVKLTPVGMDDFFLVSLSSLKTPVXX

SEQ ID NO: 43279 - protein, 41 aa, Artificial Sequence
  GFR-binding peptide
  MOD_RES (1), (3), (35), (36): Xaa is C or S
XGXSEVVMDPYVKLVVNNASDFFLISLSSLRTPVXXTPPTS

SEQ ID NO: 43280 - protein, 32 aa, Artificial Sequence
  GFR-binding peptide
HEELRPYVKLLKPKKRVYEFFLVSLSSHHVRS

SEQ ID NO: 43281 - protein, 35 aa, Artificial Sequence
  GFR-binding peptide
  MOD_RES (2), (4), (35): Xaa is C or S
SXKXSKVIMPYVKLIKPTKGILFFISLSSLDQSVX

SEQ ID NO: 43282 - protein, 42 aa, Artificial Sequence
  GFR-binding peptide
  MOD_RES (1), (3), (37), (38): Xaa is C or S
  MOD_RES (15), (16), (17), (18), (19): Xaa is A or G
  MOD_RES (20), (21), (22), (23): Xaa is A or G or is absent
XGXARVVMNPYVKLXXXXXXXXXFFLVSLSSLQTPAXXPKPV

SEQ ID NO: 43283 - protein, 34 aa, Artificial Sequence
  GFR-binding peptide
  MOD_RES (1), (32), (33): Xaa is C or S
XSKVVMPYVKLVKPTRGVLFFISLSSLDQPVXXP

SEQ ID NO: 43284 - protein, 33 aa, Artificial Sequence
  GFR-binding peptide
  MOD_RES (32), (33): Xaa is C or S
RDVVMGPYVKLIIQQKDNFFLMSLSSMKTPTXX

SEQ ID NO: 43285 - protein, 39 aa, Artificial Sequence
  GFR-binding peptide
  MOD_RES (2), (35), (36): Xaa is C or S
  MOD_RES (13), (14), (15), (16), (17): Xaa is A or G
  MOD_RES (18), (19), (20), (21): Xaa is A or G or is absent
KXSKVIMPYVKLXXXXXXXXXFFLISLSSLDQSVXXPSA

SEQ ID NO: 43286 - protein, 37 aa, Artificial Sequence
  GFR-binding peptide
  MOD_RES (1), (3), (35), (36): Xaa is C or S
XGXAKVVMNPYVKLIVNNSSDFFLVSLSSLKTPAXXA

SEQ ID NO: 43287 - protein, 39 aa, Artificial Sequence
  GFR-binding peptide
  MOD_RES (2), (36), (37): Xaa is C or S
  MOD_RES (14), (15), (16), (17), (18): Xaa is A or G
  MOD_RES (19), (20), (21), (22): Xaa is A or G or is absent
GXARVVMNPYVKLXXXXXXXXXFFLVSLSSLQTPAXXPK

SEQ ID NO: 43288 - protein, 39 aa, Artificial Sequence
  GFR-binding peptide
  MOD_RES (1), (33): Xaa is C or S
XSRVVMNPYVKLIVNSSDDFFLVSLSSLKTPAXTPKTVH

SEQ ID NO: 43289 - protein, 40 aa, Artificial Sequence
  GFR-binding peptide
  MOD_RES (34), (34): Xaa is C or S
  MOD_RES (12), (13), (14), (15), (16): Xaa is A or G
  MOD_RES (17), (18), (19), (20): Xaa is A or G or is absent
SRVVMNPYVKLXXXXXXXXXFFLVSLSSLKTPAXTPKTVH

SEQ ID NO: 43290 - protein, 43 aa, Artificial Sequence
  GFR-binding peptide
  MOD_RES (2), (39): Xaa is C or S
AXELHEELRPYVKLLKPKKRVYEFFLVSLSSHHVRSPQXKVSS

SEQ ID NO: 43291 - protein, 37 aa, Artificial Sequence
  GFR-binding peptide
  MOD_RES (1), (33), (34): Xaa is C or S
XARVVMNPYVKLIVNSSDDFFLVSLSSLQTPAXXPKP

SEQ ID NO: 43292 - protein, 35 aa, Artificial Sequence
  GFR-binding peptide
  MOD_RES (33), (33): Xaa is C or S
NHQLFPYVKLHQGQHPKIRFFLMSLSSEETPVXEL

SEQ ID NO: 43293 - protein, 34 aa, Artificial Sequence
  GFR-binding peptide
  MOD_RES (1), (34): Xaa is C or S
  MOD_RES (12), (13), (14), (15), (16): Xaa is A or G
  MOD_RES (17), (18), (19), (20): Xaa is A or G or is absent
XEEVIMPYVKLXXXXXXXXXFFLMSLSSTKVPAX

SEQ ID NO: 43294 - protein, 36 aa, Artificial Sequence
  GFR-binding peptide
  MOD_RES (1), (33), (34): Xaa is C or S
XSEVTMNPYVKLVVNKNEDFFLISLSSMKEPVXXPE

SEQ ID NO: 43295 - protein, 40 aa, Artificial Sequence
  GFR-binding peptide
  MOD_RES (1), (35): Xaa is C or S
  MOD_RES (13), (14), (15), (16), (17): Xaa is A or G
  MOD_RES (18), (19), (20), (21): Xaa is A or G or is absent
XKNHQLFPYVKLXXXXXXXXXFFLMSLSSEETPVXELGED

SEQ ID NO: 43296 - protein, 41 aa, Artificial Sequence
  GFR-binding peptide
  MOD_RES (1), (3), (37): Xaa is C or S
  MOD_RES (15), (16), (17), (18), (19): Xaa is A or G
  MOD_RES (20), (21), (22), (23): Xaa is A or G or is absent
XGXSRVVMNPYVKLXXXXXXXXXFFLVSLSSLKTPAXTPKT

SEQ ID NO: 43297 - protein, 36 aa, Artificial Sequence
  GFR-binding peptide
  MOD_RES (1), (1): Xaa is C or S
XELHEELRPYVKLLKPKKRVYEFFLVSLSSHHVRSP

SEQ ID NO: 43298 - protein, 35 aa, Artificial Sequence
  GFR-binding peptide
  MOD_RES (32), (33): Xaa is C or S
SEVTMNPYVKLVVNKNEDFFLISLSSMKEPVXXPE

SEQ ID NO: 43299 - protein, 34 aa, Artificial Sequence
  GFR-binding peptide
  MOD_RES (31), (32): Xaa is C or S
SKVIMPYVKLIKPTKGILFFISLSSLDQSVXXPS

SEQ ID NO: 43300 - protein, 41 aa, Artificial Sequence
  GFR-binding peptide
  MOD_RES (2), (36), (37): Xaa is C or S
  MOD_RES (14), (15), (16), (17), (18): Xaa is A or G
  MOD_RES (19), (20), (21), (22): Xaa is A or G or is absent
GXAEVVMDPYVKLXXXXXXXXXFFLISLSSLRAPVXXSAPA

SEQ ID NO: 43301 - protein, 39 aa, Artificial Sequence
  GFR-binding peptide
  MOD_RES (2), (33), (34): Xaa is C or S
KXSRVIMPYVKLVKPKRGVLFFISLSSLAQPVXXPAASA

SEQ ID NO: 43302 - protein, 38 aa, Artificial Sequence
  GFR-binding peptide
  MOD_RES (34), (35): Xaa is C or S
  MOD_RES (12), (13), (14), (15), (16): Xaa is A or G
  MOD_RES (17), (18), (19), (20): Xaa is A or G or is absent
SRVVMNPYVKLXXXXXXXXXFFLVSLSSLKTPAXXPKP

SEQ ID NO: 43303 - protein, 34 aa, Artificial Sequence
  GFR-binding peptide
  MOD_RES (1), (32), (33): Xaa is C or S
XEEVIMPYVKLLLVRGNDFFLMSLSSTKVPAXXT

SEQ ID NO: 43304 - protein, 34 aa, Artificial Sequence
  GFR-binding peptide
  MOD_RES (32), (33): Xaa is C or S
AEVVMDPYVKLVVNNAADFFLISLSSLRAPVXXS

SEQ ID NO: 43305 - protein, 42 aa, Artificial Sequence
  GFR-binding peptide
  MOD_RES (1), (3), (37), (38): Xaa is C or S
  MOD_RES (15), (16), (17), (18), (19): Xaa is A or G
  MOD_RES (20), (21), (22), (23): Xaa is A or G or is absent
XGXAKVVMNPYVKLXXXXXXXXXFFLVSLSSLKTPAXXAKPV

SEQ ID NO: 43306 - protein, 37 aa, Artificial Sequence
  GFR-binding peptide
  MOD_RES (1), (3), (37): Xaa is C or S
  MOD_RES (15), (16), (17), (18), (19): Xaa is A or G
  MOD_RES (20), (21), (22), (23): Xaa is A or G or is absent
XGXARVVMNPYVKLXXXXXXXXXFFLVSLSSLQTPAX

SEQ ID NO: 43307 - protein, 38 aa, Artificial Sequence
  GFR-binding peptide
  MOD_RES (33), (34): Xaa is C or S
  MOD_RES (11), (12), (13), (14), (15): Xaa is A or G
  MOD_RES (16), (17), (18), (19): Xaa is A or G or is absent
EEVIMPYVKLXXXXXXXXXFFLMSLSSTKVPAXXTSPV

SEQ ID NO: 43308 - protein, 38 aa, Artificial Sequence
  GFR-binding peptide
  MOD_RES (2), (4), (38): Xaa is C or S
  MOD_RES (16), (17), (18), (19), (20): Xaa is A or G
  MOD_RES (21), (22), (23), (24): Xaa is A or G or is absent
RXAXSEVTMNPYVKLXXXXXXXXXFFLISLSSMKEPVX

SEQ ID NO: 43309 - protein, 36 aa, Artificial Sequence
  GFR-binding peptide
  MOD_RES (36), (36): Xaa is C or S
LHEELRPYVKLLKPKKRVYEFFLVSLSSHHVRSPQX

SEQ ID NO: 43310 - protein, 40 aa, Artificial Sequence
  GFR-binding peptide
  MOD_RES (2), (4), (36), (37): Xaa is C or S
HXGXAKVVMNPYVKLIVNNSSDFFLVSLSSLKTPAXXAKP

SEQ ID NO: 43311 - protein, 35 aa, Artificial Sequence
  GFR-binding peptide
  MOD_RES (2), (2): Xaa is C or S
  MOD_RES (14), (15), (16), (17), (18): Xaa is A or G
  MOD_RES (19), (20), (21), (22): Xaa is A or G or is absent
GXAEVVMDPYVKLXXXXXXXXXFFLISLSSLRAPV

SEQ ID NO: 43312 - protein, 34 aa, Artificial Sequence
  GFR-binding peptide
  MOD_RES (1), (33), (34): Xaa is C or S
XSRVVMNPYVKLIVNSSDDFFLVSLSSLKTPAXX

SEQ ID NO: 43313 - protein, 41 aa, Artificial Sequence
  GFR-binding peptide
  MOD_RES (2), (4), (37), (38): Xaa is C or S
  MOD_RES (15), (16), (17), (18), (19): Xaa is A or G
  MOD_RES (20), (21), (22), (23): Xaa is A or G or is absent
SXKXSRVIMPYVKLXXXXXXXXXFFLISLSSLAQPVXXPAA

SEQ ID NO: 43314 - protein, 35 aa, Artificial Sequence
  GFR-binding peptide
  MOD_RES (34), (35): Xaa is C or S
  MOD_RES (12), (13), (14), (15), (16): Xaa is A or G
  MOD_RES (17), (18), (19), (20): Xaa is A or G or is absent
SRVVMNPYVKLXXXXXXXXXFFLVSLSSLKTPAXX

SEQ ID NO: 43315 - protein, 38 aa, Artificial Sequence
  GFR-binding peptide
  MOD_RES (1), (33), (34): Xaa is C or S
XAEVVMDPYVKLVVNNAADFFLISLSSLRAPVXXSAPA

SEQ ID NO: 43316 - protein, 37 aa, Artificial Sequence
  GFR-binding peptide
  MOD_RES (36), (36): Xaa is C or S
LHEELRPYVKLLKPKKRVYEFFLVSLSSHHVRSPQXK

SEQ ID NO: 43317 - protein, 38 aa, Artificial Sequence
  GFR-binding peptide
  MOD_RES (1), (35), (36): Xaa is C or S
  MOD_RES (13), (14), (15), (16), (17): Xaa is A or G
  MOD_RES (18), (19), (20), (21): Xaa is A or G or is absent
XSRVVMNPYVKLXXXXXXXXXFFLVSLSSLKTPAXXPK

SEQ ID NO: 43318 - protein, 36 aa, Artificial Sequence
  GFR-binding peptide
  MOD_RES (2), (4), (35), (36): Xaa is C or S
SXKXSKVVMPYVKLVKPTRGVLFFISLSSLDQPVXX

SEQ ID NO: 43319 - protein, 37 aa, Artificial Sequence
  GFR-binding peptide
  MOD_RES (1), (33), (34): Xaa is C or S
XGEVVMEPYVKLVVKDYEDFFLMSLSSLETPVXXAKP

SEQ ID NO: 43320 - protein, 42 aa, Artificial Sequence
  GFR-binding peptide
  MOD_RES (2), (4), (38), (39): Xaa is C or S
  MOD_RES (16), (17), (18), (19), (20): Xaa is A or G
  MOD_RES (21), (22), (23), (24): Xaa is A or G or is absent
HXGXSRVVMNPYVKLXXXXXXXXXFFLVSLSSLKTPAXXPKP

SEQ ID NO: 43321 - protein, 38 aa, Artificial Sequence
  GFR-binding peptide
  MOD_RES (1), (3), (37), (38): Xaa is C or S
  MOD_RES (15), (16), (17), (18), (19): Xaa is A or G
  MOD_RES (20), (21), (22), (23): Xaa is A or G or is absent
XGXGEVVMEPYVKLXXXXXXXXXFFLMSLSSLETPVXX

SEQ ID NO: 43322 - protein, 33 aa, Artificial Sequence
  GFR-binding peptide
  MOD_RES (33), (33): Xaa is C or S
  MOD_RES (11), (12), (13), (14), (15): Xaa is A or G
  MOD_RES (16), (17), (18), (19): Xaa is A or G or is absent
SKVIMPYVKLXXXXXXXXXFFLISLSSLDQSVX

SEQ ID NO: 43323 - protein, 36 aa, Artificial Sequence
  GFR-binding peptide
ELHEELRPYVKLLKPKKRVYEFFLVSLSSHHVRSPQ

SEQ ID NO: 43324 - protein, 34 aa, Artificial Sequence
  GFR-binding peptide
  MOD_RES (33), (34): Xaa is C or S
  MOD_RES (11), (12), (13), (14), (15): Xaa is A or G
  MOD_RES (16), (17), (18), (19): Xaa is A or G or is absent
SKVIMPYVKLXXXXXXXXXFFLISLSSLDQSVXX

SEQ ID NO: 43325 - protein, 38 aa, Artificial Sequence
  GFR-binding peptide
  MOD_RES (33), (34): Xaa is C or S
  MOD_RES (11), (12), (13), (14), (15): Xaa is A or G
  MOD_RES (16), (17), (18), (19): Xaa is A or G or is absent
RVVMNPYVKLXXXXXXXXXFFLVSLSSLKTPAXXPKPV

SEQ ID NO: 43326 - protein, 38 aa, Artificial Sequence
  GFR-binding peptide
  MOD_RES (1), (33), (34): Xaa is C or S
XSEVVMDPYVKLVVNNASDFFLISLSSLRTPVXXTPPT

SEQ ID NO: 43327 - protein, 42 aa, Artificial Sequence
  GFR-binding peptide
  MOD_RES (2), (36), (37): Xaa is C or S
  MOD_RES (14), (15), (16), (17), (18): Xaa is A or G
  MOD_RES (19), (20), (21), (22): Xaa is A or G or is absent
GXAEVVMDPYVKLXXXXXXXXXFFLISLSSLRAPVXXSAPAA

SEQ ID NO: 43328 - protein, 34 aa, Artificial Sequence
  GFR-binding peptide
  MOD_RES (1), (33), (34): Xaa is C or S
XESVAMGPYVKLYTVVGKDFFLISLSSLKTPVXX

SEQ ID NO: 43329 - protein, 33 aa, Artificial Sequence
  GFR-binding peptide
  MOD_RES (33), (33): Xaa is C or S
NHQLFPYVKLHQGQHPKIRFFLMSLSSEETPVX

SEQ ID NO: 43330 - protein, 40 aa, Artificial Sequence
  GFR-binding peptide
  MOD_RES (34), (35): Xaa is C or S
  MOD_RES (12), (13), (14), (15), (16): Xaa is A or G
  MOD_RES (17), (18), (19), (20): Xaa is A or G or is absent
AEVVMDPYVKLXXXXXXXXXFFLISLSSLRAPVXXSAPAA

SEQ ID NO: 43331 - protein, 36 aa, Artificial Sequence
  GFR-binding peptide
  MOD_RES (2), (35), (36): Xaa is C or S
  MOD_RES (13), (14), (15), (16), (17): Xaa is A or G
  MOD_RES (18), (19), (20), (21): Xaa is A or G or is absent
GXEEVIMPYVKLXXXXXXXXXFFLMSLSSTKVPAXX

SEQ ID NO: 43332 - protein, 36 aa, Artificial Sequence
  GFR-binding peptide
  MOD_RES (2), (36): Xaa is C or S
  MOD_RES (14), (15), (16), (17), (18): Xaa is A or G
  MOD_RES (19), (20), (21), (22): Xaa is A or G or is absent
GXSRVVMNPYVKLXXXXXXXXXFFLVSLSSLKTPAX

SEQ ID NO: 43333 - protein, 35 aa, Artificial Sequence
  GFR-binding peptide
  MOD_RES (1), (33), (34): Xaa is C or S
XRDVVMGPYVKLIIQQKDNFFLMSLSSMKTPTXXP

SEQ ID NO: 43334 - protein, 34 aa, Artificial Sequence
  GFR-binding peptide
  MOD_RES (33), (34): Xaa is C or S
  MOD_RES (11), (12), (13), (14), (15): Xaa is A or G
  MOD_RES (16), (17), (18), (19): Xaa is A or G or is absent
KVVMNPYVKLXXXXXXXXXFFLVSLSSLKTPAXX

SEQ ID NO: 43335 - protein, 39 aa, Artificial Sequence
  GFR-binding peptide
  MOD_RES (2), (34), (35): Xaa is C or S
GXESVAMGPYVKLYTVVGKDFFLISLSSLKTPVXXAKSA

SEQ ID NO: 43336 - protein, 39 aa, Artificial Sequence
  GFR-binding peptide
  MOD_RES (2), (4), (38): Xaa is C or S
RXEXKNHQLFPYVKLHQGQHPKIRFFLMSLSSEETPVXE

SEQ ID NO: 43337 - protein, 35 aa, Artificial Sequence
  GFR-binding peptide
  MOD_RES (2), (2): Xaa is C or S
  MOD_RES (14), (15), (16), (17), (18): Xaa is A or G
  MOD_RES (19), (20), (21), (22): Xaa is A or G or is absent
GXGEVVMEPYVKLXXXXXXXXXFFLMSLSSLETPV

SEQ ID NO: 43338 - protein, 34 aa, Artificial Sequence
  GFR-binding peptide
  MOD_RES (33), (34): Xaa is C or S
  MOD_RES (11), (12), (13), (14), (15): Xaa is A or G
  MOD_RES (16), (17), (18), (19): Xaa is A or G or is absent
RVVMNPYVKLXXXXXXXXXFFLVSLSSLKTPAXX

SEQ ID NO: 43339 - protein, 32 aa, Artificial Sequence
  GFR-binding peptide
  MOD_RES (31), (31): Xaa is C or S
RVVMNPYVKLIVNSSDDFFLVSLSSLKTPAXT

SEQ ID NO: 43340 - protein, 41 aa, Artificial Sequence
  GFR-binding peptide
  MOD_RES (1), (3), (35), (36): Xaa is C or S
XGXGEVVMEPYVKLVVKDYEDFFLMSLSSLETPVXXAKPIS

SEQ ID NO: 43341 - protein, 37 aa, Artificial Sequence
  GFR-binding peptide
  MOD_RES (1), (34), (35): Xaa is C or S
  MOD_RES (12), (13), (14), (15), (16): Xaa is A or G
  MOD_RES (17), (18), (19), (20): Xaa is A or G or is absent
XEEVIMPYVKLXXXXXXXXXFFLMSLSSTKVPAXXTS

SEQ ID NO: 43342 - protein, 40 aa, Artificial Sequence
  GFR-binding peptide
  MOD_RES (2), (4), (38): Xaa is C or S
RXEXKNHQLFPYVKLHQGQHPKIRFFLMSLSSEETPVXEL

SEQ ID NO: 43343 - protein, 37 aa, Artificial Sequence
  GFR-binding peptide
  MOD_RES (2), (36), (37): Xaa is C or S
  MOD_RES (14), (15), (16), (17), (18): Xaa is A or G
  MOD_RES (19), (20), (21), (22): Xaa is A or G or is absent
GXRDVVMGPYVKLXXXXXXXXXFFLMSLSSMKTPTXX

SEQ ID NO: 43344 - protein, 32 aa, Artificial Sequence
  GFR-binding peptide
  MOD_RES (11), (12), (13), (14), (15): Xaa is A or G
  MOD_RES (16), (17), (18), (19): Xaa is A or G or is absent
SKVVMPYVKLXXXXXXXXXFFLISLSSLDQPV

SEQ ID NO: 43345 - protein, 33 aa, Artificial Sequence
  GFR-binding peptide
  MOD_RES (2), (33): Xaa is C or S
GXEEVIMPYVKLLLVRGNDFFLMSLSSTKVPAX

SEQ ID NO: 43346 - protein, 35 aa, Artificial Sequence
  GFR-binding peptide
  MOD_RES (32), (33): Xaa is C or S
RDVVMGPYVKLIIQQKDNFFLMSLSSMKTPTXXPG

SEQ ID NO: 43347 - protein, 38 aa, Artificial Sequence
  GFR-binding peptide
  MOD_RES (1), (3), (37), (38): Xaa is C or S
  MOD_RES (15), (16), (17), (18), (19): Xaa is A or G
  MOD_RES (20), (21), (22), (23): Xaa is A or G or is absent
XGXESVAMGPYVKLXXXXXXXXXFFLISLSSLKTPVXX

SEQ ID NO: 43348 - protein, 37 aa, Artificial Sequence
  GFR-binding peptide
  MOD_RES (2), (36), (37): Xaa is C or S
  MOD_RES (14), (15), (16), (17), (18): Xaa is A or G
  MOD_RES (19), (20), (21), (22): Xaa is A or G or is absent
GXAEVVMDPYVKLXXXXXXXXXFFLISLSSLRAPVXX

SEQ ID NO: 43349 - protein, 36 aa, Artificial Sequence
  GFR-binding peptide
  MOD_RES (33), (34): Xaa is C or S
  MOD_RES (11), (12), (13), (14), (15): Xaa is A or G
  MOD_RES (16), (17), (18), (19): Xaa is A or G or is absent
SVAMGPYVKLXXXXXXXXXFFLISLSSLKTPVXXAK

SEQ ID NO: 43350 - protein, 35 aa, Artificial Sequence
  GFR-binding peptide
  MOD_RES (1), (35): Xaa is C or S
  MOD_RES (13), (14), (15), (16), (17): Xaa is A or G
  MOD_RES (18), (19), (20), (21): Xaa is A or G or is absent
XKNHQLFPYVKLXXXXXXXXXFFLMSLSSEETPVX

SEQ ID NO: 43351 - protein, 39 aa, Artificial Sequence
  GFR-binding peptide
  MOD_RES (1), (3), (37), (38): Xaa is C or S
  MOD_RES (15), (16), (17), (18), (19): Xaa is A or G
  MOD_RES (20), (21), (22), (23): Xaa is A or G or is absent
XGXARVVMNPYVKLXXXXXXXXXFFLVSLSSLQTPAXXP

SEQ ID NO: 43352 - protein, 36 aa, Artificial Sequence
  GFR-binding peptide
  MOD_RES (34), (34): Xaa is C or S
KNHQLFPYVKLHQGQHPKIRFFLMSLSSEETPVXEL

SEQ ID NO: 43353 - protein, 35 aa, Artificial Sequence
  GFR-binding peptide
  MOD_RES (2), (35): Xaa is C or S
  MOD_RES (13), (14), (15), (16), (17): Xaa is A or G
  MOD_RES (18), (19), (20), (21): Xaa is A or G or is absent
KXSKVIMPYVKLXXXXXXXXXFFLISLSSLDQSVX

SEQ ID NO: 43354 - protein, 33 aa, Artificial Sequence
  GFR-binding peptide
  MOD_RES (1), (1): Xaa is C or S
XEAVSMGEPYVKLTPVGMDDFFLVSLSSLKTPV

SEQ ID NO: 43355 - protein, 39 aa, Artificial Sequence
  GFR-binding peptide
  MOD_RES (2), (34), (35): Xaa is C or S
GXRDVVMGPYVKLIIQQKDNFFLMSLSSMKTPTXXPGAS

SEQ ID NO: 43356 - protein, 43 aa, Artificial Sequence
  GFR-binding peptide
  MOD_RES (1), (3), (37), (38): Xaa is C or S
  MOD_RES (15), (16), (17), (18), (19): Xaa is A or G
  MOD_RES (20), (21), (22), (23): Xaa is A or G or is absent
XGXSRVVMNPYVKLXXXXXXXXXFFLVSLSSLKTPAXXPKPVH

SEQ ID NO: 43357 - protein, 34 aa, Artificial Sequence
  GFR-binding peptide
  MOD_RES (1), (3), (34): Xaa is C or S
XKXSRVIMPYVKLVKPKRGVLFFISLSSLAQPVX

SEQ ID NO: 43358 - protein, 39 aa, Artificial Sequence
  GFR-binding peptide
  MOD_RES (2), (35), (36): Xaa is C or S
GXEAVSMGEPYVKLTPVGMDDFFLVSLSSLKTPVXXAKG

SEQ ID NO: 43359 - protein, 40 aa, Artificial Sequence
  GFR-binding peptide
  MOD_RES (2), (4), (38), (39): Xaa is C or S
  MOD_RES (16), (17), (18), (19), (20): Xaa is A or G
  MOD_RES (21), (22), (23), (24): Xaa is A or G or is absent
RXGXSEVVMDPYVKLXXXXXXXXXFFLISLSSLRTPVXXT

SEQ ID NO: 43360 - protein, 32 aa, Artificial Sequence
  GFR-binding peptide
  MOD_RES (11), (12), (13), (14), (15): Xaa is A or G
  MOD_RES (16), (17), (18), (19): Xaa is A or G or is absent
DVVMGPYVKLXXXXXXXXXFFLMSLSSMKTPT

SEQ ID NO: 43361 - protein, 39 aa, Artificial Sequence
  GFR-binding peptide
  MOD_RES (2), (36): Xaa is C or S
  MOD_RES (14), (15), (16), (17), (18): Xaa is A or G
  MOD_RES (19), (20), (21), (22): Xaa is A or G or is absent
GXSRVVMNPYVKLXXXXXXXXXFFLVSLSSLKTPAXTPK

SEQ ID NO: 43362 - protein, 39 aa, Artificial Sequence
  GFR-binding peptide
  MOD_RES (34), (35): Xaa is C or S
  MOD_RES (12), (13), (14), (15), (16): Xaa is A or G
  MOD_RES (17), (18), (19), (20): Xaa is A or G or is absent
GEVVMEPYVKLXXXXXXXXXFFLMSLSSLETPVXXAKPI

SEQ ID NO: 43363 - protein, 36 aa, Artificial Sequence
  GFR-binding peptide
  MOD_RES (2), (34): Xaa is C or S
GXSRVVMNPYVKLIVNSSDDFFLVSLSSLKTPAXTP

SEQ ID NO: 43364 - protein, 39 aa, Artificial Sequence
  GFR-binding peptide
  MOD_RES (1), (33), (34): Xaa is C or S
XAKVVMNPYVKLIVNNSSDFFLVSLSSLKTPAXXAKPVA

SEQ ID NO: 43365 - protein, 42 aa, Artificial Sequence
  GFR-binding peptide
  MOD_RES (2), (4), (41): Xaa is C or S
AXAXELHEELRPYVKLLKPKKRVYEFFLVSLSSHHVRSPQXK

SEQ ID NO: 43366 - protein, 34 aa, Artificial Sequence
  GFR-binding peptide
  MOD_RES (1), (33), (34): Xaa is C or S
XSEVTMNPYVKLVVNKNEDFFLISLSSMKEPVXX

SEQ ID NO: 43367 - protein, 35 aa, Artificial Sequence
  GFR-binding peptide
  MOD_RES (1), (3): Xaa is C or S
  MOD_RES (14), (15), (16), (17), (18): Xaa is A or G
  MOD_RES (19), (20), (21), (22): Xaa is A or G or is absent
XKXSKVVMPYVKLXXXXXXXXXFFLISLSSLDQPV

SEQ ID NO: 43368 - protein, 40 aa, Artificial Sequence
  GFR-binding peptide
  MOD_RES (2), (34), (35): Xaa is C or S
GXRDVVMGPYVKLIIQQKDNFFLMSLSSMKTPTXXPGASG

SEQ ID NO: 43369 - protein, 41 aa, Artificial Sequence
  GFR-binding peptide
  MOD_RES (2), (4), (38), (39): Xaa is C or S
  MOD_RES (16), (17), (18), (19), (20): Xaa is A or G
  MOD_RES (21), (22), (23), (24): Xaa is A or G or is absent
RXGXESVAMGPYVKLXXXXXXXXXFFLISLSSLKTPVXXAK

SEQ ID NO: 43370 - protein, 40 aa, Artificial Sequence
  GFR-binding peptide
  MOD_RES (2), (4), (38), (39): Xaa is C or S
  MOD_RES (16), (17), (18), (19), (20): Xaa is A or G
  MOD_RES (21), (22), (23), (24): Xaa is A or G or is absent
HXGXAKVVMNPYVKLXXXXXXXXXFFLVSLSSLKTPAXXA

SEQ ID NO: 43371 - protein, 35 aa, Artificial Sequence
  GFR-binding peptide
  MOD_RES (1), (3), (35): Xaa is C or S
XAXSEVTMNPYVKLVVNKNEDFFLISLSSMKEPVX

SEQ ID NO: 43372 - protein, 39 aa, Artificial Sequence
  GFR-binding peptide
  MOD_RES (37), (37): Xaa is C or S
  MOD_RES (13), (14), (15), (16), (17): Xaa is A or G
  MOD_RES (18), (19), (20), (21): Xaa is A or G or is absent
ELHEELRPYVKLXXXXXXXXXFFLVSLSSHHVRSPQXKV

SEQ ID NO: 43373 - protein, 40 aa, Artificial Sequence
  GFR-binding peptide
  MOD_RES (34), (35): Xaa is C or S
  MOD_RES (12), (13), (14), (15), (16): Xaa is A or G
  MOD_RES (17), (18), (19), (20): Xaa is A or G or is absent
SRVVMNPYVKLXXXXXXXXXFFLVSLSSLKTPAXXPKPVH

SEQ ID NO: 43374 - protein, 34 aa, Artificial Sequence
  GFR-binding peptide
  MOD_RES (32), (33): Xaa is C or S
ESVAMGPYVKLYTVVGKDFFLISLSSLKTPVXXA

SEQ ID NO: 43375 - protein, 42 aa, Artificial Sequence
  GFR-binding peptide
  MOD_RES (2), (4), (38): Xaa is C or S
  MOD_RES (16), (17), (18), (19), (20): Xaa is A or G
  MOD_RES (21), (22), (23), (24): Xaa is A or G or is absent
HXGXSRVVMNPYVKLXXXXXXXXXFFLVSLSSLKTPAXTPKT

SEQ ID NO: 43376 - protein, 32 aa, Artificial Sequence
  GFR-binding peptide
  MOD_RES (31), (32): Xaa is C or S
SKVIMPYVKLIKPTKGILFFISLSSLDQSVXX

SEQ ID NO: 43377 - protein, 33 aa, Artificial Sequence
  GFR-binding peptide
  MOD_RES (32), (33): Xaa is C or S
AKVVMNPYVKLIVNNSSDFFLVSLSSLKTPAXX

SEQ ID NO: 43378 - protein, 33 aa, Artificial Sequence
  GFR-binding peptide
  MOD_RES (1), (3): Xaa is C or S
XKXSKVVMPYVKLVKPTRGVLFFISLSSLDQPV

SEQ ID NO: 43379 - protein, 37 aa, Artificial Sequence
  GFR-binding peptide
  MOD_RES (33), (34): Xaa is C or S
  MOD_RES (11), (12), (13), (14), (15): Xaa is A or G
  MOD_RES (16), (17), (18), (19): Xaa is A or G or is absent
EVVMDPYVKLXXXXXXXXXFFLISLSSLRTPVXXTPP

SEQ ID NO: 43380 - protein, 38 aa, Artificial Sequence
  GFR-binding peptide
  MOD_RES (1), (32), (33): Xaa is C or S
XSRVIMPYVKLVKPKRGVLFFISLSSLAQPVXXPAASA

SEQ ID NO: 43381 - protein, 38 aa, Artificial Sequence
  GFR-binding peptide
  MOD_RES (33), (34): Xaa is C or S
  MOD_RES (11), (12), (13), (14), (15): Xaa is A or G
  MOD_RES (16), (17), (18), (19): Xaa is A or G or is absent
SRVIMPYVKLXXXXXXXXXFFLISLSSLAQPVXXPAAS

SEQ ID NO: 43382 - protein, 39 aa, Artificial Sequence
  GFR-binding peptide
  MOD_RES (33), (34): Xaa is C or S
  MOD_RES (11), (12), (13), (14), (15): Xaa is A or G
  MOD_RES (16), (17), (18), (19): Xaa is A or G or is absent
EVVMEPYVKLXXXXXXXXXFFLMSLSSLETPVXXAKPIS

SEQ ID NO: 43383 - protein, 33 aa, Artificial Sequence
  GFR-binding peptide
  MOD_RES (33), (33): Xaa is C or S
  MOD_RES (11), (12), (13), (14), (15): Xaa is A or G
  MOD_RES (16), (17), (18), (19): Xaa is A or G or is absent
SKVVMPYVKLXXXXXXXXXFFLISLSSLDQPVX

SEQ ID NO: 43384 - protein, 35 aa, Artificial Sequence
  GFR-binding peptide
  MOD_RES (35), (35): Xaa is C or S
  MOD_RES (13), (14), (15), (16), (17): Xaa is A or G
  MOD_RES (18), (19), (20), (21): Xaa is A or G or is absent
EAVSMGEPYVKLXXXXXXXXXFFLVSLSSLKTPVX

SEQ ID NO: 43385 - protein, 32 aa, Artificial Sequence
  GFR-binding peptide
  MOD_RES (1), (32): Xaa is C or S
XSRVIMPYVKLVKPKRGVLFFISLSSLAQPVX

SEQ ID NO: 43386 - protein, 40 aa, Artificial Sequence
  GFR-binding peptide
  MOD_RES (2), (4), (38), (39): Xaa is C or S
  MOD_RES (16), (17), (18), (19), (20): Xaa is A or G
  MOD_RES (21), (22), (23), (24): Xaa is A or G or is absent
SXGXRDVVMGPYVKLXXXXXXXXXFFLMSLSSMKTPTXXP

SEQ ID NO: 43387 - protein, 35 aa, Artificial Sequence
  GFR-binding peptide
  MOD_RES (34), (35): Xaa is C or S
  MOD_RES (12), (13), (14), (15), (16): Xaa is A or G
  MOD_RES (17), (18), (19), (20): Xaa is A or G or is absent
AKVVMNPYVKLXXXXXXXXXFFLVSLSSLKTPAXX

SEQ ID NO: 43388 - protein, 31 aa, Artificial Sequence
  GFR-binding peptide
  MOD_RES (1), (1): Xaa is C or S
XSKVVMPYVKLVKPTRGVLFFISLSSLDQPV

SEQ ID NO: 43389 - protein, 38 aa, Artificial Sequence
  GFR-binding peptide
  MOD_RES (33), (34): Xaa is C or S
  MOD_RES (11), (12), (13), (14), (15): Xaa is A or G
  MOD_RES (16), (17), (18), (19): Xaa is A or G or is absent
KVVMNPYVKLXXXXXXXXXFFLVSLSSLKTPAXXAKPV

SEQ ID NO: 43390 - protein, 36 aa, Artificial Sequence
  GFR-binding peptide
  MOD_RES (32), (33): Xaa is C or S
AEVVMDPYVKLVVNNAADFFLISLSSLRAPVXXSAP

SEQ ID NO: 43391 - protein, 35 aa, Artificial Sequence
  GFR-binding peptide
  MOD_RES (2), (33), (34): Xaa is C or S
KXSRVIMPYVKLVKPKRGVLFFISLSSLAQPVXXP

SEQ ID NO: 43392 - protein, 40 aa, Artificial Sequence
  GFR-binding peptide
  MOD_RES (2), (4), (37), (38): Xaa is C or S
  MOD_RES (15), (16), (17), (18), (19): Xaa is A or G
  MOD_RES (20), (21), (22), (23): Xaa is A or G or is absent
SXKXSRVIMPYVKLXXXXXXXXXFFLISLSSLAQPVXXPA

SEQ ID NO: 43393 - protein, 38 aa, Artificial Sequence
  GFR-binding peptide
  MOD_RES (32), (33): Xaa is C or S
SRVVMNPYVKLIVNSSDDFFLVSLSSLKTPAXXPKPVY

SEQ ID NO: 43394 - protein, 35 aa, Artificial Sequence
  GFR-binding peptide
  MOD_RES (1), (3): Xaa is C or S
  MOD_RES (14), (15), (16), (17), (18): Xaa is A or G
  MOD_RES (19), (20), (21), (22): Xaa is A or G or is absent
XKXSKVIMPYVKLXXXXXXXXXFFLISLSSLDQSV

SEQ ID NO: 43395 - protein, 33 aa, Artificial Sequence
  GFR-binding peptide
  MOD_RES (31), (32): Xaa is C or S
SRVIMPYVKLVKPKRGVLFFISLSSLAQPVXXP

SEQ ID NO: 43396 - protein, 40 aa, Artificial Sequence
  GFR-binding peptide
  MOD_RES (35), (36): Xaa is C or S
  MOD_RES (13), (14), (15), (16), (17): Xaa is A or G
  MOD_RES (18), (19), (20), (21): Xaa is A or G or is absent
EAVSMGEPYVKLXXXXXXXXXFFLVSLSSLKTPVXXAKGV

SEQ ID NO: 43397 - protein, 32 aa, Artificial Sequence
  GFR-binding peptide
  MOD_RES (11), (12), (13), (14), (15): Xaa is A or G
  MOD_RES (16), (17), (18), (19): Xaa is A or G or is absent
SVAMGPYVKLXXXXXXXXXFFLISLSSLKTPV

SEQ ID NO: 43398 - protein, 40 aa, Artificial Sequence
  GFR-binding peptide
  MOD_RES (2), (36): Xaa is C or S
  MOD_RES (14), (15), (16), (17), (18): Xaa is A or G
  MOD_RES (19), (20), (21), (22): Xaa is A or G or is absent
GXSRVVMNPYVKLXXXXXXXXXFFLVSLSSLKTPAXTPKT

SEQ ID NO: 43399 - protein, 40 aa, Artificial Sequence
  GFR-binding peptide
  MOD_RES (2), (4), (36), (37): Xaa is C or S
RXGXSEVVMDPYVKLVVNNASDFFLISLSSLRTPVXXTPP

SEQ ID NO: 43400 - protein, 40 aa, Artificial Sequence
  GFR-binding peptide
  MOD_RES (2), (34): Xaa is C or S
GXSRVVMNPYVKLIVNSSDDFFLVSLSSLKTPAXTPKTVH

SEQ ID NO: 43401 - protein, 33 aa, Artificial Sequence
  GFR-binding peptide
  MOD_RES (31), (32): Xaa is C or S
RVVMNPYVKLIVNSSDDFFLVSLSSLKTPAXXP

SEQ ID NO: 43402 - protein, 39 aa, Artificial Sequence
  GFR-binding peptide
  MOD_RES (33), (34): Xaa is C or S
  MOD_RES (11), (12), (13), (14), (15): Xaa is A or G
  MOD_RES (16), (17), (18), (19): Xaa is A or G or is absent
EVVMDPYVKLXXXXXXXXXFFLISLSSLRTPVXXTPPTS

SEQ ID NO: 43403 - protein, 39 aa, Artificial Sequence
  GFR-binding peptide
  MOD_RES (2), (36), (37): Xaa is C or S
  MOD_RES (14), (15), (16), (17), (18): Xaa is A or G
  MOD_RES (19), (20), (21), (22): Xaa is A or G or is absent
GXESVAMGPYVKLXXXXXXXXXFFLISLSSLKTPVXXAK

SEQ ID NO: 43404 - protein, 34 aa, Artificial Sequence
  GFR-binding peptide
  MOD_RES (1), (3): Xaa is C or S
XGXSRVVMNPYVKLIVNSSDDFFLVSLSSLKTPA

SEQ ID NO: 43405 - protein, 36 aa, Artificial Sequence
  GFR-binding peptide
  MOD_RES (35), (35): Xaa is C or S
  MOD_RES (11), (12), (13), (14), (15): Xaa is A or G
  MOD_RES (16), (17), (18), (19): Xaa is A or G or is absent
HEELRPYVKLXXXXXXXXXFFLVSLSSHHVRSPQXK

SEQ ID NO: 43406 - protein, 38 aa, Artificial Sequence
  GFR-binding peptide
  MOD_RES (2), (4), (35), (36): Xaa is C or S
SXKXSKVVMPYVKLVKPTRGVLFFISLSSLDQPVXXPS

SEQ ID NO: 43407 - protein, 38 aa, Artificial Sequence
  GFR-binding peptide
  MOD_RES (1), (32), (33): Xaa is C or S
XEEVIMPYVKLLLVRGNDFFLMSLSSTKVPAXXTSPVR

SEQ ID NO: 43408 - protein, 36 aa, Artificial Sequence
  GFR-binding peptide
  MOD_RES (1), (3), (35), (36): Xaa is C or S
XGXAEVVMDPYVKLVVNNAADFFLISLSSLRAPVXX

SEQ ID NO: 43409 - protein, 33 aa, Artificial Sequence
  GFR-binding peptide
  MOD_RES (31), (32): Xaa is C or S
EVVMDPYVKLVVNNASDFFLISLSSLRTPVXXT

SEQ ID NO: 43410 - protein, 36 aa, Artificial Sequence
  GFR-binding peptide
  MOD_RES (2), (36): Xaa is C or S
  MOD_RES (14), (15), (16), (17), (18): Xaa is A or G
  MOD_RES (19), (20), (21), (22): Xaa is A or G or is absent
GXAKVVMNPYVKLXXXXXXXXXFFLVSLSSLKTPAX

SEQ ID NO: 43411 - protein, 37 aa, Artificial Sequence
  GFR-binding peptide
  MOD_RES (33), (33): Xaa is C or S
NHQLFPYVKLHQGQHPKIRFFLMSLSSEETPVXELGE

SEQ ID NO: 43412 - protein, 41 aa, Artificial Sequence
  GFR-binding peptide
  MOD_RES (1), (3), (35), (36): Xaa is C or S
XGXAEVVMDPYVKLVVNNAADFFLISLSSLRAPVXXSAPAA

SEQ ID NO: 43413 - protein, 41 aa, Artificial Sequence
  GFR-binding peptide
  MOD_RES (2), (36), (37): Xaa is C or S
  MOD_RES (14), (15), (16), (17), (18): Xaa is A or G
  MOD_RES (19), (20), (21), (22): Xaa is A or G or is absent
GXAKVVMNPYVKLXXXXXXXXXFFLVSLSSLKTPAXXAKPV

SEQ ID NO: 43414 - protein, 38 aa, Artificial Sequence
  GFR-binding peptide
  MOD_RES (2), (35), (36): Xaa is C or S
GXEAVSMGEPYVKLTPVGMDDFFLVSLSSLKTPVXXAK

SEQ ID NO: 43415 - protein, 38 aa, Artificial Sequence
  GFR-binding peptide
  MOD_RES (2), (4), (37), (38): Xaa is C or S
  MOD_RES (15), (16), (17), (18), (19): Xaa is A or G
  MOD_RES (20), (21), (22), (23): Xaa is A or G or is absent
LXGXEEVIMPYVKLXXXXXXXXXFFLMSLSSTKVPAXX

SEQ ID NO: 43416 - protein, 35 aa, Artificial Sequence
  GFR-binding peptide
  MOD_RES (1), (35): Xaa is C or S
  MOD_RES (13), (14), (15), (16), (17): Xaa is A or G
  MOD_RES (18), (19), (20), (21): Xaa is A or G or is absent
XSEVTMNPYVKLXXXXXXXXXFFLISLSSMKEPVX

SEQ ID NO: 43417 - protein, 42 aa, Artificial Sequence
  GFR-binding peptide
  MOD_RES (1), (3), (37), (38): Xaa is C or S
  MOD_RES (15), (16), (17), (18), (19): Xaa is A or G
  MOD_RES (20), (21), (22), (23): Xaa is A or G or is absent
XGXSEVVMDPYVKLXXXXXXXXXFFLISLSSLRTPVXXTPPT

SEQ ID NO: 43418 - protein, 33 aa, Artificial Sequence
  GFR-binding peptide
  MOD_RES (32), (32): Xaa is C or S
SRVVMNPYVKLIVNSSDDFFLVSLSSLKTPAXT

SEQ ID NO: 43419 - protein, 32 aa, Artificial Sequence
  GFR-binding peptide
  MOD_RES (2), (2): Xaa is C or S
KXSKVIMPYVKLIKPTKGILFFISLSSLDQSV

SEQ ID NO: 43420 - protein, 34 aa, Artificial Sequence
  GFR-binding peptide
  MOD_RES (33), (34): Xaa is C or S
EAVSMGEPYVKLTPVGMDDFFLVSLSSLKTPVXX

SEQ ID NO: 43421 - protein, 35 aa, Artificial Sequence
  GFR-binding peptide
  MOD_RES (1), (1): Xaa is C or S
  MOD_RES (14), (15), (16), (17), (18): Xaa is A or G
  MOD_RES (19), (20), (21), (22): Xaa is A or G or is absent
XELHEELRPYVKLXXXXXXXXXFFLVSLSSHHVRS

SEQ ID NO: 43422 - protein, 34 aa, Artificial Sequence
  GFR-binding peptide
  MOD_RES (1), (3): Xaa is C or S
XGXRDVVMGPYVKLIIQQKDNFFLMSLSSMKTPT

SEQ ID NO: 43423 - protein, 37 aa, Artificial Sequence
  GFR-binding peptide
  MOD_RES (33), (34): Xaa is C or S
  MOD_RES (11), (12), (13), (14), (15): Xaa is A or G
  MOD_RES (16), (17), (18), (19): Xaa is A or G or is absent
EVVMEPYVKLXXXXXXXXXFFLMSLSSLETPVXXAKP

SEQ ID NO: 43424 - protein, 38 aa, Artificial Sequence
  GFR-binding peptide
  MOD_RES (2), (34), (35): Xaa is C or S
GXARVVMNPYVKLIVNSSDDFFLVSLSSLQTPAXXPKP

SEQ ID NO: 43425 - protein, 39 aa, Artificial Sequence
  GFR-binding peptide
  MOD_RES (2), (4), (35), (36): Xaa is C or S
SXKXSKVIMPYVKLIKPTKGILFFISLSSLDQSVXXPSA

SEQ ID NO: 43426 - protein, 34 aa, Artificial Sequence
  GFR-binding peptide
  MOD_RES (34), (34): Xaa is C or S
  MOD_RES (12), (13), (14), (15), (16): Xaa is A or G
  MOD_RES (17), (18), (19), (20): Xaa is A or G or is absent
AKVVMNPYVKLXXXXXXXXXFFLVSLSSLKTPAX

SEQ ID NO: 43427 - protein, 38 aa, Artificial Sequence
  GFR-binding peptide
  MOD_RES (2), (34), (35): Xaa is C or S
AXSEVTMNPYVKLVVNKNEDFFLISLSSMKEPVXXPEP

SEQ ID NO: 43428 - protein, 34 aa, Artificial Sequence
  GFR-binding peptide
  MOD_RES (2), (34): Xaa is C or S
AXSEVTMNPYVKLVVNKNEDFFLISLSSMKEPVX

SEQ ID NO: 43429 - protein, 39 aa, Artificial Sequence
  GFR-binding peptide
  MOD_RES (1), (3), (34), (35): Xaa is C or S
XKXSKVIMPYVKLIKPTKGILFFISLSSLDQSVXXPSAS

SEQ ID NO: 43430 - protein, 42 aa, Artificial Sequence
  GFR-binding peptide
  MOD_RES (1), (3), (37), (38): Xaa is C or S
  MOD_RES (15), (16), (17), (18), (19): Xaa is A or G
  MOD_RES (20), (21), (22), (23): Xaa is A or G or is absent
XAXSEVTMNPYVKLXXXXXXXXXFFLISLSSMKEPVXXPEPI

SEQ ID NO: 43431 - protein, 37 aa, Artificial Sequence
  GFR-binding peptide
  MOD_RES (2), (4), (36), (37): Xaa is C or S
RXGXSEVVMDPYVKLVVNNASDFFLISLSSLRTPVXX

SEQ ID NO: 43432 - protein, 37 aa, Artificial Sequence
  GFR-binding peptide
  MOD_RES (2), (36): Xaa is C or S
  MOD_RES (14), (15), (16), (17), (18): Xaa is A or G
  MOD_RES (19), (20), (21), (22): Xaa is A or G or is absent
GXSRVVMNPYVKLXXXXXXXXXFFLVSLSSLKTPAXT

SEQ ID NO: 43433 - protein, 38 aa, Artificial Sequence
  GFR-binding peptide
  MOD_RES (1), (34), (35): Xaa is C or S
XEAVSMGEPYVKLTPVGMDDFFLVSLSSLKTPVXXAKG

SEQ ID NO: 43434 - protein, 37 aa, Artificial Sequence
  GFR-binding peptide
  MOD_RES (2), (33), (34): Xaa is C or S
GXEEVIMPYVKLLLVRGNDFFLMSLSSTKVPAXXTSP

SEQ ID NO: 43435 - protein, 39 aa, Artificial Sequence
  GFR-binding peptide
  MOD_RES (2), (34), (35): Xaa is C or S
GXARVVMNPYVKLIVNSSDDFFLVSLSSLQTPAXXPKPV

SEQ ID NO: 43436 - protein, 41 aa, Artificial Sequence
  GFR-binding peptide
  MOD_RES (2), (36), (37): Xaa is C or S
  MOD_RES (14), (15), (16), (17), (18): Xaa is A or G
  MOD_RES (19), (20), (21), (22): Xaa is A or G or is absent
GXARVVMNPYVKLXXXXXXXXXFFLVSLSSLQTPAXXPKPV

SEQ ID NO: 43437 - protein, 41 aa, Artificial Sequence
  GFR-binding peptide
  MOD_RES (2), (4), (41): Xaa is C or S
AXAXELHEELRPYVKLLKPKKRVYEFFLVSLSSHHVRSPQX

SEQ ID NO: 43438 - protein, 34 aa, Artificial Sequence
  GFR-binding peptide
  MOD_RES (1), (1): Xaa is C or S
  MOD_RES (13), (14), (15), (16), (17): Xaa is A or G
  MOD_RES (18), (19), (20), (21): Xaa is A or G or is absent
XRDVVMGPYVKLXXXXXXXXXFFLMSLSSMKTPT

SEQ ID NO: 43439 - protein, 39 aa, Artificial Sequence
  GFR-binding peptide
  MOD_RES (2), (4), (38): Xaa is C or S
  MOD_RES (16), (17), (18), (19), (20): Xaa is A or G
  MOD_RES (21), (22), (23), (24): Xaa is A or G or is absent
HXGXSRVVMNPYVKLXXXXXXXXXFFLVSLSSLKTPAXT

SEQ ID NO: 43440 - protein, 30 aa, Artificial Sequence; identical to SEQ ID NO: 1734
  GFR-binding peptide

SEQ ID NO: 43441 - protein, 40 aa, Artificial Sequence
  GFR-binding peptide
  MOD_RES (1), (38): Xaa is C or S
  MOD_RES (14), (15), (16), (17), (18): Xaa is A or G
  MOD_RES (19), (20), (21), (22): Xaa is A or G or is absent
XELHEELRPYVKLXXXXXXXXXFFLVSLSSHHVRSPQXKV

SEQ ID NO: 43442 - protein, 37 aa, Artificial Sequence
  GFR-binding peptide
  MOD_RES (1), (3), (37): Xaa is C or S
  MOD_RES (15), (16), (17), (18), (19): Xaa is A or G
  MOD_RES (20), (21), (22), (23): Xaa is A or G or is absent
XAXSEVTMNPYVKLXXXXXXXXXFFLISLSSMKEPVX

SEQ ID NO: 43443 - protein, 38 aa, Artificial Sequence
  GFR-binding peptide
  MOD_RES (1), (34), (35): Xaa is C or S
  MOD_RES (12), (13), (14), (15), (16): Xaa is A or G
  MOD_RES (17), (18), (19), (20): Xaa is A or G or is absent
XSKVIMPYVKLXXXXXXXXXFFLISLSSLDQSVXXPSA

SEQ ID NO: 43444 - protein, 34 aa, Artificial Sequence
  GFR-binding peptide
  MOD_RES (13), (14), (15), (16), (17): Xaa is A or G
  MOD_RES (18), (19), (20), (21): Xaa is A or G or is absent
EAVSMGEPYVKLXXXXXXXXXFFLVSLSSLKTPV

SEQ ID NO: 43445 - protein, 33 aa, Artificial Sequence
  GFR-binding peptide
  MOD_RES (12), (13), (14), (15), (16): Xaa is A or G
  MOD_RES (17), (18), (19), (20): Xaa is A or G or is absent
KNHQLFPYVKLXXXXXXXXXFFLMSLSSEETPV

SEQ ID NO: 43446 - protein, 40 aa, Artificial Sequence
  GFR-binding peptide
  MOD_RES (2), (4), (37), (38): Xaa is C or S
  MOD_RES (15), (16), (17), (18), (19): Xaa is A or G
  MOD_RES (20), (21), (22), (23): Xaa is A or G or is absent
SXKXSKVVMPYVKLXXXXXXXXXFFLISLSSLDQPVXXPS

SEQ ID NO: 43447 - protein, 39 aa, Artificial Sequence
  GFR-binding peptide
  MOD_RES (2), (36), (37): Xaa is C or S
  MOD_RES (14), (15), (16), (17), (18): Xaa is A or G
  MOD_RES (19), (20), (21), (22): Xaa is A or G or is absent
AXSEVTMNPYVKLXXXXXXXXXFFLISLSSMKEPVXXPE

SEQ ID NO: 43448 - protein, 34 aa, Artificial Sequence
  GFR-binding peptide
  MOD_RES (31), (32): Xaa is C or S
EVVMEPYVKLVVKDYEDFFLMSLSSLETPVXXAK

SEQ ID NO: 43449 - protein, 37 aa, Artificial Sequence
  GFR-binding peptide
  MOD_RES (1), (35): Xaa is C or S
XKNHQLFPYVKLHQGQHPKIRFFLMSLSSEETPVXEL

SEQ ID NO: 43450 - protein, 43 aa, Artificial Sequence
  GFR-binding peptide
  MOD_RES (1), (3), (37), (38): Xaa is C or S
  MOD_RES (15), (16), (17), (18), (19): Xaa is A or G
  MOD_RES (20), (21), (22), (23): Xaa is A or G or is absent
XGXAKVVMNPYVKLXXXXXXXXXFFLVSLSSLKTPAXXAKPVA

SEQ ID NO: 43451 - protein, 44 aa, Artificial Sequence
  GFR-binding peptide
  MOD_RES (2), (4), (38), (39): Xaa is C or S
  MOD_RES (16), (17), (18), (19), (20): Xaa is A or G
  MOD_RES (21), (22), (23), (24): Xaa is A or G or is absent
HXGXSRVVMNPYVKLXXXXXXXXXFFLVSLSSLKTPAXXPKPVY

SEQ ID NO: 43452 - protein, 40 aa, Artificial Sequence
  GFR-binding peptide
  MOD_RES (34), (35): Xaa is C or S
  MOD_RES (12), (13), (14), (15), (16): Xaa is A or G
  MOD_RES (17), (18), (19), (20): Xaa is A or G or is absent
GEVVMEPYVKLXXXXXXXXXFFLMSLSSLETPVXXAKPIS

SEQ ID NO: 43453 - protein, 41 aa, Artificial Sequence
  GFR-binding peptide
  MOD_RES (2), (4), (38), (39): Xaa is C or S
  MOD_RES (16), (17), (18), (19), (20): Xaa is A or G
  MOD_RES (21), (22), (23), (24): Xaa is A or G or is absent
HXGXAKVVMNPYVKLXXXXXXXXXFFLVSLSSLKTPAXXAK

SEQ ID NO: 43454 - protein, 42 aa, Artificial Sequence
  GFR-binding peptide
  MOD_RES (1), (3), (40): Xaa is C or S
  MOD_RES (16), (17), (18), (19), (20): Xaa is A or G
  MOD_RES (21), (22), (23), (24): Xaa is A or G or is absent
XAXELHEELRPYVKLXXXXXXXXXFFLVSLSSHHVRSPQXKV

SEQ ID NO: 43455 - protein, 38 aa, Artificial Sequence
  GFR-binding peptide
  MOD_RES (2), (35), (36): Xaa is C or S
  MOD_RES (13), (14), (15), (16), (17): Xaa is A or G
  MOD_RES (18), (19), (20), (21): Xaa is A or G or is absent
KXSKVVMPYVKLXXXXXXXXXFFLISLSSLDQPVXXPS

SEQ ID NO: 43456 - protein, 37 aa, Artificial Sequence
  GFR-binding peptide
  MOD_RES (2), (34), (35): Xaa is C or S
GXSRVVMNPYVKLIVNSSDDFFLVSLSSLKTPAXXPK

SEQ ID NO: 43457 - protein, 34 aa, Artificial Sequence
  GFR-binding peptide
  MOD_RES (1), (1): Xaa is C or S
  MOD_RES (13), (14), (15), (16), (17): Xaa is A or G
  MOD_RES (18), (19), (20), (21): Xaa is A or G or is absent
XKNHQLFPYVKLXXXXXXXXXFFLMSLSSEETPV

SEQ ID NO: 43458 - protein, 34 aa, Artificial Sequence
  GFR-binding peptide
  MOD_RES (1), (33): Xaa is C or S
XSRVVMNPYVKLIVNSSDDFFLVSLSSLKTPAXT

SEQ ID NO: 43459 - protein, 34 aa, Artificial Sequence
  GFR-binding peptide
  MOD_RES (2), (33), (34): Xaa is C or S
GXEEVIMPYVKLLLVRGNDFFLMSLSSTKVPAXX

SEQ ID NO: 43460 - protein, 34 aa, Artificial Sequence
  GFR-binding peptide
  MOD_RES (33), (34): Xaa is C or S
  MOD_RES (11), (12), (13), (14), (15): Xaa is A or G
  MOD_RES (16), (17), (18), (19): Xaa is A or G or is absent
SKVVMPYVKLXXXXXXXXXFFLISLSSLDQPVXX

SEQ ID NO: 43461 - protein, 32 aa, Artificial Sequence
  GFR-binding peptide
  MOD_RES (1), (1): Xaa is C or S
XAEVVMDPYVKLVVNNAADFFLISLSSLRAPV

SEQ ID NO: 43462 - protein, 36 aa, Artificial Sequence
  GFR-binding peptide
  MOD_RES (1), (35), (36): Xaa is C or S
  MOD_RES (13), (14), (15), (16), (17): Xaa is A or G
  MOD_RES (18), (19), (20), (21): Xaa is A or G or is absent
XAEVVMDPYVKLXXXXXXXXXFFLISLSSLRAPVXX

SEQ ID NO: 43463 - protein, 34 aa, Artificial Sequence
  GFR-binding peptide
  MOD_RES (33), (34): Xaa is C or S
  MOD_RES (11), (12), (13), (14), (15): Xaa is A or G
  MOD_RES (16), (17), (18), (19): Xaa is A or G or is absent
DVVMGPYVKLXXXXXXXXXFFLMSLSSMKTPTXX

SEQ ID NO: 43464 - protein, 37 aa, Artificial Sequence
  GFR-binding peptide
  MOD_RES (2), (4): Xaa is C or S
  MOD_RES (16), (17), (18), (19), (20): Xaa is A or G
  MOD_RES (21), (22), (23), (24): Xaa is A or G or is absent
HXGXSRVVMNPYVKLXXXXXXXXXFFLVSLSSLKTPA

SEQ ID NO: 43465 - protein, 40 aa, Artificial Sequence
  GFR-binding peptide
  MOD_RES (2), (36): Xaa is C or S
EXKNHQLFPYVKLHQGQHPKIRFFLMSLSSEETPVXELGE

SEQ ID NO: 43466 - protein, 39 aa, Artificial Sequence
  GFR-binding peptide
  MOD_RES (35), (35): Xaa is C or S
  MOD_RES (11), (12), (13), (14), (15): Xaa is A or G
  MOD_RES (16), (17), (18), (19): Xaa is A or G or is absent
HEELRPYVKLXXXXXXXXXFFLVSLSSHHVRSPQXKVSS

SEQ ID NO: 43467 - protein, 36 aa, Artificial Sequence
  GFR-binding peptide
  MOD_RES (2), (36): Xaa is C or S
EXKNHQLFPYVKLHQGQHPKIRFFLMSLSSEETPVX

SEQ ID NO: 43468 - protein, 38 aa, Artificial Sequence
  GFR-binding peptide
  MOD_RES (33), (34): Xaa is C or S
EAVSMGEPYVKLTPVGMDDFFLVSLSSLKTPVXXAKGV

SEQ ID NO: 43469 - protein, 34 aa, Artificial Sequence
  GFR-binding peptide
  MOD_RES (2), (33), (34): Xaa is C or S
KXSKVIMPYVKLIKPTKGILFFISLSSLDQSVXX

SEQ ID NO: 43470 - protein, 42 aa, Artificial Sequence
  GFR-binding peptide
  MOD_RES (2), (39): Xaa is C or S
AXELHEELRPYVKLLKPKKRVYEFFLVSLSSHHVRSPQXKVS

SEQ ID NO: 43471 - protein, 41 aa, Artificial Sequence
  GFR-binding peptide
  MOD_RES (1), (3), (35), (36): Xaa is C or S
XGXSRVVMNPYVKLIVNSSDDFFLVSLSSLKTPAXXPKPVY

SEQ ID NO: 43472 - protein, 33 aa, Artificial Sequence
  GFR-binding peptide
  MOD_RES (32), (33): Xaa is C or S
GEVVMEPYVKLVVKDYEDFFLMSLSSLETPVXX

SEQ ID NO: 43473 - protein, 38 aa, Artificial Sequence
  GFR-binding peptide
  MOD_RES (2), (36): Xaa is C or S
EXKNHQLFPYVKLHQGQHPKIRFFLMSLSSEETPVXEL

SEQ ID NO: 43474 - protein, 38 aa, Artificial Sequence
  GFR-binding peptide
  MOD_RES (1), (32), (33): Xaa is C or S
XSKVIMPYVKLIKPTKGILFFISLSSLDQSVXXPSASA

SEQ ID NO: 43475 - protein, 39 aa, Artificial Sequence
  GFR-binding peptide
  MOD_RES (2), (39): Xaa is C or S
  MOD_RES (15), (16), (17), (18), (19): Xaa is A or G
  MOD_RES (20), (21), (22), (23): Xaa is A or G or is absent
AXELHEELRPYVKLXXXXXXXXXFFLVSLSSHHVRSPQX

SEQ ID NO: 43476 - protein, 42 aa, Artificial Sequence
  GFR-binding peptide
  MOD_RES (1), (3), (37), (38): Xaa is C or S
  MOD_RES (15), (16), (17), (18), (19): Xaa is A or G
  MOD_RES (20), (21), (22), (23): Xaa is A or G or is absent
XGXAEVVMDPYVKLXXXXXXXXXFFLISLSSLRAPVXXSAPA

SEQ ID NO: 43477 - protein, 39 aa, Artificial Sequence
  GFR-binding peptide
  MOD_RES (1), (33), (34): Xaa is C or S
XSRVVMNPYVKLIVNSSDDFFLVSLSSLKTPAXXPKPVH

SEQ ID NO: 43478 - protein, 39 aa, Artificial Sequence
  GFR-binding peptide
  MOD_RES (1), (3), (35), (36): Xaa is C or S
XGXAEVVMDPYVKLVVNNAADFFLISLSSLRAPVXXSAP

SEQ ID NO: 43479 - protein, 38 aa, Artificial Sequence
  GFR-binding peptide
  MOD_RES (1), (3), (34), (35): Xaa is C or S
XKXSKVVMPYVKLVKPTRGVLFFISLSSLDQPVXXPSA

SEQ ID NO: 43480 - protein, 39 aa, Artificial Sequence
  GFR-binding peptide
  MOD_RES (1), (3), (34), (35): Xaa is C or S
XKXSKVVMPYVKLVKPTRGVLFFISLSSLDQPVXXPSAS

SEQ ID NO: 43481 - protein, 35 aa, Artificial Sequence
  GFR-binding peptide
  MOD_RES (2), (4): Xaa is C or S
SXGXRDVVMGPYVKLIIQQKDNFFLMSLSSMKTPT

SEQ ID NO: 43482 - protein, 37 aa, Artificial Sequence
  GFR-binding peptide
  MOD_RES (2), (34), (35): Xaa is C or S
GXAEVVMDPYVKLVVNNAADFFLISLSSLRAPVXXSA

SEQ ID NO: 43483 - protein, 33 aa, Artificial Sequence
  GFR-binding peptide
LHEELRPYVKLLKPKKRVYEFFLVSLSSHHVRS

SEQ ID NO: 43484 - protein, 36 aa, Artificial Sequence
  GFR-binding peptide
  MOD_RES (1), (34), (35): Xaa is C or S
  MOD_RES (12), (13), (14), (15), (16): Xaa is A or G
  MOD_RES (17), (18), (19), (20): Xaa is A or G or is absent
XSKVIMPYVKLXXXXXXXXXFFLISLSSLDQSVXXP

SEQ ID NO: 43485 - protein, 40 aa, Artificial Sequence
  GFR-binding peptide
  MOD_RES (2), (35), (36): Xaa is C or S
  MOD_RES (13), (14), (15), (16), (17): Xaa is A or G
  MOD_RES (18), (19), (20), (21): Xaa is A or G or is absent
KXSKVVMPYVKLXXXXXXXXXFFLISLSSLDQPVXXPSAS

SEQ ID NO: 43486 - protein, 36 aa, Artificial Sequence
  GFR-binding peptide
  MOD_RES (2), (36): Xaa is C or S
  MOD_RES (14), (15), (16), (17), (18): Xaa is A or G
  MOD_RES (19), (20), (21), (22): Xaa is A or G or is absent
GXSEVVMDPYVKLXXXXXXXXXFFLISLSSLRTPVX

SEQ ID NO: 43487 - protein, 30 aa, Artificial Sequence; identical to SEQ ID NO: 1731
  GFR-binding peptide

SEQ ID NO: 43488 - protein, 41 aa, Artificial Sequence
  GFR-binding peptide
  MOD_RES (1), (35), (36): Xaa is C or S
  MOD_RES (13), (14), (15), (16), (17): Xaa is A or G
  MOD_RES (18), (19), (20), (21): Xaa is A or G or is absent
XRDVVMGPYVKLXXXXXXXXXFFLMSLSSMKTPTXXPGASG

SEQ ID NO: 43489 - protein, 33 aa, Artificial Sequence
  GFR-binding peptide
  MOD_RES (33), (33): Xaa is C or S
  MOD_RES (11), (12), (13), (14), (15): Xaa is A or G
  MOD_RES (16), (17), (18), (19): Xaa is A or G or is absent
DVVMGPYVKLXXXXXXXXXFFLMSLSSMKTPTX

SEQ ID NO: 43490 - protein, 40 aa, Artificial Sequence
  GFR-binding peptide
  MOD_RES (2), (36), (37): Xaa is C or S
  MOD_RES (14), (15), (16), (17), (18): Xaa is A or G
  MOD_RES (19), (20), (21), (22): Xaa is A or G or is absent
GXGEVVMEPYVKLXXXXXXXXXFFLMSLSSLETPVXXAKP

SEQ ID NO: 43491 - protein, 36 aa, Artificial Sequence
  GFR-binding peptide
  MOD_RES (1), (3): Xaa is C or S
  MOD_RES (15), (16), (17), (18), (19): Xaa is A or G
  MOD_RES (20), (21), (22), (23): Xaa is A or G or is absent
XGXESVAMGPYVKLXXXXXXXXXFFLISLSSLKTPV

SEQ ID NO: 43492 - protein, 36 aa, Artificial Sequence
  GFR-binding peptide
  MOD_RES (1), (32), (33): Xaa is C or S
XSKVIMPYVKLIKPTKGILFFISLSSLDQSVXXPSA

SEQ ID NO: 43493 - protein, 38 aa, Artificial Sequence
  GFR-binding peptide
  MOD_RES (35), (35): Xaa is C or S
HEELRPYVKLLKPKKRVYEFFLVSLSSHHVRSPQXKVS

SEQ ID NO: 43494 - protein, 37 aa, Artificial Sequence
  GFR-binding peptide
  MOD_RES (32), (33): Xaa is C or S
ESVAMGPYVKLYTVVGKDFFLISLSSLKTPVXXAKSA

SEQ ID NO: 43495 - protein, 37 aa, Artificial Sequence
  GFR-binding peptide
  MOD_RES (2), (4), (35), (36): Xaa is C or S
LXGXEEVIMPYVKLLLVRGNDFFLMSLSSTKVPAXXT

SEQ ID NO: 43496 - protein, 37 aa, Artificial Sequence
  GFR-binding peptide
  MOD_RES (1), (3), (36), (37): Xaa is C or S
  MOD_RES (14), (15), (16), (17), (18): Xaa is A or G
  MOD_RES (19), (20), (21), (22): Xaa is A or G or is absent
XKXSKVIMPYVKLXXXXXXXXXFFLISLSSLDQSVXX

SEQ ID NO: 43497 - protein, 33 aa, Artificial Sequence
  GFR-binding peptide
  MOD_RES (31), (32): Xaa is C or S
RVVMNPYVKLIVNSSDDFFLVSLSSLQTPAXXP

SEQ ID NO: 43498 - protein, 35 aa, Artificial Sequence
  GFR-binding peptide
  MOD_RES (12), (13), (14), (15), (16): Xaa is A or G
  MOD_RES (17), (18), (19), (20): Xaa is A or G or is absent
LHEELRPYVKLXXXXXXXXXFFLVSLSSHHVRSPQ

SEQ ID NO: 43499 - protein, 41 aa, Artificial Sequence
  GFR-binding peptide
  MOD_RES (1), (38): Xaa is C or S
XELHEELRPYVKLLKPKKRVYEFFLVSLSSHHVRSPQXKVS

SEQ ID NO: 43500 - protein, 37 aa, Artificial Sequence
  GFR-binding peptide
  MOD_RES (2), (4), (35), (36): Xaa is C or S
SXKXSKVVMPYVKLVKPTRGVLFFISLSSLDQPVXXP

SEQ ID NO: 43501 - protein, 39 aa, Artificial Sequence
  GFR-binding peptide
  MOD_RES (1), (3), (37): Xaa is C or S
  MOD_RES (15), (16), (17), (18), (19): Xaa is A or G
  MOD_RES (20), (21), (22), (23): Xaa is A or G or is absent
XEXKNHQLFPYVKLXXXXXXXXXFFLMSLSSEETPVXEL

SEQ ID NO: 43502 - protein, 43 aa, Artificial Sequence
  GFR-binding peptide
  MOD_RES (2), (4), (39), (40): Xaa is C or S
  MOD_RES (17), (18), (19), (20), (21): Xaa is A or G
  MOD_RES (22), (23), (24), (25): Xaa is A or G or is absent
RXGXEAVSMGEPYVKLXXXXXXXXXFFLVSLSSLKTPVXXAKG

SEQ ID NO: 43503 - protein, 36 aa, Artificial Sequence
  GFR-binding peptide
  MOD_RES (33), (34): Xaa is C or S
  MOD_RES (11), (12), (13), (14), (15): Xaa is A or G
  MOD_RES (16), (17), (18), (19): Xaa is A or G or is absent
EVVMDPYVKLXXXXXXXXXFFLISLSSLRTPVXXTP

SEQ ID NO: 43504 - protein, 42 aa, Artificial Sequence
  GFR-binding peptide
  MOD_RES (2), (4), (36): Xaa is C or S
HXGXSRVVMNPYVKLIVNSSDDFFLVSLSSLKTPAXTPKTVH

SEQ ID NO: 43505 - protein, 36 aa, Artificial Sequence
  GFR-binding peptide
  MOD_RES (1), (35): Xaa is C or S
  MOD_RES (13), (14), (15), (16), (17): Xaa is A or G
  MOD_RES (18), (19), (20), (21): Xaa is A or G or is absent
XSRVVMNPYVKLXXXXXXXXXFFLVSLSSLKTPAXT

SEQ ID NO: 43506 - protein, 41 aa, Artificial Sequence
  GFR-binding peptide
  MOD_RES (2), (36): Xaa is C or S
  MOD_RES (14), (15), (16), (17), (18): Xaa is A or G
  MOD_RES (19), (20), (21), (22): Xaa is A or G or is absent
GXSRVVMNPYVKLXXXXXXXXXFFLVSLSSLKTPAXTPKTV

SEQ ID NO: 43507 - protein, 37 aa, Artificial Sequence
  GFR-binding peptide
  MOD_RES (2), (4): Xaa is C or S
  MOD_RES (16), (17), (18), (19), (20): Xaa is A or G
  MOD_RES (21), (22), (23), (24): Xaa is A or G or is absent
RXGXAEVVMDPYVKLXXXXXXXXXFFLISLSSLRAPV

SEQ ID NO: 43508 - protein, 34 aa, Artificial Sequence
  GFR-binding peptide
  MOD_RES (1), (1): Xaa is C or S
  MOD_RES (13), (14), (15), (16), (17): Xaa is A or G
  MOD_RES (18), (19), (20), (21): Xaa is A or G or is absent
XAKVVMNPYVKLXXXXXXXXXFFLVSLSSLKTPA

SEQ ID NO: 43509 - protein, 34 aa, Artificial Sequence
  GFR-binding peptide
  MOD_RES (1), (33), (34): Xaa is C or S
XARVVMNPYVKLIVNSSDDFFLVSLSSLQTPAXX

SEQ ID NO: 43510 - protein, 39 aa, Artificial Sequence
  GFR-binding peptide
  MOD_RES (2), (4), (35), (36): Xaa is C or S
LXGXEEVIMPYVKLLLVRGNDFFLMSLSSTKVPAXXTSP

SEQ ID NO: 43511 - protein, 35 aa, Artificial Sequence
  GFR-binding peptide
  MOD_RES (1), (33), (34): Xaa is C or S
XESVAMGPYVKLYTVVGKDFFLISLSSLKTPVXXA

SEQ ID NO: 43512 - protein, 44 aa, Artificial Sequence
  GFR-binding peptide
  MOD_RES (2), (4), (38), (39): Xaa is C or S
  MOD_RES (16), (17), (18), (19), (20): Xaa is A or G
  MOD_RES (21), (22), (23), (24): Xaa is A or G or is absent
RXGXGEVVMEPYVKLXXXXXXXXXFFLMSLSSLETPVXXAKPIS

SEQ ID NO: 43513 - protein, 36 aa, Artificial Sequence
  GFR-binding peptide
  MOD_RES (31), (32): Xaa is C or S
EVVMDPYVKLVVNNASDFFLISLSSLRTPVXXTPPT

SEQ ID NO: 43514 - protein, 39 aa, Artificial Sequence
  GFR-binding peptide
  MOD_RES (2), (4), (38), (39): Xaa is C or S
  MOD_RES (16), (17), (18), (19), (20): Xaa is A or G
  MOD_RES (21), (22), (23), (24): Xaa is A or G or is absent
RXGXSEVVMDPYVKLXXXXXXXXXFFLISLSSLRTPVXX

SEQ ID NO: 43515 - protein, 36 aa, Artificial Sequence
  GFR-binding peptide
  MOD_RES (1), (33): Xaa is C or S
XSRVVMNPYVKLIVNSSDDFFLVSLSSLKTPAXTPK

SEQ ID NO: 43516 - protein, 36 aa, Artificial Sequence
  GFR-binding peptide
  MOD_RES (1), (32), (33): Xaa is C or S
XEEVIMPYVKLLLVRGNDFFLMSLSSTKVPAXXTSP

SEQ ID NO: 43517 - protein, 35 aa, Artificial Sequence
  GFR-binding peptide
  MOD_RES (1), (35): Xaa is C or S
  MOD_RES (13), (14), (15), (16), (17): Xaa is A or G
  MOD_RES (18), (19), (20), (21): Xaa is A or G or is absent
XAEVVMDPYVKLXXXXXXXXXFFLISLSSLRAPVX

SEQ ID NO: 43518 - protein, 31 aa, Artificial Sequence
  GFR-binding peptide
  MOD_RES (31), (31): Xaa is C or S
DVVMGPYVKLIIQQKDNFFLMSLSSMKTPTX

SEQ ID NO: 43519 - protein, 31 aa, Artificial Sequence
  GFR-binding peptide
SEVVMDPYVKLVVNNASDFFLISLSSLRTPV

SEQ ID NO: 43520 - protein, 36 aa, Artificial Sequence
  GFR-binding peptide
  MOD_RES (31), (32): Xaa is C or S
SVAMGPYVKLYTVVGKDFFLISLSSLKTPVXXAKSA

SEQ ID NO: 43521 - protein, 34 aa, Artificial Sequence
  GFR-binding peptide
  MOD_RES (2), (4): Xaa is C or S
SXKXSRVIMPYVKLVKPKRGVLFFISLSSLAQPV

SEQ ID NO: 43522 - protein, 42 aa, Artificial Sequence
  GFR-binding peptide
  MOD_RES (2), (4), (37), (38): Xaa is C or S
  MOD_RES (15), (16), (17), (18), (19): Xaa is A or G
  MOD_RES (20), (21), (22), (23): Xaa is A or G or is absent
LXGXEEVIMPYVKLXXXXXXXXXFFLMSLSSTKVPAXXTSPV

SEQ ID NO: 43523 - protein, 37 aa, Artificial Sequence
  GFR-binding peptide
  MOD_RES (33), (33): Xaa is C or S
  MOD_RES (11), (12), (13), (14), (15): Xaa is A or G
  MOD_RES (16), (17), (18), (19): Xaa is A or G or is absent
RVVMNPYVKLXXXXXXXXXFFLVSLSSLKTPAXTPKT

SEQ ID NO: 43524 - protein, 41 aa, Artificial Sequence
  GFR-binding peptide
  MOD_RES (2), (36), (37): Xaa is C or S
  MOD_RES (14), (15), (16), (17), (18): Xaa is A or G
  MOD_RES (19), (20), (21), (22): Xaa is A or G or is absent
GXRDVVMGPYVKLXXXXXXXXXFFLMSLSSMKTPTXXPGAS

SEQ ID NO: 43525 - protein, 40 aa, Artificial Sequence
  GFR-binding peptide
  MOD_RES (2), (4), (35), (36): Xaa is C or S
SXKXSKVVMPYVKLVKPTRGVLFFISLSSLDQPVXXPSAS

SEQ ID NO: 43526 - protein, 34 aa, Artificial Sequence
  GFR-binding peptide
  MOD_RES (1), (3): Xaa is C or S
XGXESVAMGPYVKLYTVVGKDFFLISLSSLKTPV

SEQ ID NO: 43527 - protein, 43 aa, Artificial Sequence
  GFR-binding peptide
  MOD_RES (2), (4), (37), (38): Xaa is C or S
  MOD_RES (15), (16), (17), (18), (19): Xaa is A or G
  MOD_RES (20), (21), (22), (23): Xaa is A or G or is absent
LXGXEEVIMPYVKLXXXXXXXXXFFLMSLSSTKVPAXXTSPVR

SEQ ID NO: 43528 - protein, 36 aa, Artificial Sequence
  GFR-binding peptide
  MOD_RES (1), (34), (35): Xaa is C or S
  MOD_RES (12), (13), (14), (15), (16): Xaa is A or G
  MOD_RES (17), (18), (19), (20): Xaa is A or G or is absent
XSKVVMPYVKLXXXXXXXXXFFLISLSSLDQPVXXP

SEQ ID NO: 43529 - protein, 38 aa, Artificial Sequence
  GFR-binding peptide
  MOD_RES (2), (34): Xaa is C or S
GXSRVVMNPYVKLIVNSSDDFFLVSLSSLKTPAXTPKT

SEQ ID NO: 43530 - protein, 41 aa, Artificial Sequence
  GFR-binding peptide
  MOD_RES (1), (3), (35), (36): Xaa is C or S
XGXARVVMNPYVKLIVNSSDDFFLVSLSSLQTPAXXPKPVT

SEQ ID NO: 43531 - protein, 39 aa, Artificial Sequence
  GFR-binding peptide
  MOD_RES (2), (4), (36), (37): Xaa is C or S
HXGXARVVMNPYVKLIVNSSDDFFLVSLSSLQTPAXXPK

SEQ ID NO: 43532 - protein, 36 aa, Artificial Sequence
  GFR-binding peptide
  MOD_RES (2), (4), (36): Xaa is C or S
RXGXGEVVMEPYVKLVVKDYEDFFLMSLSSLETPVX

SEQ ID NO: 43533 - protein, 33 aa, Artificial Sequence
  GFR-binding peptide
  MOD_RES (1), (33): Xaa is C or S
XARVVMNPYVKLIVNSSDDFFLVSLSSLQTPAX

SEQ ID NO: 43534 - protein, 37 aa, Artificial Sequence
  GFR-binding peptide
  MOD_RES (32), (32): Xaa is C or S
SRVVMNPYVKLIVNSSDDFFLVSLSSLKTPAXTPKTV

SEQ ID NO: 43535 - protein, 41 aa, Artificial Sequence
  GFR-binding peptide
  MOD_RES (1), (35): Xaa is C or S
  MOD_RES (13), (14), (15), (16), (17): Xaa is A or G
  MOD_RES (18), (19), (20), (21): Xaa is A or G or is absent
XSRVVMNPYVKLXXXXXXXXXFFLVSLSSLKTPAXTPKTVH

SEQ ID NO: 43536 - protein, 35 aa, Artificial Sequence
  GFR-binding peptide
  MOD_RES (34), (34): Xaa is C or S
  MOD_RES (12), (13), (14), (15), (16): Xaa is A or G
  MOD_RES (17), (18), (19), (20): Xaa is A or G or is absent
SRVVMNPYVKLXXXXXXXXXFFLVSLSSLKTPAXT

SEQ ID NO: 43537 - protein, 35 aa, Artificial Sequence
  GFR-binding peptide
  MOD_RES (2), (2): Xaa is C or S
  MOD_RES (14), (15), (16), (17), (18): Xaa is A or G
  MOD_RES (19), (20), (21), (22): Xaa is A or G or is absent
EXKNHQLFPYVKLXXXXXXXXXFFLMSLSSEETPV

SEQ ID NO: 43538 - protein, 33 aa, Artificial Sequence
  GFR-binding peptide
  MOD_RES (33), (33): Xaa is C or S
  MOD_RES (11), (12), (13), (14), (15): Xaa is A or G
  MOD_RES (16), (17), (18), (19): Xaa is A or G or is absent
RVVMNPYVKLXXXXXXXXXFFLVSLSSLKTPAX

SEQ ID NO: 43539 - protein, 41 aa, Artificial Sequence
  GFR-binding peptide
  MOD_RES (2), (35), (36): Xaa is C or S
  MOD_RES (13), (14), (15), (16), (17): Xaa is A or G
  MOD_RES (18), (19), (20), (21): Xaa is A or G or is absent
KXSRVIMPYVKLXXXXXXXXXFFLISLSSLAQPVXXPAASA

SEQ ID NO: 43540 - protein, 33 aa, Artificial Sequence
  GFR-binding peptide
  MOD_RES (33), (33): Xaa is C or S
  MOD_RES (11), (12), (13), (14), (15): Xaa is A or G
  MOD_RES (16), (17), (18), (19): Xaa is A or G or is absent
KVVMNPYVKLXXXXXXXXXFFLVSLSSLKTPAX

SEQ ID NO: 43541 - protein, 34 aa, Artificial Sequence
  GFR-binding peptide
  MOD_RES (34), (34): Xaa is C or S
KNHQLFPYVKLHQGQHPKIRFFLMSLSSEETPVX

SEQ ID NO: 43542 - protein, 37 aa, Artificial Sequence
  GFR-binding peptide
  MOD_RES (1), (33), (34): Xaa is C or S
XSRVVMNPYVKLIVNSSDDFFLVSLSSLKTPAXXPKP

SEQ ID NO: 43543 - protein, 38 aa, Artificial Sequence
  GFR-binding peptide
  MOD_RES (34), (34): Xaa is C or S
  MOD_RES (12), (13), (14), (15), (16): Xaa is A or G
  MOD_RES (17), (18), (19), (20): Xaa is A or G or is absent
SRVVMNPYVKLXXXXXXXXXFFLVSLSSLKTPAXTPKT

SEQ ID NO: 43544 - protein, 38 aa, Artificial Sequence
  GFR-binding peptide
  MOD_RES (1), (35): Xaa is C or S
XKNHQLFPYVKLHQGQHPKIRFFLMSLSSEETPVXELG

SEQ ID NO: 43545 - protein, 42 aa, Artificial Sequence
  GFR-binding peptide
  MOD_RES (1), (3), (37): Xaa is C or S
XEXKNHQLFPYVKLHQGQHPKIRFFLMSLSSEETPVXELGED

SEQ ID NO: 43546 - protein, 41 aa, Artificial Sequence
  GFR-binding peptide
  MOD_RES (2), (4), (36), (37): Xaa is C or S
RXGXESVAMGPYVKLYTVVGKDFFLISLSSLKTPVXXAKSA

SEQ ID NO: 43547 - protein, 37 aa, Artificial Sequence
  GFR-binding peptide
  MOD_RES (1), (33): Xaa is C or S
XSRVVMNPYVKLIVNSSDDFFLVSLSSLKTPAXTPKT

SEQ ID NO: 43548 - protein, 32 aa, Artificial Sequence
  GFR-binding peptide
  MOD_RES (1), (1): Xaa is C or S
XSRVVMNPYVKLIVNSSDDFFLVSLSSLKTPA

SEQ ID NO: 43549 - protein, 38 aa, Artificial Sequence
  GFR-binding peptide
  MOD_RES (34), (35): Xaa is C or S
  MOD_RES (12), (13), (14), (15), (16): Xaa is A or G
  MOD_RES (17), (18), (19), (20): Xaa is A or G or is absent
SEVTMNPYVKLXXXXXXXXXFFLISLSSMKEPVXXPEP

SEQ ID NO: 43550 - protein, 36 aa, Artificial Sequence
  GFR-binding peptide
  MOD_RES (2), (4): Xaa is C or S
  MOD_RES (15), (16), (17), (18), (19): Xaa is A or G
  MOD_RES (20), (21), (22), (23): Xaa is A or G or is absent
LXGXEEVIMPYVKLXXXXXXXXXFFLMSLSSTKVPA

SEQ ID NO: 43551 - protein, 43 aa, Artificial Sequence
  GFR-binding peptide
  MOD_RES (2), (4), (38), (39): Xaa is C or S
  MOD_RES (16), (17), (18), (19), (20): Xaa is A or G
  MOD_RES (21), (22), (23), (24): Xaa is A or G or is absent
HXGXAKVVMNPYVKLXXXXXXXXXFFLVSLSSLKTPAXXAKPV

SEQ ID NO: 43552 - protein, 39 aa, Artificial Sequence
  GFR-binding peptide
  MOD_RES (2), (4), (35), (36): Xaa is C or S
SXKXSRVIMPYVKLVKPKRGVLFFISLSSLAQPVXXPAA

SEQ ID NO: 43553 - protein, 35 aa, Artificial Sequence
  GFR-binding peptide
  MOD_RES (2), (2): Xaa is C or S
  MOD_RES (14), (15), (16), (17), (18): Xaa is A or G
  MOD_RES (19), (20), (21), (22): Xaa is A or G or is absent
GXSEVVMDPYVKLXXXXXXXXXFFLISLSSLRTPV

SEQ ID NO: 43554 - protein, 40 aa, Artificial Sequence
  GFR-binding peptide
  MOD_RES (1), (3), (36), (37): Xaa is C or S
  MOD_RES (14), (15), (16), (17), (18): Xaa is A or G
  MOD_RES (19), (20), (21), (22): Xaa is A or G or is absent
XKXSKVVMPYVKLXXXXXXXXXFFLISLSSLDQPVXXPSA

SEQ ID NO: 43555 - protein, 36 aa, Artificial Sequence
  GFR-binding peptide
  MOD_RES (1), (3): Xaa is C or S
  MOD_RES (15), (16), (17), (18), (19): Xaa is A or G
  MOD_RES (20), (21), (22), (23): Xaa is A or G or is absent
XGXSRVVMNPYVKLXXXXXXXXXFFLVSLSSLKTPA

SEQ ID NO: 43556 - protein, 37 aa, Artificial Sequence
  GFR-binding peptide
  MOD_RES (2), (33), (34): Xaa is C or S
KXSKVIMPYVKLIKPTKGILFFISLSSLDQSVXXPSA

SEQ ID NO: 43557 - protein, 35 aa, Artificial Sequence
  GFR-binding peptide
  MOD_RES (1), (3), (34), (35): Xaa is C or S
XKXSRVIMPYVKLVKPKRGVLFFISLSSLAQPVXX

SEQ ID NO: 43558 - protein, 33 aa, Artificial Sequence
  GFR-binding peptide
  MOD_RES (32), (33): Xaa is C or S
SEVTMNPYVKLVVNKNEDFFLISLSSMKEPVXX

SEQ ID NO: 43559 - protein, 37 aa, Artificial Sequence
  GFR-binding peptide
  MOD_RES (2), (35), (36): Xaa is C or S
  MOD_RES (13), (14), (15), (16), (17): Xaa is A or G
  MOD_RES (18), (19), (20), (21): Xaa is A or G or is absent
KXSRVIMPYVKLXXXXXXXXXFFLISLSSLAQPVXXP

SEQ ID NO: 43560 - protein, 31 aa, Artificial Sequence
  GFR-binding peptide
SRVVMNPYVKLIVNSSDDFFLVSLSSLKTPA

SEQ ID NO: 43561 - protein, 33 aa, Artificial Sequence
  GFR-binding peptide
  MOD_RES (1), (1): Xaa is C or S
  MOD_RES (12), (13), (14), (15), (16): Xaa is A or G
  MOD_RES (17), (18), (19), (20): Xaa is A or G or is absent
XSKVVMPYVKLXXXXXXXXXFFLISLSSLDQPV

SEQ ID NO: 43562 - protein, 34 aa, Artificial Sequence
  GFR-binding peptide
  MOD_RES (31), (31): Xaa is C or S
RVVMNPYVKLIVNSSDDFFLVSLSSLKTPAXTPK

SEQ ID NO: 43563 - protein, 39 aa, Artificial Sequence
  GFR-binding peptide
  MOD_RES (1), (33), (34): Xaa is C or S
XGEVVMEPYVKLVVKDYEDFFLMSLSSLETPVXXAKPIS

SEQ ID NO: 43564 - protein, 38 aa, Artificial Sequence
  GFR-binding peptide
  MOD_RES (34), (35): Xaa is C or S
  MOD_RES (12), (13), (14), (15), (16): Xaa is A or G
  MOD_RES (17), (18), (19), (20): Xaa is A or G or is absent
SEVVMDPYVKLXXXXXXXXXFFLISLSSLRTPVXXTPP

SEQ ID NO: 43565 - protein, 33 aa, Artificial Sequence
  GFR-binding peptide
  MOD_RES (31), (31): Xaa is C or S
RVVMNPYVKLIVNSSDDFFLVSLSSLKTPAXTP

SEQ ID NO: 43566 - protein, 33 aa, Artificial Sequence
  GFR-binding peptide
  MOD_RES (1), (32), (33): Xaa is C or S
XSRVIMPYVKLVKPKRGVLFFISLSSLAQPVXX

SEQ ID NO: 43567 - protein, 37 aa, Artificial Sequence
  GFR-binding peptide
  MOD_RES (1), (3), (35), (36): Xaa is C or S
XGXSEVVMDPYVKLVVNNASDFFLISLSSLRTPVXXT

SEQ ID NO: 43568 - protein, 36 aa, Artificial Sequence
  GFR-binding peptide
  MOD_RES (1), (3), (36): Xaa is C or S
  MOD_RES (14), (15), (16), (17), (18): Xaa is A or G
  MOD_RES (19), (20), (21), (22): Xaa is A or G or is absent
XKXSKVIMPYVKLXXXXXXXXXFFLISLSSLDQSVX

SEQ ID NO: 43569 - protein, 41 aa, Artificial Sequence
  GFR-binding peptide
  MOD_RES (1), (35), (36): Xaa is C or S
  MOD_RES (13), (14), (15), (16), (17): Xaa is A or G
  MOD_RES (18), (19), (20), (21): Xaa is A or G or is absent
XARVVMNPYVKLXXXXXXXXXFFLVSLSSLQTPAXXPKPVT

SEQ ID NO: 43570 - protein, 36 aa, Artificial Sequence
  GFR-binding peptide
  MOD_RES (1), (33), (34): Xaa is C or S
XARVVMNPYVKLIVNSSDDFFLVSLSSLQTPAXXPK

SEQ ID NO: 43571 - protein, 38 aa, Artificial Sequence
  GFR-binding peptide
  MOD_RES (1), (3), (37), (38): Xaa is C or S
  MOD_RES (15), (16), (17), (18), (19): Xaa is A or G
  MOD_RES (20), (21), (22), (23): Xaa is A or G or is absent
XGXSEVVMDPYVKLXXXXXXXXXFFLISLSSLRTPVXX

SEQ ID NO: 43572 - protein, 36 aa, Artificial Sequence
  GFR-binding peptide
  MOD_RES (2), (4), (36): Xaa is C or S
RXGXSEVVMDPYVKLVVNNASDFFLISLSSLRTPVX

SEQ ID NO: 43573 - protein, 35 aa, Artificial Sequence
  GFR-binding peptide
  MOD_RES (1), (33), (34): Xaa is C or S
XAEVVMDPYVKLVVNNAADFFLISLSSLRAPVXXS

SEQ ID NO: 43574 - protein, 32 aa, Artificial Sequence
  GFR-binding peptide
  MOD_RES (31), (32): Xaa is C or S
DVVMGPYVKLIIQQKDNFFLMSLSSMKTPTXX

SEQ ID NO: 43575 - protein, 40 aa, Artificial Sequence
  GFR-binding peptide
  MOD_RES (1), (3), (35), (36): Xaa is C or S
XGXAEVVMDPYVKLVVNNAADFFLISLSSLRAPVXXSAPA

SEQ ID NO: 43576 - protein, 33 aa, Artificial Sequence
  GFR-binding peptide
  MOD_RES (1), (3): Xaa is C or S
XGXEEVIMPYVKLLLVRGNDFFLMSLSSTKVPA

SEQ ID NO: 43577 - protein, 35 aa, Artificial Sequence
  GFR-binding peptide
  MOD_RES (32), (32): Xaa is C or S
SRVVMNPYVKLIVNSSDDFFLVSLSSLKTPAXTPK

SEQ ID NO: 43578 - protein, 37 aa, Artificial Sequence
  GFR-binding peptide
  MOD_RES (1), (1): Xaa is C or S
XELHEELRPYVKLLKPKKRVYEFFLVSLSSHHVRSPQ

SEQ ID NO: 43579 - protein, 38 aa, Artificial Sequence
  GFR-binding peptide
  MOD_RES (1), (36), (37): Xaa is C or S
  MOD_RES (14), (15), (16), (17), (18): Xaa is A or G
  MOD_RES (19), (20), (21), (22): Xaa is A or G or is absent
XEAVSMGEPYVKLXXXXXXXXXFFLVSLSSLKTPVXXA

SEQ ID NO: 43580 - protein, 33 aa, Artificial Sequence
  GFR-binding peptide
  MOD_RES (31), (32): Xaa is C or S
EEVIMPYVKLLLVRGNDFFLMSLSSTKVPAXXT

SEQ ID NO: 43581 - protein, 35 aa, Artificial Sequence
  GFR-binding peptide
  MOD_RES (2), (2): Xaa is C or S
  MOD_RES (14), (15), (16), (17), (18): Xaa is A or G
  MOD_RES (19), (20), (21), (22): Xaa is A or G or is absent
AXSEVTMNPYVKLXXXXXXXXXFFLISLSSMKEPV

SEQ ID NO: 43582 - protein, 36 aa, Artificial Sequence
  GFR-binding peptide
  MOD_RES (1), (3), (35), (36): Xaa is C or S
XGXSRVVMNPYVKLIVNSSDDFFLVSLSSLKTPAXX

SEQ ID NO: 43583 - protein, 37 aa, Artificial Sequence
  GFR-binding peptide
  MOD_RES (2), (34), (35): Xaa is C or S
GXAKVVMNPYVKLIVNNSSDFFLVSLSSLKTPAXXAK

SEQ ID NO: 43584 - protein, 41 aa, Artificial Sequence
  GFR-binding peptide
  MOD_RES (1), (35), (36): Xaa is C or S
  MOD_RES (13), (14), (15), (16), (17): Xaa is A or G
  MOD_RES (18), (19), (20), (21): Xaa is A or G or is absent
XGEVVMEPYVKLXXXXXXXXXFFLMSLSSLETPVXXAKPIS

SEQ ID NO: 43585 - protein, 34 aa, Artificial Sequence
  GFR-binding peptide
  MOD_RES (2), (4): Xaa is C or S
SXKXSKVVMPYVKLVKPTRGVLFFISLSSLDQPV

SEQ ID NO: 43586 - protein, 38 aa, Artificial Sequence
  GFR-binding peptide
  MOD_RES (1), (3), (36), (37): Xaa is C or S
XGXEAVSMGEPYVKLTPVGMDDFFLVSLSSLKTPVXXA

SEQ ID NO: 43587 - protein, 34 aa, Artificial Sequence
  GFR-binding peptide
  MOD_RES (34), (34): Xaa is C or S
  MOD_RES (12), (13), (14), (15), (16): Xaa is A or G
  MOD_RES (17), (18), (19), (20): Xaa is A or G or is absent
AEVVMDPYVKLXXXXXXXXXFFLISLSSLRAPVX

SEQ ID NO: 43588 - protein, 37 aa, Artificial Sequence
  GFR-binding peptide
  MOD_RES (1), (3), (35): Xaa is C or S
XGXSRVVMNPYVKLIVNSSDDFFLVSLSSLKTPAXTP

SEQ ID NO: 43589 - protein, 36 aa, Artificial Sequence
  GFR-binding peptide
  MOD_RES (1), (32), (33): Xaa is C or S
XSRVIMPYVKLVKPKRGVLFFISLSSLAQPVXXPAA

SEQ ID NO: 43590 - protein, 35 aa, Artificial Sequence
  GFR-binding peptide
  MOD_RES (2), (34), (35): Xaa is C or S
GXGEVVMEPYVKLVVKDYEDFFLMSLSSLETPVXX

SEQ ID NO: 43591 - protein, 34 aa, Artificial Sequence
  GFR-binding peptide
  MOD_RES (31), (32): Xaa is C or S
KVVMNPYVKLIVNNSSDFFLVSLSSLKTPAXXAK

SEQ ID NO: 43592 - protein, 41 aa, Artificial Sequence
  GFR-binding peptide
  MOD_RES (1), (3), (37), (38): Xaa is C or S
  MOD_RES (15), (16), (17), (18), (19): Xaa is A or G
  MOD_RES (20), (21), (22), (23): Xaa is A or G or is absent
XAXSEVTMNPYVKLXXXXXXXXXFFLISLSSMKEPVXXPEP

SEQ ID NO: 43593 - protein, 33 aa, Artificial Sequence
  GFR-binding peptide
  MOD_RES (32), (33): Xaa is C or S
SEVVMDPYVKLVVNNASDFFLISLSSLRTPVXX

SEQ ID NO: 43594 - protein, 37 aa, Artificial Sequence
  GFR-binding peptide
  MOD_RES (2), (34), (35): Xaa is C or S
GXARVVMNPYVKLIVNSSDDFFLVSLSSLQTPAXXPK

SEQ ID NO: 43595 - protein, 37 aa, Artificial Sequence
  GFR-binding peptide
  MOD_RES (1), (3), (37): Xaa is C or S
  MOD_RES (15), (16), (17), (18), (19): Xaa is A or G
  MOD_RES (20), (21), (22), (23): Xaa is A or G or is absent
XGXAKVVMNPYVKLXXXXXXXXXFFLVSLSSLKTPAX

SEQ ID NO: 43596 - protein, 34 aa, Artificial Sequence
  GFR-binding peptide
  MOD_RES (1), (1): Xaa is C or S
  MOD_RES (13), (14), (15), (16), (17): Xaa is A or G
  MOD_RES (18), (19), (20), (21): Xaa is A or G or is absent
XGEVVMEPYVKLXXXXXXXXXFFLMSLSSLETPV

SEQ ID NO: 43597 - protein, 44 aa, Artificial Sequence
  GFR-binding peptide
  MOD_RES (1), (3), (40): Xaa is C or S
XAXELHEELRPYVKLLKPKKRVYEFFLVSLSSHHVRSPQXKVSS

SEQ ID NO: 43598 - protein, 39 aa, Artificial Sequence
  GFR-binding peptide
  MOD_RES (1), (3), (35), (36): Xaa is C or S
XGXGEVVMEPYVKLVVKDYEDFFLMSLSSLETPVXXAKP

SEQ ID NO: 43599 - protein, 38 aa, Artificial Sequence
  GFR-binding peptide
  MOD_RES (2), (36), (37): Xaa is C or S
  MOD_RES (14), (15), (16), (17), (18): Xaa is A or G
  MOD_RES (19), (20), (21), (22): Xaa is A or G or is absent
GXRDVVMGPYVKLXXXXXXXXXFFLMSLSSMKTPTXXP

SEQ ID NO: 43600 - protein, 38 aa, Artificial Sequence
  GFR-binding peptide
  MOD_RES (2), (4), (36), (37): Xaa is C or S
HXGXSRVVMNPYVKLIVNSSDDFFLVSLSSLKTPAXXP

SEQ ID NO: 43601 - protein, 36 aa, Artificial Sequence
  GFR-binding peptide
  MOD_RES (1), (3), (35), (36): Xaa is C or S
XGXRDVVMGPYVKLIIQQKDNFFLMSLSSMKTPTXX

SEQ ID NO: 43602 - protein, 34 aa, Artificial Sequence
  GFR-binding peptide
  MOD_RES (34), (34): Xaa is C or S
  MOD_RES (12), (13), (14), (15), (16): Xaa is A or G
  MOD_RES (17), (18), (19), (20): Xaa is A or G or is absent
GEVVMEPYVKLXXXXXXXXXFFLMSLSSLETPVX

SEQ ID NO: 43603 - protein, 34 aa, Artificial Sequence
  GFR-binding peptide
  MOD_RES (1), (34): Xaa is C or S
XEAVSMGEPYVKLTPVGMDDFFLVSLSSLKTPVX

SEQ ID NO: 43604 - protein, 33 aa, Artificial Sequence
  GFR-binding peptide
  MOD_RES (12), (13), (14), (15), (16): Xaa is A or G
  MOD_RES (17), (18), (19), (20): Xaa is A or G or is absent
SEVTMNPYVKLXXXXXXXXXFFLISLSSMKEPV

SEQ ID NO: 43605 - protein, 39 aa, Artificial Sequence
  GFR-binding peptide
  MOD_RES (2), (4), (36), (37): Xaa is C or S
RXGXGEVVMEPYVKLVVKDYEDFFLMSLSSLETPVXXAK

SEQ ID NO: 43606 - protein, 39 aa, Artificial Sequence
  GFR-binding peptide
  MOD_RES (1), (3), (37), (38): Xaa is C or S
  MOD_RES (15), (16), (17), (18), (19): Xaa is A or G
  MOD_RES (20), (21), (22), (23): Xaa is A or G or is absent
XGXAKVVMNPYVKLXXXXXXXXXFFLVSLSSLKTPAXXA

SEQ ID NO: 43607 - protein, 36 aa, Artificial Sequence
  GFR-binding peptide
  MOD_RES (32), (33): Xaa is C or S
RDVVMGPYVKLIIQQKDNFFLMSLSSMKTPTXXPGA

SEQ ID NO: 43608 - protein, 34 aa, Artificial Sequence
  GFR-binding peptide
  MOD_RES (2), (2): Xaa is C or S
GXEAVSMGEPYVKLTPVGMDDFFLVSLSSLKTPV

SEQ ID NO: 43609 - protein, 35 aa, Artificial Sequence
  GFR-binding peptide
  MOD_RES (2), (2): Xaa is C or S
  MOD_RES (14), (15), (16), (17), (18): Xaa is A or G
  MOD_RES (19), (20), (21), (22): Xaa is A or G or is absent
GXRDVVMGPYVKLXXXXXXXXXFFLMSLSSMKTPT

SEQ ID NO: 43610 - protein, 38 aa, Artificial Sequence
  GFR-binding peptide
  MOD_RES (2), (2): Xaa is C or S
  MOD_RES (15), (16), (17), (18), (19): Xaa is A or G
  MOD_RES (20), (21), (22), (23): Xaa is A or G or is absent
AXELHEELRPYVKLXXXXXXXXXFFLVSLSSHHVRSPQ

SEQ ID NO: 43611 - protein, 35 aa, Artificial Sequence
  GFR-binding peptide
  MOD_RES (34), (35): Xaa is C or S
  MOD_RES (12), (13), (14), (15), (16): Xaa is A or G
  MOD_RES (17), (18), (19), (20): Xaa is A or G or is absent
GEVVMEPYVKLXXXXXXXXXFFLMSLSSLETPVXX

SEQ ID NO: 43612 - protein, 40 aa, Artificial Sequence
  GFR-binding peptide
  MOD_RES (2), (4), (36), (37): Xaa is C or S
RXAXSEVTMNPYVKLVVNKNEDFFLISLSSMKEPVXXPEP

SEQ ID NO: 43613 - protein, 38 aa, Artificial Sequence
  GFR-binding peptide
  MOD_RES (1), (34), (35): Xaa is C or S
  MOD_RES (12), (13), (14), (15), (16): Xaa is A or G
  MOD_RES (17), (18), (19), (20): Xaa is A or G or is absent
XSKVVMPYVKLXXXXXXXXXFFLISLSSLDQPVXXPSA

SEQ ID NO: 43614 - protein, 36 aa, Artificial Sequence
  GFR-binding peptide
  MOD_RES (2), (35), (36): Xaa is C or S
  MOD_RES (13), (14), (15), (16), (17): Xaa is A or G
  MOD_RES (18), (19), (20), (21): Xaa is A or G or is absent
KXSKVIMPYVKLXXXXXXXXXFFLISLSSLDQSVXX

SEQ ID NO: 43615 - protein, 40 aa, Artificial Sequence
  GFR-binding peptide
  MOD_RES (1), (3), (37), (38): Xaa is C or S
  MOD_RES (15), (16), (17), (18), (19): Xaa is A or G
  MOD_RES (20), (21), (22), (23): Xaa is A or G or is absent
XGXSEVVMDPYVKLXXXXXXXXXFFLISLSSLRTPVXXTP

SEQ ID NO: 43616 - protein, 37 aa, Artificial Sequence
  GFR-binding peptide
  MOD_RES (37), (37): Xaa is C or S
  MOD_RES (13), (14), (15), (16), (17): Xaa is A or G
  MOD_RES (18), (19), (20), (21): Xaa is A or G or is absent
ELHEELRPYVKLXXXXXXXXXFFLVSLSSHHVRSPQX

SEQ ID NO: 43617 - protein, 31 aa, Artificial Sequence
  GFR-binding peptide
RDVVMGPYVKLIIQQKDNFFLMSLSSMKTPT

SEQ ID NO: 43618 - protein, 41 aa, Artificial Sequence
  GFR-binding peptide
  MOD_RES (1), (35), (36): Xaa is C or S
  MOD_RES (13), (14), (15), (16), (17): Xaa is A or G
  MOD_RES (18), (19), (20), (21): Xaa is A or G or is absent
XSEVVMDPYVKLXXXXXXXXXFFLISLSSLRTPVXXTPPTS

SEQ ID NO: 43619 - protein, 36 aa, Artificial Sequence
  GFR-binding peptide
  MOD_RES (2), (34), (35): Xaa is C or S
GXGEVVMEPYVKLVVKDYEDFFLMSLSSLETPVXXA

SEQ ID NO: 43620 - protein, 36 aa, Artificial Sequence
  GFR-binding peptide
  MOD_RES (2), (34), (35): Xaa is C or S
GXSRVVMNPYVKLIVNSSDDFFLVSLSSLKTPAXXP

SEQ ID NO: 43621 - protein, 30 aa, Artificial Sequence
  GFR-binding peptide
RVVMNPYVKLIVNSSDDFFLVSLSSLKTPA

SEQ ID NO: 43622 - protein, 33 aa, Artificial Sequence
  GFR-binding peptide
  MOD_RES (32), (33): Xaa is C or S
ARVVMNPYVKLIVNSSDDFFLVSLSSLQTPAXX

SEQ ID NO: 43623 - protein, 36 aa, Artificial Sequence
  GFR-binding peptide
  MOD_RES (2), (36): Xaa is C or S
  MOD_RES (14), (15), (16), (17), (18): Xaa is A or G
  MOD_RES (19), (20), (21), (22): Xaa is A or G or is absent
GXESVAMGPYVKLXXXXXXXXXFFLISLSSLKTPVX

SEQ ID NO: 43624 - protein, 36 aa, Artificial Sequence
  GFR-binding peptide
  MOD_RES (32), (33): Xaa is C or S
ESVAMGPYVKLYTVVGKDFFLISLSSLKTPVXXAKS

SEQ ID NO: 43625 - protein, 31 aa, Artificial Sequence
  GFR-binding peptide
  MOD_RES (31), (31): Xaa is C or S
KVVMNPYVKLIVNNSSDFFLVSLSSLKTPAX

SEQ ID NO: 43626 - protein, 36 aa, Artificial Sequence
  GFR-binding peptide
  MOD_RES (1), (33), (34): Xaa is C or S
XRDVVMGPYVKLIIQQKDNFFLMSLSSMKTPTXXPG

SEQ ID NO: 43627 - protein, 40 aa, Artificial Sequence
  GFR-binding peptide
  MOD_RES (1), (3), (35), (36): Xaa is C or S
XGXARVVMNPYVKLIVNSSDDFFLVSLSSLQTPAXXPKPV

SEQ ID NO: 43628 - protein, 39 aa, Artificial Sequence
  GFR-binding peptide
  MOD_RES (1), (34), (35): Xaa is C or S
  MOD_RES (12), (13), (14), (15), (16): Xaa is A or G
  MOD_RES (17), (18), (19), (20): Xaa is A or G or is absent
XSRVIMPYVKLXXXXXXXXXFFLISLSSLAQPVXXPAAS

SEQ ID NO: 43629 - protein, 39 aa, Artificial Sequence
  GFR-binding peptide
  MOD_RES (1), (38): Xaa is C or S
XELHEELRPYVKLLKPKKRVYEFFLVSLSSHHVRSPQXK

SEQ ID NO: 43630 - protein, 38 aa, Artificial Sequence
  GFR-binding peptide
  MOD_RES (33), (33): Xaa is C or S
  MOD_RES (11), (12), (13), (14), (15): Xaa is A or G
  MOD_RES (16), (17), (18), (19): Xaa is A or G or is absent
NHQLFPYVKLXXXXXXXXXFFLMSLSSEETPVXELGED

SEQ ID NO: 43631 - protein, 38 aa, Artificial Sequence
  GFR-binding peptide
  MOD_RES (2), (4), (38): Xaa is C or S
  MOD_RES (16), (17), (18), (19), (20): Xaa is A or G
  MOD_RES (21), (22), (23), (24): Xaa is A or G or is absent
RXGXAEVVMDPYVKLXXXXXXXXXFFLISLSSLRAPVX

SEQ ID NO: 43632 - protein, 38 aa, Artificial Sequence
  GFR-binding peptide
  MOD_RES (1), (35), (36): Xaa is C or S
  MOD_RES (13), (14), (15), (16), (17): Xaa is A or G
  MOD_RES (18), (19), (20), (21): Xaa is A or G or is absent
XAEVVMDPYVKLXXXXXXXXXFFLISLSSLRAPVXXSA

SEQ ID NO: 43633 - protein, 33 aa, Artificial Sequence
  GFR-binding peptide
  MOD_RES (1), (1): Xaa is C or S
  MOD_RES (12), (13), (14), (15), (16): Xaa is A or G
  MOD_RES (17), (18), (19), (20): Xaa is A or G or is absent
XSKVIMPYVKLXXXXXXXXXFFLISLSSLDQSV

SEQ ID NO: 43634 - protein, 32 aa, Artificial Sequence
  GFR-binding peptide
  MOD_RES (1), (1): Xaa is C or S
XRDVVMGPYVKLIIQQKDNFFLMSLSSMKTPT

SEQ ID NO: 43635 - protein, 39 aa, Artificial Sequence
  GFR-binding peptide
  MOD_RES (33), (34): Xaa is C or S
  MOD_RES (11), (12), (13), (14), (15): Xaa is A or G
  MOD_RES (16), (17), (18), (19): Xaa is A or G or is absent
RVVMNPYVKLXXXXXXXXXFFLVSLSSLKTPAXXPKPVY

SEQ ID NO: 43636 - protein, 36 aa, Artificial Sequence
  GFR-binding peptide
  MOD_RES (2), (4): Xaa is C or S
RXGXEAVSMGEPYVKLTPVGMDDFFLVSLSSLKTPV

SEQ ID NO: 43637 - protein, 36 aa, Artificial Sequence
  GFR-binding peptide
  MOD_RES (1), (35), (36): Xaa is C or S
  MOD_RES (13), (14), (15), (16), (17): Xaa is A or G
  MOD_RES (18), (19), (20), (21): Xaa is A or G or is absent
XSEVVMDPYVKLXXXXXXXXXFFLISLSSLRTPVXX

SEQ ID NO: 43638 - protein, 39 aa, Artificial Sequence
  GFR-binding peptide
  MOD_RES (2), (36), (37): Xaa is C or S
  MOD_RES (14), (15), (16), (17), (18): Xaa is A or G
  MOD_RES (19), (20), (21), (22): Xaa is A or G or is absent
GXRDVVMGPYVKLXXXXXXXXXFFLMSLSSMKTPTXXPG

SEQ ID NO: 43639 - protein, 39 aa, Artificial Sequence
  GFR-binding peptide
  MOD_RES (33), (34): Xaa is C or S
  MOD_RES (11), (12), (13), (14), (15): Xaa is A or G
  MOD_RES (16), (17), (18), (19): Xaa is A or G or is absent
EVTMNPYVKLXXXXXXXXXFFLISLSSMKEPVXXPEPIG

SEQ ID NO: 43640 - protein, 35 aa, Artificial Sequence
  GFR-binding peptide
  MOD_RES (2), (34), (35): Xaa is C or S
GXSEVVMDPYVKLVVNNASDFFLISLSSLRTPVXX

SEQ ID NO: 43641 - protein, 40 aa, Artificial Sequence
  GFR-binding peptide
  MOD_RES (34), (34): Xaa is C or S
KNHQLFPYVKLHQGQHPKIRFFLMSLSSEETPVXELGEDN

SEQ ID NO: 43642 - protein, 32 aa, Artificial Sequence
  GFR-binding peptide
  MOD_RES (32), (32): Xaa is C or S
AEVVMDPYVKLVVNNAADFFLISLSSLRAPVX

SEQ ID NO: 43643 - protein, 39 aa, Artificial Sequence
  GFR-binding peptide
  MOD_RES (2), (4), (36), (37): Xaa is C or S
RXAXSEVTMNPYVKLVVNKNEDFFLISLSSMKEPVXXPE

SEQ ID NO: 43644 - protein, 43 aa, Artificial Sequence
  GFR-binding peptide
  MOD_RES (1), (3), (37): Xaa is C or S
XEXKNHQLFPYVKLHQGQHPKIRFFLMSLSSEETPVXELGEDN

SEQ ID NO: 43645 - protein, 34 aa, Artificial Sequence
  GFR-binding peptide
  MOD_RES (34), (34): Xaa is C or S
  MOD_RES (12), (13), (14), (15), (16): Xaa is A or G
  MOD_RES (17), (18), (19), (20): Xaa is A or G or is absent
RDVVMGPYVKLXXXXXXXXXFFLMSLSSMKTPTX

SEQ ID NO: 43646 - protein, 38 aa, Artificial Sequence
  GFR-binding peptide
  MOD_RES (1), (34), (35): Xaa is C or S
  MOD_RES (12), (13), (14), (15), (16): Xaa is A or G
  MOD_RES (17), (18), (19), (20): Xaa is A or G or is absent
XEEVIMPYVKLXXXXXXXXXFFLMSLSSTKVPAXXTSP

SEQ ID NO: 43647 - protein, 37 aa, Artificial Sequence
  GFR-binding peptide
  MOD_RES (34), (35): Xaa is C or S
  MOD_RES (12), (13), (14), (15), (16): Xaa is A or G
  MOD_RES (17), (18), (19), (20): Xaa is A or G or is absent
SEVTMNPYVKLXXXXXXXXXFFLISLSSMKEPVXXPE

SEQ ID NO: 43648 - protein, 36 aa, Artificial Sequence
  GFR-binding peptide
  MOD_RES (1), (33), (34): Xaa is C or S
XAEVVMDPYVKLVVNNAADFFLISLSSLRAPVXXSA

SEQ ID NO: 43649 - protein, 40 aa, Artificial Sequence
  GFR-binding peptide
  MOD_RES (2), (36), (37): Xaa is C or S
  MOD_RES (14), (15), (16), (17), (18): Xaa is A or G
  MOD_RES (19), (20), (21), (22): Xaa is A or G or is absent
GXSEVVMDPYVKLXXXXXXXXXFFLISLSSLRTPVXXTPP

SEQ ID NO: 43650 - protein, 34 aa, Artificial Sequence
  GFR-binding peptide
  MOD_RES (12), (13), (14), (15), (16): Xaa is A or G
  MOD_RES (17), (18), (19), (20): Xaa is A or G or is absent
LHEELRPYVKLXXXXXXXXXFFLVSLSSHHVRSP

SEQ ID NO: 43651 - protein, 41 aa, Artificial Sequence
  GFR-binding peptide
  MOD_RES (2), (39): Xaa is C or S
  MOD_RES (15), (16), (17), (18), (19): Xaa is A or G
  MOD_RES (20), (21), (22), (23): Xaa is A or G or is absent
AXELHEELRPYVKLXXXXXXXXXFFLVSLSSHHVRSPQXKV

SEQ ID NO: 43652 - protein, 38 aa, Artificial Sequence
  GFR-binding peptide
  MOD_RES (2), (4), (38): Xaa is C or S
RXEXKNHQLFPYVKLHQGQHPKIRFFLMSLSSEETPVX

SEQ ID NO: 43653 - protein, 36 aa, Artificial Sequence
  GFR-binding peptide
  MOD_RES (1), (34), (35): Xaa is C or S
  MOD_RES (12), (13), (14), (15), (16): Xaa is A or G
  MOD_RES (17), (18), (19), (20): Xaa is A or G or is absent
XSRVIMPYVKLXXXXXXXXXFFLISLSSLAQPVXXP

SEQ ID NO: 43654 - protein, 32 aa, Artificial Sequence
  GFR-binding peptide
  MOD_RES (11), (12), (13), (14), (15): Xaa is A or G
  MOD_RES (16), (17), (18), (19): Xaa is A or G or is absent
RVVMNPYVKLXXXXXXXXXFFLVSLSSLKTPA

SEQ ID NO: 43655 - protein, 37 aa, Artificial Sequence
  GFR-binding peptide
  MOD_RES (2), (36), (37): Xaa is C or S
  MOD_RES (14), (15), (16), (17), (18): Xaa is A or G
  MOD_RES (19), (20), (21), (22): Xaa is A or G or is absent
GXARVVMNPYVKLXXXXXXXXXFFLVSLSSLQTPAXX

SEQ ID NO: 43656 - protein, 33 aa, Artificial Sequence
  GFR-binding peptide
  MOD_RES (1), (33): Xaa is C or S
XGEVVMEPYVKLVVKDYEDFFLMSLSSLETPVX

SEQ ID NO: 43657 - protein, 38 aa, Artificial Sequence
  GFR-binding peptide
  MOD_RES (1), (33), (34): Xaa is C or S
XARVVMNPYVKLIVNSSDDFFLVSLSSLQTPAXXPKPV

SEQ ID NO: 43658 - protein, 33 aa, Artificial Sequence
  GFR-binding peptide
  MOD_RES (12), (13), (14), (15), (16): Xaa is A or G
  MOD_RES (17), (18), (19), (20): Xaa is A or G or is absent
ESVAMGPYVKLXXXXXXXXXFFLISLSSLKTPV

SEQ ID NO: 43659 - protein, 36 aa, Artificial Sequence
  GFR-binding peptide
  MOD_RES (1), (33), (34): Xaa is C or S
XGEVVMEPYVKLVVKDYEDFFLMSLSSLETPVXXAK

SEQ ID NO: 43660 - protein, 39 aa, Artificial Sequence
  GFR-binding peptide
  MOD_RES (2), (4), (36), (37): Xaa is C or S
HXGXAKVVMNPYVKLIVNNSSDFFLVSLSSLKTPAXXAK

SEQ ID NO: 43661 - protein, 35 aa, Artificial Sequence
  GFR-binding peptide
  MOD_RES (1), (3), (34), (35): Xaa is C or S
XKXSKVVMPYVKLVKPTRGVLFFISLSSLDQPVXX

SEQ ID NO: 43662 - protein, 35 aa, Artificial Sequence
  GFR-binding peptide
  MOD_RES (1), (3), (35): Xaa is C or S
XGXESVAMGPYVKLYTVVGKDFFLISLSSLKTPVX

SEQ ID NO: 43663 - protein, 35 aa, Artificial Sequence
  GFR-binding peptide
  MOD_RES (31), (32): Xaa is C or S
EVTMNPYVKLVVNKNEDFFLISLSSMKEPVXXPEP

SEQ ID NO: 43664 - protein, 41 aa, Artificial Sequence
  GFR-binding peptide
  MOD_RES (1), (3), (37), (38): Xaa is C or S
  MOD_RES (15), (16), (17), (18), (19): Xaa is A or G
  MOD_RES (20), (21), (22), (23): Xaa is A or G or is absent
XGXGEVVMEPYVKLXXXXXXXXXFFLMSLSSLETPVXXAKP

SEQ ID NO: 43665 - protein, 44 aa, Artificial Sequence
  GFR-binding peptide
  MOD_RES (2), (4), (38): Xaa is C or S
  MOD_RES (16), (17), (18), (19), (20): Xaa is A or G
  MOD_RES (21), (22), (23), (24): Xaa is A or G or is absent
HXGXSRVVMNPYVKLXXXXXXXXXFFLVSLSSLKTPAXTPKTVH

SEQ ID NO: 43666 - protein, 37 aa, Artificial Sequence
  GFR-binding peptide
  MOD_RES (1), (3), (34), (35): Xaa is C or S
XKXSRVIMPYVKLVKPKRGVLFFISLSSLAQPVXXPA

SEQ ID NO: 43667 - protein, 32 aa, Artificial Sequence
  GFR-binding peptide
  MOD_RES (31), (32): Xaa is C or S
SKVVMPYVKLVKPTRGVLFFISLSSLDQPVXX

SEQ ID NO: 43668 - protein, 41 aa, Artificial Sequence
  GFR-binding peptide
  MOD_RES (2), (4), (38), (39): Xaa is C or S
  MOD_RES (16), (17), (18), (19), (20): Xaa is A or G
  MOD_RES (21), (22), (23), (24): Xaa is A or G or is absent
HXGXSRVVMNPYVKLXXXXXXXXXFFLVSLSSLKTPAXXPK

SEQ ID NO: 43669 - protein, 35 aa, Artificial Sequence
  GFR-binding peptide
  MOD_RES (33), (34): Xaa is C or S
  MOD_RES (11), (12), (13), (14), (15): Xaa is A or G
  MOD_RES (16), (17), (18), (19): Xaa is A or G or is absent
EEVIMPYVKLXXXXXXXXXFFLMSLSSTKVPAXXT

SEQ ID NO: 43670 - protein, 37 aa, Artificial Sequence
  GFR-binding peptide
  MOD_RES (32), (33): Xaa is C or S
SRVVMNPYVKLIVNSSDDFFLVSLSSLKTPAXXPKPV

SEQ ID NO: 43671 - protein, 39 aa, Artificial Sequence
  GFR-binding peptide
  MOD_RES (35), (35): Xaa is C or S
HEELRPYVKLLKPKKRVYEFFLVSLSSHHVRSPQXKVSS

SEQ ID NO: 43672 - protein, 37 aa, Artificial Sequence
  GFR-binding peptide
  MOD_RES (1), (32), (33): Xaa is C or S
XEEVIMPYVKLLLVRGNDFFLMSLSSTKVPAXXTSPV

SEQ ID NO: 43673 - protein, 40 aa, Artificial Sequence
  GFR-binding peptide
  MOD_RES (1), (3), (35), (36): Xaa is C or S
XGXRDVVMGPYVKLIIQQKDNFFLMSLSSMKTPTXXPGAS

SEQ ID NO: 43674 - protein, 38 aa, Artificial Sequence
  GFR-binding peptide
  MOD_RES (32), (33): Xaa is C or S
SEVVMDPYVKLVVNNASDFFLISLSSLRTPVXXTPPTS

SEQ ID NO: 43675 - protein, 40 aa, Artificial Sequence
  GFR-binding peptide
  MOD_RES (1), (3), (35), (36): Xaa is C or S
XAXSEVTMNPYVKLVVNKNEDFFLISLSSMKEPVXXPEPI

SEQ ID NO: 43676 - protein, 37 aa, Artificial Sequence
  GFR-binding peptide
  MOD_RES (2), (2): Xaa is C or S
  MOD_RES (15), (16), (17), (18), (19): Xaa is A or G
  MOD_RES (20), (21), (22), (23): Xaa is A or G or is absent
AXELHEELRPYVKLXXXXXXXXXFFLVSLSSHHVRSP

SEQ ID NO: 43677 - protein, 34 aa, Artificial Sequence
  GFR-binding peptide
  MOD_RES (34), (34): Xaa is C or S
  MOD_RES (12), (13), (14), (15), (16): Xaa is A or G
  MOD_RES (17), (18), (19), (20): Xaa is A or G or is absent
ARVVMNPYVKLXXXXXXXXXFFLVSLSSLQTPAX

SEQ ID NO: 43678 - protein, 40 aa, Artificial Sequence
  GFR-binding peptide
  MOD_RES (2), (4), (36), (37): Xaa is C or S
SXGXRDVVMGPYVKLIIQQKDNFFLMSLSSMKTPTXXPGA

SEQ ID NO: 43679 - protein, 40 aa, Artificial Sequence
  GFR-binding peptide
  MOD_RES (36), (36): Xaa is C or S
LHEELRPYVKLLKPKKRVYEFFLVSLSSHHVRSPQXKVSS

SEQ ID NO: 43680 - protein, 40 aa, Artificial Sequence
  GFR-binding peptide
  MOD_RES (1), (35), (36): Xaa is C or S
  MOD_RES (13), (14), (15), (16), (17): Xaa is A or G
  MOD_RES (18), (19), (20), (21): Xaa is A or G or is absent
XSEVVMDPYVKLXXXXXXXXXFFLISLSSLRTPVXXTPPT

SEQ ID NO: 43681 - protein, 38 aa, Artificial Sequence
  GFR-binding peptide
  MOD_RES (2), (36), (37): Xaa is C or S
  MOD_RES (14), (15), (16), (17), (18): Xaa is A or G
  MOD_RES (19), (20), (21), (22): Xaa is A or G or is absent
GXSRVVMNPYVKLXXXXXXXXXFFLVSLSSLKTPAXXP

SEQ ID NO: 43682 - protein, 38 aa, Artificial Sequence
  GFR-binding peptide
  MOD_RES (1), (3), (35), (36): Xaa is C or S
XGXRDVVMGPYVKLIIQQKDNFFLMSLSSMKTPTXXPG

SEQ ID NO: 43683 - protein, 39 aa, Artificial Sequence
  GFR-binding peptide
  MOD_RES (2), (4), (37), (38): Xaa is C or S
  MOD_RES (15), (16), (17), (18), (19): Xaa is A or G
  MOD_RES (20), (21), (22), (23): Xaa is A or G or is absent
SXKXSRVIMPYVKLXXXXXXXXXFFLISLSSLAQPVXXP

SEQ ID NO: 43684 - protein, 40 aa, Artificial Sequence
  GFR-binding peptide
  MOD_RES (1), (3), (37), (38): Xaa is C or S
  MOD_RES (15), (16), (17), (18), (19): Xaa is A or G
  MOD_RES (20), (21), (22), (23): Xaa is A or G or is absent
XGXAKVVMNPYVKLXXXXXXXXXFFLVSLSSLKTPAXXAK

SEQ ID NO: 43685 - protein, 40 aa, Artificial Sequence
  GFR-binding peptide
  MOD_RES (1), (35), (36): Xaa is C or S
  MOD_RES (13), (14), (15), (16), (17): Xaa is A or G
  MOD_RES (18), (19), (20), (21): Xaa is A or G or is absent
XRDVVMGPYVKLXXXXXXXXXFFLMSLSSMKTPTXXPGAS

SEQ ID NO: 43686 - protein, 42 aa, Artificial Sequence
  GFR-binding peptide
  MOD_RES (1), (3), (40): Xaa is C or S
XAXELHEELRPYVKLLKPKKRVYEFFLVSLSSHHVRSPQXKV

SEQ ID NO: 43687 - protein, 35 aa, Artificial Sequence
  GFR-binding peptide
  MOD_RES (1), (3), (35): Xaa is C or S
XGXGEVVMEPYVKLVVKDYEDFFLMSLSSLETPVX

SEQ ID NO: 43688 - protein, 37 aa, Artificial Sequence
  GFR-binding peptide
  MOD_RES (1), (36), (37): Xaa is C or S
  MOD_RES (14), (15), (16), (17), (18): Xaa is A or G
  MOD_RES (19), (20), (21), (22): Xaa is A or G or is absent
XEAVSMGEPYVKLXXXXXXXXXFFLVSLSSLKTPVXX

SEQ ID NO: 43689 - protein, 36 aa, Artificial Sequence
  GFR-binding peptide
  MOD_RES (2), (36): Xaa is C or S
  MOD_RES (14), (15), (16), (17), (18): Xaa is A or G
  MOD_RES (19), (20), (21), (22): Xaa is A or G or is absent
GXRDVVMGPYVKLXXXXXXXXXFFLMSLSSMKTPTX

SEQ ID NO: 43690 - protein, 36 aa, Artificial Sequence
  GFR-binding peptide
  MOD_RES (2), (34), (35): Xaa is C or S
GXSEVVMDPYVKLVVNNASDFFLISLSSLRTPVXXT

SEQ ID NO: 43691 - protein, 42 aa, Artificial Sequence
  GFR-binding peptide
  MOD_RES (2), (36), (37): Xaa is C or S
  MOD_RES (14), (15), (16), (17), (18): Xaa is A or G
  MOD_RES (19), (20), (21), (22): Xaa is A or G or is absent
AXSEVTMNPYVKLXXXXXXXXXFFLISLSSMKEPVXXPEPIG

SEQ ID NO: 43692 - protein, 33 aa, Artificial Sequence
  GFR-binding peptide
  MOD_RES (11), (12), (13), (14), (15): Xaa is A or G
  MOD_RES (16), (17), (18), (19): Xaa is A or G or is absent
HEELRPYVKLXXXXXXXXXFFLVSLSSHHVRSP

SEQ ID NO: 43693 - protein, 32 aa, Artificial Sequence
  GFR-binding peptide
  MOD_RES (32), (32): Xaa is C or S
GEVVMEPYVKLVVKDYEDFFLMSLSSLETPVX

SEQ ID NO: 43694 - protein, 42 aa, Artificial Sequence
  GFR-binding peptide
  MOD_RES (2), (4), (38): Xaa is C or S
  MOD_RES (16), (17), (18), (19), (20): Xaa is A or G
  MOD_RES (21), (22), (23), (24): Xaa is A or G or is absent
RXEXKNHQLFPYVKLXXXXXXXXXFFLMSLSSEETPVXELGE

SEQ ID NO: 43695 - protein, 33 aa, Artificial Sequence
  GFR-binding peptide
  MOD_RES (1), (3): Xaa is C or S
XKXSRVIMPYVKLVKPKRGVLFFISLSSLAQPV

SEQ ID NO: 43696 - protein, 39 aa, Artificial Sequence
  GFR-binding peptide
  MOD_RES (1), (3): Xaa is C or S
  MOD_RES (16), (17), (18), (19), (20): Xaa is A or G
  MOD_RES (21), (22), (23), (24): Xaa is A or G or is absent
XAXELHEELRPYVKLXXXXXXXXXFFLVSLSSHHVRSPQ

SEQ ID NO: 43697 - protein, 43 aa, Artificial Sequence
  GFR-binding peptide
  MOD_RES (1), (3), (40): Xaa is C or S
XAXELHEELRPYVKLLKPKKRVYEFFLVSLSSHHVRSPQXKVS

SEQ ID NO: 43698 - protein, 33 aa, Artificial Sequence
  GFR-binding peptide
  MOD_RES (1), (3): Xaa is C or S
XKXSKVIMPYVKLIKPTKGILFFISLSSLDQSV

SEQ ID NO: 43699 - protein, 40 aa, Artificial Sequence
  GFR-binding peptide
  MOD_RES (1), (3), (37), (38): Xaa is C or S
  MOD_RES (15), (16), (17), (18), (19): Xaa is A or G
  MOD_RES (20), (21), (22), (23): Xaa is A or G or is absent
XGXARVVMNPYVKLXXXXXXXXXFFLVSLSSLQTPAXXPK

SEQ ID NO: 43700 - protein, 41 aa, Artificial Sequence
  GFR-binding peptide
  MOD_RES (1), (3), (40): Xaa is C or S
  MOD_RES (16), (17), (18), (19), (20): Xaa is A or G
  MOD_RES (21), (22), (23), (24): Xaa is A or G or is absent
XAXELHEELRPYVKLXXXXXXXXXFFLVSLSSHHVRSPQXK

SEQ ID NO: 43701 - protein, 39 aa, Artificial Sequence
  GFR-binding peptide
  MOD_RES (1), (3), (34), (35): Xaa is C or S
XKXSRVIMPYVKLVKPKRGVLFFISLSSLAQPVXXPAAS

SEQ ID NO: 43702 - protein, 36 aa, Artificial Sequence
  GFR-binding peptide
  MOD_RES (2), (34), (35): Xaa is C or S
GXAEVVMDPYVKLVVNNAADFFLISLSSLRAPVXXS

SEQ ID NO: 43703 - protein, 41 aa, Artificial Sequence
  GFR-binding peptide
  MOD_RES (1), (35): Xaa is C or S
  MOD_RES (13), (14), (15), (16), (17): Xaa is A or G
  MOD_RES (18), (19), (20), (21): Xaa is A or G or is absent
XKNHQLFPYVKLXXXXXXXXXFFLMSLSSEETPVXELGEDN

SEQ ID NO: 43704 - protein, 38 aa, Artificial Sequence
  GFR-binding peptide
  MOD_RES (1), (3), (35), (36): Xaa is C or S
XGXGEVVMEPYVKLVVKDYEDFFLMSLSSLETPVXXAK

SEQ ID NO: 43705 - protein, 38 aa, Artificial Sequence
  GFR-binding peptide
  MOD_RES (1), (35), (36): Xaa is C or S
  MOD_RES (13), (14), (15), (16), (17): Xaa is A or G
  MOD_RES (18), (19), (20), (21): Xaa is A or G or is absent
XSEVTMNPYVKLXXXXXXXXXFFLISLSSMKEPVXXPE

SEQ ID NO: 43706 - protein, 35 aa, Artificial Sequence
  GFR-binding peptide
  MOD_RES (2), (4), (35): Xaa is C or S
SXKXSKVVMPYVKLVKPTRGVLFFISLSSLDQPVX

SEQ ID NO: 43707 - protein, 34 aa, Artificial Sequence
  GFR-binding peptide
  MOD_RES (33), (33): Xaa is C or S
  MOD_RES (11), (12), (13), (14), (15): Xaa is A or G
  MOD_RES (16), (17), (18), (19): Xaa is A or G or is absent
NHQLFPYVKLXXXXXXXXXFFLMSLSSEETPVXE

SEQ ID NO: 43708 - protein, 39 aa, Artificial Sequence
  GFR-binding peptide
  MOD_RES (2), (36), (37): Xaa is C or S
  MOD_RES (14), (15), (16), (17), (18): Xaa is A or G
  MOD_RES (19), (20), (21), (22): Xaa is A or G or is absent
GXSEVVMDPYVKLXXXXXXXXXFFLISLSSLRTPVXXTP

SEQ ID NO: 43709 - protein, 37 aa, Artificial Sequence
  GFR-binding peptide
  MOD_RES (1), (3): Xaa is C or S
  MOD_RES (16), (17), (18), (19), (20): Xaa is A or G
  MOD_RES (21), (22), (23), (24): Xaa is A or G or is absent
XGXEAVSMGEPYVKLXXXXXXXXXFFLVSLSSLKTPV

SEQ ID NO: 43710 - protein, 32 aa, Artificial Sequence
  GFR-binding peptide
  MOD_RES (11), (12), (13), (14), (15): Xaa is A or G
  MOD_RES (16), (17), (18), (19): Xaa is A or G or is absent
EEVIMPYVKLXXXXXXXXXFFLMSLSSTKVPA

SEQ ID NO: 43711 - protein, 38 aa, Artificial Sequence
  GFR-binding peptide
  MOD_RES (1), (3), (35), (36): Xaa is C or S
XGXESVAMGPYVKLYTVVGKDFFLISLSSLKTPVXXAK

SEQ ID NO: 43712 - protein, 41 aa, Artificial Sequence
  GFR-binding peptide
  MOD_RES (1), (35): Xaa is C or S
XKNHQLFPYVKLHQGQHPKIRFFLMSLSSEETPVXELGEDN

SEQ ID NO: 43713 - protein, 37 aa, Artificial Sequence
  GFR-binding peptide
  MOD_RES (1), (35), (36): Xaa is C or S
  MOD_RES (13), (14), (15), (16), (17): Xaa is A or G
  MOD_RES (18), (19), (20), (21): Xaa is A or G or is absent
XSEVTMNPYVKLXXXXXXXXXFFLISLSSMKEPVXXP

SEQ ID NO: 43714 - protein, 38 aa, Artificial Sequence
  GFR-binding peptide
  MOD_RES (2), (4), (38): Xaa is C or S
  MOD_RES (16), (17), (18), (19), (20): Xaa is A or G
  MOD_RES (21), (22), (23), (24): Xaa is A or G or is absent
RXGXGEVVMEPYVKLXXXXXXXXXFFLMSLSSLETPVX

SEQ ID NO: 43715 - protein, 38 aa, Artificial Sequence
  GFR-binding peptide
  MOD_RES (2), (33), (34): Xaa is C or S
KXSRVIMPYVKLVKPKRGVLFFISLSSLAQPVXXPAAS

SEQ ID NO: 43716 - protein, 36 aa, Artificial Sequence
  GFR-binding peptide
  MOD_RES (31), (32): Xaa is C or S
SRVIMPYVKLVKPKRGVLFFISLSSLAQPVXXPAAS

SEQ ID NO: 43717 - protein, 42 aa, Artificial Sequence
  GFR-binding peptide
  MOD_RES (1), (3), (37): Xaa is C or S
  MOD_RES (15), (16), (17), (18), (19): Xaa is A or G
  MOD_RES (20), (21), (22), (23): Xaa is A or G or is absent
XEXKNHQLFPYVKLXXXXXXXXXFFLMSLSSEETPVXELGED

SEQ ID NO: 43718 - protein, 33 aa, Artificial Sequence
  GFR-binding peptide
  MOD_RES (32), (33): Xaa is C or S
SRVVMNPYVKLIVNSSDDFFLVSLSSLKTPAXX

SEQ ID NO: 43719 - protein, 36 aa, Artificial Sequence
  GFR-binding peptide
  MOD_RES (2), (2): Xaa is C or S
  MOD_RES (15), (16), (17), (18), (19): Xaa is A or G
  MOD_RES (20), (21), (22), (23): Xaa is A or G or is absent
AXELHEELRPYVKLXXXXXXXXXFFLVSLSSHHVRS

SEQ ID NO: 43720 - protein, 34 aa, Artificial Sequence
  GFR-binding peptide
  MOD_RES (31), (32): Xaa is C or S
RVVMNPYVKLIVNSSDDFFLVSLSSLQTPAXXPK

SEQ ID NO: 43721 - protein, 36 aa, Artificial Sequence
  GFR-binding peptide
  MOD_RES (1), (3), (35), (36): Xaa is C or S
XAXSEVTMNPYVKLVVNKNEDFFLISLSSMKEPVXX

SEQ ID NO: 43722 - protein, 33 aa, Artificial Sequence
  GFR-binding peptide
  MOD_RES (1), (33): Xaa is C or S
XSRVVMNPYVKLIVNSSDDFFLVSLSSLKTPAX

SEQ ID NO: 43723 - protein, 40 aa, Artificial Sequence
  GFR-binding peptide
  MOD_RES (1), (3), (35), (36): Xaa is C or S
XGXESVAMGPYVKLYTVVGKDFFLISLSSLKTPVXXAKSA

SEQ ID NO: 43724 - protein, 40 aa, Artificial Sequence
  GFR-binding peptide
  MOD_RES (34), (34): Xaa is C or S
  MOD_RES (12), (13), (14), (15), (16): Xaa is A or G
  MOD_RES (17), (18), (19), (20): Xaa is A or G or is absent
KNHQLFPYVKLXXXXXXXXXFFLMSLSSEETPVXELGEDN

SEQ ID NO: 43725 - protein, 38 aa, Artificial Sequence
  GFR-binding peptide
  MOD_RES (1), (35), (36): Xaa is C or S
  MOD_RES (13), (14), (15), (16), (17): Xaa is A or G
  MOD_RES (18), (19), (20), (21): Xaa is A or G or is absent
XESVAMGPYVKLXXXXXXXXXFFLISLSSLKTPVXXAK

SEQ ID NO: 43726 - protein, 36 aa, Artificial Sequence
  GFR-binding peptide
  MOD_RES (1), (33), (34): Xaa is C or S
XSEVVMDPYVKLVVNNASDFFLISLSSLRTPVXXTP

SEQ ID NO: 43727 - protein, 38 aa, Artificial Sequence
  GFR-binding peptide
  MOD_RES (33), (34): Xaa is C or S
  MOD_RES (11), (12), (13), (14), (15): Xaa is A or G
  MOD_RES (16), (17), (18), (19): Xaa is A or G or is absent
EVVMDPYVKLXXXXXXXXXFFLISLSSLRTPVXXTPPT

SEQ ID NO: 43728 - protein, 37 aa, Artificial Sequence
  GFR-binding peptide
  MOD_RES (33), (34): Xaa is C or S
  MOD_RES (11), (12), (13), (14), (15): Xaa is A or G
  MOD_RES (16), (17), (18), (19): Xaa is A or G or is absent
EVTMNPYVKLXXXXXXXXXFFLISLSSMKEPVXXPEP

SEQ ID NO: 43729 - protein, 39 aa, Artificial Sequence
  GFR-binding peptide
  MOD_RES (1), (33), (34): Xaa is C or S
XRDVVMGPYVKLIIQQKDNFFLMSLSSMKTPTXXPGASG

SEQ ID NO: 43730 - protein, 36 aa, Artificial Sequence
  GFR-binding peptide
  MOD_RES (33), (34): Xaa is C or S
  MOD_RES (11), (12), (13), (14), (15): Xaa is A or G
  MOD_RES (16), (17), (18), (19): Xaa is A or G or is absent
SKVIMPYVKLXXXXXXXXXFFLISLSSLDQSVXXPS

SEQ ID NO: 43731 - protein, 32 aa, Artificial Sequence
  GFR-binding peptide
  MOD_RES (11), (12), (13), (14), (15): Xaa is A or G
  MOD_RES (16), (17), (18), (19): Xaa is A or G or is absent
KVVMNPYVKLXXXXXXXXXFFLVSLSSLKTPA

SEQ ID NO: 43732 - protein, 36 aa, Artificial Sequence
  GFR-binding peptide
  MOD_RES (33), (34): Xaa is C or S
  MOD_RES (11), (12), (13), (14), (15): Xaa is A or G
  MOD_RES (16), (17), (18), (19): Xaa is A or G or is absent
DVVMGPYVKLXXXXXXXXXFFLMSLSSMKTPTXXPG

SEQ ID NO: 43733 - protein, 39 aa, Artificial Sequence
  GFR-binding peptide
  MOD_RES (1), (34), (35): Xaa is C or S
  MOD_RES (12), (13), (14), (15), (16): Xaa is A or G
  MOD_RES (17), (18), (19), (20): Xaa is A or G or is absent
XSKVVMPYVKLXXXXXXXXXFFLISLSSLDQPVXXPSAS

SEQ ID NO: 43734 - protein, 37 aa, Artificial Sequence
  GFR-binding peptide
  MOD_RES (32), (33): Xaa is C or S
RDVVMGPYVKLIIQQKDNFFLMSLSSMKTPTXXPGAS

SEQ ID NO: 43735 - protein, 36 aa, Artificial Sequence
  GFR-binding peptide
  MOD_RES (34), (35): Xaa is C or S
  MOD_RES (12), (13), (14), (15), (16): Xaa is A or G
  MOD_RES (17), (18), (19), (20): Xaa is A or G or is absent
AEVVMDPYVKLXXXXXXXXXFFLISLSSLRAPVXXS

SEQ ID NO: 43736 - protein, 37 aa, Artificial Sequence
  GFR-binding peptide
  MOD_RES (33), (34): Xaa is C or S
  MOD_RES (11), (12), (13), (14), (15): Xaa is A or G
  MOD_RES (16), (17), (18), (19): Xaa is A or G or is absent
RVVMNPYVKLXXXXXXXXXFFLVSLSSLQTPAXXPKP

SEQ ID NO: 43737 - protein, 33 aa, Artificial Sequence
  GFR-binding peptide
  MOD_RES (32), (33): Xaa is C or S
ESVAMGPYVKLYTVVGKDFFLISLSSLKTPVXX

SEQ ID NO: 43738 - protein, 42 aa, Artificial Sequence; identical to SEQ ID NO: 1221
  GFR-binding peptide
  MOD_RES (2), (4), (36), (37): Xaa is C or S

SEQ ID NO: 43739 - protein, 33 aa, Artificial Sequence
  GFR-binding peptide
  MOD_RES (2), (33): Xaa is C or S
KXSRVIMPYVKLVKPKRGVLFFISLSSLAQPVX

SEQ ID NO: 43740 - protein, 35 aa, Artificial Sequence
  GFR-binding peptide
  MOD_RES (1), (35): Xaa is C or S
  MOD_RES (13), (14), (15), (16), (17): Xaa is A or G
  MOD_RES (18), (19), (20), (21): Xaa is A or G or is absent
XSEVVMDPYVKLXXXXXXXXXFFLISLSSLRTPVX

SEQ ID NO: 43741 - protein, 37 aa, Artificial Sequence
  GFR-binding peptide
  MOD_RES (32), (33): Xaa is C or S
GEVVMEPYVKLVVKDYEDFFLMSLSSLETPVXXAKPI

SEQ ID NO: 43742 - protein, 38 aa, Artificial Sequence
  GFR-binding peptide
  MOD_RES (2), (4), (36), (37): Xaa is C or S
RXGXSEVVMDPYVKLVVNNASDFFLISLSSLRTPVXXT

SEQ ID NO: 43743 - protein, 36 aa, Artificial Sequence
  GFR-binding peptide
  MOD_RES (1), (3), (34), (35): Xaa is C or S
XGXEEVIMPYVKLLLVRGNDFFLMSLSSTKVPAXXT

SEQ ID NO: 43744 - protein, 41 aa, Artificial Sequence
  GFR-binding peptide
  MOD_RES (2), (4), (36), (37): Xaa is C or S
HXGXAKVVMNPYVKLIVNNSSDFFLVSLSSLKTPAXXAKPV

SEQ ID NO: 43745 - protein, 39 aa, Artificial Sequence
  GFR-binding peptide
  MOD_RES (1), (33), (34): Xaa is C or S
XARVVMNPYVKLIVNSSDDFFLVSLSSLQTPAXXPKPVT

SEQ ID NO: 43746 - protein, 36 aa, Artificial Sequence
  GFR-binding peptide
  MOD_RES (31), (32): Xaa is C or S
SKVVMPYVKLVKPTRGVLFFISLSSLDQPVXXPSAS

SEQ ID NO: 43747 - protein, 43 aa, Artificial Sequence
  GFR-binding peptide
  MOD_RES (2), (4), (38), (39): Xaa is C or S
  MOD_RES (16), (17), (18), (19), (20): Xaa is A or G
  MOD_RES (21), (22), (23), (24): Xaa is A or G or is absent
RXAXSEVTMNPYVKLXXXXXXXXXFFLISLSSMKEPVXXPEPI

SEQ ID NO: 43748 - protein, 37 aa, Artificial Sequence
  GFR-binding peptide
  MOD_RES (31), (32): Xaa is C or S
SRVIMPYVKLVKPKRGVLFFISLSSLAQPVXXPAASA

SEQ ID NO: 43749 - protein, 37 aa, Artificial Sequence
  GFR-binding peptide
  MOD_RES (33), (34): Xaa is C or S
  MOD_RES (11), (12), (13), (14), (15): Xaa is A or G
  MOD_RES (16), (17), (18), (19): Xaa is A or G or is absent
SRVIMPYVKLXXXXXXXXXFFLISLSSLAQPVXXPAA

SEQ ID NO: 43750 - protein, 33 aa, Artificial Sequence
  GFR-binding peptide
  MOD_RES (33), (33): Xaa is C or S
  MOD_RES (11), (12), (13), (14), (15): Xaa is A or G
  MOD_RES (16), (17), (18), (19): Xaa is A or G or is absent
EVVMDPYVKLXXXXXXXXXFFLISLSSLRTPVX

SEQ ID NO: 43751 - protein, 37 aa, Artificial Sequence
  GFR-binding peptide
  MOD_RES (1), (35), (36): Xaa is C or S
  MOD_RES (13), (14), (15), (16), (17): Xaa is A or G
  MOD_RES (18), (19), (20), (21): Xaa is A or G or is absent
XAKVVMNPYVKLXXXXXXXXXFFLVSLSSLKTPAXXA

SEQ ID NO: 43752 - protein, 32 aa, Artificial Sequence
  GFR-binding peptide
  MOD_RES (32), (32): Xaa is C or S
ARVVMNPYVKLIVNSSDDFFLVSLSSLQTPAX

SEQ ID NO: 43753 - protein, 39 aa, Artificial Sequence
  GFR-binding peptide
  MOD_RES (2), (4), (35), (36): Xaa is C or S
SXKXSKVVMPYVKLVKPTRGVLFFISLSSLDQPVXXPSA

SEQ ID NO: 43754 - protein, 39 aa, Artificial Sequence
  GFR-binding peptide
  MOD_RES (2), (4), (36), (37): Xaa is C or S
RXGXSEVVMDPYVKLVVNNASDFFLISLSSLRTPVXXTP

SEQ ID NO: 43755 - protein, 39 aa, Artificial Sequence
  GFR-binding peptide
  MOD_RES (35), (36): Xaa is C or S
  MOD_RES (13), (14), (15), (16), (17): Xaa is A or G
  MOD_RES (18), (19), (20), (21): Xaa is A or G or is absent
EAVSMGEPYVKLXXXXXXXXXFFLVSLSSLKTPVXXAKG

SEQ ID NO: 43756 - protein, 35 aa, Artificial Sequence
  GFR-binding peptide
  MOD_RES (31), (32): Xaa is C or S
RVVMNPYVKLIVNSSDDFFLVSLSSLKTPAXXPKP

SEQ ID NO: 43757 - protein, 37 aa, Artificial Sequence
  GFR-binding peptide
  MOD_RES (1), (3), (35), (36): Xaa is C or S
XGXSRVVMNPYVKLIVNSSDDFFLVSLSSLKTPAXXP

SEQ ID NO: 43758 - protein, 38 aa, Artificial Sequence
  GFR-binding peptide
  MOD_RES (2), (34), (35): Xaa is C or S
GXAKVVMNPYVKLIVNNSSDFFLVSLSSLKTPAXXAKP

SEQ ID NO: 43759 - protein, 37 aa, Artificial Sequence
  GFR-binding peptide
  MOD_RES (33), (34): Xaa is C or S
  MOD_RES (11), (12), (13), (14), (15): Xaa is A or G
  MOD_RES (16), (17), (18), (19): Xaa is A or G or is absent
SKVIMPYVKLXXXXXXXXXFFLISLSSLDQSVXXPSA

SEQ ID NO: 43760 - protein, 41 aa, Artificial Sequence
  GFR-binding peptide
  MOD_RES (2), (4), (38), (39): Xaa is C or S
  MOD_RES (16), (17), (18), (19), (20): Xaa is A or G
  MOD_RES (21), (22), (23), (24): Xaa is A or G or is absent
RXGXGEVVMEPYVKLXXXXXXXXXFFLMSLSSLETPVXXAK

SEQ ID NO: 43761 - protein, 40 aa, Artificial Sequence
  GFR-binding peptide
  MOD_RES (1), (3), (36), (37): Xaa is C or S
XGXEAVSMGEPYVKLTPVGMDDFFLVSLSSLKTPVXXAKG

SEQ ID NO: 43762 - protein, 40 aa, Artificial Sequence
  GFR-binding peptide
  MOD_RES (2), (35), (36): Xaa is C or S
  MOD_RES (13), (14), (15), (16), (17): Xaa is A or G
  MOD_RES (18), (19), (20), (21): Xaa is A or G or is absent
KXSKVIMPYVKLXXXXXXXXXFFLISLSSLDQSVXXPSAS

SEQ ID NO: 43763 - protein, 36 aa, Artificial Sequence
  GFR-binding peptide
  MOD_RES (1), (3), (34), (35): Xaa is C or S
XKXSKVIMPYVKLIKPTKGILFFISLSSLDQSVXXP

SEQ ID NO: 43764 - protein, 36 aa, Artificial Sequence
  GFR-binding peptide
  MOD_RES (1), (3), (34), (35): Xaa is C or S
XKXSRVIMPYVKLVKPKRGVLFFISLSSLAQPVXXP

SEQ ID NO: 43765 - protein, 41 aa, Artificial Sequence
  GFR-binding peptide
  MOD_RES (2), (35), (36): Xaa is C or S
GXEAVSMGEPYVKLTPVGMDDFFLVSLSSLKTPVXXAKGVK

SEQ ID NO: 43766 - protein, 37 aa, Artificial Sequence
  GFR-binding peptide
  MOD_RES (2), (4), (36), (37): Xaa is C or S
SXGXRDVVMGPYVKLIIQQKDNFFLMSLSSMKTPTXX

SEQ ID NO: 43767 - protein, 41 aa, Artificial Sequence
  GFR-binding peptide
  MOD_RES (2), (4), (39), (40): Xaa is C or S
  MOD_RES (17), (18), (19), (20), (21): Xaa is A or G
  MOD_RES (22), (23), (24), (25): Xaa is A or G or is absent
RXGXEAVSMGEPYVKLXXXXXXXXXFFLVSLSSLKTPVXXA

SEQ ID NO: 43768 - protein, 42 aa, Artificial Sequence
  GFR-binding peptide
  MOD_RES (2), (36), (37): Xaa is C or S
  MOD_RES (14), (15), (16), (17), (18): Xaa is A or G
  MOD_RES (19), (20), (21), (22): Xaa is A or G or is absent
GXSRVVMNPYVKLXXXXXXXXXFFLVSLSSLKTPAXXPKPVH

SEQ ID NO: 43769 - protein, 37 aa, Artificial Sequence
  GFR-binding peptide
  MOD_RES (1), (33), (34): Xaa is C or S
XESVAMGPYVKLYTVVGKDFFLISLSSLKTPVXXAKS

SEQ ID NO: 43770 - protein, 39 aa, Artificial Sequence
  GFR-binding peptide
  MOD_RES (2), (4), (38), (39): Xaa is C or S
  MOD_RES (16), (17), (18), (19), (20): Xaa is A or G
  MOD_RES (21), (22), (23), (24): Xaa is A or G or is absent
RXAXSEVTMNPYVKLXXXXXXXXXFFLISLSSMKEPVXX

SEQ ID NO: 43771 - protein, 42 aa, Artificial Sequence
  GFR-binding peptide
  MOD_RES (2), (37), (38): Xaa is C or S
  MOD_RES (15), (16), (17), (18), (19): Xaa is A or G
  MOD_RES (20), (21), (22), (23): Xaa is A or G or is absent
GXEAVSMGEPYVKLXXXXXXXXXFFLVSLSSLKTPVXXAKGV

SEQ ID NO: 43772 - protein, 36 aa, Artificial Sequence
  GFR-binding peptide
  MOD_RES (13), (14), (15), (16), (17): Xaa is A or G
  MOD_RES (18), (19), (20), (21): Xaa is A or G or is absent
ELHEELRPYVKLXXXXXXXXXFFLVSLSSHHVRSPQ

SEQ ID NO: 43773 - protein, 40 aa, Artificial Sequence
  GFR-binding peptide
  MOD_RES (1), (3), (34), (35): Xaa is C or S
XKXSKVVMPYVKLVKPTRGVLFFISLSSLDQPVXXPSASA

SEQ ID NO: 43774 - protein, 41 aa, Artificial Sequence
  GFR-binding peptide
  MOD_RES (1), (3), (37), (38): Xaa is C or S
  MOD_RES (15), (16), (17), (18), (19): Xaa is A or G
  MOD_RES (20), (21), (22), (23): Xaa is A or G or is absent
XGXSEVVMDPYVKLXXXXXXXXXFFLISLSSLRTPVXXTPP

SEQ ID NO: 43775 - protein, 38 aa, Artificial Sequence
  GFR-binding peptide
  MOD_RES (1), (33), (34): Xaa is C or S
XESVAMGPYVKLYTVVGKDFFLISLSSLKTPVXXAKSA

SEQ ID NO: 43776 - protein, 40 aa, Artificial Sequence
  GFR-binding peptide
  MOD_RES (1), (3), (38), (39): Xaa is C or S
  MOD_RES (16), (17), (18), (19), (20): Xaa is A or G
  MOD_RES (21), (22), (23), (24): Xaa is A or G or is absent
XGXEAVSMGEPYVKLXXXXXXXXXFFLVSLSSLKTPVXXA

SEQ ID NO: 43777 - protein, 37 aa, Artificial Sequence
  GFR-binding peptide
  MOD_RES (2), (36), (37): Xaa is C or S
  MOD_RES (14), (15), (16), (17), (18): Xaa is A or G
  MOD_RES (19), (20), (21), (22): Xaa is A or G or is absent
GXAKVVMNPYVKLXXXXXXXXXFFLVSLSSLKTPAXX

SEQ ID NO: 43778 - protein, 35 aa, Artificial Sequence
  GFR-binding peptide
  MOD_RES (1), (34), (35): Xaa is C or S
XEAVSMGEPYVKLTPVGMDDFFLVSLSSLKTPVXX

SEQ ID NO: 43779 - protein, 37 aa, Artificial Sequence
  GFR-binding peptide
  MOD_RES (2), (4), (37): Xaa is C or S
  MOD_RES (15), (16), (17), (18), (19): Xaa is A or G
  MOD_RES (20), (21), (22), (23): Xaa is A or G or is absent
SXKXSKVIMPYVKLXXXXXXXXXFFLISLSSLDQSVX

SEQ ID NO: 43780 - protein, 38 aa, Artificial Sequence
  GFR-binding peptide
  MOD_RES (36), (36): Xaa is C or S
  MOD_RES (12), (13), (14), (15), (16): Xaa is A or G
  MOD_RES (17), (18), (19), (20): Xaa is A or G or is absent
LHEELRPYVKLXXXXXXXXXFFLVSLSSHHVRSPQXKV

SEQ ID NO: 43781 - protein, 39 aa, Artificial Sequence
  GFR-binding peptide
  MOD_RES (34), (35): Xaa is C or S
  MOD_RES (12), (13), (14), (15), (16): Xaa is A or G
  MOD_RES (17), (18), (19), (20): Xaa is A or G or is absent
RDVVMGPYVKLXXXXXXXXXFFLMSLSSMKTPTXXPGAS

SEQ ID NO: 43782 - protein, 35 aa, Artificial Sequence
  GFR-binding peptide
  MOD_RES (32), (33): Xaa is C or S
SRVVMNPYVKLIVNSSDDFFLVSLSSLKTPAXXPK

SEQ ID NO: 43783 - protein, 32 aa, Artificial Sequence
  GFR-binding peptide
  MOD_RES (11), (12), (13), (14), (15): Xaa is A or G
  MOD_RES (16), (17), (18), (19): Xaa is A or G or is absent
EVVMDPYVKLXXXXXXXXXFFLISLSSLRTPV

SEQ ID NO: 43784 - protein, 37 aa, Artificial Sequence
  GFR-binding peptide
  MOD_RES (1), (32), (33): Xaa is C or S
XSRVIMPYVKLVKPKRGVLFFISLSSLAQPVXXPAAS

SEQ ID NO: 43785 - protein, 37 aa, Artificial Sequence
  GFR-binding peptide
  MOD_RES (2), (4), (35), (36): Xaa is C or S
SXKXSKVIMPYVKLIKPTKGILFFISLSSLDQSVXXP

SEQ ID NO: 43786 - protein, 31 aa, Artificial Sequence
  GFR-binding peptide
  MOD_RES (31), (31): Xaa is C or S
SKVIMPYVKLIKPTKGILFFISLSSLDQSVX

SEQ ID NO: 43787 - protein, 40 aa, Artificial Sequence
  GFR-binding peptide
  MOD_RES (2), (4): Xaa is C or S
  MOD_RES (17), (18), (19), (20), (21): Xaa is A or G
  MOD_RES (22), (23), (24), (25): Xaa is A or G or is absent
AXAXELHEELRPYVKLXXXXXXXXXFFLVSLSSHHVRSPQ

SEQ ID NO: 43788 - protein, 32 aa, Artificial Sequence
  GFR-binding peptide
  MOD_RES (31), (32): Xaa is C or S
EEVIMPYVKLLLVRGNDFFLMSLSSTKVPAXX

SEQ ID NO: 43789 - protein, 31 aa, Artificial Sequence
  GFR-binding peptide
  MOD_RES (31), (31): Xaa is C or S
SRVIMPYVKLVKPKRGVLFFISLSSLAQPVX

SEQ ID NO: 43790 - protein, 34 aa, Artificial Sequence
  GFR-binding peptide
  MOD_RES (2), (34): Xaa is C or S
GXSRVVMNPYVKLIVNSSDDFFLVSLSSLKTPAX

SEQ ID NO: 43791 - protein, 38 aa, Artificial Sequence
  GFR-binding peptide
  MOD_RES (2), (33), (34): Xaa is C or S
GXEEVIMPYVKLLLVRGNDFFLMSLSSTKVPAXXTSPV

SEQ ID NO: 43792 - protein, 31 aa, Artificial Sequence
  GFR-binding peptide
  MOD_RES (31), (31): Xaa is C or S
RVVMNPYVKLIVNSSDDFFLVSLSSLKTPAX

SEQ ID NO: 43793 - protein, 38 aa, Artificial Sequence
  GFR-binding peptide
  MOD_RES (1), (35), (36): Xaa is C or S
  MOD_RES (13), (14), (15), (16), (17): Xaa is A or G
  MOD_RES (18), (19), (20), (21): Xaa is A or G or is absent
XRDVVMGPYVKLXXXXXXXXXFFLMSLSSMKTPTXXPG

SEQ ID NO: 43794 - protein, 42 aa, Artificial Sequence
  GFR-binding peptide
  MOD_RES (1), (3), (36), (37): Xaa is C or S
  MOD_RES (14), (15), (16), (17), (18): Xaa is A or G
  MOD_RES (19), (20), (21), (22): Xaa is A or G or is absent
XKXSKVIMPYVKLXXXXXXXXXFFLISLSSLDQSVXXPSASA

SEQ ID NO: 43795 - protein, 41 aa, Artificial Sequence
  GFR-binding peptide
  MOD_RES (1), (3), (36), (37): Xaa is C or S
  MOD_RES (14), (15), (16), (17), (18): Xaa is A or G
  MOD_RES (19), (20), (21), (22): Xaa is A or G or is absent
XKXSKVIMPYVKLXXXXXXXXXFFLISLSSLDQSVXXPSAS

SEQ ID NO: 43796 - protein, 41 aa, Artificial Sequence
  GFR-binding peptide
  MOD_RES (1), (3), (37), (38): Xaa is C or S
  MOD_RES (15), (16), (17), (18), (19): Xaa is A or G
  MOD_RES (20), (21), (22), (23): Xaa is A or G or is absent
XGXARVVMNPYVKLXXXXXXXXXFFLVSLSSLQTPAXXPKP

SEQ ID NO: 43797 - protein, 34 aa, Artificial Sequence
  GFR-binding peptide
  MOD_RES (1), (1): Xaa is C or S
  MOD_RES (13), (14), (15), (16), (17): Xaa is A or G
  MOD_RES (18), (19), (20), (21): Xaa is A or G or is absent
XSEVTMNPYVKLXXXXXXXXXFFLISLSSMKEPV

SEQ ID NO: 43798 - protein, 34 aa, Artificial Sequence
  GFR-binding peptide
  MOD_RES (32), (33): Xaa is C or S
AKVVMNPYVKLIVNNSSDFFLVSLSSLKTPAXXA

SEQ ID NO: 43799 - protein, 36 aa, Artificial Sequence
  GFR-binding peptide
  MOD_RES (33), (34): Xaa is C or S
  MOD_RES (11), (12), (13), (14), (15): Xaa is A or G
  MOD_RES (16), (17), (18), (19): Xaa is A or G or is absent
SKVVMPYVKLXXXXXXXXXFFLISLSSLDQPVXXPS

SEQ ID NO: 43800 - protein, 41 aa, Artificial Sequence
  GFR-binding peptide
  MOD_RES (2), (36), (37): Xaa is C or S
  MOD_RES (14), (15), (16), (17), (18): Xaa is A or G
  MOD_RES (19), (20), (21), (22): Xaa is A or G or is absent
AXSEVTMNPYVKLXXXXXXXXXFFLISLSSMKEPVXXPEPI

SEQ ID NO: 43801 - protein, 41 aa, Artificial Sequence
  GFR-binding peptide
  MOD_RES (2), (4), (36), (37): Xaa is C or S
HXGXARVVMNPYVKLIVNSSDDFFLVSLSSLQTPAXXPKPV

SEQ ID NO: 43802 - protein, 38 aa, Artificial Sequence
  GFR-binding peptide
  MOD_RES (32), (33): Xaa is C or S
SRVVMNPYVKLIVNSSDDFFLVSLSSLKTPAXXPKPVH

SEQ ID NO: 43803 - protein, 43 aa, Artificial Sequence
  GFR-binding peptide
  MOD_RES (1), (3), (38), (39): Xaa is C or S
  MOD_RES (16), (17), (18), (19), (20): Xaa is A or G
  MOD_RES (21), (22), (23), (24): Xaa is A or G or is absent
XGXEAVSMGEPYVKLXXXXXXXXXFFLVSLSSLKTPVXXAKGV

SEQ ID NO: 43804 - protein, 35 aa, Artificial Sequence
  GFR-binding peptide
  MOD_RES (33), (34): Xaa is C or S
  MOD_RES (11), (12), (13), (14), (15): Xaa is A or G
  MOD_RES (16), (17), (18), (19): Xaa is A or G or is absent
EVVMDPYVKLXXXXXXXXXFFLISLSSLRTPVXXT

SEQ ID NO: 43805 - protein, 32 aa, Artificial Sequence
  GFR-binding peptide
  MOD_RES (11), (12), (13), (14), (15): Xaa is A or G
  MOD_RES (16), (17), (18), (19): Xaa is A or G or is absent
EVTMNPYVKLXXXXXXXXXFFLISLSSMKEPV

SEQ ID NO: 43806 - protein, 37 aa, Artificial Sequence
  GFR-binding peptide
  MOD_RES (2), (37): Xaa is C or S
  MOD_RES (15), (16), (17), (18), (19): Xaa is A or G
  MOD_RES (20), (21), (22), (23): Xaa is A or G or is absent
GXEAVSMGEPYVKLXXXXXXXXXFFLVSLSSLKTPVX

SEQ ID NO: 43807 - protein, 35 aa, Artificial Sequence
  GFR-binding peptide
  MOD_RES (34), (34): Xaa is C or S
KNHQLFPYVKLHQGQHPKIRFFLMSLSSEETPVXE

SEQ ID NO: 43808 - protein, 42 aa, Artificial Sequence
  GFR-binding peptide
  MOD_RES (1), (3), (36), (37): Xaa is C or S
  MOD_RES (14), (15), (16), (17), (18): Xaa is A or G
  MOD_RES (19), (20), (21), (22): Xaa is A or G or is absent
XKXSRVIMPYVKLXXXXXXXXXFFLISLSSLAQPVXXPAASA

SEQ ID NO: 43809 - protein, 42 aa, Artificial Sequence
  GFR-binding peptide
  MOD_RES (1), (3), (37), (38): Xaa is C or S
  MOD_RES (15), (16), (17), (18), (19): Xaa is A or G
  MOD_RES (20), (21), (22), (23): Xaa is A or G or is absent
XGXRDVVMGPYVKLXXXXXXXXXFFLMSLSSMKTPTXXPGAS

SEQ ID NO: 43810 - protein, 38 aa, Artificial Sequence
  GFR-binding peptide
  MOD_RES (2), (4), (37), (38): Xaa is C or S
  MOD_RES (15), (16), (17), (18), (19): Xaa is A or G
  MOD_RES (20), (21), (22), (23): Xaa is A or G or is absent
SXKXSRVIMPYVKLXXXXXXXXXFFLISLSSLAQPVXX

SEQ ID NO: 43811 - protein, 38 aa, Artificial Sequence
  GFR-binding peptide
  MOD_RES (2), (4), (36), (37): Xaa is C or S
RXGXESVAMGPYVKLYTVVGKDFFLISLSSLKTPVXXA

SEQ ID NO: 43812 - protein, 37 aa, Artificial Sequence
  GFR-binding peptide
  MOD_RES (34), (35): Xaa is C or S
  MOD_RES (12), (13), (14), (15), (16): Xaa is A or G
  MOD_RES (17), (18), (19), (20): Xaa is A or G or is absent
ESVAMGPYVKLXXXXXXXXXFFLISLSSLKTPVXXAK

SEQ ID NO: 43813 - protein, 37 aa, Artificial Sequence
  GFR-binding peptide
  MOD_RES (34), (35): Xaa is C or S
  MOD_RES (12), (13), (14), (15), (16): Xaa is A or G
  MOD_RES (17), (18), (19), (20): Xaa is A or G or is absent
SEVVMDPYVKLXXXXXXXXXFFLISLSSLRTPVXXTP

SEQ ID NO: 43814 - protein, 41 aa, Artificial Sequence
  GFR-binding peptide
  MOD_RES (1), (3), (37): Xaa is C or S
  MOD_RES (15), (16), (17), (18), (19): Xaa is A or G
  MOD_RES (20), (21), (22), (23): Xaa is A or G or is absent
XEXKNHQLFPYVKLXXXXXXXXXFFLMSLSSEETPVXELGE

SEQ ID NO: 43815 - protein, 34 aa, Artificial Sequence
  GFR-binding peptide
  MOD_RES (2), (34): Xaa is C or S
GXESVAMGPYVKLYTVVGKDFFLISLSSLKTPVX

SEQ ID NO: 43816 - protein, 38 aa, Artificial Sequence
  GFR-binding peptide
  MOD_RES (2), (35), (36): Xaa is C or S
  MOD_RES (13), (14), (15), (16), (17): Xaa is A or G
  MOD_RES (18), (19), (20), (21): Xaa is A or G or is absent
GXEEVIMPYVKLXXXXXXXXXFFLMSLSSTKVPAXXTS

SEQ ID NO: 43817 - protein, 39 aa, Artificial Sequence
  GFR-binding peptide
  MOD_RES (34), (34): Xaa is C or S
  MOD_RES (12), (13), (14), (15), (16): Xaa is A or G
  MOD_RES (17), (18), (19), (20): Xaa is A or G or is absent
SRVVMNPYVKLXXXXXXXXXFFLVSLSSLKTPAXTPKTV

SEQ ID NO: 43818 - protein, 34 aa, Artificial Sequence
  GFR-binding peptide
  MOD_RES (1), (3), (34): Xaa is C or S
XKXSKVVMPYVKLVKPTRGVLFFISLSSLDQPVX

SEQ ID NO: 43819 - protein, 42 aa, Artificial Sequence
  GFR-binding peptide
  MOD_RES (1), (36), (37): Xaa is C or S
  MOD_RES (14), (15), (16), (17), (18): Xaa is A or G
  MOD_RES (19), (20), (21), (22): Xaa is A or G or is absent
XEAVSMGEPYVKLXXXXXXXXXFFLVSLSSLKTPVXXAKGVK

SEQ ID NO: 43820 - protein, 32 aa, Artificial Sequence
  GFR-binding peptide
  MOD_RES (32), (32): Xaa is C or S
SEVTMNPYVKLVVNKNEDFFLISLSSMKEPVX

SEQ ID NO: 43821 - protein, 35 aa, Artificial Sequence
  GFR-binding peptide
  MOD_RES (1), (1): Xaa is C or S
XELHEELRPYVKLLKPKKRVYEFFLVSLSSHHVRS

SEQ ID NO: 43822 - protein, 38 aa, Artificial Sequence
  GFR-binding peptide
  MOD_RES (1), (3), (37): Xaa is C or S
  MOD_RES (15), (16), (17), (18), (19): Xaa is A or G
  MOD_RES (20), (21), (22), (23): Xaa is A or G or is absent
XEXKNHQLFPYVKLXXXXXXXXXFFLMSLSSEETPVXE

SEQ ID NO: 43823 - protein, 34 aa, Artificial Sequence
  GFR-binding peptide
HEELRPYVKLLKPKKRVYEFFLVSLSSHHVRSPQ

SEQ ID NO: 43824 - protein, 30 aa, Artificial Sequence
  GFR-binding peptide
KVVMNPYVKLIVNNSSDFFLVSLSSLKTPA

SEQ ID NO: 43825 - protein, 38 aa, Artificial Sequence
  GFR-binding peptide
  MOD_RES (2), (4), (38): Xaa is C or S
  MOD_RES (16), (17), (18), (19), (20): Xaa is A or G
  MOD_RES (21), (22), (23), (24): Xaa is A or G or is absent
HXGXARVVMNPYVKLXXXXXXXXXFFLVSLSSLQTPAX

SEQ ID NO: 43826 - protein, 38 aa, Artificial Sequence
  GFR-binding peptide
  MOD_RES (1), (35), (36): Xaa is C or S
  MOD_RES (13), (14), (15), (16), (17): Xaa is A or G
  MOD_RES (18), (19), (20), (21): Xaa is A or G or is absent
XARVVMNPYVKLXXXXXXXXXFFLVSLSSLQTPAXXPK

SEQ ID NO: 43827 - protein, 35 aa, Artificial Sequence
  GFR-binding peptide
  MOD_RES (2), (2): Xaa is C or S
  MOD_RES (14), (15), (16), (17), (18): Xaa is A or G
  MOD_RES (19), (20), (21), (22): Xaa is A or G or is absent
GXESVAMGPYVKLXXXXXXXXXFFLISLSSLKTPV

SEQ ID NO: 43828 - protein, 38 aa, Artificial Sequence
  GFR-binding peptide
  MOD_RES (1), (3), (37), (38): Xaa is C or S
  MOD_RES (15), (16), (17), (18), (19): Xaa is A or G
  MOD_RES (20), (21), (22), (23): Xaa is A or G or is absent
XGXAEVVMDPYVKLXXXXXXXXXFFLISLSSLRAPVXX

SEQ ID NO: 43829 - protein, 32 aa, Artificial Sequence
  GFR-binding peptide
  MOD_RES (1), (1): Xaa is C or S
XGEVVMEPYVKLVVKDYEDFFLMSLSSLETPV

SEQ ID NO: 43830 - protein, 39 aa, Artificial Sequence
  GFR-binding peptide
  MOD_RES (2), (4), (38), (39): Xaa is C or S
  MOD_RES (16), (17), (18), (19), (20): Xaa is A or G
  MOD_RES (21), (22), (23), (24): Xaa is A or G or is absent
SXGXRDVVMGPYVKLXXXXXXXXXFFLMSLSSMKTPTXX

SEQ ID NO: 43831 - protein, 36 aa, Artificial Sequence
  GFR-binding peptide
  MOD_RES (33), (33): Xaa is C or S
  MOD_RES (11), (12), (13), (14), (15): Xaa is A or G
  MOD_RES (16), (17), (18), (19): Xaa is A or G or is absent
RVVMNPYVKLXXXXXXXXXFFLVSLSSLKTPAXTPK

SEQ ID NO: 43832 - protein, 38 aa, Artificial Sequence
  GFR-binding peptide
  MOD_RES (2), (4): Xaa is C or S
AXAXELHEELRPYVKLLKPKKRVYEFFLVSLSSHHVRS

SEQ ID NO: 43833 - protein, 39 aa, Artificial Sequence
  GFR-binding peptide
  MOD_RES (2), (4), (38), (39): Xaa is C or S
  MOD_RES (16), (17), (18), (19), (20): Xaa is A or G
  MOD_RES (21), (22), (23), (24): Xaa is A or G or is absent
RXGXAEVVMDPYVKLXXXXXXXXXFFLISLSSLRAPVXX

SEQ ID NO: 43834 - protein, 42 aa, Artificial Sequence
  GFR-binding peptide
  MOD_RES (2), (4), (39), (40): Xaa is C or S
  MOD_RES (17), (18), (19), (20), (21): Xaa is A or G
  MOD_RES (22), (23), (24), (25): Xaa is A or G or is absent
RXGXEAVSMGEPYVKLXXXXXXXXXFFLVSLSSLKTPVXXAK

SEQ ID NO: 43835 - protein, 37 aa, Artificial Sequence
  GFR-binding peptide
  MOD_RES (1), (35), (36): Xaa is C or S
  MOD_RES (13), (14), (15), (16), (17): Xaa is A or G
  MOD_RES (18), (19), (20), (21): Xaa is A or G or is absent
XGEVVMEPYVKLXXXXXXXXXFFLMSLSSLETPVXXA

SEQ ID NO: 43836 - protein, 36 aa, Artificial Sequence
  GFR-binding peptide
  MOD_RES (1), (33), (34): Xaa is C or S
XSRVVMNPYVKLIVNSSDDFFLVSLSSLKTPAXXPK

SEQ ID NO: 43837 - protein, 40 aa, Artificial Sequence
  GFR-binding peptide
  MOD_RES (1), (3), (37), (38): Xaa is C or S
  MOD_RES (15), (16), (17), (18), (19): Xaa is A or G
  MOD_RES (20), (21), (22), (23): Xaa is A or G or is absent
XAXSEVTMNPYVKLXXXXXXXXXFFLISLSSMKEPVXXPE

SEQ ID NO: 43838 - protein, 34 aa, Artificial Sequence
  GFR-binding peptide
  MOD_RES (2), (34): Xaa is C or S
GXSEVVMDPYVKLVVNNASDFFLISLSSLRTPVX

SEQ ID NO: 43839 - protein, 38 aa, Artificial Sequence
  GFR-binding peptide
  MOD_RES (34), (35): Xaa is C or S
  MOD_RES (12), (13), (14), (15), (16): Xaa is A or G
  MOD_RES (17), (18), (19), (20): Xaa is A or G or is absent
ARVVMNPYVKLXXXXXXXXXFFLVSLSSLQTPAXXPKP

SEQ ID NO: 43840 - protein, 43 aa, Artificial Sequence
  GFR-binding peptide
  MOD_RES (2), (4), (37), (38): Xaa is C or S
  MOD_RES (15), (16), (17), (18), (19): Xaa is A or G
  MOD_RES (20), (21), (22), (23): Xaa is A or G or is absent
SXKXSKVIMPYVKLXXXXXXXXXFFLISLSSLDQSVXXPSASA

SEQ ID NO: 43841 - protein, 35 aa, Artificial Sequence
  GFR-binding peptide
  MOD_RES (1), (33): Xaa is C or S
XSRVVMNPYVKLIVNSSDDFFLVSLSSLKTPAXTP

SEQ ID NO: 43842 - protein, 37 aa, Artificial Sequence
  GFR-binding peptide
  MOD_RES (2), (4): Xaa is C or S
  MOD_RES (16), (17), (18), (19), (20): Xaa is A or G
  MOD_RES (21), (22), (23), (24): Xaa is A or G or is absent
RXGXSEVVMDPYVKLXXXXXXXXXFFLISLSSLRTPV

SEQ ID NO: 43843 - protein, 36 aa, Artificial Sequence
  GFR-binding peptide
  MOD_RES (33), (34): Xaa is C or S
  MOD_RES (11), (12), (13), (14), (15): Xaa is A or G
  MOD_RES (16), (17), (18), (19): Xaa is A or G or is absent
EVVMEPYVKLXXXXXXXXXFFLMSLSSLETPVXXAK

SEQ ID NO: 43844 - protein, 35 aa, Artificial Sequence
  GFR-binding peptide
  MOD_RES (1), (32), (33): Xaa is C or S
XSKVVMPYVKLVKPTRGVLFFISLSSLDQPVXXPS

SEQ ID NO: 43845 - protein, 39 aa, Artificial Sequence
  GFR-binding peptide
  MOD_RES (33), (34): Xaa is C or S
  MOD_RES (11), (12), (13), (14), (15): Xaa is A or G
  MOD_RES (16), (17), (18), (19): Xaa is A or G or is absent
RVVMNPYVKLXXXXXXXXXFFLVSLSSLQTPAXXPKPVT

SEQ ID NO: 43846 - protein, 35 aa, Artificial Sequence
  GFR-binding peptide
  MOD_RES (1), (3), (35): Xaa is C or S
XGXSRVVMNPYVKLIVNSSDDFFLVSLSSLKTPAX

SEQ ID NO: 43847 - protein, 34 aa, Artificial Sequence
  GFR-binding peptide
  MOD_RES (2), (34): Xaa is C or S
GXAEVVMDPYVKLVVNNAADFFLISLSSLRAPVX

SEQ ID NO: 43848 - protein, 35 aa, Artificial Sequence
  GFR-binding peptide
  MOD_RES (32), (33): Xaa is C or S
ARVVMNPYVKLIVNSSDDFFLVSLSSLQTPAXXPK

SEQ ID NO: 43849 - protein, 38 aa, Artificial Sequence
  GFR-binding peptide
  MOD_RES (35), (36): Xaa is C or S
  MOD_RES (13), (14), (15), (16), (17): Xaa is A or G
  MOD_RES (18), (19), (20), (21): Xaa is A or G or is absent
EAVSMGEPYVKLXXXXXXXXXFFLVSLSSLKTPVXXAK

SEQ ID NO: 43850 - protein, 34 aa, Artificial Sequence
  GFR-binding peptide
LHEELRPYVKLLKPKKRVYEFFLVSLSSHHVRSP

SEQ ID NO: 43851 - protein, 33 aa, Artificial Sequence
  GFR-binding peptide
  MOD_RES (1), (32), (33): Xaa is C or S
XSKVIMPYVKLIKPTKGILFFISLSSLDQSVXX

SEQ ID NO: 43852 - protein, 35 aa, Artificial Sequence
  GFR-binding peptide
  MOD_RES (1), (34), (35): Xaa is C or S
  MOD_RES (12), (13), (14), (15), (16): Xaa is A or G
  MOD_RES (17), (18), (19), (20): Xaa is A or G or is absent
XSKVIMPYVKLXXXXXXXXXFFLISLSSLDQSVXX

SEQ ID NO: 43853 - protein, 40 aa, Artificial Sequence
  GFR-binding peptide
  MOD_RES (2), (37), (38): Xaa is C or S
  MOD_RES (15), (16), (17), (18), (19): Xaa is A or G
  MOD_RES (20), (21), (22), (23): Xaa is A or G or is absent
GXEAVSMGEPYVKLXXXXXXXXXFFLVSLSSLKTPVXXAK

SEQ ID NO: 43854 - protein, 37 aa, Artificial Sequence
  GFR-binding peptide
  MOD_RES (33), (34): Xaa is C or S
  MOD_RES (11), (12), (13), (14), (15): Xaa is A or G
  MOD_RES (16), (17), (18), (19): Xaa is A or G or is absent
DVVMGPYVKLXXXXXXXXXFFLMSLSSMKTPTXXPGA

SEQ ID NO: 43855 - protein, 35 aa, Artificial Sequence
  GFR-binding peptide
  MOD_RES (2), (33), (34): Xaa is C or S
KXSKVIMPYVKLIKPTKGILFFISLSSLDQSVXXP

SEQ ID NO: 43856 - protein, 35 aa, Artificial Sequence
  GFR-binding peptide
  MOD_RES (2), (4): Xaa is C or S
RXGXGEVVMEPYVKLVVKDYEDFFLMSLSSLETPV

SEQ ID NO: 43857 - protein, 38 aa, Artificial Sequence
  GFR-binding peptide
  MOD_RES (2), (36), (37): Xaa is C or S
  MOD_RES (14), (15), (16), (17), (18): Xaa is A or G
  MOD_RES (19), (20), (21), (22): Xaa is A or G or is absent
GXARVVMNPYVKLXXXXXXXXXFFLVSLSSLQTPAXXP

SEQ ID NO: 43858 - protein, 37 aa, Artificial Sequence
  GFR-binding peptide
  MOD_RES (34), (35): Xaa is C or S
  MOD_RES (12), (13), (14), (15), (16): Xaa is A or G
  MOD_RES (17), (18), (19), (20): Xaa is A or G or is absent
AEVVMDPYVKLXXXXXXXXXFFLISLSSLRAPVXXSA

SEQ ID NO: 43859 - protein, 43 aa, Artificial Sequence
  GFR-binding peptide
  MOD_RES (1), (3), (37), (38): Xaa is C or S
  MOD_RES (15), (16), (17), (18), (19): Xaa is A or G
  MOD_RES (20), (21), (22), (23): Xaa is A or G or is absent
XGXSEVVMDPYVKLXXXXXXXXXFFLISLSSLRTPVXXTPPTS

SEQ ID NO: 43860 - protein, 40 aa, Artificial Sequence
  GFR-binding peptide
  MOD_RES (36), (36): Xaa is C or S
  MOD_RES (12), (13), (14), (15), (16): Xaa is A or G
  MOD_RES (17), (18), (19), (20): Xaa is A or G or is absent
LHEELRPYVKLXXXXXXXXXFFLVSLSSHHVRSPQXKVSS

SEQ ID NO: 43861 - protein, 39 aa, Artificial Sequence
  GFR-binding peptide
  MOD_RES (2), (35), (36): Xaa is C or S
  MOD_RES (13), (14), (15), (16), (17): Xaa is A or G
  MOD_RES (18), (19), (20), (21): Xaa is A or G or is absent
KXSKVVMPYVKLXXXXXXXXXFFLISLSSLDQPVXXPSA

SEQ ID NO: 43862 - protein, 33 aa, Artificial Sequence
  GFR-binding peptide
  MOD_RES (33), (33): Xaa is C or S
  MOD_RES (11), (12), (13), (14), (15): Xaa is A or G
  MOD_RES (16), (17), (18), (19): Xaa is A or G or is absent
EVTMNPYVKLXXXXXXXXXFFLISLSSMKEPVX

SEQ ID NO: 43863 - protein, 38 aa, Artificial Sequence
  GFR-binding peptide
  MOD_RES (1), (3), (35): Xaa is C or S
XGXSRVVMNPYVKLIVNSSDDFFLVSLSSLKTPAXTPK

SEQ ID NO: 43864 - protein, 44 aa, Artificial Sequence
  GFR-binding peptide
  MOD_RES (2), (4), (38), (39): Xaa is C or S
  MOD_RES (16), (17), (18), (19), (20): Xaa is A or G
  MOD_RES (21), (22), (23), (24): Xaa is A or G or is absent
SXGXRDVVMGPYVKLXXXXXXXXXFFLMSLSSMKTPTXXPGASG

SEQ ID NO: 43865 - protein, 37 aa, Artificial Sequence
  GFR-binding peptide
  MOD_RES (1), (3), (37): Xaa is C or S
  MOD_RES (15), (16), (17), (18), (19): Xaa is A or G
  MOD_RES (20), (21), (22), (23): Xaa is A or G or is absent
XEXKNHQLFPYVKLXXXXXXXXXFFLMSLSSEETPVX

SEQ ID NO: 43866 - protein, 38 aa, Artificial Sequence
  GFR-binding peptide
  MOD_RES (2), (36): Xaa is C or S
  MOD_RES (14), (15), (16), (17), (18): Xaa is A or G
  MOD_RES (19), (20), (21), (22): Xaa is A or G or is absent
EXKNHQLFPYVKLXXXXXXXXXFFLMSLSSEETPVXEL

SEQ ID NO: 43867 - protein, 39 aa, Artificial Sequence
  GFR-binding peptide
  MOD_RES (1), (3), (37), (38): Xaa is C or S
  MOD_RES (15), (16), (17), (18), (19): Xaa is A or G
  MOD_RES (20), (21), (22), (23): Xaa is A or G or is absent
XAXSEVTMNPYVKLXXXXXXXXXFFLISLSSMKEPVXXP

SEQ ID NO: 43868 - protein, 37 aa, Artificial Sequence
  GFR-binding peptide
  MOD_RES (2), (33), (34): Xaa is C or S
KXSKVVMPYVKLVKPTRGVLFFISLSSLDQPVXXPSA

SEQ ID NO: 43869 - protein, 35 aa, Artificial Sequence
  GFR-binding peptide
  MOD_RES (32), (33): Xaa is C or S
ESVAMGPYVKLYTVVGKDFFLISLSSLKTPVXXAK

SEQ ID NO: 43870 - protein, 40 aa, Artificial Sequence
  GFR-binding peptide
  MOD_RES (1), (3), (37), (38): Xaa is C or S
  MOD_RES (15), (16), (17), (18), (19): Xaa is A or G
  MOD_RES (20), (21), (22), (23): Xaa is A or G or is absent
XGXRDVVMGPYVKLXXXXXXXXXFFLMSLSSMKTPTXXPG

SEQ ID NO: 43871 - protein, 40 aa, Artificial Sequence
  GFR-binding peptide
  MOD_RES (2), (4), (38): Xaa is C or S
  MOD_RES (16), (17), (18), (19), (20): Xaa is A or G
  MOD_RES (21), (22), (23), (24): Xaa is A or G or is absent
RXEXKNHQLFPYVKLXXXXXXXXXFFLMSLSSEETPVXEL

SEQ ID NO: 43872 - protein, 32 aa, Artificial Sequence
  GFR-binding peptide
  MOD_RES (32), (32): Xaa is C or S
ESVAMGPYVKLYTVVGKDFFLISLSSLKTPVX

SEQ ID NO: 43873 - protein, 43 aa, Artificial Sequence
  GFR-binding peptide
  MOD_RES (1), (3), (37), (38): Xaa is C or S
  MOD_RES (15), (16), (17), (18), (19): Xaa is A or G
  MOD_RES (20), (21), (22), (23): Xaa is A or G or is absent
XGXESVAMGPYVKLXXXXXXXXXFFLISLSSLKTPVXXAKSAK

SEQ ID NO: 43874 - protein, 39 aa, Artificial Sequence
  GFR-binding peptide
  MOD_RES (1), (35), (36): Xaa is C or S
  MOD_RES (13), (14), (15), (16), (17): Xaa is A or G
  MOD_RES (18), (19), (20), (21): Xaa is A or G or is absent
XSEVVMDPYVKLXXXXXXXXXFFLISLSSLRTPVXXTPP

SEQ ID NO: 43875 - protein, 41 aa, Artificial Sequence
  GFR-binding peptide
  MOD_RES (2), (4), (35), (36): Xaa is C or S
SXKXSKVVMPYVKLVKPTRGVLFFISLSSLDQPVXXPSASA

SEQ ID NO: 43876 - protein, 44 aa, Artificial Sequence
  GFR-binding peptide
  MOD_RES (2), (4), (38), (39): Xaa is C or S
  MOD_RES (16), (17), (18), (19), (20): Xaa is A or G
  MOD_RES (21), (22), (23), (24): Xaa is A or G or is absent
HXGXAKVVMNPYVKLXXXXXXXXXFFLVSLSSLKTPAXXAKPVA

SEQ ID NO: 43877 - protein, 39 aa, Artificial Sequence
  GFR-binding peptide
  MOD_RES (1), (35), (36): Xaa is C or S
  MOD_RES (13), (14), (15), (16), (17): Xaa is A or G
  MOD_RES (18), (19), (20), (21): Xaa is A or G or is absent
XSRVVMNPYVKLXXXXXXXXXFFLVSLSSLKTPAXXPKP

SEQ ID NO: 43878 - protein, 34 aa, Artificial Sequence
  GFR-binding peptide
  MOD_RES (1), (1): Xaa is C or S
  MOD_RES (13), (14), (15), (16), (17): Xaa is A or G
  MOD_RES (18), (19), (20), (21): Xaa is A or G or is absent
XSEVVMDPYVKLXXXXXXXXXFFLISLSSLRTPV

SEQ ID NO: 43879 - protein, 36 aa, Artificial Sequence
  GFR-binding peptide
  MOD_RES (2), (33), (34): Xaa is C or S
GXEEVIMPYVKLLLVRGNDFFLMSLSSTKVPAXXTS

SEQ ID NO: 43880 - protein, 39 aa, Artificial Sequence
  GFR-binding peptide
  MOD_RES (1), (35): Xaa is C or S
  MOD_RES (13), (14), (15), (16), (17): Xaa is A or G
  MOD_RES (18), (19), (20), (21): Xaa is A or G or is absent
XKNHQLFPYVKLXXXXXXXXXFFLMSLSSEETPVXELGE

SEQ ID NO: 43881 - protein, 40 aa, Artificial Sequence
  GFR-binding peptide
  MOD_RES (1), (38): Xaa is C or S
XELHEELRPYVKLLKPKKRVYEFFLVSLSSHHVRSPQXKV

SEQ ID NO: 43882 - protein, 42 aa, Artificial Sequence; identical to SEQ ID NO: 1218
  GFR-binding peptide
  MOD_RES (2), (4), (36), (37): Xaa is C or S

SEQ ID NO: 43883 - protein, 35 aa, Artificial Sequence
  GFR-binding peptide
  MOD_RES (1), (3), (34), (35): Xaa is C or S
XGXEEVIMPYVKLLLVRGNDFFLMSLSSTKVPAXX

SEQ ID NO: 43884 - protein, 40 aa, Artificial Sequence
  GFR-binding peptide
  MOD_RES (1), (3), (37): Xaa is C or S
  MOD_RES (15), (16), (17), (18), (19): Xaa is A or G
  MOD_RES (20), (21), (22), (23): Xaa is A or G or is absent
XGXSRVVMNPYVKLXXXXXXXXXFFLVSLSSLKTPAXTPK

SEQ ID NO: 43885 - protein, 37 aa, Artificial Sequence
  GFR-binding peptide
  MOD_RES (1), (3), (35), (36): Xaa is C or S
XAXSEVTMNPYVKLVVNKNEDFFLISLSSMKEPVXXP

SEQ ID NO: 43886 - protein, 38 aa, Artificial Sequence
  GFR-binding peptide
  MOD_RES (37), (37): Xaa is C or S
  MOD_RES (13), (14), (15), (16), (17): Xaa is A or G
  MOD_RES (18), (19), (20), (21): Xaa is A or G or is absent
ELHEELRPYVKLXXXXXXXXXFFLVSLSSHHVRSPQXK

SEQ ID NO: 43887 - protein, 37 aa, Artificial Sequence
  GFR-binding peptide
  MOD_RES (1), (3), (36), (37): Xaa is C or S
XGXEAVSMGEPYVKLTPVGMDDFFLVSLSSLKTPVXX

SEQ ID NO: 43888 - protein, 37 aa, Artificial Sequence
  GFR-binding peptide
  MOD_RES (1), (3), (36), (37): Xaa is C or S
  MOD_RES (14), (15), (16), (17), (18): Xaa is A or G
  MOD_RES (19), (20), (21), (22): Xaa is A or G or is absent
XKXSKVVMPYVKLXXXXXXXXXFFLISLSSLDQPVXX

SEQ ID NO: 43889 - protein, 39 aa, Artificial Sequence
  GFR-binding peptide
  MOD_RES (1), (3), (37), (38): Xaa is C or S
  MOD_RES (15), (16), (17), (18), (19): Xaa is A or G
  MOD_RES (20), (21), (22), (23): Xaa is A or G or is absent
XGXAEVVMDPYVKLXXXXXXXXXFFLISLSSLRAPVXXS

SEQ ID NO: 43890 - protein, 40 aa, Artificial Sequence
  GFR-binding peptide
  MOD_RES (1), (34), (35): Xaa is C or S
  MOD_RES (12), (13), (14), (15), (16): Xaa is A or G
  MOD_RES (17), (18), (19), (20): Xaa is A or G or is absent
XEEVIMPYVKLXXXXXXXXXFFLMSLSSTKVPAXXTSPVR

SEQ ID NO: 43891 - protein, 34 aa, Artificial Sequence
  GFR-binding peptide
  MOD_RES (1), (34): Xaa is C or S
  MOD_RES (12), (13), (14), (15), (16): Xaa is A or G
  MOD_RES (17), (18), (19), (20): Xaa is A or G or is absent
XSKVVMPYVKLXXXXXXXXXFFLISLSSLDQPVX

SEQ ID NO: 43892 - protein, 39 aa, Artificial Sequence
  GFR-binding peptide
  MOD_RES (1), (3), (36), (37): Xaa is C or S
  MOD_RES (14), (15), (16), (17), (18): Xaa is A or G
  MOD_RES (19), (20), (21), (22): Xaa is A or G or is absent
XGXEEVIMPYVKLXXXXXXXXXFFLMSLSSTKVPAXXTS

SEQ ID NO: 43893 - protein, 37 aa, Artificial Sequence
  GFR-binding peptide
  MOD_RES (2), (4), (37): Xaa is C or S
RXGXEAVSMGEPYVKLTPVGMDDFFLVSLSSLKTPVX

SEQ ID NO: 43894 - protein, 35 aa, Artificial Sequence
  GFR-binding peptide
  MOD_RES (1), (33), (34): Xaa is C or S
XARVVMNPYVKLIVNSSDDFFLVSLSSLQTPAXXP

SEQ ID NO: 43895 - protein, 43 aa, Artificial Sequence
  GFR-binding peptide
  MOD_RES (2), (4), (38), (39): Xaa is C or S
  MOD_RES (16), (17), (18), (19), (20): Xaa is A or G
  MOD_RES (21), (22), (23), (24): Xaa is A or G or is absent
HXGXARVVMNPYVKLXXXXXXXXXFFLVSLSSLQTPAXXPKPV

SEQ ID NO: 43896 - protein, 39 aa, Artificial Sequence
  GFR-binding peptide
  MOD_RES (1), (35): Xaa is C or S
XKNHQLFPYVKLHQGQHPKIRFFLMSLSSEETPVXELGE

SEQ ID NO: 43897 - protein, 35 aa, Artificial Sequence
  GFR-binding peptide
  MOD_RES (32), (33): Xaa is C or S
AEVVMDPYVKLVVNNAADFFLISLSSLRAPVXXSA

SEQ ID NO: 43898 - protein, 34 aa, Artificial Sequence
  GFR-binding peptide
  MOD_RES (2), (34): Xaa is C or S
GXRDVVMGPYVKLIIQQKDNFFLMSLSSMKTPTX

SEQ ID NO: 43899 - protein, 39 aa, Artificial Sequence
  GFR-binding peptide
  MOD_RES (37), (37): Xaa is C or S
ELHEELRPYVKLLKPKKRVYEFFLVSLSSHHVRSPQXKV

SEQ ID NO: 43900 - protein, 34 aa, Artificial Sequence
  GFR-binding peptide
  MOD_RES (33), (34): Xaa is C or S
  MOD_RES (11), (12), (13), (14), (15): Xaa is A or G
  MOD_RES (16), (17), (18), (19): Xaa is A or G or is absent
EVVMDPYVKLXXXXXXXXXFFLISLSSLRAPVXX

SEQ ID NO: 43901 - protein, 35 aa, Artificial Sequence
  GFR-binding peptide
  MOD_RES (35), (35): Xaa is C or S
  MOD_RES (11), (12), (13), (14), (15): Xaa is A or G
  MOD_RES (16), (17), (18), (19): Xaa is A or G or is absent
HEELRPYVKLXXXXXXXXXFFLVSLSSHHVRSPQX

SEQ ID NO: 43902 - protein, 33 aa, Artificial Sequence
  GFR-binding peptide
  MOD_RES (12), (13), (14), (15), (16): Xaa is A or G
  MOD_RES (17), (18), (19), (20): Xaa is A or G or is absent
ARVVMNPYVKLXXXXXXXXXFFLVSLSSLQTPA

SEQ ID NO: 43903 - protein, 39 aa, Artificial Sequence
  GFR-binding peptide
  MOD_RES (2), (4), (38), (39): Xaa is C or S
  MOD_RES (16), (17), (18), (19), (20): Xaa is A or G
  MOD_RES (21), (22), (23), (24): Xaa is A or G or is absent
HXGXSRVVMNPYVKLXXXXXXXXXFFLVSLSSLKTPAXX

SEQ ID NO: 43904 - protein, 32 aa, Artificial Sequence
  GFR-binding peptide
  MOD_RES (11), (12), (13), (14), (15): Xaa is A or G
  MOD_RES (16), (17), (18), (19): Xaa is A or G or is absent
HEELRPYVKLXXXXXXXXXFFLVSLSSHHVRS

SEQ ID NO: 43905 - protein, 32 aa, Artificial Sequence
  GFR-binding peptide
  MOD_RES (32), (32): Xaa is C or S
SRVVMNPYVKLIVNSSDDFFLVSLSSLKTPAX

SEQ ID NO: 43906 - protein, 40 aa, Artificial Sequence
  GFR-binding peptide
  MOD_RES (2), (36), (37): Xaa is C or S
  MOD_RES (14), (15), (16), (17), (18): Xaa is A or G
  MOD_RES (19), (20), (21), (22): Xaa is A or G or is absent
GXESVAMGPYVKLXXXXXXXXXFFLISLSSLKTPVXXAKS

SEQ ID NO: 43907 - protein, 37 aa, Artificial Sequence
  GFR-binding peptide
  MOD_RES (1), (35), (36): Xaa is C or S
  MOD_RES (13), (14), (15), (16), (17): Xaa is A or G
  MOD_RES (18), (19), (20), (21): Xaa is A or G or is absent
XESVAMGPYVKLXXXXXXXXXFFLISLSSLKTPVXXA

SEQ ID NO: 43908 - protein, 40 aa, Artificial Sequence
  GFR-binding peptide
  MOD_RES (34), (35): Xaa is C or S
  MOD_RES (12), (13), (14), (15), (16): Xaa is A or G
  MOD_RES (17), (18), (19), (20): Xaa is A or G or is absent
SRVVMNPYVKLXXXXXXXXXFFLVSLSSLKTPAXXPKPVY

SEQ ID NO: 43909 - protein, 40 aa, Artificial Sequence
  GFR-binding peptide
  MOD_RES (34), (35): Xaa is C or S
  MOD_RES (12), (13), (14), (15), (16): Xaa is A or G
  MOD_RES (17), (18), (19), (20): Xaa is A or G or is absent
AKVVMNPYVKLXXXXXXXXXFFLVSLSSLKTPAXXAKPVA

SEQ ID NO: 43910 - protein, 40 aa, Artificial Sequence
  GFR-binding peptide
  MOD_RES (1), (3), (34), (35): Xaa is C or S
XKXSKVIMPYVKLIKPTKGILFFISLSSLDQSVXXPSASA

SEQ ID NO: 43911 - protein, 42 aa, Artificial Sequence
  GFR-binding peptide
  MOD_RES (1), (3), (36), (37): Xaa is C or S
XGXEAVSMGEPYVKLTPVGMDDFFLVSLSSLKTPVXXAKGVK

SEQ ID NO: 43912 - protein, 37 aa, Artificial Sequence
  GFR-binding peptide
  MOD_RES (1), (3), (37): Xaa is C or S
  MOD_RES (15), (16), (17), (18), (19): Xaa is A or G
  MOD_RES (20), (21), (22), (23): Xaa is A or G or is absent
XGXAEVVMDPYVKLXXXXXXXXXFFLISLSSLRAPVX

SEQ ID NO: 43913 - protein, 36 aa, Artificial Sequence
  GFR-binding peptide
  MOD_RES (2), (36): Xaa is C or S
  MOD_RES (14), (15), (16), (17), (18): Xaa is A or G
  MOD_RES (19), (20), (21), (22): Xaa is A or G or is absent
EXKNHQLFPYVKLXXXXXXXXXFFLMSLSSEETPVX

SEQ ID NO: 43914 - protein, 35 aa, Artificial Sequence
  GFR-binding peptide
  MOD_RES (33), (34): Xaa is C or S
  MOD_RES (11), (12), (13), (14), (15): Xaa is A or G
  MOD_RES (16), (17), (18), (19): Xaa is A or G or is absent
EVVMDPYVKLXXXXXXXXXFFLISLSSLRAPVXXS

SEQ ID NO: 43915 - protein, 38 aa, Artificial Sequence
  GFR-binding peptide
  MOD_RES (34), (35): Xaa is C or S
  MOD_RES (12), (13), (14), (15), (16): Xaa is A or G
  MOD_RES (17), (18), (19), (20): Xaa is A or G or is absent
AEVVMDPYVKLXXXXXXXXXFFLISLSSLRAPVXXSAP

SEQ ID NO: 43916 - protein, 42 aa, Artificial Sequence; identical to SEQ ID NO: 1220
  GFR-binding peptide
  MOD_RES (2), (4), (36), (37): Xaa is C or S

SEQ ID NO: 43917 - protein, 40 aa, Artificial Sequence
  GFR-binding peptide
  MOD_RES (2), (36), (37): Xaa is C or S
  MOD_RES (14), (15), (16), (17), (18): Xaa is A or G
  MOD_RES (19), (20), (21), (22): Xaa is A or G or is absent
GXSRVVMNPYVKLXXXXXXXXXFFLVSLSSLKTPAXXPKP

SEQ ID NO: 43918 - protein, 37 aa, Artificial Sequence
  GFR-binding peptide
  MOD_RES (33), (34): Xaa is C or S
  MOD_RES (11), (12), (13), (14), (15): Xaa is A or G
  MOD_RES (16), (17), (18), (19): Xaa is A or G or is absent
SKVVMPYVKLXXXXXXXXXFFLISLSSLDQPVXXPSA

SEQ ID NO: 43919 - protein, 39 aa, Artificial Sequence
  GFR-binding peptide
  MOD_RES (2), (35), (36): Xaa is C or S
  MOD_RES (13), (14), (15), (16), (17): Xaa is A or G
  MOD_RES (18), (19), (20), (21): Xaa is A or G or is absent
KXSRVIMPYVKLXXXXXXXXXFFLISLSSLAQPVXXPAA

SEQ ID NO: 43920 - protein, 33 aa, Artificial Sequence
  GFR-binding peptide
  MOD_RES (2), (2): Xaa is C or S
GXAKVVMNPYVKLIVNNSSDFFLVSLSSLKTPA

SEQ ID NO: 43921 - protein, 40 aa, Artificial Sequence
  GFR-binding peptide
  MOD_RES (1), (34), (35): Xaa is C or S
  MOD_RES (12), (13), (14), (15), (16): Xaa is A or G
  MOD_RES (17), (18), (19), (20): Xaa is A or G or is absent
XSKVIMPYVKLXXXXXXXXXFFLISLSSLDQSVXXPSASA

SEQ ID NO: 43922 - protein, 41 aa, Artificial Sequence
  GFR-binding peptide
  MOD_RES (2), (39): Xaa is C or S
AXELHEELRPYVKLLKPKKRVYEFFLVSLSSHHVRSPQXKV

SEQ ID NO: 43923 - protein, 37 aa, Artificial Sequence
  GFR-binding peptide
  MOD_RES (1), (3), (35), (36): Xaa is C or S
XGXAEVVMDPYVKLVVNNAADFFLISLSSLRAPVXXS

SEQ ID NO: 43924 - protein, 38 aa, Artificial Sequence
  GFR-binding peptide
  MOD_RES (1), (3), (35), (36): Xaa is C or S
XAXSEVTMNPYVKLVVNKNEDFFLISLSSMKEPVXXPE

SEQ ID NO: 43925 - protein, 37 aa, Artificial Sequence
  GFR-binding peptide
  MOD_RES (2), (36), (37): Xaa is C or S
  MOD_RES (14), (15), (16), (17), (18): Xaa is A or G
  MOD_RES (19), (20), (21), (22): Xaa is A or G or is absent
GXSRVVMNPYVKLXXXXXXXXXFFLVSLSSLKTPAXX

SEQ ID NO: 43926 - protein, 36 aa, Artificial Sequence
  GFR-binding peptide
  MOD_RES (34), (35): Xaa is C or S
  MOD_RES (12), (13), (14), (15), (16): Xaa is A or G
  MOD_RES (17), (18), (19), (20): Xaa is A or G or is absent
ESVAMGPYVKLXXXXXXXXXFFLISLSSLKTPVXXA

SEQ ID NO: 43927 - protein, 40 aa, Artificial Sequence
  GFR-binding peptide
  MOD_RES (2), (34), (35): Xaa is C or S
GXSRVVMNPYVKLIVNSSDDFFLVSLSSLKTPAXXPKPVY

SEQ ID NO: 43928 - protein, 38 aa, Artificial Sequence
  GFR-binding peptide
  MOD_RES (1), (3), (37), (38): Xaa is C or S
  MOD_RES (15), (16), (17), (18), (19): Xaa is A or G
  MOD_RES (20), (21), (22), (23): Xaa is A or G or is absent
XAXSEVTMNPYVKLXXXXXXXXXFFLISLSSMKEPVXX

SEQ ID NO: 43929 - protein, 42 aa, Artificial Sequence
  GFR-binding peptide
  MOD_RES (2), (36), (37): Xaa is C or S
  MOD_RES (14), (15), (16), (17), (18): Xaa is A or G
  MOD_RES (19), (20), (21), (22): Xaa is A or G or is absent
GXGEVVMEPYVKLXXXXXXXXXFFLMSLSSLETPVXXAKPIS

SEQ ID NO: 43930 - protein, 35 aa, Artificial Sequence
  GFR-binding peptide
  MOD_RES (34), (35): Xaa is C or S
  MOD_RES (12), (13), (14), (15), (16): Xaa is A or G
  MOD_RES (17), (18), (19), (20): Xaa is A or G or is absent
ARVVMNPYVKLXXXXXXXXXFFLVSLSSLQTPAXX

SEQ ID NO: 43931 - protein, 35 aa, Artificial Sequence
  GFR-binding peptide
  MOD_RES (1), (3), (35): Xaa is C or S
XGXARVVMNPYVKLIVNSSDDFFLVSLSSLQTPAX

SEQ ID NO: 43932 - protein, 39 aa, Artificial Sequence
  GFR-binding peptide
  MOD_RES (34), (35): Xaa is C or S
  MOD_RES (12), (13), (14), (15), (16): Xaa is A or G
  MOD_RES (17), (18), (19), (20): Xaa is A or G or is absent
ARVVMNPYVKLXXXXXXXXXFFLVSLSSLQTPAXXPKPV

SEQ ID NO: 43933 - protein, 36 aa, Artificial Sequence
  GFR-binding peptide
  MOD_RES (1), (3): Xaa is C or S
  MOD_RES (15), (16), (17), (18), (19): Xaa is A or G
  MOD_RES (20), (21), (22), (23): Xaa is A or G or is absent
XGXAKVVMNPYVKLXXXXXXXXXFFLVSLSSLKTPA

SEQ ID NO: 43934 - protein, 37 aa, Artificial Sequence
  GFR-binding peptide
  MOD_RES (1), (3), (35), (36): Xaa is C or S
XGXARVVMNPYVKLIVNSSDDFFLVSLSSLQTPAXXP

SEQ ID NO: 43935 - protein, 43 aa, Artificial Sequence
  GFR-binding peptide
  MOD_RES (2), (4), (41): Xaa is C or S
AXAXELHEELRPYVKLLKPKKRVYEFFLVSLSSHHVRSPQXKV

SEQ ID NO: 43936 - protein, 38 aa, Artificial Sequence
  GFR-binding peptide
  MOD_RES (1), (3): Xaa is C or S
XAXELHEELRPYVKLLKPKKRVYEFFLVSLSSHHVRSP

SEQ ID NO: 43937 - protein, 35 aa, Artificial Sequence
  GFR-binding peptide
  MOD_RES (33), (34): Xaa is C or S
  MOD_RES (11), (12), (13), (14), (15): Xaa is A or G
  MOD_RES (16), (17), (18), (19): Xaa is A or G or is absent
DVVMGPYVKLXXXXXXXXXFFLMSLSSMKTPTXXP

SEQ ID NO: 43938 - protein, 32 aa, Artificial Sequence
  GFR-binding peptide
  MOD_RES (11), (12), (13), (14), (15): Xaa is A or G
  MOD_RES (16), (17), (18), (19): Xaa is A or G or is absent
SKVIMPYVKLXXXXXXXXXFFLISLSSLDQSV

SEQ ID NO: 43939 - protein, 41 aa, Artificial Sequence
  GFR-binding peptide
  MOD_RES (1), (3), (36), (37): Xaa is C or S
  MOD_RES (14), (15), (16), (17), (18): Xaa is A or G
  MOD_RES (19), (20), (21), (22): Xaa is A or G or is absent
XKXSRVIMPYVKLXXXXXXXXXFFLISLSSLAQPVXXPAAS

SEQ ID NO: 43940 - protein, 35 aa, Artificial Sequence
  GFR-binding peptide
  MOD_RES (33), (34): Xaa is C or S
  MOD_RES (11), (12), (13), (14), (15): Xaa is A or G
  MOD_RES (16), (17), (18), (19): Xaa is A or G or is absent
SVAMGPYVKLXXXXXXXXXFFLISLSSLKTPVXXA

SEQ ID NO: 43941 - protein, 37 aa, Artificial Sequence
  GFR-binding peptide
  MOD_RES (37), (37): Xaa is C or S
ELHEELRPYVKLLKPKKRVYEFFLVSLSSHHVRSPQX

SEQ ID NO: 43942 - protein, 39 aa, Artificial Sequence
  GFR-binding peptide
  MOD_RES (1), (3), (35), (36): Xaa is C or S
XAXSEVTMNPYVKLVVNKNEDFFLISLSSMKEPVXXPEP

SEQ ID NO: 43943 - protein, 33 aa, Artificial Sequence
  GFR-binding peptide
  MOD_RES (33), (33): Xaa is C or S
  MOD_RES (11), (12), (13), (14), (15): Xaa is A or G
  MOD_RES (16), (17), (18), (19): Xaa is A or G or is absent
SRVIMPYVKLXXXXXXXXXFFLISLSSLAQPVX

SEQ ID NO: 43944 - protein, 38 aa, Artificial Sequence
  GFR-binding peptide
  MOD_RES (2), (36), (37): Xaa is C or S
  MOD_RES (14), (15), (16), (17), (18): Xaa is A or G
  MOD_RES (19), (20), (21), (22): Xaa is A or G or is absent
GXGEVVMEPYVKLXXXXXXXXXFFLMSLSSLETPVXXA

SEQ ID NO: 43945 - protein, 37 aa, Artificial Sequence
  GFR-binding peptide
  MOD_RES (2), (36): Xaa is C or S
  MOD_RES (14), (15), (16), (17), (18): Xaa is A or G
  MOD_RES (19), (20), (21), (22): Xaa is A or G or is absent
EXKNHQLFPYVKLXXXXXXXXXFFLMSLSSEETPVXE

SEQ ID NO: 43946 - protein, 42 aa, Artificial Sequence
  GFR-binding peptide
  MOD_RES (2), (4), (36), (37): Xaa is C or S
HXGXAKVVMNPYVKLIVNNSSDFFLVSLSSLKTPAXXAKPVA

SEQ ID NO: 43947 - protein, 36 aa, Artificial Sequence
  GFR-binding peptide
  MOD_RES (1), (3), (36): Xaa is C or S
  MOD_RES (14), (15), (16), (17), (18): Xaa is A or G
  MOD_RES (19), (20), (21), (22): Xaa is A or G or is absent
XGXEEVIMPYVKLXXXXXXXXXFFLMSLSSTKVPAX

SEQ ID NO: 43948 - protein, 34 aa, Artificial Sequence
  GFR-binding peptide
  MOD_RES (31), (32): Xaa is C or S
RVVMNPYVKLIVNSSDDFFLVSLSSLKTPAXXPK

SEQ ID NO: 43949 - protein, 34 aa, Artificial Sequence
  GFR-binding peptide
  MOD_RES (2), (4): Xaa is C or S
LXGXEEVIMPYVKLLLVRGNDFFLMSLSSTKVPA

SEQ ID NO: 43950 - protein, 32 aa, Artificial Sequence
  GFR-binding peptide
  MOD_RES (1), (32): Xaa is C or S
XEEVIMPYVKLLLVRGNDFFLMSLSSTKVPAX

SEQ ID NO: 43951 - protein, 35 aa, Artificial Sequence
  GFR-binding peptide
  MOD_RES (1), (3), (34), (35): Xaa is C or S
XKXSKVIMPYVKLIKPTKGILFFISLSSLDQSVXX

SEQ ID NO: 43952 - protein, 40 aa, Artificial Sequence
  GFR-binding peptide
  MOD_RES (1), (3), (40): Xaa is C or S
XAXELHEELRPYVKLLKPKKRVYEFFLVSLSSHHVRSPQX

SEQ ID NO: 43953 - protein, 37 aa, Artificial Sequence
  GFR-binding peptide
  MOD_RES (2), (34), (35): Xaa is C or S
AXSEVTMNPYVKLVVNKNEDFFLISLSSMKEPVXXPE

SEQ ID NO: 43954 - protein, 42 aa, Artificial Sequence
  GFR-binding peptide
  MOD_RES (2), (36), (37): Xaa is C or S
  MOD_RES (14), (15), (16), (17), (18): Xaa is A or G
  MOD_RES (19), (20), (21), (22): Xaa is A or G or is absent
GXAKVVMNPYVKLXXXXXXXXXFFLVSLSSLKTPAXXAKPVA

SEQ ID NO: 43955 - protein, 35 aa, Artificial Sequence
  GFR-binding peptide
  MOD_RES (32), (33): Xaa is C or S
GEVVMEPYVKLVVKDYEDFFLMSLSSLETPVXXAK

SEQ ID NO: 43956 - protein, 39 aa, Artificial Sequence
  GFR-binding peptide
  MOD_RES (1), (3), (35), (36): Xaa is C or S
XGXESVAMGPYVKLYTVVGKDFFLISLSSLKTPVXXAKS

SEQ ID NO: 43957 - protein, 38 aa, Artificial Sequence
  GFR-binding peptide
  MOD_RES (1), (3), (37), (38): Xaa is C or S
  MOD_RES (15), (16), (17), (18), (19): Xaa is A or G
  MOD_RES (20), (21), (22), (23): Xaa is A or G or is absent
XGXAKVVMNPYVKLXXXXXXXXXFFLVSLSSLKTPAXX

SEQ ID NO: 43958 - protein, 38 aa, Artificial Sequence
  GFR-binding peptide
  MOD_RES (32), (33): Xaa is C or S
ARVVMNPYVKLIVNSSDDFFLVSLSSLQTPAXXPKPVT

SEQ ID NO: 43959 - protein, 36 aa, Artificial Sequence
  GFR-binding peptide
  MOD_RES (34), (35): Xaa is C or S
  MOD_RES (12), (13), (14), (15), (16): Xaa is A or G
  MOD_RES (17), (18), (19), (20): Xaa is A or G or is absent
AKVVMNPYVKLXXXXXXXXXFFLVSLSSLKTPAXXA

SEQ ID NO: 43960 - protein, 39 aa, Artificial Sequence
  GFR-binding peptide
  MOD_RES (34), (35): Xaa is C or S
  MOD_RES (12), (13), (14), (15), (16): Xaa is A or G
  MOD_RES (17), (18), (19), (20): Xaa is A or G or is absent
AEVVMDPYVKLXXXXXXXXXFFLISLSSLRAPVXXSAPA

SEQ ID NO: 43961 - protein, 38 aa, Artificial Sequence
  GFR-binding peptide
  MOD_RES (2), (4), (36), (37): Xaa is C or S
HXGXARVVMNPYVKLIVNSSDDFFLVSLSSLQTPAXXP

SEQ ID NO: 43962 - protein, 37 aa, Artificial Sequence
  GFR-binding peptide
  MOD_RES (2), (2): Xaa is C or S
AXELHEELRPYVKLLKPKKRVYEFFLVSLSSHHVRSP

SEQ ID NO: 43963 - protein, 36 aa, Artificial Sequence
  GFR-binding peptide
  MOD_RES (32), (33): Xaa is C or S
SEVVMDPYVKLVVNNASDFFLISLSSLRTPVXXTPP

SEQ ID NO: 43964 - protein, 33 aa, Artificial Sequence
  GFR-binding peptide
  MOD_RES (2), (2): Xaa is C or S
GXGEVVMEPYVKLVVKDYEDFFLMSLSSLETPV

SEQ ID NO: 43965 - protein, 36 aa, Artificial Sequence
  GFR-binding peptide
  MOD_RES (2), (4), (36): Xaa is C or S
RXAXSEVTMNPYVKLVVNKNEDFFLISLSSMKEPVX

SEQ ID NO: 43966 - protein, 44 aa, Artificial Sequence
  GFR-binding peptide
  MOD_RES (2), (4), (38), (39): Xaa is C or S
  MOD_RES (16), (17), (18), (19), (20): Xaa is A or G
  MOD_RES (21), (22), (23), (24): Xaa is A or G or is absent
HXGXSRVVMNPYVKLXXXXXXXXXFFLVSLSSLKTPAXXPKPVH

SEQ ID NO: 43967 - protein, 37 aa, Artificial Sequence
  GFR-binding peptide
  MOD_RES (2), (4), (36), (37): Xaa is C or S
RXGXESVAMGPYVKLYTVVGKDFFLISLSSLKTPVXX

SEQ ID NO: 43968 - protein, 34 aa, Artificial Sequence
  GFR-binding peptide
  MOD_RES (1), (32), (33): Xaa is C or S
XSRVIMPYVKLVKPKRGVLFFISLSSLAQPVXXP

SEQ ID NO: 43969 - protein, 33 aa, Artificial Sequence
  GFR-binding peptide
  MOD_RES (33), (33): Xaa is C or S
  MOD_RES (11), (12), (13), (14), (15): Xaa is A or G
  MOD_RES (16), (17), (18), (19): Xaa is A or G or is absent
EVVMEPYVKLXXXXXXXXXFFLMSLSSLETPVX

SEQ ID NO: 43970 - protein, 35 aa, Artificial Sequence
  GFR-binding peptide
  MOD_RES (31), (31): Xaa is C or S
RVVMNPYVKLIVNSSDDFFLVSLSSLKTPAXTPKT

SEQ ID NO: 43971 - protein, 34 aa, Artificial Sequence
  GFR-binding peptide
  MOD_RES (1), (3): Xaa is C or S
XGXAEVVMDPYVKLVVNNAADFFLISLSSLRAPV

SEQ ID NO: 43972 - protein, 39 aa, Artificial Sequence
  GFR-binding peptide
  MOD_RES (2), (34), (35): Xaa is C or S
GXGEVVMEPYVKLVVKDYEDFFLMSLSSLETPVXXAKPI

SEQ ID NO: 43973 - protein, 35 aa, Artificial Sequence
  GFR-binding peptide
  MOD_RES (1), (3), (35): Xaa is C or S
XGXSEVVMDPYVKLVVNNASDFFLISLSSLRTPVX

SEQ ID NO: 43974 - protein, 39 aa, Artificial Sequence
  GFR-binding peptide
  MOD_RES (1), (3), (36), (37): Xaa is C or S
  MOD_RES (14), (15), (16), (17), (18): Xaa is A or G
  MOD_RES (19), (20), (21), (22): Xaa is A or G or is absent
XKXSKVIMPYVKLXXXXXXXXXFFLISLSSLDQSVXXPS

SEQ ID NO: 43975 - protein, 37 aa, Artificial Sequence
  GFR-binding peptide
  MOD_RES (2), (4): Xaa is C or S
  MOD_RES (16), (17), (18), (19), (20): Xaa is A or G
  MOD_RES (21), (22), (23), (24): Xaa is A or G or is absent
RXAXSEVTMNPYVKLXXXXXXXXXFFLISLSSMKEPV

SEQ ID NO: 43976 - protein, 40 aa, Artificial Sequence
  GFR-binding peptide
  MOD_RES (1), (3), (35), (36): Xaa is C or S
XGXSEVVMDPYVKLVVNNASDFFLISLSSLRTPVXXTPPT

SEQ ID NO: 43977 - protein, 35 aa, Artificial Sequence
  GFR-binding peptide
  MOD_RES (31), (32): Xaa is C or S
EEVIMPYVKLLLVRGNDFFLMSLSSTKVPAXXTSP

SEQ ID NO: 43978 - protein, 36 aa, Artificial Sequence
  GFR-binding peptide
  MOD_RES (31), (32): Xaa is C or S
SKVIMPYVKLIKPTKGILFFISLSSLDQSVXXPSAS

SEQ ID NO: 43979 - protein, 41 aa, Artificial Sequence
  GFR-binding peptide
  MOD_RES (2), (4), (38): Xaa is C or S
  MOD_RES (16), (17), (18), (19), (20): Xaa is A or G
  MOD_RES (21), (22), (23), (24): Xaa is A or G or is absent
HXGXSRVVMNPYVKLXXXXXXXXXFFLVSLSSLKTPAXTPK

SEQ ID NO: 43980 - protein, 43 aa, Artificial Sequence
  GFR-binding peptide
  MOD_RES (2), (4), (38), (39): Xaa is C or S
  MOD_RES (16), (17), (18), (19), (20): Xaa is A or G
  MOD_RES (21), (22), (23), (24): Xaa is A or G or is absent
RXGXSEVVMDPYVKLXXXXXXXXXFFLISLSSLRTPVXXTPPT

SEQ ID NO: 43981 - protein, 37 aa, Artificial Sequence
  GFR-binding peptide
  MOD_RES (2), (34), (35): Xaa is C or S
GXESVAMGPYVKLYTVVGKDFFLISLSSLKTPVXXAK

SEQ ID NO: 43982 - protein, 34 aa, Artificial Sequence
  GFR-binding peptide
  MOD_RES (1), (34): Xaa is C or S
  MOD_RES (12), (13), (14), (15), (16): Xaa is A or G
  MOD_RES (17), (18), (19), (20): Xaa is A or G or is absent
XSRVIMPYVKLXXXXXXXXXFFLISLSSLAQPVX

SEQ ID NO: 43983 - protein, 42 aa, Artificial Sequence
  GFR-binding peptide
  MOD_RES (1), (3), (37): Xaa is C or S
  MOD_RES (15), (16), (17), (18), (19): Xaa is A or G
  MOD_RES (20), (21), (22), (23): Xaa is A or G or is absent
XGXSRVVMNPYVKLXXXXXXXXXFFLVSLSSLKTPAXTPKTV

SEQ ID NO: 43984 - protein, 37 aa, Artificial Sequence
  GFR-binding peptide
  MOD_RES (32), (33): Xaa is C or S
ARVVMNPYVKLIVNSSDDFFLVSLSSLQTPAXXPKPV

SEQ ID NO: 43985 - protein, 40 aa, Artificial Sequence
  GFR-binding peptide
  MOD_RES (2), (4), (36), (37): Xaa is C or S
HXGXSRVVMNPYVKLIVNSSDDFFLVSLSSLKTPAXXPKP

SEQ ID NO: 43986 - protein, 32 aa, Artificial Sequence
  GFR-binding peptide
  MOD_RES (11), (12), (13), (14), (15): Xaa is A or G
  MOD_RES (16), (17), (18), (19): Xaa is A or G or is absent
EVVMEPYVKLXXXXXXXXXFFLMSLSSLETPV

SEQ ID NO: 43987 - protein, 37 aa, Artificial Sequence
  GFR-binding peptide
  MOD_RES (1), (3): Xaa is C or S
XAXELHEELRPYVKLLKPKKRVYEFFLVSLSSHHVRS

SEQ ID NO: 43988 - protein, 37 aa, Artificial Sequence
  GFR-binding peptide
  MOD_RES (1), (35): Xaa is C or S
  MOD_RES (13), (14), (15), (16), (17): Xaa is A or G
  MOD_RES (18), (19), (20), (21): Xaa is A or G or is absent
XSRVVMNPYVKLXXXXXXXXXFFLVSLSSLKTPAXTP

SEQ ID NO: 43989 - protein, 36 aa, Artificial Sequence
  GFR-binding peptide
  MOD_RES (2), (34), (35): Xaa is C or S
GXRDVVMGPYVKLIIQQKDNFFLMSLSSMKTPTXXP

SEQ ID NO: 43990 - protein, 39 aa, Artificial Sequence
  GFR-binding peptide
  MOD_RES (1), (33), (34): Xaa is C or S
XSEVVMDPYVKLVVNNASDFFLISLSSLRTPVXXTPPTS

SEQ ID NO: 43991 - protein, 40 aa, Artificial Sequence
  GFR-binding peptide
  MOD_RES (2), (4), (38), (39): Xaa is C or S
  MOD_RES (16), (17), (18), (19), (20): Xaa is A or G
  MOD_RES (21), (22), (23), (24): Xaa is A or G or is absent
HXGXARVVMNPYVKLXXXXXXXXXFFLVSLSSLQTPAXXP

SEQ ID NO: 43992 - protein, 37 aa, Artificial Sequence
  GFR-binding peptide
  MOD_RES (1), (33), (34): Xaa is C or S
XSEVVMDPYVKLVVNNASDFFLISLSSLRTPVXXTPP

SEQ ID NO: 43993 - protein, 38 aa, Artificial Sequence
  GFR-binding peptide
  MOD_RES (1), (3), (34), (35): Xaa is C or S
XGXEEVIMPYVKLLLVRGNDFFLMSLSSTKVPAXXTSP

SEQ ID NO: 43994 - protein, 30 aa, Artificial Sequence
  GFR-binding peptide
EVTMNPYVKLVVNKNEDFFLISLSSMKEPV

SEQ ID NO: 43995 - protein, 40 aa, Artificial Sequence
  GFR-binding peptide
  MOD_RES (2), (34), (35): Xaa is C or S
AXSEVTMNPYVKLVVNKNEDFFLISLSSMKEPVXXPEPIG

SEQ ID NO: 43996 - protein, 37 aa, Artificial Sequence
  GFR-binding peptide
  MOD_RES (2), (36), (37): Xaa is C or S
  MOD_RES (14), (15), (16), (17), (18): Xaa is A or G
  MOD_RES (19), (20), (21), (22): Xaa is A or G or is absent
GXGEVVMEPYVKLXXXXXXXXXFFLMSLSSLETPVXX

SEQ ID NO: 43997 - protein, 34 aa, Artificial Sequence
  GFR-binding peptide
  MOD_RES (33), (34): Xaa is C or S
  MOD_RES (11), (12), (13), (14), (15): Xaa is A or G
  MOD_RES (16), (17), (18), (19): Xaa is A or G or is absent
SVAMGPYVKLXXXXXXXXXFFLISLSSLKTPVXX

SEQ ID NO: 43998 - protein, 37 aa, Artificial Sequence
  GFR-binding peptide
  MOD_RES (31), (32): Xaa is C or S
SKVIMPYVKLIKPTKGILFFISLSSLDQSVXXPSASA

SEQ ID NO: 43999 - protein, 39 aa, Artificial Sequence
  GFR-binding peptide
  MOD_RES (2), (4): Xaa is C or S
AXAXELHEELRPYVKLLKPKKRVYEFFLVSLSSHHVRSP

SEQ ID NO: 44000 - protein, 36 aa, Artificial Sequence
  GFR-binding peptide
  MOD_RES (1), (3): Xaa is C or S
XEXKNHQLFPYVKLHQGQHPKIRFFLMSLSSEETPV

SEQ ID NO: 44001 - protein, 38 aa, Artificial Sequence
  GFR-binding peptide
  MOD_RES (1), (38): Xaa is C or S
XELHEELRPYVKLLKPKKRVYEFFLVSLSSHHVRSPQX

SEQ ID NO: 44002 - protein, 33 aa, Artificial Sequence
  GFR-binding peptide
  MOD_RES (2), (2): Xaa is C or S
AXSEVTMNPYVKLVVNKNEDFFLISLSSMKEPV

SEQ ID NO: 44003 - protein, 39 aa, Artificial Sequence
  GFR-binding peptide
  MOD_RES (2), (4), (38): Xaa is C or S
  MOD_RES (16), (17), (18), (19), (20): Xaa is A or G
  MOD_RES (21), (22), (23), (24): Xaa is A or G or is absent
RXEXKNHQLFPYVKLXXXXXXXXXFFLMSLSSEETPVXE

SEQ ID NO: 44004 - protein, 43 aa, Artificial Sequence
  GFR-binding peptide
  MOD_RES (2), (4), (37), (38): Xaa is C or S
  MOD_RES (15), (16), (17), (18), (19): Xaa is A or G
  MOD_RES (20), (21), (22), (23): Xaa is A or G or is absent
SXKXSKVVMPYVKLXXXXXXXXXFFLISLSSLDQPVXXPSASA

SEQ ID NO: 44005 - protein, 37 aa, Artificial Sequence
  GFR-binding peptide
  MOD_RES (34), (35): Xaa is C or S
  MOD_RES (12), (13), (14), (15), (16): Xaa is A or G
  MOD_RES (17), (18), (19), (20): Xaa is A or G or is absent
ARVVMNPYVKLXXXXXXXXXFFLVSLSSLQTPAXXPK

SEQ ID NO: 44006 - protein, 41 aa, Artificial Sequence
  GFR-binding peptide
  MOD_RES (1), (3), (37), (38): Xaa is C or S
  MOD_RES (15), (16), (17), (18), (19): Xaa is A or G
  MOD_RES (20), (21), (22), (23): Xaa is A or G or is absent
XGXSRVVMNPYVKLXXXXXXXXXFFLVSLSSLKTPAXXPKP

SEQ ID NO: 44007 - protein, 41 aa, Artificial Sequence
  GFR-binding peptide
  MOD_RES (2), (36), (37): Xaa is C or S
  MOD_RES (14), (15), (16), (17), (18): Xaa is A or G
  MOD_RES (19), (20), (21), (22): Xaa is A or G or is absent
GXSRVVMNPYVKLXXXXXXXXXFFLVSLSSLKTPAXXPKPV

SEQ ID NO: 44008 - protein, 31 aa, Artificial Sequence
  GFR-binding peptide
  MOD_RES (31), (31): Xaa is C or S
SKVVMPYVKLVKPTRGVLFFISLSSLDQPVX

SEQ ID NO: 44009 - protein, 36 aa, Artificial Sequence
  GFR-binding peptide
  MOD_RES (34), (35): Xaa is C or S
  MOD_RES (12), (13), (14), (15), (16): Xaa is A or G
  MOD_RES (17), (18), (19), (20): Xaa is A or G or is absent
RDVVMGPYVKLXXXXXXXXXFFLMSLSSMKTPTXXP

SEQ ID NO: 44010 - protein, 38 aa, Artificial Sequence
  GFR-binding peptide
  MOD_RES (32), (33): Xaa is C or S
AKVVMNPYVKLIVNNSSDFFLVSLSSLKTPAXXAKPVA

SEQ ID NO: 44011 - protein, 42 aa, Artificial Sequence
  GFR-binding peptide
  MOD_RES (2), (4), (38), (39): Xaa is C or S
  MOD_RES (16), (17), (18), (19), (20): Xaa is A or G
  MOD_RES (21), (22), (23), (24): Xaa is A or G or is absent
HXGXARVVMNPYVKLXXXXXXXXXFFLVSLSSLQTPAXXPKP

SEQ ID NO: 44012 - protein, 36 aa, Artificial Sequence
  GFR-binding peptide
  MOD_RES (31), (32): Xaa is C or S
EEVIMPYVKLLLVRGNDFFLMSLSSTKVPAXXTSPV

SEQ ID NO: 44013 - protein, 39 aa, Artificial Sequence
  GFR-binding peptide
  MOD_RES (1), (35), (36): Xaa is C or S
  MOD_RES (13), (14), (15), (16), (17): Xaa is A or G
  MOD_RES (18), (19), (20), (21): Xaa is A or G or is absent
XRDVVMGPYVKLXXXXXXXXXFFLMSLSSMKTPTXXPGA

SEQ ID NO: 44014 - protein, 33 aa, Artificial Sequence
  GFR-binding peptide
  MOD_RES (1), (32), (33): Xaa is C or S
XSKVVMPYVKLVKPTRGVLFFISLSSLDQPVXX

SEQ ID NO: 44015 - protein, 42 aa, Artificial Sequence
  GFR-binding peptide
  MOD_RES (2), (36): Xaa is C or S
  MOD_RES (14), (15), (16), (17), (18): Xaa is A or G
  MOD_RES (19), (20), (21), (22): Xaa is A or G or is absent
GXSRVVMNPYVKLXXXXXXXXXFFLVSLSSLKTPAXTPKTVH

SEQ ID NO: 44016 - protein, 38 aa, Artificial Sequence
  GFR-binding peptide
  MOD_RES (33), (34): Xaa is C or S
  MOD_RES (11), (12), (13), (14), (15): Xaa is A or G
  MOD_RES (16), (17), (18), (19): Xaa is A or G or is absent
RVVMNPYVKLXXXXXXXXXFFLVSLSSLQTPAXXPKPV

SEQ ID NO: 44017 - protein, 33 aa, Artificial Sequence
  GFR-binding peptide
  MOD_RES (33), (33): Xaa is C or S
EAVSMGEPYVKLTPVGMDDFFLVSLSSLKTPVX

SEQ ID NO: 44018 - protein, 43 aa, Artificial Sequence
  GFR-binding peptide
  MOD_RES (2), (4), (38): Xaa is C or S
  MOD_RES (16), (17), (18), (19), (20): Xaa is A or G
  MOD_RES (21), (22), (23), (24): Xaa is A or G or is absent
HXGXSRVVMNPYVKLXXXXXXXXXFFLVSLSSLKTPAXTPKTV

SEQ ID NO: 44019 - protein, 33 aa, Artificial Sequence
  GFR-binding peptide
  MOD_RES (31), (32): Xaa is C or S
SKVVMPYVKLVKPTRGVLFFISLSSLDQPVXXP

SEQ ID NO: 44020 - protein, 37 aa, Artificial Sequence
  GFR-binding peptide
  MOD_RES (34), (34): Xaa is C or S
KNHQLFPYVKLHQGQHPKIRFFLMSLSSEETPVXELG

SEQ ID NO: 44021 - protein, 45 aa, Artificial Sequence
  GFR-binding peptide
  MOD_RES (2), (4), (41): Xaa is C or S
  MOD_RES (17), (18), (19), (20), (21): Xaa is A or G
  MOD_RES (22), (23), (24), (25): Xaa is A or G or is absent
AXAXELHEELRPYVKLXXXXXXXXXFFLVSLSSHHVRSPQXKVSS

SEQ ID NO: 44022 - protein, 31 aa, Artificial Sequence
  GFR-binding peptide
  MOD_RES (1), (1): Xaa is C or S
XEEVIMPYVKLLLVRGNDFFLMSLSSTKVPA

SEQ ID NO: 44023 - protein, 30 aa, Artificial Sequence
  GFR-binding peptide
RVVMNPYVKLIVNSSDDFFLVSLSSLQTPA

SEQ ID NO: 44024 - protein, 32 aa, Artificial Sequence
  GFR-binding peptide
  MOD_RES (2), (2): Xaa is C or S
KXSRVIMPYVKLVKPKRGVLFFISLSSLAQPV

SEQ ID NO: 44025 - protein, 41 aa, Artificial Sequence
  GFR-binding peptide
  MOD_RES (1), (3), (36), (37): Xaa is C or S
  MOD_RES (14), (15), (16), (17), (18): Xaa is A or G
  MOD_RES (19), (20), (21), (22): Xaa is A or G or is absent
XGXEEVIMPYVKLXXXXXXXXXFFLMSLSSTKVPAXXTSPV

SEQ ID NO: 44026 - protein, 43 aa, Artificial Sequence
  GFR-binding peptide
  MOD_RES (1), (3), (37), (38): Xaa is C or S
  MOD_RES (15), (16), (17), (18), (19): Xaa is A or G
  MOD_RES (20), (21), (22), (23): Xaa is A or G or is absent
XGXAEVVMDPYVKLXXXXXXXXXFFLISLSSLRAPVXXSAPAA

SEQ ID NO: 44027 - protein, 41 aa, Artificial Sequence
  GFR-binding peptide
  MOD_RES (2), (4), (38), (39): Xaa is C or S
  MOD_RES (16), (17), (18), (19), (20): Xaa is A or G
  MOD_RES (21), (22), (23), (24): Xaa is A or G or is absent
RXGXSEVVMDPYVKLXXXXXXXXXFFLISLSSLRTPVXXTP

SEQ ID NO: 44028 - protein, 37 aa, Artificial Sequence
  GFR-binding peptide
  MOD_RES (1), (1): Xaa is C or S
  MOD_RES (14), (15), (16), (17), (18): Xaa is A or G
  MOD_RES (19), (20), (21), (22): Xaa is A or G or is absent
XELHEELRPYVKLXXXXXXXXXFFLVSLSSHHVRSPQ

SEQ ID NO: 44029 - protein, 39 aa, Artificial Sequence
  GFR-binding peptide
  MOD_RES (1), (3), (36), (37): Xaa is C or S
  MOD_RES (14), (15), (16), (17), (18): Xaa is A or G
  MOD_RES (19), (20), (21), (22): Xaa is A or G or is absent
XKXSRVIMPYVKLXXXXXXXXXFFLISLSSLAQPVXXPA

SEQ ID NO: 44030 - protein, 38 aa, Artificial Sequence
  GFR-binding peptide
  MOD_RES (2), (4), (38): Xaa is C or S
  MOD_RES (16), (17), (18), (19), (20): Xaa is A or G
  MOD_RES (21), (22), (23), (24): Xaa is A or G or is absent
RXEXKNHQLFPYVKLXXXXXXXXXFFLMSLSSEETPVX

SEQ ID NO: 44031 - protein, 36 aa, Artificial Sequence
  GFR-binding peptide
  MOD_RES (2), (4), (36): Xaa is C or S
HXGXARVVMNPYVKLIVNSSDDFFLVSLSSLQTPAX

SEQ ID NO: 44032 - protein, 39 aa, Artificial Sequence
  GFR-binding peptide
  MOD_RES (34), (35): Xaa is C or S
  MOD_RES (12), (13), (14), (15), (16): Xaa is A or G
  MOD_RES (17), (18), (19), (20): Xaa is A or G or is absent
SEVTMNPYVKLXXXXXXXXXFFLISLSSMKEPVXXPEPI

SEQ ID NO: 44033 - protein, 37 aa, Artificial Sequence
  GFR-binding peptide
  MOD_RES (35), (35): Xaa is C or S
HEELRPYVKLLKPKKRVYEFFLVSLSSHHVRSPQXKV

SEQ ID NO: 44034 - protein, 32 aa, Artificial Sequence
  GFR-binding peptide
  MOD_RES (11), (12), (13), (14), (15): Xaa is A or G
  MOD_RES (16), (17), (18), (19): Xaa is A or G or is absent
RVVMNPYVKLXXXXXXXXXFFLVSLSSLQTPA

SEQ ID NO: 44035 - protein, 40 aa, Artificial Sequence
  GFR-binding peptide
  MOD_RES (1), (3), (37), (38): Xaa is C or S
  MOD_RES (15), (16), (17), (18), (19): Xaa is A or G
  MOD_RES (20), (21), (22), (23): Xaa is A or G or is absent
XGXESVAMGPYVKLXXXXXXXXXFFLISLSSLKTPVXXAK

SEQ ID NO: 44036 - protein, 37 aa, Artificial Sequence
  GFR-binding peptide
  MOD_RES (33), (34): Xaa is C or S
  MOD_RES (11), (12), (13), (14), (15): Xaa is A or G
  MOD_RES (16), (17), (18), (19): Xaa is A or G or is absent
EVVMDPYVKLXXXXXXXXXFFLISLSSLRAPVXXSAP

SEQ ID NO: 44037 - protein, 41 aa, Artificial Sequence
  GFR-binding peptide
  MOD_RES (2), (4), (41): Xaa is C or S
  MOD_RES (17), (18), (19), (20), (21): Xaa is A or G
  MOD_RES (22), (23), (24), (25): Xaa is A or G or is absent
AXAXELHEELRPYVKLXXXXXXXXXFFLVSLSSHHVRSPQX

SEQ ID NO: 44038 - protein, 35 aa, Artificial Sequence
  GFR-binding peptide
  MOD_RES (31), (32): Xaa is C or S
EVVMDPYVKLVVNNASDFFLISLSSLRTPVXXTPP

SEQ ID NO: 44039 - protein, 32 aa, Artificial Sequence
  GFR-binding peptide
EAVSMGEPYVKLTPVGMDDFFLVSLSSLKTPV

SEQ ID NO: 44040 - protein, 42 aa, Artificial Sequence
  GFR-binding peptide
  MOD_RES (2), (4), (36), (37): Xaa is C or S
HXGXSRVVMNPYVKLIVNSSDDFFLVSLSSLKTPAXXPKPVY

SEQ ID NO: 44041 - protein, 35 aa, Artificial Sequence
  GFR-binding peptide
  MOD_RES (1), (3), (35): Xaa is C or S
XGXAKVVMNPYVKLIVNNSSDFFLVSLSSLKTPAX

SEQ ID NO: 44042 - protein, 33 aa, Artificial Sequence
  GFR-binding peptide
  MOD_RES (33), (33): Xaa is C or S
  MOD_RES (11), (12), (13), (14), (15): Xaa is A or G
  MOD_RES (16), (17), (18), (19): Xaa is A or G or is absent
RVVMNPYVKLXXXXXXXXXFFLVSLSSLQTPAX

SEQ ID NO: 44043 - protein, 43 aa, Artificial Sequence
  GFR-binding peptide
  MOD_RES (2), (4), (38), (39): Xaa is C or S
  MOD_RES (16), (17), (18), (19), (20): Xaa is A or G
  MOD_RES (21), (22), (23), (24): Xaa is A or G or is absent
RXGXAEVVMDPYVKLXXXXXXXXXFFLISLSSLRAPVXXSAPA

SEQ ID NO: 44044 - protein, 39 aa, Artificial Sequence
  GFR-binding peptide
  MOD_RES (2), (33), (34): Xaa is C or S
GXEEVIMPYVKLLLVRGNDFFLMSLSSTKVPAXXTSPVR

SEQ ID NO: 44045 - protein, 35 aa, Artificial Sequence
  GFR-binding peptide
  MOD_RES (33), (34): Xaa is C or S
  MOD_RES (11), (12), (13), (14), (15): Xaa is A or G
  MOD_RES (16), (17), (18), (19): Xaa is A or G or is absent
RVVMNPYVKLXXXXXXXXXFFLVSLSSLQTPAXXP

SEQ ID NO: 44046 - protein, 35 aa, Artificial Sequence
  GFR-binding peptide
  MOD_RES (1), (35): Xaa is C or S
  MOD_RES (13), (14), (15), (16), (17): Xaa is A or G
  MOD_RES (18), (19), (20), (21): Xaa is A or G or is absent
XARVVMNPYVKLXXXXXXXXXFFLVSLSSLQTPAX

SEQ ID NO: 44047 - protein, 39 aa, Artificial Sequence
  GFR-binding peptide
  MOD_RES (33), (34): Xaa is C or S
  MOD_RES (11), (12), (13), (14), (15): Xaa is A or G
  MOD_RES (16), (17), (18), (19): Xaa is A or G or is absent
KVVMNPYVKLXXXXXXXXXFFLVSLSSLKTPAXXAKPVA

SEQ ID NO: 44048 - protein, 40 aa, Artificial Sequence
  GFR-binding peptide
  MOD_RES (37), (37): Xaa is C or S
ELHEELRPYVKLLKPKKRVYEFFLVSLSSHHVRSPQXKVS

SEQ ID NO: 44049 - protein, 35 aa, Artificial Sequence
  GFR-binding peptide
  MOD_RES (1), (34), (35): Xaa is C or S
  MOD_RES (12), (13), (14), (15), (16): Xaa is A or G
  MOD_RES (17), (18), (19), (20): Xaa is A or G or is absent
XSRVIMPYVKLXXXXXXXXXFFLISLSSLAQPVXX

SEQ ID NO: 44050 - protein, 38 aa, Artificial Sequence
  GFR-binding peptide
  MOD_RES (1), (3), (37), (38): Xaa is C or S
  MOD_RES (15), (16), (17), (18), (19): Xaa is A or G
  MOD_RES (20), (21), (22), (23): Xaa is A or G or is absent
XGXRDVVMGPYVKLXXXXXXXXXFFLMSLSSMKTPTXX

SEQ ID NO: 44051 - protein, 38 aa, Artificial Sequence
  GFR-binding peptide
  MOD_RES (1), (3): Xaa is C or S
  MOD_RES (16), (17), (18), (19), (20): Xaa is A or G
  MOD_RES (21), (22), (23), (24): Xaa is A or G or is absent
XAXELHEELRPYVKLXXXXXXXXXFFLVSLSSHHVRSP

SEQ ID NO: 44052 - protein, 36 aa, Artificial Sequence
  GFR-binding peptide
  MOD_RES (2), (4), (36): Xaa is C or S
RXGXESVAMGPYVKLYTVVGKDFFLISLSSLKTPVX

SEQ ID NO: 44053 - protein, 36 aa, Artificial Sequence
  GFR-binding peptide
  MOD_RES (2), (4), (36): Xaa is C or S
HXGXSRVVMNPYVKLIVNSSDDFFLVSLSSLKTPAX

SEQ ID NO: 44054 - protein, 32 aa, Artificial Sequence
  GFR-binding peptide
  MOD_RES (31), (32): Xaa is C or S
SRVIMPYVKLVKPKRGVLFFISLSSLAQPVXX

SEQ ID NO: 44055 - protein, 41 aa, Artificial Sequence
  GFR-binding peptide
  MOD_RES (2), (37), (38): Xaa is C or S
  MOD_RES (15), (16), (17), (18), (19): Xaa is A or G
  MOD_RES (20), (21), (22), (23): Xaa is A or G or is absent
GXEAVSMGEPYVKLXXXXXXXXXFFLVSLSSLKTPVXXAKG

SEQ ID NO: 44056 - protein, 40 aa, Artificial Sequence
  GFR-binding peptide
  MOD_RES (1), (3), (35), (36): Xaa is C or S
XGXAKVVMNPYVKLIVNNSSDFFLVSLSSLKTPAXXAKPV

SEQ ID NO: 44057 - protein, 36 aa, Artificial Sequence
  GFR-binding peptide
  MOD_RES (2), (36): Xaa is C or S
  MOD_RES (14), (15), (16), (17), (18): Xaa is A or G
  MOD_RES (19), (20), (21), (22): Xaa is A or G or is absent
AXSEVTMNPYVKLXXXXXXXXXFFLISLSSMKEPVX

SEQ ID NO: 44058 - protein, 40 aa, Artificial Sequence
  GFR-binding peptide
  MOD_RES (2), (4), (35), (36): Xaa is C or S
SXKXSRVIMPYVKLVKPKRGVLFFISLSSLAQPVXXPAAS

SEQ ID NO: 44059 - protein, 39 aa, Artificial Sequence
  GFR-binding peptide
  MOD_RES (1), (36), (37): Xaa is C or S
  MOD_RES (14), (15), (16), (17), (18): Xaa is A or G
  MOD_RES (19), (20), (21), (22): Xaa is A or G or is absent
XEAVSMGEPYVKLXXXXXXXXXFFLVSLSSLKTPVXXAK

SEQ ID NO: 44060 - protein, 41 aa, Artificial Sequence
  GFR-binding peptide
  MOD_RES (2), (4), (35), (36): Xaa is C or S
SXKXSRVIMPYVKLVKPKRGVLFFISLSSLAQPVXXPAASA

SEQ ID NO: 44061 - protein, 36 aa, Artificial Sequence
  GFR-binding peptide
  MOD_RES (2), (34), (35): Xaa is C or S
GXARVVMNPYVKLIVNSSDDFFLVSLSSLQTPAXXP

SEQ ID NO: 44062 - protein, 37 aa, Artificial Sequence
  GFR-binding peptide
  MOD_RES (31), (31): Xaa is C or S
RVVMNPYVKLIVNSSDDFFLVSLSSLKTPAXTPKTVH

SEQ ID NO: 44063 - protein, 35 aa, Artificial Sequence
  GFR-binding peptide
  MOD_RES (33), (34): Xaa is C or S
  MOD_RES (11), (12), (13), (14), (15): Xaa is A or G
  MOD_RES (16), (17), (18), (19): Xaa is A or G or is absent
SRVIMPYVKLXXXXXXXXXFFLISLSSLAQPVXXP

SEQ ID NO: 44064 - protein, 34 aa, Artificial Sequence
  GFR-binding peptide
  MOD_RES (31), (32): Xaa is C or S
EVTMNPYVKLVVNKNEDFFLISLSSMKEPVXXPE

SEQ ID NO: 44065 - protein, 39 aa, Artificial Sequence
  GFR-binding peptide
  MOD_RES (2), (4), (38), (39): Xaa is C or S
  MOD_RES (16), (17), (18), (19), (20): Xaa is A or G
  MOD_RES (21), (22), (23), (24): Xaa is A or G or is absent
HXGXARVVMNPYVKLXXXXXXXXXFFLVSLSSLQTPAXX

SEQ ID NO: 44066 - protein, 38 aa, Artificial Sequence
  GFR-binding peptide
  MOD_RES (37), (37): Xaa is C or S
ELHEELRPYVKLLKPKKRVYEFFLVSLSSHHVRSPQXK

SEQ ID NO: 44067 - protein, 35 aa, Artificial Sequence
  GFR-binding peptide
  MOD_RES (33), (34): Xaa is C or S
EAVSMGEPYVKLTPVGMDDFFLVSLSSLKTPVXXA

SEQ ID NO: 44068 - protein, 41 aa, Artificial Sequence
  GFR-binding peptide
  MOD_RES (35), (36): Xaa is C or S
  MOD_RES (13), (14), (15), (16), (17): Xaa is A or G
  MOD_RES (18), (19), (20), (21): Xaa is A or G or is absent
EAVSMGEPYVKLXXXXXXXXXFFLVSLSSLKTPVXXAKGVK

SEQ ID NO: 44069 - protein, 32 aa, Artificial Sequence
  GFR-binding peptide
  MOD_RES (32), (32): Xaa is C or S
SEVVMDPYVKLVVNNASDFFLISLSSLRTPVX

SEQ ID NO: 44070 - protein, 36 aa, Artificial Sequence
  GFR-binding peptide
  MOD_RES (1), (32), (33): Xaa is C or S
XSKVVMPYVKLVKPTRGVLFFISLSSLDQPVXXPSA

SEQ ID NO: 44071 - protein, 31 aa, Artificial Sequence
  GFR-binding peptide
  MOD_RES (31), (31): Xaa is C or S
RVVMNPYVKLIVNSSDDFFLVSLSSLQTPAX

SEQ ID NO: 44072 - protein, 36 aa, Artificial Sequence
  GFR-binding peptide
  MOD_RES (32), (33): Xaa is C or S
SEVTMNPYVKLVVNKNEDFFLISLSSMKEPVXXPEP

SEQ ID NO: 44073 - protein, 40 aa, Artificial Sequence
  GFR-binding peptide
  MOD_RES (1), (35): Xaa is C or S
XKNHQLFPYVKLHQGQHPKIRFFLMSLSSEETPVXELGED

SEQ ID NO: 44074 - protein, 37 aa, Artificial Sequence
  GFR-binding peptide
  MOD_RES (1), (3), (37): Xaa is C or S
  MOD_RES (15), (16), (17), (18), (19): Xaa is A or G
  MOD_RES (20), (21), (22), (23): Xaa is A or G or is absent
XGXSRVVMNPYVKLXXXXXXXXXFFLVSLSSLKTPAX

SEQ ID NO: 44075 - protein, 42 aa, Artificial Sequence
  GFR-binding peptide
  MOD_RES (2), (4), (37), (38): Xaa is C or S
  MOD_RES (15), (16), (17), (18), (19): Xaa is A or G
  MOD_RES (20), (21), (22), (23): Xaa is A or G or is absent
SXKXSRVIMPYVKLXXXXXXXXXFFLISLSSLAQPVXXPAAS

SEQ ID NO: 44076 - protein, 40 aa, Artificial Sequence
  GFR-binding peptide
  MOD_RES (2), (4), (35), (36): Xaa is C or S
LXGXEEVIMPYVKLLLVRGNDFFLMSLSSTKVPAXXTSPV

SEQ ID NO: 44077 - protein, 36 aa, Artificial Sequence
  GFR-binding peptide
  MOD_RES (2), (4), (36): Xaa is C or S
HXGXAKVVMNPYVKLIVNNSSDFFLVSLSSLKTPAX

SEQ ID NO: 44078 - protein, 41 aa, Artificial Sequence
  GFR-binding peptide
  MOD_RES (2), (35), (36): Xaa is C or S
  MOD_RES (13), (14), (15), (16), (17): Xaa is A or G
  MOD_RES (18), (19), (20), (21): Xaa is A or G or is absent
KXSKVIMPYVKLXXXXXXXXXFFLISLSSLDQSVXXPSASA

SEQ ID NO: 44079 - protein, 39 aa, Artificial Sequence
  GFR-binding peptide
  MOD_RES (1), (3), (37), (38): Xaa is C or S
  MOD_RES (15), (16), (17), (18), (19): Xaa is A or G
  MOD_RES (20), (21), (22), (23): Xaa is A or G or is absent
XGXSRVVMNPYVKLXXXXXXXXXFFLVSLSSLKTPAXXP

SEQ ID NO: 44080 - protein, 35 aa, Artificial Sequence
  GFR-binding peptide
  MOD_RES (2), (4): Xaa is C or S
HXGXSRVVMNPYVKLIVNSSDDFFLVSLSSLKTPA

SEQ ID NO: 44081 - protein, 39 aa, Artificial Sequence
  GFR-binding peptide
  MOD_RES (33), (34): Xaa is C or S
EAVSMGEPYVKLTPVGMDDFFLVSLSSLKTPVXXAKGVK

SEQ ID NO: 44082 - protein, 41 aa, Artificial Sequence
  GFR-binding peptide
  MOD_RES (2), (4), (36), (37): Xaa is C or S
RXGXAEVVMDPYVKLVVNNAADFFLISLSSLRAPVXXSAPA

SEQ ID NO: 44083 - protein, 37 aa, Artificial Sequence
  GFR-binding peptide
  MOD_RES (2), (34), (35): Xaa is C or S
GXSEVVMDPYVKLVVNNASDFFLISLSSLRTPVXXTP

SEQ ID NO: 44084 - protein, 38 aa, Artificial Sequence
  GFR-binding peptide
  MOD_RES (1), (3), (36), (37): Xaa is C or S
  MOD_RES (14), (15), (16), (17), (18): Xaa is A or G
  MOD_RES (19), (20), (21), (22): Xaa is A or G or is absent
XKXSKVVMPYVKLXXXXXXXXXFFLISLSSLDQPVXXP

SEQ ID NO: 44085 - protein, 39 aa, Artificial Sequence
  GFR-binding peptide
  MOD_RES (2), (34), (35): Xaa is C or S
GXAEVVMDPYVKLVVNNAADFFLISLSSLRAPVXXSAPA

SEQ ID NO: 44086 - protein, 37 aa, Artificial Sequence
  GFR-binding peptide
  MOD_RES (1), (32), (33): Xaa is C or S
XSKVIMPYVKLIKPTKGILFFISLSSLDQSVXXPSAS

SEQ ID NO: 44087 - protein, 39 aa, Artificial Sequence
  GFR-binding peptide
  MOD_RES (2), (33), (34): Xaa is C or S
KXSKVIMPYVKLIKPTKGILFFISLSSLDQSVXXPSASA

SEQ ID NO: 44088 - protein, 40 aa, Artificial Sequence
  GFR-binding peptide
  MOD_RES (2), (36), (37): Xaa is C or S
  MOD_RES (14), (15), (16), (17), (18): Xaa is A or G
  MOD_RES (19), (20), (21), (22): Xaa is A or G or is absent
GXARVVMNPYVKLXXXXXXXXXFFLVSLSSLQTPAXXPKP

SEQ ID NO: 44089 - protein, 35 aa, Artificial Sequence
  GFR-binding peptide
  MOD_RES (34), (35): Xaa is C or S
  MOD_RES (12), (13), (14), (15), (16): Xaa is A or G
  MOD_RES (17), (18), (19), (20): Xaa is A or G or is absent
ESVAMGPYVKLXXXXXXXXXFFLISLSSLKTPVXX

SEQ ID NO: 44090 - protein, 41 aa, Artificial Sequence
  GFR-binding peptide
  MOD_RES (1), (35), (36): Xaa is C or S
  MOD_RES (13), (14), (15), (16), (17): Xaa is A or G
  MOD_RES (18), (19), (20), (21): Xaa is A or G or is absent
XSRVVMNPYVKLXXXXXXXXXFFLVSLSSLKTPAXXPKPVY

SEQ ID NO: 44091 - protein, 42 aa, Artificial Sequence
  GFR-binding peptide
  MOD_RES (2), (36), (37): Xaa is C or S
  MOD_RES (14), (15), (16), (17), (18): Xaa is A or G
  MOD_RES (19), (20), (21), (22): Xaa is A or G or is absent
GXSEVVMDPYVKLXXXXXXXXXFFLISLSSLRTPVXXTPPTS

SEQ ID NO: 44092 - protein, 33 aa, Artificial Sequence
  GFR-binding peptide
  MOD_RES (31), (32): Xaa is C or S
DVVMGPYVKLIIQQKDNFFLMSLSSMKTPTXXP

SEQ ID NO: 44093 - protein, 43 aa, Artificial Sequence
  GFR-binding peptide
  MOD_RES (1), (3), (37), (38): Xaa is C or S
  MOD_RES (15), (16), (17), (18), (19): Xaa is A or G
  MOD_RES (20), (21), (22), (23): Xaa is A or G or is absent
XAXSEVTMNPYVKLXXXXXXXXXFFLISLSSMKEPVXXPEPIG

SEQ ID NO: 44094 - protein, 35 aa, Artificial Sequence
  GFR-binding peptide
  MOD_RES (2), (4): Xaa is C or S
RXGXAEVVMDPYVKLVVNNAADFFLISLSSLRAPV

SEQ ID NO: 44095 - protein, 37 aa, Artificial Sequence
  GFR-binding peptide
  MOD_RES (32), (33): Xaa is C or S
SEVTMNPYVKLVVNKNEDFFLISLSSMKEPVXXPEPI

SEQ ID NO: 44096 - protein, 35 aa, Artificial Sequence
  GFR-binding peptide
  MOD_RES (2), (4), (35): Xaa is C or S
SXKXSRVIMPYVKLVKPKRGVLFFISLSSLAQPVX

SEQ ID NO: 44097 - protein, 36 aa, Artificial Sequence
  GFR-binding peptide
  MOD_RES (2), (4): Xaa is C or S
  MOD_RES (15), (16), (17), (18), (19): Xaa is A or G
  MOD_RES (20), (21), (22), (23): Xaa is A or G or is absent
SXKXSRVIMPYVKLXXXXXXXXXFFLISLSSLAQPV

SEQ ID NO: 44098 - protein, 37 aa, Artificial Sequence
  GFR-binding peptide
  MOD_RES (2), (35), (36): Xaa is C or S
  MOD_RES (13), (14), (15), (16), (17): Xaa is A or G
  MOD_RES (18), (19), (20), (21): Xaa is A or G or is absent
KXSKVVMPYVKLXXXXXXXXXFFLISLSSLDQPVXXP

SEQ ID NO: 44099 - protein, 37 aa, Artificial Sequence
  GFR-binding peptide
  MOD_RES (31), (32): Xaa is C or S
RVVMNPYVKLIVNSSDDFFLVSLSSLKTPAXXPKPVH

SEQ ID NO: 44100 - protein, 35 aa, Artificial Sequence
  GFR-binding peptide
  MOD_RES (2), (4): Xaa is C or S
HXGXAKVVMNPYVKLIVNNSSDFFLVSLSSLKTPA

SEQ ID NO: 44101 - protein, 40 aa, Artificial Sequence
  GFR-binding peptide
  MOD_RES (2), (4), (38), (39): Xaa is C or S
  MOD_RES (16), (17), (18), (19), (20): Xaa is A or G
  MOD_RES (21), (22), (23), (24): Xaa is A or G or is absent
RXAXSEVTMNPYVKLXXXXXXXXXFFLISLSSMKEPVXXP

SEQ ID NO: 44102 - protein, 38 aa, Artificial Sequence
  GFR-binding peptide
  MOD_RES (2), (4): Xaa is C or S
  MOD_RES (17), (18), (19), (20), (21): Xaa is A or G
  MOD_RES (22), (23), (24), (25): Xaa is A or G or is absent
AXAXELHEELRPYVKLXXXXXXXXXFFLVSLSSHHVRS

SEQ ID NO: 44103 - protein, 36 aa, Artificial Sequence
  GFR-binding peptide
  MOD_RES (1), (35), (36): Xaa is C or S
  MOD_RES (13), (14), (15), (16), (17): Xaa is A or G
  MOD_RES (18), (19), (20), (21): Xaa is A or G or is absent
XARVVMNPYVKLXXXXXXXXXFFLVSLSSLQTPAXX

SEQ ID NO: 44104 - protein, 42 aa, Artificial Sequence
  GFR-binding peptide
  MOD_RES (2), (36), (37): Xaa is C or S
  MOD_RES (14), (15), (16), (17), (18): Xaa is A or G
  MOD_RES (19), (20), (21), (22): Xaa is A or G or is absent
GXESVAMGPYVKLXXXXXXXXXFFLISLSSLKTPVXXAKSAK

SEQ ID NO: 44105 - protein, 33 aa, Artificial Sequence
  GFR-binding peptide
KNHQLFPYVKLHQGQHPKIRFFLMSLSSEETPV

SEQ ID NO: 44106 - protein, 36 aa, Artificial Sequence
  GFR-binding peptide
  MOD_RES (34), (35): Xaa is C or S
  MOD_RES (12), (13), (14), (15), (16): Xaa is A or G
  MOD_RES (17), (18), (19), (20): Xaa is A or G or is absent
SRVVMNPYVKLXXXXXXXXXFFLVSLSSLKTPAXXP

SEQ ID NO: 44107 - protein, 35 aa, Artificial Sequence
  GFR-binding peptide
  MOD_RES (1), (33), (34): Xaa is C or S
XSRVVMNPYVKLIVNSSDDFFLVSLSSLKTPAXXP

SEQ ID NO: 44108 - protein, 38 aa, Artificial Sequence
  GFR-binding peptide
  MOD_RES (35), (35): Xaa is C or S
  MOD_RES (11), (12), (13), (14), (15): Xaa is A or G
  MOD_RES (16), (17), (18), (19): Xaa is A or G or is absent
HEELRPYVKLXXXXXXXXXFFLVSLSSHHVRSPQXKVS

SEQ ID NO: 44109 - protein, 42 aa, Artificial Sequence
  GFR-binding peptide
  MOD_RES (2), (4), (36), (37): Xaa is C or S
HXGXARVVMNPYVKLIVNSSDDFFLVSLSSLQTPAXXPKPVT

SEQ ID NO: 44110 - protein, 42 aa, Artificial Sequence
  GFR-binding peptide
  MOD_RES (1), (3), (37), (38): Xaa is C or S
  MOD_RES (15), (16), (17), (18), (19): Xaa is A or G
  MOD_RES (20), (21), (22), (23): Xaa is A or G or is absent
XGXESVAMGPYVKLXXXXXXXXXFFLISLSSLKTPVXXAKSA

SEQ ID NO: 44111 - protein, 39 aa, Artificial Sequence
  GFR-binding peptide
  MOD_RES (33), (33): Xaa is C or S
  MOD_RES (11), (12), (13), (14), (15): Xaa is A or G
  MOD_RES (16), (17), (18), (19): Xaa is A or G or is absent
NHQLFPYVKLXXXXXXXXXFFLMSLSSEETPVXELGEDN

SEQ ID NO: 44112 - protein, 39 aa, Artificial Sequence
  GFR-binding peptide
  MOD_RES (2), (33), (34): Xaa is C or S
KXSKVVMPYVKLVKPTRGVLFFISLSSLDQPVXXPSASA

SEQ ID NO: 44113 - protein, 41 aa, Artificial Sequence
  GFR-binding peptide
  MOD_RES (1), (35), (36): Xaa is C or S
  MOD_RES (13), (14), (15), (16), (17): Xaa is A or G
  MOD_RES (18), (19), (20), (21): Xaa is A or G or is absent
XAEVVMDPYVKLXXXXXXXXXFFLISLSSLRAPVXXSAPAA

SEQ ID NO: 44114 - protein, 36 aa, Artificial Sequence
  GFR-binding peptide
  MOD_RES (2), (33), (34): Xaa is C or S
KXSKVVMPYVKLVKPTRGVLFFISLSSLDQPVXXPS

SEQ ID NO: 44115 - protein, 42 aa, Artificial Sequence
  GFR-binding peptide
  MOD_RES (2), (4), (38), (39): Xaa is C or S
  MOD_RES (16), (17), (18), (19), (20): Xaa is A or G
  MOD_RES (21), (22), (23), (24): Xaa is A or G or is absent
RXGXESVAMGPYVKLXXXXXXXXXFFLISLSSLKTPVXXAKS

SEQ ID NO: 44116 - protein, 34 aa, Artificial Sequence
  GFR-binding peptide
  MOD_RES (1), (3): Xaa is C or S
XGXARVVMNPYVKLIVNSSDDFFLVSLSSLQTPA

SEQ ID NO: 44117 - protein, 34 aa, Artificial Sequence
  GFR-binding peptide
  MOD_RES (33), (34): Xaa is C or S
  MOD_RES (11), (12), (13), (14), (15): Xaa is A or G
  MOD_RES (16), (17), (18), (19): Xaa is A or G or is absent
EEVIMPYVKLXXXXXXXXXFFLMSLSSTKVPAXX

SEQ ID NO: 44118 - protein, 39 aa, Artificial Sequence
  GFR-binding peptide
  MOD_RES (1), (3), (37): Xaa is C or S
XEXKNHQLFPYVKLHQGQHPKIRFFLMSLSSEETPVXEL

SEQ ID NO: 44119 - protein, 36 aa, Artificial Sequence
  GFR-binding peptide
  MOD_RES (35), (35): Xaa is C or S
HEELRPYVKLLKPKKRVYEFFLVSLSSHHVRSPQXK

SEQ ID NO: 44120 - protein, 36 aa, Artificial Sequence
  GFR-binding peptide
  MOD_RES (1), (3), (34), (35): Xaa is C or S
XKXSKVVMPYVKLVKPTRGVLFFISLSSLDQPVXXP

SEQ ID NO: 44121 - protein, 38 aa, Artificial Sequence
  GFR-binding peptide
  MOD_RES (2), (4), (38): Xaa is C or S
  MOD_RES (16), (17), (18), (19), (20): Xaa is A or G
  MOD_RES (21), (22), (23), (24): Xaa is A or G or is absent
HXGXAKVVMNPYVKLXXXXXXXXXFFLVSLSSLKTPAX

SEQ ID NO: 44122 - protein, 39 aa, Artificial Sequence
  GFR-binding peptide
  MOD_RES (33), (34): Xaa is C or S
  MOD_RES (11), (12), (13), (14), (15): Xaa is A or G
  MOD_RES (16), (17), (18), (19): Xaa is A or G or is absent
EVVMDPYVKLXXXXXXXXXFFLISLSSLRAPVXXSAPAA

SEQ ID NO: 44123 - protein, 39 aa, Artificial Sequence
  GFR-binding peptide
  MOD_RES (2), (35), (36): Xaa is C or S
  MOD_RES (13), (14), (15), (16), (17): Xaa is A or G
  MOD_RES (18), (19), (20), (21): Xaa is A or G or is absent
GXEEVIMPYVKLXXXXXXXXXFFLMSLSSTKVPAXXTSP

SEQ ID NO: 44124 - protein, 40 aa, Artificial Sequence
  GFR-binding peptide
  MOD_RES (2), (4), (36), (37): Xaa is C or S
RXGXAEVVMDPYVKLVVNNAADFFLISLSSLRAPVXXSAP

SEQ ID NO: 44125 - protein, 40 aa, Artificial Sequence
  GFR-binding peptide
  MOD_RES (2), (34), (35): Xaa is C or S
GXESVAMGPYVKLYTVVGKDFFLISLSSLKTPVXXAKSAK

SEQ ID NO: 44126 - protein, 32 aa, Artificial Sequence
  GFR-binding peptide
  MOD_RES (11), (12), (13), (14), (15): Xaa is A or G
  MOD_RES (16), (17), (18), (19): Xaa is A or G or is absent
SRVIMPYVKLXXXXXXXXXFFLISLSSLAQPV

SEQ ID NO: 44127 - protein, 42 aa, Artificial Sequence
  GFR-binding peptide
  MOD_RES (2), (36), (37): Xaa is C or S
  MOD_RES (14), (15), (16), (17), (18): Xaa is A or G
  MOD_RES (19), (20), (21), (22): Xaa is A or G or is absent
GXSRVVMNPYVKLXXXXXXXXXFFLVSLSSLKTPAXXPKPVY

SEQ ID NO: 44128 - protein, 31 aa, Artificial Sequence
  GFR-binding peptide
  MOD_RES (31), (31): Xaa is C or S
EVVMEPYVKLVVKDYEDFFLMSLSSLETPVX

SEQ ID NO: 44129 - protein, 36 aa, Artificial Sequence
  GFR-binding peptide
  MOD_RES (33), (34): Xaa is C or S
EAVSMGEPYVKLTPVGMDDFFLVSLSSLKTPVXXAK

SEQ ID NO: 44130 - protein, 36 aa, Artificial Sequence
  GFR-binding peptide
  MOD_RES (2), (4), (36): Xaa is C or S
RXGXAEVVMDPYVKLVVNNAADFFLISLSSLRAPVX

SEQ ID NO: 44131 - protein, 37 aa, Artificial Sequence
  GFR-binding peptide
  MOD_RES (1), (3), (36), (37): Xaa is C or S
  MOD_RES (14), (15), (16), (17), (18): Xaa is A or G
  MOD_RES (19), (20), (21), (22): Xaa is A or G or is absent
XGXEEVIMPYVKLXXXXXXXXXFFLMSLSSTKVPAXX

SEQ ID NO: 44132 - protein, 34 aa, Artificial Sequence
  GFR-binding peptide
  MOD_RES (1), (33), (34): Xaa is C or S
XAKVVMNPYVKLIVNNSSDFFLVSLSSLKTPAXX

SEQ ID NO: 44133 - protein, 36 aa, Artificial Sequence
  GFR-binding peptide
  MOD_RES (1), (36): Xaa is C or S
  MOD_RES (14), (15), (16), (17), (18): Xaa is A or G
  MOD_RES (19), (20), (21), (22): Xaa is A or G or is absent
XEAVSMGEPYVKLXXXXXXXXXFFLVSLSSLKTPVX

SEQ ID NO: 44134 - protein, 41 aa, Artificial Sequence
  GFR-binding peptide
  MOD_RES (2), (4), (38), (39): Xaa is C or S
  MOD_RES (16), (17), (18), (19), (20): Xaa is A or G
  MOD_RES (21), (22), (23), (24): Xaa is A or G or is absent
RXAXSEVTMNPYVKLXXXXXXXXXFFLISLSSMKEPVXXPE

SEQ ID NO: 44135 - protein, 35 aa, Artificial Sequence
  GFR-binding peptide
  MOD_RES (33), (33): Xaa is C or S
  MOD_RES (11), (12), (13), (14), (15): Xaa is A or G
  MOD_RES (16), (17), (18), (19): Xaa is A or G or is absent
RVVMNPYVKLXXXXXXXXXFFLVSLSSLKTPAXTP

SEQ ID NO: 44136 - protein, 37 aa, Artificial Sequence
  GFR-binding peptide
  MOD_RES (2), (36): Xaa is C or S
EXKNHQLFPYVKLHQGQHPKIRFFLMSLSSEETPVXE

SEQ ID NO: 44137 - protein, 41 aa, Artificial Sequence
  GFR-binding peptide
  MOD_RES (2), (36), (37): Xaa is C or S
  MOD_RES (14), (15), (16), (17), (18): Xaa is A or G
  MOD_RES (19), (20), (21), (22): Xaa is A or G or is absent
GXGEVVMEPYVKLXXXXXXXXXFFLMSLSSLETPVXXAKPI

SEQ ID NO: 44138 - protein, 40 aa, Artificial Sequence
  GFR-binding peptide
  MOD_RES (1), (3), (40): Xaa is C or S
  MOD_RES (16), (17), (18), (19), (20): Xaa is A or G
  MOD_RES (21), (22), (23), (24): Xaa is A or G or is absent
XAXELHEELRPYVKLXXXXXXXXXFFLVSLSSHHVRSPQX

SEQ ID NO: 44139 - protein, 35 aa, Artificial Sequence
  GFR-binding peptide
  MOD_RES (2), (35): Xaa is C or S
  MOD_RES (13), (14), (15), (16), (17): Xaa is A or G
  MOD_RES (18), (19), (20), (21): Xaa is A or G or is absent
KXSRVIMPYVKLXXXXXXXXXFFLISLSSLAQPVX

SEQ ID NO: 44140 - protein, 35 aa, Artificial Sequence
  GFR-binding peptide
  MOD_RES (2), (2): Xaa is C or S
EXKNHQLFPYVKLHQGQHPKIRFFLMSLSSEETPV

SEQ ID NO: 44141 - protein, 34 aa, Artificial Sequence
  GFR-binding peptide
  MOD_RES (31), (32): Xaa is C or S
EVVMDPYVKLVVNNAADFFLISLSSLRAPVXXSA

SEQ ID NO: 44142 - protein, 37 aa, Artificial Sequence
  GFR-binding peptide
  MOD_RES (2), (4): Xaa is C or S
  MOD_RES (16), (17), (18), (19), (20): Xaa is A or G
  MOD_RES (21), (22), (23), (24): Xaa is A or G or is absent
SXGXRDVVMGPYVKLXXXXXXXXXFFLMSLSSMKTPT

SEQ ID NO: 44143 - protein, 40 aa, Artificial Sequence
  GFR-binding peptide
  MOD_RES (2), (4): Xaa is C or S
AXAXELHEELRPYVKLLKPKKRVYEFFLVSLSSHHVRSPQ

SEQ ID NO: 44144 - protein, 36 aa, Artificial Sequence
  GFR-binding peptide
  MOD_RES (2), (33), (34): Xaa is C or S
KXSKVIMPYVKLIKPTKGILFFISLSSLDQSVXXPS

SEQ ID NO: 44145 - protein, 42 aa, Artificial Sequence
  GFR-binding peptide
  MOD_RES (1), (3), (37), (38): Xaa is C or S
  MOD_RES (15), (16), (17), (18), (19): Xaa is A or G
  MOD_RES (20), (21), (22), (23): Xaa is A or G or is absent
XGXSRVVMNPYVKLXXXXXXXXXFFLVSLSSLKTPAXXPKPV

SEQ ID NO: 44146 - protein, 39 aa, Artificial Sequence
  GFR-binding peptide
  MOD_RES (2), (4), (38), (39): Xaa is C or S
  MOD_RES (16), (17), (18), (19), (20): Xaa is A or G
  MOD_RES (21), (22), (23), (24): Xaa is A or G or is absent
RXGXGEVVMEPYVKLXXXXXXXXXFFLMSLSSLETPVXX

SEQ ID NO: 44147 - protein, 40 aa, Artificial Sequence
  GFR-binding peptide
  MOD_RES (2), (4), (38), (39): Xaa is C or S
  MOD_RES (16), (17), (18), (19), (20): Xaa is A or G
  MOD_RES (21), (22), (23), (24): Xaa is A or G or is absent
RXGXAEVVMDPYVKLXXXXXXXXXFFLISLSSLRAPVXXS

SEQ ID NO: 44148 - protein, 34 aa, Artificial Sequence
  GFR-binding peptide
  MOD_RES (1), (3), (34): Xaa is C or S
XKXSKVIMPYVKLIKPTKGILFFISLSSLDQSVX

SEQ ID NO: 44149 - protein, 39 aa, Artificial Sequence
  GFR-binding peptide
  MOD_RES (33), (33): Xaa is C or S
  MOD_RES (11), (12), (13), (14), (15): Xaa is A or G
  MOD_RES (16), (17), (18), (19): Xaa is A or G or is absent
RVVMNPYVKLXXXXXXXXXFFLVSLSSLKTPAXTPKTVH

SEQ ID NO: 44150 - protein, 45 aa, Artificial Sequence
  GFR-binding peptide
  MOD_RES (2), (4), (39), (40): Xaa is C or S
  MOD_RES (17), (18), (19), (20), (21): Xaa is A or G
  MOD_RES (22), (23), (24), (25): Xaa is A or G or is absent
RXGXEAVSMGEPYVKLXXXXXXXXXFFLVSLSSLKTPVXXAKGVK

SEQ ID NO: 44151 - protein, 37 aa, Artificial Sequence
  GFR-binding peptide
  MOD_RES (31), (32): Xaa is C or S
SKVVMPYVKLVKPTRGVLFFISLSSLDQPVXXPSASA

SEQ ID NO: 44152 - protein, 35 aa, Artificial Sequence
  GFR-binding peptide
  MOD_RES (1), (33), (34): Xaa is C or S
XAKVVMNPYVKLIVNNSSDFFLVSLSSLKTPAXXA

SEQ ID NO: 44153 - protein, 39 aa, Artificial Sequence
  GFR-binding peptide
  MOD_RES (34), (35): Xaa is C or S
  MOD_RES (12), (13), (14), (15), (16): Xaa is A or G
  MOD_RES (17), (18), (19), (20): Xaa is A or G or is absent
SEVVMDPYVKLXXXXXXXXXFFLISLSSLRTPVXXTPPT

SEQ ID NO: 44154 - protein, 35 aa, Artificial Sequence
  GFR-binding peptide
  MOD_RES (2), (4): Xaa is C or S
RXAXSEVTMNPYVKLVVNKNEDFFLISLSSMKEPV

SEQ ID NO: 44155 - protein, 35 aa, Artificial Sequence
  GFR-binding peptide
  MOD_RES (1), (33), (34): Xaa is C or S
XGEVVMEPYVKLVVKDYEDFFLMSLSSLETPVXXA

SEQ ID NO: 44156 - protein, 38 aa, Artificial Sequence
  GFR-binding peptide
  MOD_RES (2), (34), (35): Xaa is C or S
GXGEVVMEPYVKLVVKDYEDFFLMSLSSLETPVXXAKP

SEQ ID NO: 44157 - protein, 37 aa, Artificial Sequence
  GFR-binding peptide
  MOD_RES (33), (33): Xaa is C or S
  MOD_RES (11), (12), (13), (14), (15): Xaa is A or G
  MOD_RES (16), (17), (18), (19): Xaa is A or G or is absent
NHQLFPYVKLXXXXXXXXXFFLMSLSSEETPVXELGE

SEQ ID NO: 44158 - protein, 38 aa, Artificial Sequence
  GFR-binding peptide
  MOD_RES (2), (4), (36), (37): Xaa is C or S
SXGXRDVVMGPYVKLIIQQKDNFFLMSLSSMKTPTXXP

SEQ ID NO: 44159 - protein, 34 aa, Artificial Sequence
  GFR-binding peptide
  MOD_RES (1), (3): Xaa is C or S
XGXGEVVMEPYVKLVVKDYEDFFLMSLSSLETPV

SEQ ID NO: 44160 - protein, 38 aa, Artificial Sequence
  GFR-binding peptide
  MOD_RES (1), (3), (36), (37): Xaa is C or S
  MOD_RES (14), (15), (16), (17), (18): Xaa is A or G
  MOD_RES (19), (20), (21), (22): Xaa is A or G or is absent
XGXEEVIMPYVKLXXXXXXXXXFFLMSLSSTKVPAXXT

SEQ ID NO: 44161 - protein, 32 aa, Artificial Sequence
  GFR-binding peptide
  MOD_RES (32), (32): Xaa is C or S
RDVVMGPYVKLIIQQKDNFFLMSLSSMKTPTX

SEQ ID NO: 44162 - protein, 39 aa, Artificial Sequence
  GFR-binding peptide
  MOD_RES (2), (36): Xaa is C or S
  MOD_RES (14), (15), (16), (17), (18): Xaa is A or G
  MOD_RES (19), (20), (21), (22): Xaa is A or G or is absent
EXKNHQLFPYVKLXXXXXXXXXFFLMSLSSEETPVXELG

SEQ ID NO: 44163 - protein, 36 aa, Artificial Sequence
  GFR-binding peptide
  MOD_RES (1), (34), (35): Xaa is C or S
  MOD_RES (12), (13), (14), (15), (16): Xaa is A or G
  MOD_RES (17), (18), (19), (20): Xaa is A or G or is absent
XEEVIMPYVKLXXXXXXXXXFFLMSLSSTKVPAXXT

SEQ ID NO: 44164 - protein, 30 aa, Artificial Sequence
  GFR-binding peptide
SKVVMPYVKLVKPTRGVLFFISLSSLDQPV

SEQ ID NO: 44165 - protein, 33 aa, Artificial Sequence
  GFR-binding peptide
  MOD_RES (31), (32): Xaa is C or S
SKVIMPYVKLIKPTKGILFFISLSSLDQSVXXP

SEQ ID NO: 44166 - protein, 37 aa, Artificial Sequence
  GFR-binding peptide
  MOD_RES (31), (32): Xaa is C or S
EVTMNPYVKLVVNKNEDFFLISLSSMKEPVXXPEPIG

SEQ ID NO: 44167 - protein, 42 aa, Artificial Sequence
  GFR-binding peptide
  MOD_RES (1), (3), (38), (39): Xaa is C or S
  MOD_RES (16), (17), (18), (19), (20): Xaa is A or G
  MOD_RES (21), (22), (23), (24): Xaa is A or G or is absent
XGXEAVSMGEPYVKLXXXXXXXXXFFLVSLSSLKTPVXXAKG

SEQ ID NO: 44168 - protein, 36 aa, Artificial Sequence
  GFR-binding peptide
  MOD_RES (33), (34): Xaa is C or S
  MOD_RES (11), (12), (13), (14), (15): Xaa is A or G
  MOD_RES (16), (17), (18), (19): Xaa is A or G or is absent
EVTMNPYVKLXXXXXXXXXFFLISLSSMKEPVXXPE

SEQ ID NO: 44169 - protein, 40 aa, Artificial Sequence
  GFR-binding peptide
  MOD_RES (2), (4), (37), (38): Xaa is C or S
RXGXEAVSMGEPYVKLTPVGMDDFFLVSLSSLKTPVXXAK

SEQ ID NO: 44170 - protein, 36 aa, Artificial Sequence
  GFR-binding peptide
  MOD_RES (1), (3), (35): Xaa is C or S
XGXSRVVMNPYVKLIVNSSDDFFLVSLSSLKTPAXT

SEQ ID NO: 44171 - protein, 42 aa, Artificial Sequence
  GFR-binding peptide
  MOD_RES (2), (4), (36), (37): Xaa is C or S
RXAXSEVTMNPYVKLVVNKNEDFFLISLSSMKEPVXXPEPIG

SEQ ID NO: 44172 - protein, 37 aa, Artificial Sequence
  GFR-binding peptide
  MOD_RES (34), (35): Xaa is C or S
  MOD_RES (12), (13), (14), (15), (16): Xaa is A or G
  MOD_RES (17), (18), (19), (20): Xaa is A or G or is absent
GEVVMEPYVKLXXXXXXXXXFFLMSLSSLETPVXXAK

SEQ ID NO: 44173 - protein, 37 aa, Artificial Sequence
  GFR-binding peptide
  MOD_RES (31), (32): Xaa is C or S
EVVMDPYVKLVVNNAADFFLISLSSLRAPVXXSAPAA

SEQ ID NO: 44174 - protein, 35 aa, Artificial Sequence
  GFR-binding peptide
  MOD_RES (34), (35): Xaa is C or S
  MOD_RES (12), (13), (14), (15), (16): Xaa is A or G
  MOD_RES (17), (18), (19), (20): Xaa is A or G or is absent
SEVVMDPYVKLXXXXXXXXXFFLISLSSLRTPVXX

SEQ ID NO: 44175 - protein, 36 aa, Artificial Sequence
  GFR-binding peptide
  MOD_RES (33), (34): Xaa is C or S
  MOD_RES (11), (12), (13), (14), (15): Xaa is A or G
  MOD_RES (16), (17), (18), (19): Xaa is A or G or is absent
KVVMNPYVKLXXXXXXXXXFFLVSLSSLKTPAXXAK

SEQ ID NO: 44176 - protein, 37 aa, Artificial Sequence
  GFR-binding peptide
  MOD_RES (2), (4): Xaa is C or S
  MOD_RES (16), (17), (18), (19), (20): Xaa is A or G
  MOD_RES (21), (22), (23), (24): Xaa is A or G or is absent
RXGXESVAMGPYVKLXXXXXXXXXFFLISLSSLKTPV

SEQ ID NO: 44177 - protein, 38 aa, Artificial Sequence
  GFR-binding peptide
  MOD_RES (1), (32), (33): Xaa is C or S
XSKVVMPYVKLVKPTRGVLFFISLSSLDQPVXXPSASA

SEQ ID NO: 44178 - protein, 41 aa, Artificial Sequence
  GFR-binding peptide
  MOD_RES (1), (3), (37): Xaa is C or S
XEXKNHQLFPYVKLHQGQHPKIRFFLMSLSSEETPVXELGE

SEQ ID NO: 44179 - protein, 37 aa, Artificial Sequence
  GFR-binding peptide
  MOD_RES (1), (3), (37): Xaa is C or S
  MOD_RES (15), (16), (17), (18), (19): Xaa is A or G
  MOD_RES (20), (21), (22), (23): Xaa is A or G or is absent
XGXESVAMGPYVKLXXXXXXXXXFFLISLSSLKTPVX

SEQ ID NO: 44180 - protein, 39 aa, Artificial Sequence
  GFR-binding peptide
  MOD_RES (1), (3), (37): Xaa is C or S
  MOD_RES (15), (16), (17), (18), (19): Xaa is A or G
  MOD_RES (20), (21), (22), (23): Xaa is A or G or is absent
XGXSRVVMNPYVKLXXXXXXXXXFFLVSLSSLKTPAXTP

SEQ ID NO: 44181 - protein, 37 aa, Artificial Sequence
  GFR-binding peptide
  MOD_RES (34), (35): Xaa is C or S
  MOD_RES (12), (13), (14), (15), (16): Xaa is A or G
  MOD_RES (17), (18), (19), (20): Xaa is A or G or is absent
RDVVMGPYVKLXXXXXXXXXFFLMSLSSMKTPTXXPG

SEQ ID NO: 44182 - protein, 41 aa, Artificial Sequence
  GFR-binding peptide
  MOD_RES (2), (4), (36): Xaa is C or S
HXGXSRVVMNPYVKLIVNSSDDFFLVSLSSLKTPAXTPKTV

SEQ ID NO: 44183 - protein, 39 aa, Artificial Sequence
  GFR-binding peptide
  MOD_RES (2), (34), (35): Xaa is C or S
GXSRVVMNPYVKLIVNSSDDFFLVSLSSLKTPAXXPKPV

SEQ ID NO: 44184 - protein, 33 aa, Artificial Sequence
  GFR-binding peptide
  MOD_RES (1), (33): Xaa is C or S
XAEVVMDPYVKLVVNNAADFFLISLSSLRAPVX

SEQ ID NO: 44185 - protein, 37 aa, Artificial Sequence
  GFR-binding peptide
  MOD_RES (2), (4): Xaa is C or S
  MOD_RES (16), (17), (18), (19), (20): Xaa is A or G
  MOD_RES (21), (22), (23), (24): Xaa is A or G or is absent
HXGXAKVVMNPYVKLXXXXXXXXXFFLVSLSSLKTPA

SEQ ID NO: 44186 - protein, 40 aa, Artificial Sequence
  GFR-binding peptide
  MOD_RES (2), (4), (35), (36): Xaa is C or S
SXKXSKVIMPYVKLIKPTKGILFFISLSSLDQSVXXPSAS

SEQ ID NO: 44187 - protein, 36 aa, Artificial Sequence
  GFR-binding peptide
  MOD_RES (1), (34), (35): Xaa is C or S
XEAVSMGEPYVKLTPVGMDDFFLVSLSSLKTPVXXA

SEQ ID NO: 44188 - protein, 38 aa, Artificial Sequence
  GFR-binding peptide
  MOD_RES (34), (34): Xaa is C or S
KNHQLFPYVKLHQGQHPKIRFFLMSLSSEETPVXELGE

SEQ ID NO: 44189 - protein, 40 aa, Artificial Sequence
  GFR-binding peptide
  MOD_RES (34), (35): Xaa is C or S
  MOD_RES (12), (13), (14), (15), (16): Xaa is A or G
  MOD_RES (17), (18), (19), (20): Xaa is A or G or is absent
ARVVMNPYVKLXXXXXXXXXFFLVSLSSLQTPAXXPKPVT

SEQ ID NO: 44190 - protein, 37 aa, Artificial Sequence
  GFR-binding peptide
  MOD_RES (1), (3), (37): Xaa is C or S
  MOD_RES (15), (16), (17), (18), (19): Xaa is A or G
  MOD_RES (20), (21), (22), (23): Xaa is A or G or is absent
XGXGEVVMEPYVKLXXXXXXXXXFFLMSLSSLETPVX

SEQ ID NO: 44191 - protein, 35 aa, Artificial Sequence
  GFR-binding peptide
  MOD_RES (31), (32): Xaa is C or S
RVVMNPYVKLIVNSSDDFFLVSLSSLQTPAXXPKP

SEQ ID NO: 44192 - protein, 32 aa, Artificial Sequence
  GFR-binding peptide
  MOD_RES (31), (32): Xaa is C or S
EVVMDPYVKLVVNNAADFFLISLSSLRAPVXX

SEQ ID NO: 44193 - protein, 40 aa, Artificial Sequence
  GFR-binding peptide
  MOD_RES (1), (3), (37): Xaa is C or S
XEXKNHQLFPYVKLHQGQHPKIRFFLMSLSSEETPVXELG

SEQ ID NO: 44194 - protein, 41 aa, Artificial Sequence
  GFR-binding peptide
  MOD_RES (2), (4), (37), (38): Xaa is C or S
  MOD_RES (15), (16), (17), (18), (19): Xaa is A or G
  MOD_RES (20), (21), (22), (23): Xaa is A or G or is absent
LXGXEEVIMPYVKLXXXXXXXXXFFLMSLSSTKVPAXXTSP

SEQ ID NO: 44195 - protein, 35 aa, Artificial Sequence
  GFR-binding peptide
  MOD_RES (1), (3): Xaa is C or S
XGXEAVSMGEPYVKLTPVGMDDFFLVSLSSLKTPV

SEQ ID NO: 44196 - protein, 39 aa, Artificial Sequence
  GFR-binding peptide
  MOD_RES (2), (34), (35): Xaa is C or S
GXSEVVMDPYVKLVVNNASDFFLISLSSLRTPVXXTPPT

SEQ ID NO: 44197 - protein, 32 aa, Artificial Sequence
  GFR-binding peptide
  MOD_RES (11), (12), (13), (14), (15): Xaa is A or G
  MOD_RES (16), (17), (18), (19): Xaa is A or G or is absent
NHQLFPYVKLXXXXXXXXXFFLMSLSSEETPV

SEQ ID NO: 44198 - protein, 35 aa, Artificial Sequence
  GFR-binding peptide
  MOD_RES (1), (3): Xaa is C or S
  MOD_RES (14), (15), (16), (17), (18): Xaa is A or G
  MOD_RES (19), (20), (21), (22): Xaa is A or G or is absent
XGXEEVIMPYVKLXXXXXXXXXFFLMSLSSTKVPA

SEQ ID NO: 44199 - protein, 39 aa, Artificial Sequence
  GFR-binding peptide
  MOD_RES (1), (3), (37), (38): Xaa is C or S
  MOD_RES (15), (16), (17), (18), (19): Xaa is A or G
  MOD_RES (20), (21), (22), (23): Xaa is A or G or is absent
XGXESVAMGPYVKLXXXXXXXXXFFLISLSSLKTPVXXA

SEQ ID NO: 44200 - protein, 37 aa, Artificial Sequence
  GFR-binding peptide
  MOD_RES (33), (34): Xaa is C or S
  MOD_RES (11), (12), (13), (14), (15): Xaa is A or G
  MOD_RES (16), (17), (18), (19): Xaa is A or G or is absent
RVVMNPYVKLXXXXXXXXXFFLVSLSSLKTPAXXPKP

SEQ ID NO: 44201 - protein, 40 aa, Artificial Sequence
  GFR-binding peptide
  MOD_RES (2), (39): Xaa is C or S
AXELHEELRPYVKLLKPKKRVYEFFLVSLSSHHVRSPQXK

SEQ ID NO: 44202 - protein, 35 aa, Artificial Sequence
  GFR-binding peptide
  MOD_RES (1), (35): Xaa is C or S
XKNHQLFPYVKLHQGQHPKIRFFLMSLSSEETPVX

SEQ ID NO: 44203 - protein, 37 aa, Artificial Sequence
  GFR-binding peptide
  MOD_RES (33), (34): Xaa is C or S
  MOD_RES (11), (12), (13), (14), (15): Xaa is A or G
  MOD_RES (16), (17), (18), (19): Xaa is A or G or is absent
EEVIMPYVKLXXXXXXXXXFFLMSLSSTKVPAXXTSP

SEQ ID NO: 44204 - protein, 37 aa, Artificial Sequence
  GFR-binding peptide
  MOD_RES (2), (4), (36), (37): Xaa is C or S
RXAXSEVTMNPYVKLVVNKNEDFFLISLSSMKEPVXX

SEQ ID NO: 44205 - protein, 37 aa, Artificial Sequence
  GFR-binding peptide
  MOD_RES (2), (4), (36), (37): Xaa is C or S
HXGXSRVVMNPYVKLIVNSSDDFFLVSLSSLKTPAXX

SEQ ID NO: 44206 - protein, 39 aa, Artificial Sequence
  GFR-binding peptide
  MOD_RES (2), (36), (37): Xaa is C or S
  MOD_RES (14), (15), (16), (17), (18): Xaa is A or G
  MOD_RES (19), (20), (21), (22): Xaa is A or G or is absent
GXSRVVMNPYVKLXXXXXXXXXFFLVSLSSLKTPAXXPK

SEQ ID NO: 44207 - protein, 36 aa, Artificial Sequence
  GFR-binding peptide
  MOD_RES (2), (36): Xaa is C or S
  MOD_RES (14), (15), (16), (17), (18): Xaa is A or G
  MOD_RES (19), (20), (21), (22): Xaa is A or G or is absent
GXARVVMNPYVKLXXXXXXXXXFFLVSLSSLQTPAX

SEQ ID NO: 44208 - protein, 44 aa, Artificial Sequence
  GFR-binding peptide
  MOD_RES (2), (4), (39), (40): Xaa is C or S
  MOD_RES (17), (18), (19), (20), (21): Xaa is A or G
  MOD_RES (22), (23), (24), (25): Xaa is A or G or is absent
RXGXEAVSMGEPYVKLXXXXXXXXXFFLVSLSSLKTPVXXAKGV

SEQ ID NO: 44209 - protein, 41 aa, Artificial Sequence
  GFR-binding peptide
  MOD_RES (1), (3), (35), (36): Xaa is C or S
XGXAKVVMNPYVKLIVNNSSDFFLVSLSSLKTPAXXAKPVA

SEQ ID NO: 44210 - protein, 41 aa, Artificial Sequence
  GFR-binding peptide
  MOD_RES (2), (36), (37): Xaa is C or S
  MOD_RES (14), (15), (16), (17), (18): Xaa is A or G
  MOD_RES (19), (20), (21), (22): Xaa is A or G or is absent
GXESVAMGPYVKLXXXXXXXXXFFLISLSSLKTPVXXAKSA

SEQ ID NO: 44211 - protein, 41 aa, Artificial Sequence
  GFR-binding peptide
  MOD_RES (1), (3), (37), (38): Xaa is C or S
  MOD_RES (15), (16), (17), (18), (19): Xaa is A or G
  MOD_RES (20), (21), (22), (23): Xaa is A or G or is absent
XGXRDVVMGPYVKLXXXXXXXXXFFLMSLSSMKTPTXXPGA

SEQ ID NO: 44212 - protein, 36 aa, Artificial Sequence
  GFR-binding peptide
  MOD_RES (33), (34): Xaa is C or S
  MOD_RES (11), (12), (13), (14), (15): Xaa is A or G
  MOD_RES (16), (17), (18), (19): Xaa is A or G or is absent
SRVIMPYVKLXXXXXXXXXFFLISLSSLAQPVXXPA

SEQ ID NO: 44213 - protein, 38 aa, Artificial Sequence
  GFR-binding peptide
  MOD_RES (32), (33): Xaa is C or S
AEVVMDPYVKLVVNNAADFFLISLSSLRAPVXXSAPAA

SEQ ID NO: 44214 - protein, 31 aa, Artificial Sequence
  GFR-binding peptide
  MOD_RES (31), (31): Xaa is C or S
EEVIMPYVKLLLVRGNDFFLMSLSSTKVPAX

SEQ ID NO: 44215 - protein, 34 aa, Artificial Sequence
  GFR-binding peptide
  MOD_RES (1), (33), (34): Xaa is C or S
XRDVVMGPYVKLIIQQKDNFFLMSLSSMKTPTXX

SEQ ID NO: 44216 - protein, 38 aa, Artificial Sequence
  GFR-binding peptide
  MOD_RES (1), (33), (34): Xaa is C or S
XGEVVMEPYVKLVVKDYEDFFLMSLSSLETPVXXAKPI

SEQ ID NO: 44217 - protein, 33 aa, Artificial Sequence
  GFR-binding peptide
  MOD_RES (12), (13), (14), (15), (16): Xaa is A or G
  MOD_RES (17), (18), (19), (20): Xaa is A or G or is absent
RDVVMGPYVKLXXXXXXXXXFFLMSLSSMKTPT

SEQ ID NO: 44218 - protein, 40 aa, Artificial Sequence
  GFR-binding peptide
  MOD_RES (1), (3), (37), (38): Xaa is C or S
  MOD_RES (15), (16), (17), (18), (19): Xaa is A or G
  MOD_RES (20), (21), (22), (23): Xaa is A or G or is absent
XGXAEVVMDPYVKLXXXXXXXXXFFLISLSSLRAPVXXSA

SEQ ID NO: 44219 - protein, 36 aa, Artificial Sequence
  GFR-binding peptide
  MOD_RES (1), (3): Xaa is C or S
  MOD_RES (15), (16), (17), (18), (19): Xaa is A or G
  MOD_RES (20), (21), (22), (23): Xaa is A or G or is absent
XAXSEVTMNPYVKLXXXXXXXXXFFLISLSSMKEPV

SEQ ID NO: 44220 - protein, 34 aa, Artificial Sequence
  GFR-binding peptide
  MOD_RES (32), (32): Xaa is C or S
SRVVMNPYVKLIVNSSDDFFLVSLSSLKTPAXTP

SEQ ID NO: 44221 - protein, 31 aa, Artificial Sequence
  GFR-binding peptide
ESVAMGPYVKLYTVVGKDFFLISLSSLKTPV

SEQ ID NO: 44222 - protein, 37 aa, Artificial Sequence
  GFR-binding peptide
  MOD_RES (1), (3), (36), (37): Xaa is C or S
  MOD_RES (14), (15), (16), (17), (18): Xaa is A or G
  MOD_RES (19), (20), (21), (22): Xaa is A or G or is absent
XKXSRVIMPYVKLXXXXXXXXXFFLISLSSLAQPVXX

SEQ ID NO: 44223 - protein, 34 aa, Artificial Sequence
  GFR-binding peptide
  MOD_RES (2), (34): Xaa is C or S
GXARVVMNPYVKLIVNSSDDFFLVSLSSLQTPAX

SEQ ID NO: 44224 - protein, 32 aa, Artificial Sequence
  GFR-binding peptide
  MOD_RES (31), (32): Xaa is C or S
RVVMNPYVKLIVNSSDDFFLVSLSSLKTPAXX

SEQ ID NO: 44225 - protein, 41 aa, Artificial Sequence
  GFR-binding peptide
  MOD_RES (1), (3), (37), (38): Xaa is C or S
  MOD_RES (15), (16), (17), (18), (19): Xaa is A or G
  MOD_RES (20), (21), (22), (23): Xaa is A or G or is absent
XGXESVAMGPYVKLXXXXXXXXXFFLISLSSLKTPVXXAKS

SEQ ID NO: 44226 - protein, 33 aa, Artificial Sequence
  GFR-binding peptide
  MOD_RES (31), (32): Xaa is C or S
EVVMEPYVKLVVKDYEDFFLMSLSSLETPVXXA

SEQ ID NO: 44227 - protein, 37 aa, Artificial Sequence
  GFR-binding peptide
  MOD_RES (1), (35), (36): Xaa is C or S
  MOD_RES (13), (14), (15), (16), (17): Xaa is A or G
  MOD_RES (18), (19), (20), (21): Xaa is A or G or is absent
XSEVVMDPYVKLXXXXXXXXXFFLISLSSLRTPVXXT

SEQ ID NO: 44228 - protein, 41 aa, Artificial Sequence
  GFR-binding peptide
  MOD_RES (2), (4), (36), (37): Xaa is C or S
SXGXRDVVMGPYVKLIIQQKDNFFLMSLSSMKTPTXXPGAS

SEQ ID NO: 44229 - protein, 34 aa, Artificial Sequence
  GFR-binding peptide
  MOD_RES (1), (3), (34): Xaa is C or S
XGXEEVIMPYVKLLLVRGNDFFLMSLSSTKVPAX

SEQ ID NO: 44230 - protein, 34 aa, Artificial Sequence
  GFR-binding peptide
  MOD_RES (1), (32), (33): Xaa is C or S
XSKVIMPYVKLIKPTKGILFFISLSSLDQSVXXP

SEQ ID NO: 44231 - protein, 35 aa, Artificial Sequence
  GFR-binding peptide
  MOD_RES (33), (33): Xaa is C or S
  MOD_RES (11), (12), (13), (14), (15): Xaa is A or G
  MOD_RES (16), (17), (18), (19): Xaa is A or G or is absent
NHQLFPYVKLXXXXXXXXXFFLMSLSSEETPVXEL

SEQ ID NO: 44232 - protein, 34 aa, Artificial Sequence
  GFR-binding peptide
  MOD_RES (2), (34): Xaa is C or S
GXAKVVMNPYVKLIVNNSSDFFLVSLSSLKTPAX

SEQ ID NO: 44233 - protein, 38 aa, Artificial Sequence
  GFR-binding peptide
  MOD_RES (2), (4), (35), (36): Xaa is C or S
SXKXSKVIMPYVKLIKPTKGILFFISLSSLDQSVXXPS

SEQ ID NO: 44234 - protein, 33 aa, Artificial Sequence
  GFR-binding peptide
  MOD_RES (33), (33): Xaa is C or S
  MOD_RES (11), (12), (13), (14), (15): Xaa is A or G
  MOD_RES (16), (17), (18), (19): Xaa is A or G or is absent
NHQLFPYVKLXXXXXXXXXFFLMSLSSEETPVX

SEQ ID NO: 44235 - protein, 40 aa, Artificial Sequence
  GFR-binding peptide
  MOD_RES (2), (35), (36): Xaa is C or S
  MOD_RES (13), (14), (15), (16), (17): Xaa is A or G
  MOD_RES (18), (19), (20), (21): Xaa is A or G or is absent
KXSRVIMPYVKLXXXXXXXXXFFLISLSSLAQPVXXPAAS

SEQ ID NO: 44236 - protein, 38 aa, Artificial Sequence
  GFR-binding peptide
  MOD_RES (34), (35): Xaa is C or S
  MOD_RES (12), (13), (14), (15), (16): Xaa is A or G
  MOD_RES (17), (18), (19), (20): Xaa is A or G or is absent
AKVVMNPYVKLXXXXXXXXXFFLVSLSSLKTPAXXAKP

SEQ ID NO: 44237 - protein, 41 aa, Artificial Sequence
  GFR-binding peptide
  MOD_RES (2), (4), (37), (38): Xaa is C or S
RXGXEAVSMGEPYVKLTPVGMDDFFLVSLSSLKTPVXXAKG

SEQ ID NO: 44238 - protein, 43 aa, Artificial Sequence
  GFR-binding peptide
  MOD_RES (2), (4), (38): Xaa is C or S
  MOD_RES (16), (17), (18), (19), (20): Xaa is A or G
  MOD_RES (21), (22), (23), (24): Xaa is A or G or is absent
RXEXKNHQLFPYVKLXXXXXXXXXFFLMSLSSEETPVXELGED

SEQ ID NO: 44239 - protein, 36 aa, Artificial Sequence
  GFR-binding peptide
  MOD_RES (32), (33): Xaa is C or S
AKVVMNPYVKLIVNNSSDFFLVSLSSLKTPAXXAKP

SEQ ID NO: 44240 - protein, 33 aa, Artificial Sequence
  GFR-binding peptide
  MOD_RES (12), (13), (14), (15), (16): Xaa is A or G
  MOD_RES (17), (18), (19), (20): Xaa is A or G or is absent
SEVVMDPYVKLXXXXXXXXXFFLISLSSLRTPV

SEQ ID NO: 44241 - protein, 39 aa, Artificial Sequence
  GFR-binding peptide
  MOD_RES (2), (4), (39): Xaa is C or S
  MOD_RES (17), (18), (19), (20), (21): Xaa is A or G
  MOD_RES (22), (23), (24), (25): Xaa is A or G or is absent
RXGXEAVSMGEPYVKLXXXXXXXXXFFLVSLSSLKTPVX

SEQ ID NO: 44242 - protein, 40 aa, Artificial Sequence
  GFR-binding peptide
  MOD_RES (2), (36), (37): Xaa is C or S
  MOD_RES (14), (15), (16), (17), (18): Xaa is A or G
  MOD_RES (19), (20), (21), (22): Xaa is A or G or is absent
AXSEVTMNPYVKLXXXXXXXXXFFLISLSSMKEPVXXPEP

SEQ ID NO: 44243 - protein, 38 aa, Artificial Sequence
  GFR-binding peptide
  MOD_RES (33), (34): Xaa is C or S
  MOD_RES (11), (12), (13), (14), (15): Xaa is A or G
  MOD_RES (16), (17), (18), (19): Xaa is A or G or is absent
SVAMGPYVKLXXXXXXXXXFFLISLSSLKTPVXXAKSA

SEQ ID NO: 44244 - protein, 36 aa, Artificial Sequence
  GFR-binding peptide
  MOD_RES (32), (33): Xaa is C or S
ARVVMNPYVKLIVNSSDDFFLVSLSSLQTPAXXPKP

SEQ ID NO: 44245 - protein, 42 aa, Artificial Sequence
  GFR-binding peptide
  MOD_RES (2), (4), (38): Xaa is C or S
RXEXKNHQLFPYVKLHQGQHPKIRFFLMSLSSEETPVXELGE

SEQ ID NO: 44246 - protein, 37 aa, Artificial Sequence
  GFR-binding peptide
  MOD_RES (2), (35), (36): Xaa is C or S
GXEAVSMGEPYVKLTPVGMDDFFLVSLSSLKTPVXXA

SEQ ID NO: 44247 - protein, 37 aa, Artificial Sequence
  GFR-binding peptide
  MOD_RES (2), (33), (34): Xaa is C or S
KXSRVIMPYVKLVKPKRGVLFFISLSSLAQPVXXPAA

SEQ ID NO: 44248 - protein, 35 aa, Artificial Sequence
  GFR-binding peptide
  MOD_RES (34), (35): Xaa is C or S
  MOD_RES (12), (13), (14), (15), (16): Xaa is A or G
  MOD_RES (17), (18), (19), (20): Xaa is A or G or is absent
AEVVMDPYVKLXXXXXXXXXFFLISLSSLRAPVXX

SEQ ID NO: 44249 - protein, 38 aa, Artificial Sequence
  GFR-binding peptide
  MOD_RES (1), (33), (34): Xaa is C or S
XRDVVMGPYVKLIIQQKDNFFLMSLSSMKTPTXXPGAS

SEQ ID NO: 44250 - protein, 36 aa, Artificial Sequence
  GFR-binding peptide
  MOD_RES (34), (35): Xaa is C or S
  MOD_RES (12), (13), (14), (15), (16): Xaa is A or G
  MOD_RES (17), (18), (19), (20): Xaa is A or G or is absent
SEVTMNPYVKLXXXXXXXXXFFLISLSSMKEPVXXP

SEQ ID NO: 44251 - protein, 38 aa, Artificial Sequence
  GFR-binding peptide
  MOD_RES (1), (33), (34): Xaa is C or S
XSRVVMNPYVKLIVNSSDDFFLVSLSSLKTPAXXPKPV

SEQ ID NO: 44252 - protein, 37 aa, Artificial Sequence
  GFR-binding peptide
  MOD_RES (1), (34), (35): Xaa is C or S
  MOD_RES (12), (13), (14), (15), (16): Xaa is A or G
  MOD_RES (17), (18), (19), (20): Xaa is A or G or is absent
XSRVIMPYVKLXXXXXXXXXFFLISLSSLAQPVXXPA

SEQ ID NO: 44253 - protein, 38 aa, Artificial Sequence
  GFR-binding peptide
  MOD_RES (2), (4), (37), (38): Xaa is C or S
RXGXEAVSMGEPYVKLTPVGMDDFFLVSLSSLKTPVXX

SEQ ID NO: 44254 - protein, 41 aa, Artificial Sequence
  GFR-binding peptide
  MOD_RES (2), (36), (37): Xaa is C or S
  MOD_RES (14), (15), (16), (17), (18): Xaa is A or G
  MOD_RES (19), (20), (21), (22): Xaa is A or G or is absent
GXSEVVMDPYVKLXXXXXXXXXFFLISLSSLRTPVXXTPPT

SEQ ID NO: 44255 - protein, 34 aa, Artificial Sequence
  GFR-binding peptide
  MOD_RES (2), (33), (34): Xaa is C or S
KXSRVIMPYVKLVKPKRGVLFFISLSSLAQPVXX

SEQ ID NO: 44256 - protein, 39 aa, Artificial Sequence
  GFR-binding peptide
  MOD_RES (2), (37), (38): Xaa is C or S
  MOD_RES (15), (16), (17), (18), (19): Xaa is A or G
  MOD_RES (20), (21), (22), (23): Xaa is A or G or is absent
GXEAVSMGEPYVKLXXXXXXXXXFFLVSLSSLKTPVXXA

SEQ ID NO: 44257 - protein, 43 aa, Artificial Sequence
  GFR-binding peptide
  MOD_RES (2), (4), (41): Xaa is C or S
  MOD_RES (17), (18), (19), (20), (21): Xaa is A or G
  MOD_RES (22), (23), (24), (25): Xaa is A or G or is absent
AXAXELHEELRPYVKLXXXXXXXXXFFLVSLSSHHVRSPQXKV

SEQ ID NO: 44258 - protein, 36 aa, Artificial Sequence
  GFR-binding peptide
  MOD_RES (36), (36): Xaa is C or S
  MOD_RES (12), (13), (14), (15), (16): Xaa is A or G
  MOD_RES (17), (18), (19), (20): Xaa is A or G or is absent
LHEELRPYVKLXXXXXXXXXFFLVSLSSHHVRSPQX

SEQ ID NO: 44259 - protein, 39 aa, Artificial Sequence
  GFR-binding peptide
  MOD_RES (1), (35), (36): Xaa is C or S
  MOD_RES (13), (14), (15), (16), (17): Xaa is A or G
  MOD_RES (18), (19), (20), (21): Xaa is A or G or is absent
XGEVVMEPYVKLXXXXXXXXXFFLMSLSSLETPVXXAKP

SEQ ID NO: 44260 - protein, 36 aa, Artificial Sequence
  GFR-binding peptide
  MOD_RES (33), (34): Xaa is C or S
  MOD_RES (11), (12), (13), (14), (15): Xaa is A or G
  MOD_RES (16), (17), (18), (19): Xaa is A or G or is absent
EEVIMPYVKLXXXXXXXXXFFLMSLSSTKVPAXXTS

SEQ ID NO: 44261 - protein, 32 aa, Artificial Sequence
  GFR-binding peptide
  MOD_RES (31), (32): Xaa is C or S
RVVMNPYVKLIVNSSDDFFLVSLSSLQTPAXX

SEQ ID NO: 44262 - protein, 38 aa, Artificial Sequence
  GFR-binding peptide
  MOD_RES (33), (33): Xaa is C or S
NHQLFPYVKLHQGQHPKIRFFLMSLSSEETPVXELGED

SEQ ID NO: 44263 - protein, 40 aa, Artificial Sequence
  GFR-binding peptide
  MOD_RES (2), (4), (38): Xaa is C or S
  MOD_RES (16), (17), (18), (19), (20): Xaa is A or G
  MOD_RES (21), (22), (23), (24): Xaa is A or G or is absent
HXGXSRVVMNPYVKLXXXXXXXXXFFLVSLSSLKTPAXTP

SEQ ID NO: 44264 - protein, 42 aa, Artificial Sequence
  GFR-binding peptide
  MOD_RES (2), (4), (38), (39): Xaa is C or S
  MOD_RES (16), (17), (18), (19), (20): Xaa is A or G
  MOD_RES (21), (22), (23), (24): Xaa is A or G or is absent
HXGXAKVVMNPYVKLXXXXXXXXXFFLVSLSSLKTPAXXAKP

SEQ ID NO: 44265 - protein, 35 aa, Artificial Sequence
  GFR-binding peptide
  MOD_RES (2), (2): Xaa is C or S
  MOD_RES (14), (15), (16), (17), (18): Xaa is A or G
  MOD_RES (19), (20), (21), (22): Xaa is A or G or is absent
GXSRVVMNPYVKLXXXXXXXXXFFLVSLSSLKTPA

SEQ ID NO: 44266 - protein, 34 aa, Artificial Sequence
  GFR-binding peptide
  MOD_RES (2), (2): Xaa is C or S
  MOD_RES (13), (14), (15), (16), (17): Xaa is A or G
  MOD_RES (18), (19), (20), (21): Xaa is A or G or is absent
KXSRVIMPYVKLXXXXXXXXXFFLISLSSLAQPV

SEQ ID NO: 44267 - protein, 39 aa, Artificial Sequence
  GFR-binding peptide
  MOD_RES (33), (34): Xaa is C or S
  MOD_RES (11), (12), (13), (14), (15): Xaa is A or G
  MOD_RES (16), (17), (18), (19): Xaa is A or G or is absent
RVVMNPYVKLXXXXXXXXXFFLVSLSSLKTPAXXPKPVH

SEQ ID NO: 44268 - protein, 34 aa, Artificial Sequence
  GFR-binding peptide
  MOD_RES (32), (33): Xaa is C or S
SRVVMNPYVKLIVNSSDDFFLVSLSSLKTPAXXP

SEQ ID NO: 44269 - protein, 38 aa, Artificial Sequence
  GFR-binding peptide
  MOD_RES (1), (3), (35), (36): Xaa is C or S
XGXAEVVMDPYVKLVVNNAADFFLISLSSLRAPVXXSA

SEQ ID NO: 44270 - protein, 36 aa, Artificial Sequence
  GFR-binding peptide
  MOD_RES (1), (35), (36): Xaa is C or S
  MOD_RES (13), (14), (15), (16), (17): Xaa is A or G
  MOD_RES (18), (19), (20), (21): Xaa is A or G or is absent
XRDVVMGPYVKLXXXXXXXXXFFLMSLSSMKTPTXX

SEQ ID NO: 44271 - protein, 41 aa, Artificial Sequence
  GFR-binding peptide
  MOD_RES (1), (3), (36), (37): Xaa is C or S
XGXEAVSMGEPYVKLTPVGMDDFFLVSLSSLKTPVXXAKGV

SEQ ID NO: 44272 - protein, 42 aa, Artificial Sequence
  GFR-binding peptide
  MOD_RES (1), (38): Xaa is C or S
  MOD_RES (14), (15), (16), (17), (18): Xaa is A or G
  MOD_RES (19), (20), (21), (22): Xaa is A or G or is absent
XELHEELRPYVKLXXXXXXXXXFFLVSLSSHHVRSPQXKVSS

SEQ ID NO: 44273 - protein, 39 aa, Artificial Sequence
  GFR-binding peptide
  MOD_RES (1), (3), (37), (38): Xaa is C or S
  MOD_RES (15), (16), (17), (18), (19): Xaa is A or G
  MOD_RES (20), (21), (22), (23): Xaa is A or G or is absent
XGXGEVVMEPYVKLXXXXXXXXXFFLMSLSSLETPVXXA

SEQ ID NO: 44274 - protein, 36 aa, Artificial Sequence
  GFR-binding peptide
  MOD_RES (2), (36): Xaa is C or S
  MOD_RES (14), (15), (16), (17), (18): Xaa is A or G
  MOD_RES (19), (20), (21), (22): Xaa is A or G or is absent
GXGEVVMEPYVKLXXXXXXXXXFFLMSLSSLETPVX

SEQ ID NO: 44275 - protein, 40 aa, Artificial Sequence
  GFR-binding peptide
  MOD_RES (34), (35): Xaa is C or S
  MOD_RES (12), (13), (14), (15), (16): Xaa is A or G
  MOD_RES (17), (18), (19), (20): Xaa is A or G or is absent
SEVVMDPYVKLXXXXXXXXXFFLISLSSLRTPVXXTPPTS

SEQ ID NO: 44276 - protein, 32 aa, Artificial Sequence
  GFR-binding peptide
  MOD_RES (2), (2): Xaa is C or S
GXEEVIMPYVKLLLVRGNDFFLMSLSSTKVPA

SEQ ID NO: 44277 - protein, 37 aa, Artificial Sequence
  GFR-binding peptide
  MOD_RES (33), (34): Xaa is C or S
  MOD_RES (11), (12), (13), (14), (15): Xaa is A or G
  MOD_RES (16), (17), (18), (19): Xaa is A or G or is absent
KVVMNPYVKLXXXXXXXXXFFLVSLSSLKTPAXXAKP

SEQ ID NO: 44278 - protein, 38 aa, Artificial Sequence
  GFR-binding peptide
  MOD_RES (1), (33), (34): Xaa is C or S
XSEVTMNPYVKLVVNKNEDFFLISLSSMKEPVXXPEPI

SEQ ID NO: 44279 - protein, 38 aa, Artificial Sequence
  GFR-binding peptide
  MOD_RES (2), (4), (36), (37): Xaa is C or S
RXGXAEVVMDPYVKLVVNNAADFFLISLSSLRAPVXXS

SEQ ID NO: 44280 - protein, 36 aa, Artificial Sequence
  GFR-binding peptide
  MOD_RES (2), (35), (36): Xaa is C or S
  MOD_RES (13), (14), (15), (16), (17): Xaa is A or G
  MOD_RES (18), (19), (20), (21): Xaa is A or G or is absent
KXSRVIMPYVKLXXXXXXXXXFFLISLSSLAQPVXX

SEQ ID NO: 44281 - protein, 43 aa, Artificial Sequence
  GFR-binding peptide
  MOD_RES (1), (3), (37), (38): Xaa is C or S
  MOD_RES (15), (16), (17), (18), (19): Xaa is A or G
  MOD_RES (20), (21), (22), (23): Xaa is A or G or is absent
XGXRDVVMGPYVKLXXXXXXXXXFFLMSLSSMKTPTXXPGASG

SEQ ID NO: 44282 - protein, 36 aa, Artificial Sequence
  GFR-binding peptide
  MOD_RES (2), (4), (35), (36): Xaa is C or S
LXGXEEVIMPYVKLLLVRGNDFFLMSLSSTKVPAXX

SEQ ID NO: 44283 - protein, 42 aa, Artificial Sequence
  GFR-binding peptide
  MOD_RES (2), (4), (38), (39): Xaa is C or S
  MOD_RES (16), (17), (18), (19), (20): Xaa is A or G
  MOD_RES (21), (22), (23), (24): Xaa is A or G or is absent
RXGXAEVVMDPYVKLXXXXXXXXXFFLISLSSLRAPVXXSAP

SEQ ID NO: 44284 - protein, 44 aa, Artificial Sequence
  GFR-binding peptide
  MOD_RES (2), (4), (41): Xaa is C or S
AXAXELHEELRPYVKLLKPKKRVYEFFLVSLSSHHVRSPQXKVS

SEQ ID NO: 44285 - protein, 37 aa, Artificial Sequence
  GFR-binding peptide
  MOD_RES (36), (36): Xaa is C or S
  MOD_RES (12), (13), (14), (15), (16): Xaa is A or G
  MOD_RES (17), (18), (19), (20): Xaa is A or G or is absent
LHEELRPYVKLXXXXXXXXXFFLVSLSSHHVRSPQXK

SEQ ID NO: 44286 - protein, 40 aa, Artificial Sequence
  GFR-binding peptide
  MOD_RES (34), (35): Xaa is C or S
  MOD_RES (12), (13), (14), (15), (16): Xaa is A or G
  MOD_RES (17), (18), (19), (20): Xaa is A or G or is absent
RDVVMGPYVKLXXXXXXXXXFFLMSLSSMKTPTXXPGASG

SEQ ID NO: 44287 - protein, 38 aa, Artificial Sequence
  GFR-binding peptide
  MOD_RES (2), (36), (37): Xaa is C or S
  MOD_RES (14), (15), (16), (17), (18): Xaa is A or G
  MOD_RES (19), (20), (21), (22): Xaa is A or G or is absent
GXAKVVMNPYVKLXXXXXXXXXFFLVSLSSLKTPAXXA

SEQ ID NO: 44288 - protein, 39 aa, Artificial Sequence
  GFR-binding peptide
  MOD_RES (2), (34), (35): Xaa is C or S
GXAKVVMNPYVKLIVNNSSDFFLVSLSSLKTPAXXAKPV

SEQ ID NO: 44289 - protein, 39 aa, Artificial Sequence
  GFR-binding peptide
  MOD_RES (2), (36), (37): Xaa is C or S
  MOD_RES (14), (15), (16), (17), (18): Xaa is A or G
  MOD_RES (19), (20), (21), (22): Xaa is A or G or is absent
GXGEVVMEPYVKLXXXXXXXXXFFLMSLSSLETPVXXAK

SEQ ID NO: 44290 - protein, 39 aa, Artificial Sequence
  GFR-binding peptide
  MOD_RES (34), (35): Xaa is C or S
  MOD_RES (12), (13), (14), (15), (16): Xaa is A or G
  MOD_RES (17), (18), (19), (20): Xaa is A or G or is absent
AKVVMNPYVKLXXXXXXXXXFFLVSLSSLKTPAXXAKPV

SEQ ID NO: 44291 - protein, 38 aa, Artificial Sequence
  GFR-binding peptide
  MOD_RES (2), (4), (36): Xaa is C or S
HXGXSRVVMNPYVKLIVNSSDDFFLVSLSSLKTPAXTP

SEQ ID NO: 44292 - protein, 34 aa, Artificial Sequence
  GFR-binding peptide
  MOD_RES (31), (32): Xaa is C or S
EVVMDPYVKLVVNNASDFFLISLSSLRTPVXXTP

SEQ ID NO: 44293 - protein, 32 aa, Artificial Sequence
  GFR-binding peptide
  MOD_RES (31), (32): Xaa is C or S
EVVMEPYVKLVVKDYEDFFLMSLSSLETPVXX

SEQ ID NO: 44294 - protein, 42 aa, Artificial Sequence
  GFR-binding peptide
  MOD_RES (1), (3), (36), (37): Xaa is C or S
  MOD_RES (14), (15), (16), (17), (18): Xaa is A or G
  MOD_RES (19), (20), (21), (22): Xaa is A or G or is absent
XKXSKVVMPYVKLXXXXXXXXXFFLISLSSLDQPVXXPSASA

SEQ ID NO: 44295 - protein, 40 aa, Artificial Sequence
  GFR-binding peptide
  MOD_RES (1), (35), (36): Xaa is C or S
  MOD_RES (13), (14), (15), (16), (17): Xaa is A or G
  MOD_RES (18), (19), (20), (21): Xaa is A or G or is absent
XAKVVMNPYVKLXXXXXXXXXFFLVSLSSLKTPAXXAKPV

SEQ ID NO: 44296 - protein, 35 aa, Artificial Sequence
  GFR-binding peptide
  MOD_RES (1), (33), (34): Xaa is C or S
XSEVTMNPYVKLVVNKNEDFFLISLSSMKEPVXXP

SEQ ID NO: 44297 - protein, 41 aa, Artificial Sequence
  GFR-binding peptide
  MOD_RES (2), (4), (38): Xaa is C or S
RXEXKNHQLFPYVKLHQGQHPKIRFFLMSLSSEETPVXELG

SEQ ID NO: 44298 - protein, 31 aa, Artificial Sequence
  GFR-binding peptide
ARVVMNPYVKLIVNSSDDFFLVSLSSLQTPA

SEQ ID NO: 44299 - protein, 36 aa, Artificial Sequence
  GFR-binding peptide
  MOD_RES (1), (3), (36): Xaa is C or S
  MOD_RES (14), (15), (16), (17), (18): Xaa is A or G
  MOD_RES (19), (20), (21), (22): Xaa is A or G or is absent
XKXSRVIMPYVKLXXXXXXXXXFFLISLSSLAQPVX

SEQ ID NO: 44300 - protein, 38 aa, Artificial Sequence
  GFR-binding peptide
  MOD_RES (36), (36): Xaa is C or S
LHEELRPYVKLLKPKKRVYEFFLVSLSSHHVRSPQXKV

SEQ ID NO: 44301 - protein, 35 aa, Artificial Sequence
  GFR-binding peptide
  MOD_RES (34), (34): Xaa is C or S
  MOD_RES (12), (13), (14), (15), (16): Xaa is A or G
  MOD_RES (17), (18), (19), (20): Xaa is A or G or is absent
KNHQLFPYVKLXXXXXXXXXFFLMSLSSEETPVXE

SEQ ID NO: 44302 - protein, 38 aa, Artificial Sequence
  GFR-binding peptide
  MOD_RES (2), (34), (35): Xaa is C or S
GXSEVVMDPYVKLVVNNASDFFLISLSSLRTPVXXTPP

SEQ ID NO: 44303 - protein, 33 aa, Artificial Sequence
  GFR-binding peptide
  MOD_RES (33), (33): Xaa is C or S
  MOD_RES (11), (12), (13), (14), (15): Xaa is A or G
  MOD_RES (16), (17), (18), (19): Xaa is A or G or is absent
EEVIMPYVKLXXXXXXXXXFFLMSLSSTKVPAX

SEQ ID NO: 44304 - protein, 34 aa, Artificial Sequence
  GFR-binding peptide
  MOD_RES (32), (33): Xaa is C or S
SEVTMNPYVKLVVNKNEDFFLISLSSMKEPVXXP

SEQ ID NO: 44305 - protein, 35 aa, Artificial Sequence
  GFR-binding peptide
  MOD_RES (1), (34), (35): Xaa is C or S
  MOD_RES (12), (13), (14), (15), (16): Xaa is A or G
  MOD_RES (17), (18), (19), (20): Xaa is A or G or is absent
XEEVIMPYVKLXXXXXXXXXFFLMSLSSTKVPAXX

SEQ ID NO: 44306 - protein, 34 aa, Artificial Sequence
  GFR-binding peptide
  MOD_RES (32), (33): Xaa is C or S
RDVVMGPYVKLIIQQKDNFFLMSLSSMKTPTXXP

SEQ ID NO: 44307 - protein, 38 aa, Artificial Sequence
  GFR-binding peptide
  MOD_RES (33), (34): Xaa is C or S
  MOD_RES (11), (12), (13), (14), (15): Xaa is A or G
  MOD_RES (16), (17), (18), (19): Xaa is A or G or is absent
EVVMEPYVKLXXXXXXXXXFFLMSLSSLETPVXXAKPI

SEQ ID NO: 44308 - protein, 32 aa, Artificial Sequence
  GFR-binding peptide
  MOD_RES (11), (12), (13), (14), (15): Xaa is A or G
  MOD_RES (16), (17), (18), (19): Xaa is A or G or is absent
EVVMDPYVKLXXXXXXXXXFFLISLSSLRAPV

SEQ ID NO: 44309 - protein, 37 aa, Artificial Sequence
  GFR-binding peptide
  MOD_RES (1), (33), (34): Xaa is C or S
XAEVVMDPYVKLVVNNAADFFLISLSSLRAPVXXSAP

SEQ ID NO: 44310 - protein, 40 aa, Artificial Sequence
  GFR-binding peptide
  MOD_RES (2), (4), (37), (38): Xaa is C or S
  MOD_RES (15), (16), (17), (18), (19): Xaa is A or G
  MOD_RES (20), (21), (22), (23): Xaa is A or G or is absent
SXKXSKVIMPYVKLXXXXXXXXXFFLISLSSLDQSVXXPS

SEQ ID NO: 44311 - protein, 36 aa, Artificial Sequence
  GFR-binding peptide
  MOD_RES (31), (32): Xaa is C or S
EVVMEPYVKLVVKDYEDFFLMSLSSLETPVXXAKPI

SEQ ID NO: 44312 - protein, 38 aa, Artificial Sequence
  GFR-binding peptide
  MOD_RES (1), (35): Xaa is C or S
  MOD_RES (13), (14), (15), (16), (17): Xaa is A or G
  MOD_RES (18), (19), (20), (21): Xaa is A or G or is absent
XKNHQLFPYVKLXXXXXXXXXFFLMSLSSEETPVXELG

SEQ ID NO: 44313 - protein, 36 aa, Artificial Sequence
  GFR-binding peptide
  MOD_RES (34), (34): Xaa is C or S
  MOD_RES (12), (13), (14), (15), (16): Xaa is A or G
  MOD_RES (17), (18), (19), (20): Xaa is A or G or is absent
KNHQLFPYVKLXXXXXXXXXFFLMSLSSEETPVXEL

SEQ ID NO: 44314 - protein, 40 aa, Artificial Sequence
  GFR-binding peptide
  MOD_RES (2), (36): Xaa is C or S
  MOD_RES (14), (15), (16), (17), (18): Xaa is A or G
  MOD_RES (19), (20), (21), (22): Xaa is A or G or is absent
EXKNHQLFPYVKLXXXXXXXXXFFLMSLSSEETPVXELGE

SEQ ID NO: 44315 - protein, 38 aa, Artificial Sequence
  GFR-binding peptide
  MOD_RES (2), (37), (38): Xaa is C or S
  MOD_RES (15), (16), (17), (18), (19): Xaa is A or G
  MOD_RES (20), (21), (22), (23): Xaa is A or G or is absent
GXEAVSMGEPYVKLXXXXXXXXXFFLVSLSSLKTPVXX

SEQ ID NO: 44316 - protein, 34 aa, Artificial Sequence
  GFR-binding peptide
  MOD_RES (1), (1): Xaa is C or S
  MOD_RES (13), (14), (15), (16), (17): Xaa is A or G
  MOD_RES (18), (19), (20), (21): Xaa is A or G or is absent
XAEVVMDPYVKLXXXXXXXXXFFLISLSSLRAPV

SEQ ID NO: 44317 - protein, 42 aa, Artificial Sequence
  GFR-binding peptide
  MOD_RES (2), (36): Xaa is C or S
  MOD_RES (14), (15), (16), (17), (18): Xaa is A or G
  MOD_RES (19), (20), (21), (22): Xaa is A or G or is absent
EXKNHQLFPYVKLXXXXXXXXXFFLMSLSSEETPVXELGEDN

SEQ ID NO: 44318 - protein, 39 aa, Artificial Sequence
  GFR-binding peptide
  MOD_RES (1), (33), (34): Xaa is C or S
XSEVTMNPYVKLVVNKNEDFFLISLSSMKEPVXXPEPIG

SEQ ID NO: 44319 - protein, 34 aa, Artificial Sequence
  GFR-binding peptide
  MOD_RES (31), (32): Xaa is C or S
EEVIMPYVKLLLVRGNDFFLMSLSSTKVPAXXTS

SEQ ID NO: 44320 - protein, 39 aa, Artificial Sequence
  GFR-binding peptide
  MOD_RES (1), (3), (35), (36): Xaa is C or S
XGXRDVVMGPYVKLIIQQKDNFFLMSLSSMKTPTXXPGA

SEQ ID NO: 44321 - protein, 38 aa, Artificial Sequence
  GFR-binding peptide
  MOD_RES (33), (33): Xaa is C or S
  MOD_RES (11), (12), (13), (14), (15): Xaa is A or G
  MOD_RES (16), (17), (18), (19): Xaa is A or G or is absent
RVVMNPYVKLXXXXXXXXXFFLVSLSSLKTPAXTPKTV

SEQ ID NO: 44322 - protein, 34 aa, Artificial Sequence
  GFR-binding peptide
  MOD_RES (33), (33): Xaa is C or S
NHQLFPYVKLHQGQHPKIRFFLMSLSSEETPVXE

SEQ ID NO: 44323 - protein, 45 aa, Artificial Sequence
  GFR-binding peptide
  MOD_RES (2), (4), (41): Xaa is C or S
AXAXELHEELRPYVKLLKPKKRVYEFFLVSLSSHHVRSPQXKVSS

SEQ ID NO: 44324 - protein, 35 aa, Artificial Sequence
  GFR-binding peptide
  MOD_RES (2), (33), (34): Xaa is C or S
KXSKVVMPYVKLVKPTRGVLFFISLSSLDQPVXXP

SEQ ID NO: 44325 - protein, 37 aa, Artificial Sequence
  GFR-binding peptide
  MOD_RES (31), (32): Xaa is C or S
EEVIMPYVKLLLVRGNDFFLMSLSSTKVPAXXTSPVR

SEQ ID NO: 44326 - protein, 31 aa, Artificial Sequence
  GFR-binding peptide
GEVVMEPYVKLVVKDYEDFFLMSLSSLETPV

SEQ ID NO: 44327 - protein, 32 aa, Artificial Sequence
  GFR-binding peptide
  MOD_RES (31), (32): Xaa is C or S
KVVMNPYVKLIVNNSSDFFLVSLSSLKTPAXX

SEQ ID NO: 44328 - protein, 35 aa, Artificial Sequence
  GFR-binding peptide
  MOD_RES (33), (34): Xaa is C or S
  MOD_RES (11), (12), (13), (14), (15): Xaa is A or G
  MOD_RES (16), (17), (18), (19): Xaa is A or G or is absent
RVVMNPYVKLXXXXXXXXXFFLVSLSSLKTPAXXP

SEQ ID NO: 44329 - protein, 39 aa, Artificial Sequence
  GFR-binding peptide
  MOD_RES (1), (35), (36): Xaa is C or S
  MOD_RES (13), (14), (15), (16), (17): Xaa is A or G
  MOD_RES (18), (19), (20), (21): Xaa is A or G or is absent
XESVAMGPYVKLXXXXXXXXXFFLISLSSLKTPVXXAKS

SEQ ID NO: 44330 - protein, 37 aa, Artificial Sequence
  GFR-binding peptide
  MOD_RES (33), (34): Xaa is C or S
EAVSMGEPYVKLTPVGMDDFFLVSLSSLKTPVXXAKG

SEQ ID NO: 44331 - protein, 39 aa, Artificial Sequence
  GFR-binding peptide
  MOD_RES (2), (34), (35): Xaa is C or S
AXSEVTMNPYVKLVVNKNEDFFLISLSSMKEPVXXPEPI

SEQ ID NO: 44332 - protein, 38 aa, Artificial Sequence
  GFR-binding peptide
  MOD_RES (2), (2): Xaa is C or S
AXELHEELRPYVKLLKPKKRVYEFFLVSLSSHHVRSPQ

SEQ ID NO: 44333 - protein, 32 aa, Artificial Sequence
  GFR-binding peptide
  MOD_RES (1), (1): Xaa is C or S
XARVVMNPYVKLIVNSSDDFFLVSLSSLQTPA

SEQ ID NO: 44334 - protein, 33 aa, Artificial Sequence
  GFR-binding peptide
  MOD_RES (12), (13), (14), (15), (16): Xaa is A or G
  MOD_RES (17), (18), (19), (20): Xaa is A or G or is absent
AKVVMNPYVKLXXXXXXXXXFFLVSLSSLKTPA

SEQ ID NO: 44335 - protein, 43 aa, Artificial Sequence
  GFR-binding peptide
  MOD_RES (2), (39): Xaa is C or S
  MOD_RES (15), (16), (17), (18), (19): Xaa is A or G
  MOD_RES (20), (21), (22), (23): Xaa is A or G or is absent
AXELHEELRPYVKLXXXXXXXXXFFLVSLSSHHVRSPQXKVSS

SEQ ID NO: 44336 - protein, 37 aa, Artificial Sequence
  GFR-binding peptide
  MOD_RES (31), (32): Xaa is C or S
RVVMNPYVKLIVNSSDDFFLVSLSSLKTPAXXPKPVY

SEQ ID NO: 44337 - protein, 37 aa, Artificial Sequence
  GFR-binding peptide
  MOD_RES (1), (34), (35): Xaa is C or S
  MOD_RES (12), (13), (14), (15), (16): Xaa is A or G
  MOD_RES (17), (18), (19), (20): Xaa is A or G or is absent
XSKVVMPYVKLXXXXXXXXXFFLISLSSLDQPVXXPS

SEQ ID NO: 44338 - protein, 39 aa, Artificial Sequence
  GFR-binding peptide
  MOD_RES (2), (4), (36), (37): Xaa is C or S
SXGXRDVVMGPYVKLIIQQKDNFFLMSLSSMKTPTXXPG

SEQ ID NO: 44339 - protein, 34 aa, Artificial Sequence
  GFR-binding peptide
  MOD_RES (1), (33), (34): Xaa is C or S
XGEVVMEPYVKLVVKDYEDFFLMSLSSLETPVXX

SEQ ID NO: 44340 - protein, 44 aa, Artificial Sequence
  GFR-binding peptide
  MOD_RES (2), (4), (38), (39): Xaa is C or S
  MOD_RES (16), (17), (18), (19), (20): Xaa is A or G
  MOD_RES (21), (22), (23), (24): Xaa is A or G or is absent
RXGXAEVVMDPYVKLXXXXXXXXXFFLISLSSLRAPVXXSAPAA

SEQ ID NO: 44341 - protein, 37 aa, Artificial Sequence
  GFR-binding peptide
  MOD_RES (2), (34), (35): Xaa is C or S
GXGEVVMEPYVKLVVKDYEDFFLMSLSSLETPVXXAK

SEQ ID NO: 44342 - protein, 36 aa, Artificial Sequence
  GFR-binding peptide
  MOD_RES (2), (2): Xaa is C or S
AXELHEELRPYVKLLKPKKRVYEFFLVSLSSHHVRS

SEQ ID NO: 44343 - protein, 34 aa, Artificial Sequence
  GFR-binding peptide
  MOD_RES (34), (34): Xaa is C or S
  MOD_RES (12), (13), (14), (15), (16): Xaa is A or G
  MOD_RES (17), (18), (19), (20): Xaa is A or G or is absent
ESVAMGPYVKLXXXXXXXXXFFLISLSSLKTPVX

SEQ ID NO: 44344 - protein, 36 aa, Artificial Sequence
  GFR-binding peptide
  MOD_RES (1), (3): Xaa is C or S
  MOD_RES (15), (16), (17), (18), (19): Xaa is A or G
  MOD_RES (20), (21), (22), (23): Xaa is A or G or is absent
XGXAEVVMDPYVKLXXXXXXXXXFFLISLSSLRAPV

SEQ ID NO: 44345 - protein, 38 aa, Artificial Sequence
  GFR-binding peptide
  MOD_RES (2), (36), (37): Xaa is C or S
  MOD_RES (14), (15), (16), (17), (18): Xaa is A or G
  MOD_RES (19), (20), (21), (22): Xaa is A or G or is absent
AXSEVTMNPYVKLXXXXXXXXXFFLISLSSMKEPVXXP

SEQ ID NO: 44346 - protein, 38 aa, Artificial Sequence
  GFR-binding peptide
  MOD_RES (2), (4), (38): Xaa is C or S
  MOD_RES (16), (17), (18), (19), (20): Xaa is A or G
  MOD_RES (21), (22), (23), (24): Xaa is A or G or is absent
RXGXESVAMGPYVKLXXXXXXXXXFFLISLSSLKTPVX

SEQ ID NO: 44347 - protein, 39 aa, Artificial Sequence
  GFR-binding peptide
  MOD_RES (33), (34): Xaa is C or S
  MOD_RES (11), (12), (13), (14), (15): Xaa is A or G
  MOD_RES (16), (17), (18), (19): Xaa is A or G or is absent
SKVIMPYVKLXXXXXXXXXFFLISLSSLDQSVXXPSASA

SEQ ID NO: 44348 - protein, 36 aa, Artificial Sequence
  GFR-binding peptide
  MOD_RES (32), (33): Xaa is C or S
GEVVMEPYVKLVVKDYEDFFLMSLSSLETPVXXAKP

SEQ ID NO: 44349 - protein, 39 aa, Artificial Sequence
  GFR-binding peptide
  MOD_RES (1), (3), (37), (38): Xaa is C or S
  MOD_RES (15), (16), (17), (18), (19): Xaa is A or G
  MOD_RES (20), (21), (22), (23): Xaa is A or G or is absent
XGXSEVVMDPYVKLXXXXXXXXXFFLISLSSLRTPVXXT

SEQ ID NO: 44350 - protein, 38 aa, Artificial Sequence
  GFR-binding peptide
  MOD_RES (1), (38): Xaa is C or S
  MOD_RES (14), (15), (16), (17), (18): Xaa is A or G
  MOD_RES (19), (20), (21), (22): Xaa is A or G or is absent
XELHEELRPYVKLXXXXXXXXXFFLVSLSSHHVRSPQX

SEQ ID NO: 44351 - protein, 36 aa, Artificial Sequence
  GFR-binding peptide
  MOD_RES (1), (3), (35), (36): Xaa is C or S
XGXARVVMNPYVKLIVNSSDDFFLVSLSSLQTPAXX

SEQ ID NO: 44352 - protein, 37 aa, Artificial Sequence
  GFR-binding peptide
  MOD_RES (2), (4), (37): Xaa is C or S
  MOD_RES (15), (16), (17), (18), (19): Xaa is A or G
  MOD_RES (20), (21), (22), (23): Xaa is A or G or is absent
SXKXSKVVMPYVKLXXXXXXXXXFFLISLSSLDQPVX

SEQ ID NO: 44353 - protein, 38 aa, Artificial Sequence
  GFR-binding peptide
  MOD_RES (32), (33): Xaa is C or S
ESVAMGPYVKLYTVVGKDFFLISLSSLKTPVXXAKSAK

SEQ ID NO: 44354 - protein, 34 aa, Artificial Sequence
  GFR-binding peptide
  MOD_RES (1), (1): Xaa is C or S
  MOD_RES (13), (14), (15), (16), (17): Xaa is A or G
  MOD_RES (18), (19), (20), (21): Xaa is A or G or is absent
XARVVMNPYVKLXXXXXXXXXFFLVSLSSLQTPA

SEQ ID NO: 44355 - protein, 41 aa, Artificial Sequence
  GFR-binding peptide
  MOD_RES (1), (35), (36): Xaa is C or S
  MOD_RES (13), (14), (15), (16), (17): Xaa is A or G
  MOD_RES (18), (19), (20), (21): Xaa is A or G or is absent
XAKVVMNPYVKLXXXXXXXXXFFLVSLSSLKTPAXXAKPVA

SEQ ID NO: 44356 - protein, 40 aa, Artificial Sequence
  GFR-binding peptide
  MOD_RES (2), (4), (36), (37): Xaa is C or S
HXGXARVVMNPYVKLIVNSSDDFFLVSLSSLQTPAXXPKP

SEQ ID NO: 44357 - protein, 35 aa, Artificial Sequence
  GFR-binding peptide
  MOD_RES (2), (34), (35): Xaa is C or S
GXAKVVMNPYVKLIVNNSSDFFLVSLSSLKTPAXX

SEQ ID NO: 44358 - protein, 39 aa, Artificial Sequence
  GFR-binding peptide
  MOD_RES (1), (35), (36): Xaa is C or S
  MOD_RES (13), (14), (15), (16), (17): Xaa is A or G
  MOD_RES (18), (19), (20), (21): Xaa is A or G or is absent
XAKVVMNPYVKLXXXXXXXXXFFLVSLSSLKTPAXXAKP

SEQ ID NO: 44359 - protein, 41 aa, Artificial Sequence
  GFR-binding peptide
  MOD_RES (1), (35), (36): Xaa is C or S
  MOD_RES (13), (14), (15), (16), (17): Xaa is A or G
  MOD_RES (18), (19), (20), (21): Xaa is A or G or is absent
XSRVVMNPYVKLXXXXXXXXXFFLVSLSSLKTPAXXPKPVH

SEQ ID NO: 44360 - protein, 35 aa, Artificial Sequence
  GFR-binding peptide
  MOD_RES (1), (33), (34): Xaa is C or S
XSEVVMDPYVKLVVNNASDFFLISLSSLRTPVXXT

SEQ ID NO: 44361 - protein, 34 aa, Artificial Sequence
  GFR-binding peptide
  MOD_RES (33), (34): Xaa is C or S
  MOD_RES (11), (12), (13), (14), (15): Xaa is A or G
  MOD_RES (16), (17), (18), (19): Xaa is A or G or is absent
EVTMNPYVKLXXXXXXXXXFFLISLSSMKEPVXX

SEQ ID NO: 44362 - protein, 39 aa, Artificial Sequence
  GFR-binding peptide
  MOD_RES (33), (34): Xaa is C or S
  MOD_RES (11), (12), (13), (14), (15): Xaa is A or G
  MOD_RES (16), (17), (18), (19): Xaa is A or G or is absent
DVVMGPYVKLXXXXXXXXXFFLMSLSSMKTPTXXPGASG

SEQ ID NO: 44363 - protein, 35 aa, Artificial Sequence
  GFR-binding peptide
  MOD_RES (33), (34): Xaa is C or S
  MOD_RES (11), (12), (13), (14), (15): Xaa is A or G
  MOD_RES (16), (17), (18), (19): Xaa is A or G or is absent
EVVMEPYVKLXXXXXXXXXFFLMSLSSLETPVXXA

SEQ ID NO: 44364 - protein, 35 aa, Artificial Sequence
  GFR-binding peptide
  MOD_RES (1), (35): Xaa is C or S
  MOD_RES (13), (14), (15), (16), (17): Xaa is A or G
  MOD_RES (18), (19), (20), (21): Xaa is A or G or is absent
XRDVVMGPYVKLXXXXXXXXXFFLMSLSSMKTPTX

SEQ ID NO: 44365 - protein, 36 aa, Artificial Sequence
  GFR-binding peptide
  MOD_RES (34), (35): Xaa is C or S
  MOD_RES (12), (13), (14), (15), (16): Xaa is A or G
  MOD_RES (17), (18), (19), (20): Xaa is A or G or is absent
ARVVMNPYVKLXXXXXXXXXFFLVSLSSLQTPAXXP

SEQ ID NO: 44366 - protein, 37 aa, Artificial Sequence
  GFR-binding peptide
  MOD_RES (1), (35), (36): Xaa is C or S
  MOD_RES (13), (14), (15), (16), (17): Xaa is A or G
  MOD_RES (18), (19), (20), (21): Xaa is A or G or is absent
XRDVVMGPYVKLXXXXXXXXXFFLMSLSSMKTPTXXP

SEQ ID NO: 44367 - protein, 37 aa, Artificial Sequence
  GFR-binding peptide
  MOD_RES (1), (35): Xaa is C or S
  MOD_RES (13), (14), (15), (16), (17): Xaa is A or G
  MOD_RES (18), (19), (20), (21): Xaa is A or G or is absent
XKNHQLFPYVKLXXXXXXXXXFFLMSLSSEETPVXEL

SEQ ID NO: 44368 - protein, 36 aa, Artificial Sequence
  GFR-binding peptide
  MOD_RES (1), (3), (35), (36): Xaa is C or S
XGXAKVVMNPYVKLIVNNSSDFFLVSLSSLKTPAXX

SEQ ID NO: 44369 - protein, 38 aa, Artificial Sequence
  GFR-binding peptide
  MOD_RES (2), (35), (36): Xaa is C or S
  MOD_RES (13), (14), (15), (16), (17): Xaa is A or G
  MOD_RES (18), (19), (20), (21): Xaa is A or G or is absent
KXSRVIMPYVKLXXXXXXXXXFFLISLSSLAQPVXXPA

SEQ ID NO: 44370 - protein, 41 aa, Artificial Sequence
  GFR-binding peptide
  MOD_RES (2), (4), (35), (36): Xaa is C or S
SXKXSKVIMPYVKLIKPTKGILFFISLSSLDQSVXXPSASA

SEQ ID NO: 44371 - protein, 40 aa, Artificial Sequence
  GFR-binding peptide
  MOD_RES (1), (3), (34), (35): Xaa is C or S
XKXSRVIMPYVKLVKPKRGVLFFISLSSLAQPVXXPAASA

SEQ ID NO: 44372 - protein, 41 aa, Artificial Sequence
  GFR-binding peptide
  MOD_RES (1), (35), (36): Xaa is C or S
  MOD_RES (13), (14), (15), (16), (17): Xaa is A or G
  MOD_RES (18), (19), (20), (21): Xaa is A or G or is absent
XSEVTMNPYVKLXXXXXXXXXFFLISLSSMKEPVXXPEPIG

SEQ ID NO: 44373 - protein, 41 aa, Artificial Sequence
  GFR-binding peptide
  MOD_RES (2), (35), (36): Xaa is C or S
  MOD_RES (13), (14), (15), (16), (17): Xaa is A or G
  MOD_RES (18), (19), (20), (21): Xaa is A or G or is absent
KXSKVVMPYVKLXXXXXXXXXFFLISLSSLDQPVXXPSASA

SEQ ID NO: 44374 - protein, 42 aa, Artificial Sequence
  GFR-binding peptide
  MOD_RES (2), (36), (37): Xaa is C or S
  MOD_RES (14), (15), (16), (17), (18): Xaa is A or G
  MOD_RES (19), (20), (21), (22): Xaa is A or G or is absent
GXARVVMNPYVKLXXXXXXXXXFFLVSLSSLQTPAXXPKPVT

SEQ ID NO: 44375 - protein, 36 aa, Artificial Sequence
  GFR-binding peptide
  MOD_RES (2), (4), (35), (36): Xaa is C or S
SXKXSKVIMPYVKLIKPTKGILFFISLSSLDQSVXX

SEQ ID NO: 44376 - protein, 36 aa, Artificial Sequence
  GFR-binding peptide
  MOD_RES (31), (32): Xaa is C or S
RVVMNPYVKLIVNSSDDFFLVSLSSLKTPAXXPKPV

SEQ ID NO: 44377 - protein, 33 aa, Artificial Sequence
  GFR-binding peptide
  MOD_RES (2), (2): Xaa is C or S
GXARVVMNPYVKLIVNSSDDFFLVSLSSLQTPA

SEQ ID NO: 44378 - protein, 40 aa, Artificial Sequence
  GFR-binding peptide
  MOD_RES (2), (34), (35): Xaa is C or S
GXGEVVMEPYVKLVVKDYEDFFLMSLSSLETPVXXAKPIS

SEQ ID NO: 44379 - protein, 38 aa, Artificial Sequence
  GFR-binding peptide
  MOD_RES (2), (4), (35), (36): Xaa is C or S
LXGXEEVIMPYVKLLLVRGNDFFLMSLSSTKVPAXXTS

SEQ ID NO: 44380 - protein, 40 aa, Artificial Sequence
  GFR-binding peptide
  MOD_RES (1), (36), (37): Xaa is C or S
  MOD_RES (14), (15), (16), (17), (18): Xaa is A or G
  MOD_RES (19), (20), (21), (22): Xaa is A or G or is absent
XEAVSMGEPYVKLXXXXXXXXXFFLVSLSSLKTPVXXAKG

SEQ ID NO: 44381 - protein, 36 aa, Artificial Sequence
  GFR-binding peptide
  MOD_RES (33), (34): Xaa is C or S
  MOD_RES (11), (12), (13), (14), (15): Xaa is A or G
  MOD_RES (16), (17), (18), (19): Xaa is A or G or is absent
RVVMNPYVKLXXXXXXXXXFFLVSLSSLQTPAXXPK

SEQ ID NO: 44382 - protein, 34 aa, Artificial Sequence
  GFR-binding peptide
  MOD_RES (34), (34): Xaa is C or S
  MOD_RES (12), (13), (14), (15), (16): Xaa is A or G
  MOD_RES (17), (18), (19), (20): Xaa is A or G or is absent
KNHQLFPYVKLXXXXXXXXXFFLMSLSSEETPVX

SEQ ID NO: 44383 - protein, 33 aa, Artificial Sequence
  GFR-binding peptide
  MOD_RES (2), (2): Xaa is C or S
GXAEVVMDPYVKLVVNNAADFFLISLSSLRAPV

SEQ ID NO: 44384 - protein, 38 aa, Artificial Sequence
  GFR-binding peptide
  MOD_RES (1), (3), (36), (37): Xaa is C or S
  MOD_RES (14), (15), (16), (17), (18): Xaa is A or G
  MOD_RES (19), (20), (21), (22): Xaa is A or G or is absent
XKXSKVIMPYVKLXXXXXXXXXFFLISLSSLDQSVXXP

SEQ ID NO: 44385 - protein, 42 aa, Artificial Sequence
  GFR-binding peptide
  MOD_RES (2), (4), (38), (39): Xaa is C or S
  MOD_RES (16), (17), (18), (19), (20): Xaa is A or G
  MOD_RES (21), (22), (23), (24): Xaa is A or G or is absent
RXGXGEVVMEPYVKLXXXXXXXXXFFLMSLSSLETPVXXAKP

SEQ ID NO: 44386 - protein, 36 aa, Artificial Sequence
  GFR-binding peptide
  MOD_RES (2), (2): Xaa is C or S
  MOD_RES (15), (16), (17), (18), (19): Xaa is A or G
  MOD_RES (20), (21), (22), (23): Xaa is A or G or is absent
GXEAVSMGEPYVKLXXXXXXXXXFFLVSLSSLKTPV

SEQ ID NO: 44387 - protein, 39 aa, Artificial Sequence
  GFR-binding peptide
  MOD_RES (2), (4): Xaa is C or S
  MOD_RES (17), (18), (19), (20), (21): Xaa is A or G
  MOD_RES (22), (23), (24), (25): Xaa is A or G or is absent
AXAXELHEELRPYVKLXXXXXXXXXFFLVSLSSHHVRSP

SEQ ID NO: 44388 - protein, 35 aa, Artificial Sequence
  GFR-binding peptide
  MOD_RES (13), (14), (15), (16), (17): Xaa is A or G
  MOD_RES (18), (19), (20), (21): Xaa is A or G or is absent
ELHEELRPYVKLXXXXXXXXXFFLVSLSSHHVRSP

SEQ ID NO: 44389 - protein, 37 aa, Artificial Sequence
  GFR-binding peptide
  MOD_RES (1), (35), (36): Xaa is C or S
  MOD_RES (13), (14), (15), (16), (17): Xaa is A or G
  MOD_RES (18), (19), (20), (21): Xaa is A or G or is absent
XAEVVMDPYVKLXXXXXXXXXFFLISLSSLRAPVXXS

SEQ ID NO: 44390 - protein, 40 aa, Artificial Sequence
  GFR-binding peptide
  MOD_RES (34), (35): Xaa is C or S
  MOD_RES (12), (13), (14), (15), (16): Xaa is A or G
  MOD_RES (17), (18), (19), (20): Xaa is A or G or is absent
ESVAMGPYVKLXXXXXXXXXFFLISLSSLKTPVXXAKSAK

SEQ ID NO: 44391 - protein, 33 aa, Artificial Sequence
  GFR-binding peptide
  MOD_RES (31), (32): Xaa is C or S
SVAMGPYVKLYTVVGKDFFLISLSSLKTPVXXA

SEQ ID NO: 44392 - protein, 38 aa, Artificial Sequence
  GFR-binding peptide
  MOD_RES (2), (36), (37): Xaa is C or S
  MOD_RES (14), (15), (16), (17), (18): Xaa is A or G
  MOD_RES (19), (20), (21), (22): Xaa is A or G or is absent
GXAEVVMDPYVKLXXXXXXXXXFFLISLSSLRAPVXXS

SEQ ID NO: 44393 - protein, 38 aa, Artificial Sequence
  GFR-binding peptide
  MOD_RES (2), (35), (36): Xaa is C or S
  MOD_RES (13), (14), (15), (16), (17): Xaa is A or G
  MOD_RES (18), (19), (20), (21): Xaa is A or G or is absent
KXSKVIMPYVKLXXXXXXXXXFFLISLSSLDQSVXXPS

SEQ ID NO: 44394 - protein, 40 aa, Artificial Sequence
  GFR-binding peptide
  MOD_RES (1), (35): Xaa is C or S
  MOD_RES (13), (14), (15), (16), (17): Xaa is A or G
  MOD_RES (18), (19), (20), (21): Xaa is A or G or is absent
XSRVVMNPYVKLXXXXXXXXXFFLVSLSSLKTPAXTPKTV

SEQ ID NO: 44395 - protein, 37 aa, Artificial Sequence
  GFR-binding peptide
  MOD_RES (2), (4), (36), (37): Xaa is C or S
RXGXAEVVMDPYVKLVVNNAADFFLISLSSLRAPVXX

SEQ ID NO: 44396 - protein, 44 aa, Artificial Sequence
  GFR-binding peptide
  MOD_RES (2), (4), (38), (39): Xaa is C or S
  MOD_RES (16), (17), (18), (19), (20): Xaa is A or G
  MOD_RES (21), (22), (23), (24): Xaa is A or G or is absent
RXGXESVAMGPYVKLXXXXXXXXXFFLISLSSLKTPVXXAKSAK

SEQ ID NO: 44397 - protein, 41 aa, Artificial Sequence
  GFR-binding peptide
  MOD_RES (2), (4), (38), (39): Xaa is C or S
  MOD_RES (16), (17), (18), (19), (20): Xaa is A or G
  MOD_RES (21), (22), (23), (24): Xaa is A or G or is absent
RXGXAEVVMDPYVKLXXXXXXXXXFFLISLSSLRAPVXXSA

SEQ ID NO: 44398 - protein, 41 aa, Artificial Sequence
  GFR-binding peptide
  MOD_RES (1), (3), (35), (36): Xaa is C or S
XGXSRVVMNPYVKLIVNSSDDFFLVSLSSLKTPAXXPKPVH

SEQ ID NO: 44399 - protein, 40 aa, Artificial Sequence
  GFR-binding peptide
  MOD_RES (2), (4), (36), (37): Xaa is C or S
RXGXGEVVMEPYVKLVVKDYEDFFLMSLSSLETPVXXAKP

SEQ ID NO: 44400 - protein, 40 aa, Artificial Sequence
  GFR-binding peptide
  MOD_RES (2), (35), (36): Xaa is C or S
  MOD_RES (13), (14), (15), (16), (17): Xaa is A or G
  MOD_RES (18), (19), (20), (21): Xaa is A or G or is absent
GXEEVIMPYVKLXXXXXXXXXFFLMSLSSTKVPAXXTSPV

SEQ ID NO: 44401 - protein, 35 aa, Artificial Sequence
  GFR-binding peptide
  MOD_RES (2), (34), (35): Xaa is C or S
AXSEVTMNPYVKLVVNKNEDFFLISLSSMKEPVXX

SEQ ID NO: 44402 - protein, 39 aa, Artificial Sequence
  GFR-binding peptide
  MOD_RES (1), (3), (35): Xaa is C or S
XGXSRVVMNPYVKLIVNSSDDFFLVSLSSLKTPAXTPKT

SEQ ID NO: 44403 - protein, 41 aa, Artificial Sequence
  GFR-binding peptide
  MOD_RES (1), (3), (35), (36): Xaa is C or S
XGXRDVVMGPYVKLIIQQKDNFFLMSLSSMKTPTXXPGASG

SEQ ID NO: 44404 - protein, 33 aa, Artificial Sequence
  GFR-binding peptide
  MOD_RES (2), (2): Xaa is C or S
GXESVAMGPYVKLYTVVGKDFFLISLSSLKTPV

SEQ ID NO: 44405 - protein, 33 aa, Artificial Sequence
  GFR-binding peptide
  MOD_RES (2), (2): Xaa is C or S
GXSRVVMNPYVKLIVNSSDDFFLVSLSSLKTPA

SEQ ID NO: 44406 - protein, 36 aa, Artificial Sequence
  GFR-binding peptide
  MOD_RES (1), (3): Xaa is C or S
  MOD_RES (15), (16), (17), (18), (19): Xaa is A or G
  MOD_RES (20), (21), (22), (23): Xaa is A or G or is absent
XEXKNHQLFPYVKLXXXXXXXXXFFLMSLSSEETPV

SEQ ID NO: 44407 - protein, 36 aa, Artificial Sequence
  GFR-binding peptide
  MOD_RES (1), (3), (35), (36): Xaa is C or S
XGXSEVVMDPYVKLVVNNASDFFLISLSSLRTPVXX

SEQ ID NO: 44408 - protein, 41 aa, Artificial Sequence
  GFR-binding peptide
  MOD_RES (2), (35), (36): Xaa is C or S
  MOD_RES (13), (14), (15), (16), (17): Xaa is A or G
  MOD_RES (18), (19), (20), (21): Xaa is A or G or is absent
GXEEVIMPYVKLXXXXXXXXXFFLMSLSSTKVPAXXTSPVR

SEQ ID NO: 44409 - protein, 40 aa, Artificial Sequence
  GFR-binding peptide
  MOD_RES (1), (34), (35): Xaa is C or S
XEAVSMGEPYVKLTPVGMDDFFLVSLSSLKTPVXXAKGVK

SEQ ID NO: 44410 - protein, 37 aa, Artificial Sequence
  GFR-binding peptide
  MOD_RES (34), (35): Xaa is C or S
  MOD_RES (12), (13), (14), (15), (16): Xaa is A or G
  MOD_RES (17), (18), (19), (20): Xaa is A or G or is absent
AKVVMNPYVKLXXXXXXXXXFFLVSLSSLKTPAXXAK

SEQ ID NO: 44411 - protein, 33 aa, Artificial Sequence
  GFR-binding peptide
  MOD_RES (2), (33): Xaa is C or S
KXSKVIMPYVKLIKPTKGILFFISLSSLDQSVX

SEQ ID NO: 44412 - protein, 40 aa, Artificial Sequence
  GFR-binding peptide
  MOD_RES (1), (35), (36): Xaa is C or S
  MOD_RES (13), (14), (15), (16), (17): Xaa is A or G
  MOD_RES (18), (19), (20), (21): Xaa is A or G or is absent
XARVVMNPYVKLXXXXXXXXXFFLVSLSSLQTPAXXPKPV

SEQ ID NO: 44413 - protein, 36 aa, Artificial Sequence
  GFR-binding peptide
  MOD_RES (1), (3): Xaa is C or S
  MOD_RES (15), (16), (17), (18), (19): Xaa is A or G
  MOD_RES (20), (21), (22), (23): Xaa is A or G or is absent
XGXARVVMNPYVKLXXXXXXXXXFFLVSLSSLQTPA

SEQ ID NO: 44414 - protein, 37 aa, Artificial Sequence
  GFR-binding peptide
  MOD_RES (1), (3), (37): Xaa is C or S
XEXKNHQLFPYVKLHQGQHPKIRFFLMSLSSEETPVX

SEQ ID NO: 44415 - protein, 31 aa, Artificial Sequence
  GFR-binding peptide
  MOD_RES (31), (31): Xaa is C or S
EVVMDPYVKLVVNNAADFFLISLSSLRAPVX

SEQ ID NO: 44416 - protein, 33 aa, Artificial Sequence
  GFR-binding peptide
  MOD_RES (12), (13), (14), (15), (16): Xaa is A or G
  MOD_RES (17), (18), (19), (20): Xaa is A or G or is absent
SRVVMNPYVKLXXXXXXXXXFFLVSLSSLKTPA

SEQ ID NO: 44417 - protein, 30 aa, Artificial Sequence; identical to SEQ ID NO: 1733
  GFR-binding peptide

SEQ ID NO: 44418 - protein, 43 aa, Artificial Sequence
  GFR-binding peptide
  MOD_RES (1), (3), (37), (38): Xaa is C or S
  MOD_RES (15), (16), (17), (18), (19): Xaa is A or G
  MOD_RES (20), (21), (22), (23): Xaa is A or G or is absent
XGXSRVVMNPYVKLXXXXXXXXXFFLVSLSSLKTPAXXPKPVY

SEQ ID NO: 44419 - protein, 37 aa, Artificial Sequence
  GFR-binding peptide
  MOD_RES (1), (35), (36): Xaa is C or S
  MOD_RES (13), (14), (15), (16), (17): Xaa is A or G
  MOD_RES (18), (19), (20), (21): Xaa is A or G or is absent
XARVVMNPYVKLXXXXXXXXXFFLVSLSSLQTPAXXP

SEQ ID NO: 44420 - protein, 36 aa, Artificial Sequence
  GFR-binding peptide
  MOD_RES (1), (33), (34): Xaa is C or S
XAKVVMNPYVKLIVNNSSDFFLVSLSSLKTPAXXAK

SEQ ID NO: 44421 - protein, 36 aa, Artificial Sequence
  GFR-binding peptide
  MOD_RES (34), (35): Xaa is C or S
  MOD_RES (12), (13), (14), (15), (16): Xaa is A or G
  MOD_RES (17), (18), (19), (20): Xaa is A or G or is absent
GEVVMEPYVKLXXXXXXXXXFFLMSLSSLETPVXXA

SEQ ID NO: 44422 - protein, 37 aa, Artificial Sequence
  GFR-binding peptide
  MOD_RES (34), (35): Xaa is C or S
  MOD_RES (12), (13), (14), (15), (16): Xaa is A or G
  MOD_RES (17), (18), (19), (20): Xaa is A or G or is absent
SRVVMNPYVKLXXXXXXXXXFFLVSLSSLKTPAXXPK

SEQ ID NO: 44423 - protein, 38 aa, Artificial Sequence
  GFR-binding peptide
  MOD_RES (1), (3), (37): Xaa is C or S
XEXKNHQLFPYVKLHQGQHPKIRFFLMSLSSEETPVXE

SEQ ID NO: 44424 - protein, 41 aa, Artificial Sequence
  GFR-binding peptide
  MOD_RES (2), (4), (38): Xaa is C or S
  MOD_RES (16), (17), (18), (19), (20): Xaa is A or G
  MOD_RES (21), (22), (23), (24): Xaa is A or G or is absent
RXEXKNHQLFPYVKLXXXXXXXXXFFLMSLSSEETPVXELG

SEQ ID NO: 44425 - protein, 36 aa, Artificial Sequence
  GFR-binding peptide
  MOD_RES (2), (35), (36): Xaa is C or S
  MOD_RES (13), (14), (15), (16), (17): Xaa is A or G
  MOD_RES (18), (19), (20), (21): Xaa is A or G or is absent
KXSKVVMPYVKLXXXXXXXXXFFLISLSSLDQPVXX

SEQ ID NO: 44426 - protein, 34 aa, Artificial Sequence
  GFR-binding peptide
  MOD_RES (13), (14), (15), (16), (17): Xaa is A or G
  MOD_RES (18), (19), (20), (21): Xaa is A or G or is absent
ELHEELRPYVKLXXXXXXXXXFFLVSLSSHHVRS

SEQ ID NO: 44427 - protein, 39 aa, Artificial Sequence
  GFR-binding peptide
  MOD_RES (2), (4), (37), (38): Xaa is C or S
  MOD_RES (15), (16), (17), (18), (19): Xaa is A or G
  MOD_RES (20), (21), (22), (23): Xaa is A or G or is absent
LXGXEEVIMPYVKLXXXXXXXXXFFLMSLSSTKVPAXXT

SEQ ID NO: 44428 - protein, 38 aa, Artificial Sequence
  GFR-binding peptide
  MOD_RES (2), (34), (35): Xaa is C or S
GXSRVVMNPYVKLIVNSSDDFFLVSLSSLKTPAXXPKP

SEQ ID NO: 44429 - protein, 34 aa, Artificial Sequence
  GFR-binding peptide
  MOD_RES (33), (34): Xaa is C or S
  MOD_RES (11), (12), (13), (14), (15): Xaa is A or G
  MOD_RES (16), (17), (18), (19): Xaa is A or G or is absent
RVVMNPYVKLXXXXXXXXXFFLVSLSSLQTPAXX

SEQ ID NO: 44430 - protein, 39 aa, Artificial Sequence
  GFR-binding peptide
  MOD_RES (2), (4), (38), (39): Xaa is C or S
  MOD_RES (16), (17), (18), (19), (20): Xaa is A or G
  MOD_RES (21), (22), (23), (24): Xaa is A or G or is absent
HXGXAKVVMNPYVKLXXXXXXXXXFFLVSLSSLKTPAXX

SEQ ID NO: 44431 - protein, 41 aa, Artificial Sequence
  GFR-binding peptide
  MOD_RES (2), (36): Xaa is C or S
EXKNHQLFPYVKLHQGQHPKIRFFLMSLSSEETPVXELGED

SEQ ID NO: 44432 - protein, 37 aa, Artificial Sequence
  GFR-binding peptide
  MOD_RES (2), (4): Xaa is C or S
  MOD_RES (16), (17), (18), (19), (20): Xaa is A or G
  MOD_RES (21), (22), (23), (24): Xaa is A or G or is absent
HXGXARVVMNPYVKLXXXXXXXXXFFLVSLSSLQTPA

SEQ ID NO: 44433 - protein, 36 aa, Artificial Sequence
  GFR-binding peptide
  MOD_RES (1), (35), (36): Xaa is C or S
  MOD_RES (13), (14), (15), (16), (17): Xaa is A or G
  MOD_RES (18), (19), (20), (21): Xaa is A or G or is absent
XGEVVMEPYVKLXXXXXXXXXFFLMSLSSLETPVXX

SEQ ID NO: 44434 - protein, 39 aa, Artificial Sequence
  GFR-binding peptide
  MOD_RES (2), (4), (36), (37): Xaa is C or S
RXGXAEVVMDPYVKLVVNNAADFFLISLSSLRAPVXXSA

SEQ ID NO: 44435 - protein, 31 aa, Artificial Sequence
  GFR-binding peptide
  MOD_RES (1), (1): Xaa is C or S
XSRVIMPYVKLVKPKRGVLFFISLSSLAQPV

SEQ ID NO: 44436 - protein, 38 aa, Artificial Sequence
  GFR-binding peptide
  MOD_RES (2), (36), (37): Xaa is C or S
  MOD_RES (14), (15), (16), (17), (18): Xaa is A or G
  MOD_RES (19), (20), (21), (22): Xaa is A or G or is absent
GXESVAMGPYVKLXXXXXXXXXFFLISLSSLKTPVXXA

SEQ ID NO: 44437 - protein, 35 aa, Artificial Sequence
  GFR-binding peptide
  MOD_RES (34), (35): Xaa is C or S
  MOD_RES (12), (13), (14), (15), (16): Xaa is A or G
  MOD_RES (17), (18), (19), (20): Xaa is A or G or is absent
RDVVMGPYVKLXXXXXXXXXFFLMSLSSMKTPTXX

SEQ ID NO: 44438 - protein, 39 aa, Artificial Sequence
  GFR-binding peptide
  MOD_RES (1), (3), (36), (37): Xaa is C or S
  MOD_RES (14), (15), (16), (17), (18): Xaa is A or G
  MOD_RES (19), (20), (21), (22): Xaa is A or G or is absent
XKXSKVVMPYVKLXXXXXXXXXFFLISLSSLDQPVXXPS

SEQ ID NO: 44439 - protein, 35 aa, Artificial Sequence
  GFR-binding peptide
  MOD_RES (1), (35): Xaa is C or S
  MOD_RES (13), (14), (15), (16), (17): Xaa is A or G
  MOD_RES (18), (19), (20), (21): Xaa is A or G or is absent
XGEVVMEPYVKLXXXXXXXXXFFLMSLSSLETPVX

SEQ ID NO: 44440 - protein, 38 aa, Artificial Sequence
  GFR-binding peptide
  MOD_RES (34), (35): Xaa is C or S
  MOD_RES (12), (13), (14), (15), (16): Xaa is A or G
  MOD_RES (17), (18), (19), (20): Xaa is A or G or is absent
ESVAMGPYVKLXXXXXXXXXFFLISLSSLKTPVXXAKS

SEQ ID NO: 44441 - protein, 40 aa, Artificial Sequence
  GFR-binding peptide
  MOD_RES (1), (35), (36): Xaa is C or S
  MOD_RES (13), (14), (15), (16), (17): Xaa is A or G
  MOD_RES (18), (19), (20), (21): Xaa is A or G or is absent
XSEVTMNPYVKLXXXXXXXXXFFLISLSSMKEPVXXPEPI

SEQ ID NO: 44442 - protein, 36 aa, Artificial Sequence
  GFR-binding peptide
  MOD_RES (33), (34): Xaa is C or S
  MOD_RES (11), (12), (13), (14), (15): Xaa is A or G
  MOD_RES (16), (17), (18), (19): Xaa is A or G or is absent
RVVMNPYVKLXXXXXXXXXFFLVSLSSLKTPAXXPK

SEQ ID NO: 44443 - protein, 39 aa, Artificial Sequence
  GFR-binding peptide
  MOD_RES (1), (35), (36): Xaa is C or S
  MOD_RES (13), (14), (15), (16), (17): Xaa is A or G
  MOD_RES (18), (19), (20), (21): Xaa is A or G or is absent
XAEVVMDPYVKLXXXXXXXXXFFLISLSSLRAPVXXSAP

SEQ ID NO: 44444 - protein, 41 aa, Artificial Sequence
  GFR-binding peptide
  MOD_RES (2), (4), (36), (37): Xaa is C or S
RXGXGEVVMEPYVKLVVKDYEDFFLMSLSSLETPVXXAKPI

SEQ ID NO: 44445 - protein, 33 aa, Artificial Sequence
  GFR-binding peptide
  MOD_RES (1), (33): Xaa is C or S
XAKVVMNPYVKLIVNNSSDFFLVSLSSLKTPAX

SEQ ID NO: 44446 - protein, 31 aa, Artificial Sequence
  GFR-binding peptide
AKVVMNPYVKLIVNNSSDFFLVSLSSLKTPA

SEQ ID NO: 44447 - protein, 38 aa, Artificial Sequence
  GFR-binding peptide
  MOD_RES (2), (33), (34): Xaa is C or S
KXSKVIMPYVKLIKPTKGILFFISLSSLDQSVXXPSAS

SEQ ID NO: 44448 - protein, 36 aa, Artificial Sequence
  GFR-binding peptide
  MOD_RES (33), (34): Xaa is C or S
  MOD_RES (11), (12), (13), (14), (15): Xaa is A or G
  MOD_RES (16), (17), (18), (19): Xaa is A or G or is absent
EVVMDPYVKLXXXXXXXXXFFLISLSSLRAPVXXSA

SEQ ID NO: 44449 - protein, 40 aa, Artificial Sequence
  GFR-binding peptide
  MOD_RES (2), (4), (38), (39): Xaa is C or S
  MOD_RES (16), (17), (18), (19), (20): Xaa is A or G
  MOD_RES (21), (22), (23), (24): Xaa is A or G or is absent
RXGXGEVVMEPYVKLXXXXXXXXXFFLMSLSSLETPVXXA

SEQ ID NO: 44450 - protein, 31 aa, Artificial Sequence
  GFR-binding peptide
SEVTMNPYVKLVVNKNEDFFLISLSSMKEPV

SEQ ID NO: 44451 - protein, 36 aa, Artificial Sequence
  GFR-binding peptide
  MOD_RES (31), (32): Xaa is C or S
DVVMGPYVKLIIQQKDNFFLMSLSSMKTPTXXPGAS

SEQ ID NO: 44452 - protein, 39 aa, Artificial Sequence
  GFR-binding peptide
  MOD_RES (1), (34), (35): Xaa is C or S
  MOD_RES (12), (13), (14), (15), (16): Xaa is A or G
  MOD_RES (17), (18), (19), (20): Xaa is A or G or is absent
XEEVIMPYVKLXXXXXXXXXFFLMSLSSTKVPAXXTSPV

SEQ ID NO: 44453 - protein, 35 aa, Artificial Sequence
  GFR-binding peptide
  MOD_RES (1), (35): Xaa is C or S
  MOD_RES (13), (14), (15), (16), (17): Xaa is A or G
  MOD_RES (18), (19), (20), (21): Xaa is A or G or is absent
XESVAMGPYVKLXXXXXXXXXFFLISLSSLKTPVX

SEQ ID NO: 44454 - protein, 41 aa, Artificial Sequence
  GFR-binding peptide
  MOD_RES (1), (35), (36): Xaa is C or S
  MOD_RES (13), (14), (15), (16), (17): Xaa is A or G
  MOD_RES (18), (19), (20), (21): Xaa is A or G or is absent
XESVAMGPYVKLXXXXXXXXXFFLISLSSLKTPVXXAKSAK

SEQ ID NO: 44455 - protein, 43 aa, Artificial Sequence
  GFR-binding peptide
  MOD_RES (2), (4), (38), (39): Xaa is C or S
  MOD_RES (16), (17), (18), (19), (20): Xaa is A or G
  MOD_RES (21), (22), (23), (24): Xaa is A or G or is absent
SXGXRDVVMGPYVKLXXXXXXXXXFFLMSLSSMKTPTXXPGAS

SEQ ID NO: 44456 - protein, 39 aa, Artificial Sequence
  GFR-binding peptide
  MOD_RES (2), (39): Xaa is C or S
AXELHEELRPYVKLLKPKKRVYEFFLVSLSSHHVRSPQX

SEQ ID NO: 44457 - protein, 39 aa, Artificial Sequence
  GFR-binding peptide
  MOD_RES (2), (4), (37), (38): Xaa is C or S
  MOD_RES (15), (16), (17), (18), (19): Xaa is A or G
  MOD_RES (20), (21), (22), (23): Xaa is A or G or is absent
SXKXSKVIMPYVKLXXXXXXXXXFFLISLSSLDQSVXXP

SEQ ID NO: 44458 - protein, 39 aa, Artificial Sequence
  GFR-binding peptide
  MOD_RES (1), (33), (34): Xaa is C or S
XAEVVMDPYVKLVVNNAADFFLISLSSLRAPVXXSAPAA

SEQ ID NO: 44459 - protein, 37 aa, Artificial Sequence
  GFR-binding peptide
  MOD_RES (2), (35), (36): Xaa is C or S
  MOD_RES (13), (14), (15), (16), (17): Xaa is A or G
  MOD_RES (18), (19), (20), (21): Xaa is A or G or is absent
GXEEVIMPYVKLXXXXXXXXXFFLMSLSSTKVPAXXT

SEQ ID NO: 44460 - protein, 34 aa, Artificial Sequence
  GFR-binding peptide
  MOD_RES (1), (3): Xaa is C or S
XGXSEVVMDPYVKLVVNNASDFFLISLSSLRTPV

SEQ ID NO: 44461 - protein, 37 aa, Artificial Sequence
  GFR-binding peptide
  MOD_RES (32), (33): Xaa is C or S
AKVVMNPYVKLIVNNSSDFFLVSLSSLKTPAXXAKPV

SEQ ID NO: 44462 - protein, 39 aa, Artificial Sequence
  GFR-binding peptide
  MOD_RES (2), (36), (37): Xaa is C or S
  MOD_RES (14), (15), (16), (17), (18): Xaa is A or G
  MOD_RES (19), (20), (21), (22): Xaa is A or G or is absent
GXAEVVMDPYVKLXXXXXXXXXFFLISLSSLRAPVXXSA

SEQ ID NO: 44463 - protein, 37 aa, Artificial Sequence
  GFR-binding peptide
  MOD_RES (2), (4), (37): Xaa is C or S
  MOD_RES (15), (16), (17), (18), (19): Xaa is A or G
  MOD_RES (20), (21), (22), (23): Xaa is A or G or is absent
SXKXSRVIMPYVKLXXXXXXXXXFFLISLSSLAQPVX

SEQ ID NO: 44464 - protein, 38 aa, Artificial Sequence
  GFR-binding peptide
  MOD_RES (2), (4), (36), (37): Xaa is C or S
HXGXAKVVMNPYVKLIVNNSSDFFLVSLSSLKTPAXXA

SEQ ID NO: 44465 - protein, 37 aa, Artificial Sequence
  GFR-binding peptide
  MOD_RES (1), (34), (35): Xaa is C or S
  MOD_RES (12), (13), (14), (15), (16): Xaa is A or G
  MOD_RES (17), (18), (19), (20): Xaa is A or G or is absent
XSKVIMPYVKLXXXXXXXXXFFLISLSSLDQSVXXPS

SEQ ID NO: 44466 - protein, 36 aa, Artificial Sequence
  GFR-binding peptide
  MOD_RES (1), (1): Xaa is C or S
  MOD_RES (14), (15), (16), (17), (18): Xaa is A or G
  MOD_RES (19), (20), (21), (22): Xaa is A or G or is absent
XELHEELRPYVKLXXXXXXXXXFFLVSLSSHHVRSP

SEQ ID NO: 44467 - protein, 42 aa, Artificial Sequence
  GFR-binding peptide
  MOD_RES (2), (4), (37), (38): Xaa is C or S
  MOD_RES (15), (16), (17), (18), (19): Xaa is A or G
  MOD_RES (20), (21), (22), (23): Xaa is A or G or is absent
SXKXSKVIMPYVKLXXXXXXXXXFFLISLSSLDQSVXXPSAS

SEQ ID NO: 44468 - protein, 38 aa, Artificial Sequence
  GFR-binding peptide
  MOD_RES (1), (3), (36), (37): Xaa is C or S
  MOD_RES (14), (15), (16), (17), (18): Xaa is A or G
  MOD_RES (19), (20), (21), (22): Xaa is A or G or is absent
XKXSRVIMPYVKLXXXXXXXXXFFLISLSSLAQPVXXP

SEQ ID NO: 44469 - protein, 39 aa, Artificial Sequence
  GFR-binding peptide
  MOD_RES (1), (33), (34): Xaa is C or S
XSRVVMNPYVKLIVNSSDDFFLVSLSSLKTPAXXPKPVY

SEQ ID NO: 44470 - protein, 32 aa, Artificial Sequence
  GFR-binding peptide
  MOD_RES (1), (1): Xaa is C or S
XESVAMGPYVKLYTVVGKDFFLISLSSLKTPV

SEQ ID NO: 44471 - protein, 32 aa, Artificial Sequence
  GFR-binding peptide
  MOD_RES (31), (32): Xaa is C or S
EVVMDPYVKLVVNNASDFFLISLSSLRTPVXX

SEQ ID NO: 44472 - protein, 35 aa, Artificial Sequence
  GFR-binding peptide
LHEELRPYVKLLKPKKRVYEFFLVSLSSHHVRSPQ

SEQ ID NO: 44473 - protein, 42 aa, Artificial Sequence
  GFR-binding peptide
  MOD_RES (2), (4), (38), (39): Xaa is C or S
  MOD_RES (16), (17), (18), (19), (20): Xaa is A or G
  MOD_RES (21), (22), (23), (24): Xaa is A or G or is absent
SXGXRDVVMGPYVKLXXXXXXXXXFFLMSLSSMKTPTXXPGA

SEQ ID NO: 44474 - protein, 38 aa, Artificial Sequence
  GFR-binding peptide
  MOD_RES (33), (34): Xaa is C or S
  MOD_RES (11), (12), (13), (14), (15): Xaa is A or G
  MOD_RES (16), (17), (18), (19): Xaa is A or G or is absent
SKVIMPYVKLXXXXXXXXXFFLISLSSLDQSVXXPSAS

SEQ ID NO: 44475 - protein, 43 aa, Artificial Sequence
  GFR-binding peptide
  MOD_RES (2), (4), (38): Xaa is C or S
RXEXKNHQLFPYVKLHQGQHPKIRFFLMSLSSEETPVXELGED

SEQ ID NO: 44476 - protein, 34 aa, Artificial Sequence
  GFR-binding peptide
  MOD_RES (33), (34): Xaa is C or S
  MOD_RES (11), (12), (13), (14), (15): Xaa is A or G
  MOD_RES (16), (17), (18), (19): Xaa is A or G or is absent
SRVIMPYVKLXXXXXXXXXFFLISLSSLAQPVXX

SEQ ID NO: 44477 - protein, 34 aa, Artificial Sequence
  GFR-binding peptide
  MOD_RES (2), (2): Xaa is C or S
  MOD_RES (13), (14), (15), (16), (17): Xaa is A or G
  MOD_RES (18), (19), (20), (21): Xaa is A or G or is absent
GXEEVIMPYVKLXXXXXXXXXFFLMSLSSTKVPA

SEQ ID NO: 44478 - protein, 34 aa, Artificial Sequence
  GFR-binding peptide
  MOD_RES (31), (32): Xaa is C or S
DVVMGPYVKLIIQQKDNFFLMSLSSMKTPTXXPG

SEQ ID NO: 44479 - protein, 39 aa, Artificial Sequence
  GFR-binding peptide
  MOD_RES (1), (35), (36): Xaa is C or S
  MOD_RES (13), (14), (15), (16), (17): Xaa is A or G
  MOD_RES (18), (19), (20), (21): Xaa is A or G or is absent
XARVVMNPYVKLXXXXXXXXXFFLVSLSSLQTPAXXPKP

SEQ ID NO: 44480 - protein, 38 aa, Artificial Sequence
  GFR-binding peptide
  MOD_RES (1), (34), (35): Xaa is C or S
  MOD_RES (12), (13), (14), (15), (16): Xaa is A or G
  MOD_RES (17), (18), (19), (20): Xaa is A or G or is absent
XSRVIMPYVKLXXXXXXXXXFFLISLSSLAQPVXXPAA

SEQ ID NO: 44481 - protein, 43 aa, Artificial Sequence
  GFR-binding peptide
  MOD_RES (1), (3), (37), (38): Xaa is C or S
  MOD_RES (15), (16), (17), (18), (19): Xaa is A or G
  MOD_RES (20), (21), (22), (23): Xaa is A or G or is absent
XGXGEVVMEPYVKLXXXXXXXXXFFLMSLSSLETPVXXAKPIS

SEQ ID NO: 44482 - protein, 38 aa, Artificial Sequence
  GFR-binding peptide
  MOD_RES (33), (34): Xaa is C or S
  MOD_RES (11), (12), (13), (14), (15): Xaa is A or G
  MOD_RES (16), (17), (18), (19): Xaa is A or G or is absent
DVVMGPYVKLXXXXXXXXXFFLMSLSSMKTPTXXPGAS

SEQ ID NO: 44483 - protein, 39 aa, Artificial Sequence
  GFR-binding peptide
  MOD_RES (33), (34): Xaa is C or S
  MOD_RES (11), (12), (13), (14), (15): Xaa is A or G
  MOD_RES (16), (17), (18), (19): Xaa is A or G or is absent
EEVIMPYVKLXXXXXXXXXFFLMSLSSTKVPAXXTSPVR

SEQ ID NO: 44484 - protein, 40 aa, Artificial Sequence
  GFR-binding peptide
  MOD_RES (2), (34), (35): Xaa is C or S
GXSRVVMNPYVKLIVNSSDDFFLVSLSSLKTPAXXPKPVH

SEQ ID NO: 44485 - protein, 38 aa, Artificial Sequence
  GFR-binding peptide
  MOD_RES (1), (35), (36): Xaa is C or S
  MOD_RES (13), (14), (15), (16), (17): Xaa is A or G
  MOD_RES (18), (19), (20), (21): Xaa is A or G or is absent
XSEVVMDPYVKLXXXXXXXXXFFLISLSSLRTPVXXTP

SEQ ID NO: 44486 - protein, 35 aa, Artificial Sequence
  GFR-binding peptide
  MOD_RES (2), (34), (35): Xaa is C or S
GXRDVVMGPYVKLIIQQKDNFFLMSLSSMKTPTXX

SEQ ID NO: 44487 - protein, 37 aa, Artificial Sequence
  GFR-binding peptide
  MOD_RES (1), (33), (34): Xaa is C or S
XRDVVMGPYVKLIIQQKDNFFLMSLSSMKTPTXXPGA

SEQ ID NO: 44488 - protein, 39 aa, Artificial Sequence
  GFR-binding peptide
  MOD_RES (2), (4), (36), (37): Xaa is C or S
RXGXESVAMGPYVKLYTVVGKDFFLISLSSLKTPVXXAK

SEQ ID NO: 44489 - protein, 36 aa, Artificial Sequence
  GFR-binding peptide
  MOD_RES (31), (32): Xaa is C or S
EVVMDPYVKLVVNNAADFFLISLSSLRAPVXXSAPA

SEQ ID NO: 44490 - protein, 37 aa, Artificial Sequence
  GFR-binding peptide
  MOD_RES (2), (4): Xaa is C or S
RXEXKNHQLFPYVKLHQGQHPKIRFFLMSLSSEETPV

SEQ ID NO: 44491 - protein, 40 aa, Artificial Sequence
  GFR-binding peptide
  MOD_RES (1), (3), (35), (36): Xaa is C or S
XGXGEVVMEPYVKLVVKDYEDFFLMSLSSLETPVXXAKPI

SEQ ID NO: 44492 - protein, 35 aa, Artificial Sequence
  GFR-binding peptide
  MOD_RES (1), (1): Xaa is C or S
  MOD_RES (14), (15), (16), (17), (18): Xaa is A or G
  MOD_RES (19), (20), (21), (22): Xaa is A or G or is absent
XEAVSMGEPYVKLXXXXXXXXXFFLVSLSSLKTPV

SEQ ID NO: 44493 - protein, 33 aa, Artificial Sequence
  GFR-binding peptide
  MOD_RES (12), (13), (14), (15), (16): Xaa is A or G
  MOD_RES (17), (18), (19), (20): Xaa is A or G or is absent
LHEELRPYVKLXXXXXXXXXFFLVSLSSHHVRS

SEQ ID NO: 44494 - protein, 41 aa, Artificial Sequence
  GFR-binding peptide
  MOD_RES (2), (4), (36), (37): Xaa is C or S
RXGXSEVVMDPYVKLVVNNASDFFLISLSSLRTPVXXTPPT

SEQ ID NO: 44495 - protein, 39 aa, Artificial Sequence
  GFR-binding peptide
  MOD_RES (2), (34): Xaa is C or S
GXSRVVMNPYVKLIVNSSDDFFLVSLSSLKTPAXTPKTV

SEQ ID NO: 44496 - protein, 38 aa, Artificial Sequence
  GFR-binding peptide
  MOD_RES (1), (35), (36): Xaa is C or S
  MOD_RES (13), (14), (15), (16), (17): Xaa is A or G
  MOD_RES (18), (19), (20), (21): Xaa is A or G or is absent
XAKVVMNPYVKLXXXXXXXXXFFLVSLSSLKTPAXXAK

SEQ ID NO: 44497 - protein, 43 aa, Artificial Sequence
  GFR-binding peptide
  MOD_RES (2), (37), (38): Xaa is C or S
  MOD_RES (15), (16), (17), (18), (19): Xaa is A or G
  MOD_RES (20), (21), (22), (23): Xaa is A or G or is absent
GXEAVSMGEPYVKLXXXXXXXXXFFLVSLSSLKTPVXXAKGVK

SEQ ID NO: 44498 - protein, 33 aa, Artificial Sequence
  GFR-binding peptide
  MOD_RES (1), (33): Xaa is C or S
XSEVTMNPYVKLVVNKNEDFFLISLSSMKEPVX

SEQ ID NO: 44499 - protein, 40 aa, Artificial Sequence
  GFR-binding peptide
  MOD_RES (2), (34), (35): Xaa is C or S
GXSEVVMDPYVKLVVNNASDFFLISLSSLRTPVXXTPPTS

SEQ ID NO: 44500 - protein, 40 aa, Artificial Sequence
  GFR-binding peptide
  MOD_RES (2), (34), (35): Xaa is C or S
GXARVVMNPYVKLIVNSSDDFFLVSLSSLQTPAXXPKPVT

SEQ ID NO: 44501 - protein, 37 aa, Artificial Sequence
  GFR-binding peptide
  MOD_RES (32), (33): Xaa is C or S
AEVVMDPYVKLVVNNAADFFLISLSSLRAPVXXSAPA

SEQ ID NO: 44502 - protein, 40 aa, Artificial Sequence
  GFR-binding peptide
  MOD_RES (2), (4), (37), (38): Xaa is C or S
  MOD_RES (15), (16), (17), (18), (19): Xaa is A or G
  MOD_RES (20), (21), (22), (23): Xaa is A or G or is absent
LXGXEEVIMPYVKLXXXXXXXXXFFLMSLSSTKVPAXXTS

SEQ ID NO: 44503 - protein, 38 aa, Artificial Sequence
  GFR-binding peptide
  MOD_RES (32), (33): Xaa is C or S
GEVVMEPYVKLVVKDYEDFFLMSLSSLETPVXXAKPIS

SEQ ID NO: 44504 - protein, 40 aa, Artificial Sequence
  GFR-binding peptide
  MOD_RES (2), (39): Xaa is C or S
  MOD_RES (15), (16), (17), (18), (19): Xaa is A or G
  MOD_RES (20), (21), (22), (23): Xaa is A or G or is absent
AXELHEELRPYVKLXXXXXXXXXFFLVSLSSHHVRSPQXK

SEQ ID NO: 44505 - protein, 40 aa, Artificial Sequence
  GFR-binding peptide
  MOD_RES (1), (3), (35): Xaa is C or S
XGXSRVVMNPYVKLIVNSSDDFFLVSLSSLKTPAXTPKTV

SEQ ID NO: 44506 - protein, 38 aa, Artificial Sequence
  GFR-binding peptide
  MOD_RES (2), (34), (35): Xaa is C or S
GXAEVVMDPYVKLVVNNAADFFLISLSSLRAPVXXSAP

SEQ ID NO: 44507 - protein, 38 aa, Artificial Sequence
  GFR-binding peptide
  MOD_RES (2), (34), (35): Xaa is C or S
GXRDVVMGPYVKLIIQQKDNFFLMSLSSMKTPTXXPGA

SEQ ID NO: 44508 - protein, 39 aa, Artificial Sequence
  GFR-binding peptide
  MOD_RES (2), (36): Xaa is C or S
EXKNHQLFPYVKLHQGQHPKIRFFLMSLSSEETPVXELG

SEQ ID NO: 44509 - protein, 37 aa, Artificial Sequence
  GFR-binding peptide
  MOD_RES (2), (34), (35): Xaa is C or S
GXRDVVMGPYVKLIIQQKDNFFLMSLSSMKTPTXXPG

SEQ ID NO: 44510 - protein, 37 aa, Artificial Sequence
  GFR-binding peptide
  MOD_RES (34), (34): Xaa is C or S
  MOD_RES (12), (13), (14), (15), (16): Xaa is A or G
  MOD_RES (17), (18), (19), (20): Xaa is A or G or is absent
KNHQLFPYVKLXXXXXXXXXFFLMSLSSEETPVXELG

SEQ ID NO: 44511 - protein, 33 aa, Artificial Sequence
  GFR-binding peptide
  MOD_RES (33), (33): Xaa is C or S
  MOD_RES (11), (12), (13), (14), (15): Xaa is A or G
  MOD_RES (16), (17), (18), (19): Xaa is A or G or is absent
EVVMDPYVKLXXXXXXXXXFFLISLSSLRAPVX

SEQ ID NO: 44512 - protein, 42 aa, Artificial Sequence
  GFR-binding peptide
  MOD_RES (2), (4), (36), (37): Xaa is C or S
RXGXGEVVMEPYVKLVVKDYEDFFLMSLSSLETPVXXAKPIS

SEQ ID NO: 44513 - protein, 33 aa, Artificial Sequence
  GFR-binding peptide
HEELRPYVKLLKPKKRVYEFFLVSLSSHHVRSP

SEQ ID NO: 44514 - protein, 32 aa, Artificial Sequence
  GFR-binding peptide
  MOD_RES (1), (32): Xaa is C or S
XSKVVMPYVKLVKPTRGVLFFISLSSLDQPVX

SEQ ID NO: 44515 - protein, 38 aa, Artificial Sequence
  GFR-binding peptide
  MOD_RES (2), (4), (38): Xaa is C or S
  MOD_RES (16), (17), (18), (19), (20): Xaa is A or G
  MOD_RES (21), (22), (23), (24): Xaa is A or G or is absent
HXGXSRVVMNPYVKLXXXXXXXXXFFLVSLSSLKTPAX

SEQ ID NO: 44516 - protein, 39 aa, Artificial Sequence
  GFR-binding peptide
  MOD_RES (1), (3), (36), (37): Xaa is C or S
XGXEAVSMGEPYVKLTPVGMDDFFLVSLSSLKTPVXXAK

SEQ ID NO: 44517 - protein, 38 aa, Artificial Sequence
  GFR-binding peptide
  MOD_RES (2), (4), (37), (38): Xaa is C or S
  MOD_RES (15), (16), (17), (18), (19): Xaa is A or G
  MOD_RES (20), (21), (22), (23): Xaa is A or G or is absent
SXKXSKVVMPYVKLXXXXXXXXXFFLISLSSLDQPVXX

SEQ ID NO: 44518 - protein, 36 aa, Artificial Sequence
  GFR-binding peptide
  MOD_RES (1), (35), (36): Xaa is C or S
  MOD_RES (13), (14), (15), (16), (17): Xaa is A or G
  MOD_RES (18), (19), (20), (21): Xaa is A or G or is absent
XSRVVMNPYVKLXXXXXXXXXFFLVSLSSLKTPAXX

SEQ ID NO: 44519 - protein, 39 aa, Artificial Sequence
  GFR-binding peptide
  MOD_RES (1), (3), (35), (36): Xaa is C or S
XGXSEVVMDPYVKLVVNNASDFFLISLSSLRTPVXXTPP

SEQ ID NO: 44520 - protein, 37 aa, Artificial Sequence
  GFR-binding peptide
  MOD_RES (1), (3), (35), (36): Xaa is C or S
XGXRDVVMGPYVKLIIQQKDNFFLMSLSSMKTPTXXP

SEQ ID NO: 44521 - protein, 38 aa, Artificial Sequence
  GFR-binding peptide
  MOD_RES (1), (3), (35), (36): Xaa is C or S
XGXARVVMNPYVKLIVNSSDDFFLVSLSSLQTPAXXPK

SEQ ID NO: 44522 - protein, 38 aa, Artificial Sequence
  GFR-binding peptide
  MOD_RES (33), (34): Xaa is C or S
  MOD_RES (11), (12), (13), (14), (15): Xaa is A or G
  MOD_RES (16), (17), (18), (19): Xaa is A or G or is absent
EVTMNPYVKLXXXXXXXXXFFLISLSSMKEPVXXPEPI

SEQ ID NO: 44523 - protein, 44 aa, Artificial Sequence
  GFR-binding peptide
  MOD_RES (1), (3), (40): Xaa is C or S
  MOD_RES (16), (17), (18), (19), (20): Xaa is A or G
  MOD_RES (21), (22), (23), (24): Xaa is A or G or is absent
XAXELHEELRPYVKLXXXXXXXXXFFLVSLSSHHVRSPQXKVSS

SEQ ID NO: 44524 - protein, 31 aa, Artificial Sequence
  GFR-binding peptide
  MOD_RES (1), (1): Xaa is C or S
XSKVIMPYVKLIKPTKGILFFISLSSLDQSV

SEQ ID NO: 44525 - protein, 36 aa, Artificial Sequence
  GFR-binding peptide
  MOD_RES (2), (34), (35): Xaa is C or S
GXAKVVMNPYVKLIVNNSSDFFLVSLSSLKTPAXXA

SEQ ID NO: 44526 - protein, 37 aa, Artificial Sequence
  GFR-binding peptide
  MOD_RES (1), (33), (34): Xaa is C or S
XSEVTMNPYVKLVVNKNEDFFLISLSSMKEPVXXPEP

SEQ ID NO: 44527 - protein, 42 aa, Artificial Sequence
  GFR-binding peptide
  MOD_RES (2), (39): Xaa is C or S
  MOD_RES (15), (16), (17), (18), (19): Xaa is A or G
  MOD_RES (20), (21), (22), (23): Xaa is A or G or is absent
AXELHEELRPYVKLXXXXXXXXXFFLVSLSSHHVRSPQXKVS

SEQ ID NO: 44528 - protein, 34 aa, Artificial Sequence
  GFR-binding peptide
  MOD_RES (2), (4): Xaa is C or S
SXKXSKVIMPYVKLIKPTKGILFFISLSSLDQSV

SEQ ID NO: 44529 - protein, 41 aa, Artificial Sequence
  GFR-binding peptide
  MOD_RES (1), (3), (35), (36): Xaa is C or S
XAXSEVTMNPYVKLVVNKNEDFFLISLSSMKEPVXXPEPIG

SEQ ID NO: 44530 - protein, 38 aa, Artificial Sequence
  GFR-binding peptide
  MOD_RES (34), (34): Xaa is C or S
  MOD_RES (12), (13), (14), (15), (16): Xaa is A or G
  MOD_RES (17), (18), (19), (20): Xaa is A or G or is absent
KNHQLFPYVKLXXXXXXXXXFFLMSLSSEETPVXELGE

SEQ ID NO: 44531 - protein, 39 aa, Artificial Sequence
  GFR-binding peptide
  MOD_RES (34), (35): Xaa is C or S
  MOD_RES (12), (13), (14), (15), (16): Xaa is A or G
  MOD_RES (17), (18), (19), (20): Xaa is A or G or is absent
ESVAMGPYVKLXXXXXXXXXFFLISLSSLKTPVXXAKSA

SEQ ID NO: 44532 - protein, 33 aa, Artificial Sequence
  GFR-binding peptide
  MOD_RES (31), (32): Xaa is C or S
EVVMDPYVKLVVNNAADFFLISLSSLRAPVXXS

SEQ ID NO: 44533 - protein, 36 aa, Artificial Sequence
  GFR-binding peptide
  MOD_RES (1), (33), (34): Xaa is C or S
XESVAMGPYVKLYTVVGKDFFLISLSSLKTPVXXAK

SEQ ID NO: 44534 - protein, 38 aa, Artificial Sequence
  GFR-binding peptide
  MOD_RES (2), (33), (34): Xaa is C or S
KXSKVVMPYVKLVKPTRGVLFFISLSSLDQPVXXPSAS

SEQ ID NO: 44535 - protein, 35 aa, Artificial Sequence
  GFR-binding peptide
  MOD_RES (2), (4): Xaa is C or S
RXGXSEVVMDPYVKLVVNNASDFFLISLSSLRTPV

SEQ ID NO: 44536 - protein, 38 aa, Artificial Sequence
  GFR-binding peptide
  MOD_RES (1), (3), (34), (35): Xaa is C or S
XKXSKVIMPYVKLIKPTKGILFFISLSSLDQSVXXPSA

SEQ ID NO: 44537 - protein, 42 aa, Artificial Sequence
  GFR-binding peptide
  MOD_RES (2), (4), (37), (38): Xaa is C or S
  MOD_RES (15), (16), (17), (18), (19): Xaa is A or G
  MOD_RES (20), (21), (22), (23): Xaa is A or G or is absent
SXKXSKVVMPYVKLXXXXXXXXXFFLISLSSLDQPVXXPSAS

SEQ ID NO: 44538 - protein, 38 aa, Artificial Sequence
  GFR-binding peptide
  MOD_RES (2), (4), (38): Xaa is C or S
  MOD_RES (16), (17), (18), (19), (20): Xaa is A or G
  MOD_RES (21), (22), (23), (24): Xaa is A or G or is absent
RXGXSEVVMDPYVKLXXXXXXXXXFFLISLSSLRTPVX

SEQ ID NO: 44539 - protein, 41 aa, Artificial Sequence
  GFR-binding peptide
  MOD_RES (1), (36), (37): Xaa is C or S
  MOD_RES (14), (15), (16), (17), (18): Xaa is A or G
  MOD_RES (19), (20), (21), (22): Xaa is A or G or is absent
XEAVSMGEPYVKLXXXXXXXXXFFLVSLSSLKTPVXXAKGV

SEQ ID NO: 44540 - protein, 42 aa, Artificial Sequence
  GFR-binding peptide
  MOD_RES (2), (36): Xaa is C or S
EXKNHQLFPYVKLHQGQHPKIRFFLMSLSSEETPVXELGEDN

SEQ ID NO: 44541 - protein, 37 aa, Artificial Sequence
  GFR-binding peptide
  MOD_RES (1), (34), (35): Xaa is C or S
XEAVSMGEPYVKLTPVGMDDFFLVSLSSLKTPVXXAK

SEQ ID NO: 44542 - protein, 35 aa, Artificial Sequence
  GFR-binding peptide
  MOD_RES (1), (32), (33): Xaa is C or S
XSRVIMPYVKLVKPKRGVLFFISLSSLAQPVXXPA

SEQ ID NO: 44543 - protein, 39 aa, Artificial Sequence
  GFR-binding peptide
  MOD_RES (34), (35): Xaa is C or S
  MOD_RES (12), (13), (14), (15), (16): Xaa is A or G
  MOD_RES (17), (18), (19), (20): Xaa is A or G or is absent
SRVVMNPYVKLXXXXXXXXXFFLVSLSSLKTPAXXPKPV

SEQ ID NO: 44544 - protein, 35 aa, Artificial Sequence
  GFR-binding peptide
  MOD_RES (32), (33): Xaa is C or S
SEVVMDPYVKLVVNNASDFFLISLSSLRTPVXXTP

SEQ ID NO: 44545 - protein, 41 aa, Artificial Sequence
  GFR-binding peptide
  MOD_RES (37), (37): Xaa is C or S
ELHEELRPYVKLLKPKKRVYEFFLVSLSSHHVRSPQXKVSS

SEQ ID NO: 44546 - protein, 32 aa, Artificial Sequence
  GFR-binding peptide
  MOD_RES (31), (32): Xaa is C or S
SVAMGPYVKLYTVVGKDFFLISLSSLKTPVXX

SEQ ID NO: 44547 - protein, 36 aa, Artificial Sequence
  GFR-binding peptide
  MOD_RES (1), (35), (36): Xaa is C or S
  MOD_RES (13), (14), (15), (16), (17): Xaa is A or G
  MOD_RES (18), (19), (20), (21): Xaa is A or G or is absent
XESVAMGPYVKLXXXXXXXXXFFLISLSSLKTPVXX

SEQ ID NO: 44548 - protein, 34 aa, Artificial Sequence
  GFR-binding peptide
  MOD_RES (34), (34): Xaa is C or S
  MOD_RES (12), (13), (14), (15), (16): Xaa is A or G
  MOD_RES (17), (18), (19), (20): Xaa is A or G or is absent
SEVVMDPYVKLXXXXXXXXXFFLISLSSLRTPVX

SEQ ID NO: 44549 - protein, 39 aa, Artificial Sequence
  GFR-binding peptide
  MOD_RES (1), (3), (35), (36): Xaa is C or S
XGXARVVMNPYVKLIVNSSDDFFLVSLSSLQTPAXXPKP

SEQ ID NO: 44550 - protein, 44 aa, Artificial Sequence
  GFR-binding peptide
  MOD_RES (2), (4), (38), (39): Xaa is C or S
  MOD_RES (16), (17), (18), (19), (20): Xaa is A or G
  MOD_RES (21), (22), (23), (24): Xaa is A or G or is absent
RXAXSEVTMNPYVKLXXXXXXXXXFFLISLSSMKEPVXXPEPIG

SEQ ID NO: 44551 - protein, 42 aa, Artificial Sequence
  GFR-binding peptide
  MOD_RES (1), (3), (36), (37): Xaa is C or S
  MOD_RES (14), (15), (16), (17), (18): Xaa is A or G
  MOD_RES (19), (20), (21), (22): Xaa is A or G or is absent
XGXEEVIMPYVKLXXXXXXXXXFFLMSLSSTKVPAXXTSPVR

SEQ ID NO: 44552 - protein, 31 aa, Artificial Sequence
  GFR-binding peptide
AEVVMDPYVKLVVNNAADFFLISLSSLRAPV

SEQ ID NO: 44553 - protein, 37 aa, Artificial Sequence
  GFR-binding peptide
  MOD_RES (2), (35), (36): Xaa is C or S
  MOD_RES (13), (14), (15), (16), (17): Xaa is A or G
  MOD_RES (18), (19), (20), (21): Xaa is A or G or is absent
KXSKVIMPYVKLXXXXXXXXXFFLISLSSLDQSVXXP

SEQ ID NO: 44554 - protein, 34 aa, Artificial Sequence
  GFR-binding peptide
  MOD_RES (31), (32): Xaa is C or S
SRVIMPYVKLVKPKRGVLFFISLSSLAQPVXXPA

SEQ ID NO: 44555 - protein, 35 aa, Artificial Sequence
  GFR-binding peptide
  MOD_RES (31), (32): Xaa is C or S
EVVMDPYVKLVVNNAADFFLISLSSLRAPVXXSAP

SEQ ID NO: 44556 - protein, 40 aa, Artificial Sequence
  GFR-binding peptide
  MOD_RES (1), (3), (35), (36): Xaa is C or S
XGXSRVVMNPYVKLIVNSSDDFFLVSLSSLKTPAXXPKPV

SEQ ID NO: 44557 - protein, 41 aa, Artificial Sequence
  GFR-binding peptide
  MOD_RES (1), (3), (36), (37): Xaa is C or S
  MOD_RES (14), (15), (16), (17), (18): Xaa is A or G
  MOD_RES (19), (20), (21), (22): Xaa is A or G or is absent
XKXSKVVMPYVKLXXXXXXXXXFFLISLSSLDQPVXXPSAS

SEQ ID NO: 44558 - protein, 39 aa, Artificial Sequence
  GFR-binding peptide
  MOD_RES (33), (34): Xaa is C or S
  MOD_RES (11), (12), (13), (14), (15): Xaa is A or G
  MOD_RES (16), (17), (18), (19): Xaa is A or G or is absent
SRVIMPYVKLXXXXXXXXXFFLISLSSLAQPVXXPAASA

SEQ ID NO: 44559 - protein, 39 aa, Artificial Sequence
  GFR-binding peptide
  MOD_RES (33), (33): Xaa is C or S
NHQLFPYVKLHQGQHPKIRFFLMSLSSEETPVXELGEDN

SEQ ID NO: 44560 - protein, 37 aa, Artificial Sequence
  GFR-binding peptide
  MOD_RES (2), (4), (35), (36): Xaa is C or S
SXKXSRVIMPYVKLVKPKRGVLFFISLSSLAQPVXXP

SEQ ID NO: 44561 - protein, 39 aa, Artificial Sequence
  GFR-binding peptide
  MOD_RES (2), (4), (38), (39): Xaa is C or S
  MOD_RES (16), (17), (18), (19), (20): Xaa is A or G
  MOD_RES (21), (22), (23), (24): Xaa is A or G or is absent
RXGXESVAMGPYVKLXXXXXXXXXFFLISLSSLKTPVXX

SEQ ID NO: 44562 - protein, 36 aa, Artificial Sequence
  GFR-binding peptide
  MOD_RES (32), (32): Xaa is C or S
SRVVMNPYVKLIVNSSDDFFLVSLSSLKTPAXTPKT

SEQ ID NO: 44563 - protein, 35 aa, Artificial Sequence
  GFR-binding peptide
  MOD_RES (31), (32): Xaa is C or S
DVVMGPYVKLIIQQKDNFFLMSLSSMKTPTXXPGA

SEQ ID NO: 44564 - protein, 36 aa, Artificial Sequence
  GFR-binding peptide
  MOD_RES (2), (4), (36): Xaa is C or S
SXGXRDVVMGPYVKLIIQQKDNFFLMSLSSMKTPTX

SEQ ID NO: 44565 - protein, 34 aa, Artificial Sequence
  GFR-binding peptide
  MOD_RES (32), (33): Xaa is C or S
ARVVMNPYVKLIVNSSDDFFLVSLSSLQTPAXXP

SEQ ID NO: 44566 - protein, 31 aa, Artificial Sequence
  GFR-binding peptide
  MOD_RES (31), (31): Xaa is C or S
EVTMNPYVKLVVNKNEDFFLISLSSMKEPVX

SEQ ID NO: 44567 - protein, 40 aa, Artificial Sequence
  GFR-binding peptide
  MOD_RES (1), (3), (37), (38): Xaa is C or S
  MOD_RES (15), (16), (17), (18), (19): Xaa is A or G
  MOD_RES (20), (21), (22), (23): Xaa is A or G or is absent
XGXSRVVMNPYVKLXXXXXXXXXFFLVSLSSLKTPAXXPK

SEQ ID NO: 44568 - protein, 42 aa, Artificial Sequence
  GFR-binding peptide
  MOD_RES (2), (36), (37): Xaa is C or S
  MOD_RES (14), (15), (16), (17), (18): Xaa is A or G
  MOD_RES (19), (20), (21), (22): Xaa is A or G or is absent
GXRDVVMGPYVKLXXXXXXXXXFFLMSLSSMKTPTXXPGASG

SEQ ID NO: 44569 - protein, 34 aa, Artificial Sequence
  GFR-binding peptide
  MOD_RES (33), (34): Xaa is C or S
  MOD_RES (11), (12), (13), (14), (15): Xaa is A or G
  MOD_RES (16), (17), (18), (19): Xaa is A or G or is absent
EVVMEPYVKLXXXXXXXXXFFLMSLSSLETPVXX

SEQ ID NO: 44570 - protein, 34 aa, Artificial Sequence
  GFR-binding peptide
  MOD_RES (34), (34): Xaa is C or S
  MOD_RES (12), (13), (14), (15), (16): Xaa is A or G
  MOD_RES (17), (18), (19), (20): Xaa is A or G or is absent
SEVTMNPYVKLXXXXXXXXXFFLISLSSMKEPVX

SEQ ID NO: 44571 - protein, 34 aa, Artificial Sequence
  GFR-binding peptide
  MOD_RES (31), (32): Xaa is C or S
SVAMGPYVKLYTVVGKDFFLISLSSLKTPVXXAK

SEQ ID NO: 44572 - protein, 37 aa, Artificial Sequence
  GFR-binding peptide
  MOD_RES (1), (3): Xaa is C or S
  MOD_RES (16), (17), (18), (19), (20): Xaa is A or G
  MOD_RES (21), (22), (23), (24): Xaa is A or G or is absent
XAXELHEELRPYVKLXXXXXXXXXFFLVSLSSHHVRS

SEQ ID NO: 44573 - protein, 37 aa, Artificial Sequence
  GFR-binding peptide
  MOD_RES (2), (4), (36): Xaa is C or S
HXGXSRVVMNPYVKLIVNSSDDFFLVSLSSLKTPAXT

SEQ ID NO: 44574 - protein, 41 aa, Artificial Sequence
  GFR-binding peptide
  MOD_RES (2), (4), (36), (37): Xaa is C or S
RXAXSEVTMNPYVKLVVNKNEDFFLISLSSMKEPVXXPEPI

SEQ ID NO: 44575 - protein, 33 aa, Artificial Sequence
  GFR-binding peptide
  MOD_RES (1), (33): Xaa is C or S
XRDVVMGPYVKLIIQQKDNFFLMSLSSMKTPTX

SEQ ID NO: 44576 - protein, 35 aa, Artificial Sequence
  GFR-binding peptide
  MOD_RES (1), (3), (35): Xaa is C or S
XGXAEVVMDPYVKLVVNNAADFFLISLSSLRAPVX

SEQ ID NO: 44577 - protein, 35 aa, Artificial Sequence
  GFR-binding peptide
  MOD_RES (31), (32): Xaa is C or S
SKVIMPYVKLIKPTKGILFFISLSSLDQSVXXPSA

SEQ ID NO: 44578 - protein, 42 aa, Artificial Sequence
  GFR-binding peptide
  MOD_RES (1), (38): Xaa is C or S
XELHEELRPYVKLLKPKKRVYEFFLVSLSSHHVRSPQXKVSS

SEQ ID NO: 44579 - protein, 40 aa, Artificial Sequence
  GFR-binding peptide
  MOD_RES (2), (36), (37): Xaa is C or S
  MOD_RES (14), (15), (16), (17), (18): Xaa is A or G
  MOD_RES (19), (20), (21), (22): Xaa is A or G or is absent
GXAEVVMDPYVKLXXXXXXXXXFFLISLSSLRAPVXXSAP

SEQ ID NO: 44580 - protein, 39 aa, Artificial Sequence
  GFR-binding peptide
  MOD_RES (1), (34), (35): Xaa is C or S
  MOD_RES (12), (13), (14), (15), (16): Xaa is A or G
  MOD_RES (17), (18), (19), (20): Xaa is A or G or is absent
XSKVIMPYVKLXXXXXXXXXFFLISLSSLDQSVXXPSAS

SEQ ID NO: 44581 - protein, 38 aa, Artificial Sequence
  GFR-binding peptide
  MOD_RES (1), (3), (35), (36): Xaa is C or S
XGXAKVVMNPYVKLIVNNSSDFFLVSLSSLKTPAXXAK

SEQ ID NO: 44582 - protein, 35 aa, Artificial Sequence
  GFR-binding peptide
  MOD_RES (1), (35): Xaa is C or S
  MOD_RES (13), (14), (15), (16), (17): Xaa is A or G
  MOD_RES (18), (19), (20), (21): Xaa is A or G or is absent
XAKVVMNPYVKLXXXXXXXXXFFLVSLSSLKTPAX

SEQ ID NO: 44583 - protein, 34 aa, Artificial Sequence
  GFR-binding peptide
  MOD_RES (1), (1): Xaa is C or S
XKNHQLFPYVKLHQGQHPKIRFFLMSLSSEETPV

SEQ ID NO: 44584 - protein, 33 aa, Artificial Sequence
  GFR-binding peptide
  MOD_RES (1), (1): Xaa is C or S
  MOD_RES (12), (13), (14), (15), (16): Xaa is A or G
  MOD_RES (17), (18), (19), (20): Xaa is A or G or is absent
XSRVIMPYVKLXXXXXXXXXFFLISLSSLAQPV

SEQ ID NO: 44585 - protein, 38 aa, Artificial Sequence
  GFR-binding peptide
  MOD_RES (2), (36), (37): Xaa is C or S
  MOD_RES (14), (15), (16), (17), (18): Xaa is A or G
  MOD_RES (19), (20), (21), (22): Xaa is A or G or is absent
GXSEVVMDPYVKLXXXXXXXXXFFLISLSSLRTPVXXT

SEQ ID NO: 44586 - protein, 38 aa, Artificial Sequence
  GFR-binding peptide
  MOD_RES (1), (33): Xaa is C or S
XSRVVMNPYVKLIVNSSDDFFLVSLSSLKTPAXTPKTV

SEQ ID NO: 44587 - protein, 36 aa, Artificial Sequence
  GFR-binding peptide
  MOD_RES (1), (3): Xaa is C or S
  MOD_RES (15), (16), (17), (18), (19): Xaa is A or G
  MOD_RES (20), (21), (22), (23): Xaa is A or G or is absent
XGXGEVVMEPYVKLXXXXXXXXXFFLMSLSSLETPV

SEQ ID NO: 44588 - protein, 38 aa, Artificial Sequence
  GFR-binding peptide
  MOD_RES (2), (4), (37), (38): Xaa is C or S
  MOD_RES (15), (16), (17), (18), (19): Xaa is A or G
  MOD_RES (20), (21), (22), (23): Xaa is A or G or is absent
SXKXSKVIMPYVKLXXXXXXXXXFFLISLSSLDQSVXX

SEQ ID NO: 44589 - protein, 33 aa, Artificial Sequence
  GFR-binding peptide
  MOD_RES (33), (33): Xaa is C or S
  MOD_RES (11), (12), (13), (14), (15): Xaa is A or G
  MOD_RES (16), (17), (18), (19): Xaa is A or G or is absent
SVAMGPYVKLXXXXXXXXXFFLISLSSLKTPVX

SEQ ID NO: 44590 - protein, 34 aa, Artificial Sequence
  GFR-binding peptide
  MOD_RES (1), (33), (34): Xaa is C or S
XAEVVMDPYVKLVVNNAADFFLISLSSLRAPVXX

SEQ ID NO: 44591 - protein, 32 aa, Artificial Sequence
  GFR-binding peptide
  MOD_RES (2), (2): Xaa is C or S
KXSKVVMPYVKLVKPTRGVLFFISLSSLDQPV

SEQ ID NO: 44592 - protein, 38 aa, Artificial Sequence
  GFR-binding peptide
  MOD_RES (1), (35), (36): Xaa is C or S
  MOD_RES (13), (14), (15), (16), (17): Xaa is A or G
  MOD_RES (18), (19), (20), (21): Xaa is A or G or is absent
XGEVVMEPYVKLXXXXXXXXXFFLMSLSSLETPVXXAK

SEQ ID NO: 44593 - protein, 41 aa, Artificial Sequence
  GFR-binding peptide
  MOD_RES (1), (3), (35): Xaa is C or S
XGXSRVVMNPYVKLIVNSSDDFFLVSLSSLKTPAXTPKTVH

SEQ ID NO: 44594 - protein, 38 aa, Artificial Sequence
  GFR-binding peptide
  MOD_RES (2), (36): Xaa is C or S
  MOD_RES (14), (15), (16), (17), (18): Xaa is A or G
  MOD_RES (19), (20), (21), (22): Xaa is A or G or is absent
GXSRVVMNPYVKLXXXXXXXXXFFLVSLSSLKTPAXTP

SEQ ID NO: 44595 - protein, 40 aa, Artificial Sequence
  GFR-binding peptide
  MOD_RES (1), (35), (36): Xaa is C or S
  MOD_RES (13), (14), (15), (16), (17): Xaa is A or G
  MOD_RES (18), (19), (20), (21): Xaa is A or G or is absent
XAEVVMDPYVKLXXXXXXXXXFFLISLSSLRAPVXXSAPA

SEQ ID NO: 44596 - protein, 39 aa, Artificial Sequence
  GFR-binding peptide
  MOD_RES (36), (36): Xaa is C or S
LHEELRPYVKLLKPKKRVYEFFLVSLSSHHVRSPQXKVS

SEQ ID NO: 44597 - protein, 37 aa, Artificial Sequence
  GFR-binding peptide
  MOD_RES (2), (36), (37): Xaa is C or S
  MOD_RES (14), (15), (16), (17), (18): Xaa is A or G
  MOD_RES (19), (20), (21), (22): Xaa is A or G or is absent
AXSEVTMNPYVKLXXXXXXXXXFFLISLSSMKEPVXX

SEQ ID NO: 44598 - protein, 38 aa, Artificial Sequence
  GFR-binding peptide
  MOD_RES (1), (3), (35), (36): Xaa is C or S
XGXSEVVMDPYVKLVVNNASDFFLISLSSLRTPVXXTP

SEQ ID NO: 44599 - protein, 43 aa, Artificial Sequence
  GFR-binding peptide
  MOD_RES (2), (4), (37), (38): Xaa is C or S
  MOD_RES (15), (16), (17), (18), (19): Xaa is A or G
  MOD_RES (20), (21), (22), (23): Xaa is A or G or is absent
SXKXSRVIMPYVKLXXXXXXXXXFFLISLSSLAQPVXXPAASA

SEQ ID NO: 44600 - protein, 42 aa, Artificial Sequence
  GFR-binding peptide
  MOD_RES (2), (4), (38), (39): Xaa is C or S
  MOD_RES (16), (17), (18), (19), (20): Xaa is A or G
  MOD_RES (21), (22), (23), (24): Xaa is A or G or is absent
RXAXSEVTMNPYVKLXXXXXXXXXFFLISLSSMKEPVXXPEP

SEQ ID NO: 44601 - protein, 32 aa, Artificial Sequence
  GFR-binding peptide
  MOD_RES (31), (32): Xaa is C or S
EVTMNPYVKLVVNKNEDFFLISLSSMKEPVXX

SEQ ID NO: 44602 - protein, 39 aa, Artificial Sequence
  GFR-binding peptide
  MOD_RES (34), (34): Xaa is C or S
  MOD_RES (12), (13), (14), (15), (16): Xaa is A or G
  MOD_RES (17), (18), (19), (20): Xaa is A or G or is absent
KNHQLFPYVKLXXXXXXXXXFFLMSLSSEETPVXELGED

SEQ ID NO: 44603 - protein, 38 aa, Artificial Sequence
  GFR-binding peptide
  MOD_RES (33), (34): Xaa is C or S
  MOD_RES (11), (12), (13), (14), (15): Xaa is A or G
  MOD_RES (16), (17), (18), (19): Xaa is A or G or is absent
SKVVMPYVKLXXXXXXXXXFFLISLSSLDQPVXXPSAS

SEQ ID NO: 44604 - protein, 37 aa, Artificial Sequence
  GFR-binding peptide
  MOD_RES (31), (32): Xaa is C or S
SVAMGPYVKLYTVVGKDFFLISLSSLKTPVXXAKSAK

SEQ ID NO: 44605 - protein, 37 aa, Artificial Sequence
  GFR-binding peptide
  MOD_RES (2), (34): Xaa is C or S
GXSRVVMNPYVKLIVNSSDDFFLVSLSSLKTPAXTPK

SEQ ID NO: 44606 - protein, 37 aa, Artificial Sequence
  GFR-binding peptide
  MOD_RES (2), (4), (36), (37): Xaa is C or S
RXGXGEVVMEPYVKLVVKDYEDFFLMSLSSLETPVXX

SEQ ID NO: 44607 - protein, 33 aa, Artificial Sequence
  GFR-binding peptide
  MOD_RES (1), (32), (33): Xaa is C or S
XEEVIMPYVKLLLVRGNDFFLMSLSSTKVPAXX

SEQ ID NO: 44608 - protein, 34 aa, Artificial Sequence
  GFR-binding peptide
  MOD_RES (1), (34): Xaa is C or S
  MOD_RES (12), (13), (14), (15), (16): Xaa is A or G
  MOD_RES (17), (18), (19), (20): Xaa is A or G or is absent
XSKVIMPYVKLXXXXXXXXXFFLISLSSLDQSVX

SEQ ID NO: 44609 - protein, 33 aa, Artificial Sequence
  GFR-binding peptide
  MOD_RES (31), (32): Xaa is C or S
EVTMNPYVKLVVNKNEDFFLISLSSMKEPVXXP

SEQ ID NO: 44610 - protein, 33 aa, Artificial Sequence
  GFR-binding peptide
  MOD_RES (32), (33): Xaa is C or S
AEVVMDPYVKLVVNNAADFFLISLSSLRAPVXX

SEQ ID NO: 44611 - protein, 41 aa, Artificial Sequence
  GFR-binding peptide
  MOD_RES (2), (4), (38), (39): Xaa is C or S
  MOD_RES (16), (17), (18), (19), (20): Xaa is A or G
  MOD_RES (21), (22), (23), (24): Xaa is A or G or is absent
SXGXRDVVMGPYVKLXXXXXXXXXFFLMSLSSMKTPTXXPG

SEQ ID NO: 44612 - protein, 39 aa, Artificial Sequence
  GFR-binding peptide
  MOD_RES (33), (34): Xaa is C or S
  MOD_RES (11), (12), (13), (14), (15): Xaa is A or G
  MOD_RES (16), (17), (18), (19): Xaa is A or G or is absent
SKVVMPYVKLXXXXXXXXXFFLISLSSLDQPVXXPSASA

SEQ ID NO: 44613 - protein, 34 aa, Artificial Sequence
  GFR-binding peptide
  MOD_RES (1), (33), (34): Xaa is C or S
XSEVVMDPYVKLVVNNASDFFLISLSSLRTPVXX

SEQ ID NO: 44614 - protein, 32 aa, Artificial Sequence
  GFR-binding peptide
  MOD_RES (1), (1): Xaa is C or S
XSEVTMNPYVKLVVNKNEDFFLISLSSMKEPV

SEQ ID NO: 44615 - protein, 41 aa, Artificial Sequence
  GFR-binding peptide
  MOD_RES (2), (4), (37), (38): Xaa is C or S
  MOD_RES (15), (16), (17), (18), (19): Xaa is A or G
  MOD_RES (20), (21), (22), (23): Xaa is A or G or is absent
SXKXSKVVMPYVKLXXXXXXXXXFFLISLSSLDQPVXXPSA

SEQ ID NO: 44616 - protein, 34 aa, Artificial Sequence
  GFR-binding peptide
  MOD_RES (1), (3): Xaa is C or S
XGXAKVVMNPYVKLIVNNSSDFFLVSLSSLKTPA

SEQ ID NO: 44617 - protein, 38 aa, Artificial Sequence
  GFR-binding peptide
  MOD_RES (1), (35): Xaa is C or S
  MOD_RES (13), (14), (15), (16), (17): Xaa is A or G
  MOD_RES (18), (19), (20), (21): Xaa is A or G or is absent
XSRVVMNPYVKLXXXXXXXXXFFLVSLSSLKTPAXTPK

SEQ ID NO: 44618 - protein, 40 aa, Artificial Sequence
  GFR-binding peptide
  MOD_RES (34), (35): Xaa is C or S
  MOD_RES (12), (13), (14), (15), (16): Xaa is A or G
  MOD_RES (17), (18), (19), (20): Xaa is A or G or is absent
SEVTMNPYVKLXXXXXXXXXFFLISLSSMKEPVXXPEPIG

SEQ ID NO: 44619 - protein, 33 aa, Artificial Sequence
  GFR-binding peptide
  MOD_RES (12), (13), (14), (15), (16): Xaa is A or G
  MOD_RES (17), (18), (19), (20): Xaa is A or G or is absent
GEVVMEPYVKLXXXXXXXXXFFLMSLSSLETPV

SEQ ID NO: 44620 - protein, 37 aa, Artificial Sequence
  GFR-binding peptide
  MOD_RES (32), (33): Xaa is C or S
SEVVMDPYVKLVVNNASDFFLISLSSLRTPVXXTPPT

SEQ ID NO: 44621 - protein, 40 aa, Artificial Sequence
  GFR-binding peptide
  MOD_RES (1), (3), (34), (35): Xaa is C or S
XGXEEVIMPYVKLLLVRGNDFFLMSLSSTKVPAXXTSPVR

SEQ ID NO: 44622 - protein, 35 aa, Artificial Sequence
  GFR-binding peptide
  MOD_RES (31), (32): Xaa is C or S
EVVMEPYVKLVVKDYEDFFLMSLSSLETPVXXAKP

SEQ ID NO: 44623 - protein, 37 aa, Artificial Sequence
  GFR-binding peptide
  MOD_RES (2), (4): Xaa is C or S
  MOD_RES (16), (17), (18), (19), (20): Xaa is A or G
  MOD_RES (21), (22), (23), (24): Xaa is A or G or is absent
RXEXKNHQLFPYVKLXXXXXXXXXFFLMSLSSEETPV

SEQ ID NO: 44624 - protein, 41 aa, Artificial Sequence
  GFR-binding peptide
  MOD_RES (1), (3), (38), (39): Xaa is C or S
  MOD_RES (16), (17), (18), (19), (20): Xaa is A or G
  MOD_RES (21), (22), (23), (24): Xaa is A or G or is absent
XGXEAVSMGEPYVKLXXXXXXXXXFFLVSLSSLKTPVXXAK

SEQ ID NO: 44625 - protein, 33 aa, Artificial Sequence
  GFR-binding peptide
  MOD_RES (31), (32): Xaa is C or S
KVVMNPYVKLIVNNSSDFFLVSLSSLKTPAXXA

SEQ ID NO: 44626 - protein, 39 aa, Artificial Sequence
  GFR-binding peptide
  MOD_RES (1), (35): Xaa is C or S
  MOD_RES (13), (14), (15), (16), (17): Xaa is A or G
  MOD_RES (18), (19), (20), (21): Xaa is A or G or is absent
XSRVVMNPYVKLXXXXXXXXXFFLVSLSSLKTPAXTPKT

SEQ ID NO: 44627 - protein, 37 aa, Artificial Sequence
  GFR-binding peptide
  MOD_RES (35), (35): Xaa is C or S
  MOD_RES (11), (12), (13), (14), (15): Xaa is A or G
  MOD_RES (16), (17), (18), (19): Xaa is A or G or is absent
HEELRPYVKLXXXXXXXXXFFLVSLSSHHVRSPQXKV

SEQ ID NO: 44628 - protein, 36 aa, Artificial Sequence
  GFR-binding peptide
  MOD_RES (2), (4): Xaa is C or S
  MOD_RES (15), (16), (17), (18), (19): Xaa is A or G
  MOD_RES (20), (21), (22), (23): Xaa is A or G or is absent
SXKXSKVVMPYVKLXXXXXXXXXFFLISLSSLDQPV

SEQ ID NO: 44629 - protein, 31 aa, Artificial Sequence
  GFR-binding peptide
  MOD_RES (31), (31): Xaa is C or S
EVVMDPYVKLVVNNASDFFLISLSSLRTPVX

SEQ ID NO: 44630 - protein, 38 aa, Artificial Sequence
  GFR-binding peptide
  MOD_RES (33), (34): Xaa is C or S
  MOD_RES (11), (12), (13), (14), (15): Xaa is A or G
  MOD_RES (16), (17), (18), (19): Xaa is A or G or is absent
EVVMDPYVKLXXXXXXXXXFFLISLSSLRAPVXXSAPA

SEQ ID NO: 44631 - protein, 39 aa, Artificial Sequence
  GFR-binding peptide
  MOD_RES (1), (3), (35), (36): Xaa is C or S
XGXSRVVMNPYVKLIVNSSDDFFLVSLSSLKTPAXXPKP

SEQ ID NO: 44632 - protein, 40 aa, Artificial Sequence
  GFR-binding peptide
  MOD_RES (1), (3), (37), (38): Xaa is C or S
  MOD_RES (15), (16), (17), (18), (19): Xaa is A or G
  MOD_RES (20), (21), (22), (23): Xaa is A or G or is absent
XGXGEVVMEPYVKLXXXXXXXXXFFLMSLSSLETPVXXAK

SEQ ID NO: 44633 - protein, 41 aa, Artificial Sequence
  GFR-binding peptide
  MOD_RES (2), (4), (38), (39): Xaa is C or S
  MOD_RES (16), (17), (18), (19), (20): Xaa is A or G
  MOD_RES (21), (22), (23), (24): Xaa is A or G or is absent
HXGXARVVMNPYVKLXXXXXXXXXFFLVSLSSLQTPAXXPK

SEQ ID NO: 44634 - protein, 35 aa, Artificial Sequence
  GFR-binding peptide
  MOD_RES (34), (35): Xaa is C or S
  MOD_RES (12), (13), (14), (15), (16): Xaa is A or G
  MOD_RES (17), (18), (19), (20): Xaa is A or G or is absent
SEVTMNPYVKLXXXXXXXXXFFLISLSSMKEPVXX

SEQ ID NO: 44635 - protein, 34 aa, Artificial Sequence
  GFR-binding peptide
  MOD_RES (2), (34): Xaa is C or S
GXGEVVMEPYVKLVVKDYEDFFLMSLSSLETPVX

SEQ ID NO: 44636 - protein, 33 aa, Artificial Sequence
  GFR-binding peptide
  MOD_RES (2), (2): Xaa is C or S
GXRDVVMGPYVKLIIQQKDNFFLMSLSSMKTPT

SEQ ID NO: 44637 - protein, 35 aa, Artificial Sequence
  GFR-binding peptide
  MOD_RES (2), (34), (35): Xaa is C or S
GXSRVVMNPYVKLIVNSSDDFFLVSLSSLKTPAXX

SEQ ID NO: 44638 - protein, 41 aa, Artificial Sequence
  GFR-binding peptide
  MOD_RES (37), (37): Xaa is C or S
  MOD_RES (13), (14), (15), (16), (17): Xaa is A or G
  MOD_RES (18), (19), (20), (21): Xaa is A or G or is absent
ELHEELRPYVKLXXXXXXXXXFFLVSLSSHHVRSPQXKVSS

SEQ ID NO: 44639 - protein, 36 aa, Artificial Sequence
  GFR-binding peptide
  MOD_RES (1), (3), (36): Xaa is C or S
  MOD_RES (14), (15), (16), (17), (18): Xaa is A or G
  MOD_RES (19), (20), (21), (22): Xaa is A or G or is absent
XKXSKVVMPYVKLXXXXXXXXXFFLISLSSLDQPVX

SEQ ID NO: 44640 - protein, 34 aa, Artificial Sequence
  GFR-binding peptide
  MOD_RES (11), (12), (13), (14), (15): Xaa is A or G
  MOD_RES (16), (17), (18), (19): Xaa is A or G or is absent
HEELRPYVKLXXXXXXXXXFFLVSLSSHHVRSPQ

SEQ ID NO: 44641 - protein, 43 aa, Artificial Sequence
  GFR-binding peptide
  MOD_RES (2), (4), (38), (39): Xaa is C or S
  MOD_RES (16), (17), (18), (19), (20): Xaa is A or G
  MOD_RES (21), (22), (23), (24): Xaa is A or G or is absent
RXGXESVAMGPYVKLXXXXXXXXXFFLISLSSLKTPVXXAKSA

SEQ ID NO: 44642 - protein, 36 aa, Artificial Sequence
  GFR-binding peptide
  MOD_RES (31), (31): Xaa is C or S
RVVMNPYVKLIVNSSDDFFLVSLSSLKTPAXTPKTV

SEQ ID NO: 44643 - protein, 34 aa, Artificial Sequence
  GFR-binding peptide
  MOD_RES (2), (2): Xaa is C or S
  MOD_RES (13), (14), (15), (16), (17): Xaa is A or G
  MOD_RES (18), (19), (20), (21): Xaa is A or G or is absent
KXSKVIMPYVKLXXXXXXXXXFFLISLSSLDQSV

SEQ ID NO: 44644 - protein, 37 aa, Artificial Sequence
  GFR-binding peptide
  MOD_RES (2), (4), (37): Xaa is C or S
  MOD_RES (15), (16), (17), (18), (19): Xaa is A or G
  MOD_RES (20), (21), (22), (23): Xaa is A or G or is absent
LXGXEEVIMPYVKLXXXXXXXXXFFLMSLSSTKVPAX

SEQ ID NO: 44645 - protein, 38 aa, Artificial Sequence
  GFR-binding peptide
  MOD_RES (1), (3), (35), (36): Xaa is C or S
XGXSRVVMNPYVKLIVNSSDDFFLVSLSSLKTPAXXPK

SEQ ID NO: 44646 - protein, 40 aa, Artificial Sequence
  GFR-binding peptide
  MOD_RES (1), (34), (35): Xaa is C or S
  MOD_RES (12), (13), (14), (15), (16): Xaa is A or G
  MOD_RES (17), (18), (19), (20): Xaa is A or G or is absent
XSKVVMPYVKLXXXXXXXXXFFLISLSSLDQPVXXPSASA

SEQ ID NO: 44647 - protein, 37 aa, Artificial Sequence
  GFR-binding peptide
  MOD_RES (1), (32), (33): Xaa is C or S
XSKVVMPYVKLVKPTRGVLFFISLSSLDQPVXXPSAS

SEQ ID NO: 44648 - protein, 39 aa, Artificial Sequence
  GFR-binding peptide
  MOD_RES (1), (35), (36): Xaa is C or S
  MOD_RES (13), (14), (15), (16), (17): Xaa is A or G
  MOD_RES (18), (19), (20), (21): Xaa is A or G or is absent
XSEVTMNPYVKLXXXXXXXXXFFLISLSSMKEPVXXPEP

SEQ ID NO: 44649 - protein, 34 aa, Artificial Sequence
  GFR-binding peptide
  MOD_RES (33), (33): Xaa is C or S
  MOD_RES (11), (12), (13), (14), (15): Xaa is A or G
  MOD_RES (16), (17), (18), (19): Xaa is A or G or is absent
RVVMNPYVKLXXXXXXXXXFFLVSLSSLKTPAXT

SEQ ID NO: 44650 - protein, 34 aa, Artificial Sequence
  GFR-binding peptide
  MOD_RES (33), (34): Xaa is C or S
  MOD_RES (11), (12), (13), (14), (15): Xaa is A or G
  MOD_RES (16), (17), (18), (19): Xaa is A or G or is absent
EVVMDPYVKLXXXXXXXXXFFLISLSSLRTPVXX

SEQ ID NO: 44651 - protein, 42 aa, Artificial Sequence
  GFR-binding peptide
  MOD_RES (2), (4), (36), (37): Xaa is C or S
HXGXSRVVMNPYVKLIVNSSDDFFLVSLSSLKTPAXXPKPVH

SEQ ID NO: 44652 - protein, 42 aa, Artificial Sequence
  GFR-binding peptide
  MOD_RES (2), (4), (36), (37): Xaa is C or S
RXGXGEVVMDPYVKLVVKENEDFFLMSLSSLETPVXXAKPIK

SEQ ID NO: 44653 - protein, 36 aa, Artificial Sequence
  GFR-binding peptide
  MOD_RES (2), (34), (35): Xaa is C or S
GXESVAMGPYVKLYTVVGKDFFLISLSSLKTPVXXA

SEQ ID NO: 44654 - protein, 33 aa, Artificial Sequence
  GFR-binding peptide
  MOD_RES (12), (13), (14), (15), (16): Xaa is A or G
  MOD_RES (17), (18), (19), (20): Xaa is A or G or is absent
AEVVMDPYVKLXXXXXXXXXFFLISLSSLRAPV

SEQ ID NO: 44655 - protein, 32 aa, Artificial Sequence
  GFR-binding peptide
  MOD_RES (1), (1): Xaa is C or S
XAKVVMNPYVKLIVNNSSDFFLVSLSSLKTPA

SEQ ID NO: 44656 - protein, 39 aa, Artificial Sequence
  GFR-binding peptide
  MOD_RES (1), (3): Xaa is C or S
XAXELHEELRPYVKLLKPKKRVYEFFLVSLSSHHVRSPQ

SEQ ID NO: 44657 - protein, 43 aa, Artificial Sequence
  GFR-binding peptide
  MOD_RES (2), (4), (37), (38): Xaa is C or S
RXGXEAVSMGEPYVKLTPVGMDDFFLVSLSSLKTPVXXAKGVK

SEQ ID NO: 44658 - protein, 37 aa, Artificial Sequence
  GFR-binding peptide
  MOD_RES (2), (36), (37): Xaa is C or S
  MOD_RES (14), (15), (16), (17), (18): Xaa is A or G
  MOD_RES (19), (20), (21), (22): Xaa is A or G or is absent
GXSEVVMDPYVKLXXXXXXXXXFFLISLSSLRTPVXX

SEQ ID NO: 44659 - protein, 41 aa, Artificial Sequence
  GFR-binding peptide
  MOD_RES (1), (3), (40): Xaa is C or S
XAXELHEELRPYVKLLKPKKRVYEFFLVSLSSHHVRSPQXK

SEQ ID NO: 44660 - protein, 38 aa, Artificial Sequence
  GFR-binding peptide
  MOD_RES (34), (35): Xaa is C or S
  MOD_RES (12), (13), (14), (15), (16): Xaa is A or G
  MOD_RES (17), (18), (19), (20): Xaa is A or G or is absent
RDVVMGPYVKLXXXXXXXXXFFLMSLSSMKTPTXXPGA

SEQ ID NO: 44661 - protein, 36 aa, Artificial Sequence
  GFR-binding peptide
  MOD_RES (34), (35): Xaa is C or S
  MOD_RES (12), (13), (14), (15), (16): Xaa is A or G
  MOD_RES (17), (18), (19), (20): Xaa is A or G or is absent
SEVVMDPYVKLXXXXXXXXXFFLISLSSLRTPVXXT

SEQ ID NO: 44662 - protein, 39 aa, Artificial Sequence
  GFR-binding peptide
  MOD_RES (1), (34), (35): Xaa is C or S
XEAVSMGEPYVKLTPVGMDDFFLVSLSSLKTPVXXAKGV

SEQ ID NO: 44663 - protein, 41 aa, Artificial Sequence
  GFR-binding peptide
  MOD_RES (1), (38): Xaa is C or S
  MOD_RES (14), (15), (16), (17), (18): Xaa is A or G
  MOD_RES (19), (20), (21), (22): Xaa is A or G or is absent
XELHEELRPYVKLXXXXXXXXXFFLVSLSSHHVRSPQXKVS

SEQ ID NO: 44664 - protein, 44 aa, Artificial Sequence
  GFR-binding peptide
  MOD_RES (2), (4), (38), (39): Xaa is C or S
  MOD_RES (16), (17), (18), (19), (20): Xaa is A or G
  MOD_RES (21), (22), (23), (24): Xaa is A or G or is absent
RXGXSEVVMDPYVKLXXXXXXXXXFFLISLSSLRTPVXXTPPTS

SEQ ID NO: 44665 - protein, 40 aa, Artificial Sequence
  GFR-binding peptide
  MOD_RES (2), (34), (35): Xaa is C or S
GXAEVVMDPYVKLVVNNAADFFLISLSSLRAPVXXSAPAA

SEQ ID NO: 44666 - protein, 37 aa, Artificial Sequence
  GFR-binding peptide
  MOD_RES (1), (35), (36): Xaa is C or S
  MOD_RES (13), (14), (15), (16), (17): Xaa is A or G
  MOD_RES (18), (19), (20), (21): Xaa is A or G or is absent
XSRVVMNPYVKLXXXXXXXXXFFLVSLSSLKTPAXXP

SEQ ID NO: 44667 - protein, 37 aa, Artificial Sequence
  GFR-binding peptide
  MOD_RES (1), (3), (34), (35): Xaa is C or S
XGXEEVIMPYVKLLLVRGNDFFLMSLSSTKVPAXXTS

SEQ ID NO: 44668 - protein, 37 aa, Artificial Sequence
  GFR-binding peptide
  MOD_RES (31), (32): Xaa is C or S
EVVMDPYVKLVVNNASDFFLISLSSLRTPVXXTPPTS

SEQ ID NO: 44669 - protein, 31 aa, Artificial Sequence
  GFR-binding peptide
  MOD_RES (31), (31): Xaa is C or S
SVAMGPYVKLYTVVGKDFFLISLSSLKTPVX

SEQ ID NO: 44670 - protein, 42 aa, Artificial Sequence
  GFR-binding peptide
  MOD_RES (2), (4), (38), (39): Xaa is C or S
  MOD_RES (16), (17), (18), (19), (20): Xaa is A or G
  MOD_RES (21), (22), (23), (24): Xaa is A or G or is absent
RXGXSEVVMDPYVKLXXXXXXXXXFFLISLSSLRTPVXXTPP

SEQ ID NO: 44671 - protein, 40 aa, Artificial Sequence
  GFR-binding peptide
  MOD_RES (1), (35), (36): Xaa is C or S
  MOD_RES (13), (14), (15), (16), (17): Xaa is A or G
  MOD_RES (18), (19), (20), (21): Xaa is A or G or is absent
XSRVVMNPYVKLXXXXXXXXXFFLVSLSSLKTPAXXPKPV

SEQ ID NO: 44672 - protein, 35 aa, Artificial Sequence
  GFR-binding peptide
  MOD_RES (1), (32), (33): Xaa is C or S
XEEVIMPYVKLLLVRGNDFFLMSLSSTKVPAXXTS

SEQ ID NO: 44673 - protein, 40 aa, Artificial Sequence
  GFR-binding peptide
  MOD_RES (1), (3), (36), (37): Xaa is C or S
  MOD_RES (14), (15), (16), (17), (18): Xaa is A or G
  MOD_RES (19), (20), (21), (22): Xaa is A or G or is absent
XGXEEVIMPYVKLXXXXXXXXXFFLMSLSSTKVPAXXTSP

SEQ ID NO: 44674 - protein, 35 aa, Artificial Sequence
  GFR-binding peptide
  MOD_RES (1), (3): Xaa is C or S
  MOD_RES (14), (15), (16), (17), (18): Xaa is A or G
  MOD_RES (19), (20), (21), (22): Xaa is A or G or is absent
XKXSRVIMPYVKLXXXXXXXXXFFLISLSSLAQPV

SEQ ID NO: 44675 - protein, 32 aa, Artificial Sequence
  GFR-binding peptide
  MOD_RES (1), (32): Xaa is C or S
XSKVIMPYVKLIKPTKGILFFISLSSLDQSVX

SEQ ID NO: 44676 - protein, 36 aa, Artificial Sequence
  GFR-binding peptide
  MOD_RES (2), (4): Xaa is C or S
  MOD_RES (15), (16), (17), (18), (19): Xaa is A or G
  MOD_RES (20), (21), (22), (23): Xaa is A or G or is absent
SXKXSKVIMPYVKLXXXXXXXXXFFLISLSSLDQSV

SEQ ID NO: 44677 - protein, 35 aa, Artificial Sequence
  GFR-binding peptide
  MOD_RES (2), (34): Xaa is C or S
GXSRVVMNPYVKLIVNSSDDFFLVSLSSLKTPAXT

SEQ ID NO: 44678 - protein, 36 aa, Artificial Sequence
  GFR-binding peptide
  MOD_RES (2), (36): Xaa is C or S
  MOD_RES (14), (15), (16), (17), (18): Xaa is A or G
  MOD_RES (19), (20), (21), (22): Xaa is A or G or is absent
GXAEVVMDPYVKLXXXXXXXXXFFLISLSSLRAPVX

SEQ ID NO: 44679 - protein, 33 aa, Artificial Sequence
  GFR-binding peptide
  MOD_RES (1), (33): Xaa is C or S
XSEVVMDPYVKLVVNNASDFFLISLSSLRTPVX

SEQ ID NO: 44680 - protein, 34 aa, Artificial Sequence
  GFR-binding peptide
  MOD_RES (34), (34): Xaa is C or S
  MOD_RES (12), (13), (14), (15), (16): Xaa is A or G
  MOD_RES (17), (18), (19), (20): Xaa is A or G or is absent
SRVVMNPYVKLXXXXXXXXXFFLVSLSSLKTPAX

SEQ ID NO: 44681 - protein, 40 aa, Artificial Sequence
  GFR-binding peptide
  MOD_RES (2), (36), (37): Xaa is C or S
  MOD_RES (14), (15), (16), (17), (18): Xaa is A or G
  MOD_RES (19), (20), (21), (22): Xaa is A or G or is absent
GXAKVVMNPYVKLXXXXXXXXXFFLVSLSSLKTPAXXAKP

SEQ ID NO: 44682 - protein, 36 aa, Artificial Sequence
  GFR-binding peptide
  MOD_RES (32), (33): Xaa is C or S
SRVVMNPYVKLIVNSSDDFFLVSLSSLKTPAXXPKP

SEQ ID NO: 44683 - protein, 34 aa, Artificial Sequence
  GFR-binding peptide
  MOD_RES (32), (33): Xaa is C or S
GEVVMEPYVKLVVKDYEDFFLMSLSSLETPVXXA

SEQ ID NO: 44684 - protein, 38 aa, Artificial Sequence
  GFR-binding peptide
  MOD_RES (2), (34), (35): Xaa is C or S
GXESVAMGPYVKLYTVVGKDFFLISLSSLKTPVXXAKS

SEQ ID NO: 44685 - protein, 35 aa, Artificial Sequence
  GFR-binding peptide
  MOD_RES (32), (33): Xaa is C or S
AKVVMNPYVKLIVNNSSDFFLVSLSSLKTPAXXAK

SEQ ID NO: 44686 - protein, 40 aa, Artificial Sequence
  GFR-binding peptide
  MOD_RES (2), (4), (38), (39): Xaa is C or S
  MOD_RES (16), (17), (18), (19), (20): Xaa is A or G
  MOD_RES (21), (22), (23), (24): Xaa is A or G or is absent
HXGXSRVVMNPYVKLXXXXXXXXXFFLVSLSSLKTPAXXP

SEQ ID NO: 44687 - protein, 41 aa, Artificial Sequence
  GFR-binding peptide
  MOD_RES (2), (4), (36), (37): Xaa is C or S
HXGXSRVVMNPYVKLIVNSSDDFFLVSLSSLKTPAXXPKPV

SEQ ID NO: 44688 - protein, 38 aa, Artificial Sequence
  GFR-binding peptide
  MOD_RES (2), (4): Xaa is C or S
  MOD_RES (17), (18), (19), (20), (21): Xaa is A or G
  MOD_RES (22), (23), (24), (25): Xaa is A or G or is absent
RXGXEAVSMGEPYVKLXXXXXXXXXFFLVSLSSLKTPV

SEQ ID NO: 44689 - protein, 41 aa, Artificial Sequence
  GFR-binding peptide
  MOD_RES (1), (3), (37), (38): Xaa is C or S
  MOD_RES (15), (16), (17), (18), (19): Xaa is A or G
  MOD_RES (20), (21), (22), (23): Xaa is A or G or is absent
XGXAKVVMNPYVKLXXXXXXXXXFFLVSLSSLKTPAXXAKP

SEQ ID NO: 44690 - protein, 35 aa, Artificial Sequence
  GFR-binding peptide
  MOD_RES (2), (33), (34): Xaa is C or S
GXEEVIMPYVKLLLVRGNDFFLMSLSSTKVPAXXT

SEQ ID NO: 44691 - protein, 35 aa, Artificial Sequence
  GFR-binding peptide
ELHEELRPYVKLLKPKKRVYEFFLVSLSSHHVRSP

SEQ ID NO: 44692 - protein, 37 aa, Artificial Sequence
  GFR-binding peptide
  MOD_RES (2), (4), (36), (37): Xaa is C or S
HXGXARVVMNPYVKLIVNSSDDFFLVSLSSLQTPAXX

SEQ ID NO: 44693 - protein, 32 aa, Artificial Sequence
  GFR-binding peptide
  MOD_RES (1), (1): Xaa is C or S
XSEVVMDPYVKLVVNNASDFFLISLSSLRTPV

SEQ ID NO: 44694 - protein, 35 aa, Artificial Sequence
  GFR-binding peptide
  MOD_RES (2), (4), (35): Xaa is C or S
LXGXEEVIMPYVKLLLVRGNDFFLMSLSSTKVPAX

SEQ ID NO: 44695 - protein, 44 aa, Artificial Sequence
  GFR-binding peptide
  MOD_RES (1), (3), (38), (39): Xaa is C or S
  MOD_RES (16), (17), (18), (19), (20): Xaa is A or G
  MOD_RES (21), (22), (23), (24): Xaa is A or G or is absent
XGXEAVSMGEPYVKLXXXXXXXXXFFLVSLSSLKTPVXXAKGVK

SEQ ID NO: 44696 - protein, 43 aa, Artificial Sequence
  GFR-binding peptide
  MOD_RES (1), (3), (40): Xaa is C or S
  MOD_RES (16), (17), (18), (19), (20): Xaa is A or G
  MOD_RES (21), (22), (23), (24): Xaa is A or G or is absent
XAXELHEELRPYVKLXXXXXXXXXFFLVSLSSHHVRSPQXKVS

SEQ ID NO: 44697 - protein, 34 aa, Artificial Sequence
  GFR-binding peptide
ELHEELRPYVKLLKPKKRVYEFFLVSLSSHHVRS

SEQ ID NO: 44698 - protein, 39 aa, Artificial Sequence
  GFR-binding peptide
  MOD_RES (1), (3), (34), (35): Xaa is C or S
XGXEEVIMPYVKLLLVRGNDFFLMSLSSTKVPAXXTSPV

SEQ ID NO: 44699 - protein, 35 aa, Artificial Sequence
  GFR-binding peptide
  MOD_RES (33), (34): Xaa is C or S
  MOD_RES (11), (12), (13), (14), (15): Xaa is A or G
  MOD_RES (16), (17), (18), (19): Xaa is A or G or is absent
SKVVMPYVKLXXXXXXXXXFFLISLSSLDQPVXXP

SEQ ID NO: 44700 - protein, 39 aa, Artificial Sequence
  GFR-binding peptide
  MOD_RES (1), (3), (35), (36): Xaa is C or S
XGXAKVVMNPYVKLIVNNSSDFFLVSLSSLKTPAXXAKP

SEQ ID NO: 44701 - protein, 38 aa, Artificial Sequence
  GFR-binding peptide
  MOD_RES (34), (35): Xaa is C or S
  MOD_RES (12), (13), (14), (15), (16): Xaa is A or G
  MOD_RES (17), (18), (19), (20): Xaa is A or G or is absent
GEVVMEPYVKLXXXXXXXXXFFLMSLSSLETPVXXAKP

SEQ ID NO: 44702 - protein, 30 aa, Artificial Sequence
  GFR-binding peptide
SKVIMPYVKLIKPTKGILFFISLSSLDQSV

SEQ ID NO: 44703 - protein, 38 aa, Artificial Sequence
  GFR-binding peptide
  MOD_RES (1), (3), (37), (38): Xaa is C or S
  MOD_RES (15), (16), (17), (18), (19): Xaa is A or G
  MOD_RES (20), (21), (22), (23): Xaa is A or G or is absent
XGXARVVMNPYVKLXXXXXXXXXFFLVSLSSLQTPAXX

SEQ ID NO: 44704 - protein, 42 aa, Artificial Sequence
  GFR-binding peptide
  MOD_RES (2), (4), (41): Xaa is C or S
  MOD_RES (17), (18), (19), (20), (21): Xaa is A or G
  MOD_RES (22), (23), (24), (25): Xaa is A or G or is absent
AXAXELHEELRPYVKLXXXXXXXXXFFLVSLSSHHVRSPQXK

SEQ ID NO: 44705 - protein, 43 aa, Artificial Sequence
  GFR-binding peptide
  MOD_RES (1), (3), (37), (38): Xaa is C or S
  MOD_RES (15), (16), (17), (18), (19): Xaa is A or G
  MOD_RES (20), (21), (22), (23): Xaa is A or G or is absent
XGXARVVMNPYVKLXXXXXXXXXFFLVSLSSLQTPAXXPKPVT

SEQ ID NO: 44706 - protein, 43 aa, Artificial Sequence
  GFR-binding peptide
  MOD_RES (2), (4), (38), (39): Xaa is C or S
  MOD_RES (16), (17), (18), (19), (20): Xaa is A or G
  MOD_RES (21), (22), (23), (24): Xaa is A or G or is absent
HXGXSRVVMNPYVKLXXXXXXXXXFFLVSLSSLKTPAXXPKPV

SEQ ID NO: 44707 - protein, 35 aa, Artificial Sequence
  GFR-binding peptide
  MOD_RES (31), (32): Xaa is C or S
KVVMNPYVKLIVNNSSDFFLVSLSSLKTPAXXAKP

SEQ ID NO: 44708 - protein, 38 aa, Artificial Sequence
  GFR-binding peptide
  MOD_RES (1), (33), (34): Xaa is C or S
XAKVVMNPYVKLIVNNSSDFFLVSLSSLKTPAXXAKPV

SEQ ID NO: 44709 - protein, 36 aa, Artificial Sequence
  GFR-binding peptide
  MOD_RES (1), (35), (36): Xaa is C or S
  MOD_RES (13), (14), (15), (16), (17): Xaa is A or G
  MOD_RES (18), (19), (20), (21): Xaa is A or G or is absent
XAKVVMNPYVKLXXXXXXXXXFFLVSLSSLKTPAXX

SEQ ID NO: 44710 - protein, 39 aa, Artificial Sequence
  GFR-binding peptide
  MOD_RES (2), (4), (37), (38): Xaa is C or S
  MOD_RES (15), (16), (17), (18), (19): Xaa is A or G
  MOD_RES (20), (21), (22), (23): Xaa is A or G or is absent
SXKXSKVVMPYVKLXXXXXXXXXFFLISLSSLDQPVXXP

SEQ ID NO: 44711 - protein, 35 aa, Artificial Sequence
  GFR-binding peptide
  MOD_RES (33), (34): Xaa is C or S
  MOD_RES (11), (12), (13), (14), (15): Xaa is A or G
  MOD_RES (16), (17), (18), (19): Xaa is A or G or is absent
SKVIMPYVKLXXXXXXXXXFFLISLSSLDQSVXXP

SEQ ID NO: 44712 - protein, 36 aa, Artificial Sequence
  GFR-binding peptide
  MOD_RES (34), (34): Xaa is C or S
  MOD_RES (12), (13), (14), (15), (16): Xaa is A or G
  MOD_RES (17), (18), (19), (20): Xaa is A or G or is absent
SRVVMNPYVKLXXXXXXXXXFFLVSLSSLKTPAXTP

SEQ ID NO: 44713 - protein, 34 aa, Artificial Sequence
  GFR-binding peptide
  MOD_RES (31), (32): Xaa is C or S
SKVVMPYVKLVKPTRGVLFFISLSSLDQPVXXPS

SEQ ID NO: 44714 - protein, 35 aa, Artificial Sequence
  GFR-binding peptide
  MOD_RES (31), (32): Xaa is C or S
SVAMGPYVKLYTVVGKDFFLISLSSLKTPVXXAKS

SEQ ID NO: 44715 - protein, 42 aa, Artificial Sequence
  GFR-binding peptide
  MOD_RES (1), (3), (37), (38): Xaa is C or S
  MOD_RES (15), (16), (17), (18), (19): Xaa is A or G
  MOD_RES (20), (21), (22), (23): Xaa is A or G or is absent
XGXGEVVMEPYVKLXXXXXXXXXFFLMSLSSLETPVXXAKPI

SEQ ID NO: 44716 - protein, 35 aa, Artificial Sequence
  GFR-binding peptide
  MOD_RES (33), (34): Xaa is C or S
  MOD_RES (11), (12), (13), (14), (15): Xaa is A or G
  MOD_RES (16), (17), (18), (19): Xaa is A or G or is absent
KVVMNPYVKLXXXXXXXXXFFLVSLSSLKTPAXXA

SEQ ID NO: 44717 - protein, 34 aa, Artificial Sequence
  GFR-binding peptide
  MOD_RES (1), (1): Xaa is C or S
  MOD_RES (13), (14), (15), (16), (17): Xaa is A or G
  MOD_RES (18), (19), (20), (21): Xaa is A or G or is absent
XESVAMGPYVKLXXXXXXXXXFFLISLSSLKTPV

SEQ ID NO: 44718 - protein, 36 aa, Artificial Sequence
  GFR-binding peptide
  MOD_RES (1), (35): Xaa is C or S
XKNHQLFPYVKLHQGQHPKIRFFLMSLSSEETPVXE

SEQ ID NO: 44719 - protein, 34 aa, Artificial Sequence
  GFR-binding peptide
  MOD_RES (2), (33), (34): Xaa is C or S
KXSKVVMPYVKLVKPTRGVLFFISLSSLDQPVXX

SEQ ID NO: 44720 - protein, 36 aa, Artificial Sequence
  GFR-binding peptide
  MOD_RES (2), (4), (35), (36): Xaa is C or S
SXKXSRVIMPYVKLVKPKRGVLFFISLSSLAQPVXX

SEQ ID NO: 44721 - protein, 36 aa, Artificial Sequence
  GFR-binding peptide
  MOD_RES (1), (3): Xaa is C or S
  MOD_RES (15), (16), (17), (18), (19): Xaa is A or G
  MOD_RES (20), (21), (22), (23): Xaa is A or G or is absent
XGXRDVVMGPYVKLXXXXXXXXXFFLMSLSSMKTPT

SEQ ID NO: 44722 - protein, 40 aa, Artificial Sequence
  GFR-binding peptide
  MOD_RES (2), (4), (36): Xaa is C or S
HXGXSRVVMNPYVKLIVNSSDDFFLVSLSSLKTPAXTPKT

SEQ ID NO: 44723 - protein, 36 aa, Artificial Sequence
  GFR-binding peptide
  MOD_RES (31), (32): Xaa is C or S
RVVMNPYVKLIVNSSDDFFLVSLSSLQTPAXXPKPV

SEQ ID NO: 44724 - protein, 41 aa, Artificial Sequence
  GFR-binding peptide
  MOD_RES (1), (3), (35), (36): Xaa is C or S
XGXESVAMGPYVKLYTVVGKDFFLISLSSLKTPVXXAKSAK

SEQ ID NO: 44725 - protein, 40 aa, Artificial Sequence
  GFR-binding peptide
  MOD_RES (2), (36), (37): Xaa is C or S
  MOD_RES (14), (15), (16), (17), (18): Xaa is A or G
  MOD_RES (19), (20), (21), (22): Xaa is A or G or is absent
GXRDVVMGPYVKLXXXXXXXXXFFLMSLSSMKTPTXXPGA

SEQ ID NO: 44726 - protein, 40 aa, Artificial Sequence
  GFR-binding peptide
  MOD_RES (2), (4), (39), (40): Xaa is C or S
  MOD_RES (17), (18), (19), (20), (21): Xaa is A or G
  MOD_RES (22), (23), (24), (25): Xaa is A or G or is absent
RXGXEAVSMGEPYVKLXXXXXXXXXFFLVSLSSLKTPVXX

SEQ ID NO: 44727 - protein, 36 aa, Artificial Sequence
  GFR-binding peptide
  MOD_RES (31), (32): Xaa is C or S
EVTMNPYVKLVVNKNEDFFLISLSSMKEPVXXPEPI

SEQ ID NO: 44728 - protein, 35 aa, Artificial Sequence
  GFR-binding peptide
  MOD_RES (31), (32): Xaa is C or S
SRVIMPYVKLVKPKRGVLFFISLSSLAQPVXXPAA

SEQ ID NO: 44729 - protein, 37 aa, Artificial Sequence
  GFR-binding peptide
  MOD_RES (31), (32): Xaa is C or S
KVVMNPYVKLIVNNSSDFFLVSLSSLKTPAXXAKPVA

SEQ ID NO: 44730 - protein, 39 aa, Artificial Sequence
  GFR-binding peptide
  MOD_RES (2), (4), (37), (38): Xaa is C or S
RXGXEAVSMGEPYVKLTPVGMDDFFLVSLSSLKTPVXXA

SEQ ID NO: 44731 - protein, 39 aa, Artificial Sequence
  GFR-binding peptide
  MOD_RES (1), (33), (34): Xaa is C or S
XESVAMGPYVKLYTVVGKDFFLISLSSLKTPVXXAKSAK

SEQ ID NO: 44732 - protein, 33 aa, Artificial Sequence
  GFR-binding peptide
  MOD_RES (1), (33): Xaa is C or S
XESVAMGPYVKLYTVVGKDFFLISLSSLKTPVX

SEQ ID NO: 44733 - protein, 41 aa, Artificial Sequence
  GFR-binding peptide
  MOD_RES (2), (4), (37), (38): Xaa is C or S
  MOD_RES (15), (16), (17), (18), (19): Xaa is A or G
  MOD_RES (20), (21), (22), (23): Xaa is A or G or is absent
SXKXSKVIMPYVKLXXXXXXXXXFFLISLSSLDQSVXXPSA

SEQ ID NO: 44734 - protein, 36 aa, Artificial Sequence
  GFR-binding peptide
  MOD_RES (1), (3), (35), (36): Xaa is C or S
XGXESVAMGPYVKLYTVVGKDFFLISLSSLKTPVXX

SEQ ID NO: 44735 - protein, 37 aa, Artificial Sequence
  GFR-binding peptide
  MOD_RES (2), (36), (37): Xaa is C or S
  MOD_RES (14), (15), (16), (17), (18): Xaa is A or G
  MOD_RES (19), (20), (21), (22): Xaa is A or G or is absent
GXESVAMGPYVKLXXXXXXXXXFFLISLSSLKTPVXX

SEQ ID NO: 44736 - protein, 35 aa, Artificial Sequence
  GFR-binding peptide
  MOD_RES (1), (34), (35): Xaa is C or S
  MOD_RES (12), (13), (14), (15), (16): Xaa is A or G
  MOD_RES (17), (18), (19), (20): Xaa is A or G or is absent
XSKVVMPYVKLXXXXXXXXXFFLISLSSLDQPVXX

SEQ ID NO: 44737 - protein, 36 aa, Artificial Sequence
  GFR-binding peptide
  MOD_RES (33), (33): Xaa is C or S
  MOD_RES (11), (12), (13), (14), (15): Xaa is A or G
  MOD_RES (16), (17), (18), (19): Xaa is A or G or is absent
NHQLFPYVKLXXXXXXXXXFFLMSLSSEETPVXELG

SEQ ID NO: 44738 - protein, 35 aa, Artificial Sequence
  GFR-binding peptide
  MOD_RES (33), (34): Xaa is C or S
  MOD_RES (11), (12), (13), (14), (15): Xaa is A or G
  MOD_RES (16), (17), (18), (19): Xaa is A or G or is absent
EVTMNPYVKLXXXXXXXXXFFLISLSSMKEPVXXP

SEQ ID NO: 44739 - protein, 40 aa, Artificial Sequence
  GFR-binding peptide
  MOD_RES (1), (34), (35): Xaa is C or S
  MOD_RES (12), (13), (14), (15), (16): Xaa is A or G
  MOD_RES (17), (18), (19), (20): Xaa is A or G or is absent
XSRVIMPYVKLXXXXXXXXXFFLISLSSLAQPVXXPAASA

SEQ ID NO: 44740 - protein, 34 aa, Artificial Sequence
  GFR-binding peptide
  MOD_RES (1), (1): Xaa is C or S
  MOD_RES (13), (14), (15), (16), (17): Xaa is A or G
  MOD_RES (18), (19), (20), (21): Xaa is A or G or is absent
XSRVVMNPYVKLXXXXXXXXXFFLVSLSSLKTPA

SEQ ID NO: 44741 - protein, 42 aa, Artificial Sequence
  GFR-binding peptide
  MOD_RES (2), (4), (37), (38): Xaa is C or S
RXGXEAVSMGEPYVKLTPVGMDDFFLVSLSSLKTPVXXAKGV

SEQ ID NO: 44742 - protein, 37 aa, Artificial Sequence
  GFR-binding peptide
  MOD_RES (2), (4), (36), (37): Xaa is C or S
HXGXAKVVMNPYVKLIVNNSSDFFLVSLSSLKTPAXX

SEQ ID NO: 44743 - protein, 35 aa, Artificial Sequence
  GFR-binding peptide
  MOD_RES (2), (35): Xaa is C or S
  MOD_RES (13), (14), (15), (16), (17): Xaa is A or G
  MOD_RES (18), (19), (20), (21): Xaa is A or G or is absent
GXEEVIMPYVKLXXXXXXXXXFFLMSLSSTKVPAX

SEQ ID NO: 44744 - protein, 40 aa, Artificial Sequence
  GFR-binding peptide
  MOD_RES (2), (4), (36), (37): Xaa is C or S
RXGXESVAMGPYVKLYTVVGKDFFLISLSSLKTPVXXAKS

SEQ ID NO: 44745 - protein, 44 aa, Artificial Sequence
  GFR-binding peptide
  MOD_RES (2), (4), (38): Xaa is C or S
  MOD_RES (16), (17), (18), (19), (20): Xaa is A or G
  MOD_RES (21), (22), (23), (24): Xaa is A or G or is absent
RXEXKNHQLFPYVKLXXXXXXXXXFFLMSLSSEETPVXELGEDN

SEQ ID NO: 44746 - protein, 38 aa, Artificial Sequence
  GFR-binding peptide
  MOD_RES (32), (33): Xaa is C or S
SEVTMNPYVKLVVNKNEDFFLISLSSMKEPVXXPEPIG

SEQ ID NO: 44747 - protein, 38 aa, Artificial Sequence
  GFR-binding peptide
  MOD_RES (2), (4), (36), (37): Xaa is C or S
RXGXGEVVMEPYVKLVVKDYEDFFLMSLSSLETPVXXA

SEQ ID NO: 44748 - protein, 36 aa, Artificial Sequence
  GFR-binding peptide
  MOD_RES (31), (32): Xaa is C or S
KVVMNPYVKLIVNNSSDFFLVSLSSLKTPAXXAKPV

SEQ ID NO: 44749 - protein, 37 aa, Artificial Sequence
  GFR-binding peptide
  MOD_RES (1), (3), (37): Xaa is C or S
  MOD_RES (15), (16), (17), (18), (19): Xaa is A or G
  MOD_RES (20), (21), (22), (23): Xaa is A or G or is absent
XGXSEVVMDPYVKLXXXXXXXXXFFLISLSSLRTPVX

SEQ ID NO: 44750 - protein, 39 aa, Artificial Sequence
  GFR-binding peptide
  MOD_RES (2), (4), (36): Xaa is C or S
HXGXSRVVMNPYVKLIVNSSDDFFLVSLSSLKTPAXTPK

SEQ ID NO: 44751 - protein, 34 aa, Artificial Sequence
  GFR-binding peptide
  MOD_RES (32), (33): Xaa is C or S
SEVVMDPYVKLVVNNASDFFLISLSSLRTPVXXT

SEQ ID NO: 44752 - protein, 35 aa, Artificial Sequence
  GFR-binding peptide
  MOD_RES (31), (32): Xaa is C or S
SKVVMPYVKLVKPTRGVLFFISLSSLDQPVXXPSA

SEQ ID NO: 44753 - protein, 37 aa, Artificial Sequence
  GFR-binding peptide
  MOD_RES (35), (36): Xaa is C or S
  MOD_RES (13), (14), (15), (16), (17): Xaa is A or G
  MOD_RES (18), (19), (20), (21): Xaa is A or G or is absent
EAVSMGEPYVKLXXXXXXXXXFFLVSLSSLKTPVXXA

SEQ ID NO: 44754 - protein, 39 aa, Artificial Sequence
  GFR-binding peptide
  MOD_RES (36), (36): Xaa is C or S
  MOD_RES (12), (13), (14), (15), (16): Xaa is A or G
  MOD_RES (17), (18), (19), (20): Xaa is A or G or is absent
LHEELRPYVKLXXXXXXXXXFFLVSLSSHHVRSPQXKVS

SEQ ID NO: 44755 - protein, 35 aa, Artificial Sequence
  GFR-binding peptide
  MOD_RES (2), (2): Xaa is C or S
  MOD_RES (14), (15), (16), (17), (18): Xaa is A or G
  MOD_RES (19), (20), (21), (22): Xaa is A or G or is absent
GXARVVMNPYVKLXXXXXXXXXFFLVSLSSLQTPA

SEQ ID NO: 44756 - protein, 35 aa, Artificial Sequence
  GFR-binding peptide
  MOD_RES (2), (35): Xaa is C or S
  MOD_RES (13), (14), (15), (16), (17): Xaa is A or G
  MOD_RES (18), (19), (20), (21): Xaa is A or G or is absent
KXSKVVMPYVKLXXXXXXXXXFFLISLSSLDQPVX

SEQ ID NO: 44757 - protein, 37 aa, Artificial Sequence
  GFR-binding peptide
  MOD_RES (31), (32): Xaa is C or S
EVVMEPYVKLVVKDYEDFFLMSLSSLETPVXXAKPIS

SEQ ID NO: 44758 - protein, 35 aa, Artificial Sequence
  GFR-binding peptide
  MOD_RES (1), (35): Xaa is C or S
  MOD_RES (13), (14), (15), (16), (17): Xaa is A or G
  MOD_RES (18), (19), (20), (21): Xaa is A or G or is absent
XSRVVMNPYVKLXXXXXXXXXFFLVSLSSLKTPAX

SEQ ID NO: 44759 - protein, 38 aa, Artificial Sequence
  GFR-binding peptide
  MOD_RES (1), (3), (37): Xaa is C or S
  MOD_RES (15), (16), (17), (18), (19): Xaa is A or G
  MOD_RES (20), (21), (22), (23): Xaa is A or G or is absent
XGXSRVVMNPYVKLXXXXXXXXXFFLVSLSSLKTPAXT

SEQ ID NO: 44760 - protein, 38 aa, Artificial Sequence
  GFR-binding peptide
  MOD_RES (2), (4), (35), (36): Xaa is C or S
SXKXSRVIMPYVKLVKPKRGVLFFISLSSLAQPVXXPA

SEQ ID NO: 44761 - protein, 30 aa, Artificial Sequence
  GFR-binding peptide
SRVIMPYVKLVKPKRGVLFFISLSSLAQPV

SEQ ID NO: 44762 - protein, 37 aa, Artificial Sequence
  GFR-binding peptide
  MOD_RES (1), (3), (34), (35): Xaa is C or S
XKXSKVIMPYVKLIKPTKGILFFISLSSLDQSVXXPS

SEQ ID NO: 44763 - protein, 34 aa, Artificial Sequence
  GFR-binding peptide
  MOD_RES (1), (3): Xaa is C or S
XAXSEVTMNPYVKLVVNKNEDFFLISLSSMKEPV

SEQ ID NO: 44764 - protein, 40 aa, Artificial Sequence
  GFR-binding peptide
  MOD_RES (1), (35), (36): Xaa is C or S
  MOD_RES (13), (14), (15), (16), (17): Xaa is A or G
  MOD_RES (18), (19), (20), (21): Xaa is A or G or is absent
XGEVVMEPYVKLXXXXXXXXXFFLMSLSSLETPVXXAKPI

SEQ ID NO: 44765 - protein, 37 aa, Artificial Sequence
  GFR-binding peptide
  MOD_RES (1), (33), (34): Xaa is C or S
XAKVVMNPYVKLIVNNSSDFFLVSLSSLKTPAXXAKP

SEQ ID NO: 44766 - protein, 37 aa, Artificial Sequence
  GFR-binding peptide
  MOD_RES (1), (3), (35), (36): Xaa is C or S
XGXESVAMGPYVKLYTVVGKDFFLISLSSLKTPVXXA

SEQ ID NO: 44767 - protein, 33 aa, Artificial Sequence
  GFR-binding peptide
  MOD_RES (2), (2): Xaa is C or S
GXSEVVMDPYVKLVVNNASDFFLISLSSLRTPV

SEQ ID NO: 44768 - protein, 40 aa, Artificial Sequence
  GFR-binding peptide
  MOD_RES (37), (37): Xaa is C or S
  MOD_RES (13), (14), (15), (16), (17): Xaa is A or G
  MOD_RES (18), (19), (20), (21): Xaa is A or G or is absent
ELHEELRPYVKLXXXXXXXXXFFLVSLSSHHVRSPQXKVS

SEQ ID NO: 44769 - protein, 37 aa, Artificial Sequence
  GFR-binding peptide
  MOD_RES (2), (4): Xaa is C or S
  MOD_RES (16), (17), (18), (19), (20): Xaa is A or G
  MOD_RES (21), (22), (23), (24): Xaa is A or G or is absent
RXGXGEVVMEPYVKLXXXXXXXXXFFLMSLSSLETPV

SEQ ID NO: 44770 - protein, 36 aa, Artificial Sequence
  GFR-binding peptide
  MOD_RES (1), (35): Xaa is C or S
  MOD_RES (13), (14), (15), (16), (17): Xaa is A or G
  MOD_RES (18), (19), (20), (21): Xaa is A or G or is absent
XKNHQLFPYVKLXXXXXXXXXFFLMSLSSEETPVXE

SEQ ID NO: 44771 - protein, 36 aa, Artificial Sequence
  GFR-binding peptide
  MOD_RES (33), (33): Xaa is C or S
NHQLFPYVKLHQGQHPKIRFFLMSLSSEETPVXELG

SEQ ID NO: 44772 - protein, 35 aa, Artificial Sequence
  GFR-binding peptide
  MOD_RES (2), (34), (35): Xaa is C or S
GXESVAMGPYVKLYTVVGKDFFLISLSSLKTPVXX

SEQ ID NO: 44773 - protein, 37 aa, Artificial Sequence
  GFR-binding peptide
  MOD_RES (1), (3), (35), (36): Xaa is C or S
XGXGEVVMEPYVKLVVKDYEDFFLMSLSSLETPVXXA

SEQ ID NO: 44774 - protein, 36 aa, Artificial Sequence
  GFR-binding peptide
  MOD_RES (35), (36): Xaa is C or S
  MOD_RES (13), (14), (15), (16), (17): Xaa is A or G
  MOD_RES (18), (19), (20), (21): Xaa is A or G or is absent
EAVSMGEPYVKLXXXXXXXXXFFLVSLSSLKTPVXX

SEQ ID NO: 44775 - protein, 40 aa, Artificial Sequence
  GFR-binding peptide
  MOD_RES (2), (34), (35): Xaa is C or S
GXAKVVMNPYVKLIVNNSSDFFLVSLSSLKTPAXXAKPVA

SEQ ID NO: 44776 - protein, 36 aa, Artificial Sequence
  GFR-binding peptide
  MOD_RES (1), (3), (36): Xaa is C or S
XGXEAVSMGEPYVKLTPVGMDDFFLVSLSSLKTPVX

SEQ ID NO: 44777 - protein, 44 aa, Artificial Sequence
  GFR-binding peptide
  MOD_RES (2), (4), (41): Xaa is C or S
  MOD_RES (17), (18), (19), (20), (21): Xaa is A or G
  MOD_RES (22), (23), (24), (25): Xaa is A or G or is absent
AXAXELHEELRPYVKLXXXXXXXXXFFLVSLSSHHVRSPQXKVS

SEQ ID NO: 44778 - protein, 35 aa, Artificial Sequence
  GFR-binding peptide
  MOD_RES (2), (34), (35): Xaa is C or S
GXARVVMNPYVKLIVNSSDDFFLVSLSSLQTPAXX

SEQ ID NO: 44779 - protein, 39 aa, Artificial Sequence
  GFR-binding peptide
  MOD_RES (2), (4), (36), (37): Xaa is C or S
HXGXSRVVMNPYVKLIVNSSDDFFLVSLSSLKTPAXXPK

SEQ ID NO: 44780 - protein, 35 aa, Artificial Sequence
  GFR-binding peptide
  MOD_RES (1), (3), (35): Xaa is C or S
XGXRDVVMGPYVKLIIQQKDNFFLMSLSSMKTPTX

SEQ ID NO: 44781 - protein, 38 aa, Artificial Sequence
  GFR-binding peptide
  MOD_RES (2), (4), (38): Xaa is C or S
  MOD_RES (16), (17), (18), (19), (20): Xaa is A or G
  MOD_RES (21), (22), (23), (24): Xaa is A or G or is absent
SXGXRDVVMGPYVKLXXXXXXXXXFFLMSLSSMKTPTX

SEQ ID NO: 44782 - protein, 32 aa, Artificial Sequence
  GFR-binding peptide
  MOD_RES (32), (32): Xaa is C or S
AKVVMNPYVKLIVNNSSDFFLVSLSSLKTPAX

SEQ ID NO: 44783 - protein, 38 aa, Artificial Sequence
  GFR-binding peptide
  MOD_RES (32), (33): Xaa is C or S
RDVVMGPYVKLIIQQKDNFFLMSLSSMKTPTXXPGASG

SEQ ID NO: 44784 - protein, 39 aa, Artificial Sequence
  GFR-binding peptide
  MOD_RES (1), (38): Xaa is C or S
  MOD_RES (14), (15), (16), (17), (18): Xaa is A or G
  MOD_RES (19), (20), (21), (22): Xaa is A or G or is absent
XELHEELRPYVKLXXXXXXXXXFFLVSLSSHHVRSPQXK

SEQ ID NO: 44785 - protein, 35 aa, Artificial Sequence
  GFR-binding peptide
  MOD_RES (2), (34), (35): Xaa is C or S
GXAEVVMDPYVKLVVNNAADFFLISLSSLRAPVXX

SEQ ID NO: 44786 - protein, 35 aa, Artificial Sequence
  GFR-binding peptide
  MOD_RES (2), (2): Xaa is C or S
  MOD_RES (14), (15), (16), (17), (18): Xaa is A or G
  MOD_RES (19), (20), (21), (22): Xaa is A or G or is absent
GXAKVVMNPYVKLXXXXXXXXXFFLVSLSSLKTPA

SEQ ID NO: 44787 - protein, 35 aa, Artificial Sequence
  GFR-binding peptide
  MOD_RES (35), (35): Xaa is C or S
HEELRPYVKLLKPKKRVYEFFLVSLSSHHVRSPQX

SEQ ID NO: 44788 - protein, 37 aa, Artificial Sequence
  GFR-binding peptide
  MOD_RES (1), (3), (34), (35): Xaa is C or S
XKXSKVVMPYVKLVKPTRGVLFFISLSSLDQPVXXPS

SEQ ID NO: 44789 - protein, 38 aa, Artificial Sequence
  GFR-binding peptide
  MOD_RES (1), (3), (38): Xaa is C or S
  MOD_RES (16), (17), (18), (19), (20): Xaa is A or G
  MOD_RES (21), (22), (23), (24): Xaa is A or G or is absent
XGXEAVSMGEPYVKLXXXXXXXXXFFLVSLSSLKTPVX

SEQ ID NO: 44790 - protein, 36 aa, Artificial Sequence
  GFR-binding peptide
  MOD_RES (1), (3), (35), (36): Xaa is C or S
XGXGEVVMEPYVKLVVKDYEDFFLMSLSSLETPVXX

SEQ ID NO: 44791 - protein, 35 aa, Artificial Sequence
  GFR-binding peptide
  MOD_RES (2), (4): Xaa is C or S
RXGXESVAMGPYVKLYTVVGKDFFLISLSSLKTPV

SEQ ID NO: 44792 - protein, 39 aa, Artificial Sequence
  GFR-binding peptide
  MOD_RES (2), (36), (37): Xaa is C or S
  MOD_RES (14), (15), (16), (17), (18): Xaa is A or G
  MOD_RES (19), (20), (21), (22): Xaa is A or G or is absent
GXAKVVMNPYVKLXXXXXXXXXFFLVSLSSLKTPAXXAK

SEQ ID NO: 44793 - protein, 43 aa, Artificial Sequence
  GFR-binding peptide
  MOD_RES (1), (3), (37): Xaa is C or S
  MOD_RES (15), (16), (17), (18), (19): Xaa is A or G
  MOD_RES (20), (21), (22), (23): Xaa is A or G or is absent
XEXKNHQLFPYVKLXXXXXXXXXFFLMSLSSEETPVXELGEDN

SEQ ID NO: 44794 - protein, 33 aa, Artificial Sequence
  GFR-binding peptide
  MOD_RES (2), (33): Xaa is C or S
KXSKVVMPYVKLVKPTRGVLFFISLSSLDQPVX

SEQ ID NO: 44795 - protein, 43 aa, Artificial Sequence
  GFR-binding peptide
  MOD_RES (5), (6), (40), (42): Xaa is C or S
  MOD_RES (20), (21), (22), (23), (24): Xaa is A or G
  MOD_RES (25), (26), (27), (28): Xaa is A or G or is absent
IPKAXXVPTELSSLSMLFFXXXXXXXXXLKVYPEMVVEGXGXR

SEQ ID NO: 44796 - protein, 35 aa, Artificial Sequence
  GFR-binding peptide
  MOD_RES (32), (34): Xaa is C or S
APTQLSSLSVLFFDDSSNVILKVYPNMVVRAXGXH

SEQ ID NO: 44797 - protein, 40 aa, Artificial Sequence
  GFR-binding peptide
  MOD_RES (4), (5), (38), (40): Xaa is C or S
  MOD_RES (19), (20), (21), (22), (23): Xaa is A or G
  MOD_RES (24), (25), (26), (27): Xaa is A or G or is absent
AAPXXVPQALSSLSILFFXXXXXXXXXLKVYPMIVRSXKX

SEQ ID NO: 44798 - protein, 37 aa, Artificial Sequence
  GFR-binding peptide
  MOD_RES (6), (7): Xaa is C or S
GSAGPXXTPTKMSSLSMLFFNDKQQIILKVYPGMVVD

SEQ ID NO: 44799 - protein, 38 aa, Artificial Sequence
  GFR-binding peptide
  MOD_RES (1), (2), (36), (38): Xaa is C or S
  MOD_RES (16), (17), (18), (19), (20): Xaa is A or G
  MOD_RES (21), (22), (23), (24): Xaa is A or G or is absent
XXAPTKLSSLSVLFFXXXXXXXXXLKVYPNMVVRSXGX

SEQ ID NO: 44800 - protein, 39 aa, Artificial Sequence
  GFR-binding peptide
  MOD_RES (2), (3), (37), (39): Xaa is C or S
  MOD_RES (17), (18), (19), (20), (21): Xaa is A or G
  MOD_RES (22), (23), (24), (25): Xaa is A or G or is absent
PXXTPTKMSSLSMLFFXXXXXXXXXLKVYPGMVVDRXGX

SEQ ID NO: 44801 - protein, 36 aa, Artificial Sequence
  GFR-binding peptide
  MOD_RES (34), (36): Xaa is C or S
  MOD_RES (14), (15), (16), (17), (18): Xaa is A or G
  MOD_RES (19), (20), (21), (22): Xaa is A or G or is absent
VPTRLSSLSILFFXXXXXXXXXLKVYPDMVVESXGX

SEQ ID NO: 44802 - protein, 38 aa, Artificial Sequence
  GFR-binding peptide
  MOD_RES (4), (5), (36), (38): Xaa is C or S
AAPXXVPQALSSLSILFFVGRKPKVLKVYPMIVRSXKX

SEQ ID NO: 44803 - protein, 37 aa, Artificial Sequence
  GFR-binding peptide
  MOD_RES (4), (5): Xaa is C or S
  MOD_RES (19), (20), (21), (22), (23): Xaa is A or G
  MOD_RES (24), (25), (26), (27): Xaa is A or G or is absent
SKAXXVPTKLSSLSILFFXXXXXXXXXLKVYPGMAVS

SEQ ID NO: 44804 - protein, 43 aa, Artificial Sequence
  GFR-binding peptide
  MOD_RES (7), (41), (43): Xaa is C or S
  MOD_RES (21), (22), (23), (24), (25): Xaa is A or G
  MOD_RES (26), (27), (28), (29): Xaa is A or G or is absent
HVTKPTXAPTKLSSLSVLFFXXXXXXXXXLKVYPNMVVRSXGX

SEQ ID NO: 44805 - protein, 39 aa, Artificial Sequence
  GFR-binding peptide
  MOD_RES (6), (6): Xaa is C or S
DEGLEXVPTEESSLSMLFFRIKPHQGQHLKVYPFLQHNK

SEQ ID NO: 44806 - protein, 36 aa, Artificial Sequence
  GFR-binding peptide
  MOD_RES (1), (2), (36): Xaa is C or S
  MOD_RES (16), (17), (18), (19), (20): Xaa is A or G
  MOD_RES (21), (22), (23), (24): Xaa is A or G or is absent
XXVPEKMSSLSILFFXXXXXXXXXLKVYPNMTVESX

SEQ ID NO: 44807 - protein, 40 aa, Artificial Sequence
  GFR-binding peptide
  MOD_RES (4), (38), (40): Xaa is C or S
  MOD_RES (18), (19), (20), (21), (22): Xaa is A or G
  MOD_RES (23), (24), (25), (26): Xaa is A or G or is absent
GLEXVPTEESSLSMLFFXXXXXXXXXLKVYPFLQHNKXEX

SEQ ID NO: 44808 - protein, 41 aa, Artificial Sequence
  GFR-binding peptide
  MOD_RES (6), (40): Xaa is C or S
  MOD_RES (20), (21), (22), (23), (24): Xaa is A or G
  MOD_RES (25), (26), (27), (28): Xaa is A or G or is absent
DEGLEXVPTEESSLSMLFFXXXXXXXXXLKVYPFLQHNKXE

SEQ ID NO: 44809 - protein, 44 aa, Artificial Sequence
  GFR-binding peptide
  MOD_RES (6), (7), (41), (43): Xaa is C or S
  MOD_RES (21), (22), (23), (24), (25): Xaa is A or G
  MOD_RES (26), (27), (28), (29): Xaa is A or G or is absent
TVPKPXXAPTQLSSLSVLFFXXXXXXXXXLKVYPNMVVRAXGXH

SEQ ID NO: 44810 - protein, 39 aa, Artificial Sequence
  GFR-binding peptide
  MOD_RES (1), (2), (37), (39): Xaa is C or S
  MOD_RES (16), (17), (18), (19), (20): Xaa is A or G
  MOD_RES (21), (22), (23), (24): Xaa is A or G or is absent
XXVPTKLSSLSVLFFXXXXXXXXXLKVYPEGMSVAEXGX

SEQ ID NO: 44811 - protein, 35 aa, Artificial Sequence
  GFR-binding peptide
  MOD_RES (3), (4), (35): Xaa is C or S
SPXXVSQDLSSLSILFFIGKTPKILKVYPMIVKSX

SEQ ID NO: 44812 - protein, 33 aa, Artificial Sequence
  GFR-binding peptide
  MOD_RES (33), (33): Xaa is C or S
  MOD_RES (14), (15), (16), (17), (18): Xaa is A or G
  MOD_RES (19), (20), (21), (22): Xaa is A or G or is absent
APVKTSSLSMLFFXXXXXXXXXLKVYPMIVEEX

SEQ ID NO: 44813 - protein, 40 aa, Artificial Sequence
  GFR-binding peptide
  MOD_RES (4), (5), (38), (40): Xaa is C or S
  MOD_RES (19), (20), (21), (22), (23): Xaa is A or G
  MOD_RES (24), (25), (26), (27): Xaa is A or G or is absent
ASPXXVSQDLSSLSILFFXXXXXXXXXLKVYPMIVKSXKX

SEQ ID NO: 44814 - protein, 38 aa, Artificial Sequence
  GFR-binding peptide
  MOD_RES (2), (3), (35), (37): Xaa is C or S
PXXVPEKMSSLSILFFDENKNVVLKVYPNMTVESXAXR

SEQ ID NO: 44815 - protein, 34 aa, Artificial Sequence
  GFR-binding peptide
  MOD_RES (33), (33): Xaa is C or S
  MOD_RES (14), (15), (16), (17), (18): Xaa is A or G
  MOD_RES (19), (20), (21), (22): Xaa is A or G or is absent
VPQDLSSLSILFFXXXXXXXXXLKVYPMVVKSXK

SEQ ID NO: 44816 - protein, 35 aa, Artificial Sequence
  GFR-binding peptide
  MOD_RES (1), (34): Xaa is C or S
XVPTKLSSLSVLFFDDMGVPTLKVYPEGMSVAEXG

SEQ ID NO: 44817 - protein, 39 aa, Artificial Sequence
  GFR-binding peptide
  MOD_RES (6), (7): Xaa is C or S
  MOD_RES (21), (22), (23), (24), (25): Xaa is A or G
  MOD_RES (26), (27), (28), (29): Xaa is A or G or is absent
KASKAXXVPTKLSSLSILFFXXXXXXXXXLKVYPGMAVS

SEQ ID NO: 44818 - protein, 40 aa, Artificial Sequence
  GFR-binding peptide
  MOD_RES (2), (3), (37), (39): Xaa is C or S
  MOD_RES (17), (18), (19), (20), (21): Xaa is A or G
  MOD_RES (22), (23), (24), (25): Xaa is A or G or is absent
AXXVPTKLSSLSILFFXXXXXXXXXLKVYPGMAVSEXGXR

SEQ ID NO: 44819 - protein, 37 aa, Artificial Sequence
  GFR-binding peptide
  MOD_RES (6), (7): Xaa is C or S
TVPKPXXAPTQLSSLSVLFFDDSSNVILKVYPNMVVR

SEQ ID NO: 44820 - protein, 44 aa, Artificial Sequence
  GFR-binding peptide
  MOD_RES (6), (7), (41), (43): Xaa is C or S
  MOD_RES (21), (22), (23), (24), (25): Xaa is A or G
  MOD_RES (26), (27), (28), (29): Xaa is A or G or is absent
KIPKAXXVPTELSSLSMLFFXXXXXXXXXLKVYPDMVVEGXGXR

SEQ ID NO: 44821 - protein, 40 aa, Artificial Sequence
  GFR-binding peptide
  MOD_RES (5), (6), (40): Xaa is C or S
  MOD_RES (20), (21), (22), (23), (24): Xaa is A or G
  MOD_RES (25), (26), (27), (28): Xaa is A or G or is absent
ASKAXXVPTKLSSLSILFFXXXXXXXXXLKVYPGMAVSEX

SEQ ID NO: 44822 - protein, 38 aa, Artificial Sequence
  GFR-binding peptide
  MOD_RES (7), (7): Xaa is C or S
HVTKPTXAPTKLSSLSVLFFDDSSNVILKVYPNMVVRS

SEQ ID NO: 44823 - protein, 37 aa, Artificial Sequence
  GFR-binding peptide
  MOD_RES (1), (35), (37): Xaa is C or S
  MOD_RES (15), (16), (17), (18), (19): Xaa is A or G
  MOD_RES (20), (21), (22), (23): Xaa is A or G or is absent
XTPTKMSSLSMLFFXXXXXXXXXLKVYPGMVVDRXGX

SEQ ID NO: 44824 - protein, 41 aa, Artificial Sequence
  GFR-binding peptide
  MOD_RES (4), (5), (39), (41): Xaa is C or S
  MOD_RES (19), (20), (21), (22), (23): Xaa is A or G
  MOD_RES (24), (25), (26), (27): Xaa is A or G or is absent
PASXXVPARLSSLSILFFXXXXXXXXXLKVYPDMVVEAXGX

SEQ ID NO: 44825 - protein, 40 aa, Artificial Sequence
  GFR-binding peptide
  MOD_RES (5), (6), (39): Xaa is C or S
VGKAXXVPTKLSSLSVLFFDDMGVPTLKVYPEGMSVAEXG

SEQ ID NO: 44826 - protein, 36 aa, Artificial Sequence
  GFR-binding peptide
  MOD_RES (2), (3), (35): Xaa is C or S
PXXVPEKMSSLSILFFDENKNVVLKVYPNMTVESXA

SEQ ID NO: 44827 - protein, 37 aa, Artificial Sequence
  GFR-binding peptide
  MOD_RES (4), (4): Xaa is C or S
  MOD_RES (18), (19), (20), (21), (22): Xaa is A or G
  MOD_RES (23), (24), (25), (26): Xaa is A or G or is absent
KPTXAPTKLSSLSVLFFXXXXXXXXXLKVYPNMVVRS

SEQ ID NO: 44828 - protein, 36 aa, Artificial Sequence
  GFR-binding peptide
  MOD_RES (3), (4), (35): Xaa is C or S
APXXVPQALSSLSILFFVGRKPKVLKVYPMIVRSXK

SEQ ID NO: 44829 - protein, 36 aa, Artificial Sequence
  GFR-binding peptide
  MOD_RES (1), (2), (35): Xaa is C or S
XXVPTKLSSLSVLFFDDMGVPTLKVYPEGMSVAEXG

SEQ ID NO: 44830 - protein, 41 aa, Artificial Sequence
  GFR-binding peptide
  MOD_RES (6), (7), (39), (41): Xaa is C or S
STPPTXXVPTRLSSLSILFFDSANNVVLKVYPDMVVESXGX

SEQ ID NO: 44831 - protein, 32 aa, Artificial Sequence
  GFR-binding peptide
SRVHHSSLSVLFFEYVRKKPKLLKVYPRLEEH

SEQ ID NO: 44832 - protein, 35 aa, Artificial Sequence
  GFR-binding peptide
  MOD_RES (1), (32), (34): Xaa is C or S
XVSQDLSSLSILFFIGKTPKILKVYPMIVKSXKXS

SEQ ID NO: 44833 - protein, 42 aa, Artificial Sequence
  GFR-binding peptide
  MOD_RES (5), (6), (40), (42): Xaa is C or S
  MOD_RES (20), (21), (22), (23), (24): Xaa is A or G
  MOD_RES (25), (26), (27), (28): Xaa is A or G or is absent
VPKPXXAPTQLSSLSVLFFXXXXXXXXXLKVYPNMVVRAXGX

SEQ ID NO: 44834 - protein, 34 aa, Artificial Sequence
  GFR-binding peptide
  MOD_RES (2), (3), (34): Xaa is C or S
PXXVPQDLSSLSILFFVGRTPKVLKVYPMVVKSX

SEQ ID NO: 44835 - protein, 33 aa, Artificial Sequence
  GFR-binding peptide
  MOD_RES (1), (2): Xaa is C or S
XXTPTKMSSLSMLFFNDKQQIILKVYPGMVVDR

SEQ ID NO: 44836 - protein, 39 aa, Artificial Sequence
  GFR-binding peptide
  MOD_RES (4), (5), (38): Xaa is C or S
  MOD_RES (19), (20), (21), (22), (23): Xaa is A or G
  MOD_RES (24), (25), (26), (27): Xaa is A or G or is absent
ASPXXVSQDLSSLSILFFXXXXXXXXXLKVYPMIVKSXK

SEQ ID NO: 44837 - protein, 37 aa, Artificial Sequence
  GFR-binding peptide
  MOD_RES (2), (3), (35), (37): Xaa is C or S
AXXAPTKLSSLSVLFFDSSNNVILKVYPNMVVKAXGX

SEQ ID NO: 44838 - protein, 39 aa, Artificial Sequence
  GFR-binding peptide
  MOD_RES (3), (4), (38): Xaa is C or S
  MOD_RES (18), (19), (20), (21), (22): Xaa is A or G
  MOD_RES (23), (24), (25), (26): Xaa is A or G or is absent
KPXXAPTQLSSLSVLFFXXXXXXXXXLKVYPNMVVRAXG

SEQ ID NO: 44839 - protein, 39 aa, Artificial Sequence
  GFR-binding peptide
  MOD_RES (7), (39): Xaa is C or S
HVTKPTXAPTKLSSLSVLFFDDSSNVILKVYPNMVVRSX

SEQ ID NO: 44840 - protein, 40 aa, Artificial Sequence
  GFR-binding peptide
  MOD_RES (7), (7): Xaa is C or S
  MOD_RES (21), (22), (23), (24), (25): Xaa is A or G
  MOD_RES (26), (27), (28), (29): Xaa is A or G or is absent
HVTKPTXAPTKLSSLSVLFFXXXXXXXXXLKVYPNMVVRS

SEQ ID NO: 44841 - protein, 43 aa, Artificial Sequence
  GFR-binding peptide
  MOD_RES (5), (42): Xaa is C or S
SSVKXQPSRVHHSSLSVLFFEYVRKKPKLLKVYPRLEEHLEXA

SEQ ID NO: 44842 - protein, 37 aa, Artificial Sequence
  GFR-binding peptide
  MOD_RES (4), (5), (37): Xaa is C or S
PKPXXAPTQLSSLSVLFFDDSSNVILKVYPNMVVRAX

SEQ ID NO: 44843 - protein, 35 aa, Artificial Sequence
  GFR-binding peptide
  MOD_RES (3), (3): Xaa is C or S
LEXVPTEESSLSMLFFRIKPHQGQHLKVYPFLQHN

SEQ ID NO: 44844 - protein, 34 aa, Artificial Sequence
  GFR-binding peptide
  MOD_RES (1), (34): Xaa is C or S
  MOD_RES (15), (16), (17), (18), (19): Xaa is A or G
  MOD_RES (20), (21), (22), (23): Xaa is A or G or is absent
XAPVKTSSLSMLFFXXXXXXXXXLKVYPMIVEEX

SEQ ID NO: 44845 - protein, 36 aa, Artificial Sequence
  GFR-binding peptide
  MOD_RES (3), (4), (36): Xaa is C or S
EPXXVPEKMSSLSILFFDENKNVVLKVYPNMTVESX

SEQ ID NO: 44846 - protein, 40 aa, Artificial Sequence
  GFR-binding peptide
  MOD_RES (6), (40): Xaa is C or S
  MOD_RES (20), (21), (22), (23), (24): Xaa is A or G
  MOD_RES (25), (26), (27), (28): Xaa is A or G or is absent
DEGLEXVPTEESSLSMLFFXXXXXXXXXLKVYPFLQHNKX

SEQ ID NO: 44847 - protein, 41 aa, Artificial Sequence
  GFR-binding peptide
  MOD_RES (5), (39), (41): Xaa is C or S
  MOD_RES (19), (20), (21), (22), (23): Xaa is A or G
  MOD_RES (24), (25), (26), (27): Xaa is A or G or is absent
TKPTXAPTKLSSLSVLFFXXXXXXXXXLKVYPNMVVRSXGX

SEQ ID NO: 44848 - protein, 36 aa, Artificial Sequence
  GFR-binding peptide
  MOD_RES (36), (36): Xaa is C or S
PSRVHHSSLSVLFFEYVRKKPKLLKVYPRLEEHLEX

SEQ ID NO: 44849 - protein, 35 aa, Artificial Sequence
  GFR-binding peptide
  MOD_RES (3), (4): Xaa is C or S
EPXXVPEKMSSLSILFFDENKNVVLKVYPNMTVES

SEQ ID NO: 44850 - protein, 34 aa, Artificial Sequence
  GFR-binding peptide
  MOD_RES (3), (4): Xaa is C or S
SPXXVSQDLSSLSILFFIGKTPKILKVYPMIVKS

SEQ ID NO: 44851 - protein, 41 aa, Artificial Sequence
  GFR-binding peptide
  MOD_RES (5), (6), (40): Xaa is C or S
  MOD_RES (20), (21), (22), (23), (24): Xaa is A or G
  MOD_RES (25), (26), (27), (28): Xaa is A or G or is absent
APASXXVPARLSSLSILFFXXXXXXXXXLKVYPDMVVEAXG

SEQ ID NO: 44852 - protein, 39 aa, Artificial Sequence
  GFR-binding peptide
  MOD_RES (6), (7), (38): Xaa is C or S
ASAAPXXVPQALSSLSILFFVGRKPKVLKVYPMIVRSXK

SEQ ID NO: 44853 - protein, 38 aa, Artificial Sequence
  GFR-binding peptide
  MOD_RES (4), (5): Xaa is C or S
  MOD_RES (19), (20), (21), (22), (23): Xaa is A or G
  MOD_RES (24), (25), (26), (27): Xaa is A or G or is absent
PKPXXAPTKLSSLSVLFFXXXXXXXXXLKVYPNMVVRS

SEQ ID NO: 44854 - protein, 34 aa, Artificial Sequence
  GFR-binding peptide
  MOD_RES (2), (3), (34): Xaa is C or S
TXXAPVKTSSLSMLFFDNGRVLLLKVYPMIVEEX

SEQ ID NO: 44855 - protein, 34 aa, Artificial Sequence
  GFR-binding peptide
  MOD_RES (2), (3): Xaa is C or S
SXXVPARLSSLSILFFDAANNVVLKVYPDMVVEA

SEQ ID NO: 44856 - protein, 42 aa, Artificial Sequence
  GFR-binding peptide
  MOD_RES (5), (6), (40), (42): Xaa is C or S
  MOD_RES (20), (21), (22), (23), (24): Xaa is A or G
  MOD_RES (25), (26), (27), (28): Xaa is A or G or is absent
VPKAXXAPTKLSSLSVLFFXXXXXXXXXLKVYPNMVVKAXGX

SEQ ID NO: 44857 - protein, 37 aa, Artificial Sequence
  GFR-binding peptide
  MOD_RES (1), (35), (37): Xaa is C or S
  MOD_RES (15), (16), (17), (18), (19): Xaa is A or G
  MOD_RES (20), (21), (22), (23): Xaa is A or G or is absent
XAPTQLSSLSVLFFXXXXXXXXXLKVYPNMVVRAXGX

SEQ ID NO: 44858 - protein, 38 aa, Artificial Sequence
  GFR-binding peptide
  MOD_RES (5), (6): Xaa is C or S
  MOD_RES (20), (21), (22), (23), (24): Xaa is A or G
  MOD_RES (25), (26), (27), (28): Xaa is A or G or is absent
VPSTXXAPVKTSSLSMLFFXXXXXXXXXLKVYPMIVEE

SEQ ID NO: 44859 - protein, 38 aa, Artificial Sequence
  GFR-binding peptide
  MOD_RES (1), (35), (37): Xaa is C or S
  MOD_RES (15), (16), (17), (18), (19): Xaa is A or G
  MOD_RES (20), (21), (22), (23): Xaa is A or G or is absent
XVPEKMSSLSILFFXXXXXXXXXLKVYPNMTVESXAXR

SEQ ID NO: 44860 - protein, 36 aa, Artificial Sequence
  GFR-binding peptide
  MOD_RES (1), (1): Xaa is C or S
XQPSRVHHSSLSVLFFEYVRKKPKLLKVYPRLEEHL

SEQ ID NO: 44861 - protein, 40 aa, Artificial Sequence
  GFR-binding peptide
  MOD_RES (4), (5), (37), (39): Xaa is C or S
PKAXXAPTKLSSLSVLFFDSSNNVILKVYPNMVVKAXGXH

SEQ ID NO: 44862 - protein, 35 aa, Artificial Sequence
  GFR-binding peptide
  MOD_RES (34), (34): Xaa is C or S
  MOD_RES (14), (15), (16), (17), (18): Xaa is A or G
  MOD_RES (19), (20), (21), (22): Xaa is A or G or is absent
VPARLSSLSILFFXXXXXXXXXLKVYPDMVVEAXG

SEQ ID NO: 44863 - protein, 34 aa, Artificial Sequence
  GFR-binding peptide
  MOD_RES (1), (2), (34): Xaa is C or S
XXAPTKLSSLSVLFFDDSSNVILKVYPNMVVRSX

SEQ ID NO: 44864 - protein, 41 aa, Artificial Sequence
  GFR-binding peptide
  MOD_RES (4), (5), (38), (40): Xaa is C or S
  MOD_RES (19), (20), (21), (22), (23): Xaa is A or G
  MOD_RES (24), (25), (26), (27): Xaa is A or G or is absent
AAPXXVPQALSSLSILFFXXXXXXXXXLKVYPMIVRSXKXS

SEQ ID NO: 44865 - protein, 35 aa, Artificial Sequence
  GFR-binding peptide
  MOD_RES (1), (2): Xaa is C or S
  MOD_RES (16), (17), (18), (19), (20): Xaa is A or G
  MOD_RES (21), (22), (23), (24): Xaa is A or G or is absent
XXAPTKLSSLSVLFFXXXXXXXXXLKVYPNMVVRS

SEQ ID NO: 44866 - protein, 38 aa, Artificial Sequence
  GFR-binding peptide
  MOD_RES (5), (6), (38): Xaa is C or S
APASXXVPARLSSLSILFFDAANNVVLKVYPDMVVEAX

SEQ ID NO: 44867 - protein, 37 aa, Artificial Sequence
  GFR-binding peptide
  MOD_RES (2), (2): Xaa is C or S
KXQPSRVHHSSLSVLFFEYVRKKPKLLKVYPRLEEHL

SEQ ID NO: 44868 - protein, 38 aa, Artificial Sequence
  GFR-binding peptide
  MOD_RES (3), (4), (38): Xaa is C or S
  MOD_RES (18), (19), (20), (21), (22): Xaa is A or G
  MOD_RES (23), (24), (25), (26): Xaa is A or G or is absent
KPXXAPTKLSSLSVLFFXXXXXXXXXLKVYPNMVVRSX

SEQ ID NO: 44869 - protein, 36 aa, Artificial Sequence
  GFR-binding peptide
  MOD_RES (1), (2), (33), (35): Xaa is C or S
XXVPQDLSSLSILFFVGRTPKVLKVYPMVVKSXKXS

SEQ ID NO: 44870 - protein, 42 aa, Artificial Sequence
  GFR-binding peptide
  MOD_RES (4), (5), (39), (41): Xaa is C or S
  MOD_RES (19), (20), (21), (22), (23): Xaa is A or G
  MOD_RES (24), (25), (26), (27): Xaa is A or G or is absent
PKPXXAPTKLSSLSVLFFXXXXXXXXXLKVYPNMVVRSXGXH

SEQ ID NO: 44871 - protein, 38 aa, Artificial Sequence
  GFR-binding peptide
  MOD_RES (1), (2), (36), (38): Xaa is C or S
  MOD_RES (16), (17), (18), (19), (20): Xaa is A or G
  MOD_RES (21), (22), (23), (24): Xaa is A or G or is absent
XXVPTELSSLSMLFFXXXXXXXXXLKVYPEMVVEGXGX

SEQ ID NO: 44872 - protein, 33 aa, Artificial Sequence
  GFR-binding peptide
  MOD_RES (1), (1): Xaa is C or S
  MOD_RES (15), (16), (17), (18), (19): Xaa is A or G
  MOD_RES (20), (21), (22), (23): Xaa is A or G or is absent
XVSQDLSSLSILFFXXXXXXXXXLKVYPMIVKS

SEQ ID NO: 44873 - protein, 36 aa, Artificial Sequence
  GFR-binding peptide
QPSRVHHSSLSVLFFEYVRKKPKLLKVYPRLEEHLE

SEQ ID NO: 44874 - protein, 34 aa, Artificial Sequence
  GFR-binding peptide
  MOD_RES (1), (2): Xaa is C or S
  MOD_RES (16), (17), (18), (19), (20): Xaa is A or G
  MOD_RES (21), (22), (23), (24): Xaa is A or G or is absent
XXVSQDLSSLSILFFXXXXXXXXXLKVYPMIVKS

SEQ ID NO: 44875 - protein, 38 aa, Artificial Sequence
  GFR-binding peptide
  MOD_RES (5), (6): Xaa is C or S
  MOD_RES (20), (21), (22), (23), (24): Xaa is A or G
  MOD_RES (25), (26), (27), (28): Xaa is A or G or is absent
VPKPXXAPTKLSSLSVLFFXXXXXXXXXLKVYPNMVVR

SEQ ID NO: 44876 - protein, 38 aa, Artificial Sequence
  GFR-binding peptide
  MOD_RES (5), (6), (38): Xaa is C or S
TPPTXXVPTRLSSLSILFFDSANNVVLKVYPDMVVESX

SEQ ID NO: 44877 - protein, 42 aa, Artificial Sequence
  GFR-binding peptide
  MOD_RES (6), (7), (41): Xaa is C or S
  MOD_RES (21), (22), (23), (24), (25): Xaa is A or G
  MOD_RES (26), (27), (28), (29): Xaa is A or G or is absent
AAPASXXVPARLSSLSILFFXXXXXXXXXLKVYPDMVVEAXG

SEQ ID NO: 44878 - protein, 34 aa, Artificial Sequence
  GFR-binding peptide
  MOD_RES (1), (2), (34): Xaa is C or S
XXVPTKLSSLSILFFDKGVVTYLKVYPGMAVSEX

SEQ ID NO: 44879 - protein, 33 aa, Artificial Sequence
  GFR-binding peptide
  MOD_RES (1), (1): Xaa is C or S
XVPTEESSLSMLFFRIKPHQGQHLKVYPFLQHN

SEQ ID NO: 44880 - protein, 40 aa, Artificial Sequence
  GFR-binding peptide
  MOD_RES (6), (7): Xaa is C or S
  MOD_RES (21), (22), (23), (24), (25): Xaa is A or G
  MOD_RES (26), (27), (28), (29): Xaa is A or G or is absent
AAPASXXVPARLSSLSILFFXXXXXXXXXLKVYPDMVVEA

SEQ ID NO: 44881 - protein, 36 aa, Artificial Sequence
  GFR-binding peptide
  MOD_RES (1), (2), (35): Xaa is C or S
  MOD_RES (16), (17), (18), (19), (20): Xaa is A or G
  MOD_RES (21), (22), (23), (24): Xaa is A or G or is absent
XXAPVKTSSLSMLFFXXXXXXXXXLKVYPMIVEEXG

SEQ ID NO: 44882 - protein, 36 aa, Artificial Sequence
  GFR-binding peptide
  MOD_RES (1), (35): Xaa is C or S
  MOD_RES (15), (16), (17), (18), (19): Xaa is A or G
  MOD_RES (20), (21), (22), (23): Xaa is A or G or is absent
XAPTKLSSLSVLFFXXXXXXXXXLKVYPNMVVRSXG

SEQ ID NO: 44883 - protein, 35 aa, Artificial Sequence
  GFR-binding peptide
  MOD_RES (2), (3), (35): Xaa is C or S
PXXTPTKMSSLSMLFFNDKQQIILKVYPGMVVDRX

SEQ ID NO: 44884 - protein, 34 aa, Artificial Sequence
  GFR-binding peptide
  MOD_RES (1), (2): Xaa is C or S
  MOD_RES (16), (17), (18), (19), (20): Xaa is A or G
  MOD_RES (21), (22), (23), (24): Xaa is A or G or is absent
XXAPTKLSSLSVLFFXXXXXXXXXLKVYPNMVVK

SEQ ID NO: 44885 - protein, 39 aa, Artificial Sequence
  GFR-binding peptide
  MOD_RES (5), (6), (38): Xaa is C or S
ASKAXXVPTKLSSLSILFFDKGVVTYLKVYPGMAVSEXG

SEQ ID NO: 44886 - protein, 39 aa, Artificial Sequence
  GFR-binding peptide
  MOD_RES (2), (36), (38): Xaa is C or S
EXVPTEESSLSMLFFRIKPHQGQHLKVYPFLQHNKXEXR

SEQ ID NO: 44887 - protein, 35 aa, Artificial Sequence
  GFR-binding peptide
  MOD_RES (34), (34): Xaa is C or S
  MOD_RES (14), (15), (16), (17), (18): Xaa is A or G
  MOD_RES (19), (20), (21), (22): Xaa is A or G or is absent
VPTELSSLSMLFFXXXXXXXXXLKVYPEMVVEGXG

SEQ ID NO: 44888 - protein, 34 aa, Artificial Sequence
  GFR-binding peptide
  MOD_RES (1), (2): Xaa is C or S
  MOD_RES (16), (17), (18), (19), (20): Xaa is A or G
  MOD_RES (21), (22), (23), (24): Xaa is A or G or is absent
XXAPTKLSSLSVLFFXXXXXXXXXLKVYPNMVVR

SEQ ID NO: 44889 - protein, 32 aa, Artificial Sequence
  GFR-binding peptide
  MOD_RES (2), (2): Xaa is C or S
TXAPTKLSSLSVLFFDDSSNVILKVYPNMVVR

SEQ ID NO: 44890 - protein, 37 aa, Artificial Sequence
  GFR-binding peptide
  MOD_RES (3), (4), (37): Xaa is C or S
  MOD_RES (18), (19), (20), (21), (22): Xaa is A or G
  MOD_RES (23), (24), (25), (26): Xaa is A or G or is absent
STXXAPVKTSSLSMLFFXXXXXXXXXLKVYPMIVEEX

SEQ ID NO: 44891 - protein, 40 aa, Artificial Sequence
  GFR-binding peptide
  MOD_RES (3), (37), (39): Xaa is C or S
LEXVPTEESSLSMLFFRIKPHQGQHLKVYPFLQHNKXEXR

SEQ ID NO: 44892 - protein, 37 aa, Artificial Sequence
  GFR-binding peptide
  MOD_RES (1), (2), (36): Xaa is C or S
  MOD_RES (16), (17), (18), (19), (20): Xaa is A or G
  MOD_RES (21), (22), (23), (24): Xaa is A or G or is absent
XXTPTKMSSLSMLFFXXXXXXXXXLKVYPGMVVDRXG

SEQ ID NO: 44893 - protein, 32 aa, Artificial Sequence
  GFR-binding peptide
  MOD_RES (14), (15), (16), (17), (18): Xaa is A or G
  MOD_RES (19), (20), (21), (22): Xaa is A or G or is absent
VPQDLSSLSILFFXXXXXXXXXLKVYPMVVKS

SEQ ID NO: 44894 - protein, 33 aa, Artificial Sequence
  GFR-binding peptide
  MOD_RES (1), (32): Xaa is C or S
XAPVKTSSLSMLFFDNGRVLLLKVYPMIVEEXG

SEQ ID NO: 44895 - protein, 35 aa, Artificial Sequence
  GFR-binding peptide
  MOD_RES (3), (4): Xaa is C or S
GPXXTPTKMSSLSMLFFNDKQQIILKVYPGMVVDR

SEQ ID NO: 44896 - protein, 38 aa, Artificial Sequence
  GFR-binding peptide
  MOD_RES (1), (2), (36), (38): Xaa is C or S
  MOD_RES (16), (17), (18), (19), (20): Xaa is A or G
  MOD_RES (21), (22), (23), (24): Xaa is A or G or is absent
XXVPTKLSSLSILFFXXXXXXXXXLKVYPGMAVSEXGX

SEQ ID NO: 44897 - protein, 37 aa, Artificial Sequence
  GFR-binding peptide
  MOD_RES (1), (2), (36): Xaa is C or S
  MOD_RES (16), (17), (18), (19), (20): Xaa is A or G
  MOD_RES (21), (22), (23), (24): Xaa is A or G or is absent
XXVPARLSSLSILFFXXXXXXXXXLKVYPDMVVEAXG

SEQ ID NO: 44898 - protein, 36 aa, Artificial Sequence
  GFR-binding peptide
  MOD_RES (3), (4): Xaa is C or S
  MOD_RES (18), (19), (20), (21), (22): Xaa is A or G
  MOD_RES (23), (24), (25), (26): Xaa is A or G or is absent
KAXXVPTKLSSLSILFFXXXXXXXXXLKVYPGMAVS

SEQ ID NO: 44899 - protein, 35 aa, Artificial Sequence
  GFR-binding peptide
  MOD_RES (1), (35): Xaa is C or S
  MOD_RES (15), (16), (17), (18), (19): Xaa is A or G
  MOD_RES (20), (21), (22), (23): Xaa is A or G or is absent
XVPTEESSLSMLFFXXXXXXXXXLKVYPFLQHNKX

SEQ ID NO: 44900 - protein, 39 aa, Artificial Sequence
  GFR-binding peptide
  MOD_RES (2), (3), (37), (39): Xaa is C or S
  MOD_RES (17), (18), (19), (20), (21): Xaa is A or G
  MOD_RES (22), (23), (24), (25): Xaa is A or G or is absent
PXXAPTQLSSLSVLFFXXXXXXXXXLKVYPNMVVRAXGX

SEQ ID NO: 44901 - protein, 36 aa, Artificial Sequence
  GFR-binding peptide
  MOD_RES (3), (3): Xaa is C or S
LEXVPTEESSLSMLFFRIKPHQGQHLKVYPFLQHNK

SEQ ID NO: 44902 - protein, 35 aa, Artificial Sequence
  GFR-binding peptide
  MOD_RES (1), (34): Xaa is C or S
  MOD_RES (15), (16), (17), (18), (19): Xaa is A or G
  MOD_RES (20), (21), (22), (23): Xaa is A or G or is absent
XVSQDLSSLSILFFXXXXXXXXXLKVYPMIVKSXK

SEQ ID NO: 44903 - protein, 33 aa, Artificial Sequence
  GFR-binding peptide
  MOD_RES (33), (33): Xaa is C or S
VPTKLSSLSVLFFDDMGVPTLKVYPEGMSVAEX

SEQ ID NO: 44904 - protein, 39 aa, Artificial Sequence
  GFR-binding peptide
  MOD_RES (5), (6), (38): Xaa is C or S
SAGPXXTPTKMSSLSMLFFNDKQQIILKVYPGMVVDRXG

SEQ ID NO: 44905 - protein, 43 aa, Artificial Sequence
  GFR-binding peptide
  MOD_RES (6), (7), (41), (43): Xaa is C or S
  MOD_RES (21), (22), (23), (24), (25): Xaa is A or G
  MOD_RES (26), (27), (28), (29): Xaa is A or G or is absent
HVPKPXXAPTKLSSLSVLFFXXXXXXXXXLKVYPNMVVRSXGX

SEQ ID NO: 44906 - protein, 34 aa, Artificial Sequence
  GFR-binding peptide
  MOD_RES (1), (32), (34): Xaa is C or S
XVPQALSSLSILFFVGRKPKVLKVYPMIVRSXKX

SEQ ID NO: 44907 - protein, 39 aa, Artificial Sequence
  GFR-binding peptide
  MOD_RES (4), (5), (38): Xaa is C or S
GKAXXVPTKLSSLSVLFFDDMGVPTLKVYPEGMSVAEXG

SEQ ID NO: 44908 - protein, 40 aa, Artificial Sequence
  GFR-binding peptide
  MOD_RES (2), (3), (37), (39): Xaa is C or S
  MOD_RES (17), (18), (19), (20), (21): Xaa is A or G
  MOD_RES (22), (23), (24), (25): Xaa is A or G or is absent
TXXVPTRLSSLSILFFXXXXXXXXXLKVYPDMVVESXGXR

SEQ ID NO: 44909 - protein, 32 aa, Artificial Sequence
  GFR-binding peptide
  MOD_RES (14), (15), (16), (17), (18): Xaa is A or G
  MOD_RES (19), (20), (21), (22): Xaa is A or G or is absent
TPTKMSSLSMLFFXXXXXXXXXLKVYPGMVVD

SEQ ID NO: 44910 - protein, 39 aa, Artificial Sequence
  GFR-binding peptide
  MOD_RES (4), (38): Xaa is C or S
  MOD_RES (18), (19), (20), (21), (22): Xaa is A or G
  MOD_RES (23), (24), (25), (26): Xaa is A or G or is absent
KPTXAPTKLSSLSVLFFXXXXXXXXXLKVYPNMVVRSXG

SEQ ID NO: 44911 - protein, 39 aa, Artificial Sequence
  GFR-binding peptide
  MOD_RES (5), (6): Xaa is C or S
  MOD_RES (20), (21), (22), (23), (24): Xaa is A or G
  MOD_RES (25), (26), (27), (28): Xaa is A or G or is absent
IPKAXXVPTELSSLSMLFFXXXXXXXXXLKVYPEMVVEG

SEQ ID NO: 44912 - protein, 36 aa, Artificial Sequence
  GFR-binding peptide
  MOD_RES (3), (35): Xaa is C or S
PTXAPTKLSSLSVLFFDDSSNVILKVYPNMVVRSXG

SEQ ID NO: 44913 - protein, 39 aa, Artificial Sequence
  GFR-binding peptide
  MOD_RES (6), (7), (39): Xaa is C or S
AVPKAXXAPTKLSSLSVLFFDSSNNVILKVYPNMVVKAX

SEQ ID NO: 44914 - protein, 42 aa, Artificial Sequence
  GFR-binding peptide
  MOD_RES (2), (39), (41): Xaa is C or S
KXQPSRVHHSSLSVLFFEYVRKKPKLLKVYPRLEEHLEXAXA

SEQ ID NO: 44915 - protein, 34 aa, Artificial Sequence
  GFR-binding peptide
  MOD_RES (1), (2), (34): Xaa is C or S
XXVPEKMSSLSILFFDENKNVVLKVYPNMTVESX

SEQ ID NO: 44916 - protein, 35 aa, Artificial Sequence
  GFR-binding peptide
  MOD_RES (33), (35): Xaa is C or S
  MOD_RES (14), (15), (16), (17), (18): Xaa is A or G
  MOD_RES (19), (20), (21), (22): Xaa is A or G or is absent
VPQDLSSLSILFFXXXXXXXXXLKVYPMVVKSXKX

SEQ ID NO: 44917 - protein, 40 aa, Artificial Sequence
  GFR-binding peptide
  MOD_RES (6), (7), (39): Xaa is C or S
GSAGPXXTPTKMSSLSMLFFNDKQQIILKVYPGMVVDRXG

SEQ ID NO: 44918 - protein, 41 aa, Artificial Sequence
  GFR-binding peptide
  MOD_RES (3), (4), (38), (40): Xaa is C or S
  MOD_RES (18), (19), (20), (21), (22): Xaa is A or G
  MOD_RES (23), (24), (25), (26): Xaa is A or G or is absent
KAXXVPTKLSSLSILFFXXXXXXXXXLKVYPGMAVSEXGXR

SEQ ID NO: 44919 - protein, 40 aa, Artificial Sequence
  GFR-binding peptide
  MOD_RES (2), (3), (37), (39): Xaa is C or S
  MOD_RES (17), (18), (19), (20), (21): Xaa is A or G
  MOD_RES (22), (23), (24), (25): Xaa is A or G or is absent
AXXAPTKLSSLSVLFFXXXXXXXXXLKVYPNMVVKAXGXH

SEQ ID NO: 44920 - protein, 35 aa, Artificial Sequence
  GFR-binding peptide
  MOD_RES (1), (33), (35): Xaa is C or S
XVPEKMSSLSILFFDENKNVVLKVYPNMTVESXAX

SEQ ID NO: 44921 - protein, 39 aa, Artificial Sequence
  GFR-binding peptide
  MOD_RES (3), (3): Xaa is C or S
  MOD_RES (19), (20), (21), (22), (23): Xaa is A or G
  MOD_RES (24), (25), (26), (27): Xaa is A or G or is absent
VKXQPSRVHHSSLSVLFFXXXXXXXXXLKVYPRLEEHLE

SEQ ID NO: 44922 - protein, 40 aa, Artificial Sequence
  GFR-binding peptide
  MOD_RES (6), (7): Xaa is C or S
  MOD_RES (21), (22), (23), (24), (25): Xaa is A or G
  MOD_RES (26), (27), (28), (29): Xaa is A or G or is absent
HVPKPXXAPTKLSSLSVLFFXXXXXXXXXLKVYPNMVVRS

SEQ ID NO: 44923 - protein, 34 aa, Artificial Sequence
  GFR-binding peptide
  MOD_RES (2), (3): Xaa is C or S
AXXVPTKLSSLSILFFDKGVVTYLKVYPGMAVSE

SEQ ID NO: 44924 - protein, 42 aa, Artificial Sequence
  GFR-binding peptide
  MOD_RES (5), (39), (41): Xaa is C or S
  MOD_RES (19), (20), (21), (22), (23): Xaa is A or G
  MOD_RES (24), (25), (26), (27): Xaa is A or G or is absent
TKPTXAPTKLSSLSVLFFXXXXXXXXXLKVYPNMVVRSXGXH

SEQ ID NO: 44925 - protein, 32 aa, Artificial Sequence
  GFR-binding peptide
  MOD_RES (1), (2): Xaa is C or S
XXVSQDLSSLSILFFIGKTPKILKVYPMIVKS

SEQ ID NO: 44926 - protein, 33 aa, Artificial Sequence
  GFR-binding peptide
  MOD_RES (1), (2): Xaa is C or S
XXAPTKLSSLSVLFFDSSNNVILKVYPNMVVKA

SEQ ID NO: 44927 - protein, 33 aa, Artificial Sequence
  GFR-binding peptide
  MOD_RES (31), (33): Xaa is C or S
VPQDLSSLSILFFVGRTPKVLKVYPMVVKSXKX

SEQ ID NO: 44928 - protein, 37 aa, Artificial Sequence
  GFR-binding peptide
  MOD_RES (4), (5): Xaa is C or S
  MOD_RES (19), (20), (21), (22), (23): Xaa is A or G
  MOD_RES (24), (25), (26), (27): Xaa is A or G or is absent
PPTXXVPTRLSSLSILFFXXXXXXXXXLKVYPDMVVE

SEQ ID NO: 44929 - protein, 38 aa, Artificial Sequence
  GFR-binding peptide
  MOD_RES (6), (7), (38): Xaa is C or S
ASAAPXXVPQALSSLSILFFVGRKPKVLKVYPMIVRSX

SEQ ID NO: 44930 - protein, 38 aa, Artificial Sequence
  GFR-binding peptide
  MOD_RES (5), (6): Xaa is C or S
  MOD_RES (20), (21), (22), (23), (24): Xaa is A or G
  MOD_RES (25), (26), (27), (28): Xaa is A or G or is absent
SAAPXXVPQALSSLSILFFXXXXXXXXXLKVYPMIVRS

SEQ ID NO: 44931 - protein, 39 aa, Artificial Sequence
  GFR-binding peptide
  MOD_RES (6), (7): Xaa is C or S
  MOD_RES (21), (22), (23), (24), (25): Xaa is A or G
  MOD_RES (26), (27), (28), (29): Xaa is A or G or is absent
SIPKAXXVPTELSSLSMLFFXXXXXXXXXLKVYPEMVVE

SEQ ID NO: 44932 - protein, 33 aa, Artificial Sequence
  GFR-binding peptide
  MOD_RES (1), (1): Xaa is C or S
  MOD_RES (15), (16), (17), (18), (19): Xaa is A or G
  MOD_RES (20), (21), (22), (23): Xaa is A or G or is absent
XVPQDLSSLSILFFXXXXXXXXXLKVYPMVVKS

SEQ ID NO: 44933 - protein, 35 aa, Artificial Sequence
  GFR-binding peptide
  MOD_RES (1), (1): Xaa is C or S
  MOD_RES (15), (16), (17), (18), (19): Xaa is A or G
  MOD_RES (20), (21), (22), (23): Xaa is A or G or is absent
XVPTKLSSLSVLFFXXXXXXXXXLKVYPEGMSVAE

SEQ ID NO: 44934 - protein, 32 aa, Artificial Sequence
  GFR-binding peptide
  MOD_RES (1), (32): Xaa is C or S
XVPQALSSLSILFFVGRKPKVLKVYPMIVRSX

SEQ ID NO: 44935 - protein, 40 aa, Artificial Sequence
  GFR-binding peptide
  MOD_RES (2), (3), (37), (39): Xaa is C or S
  MOD_RES (17), (18), (19), (20), (21): Xaa is A or G
  MOD_RES (22), (23), (24), (25): Xaa is A or G or is absent
PXXTPTKMSSLSMLFFXXXXXXXXXLKVYPGMVVDRXGXS

SEQ ID NO: 44936 - protein, 35 aa, Artificial Sequence
  GFR-binding peptide
  MOD_RES (1), (2): Xaa is C or S
  MOD_RES (16), (17), (18), (19), (20): Xaa is A or G
  MOD_RES (21), (22), (23), (24): Xaa is A or G or is absent
XXAPTKLSSLSVLFFXXXXXXXXXLKVYPNMVVKA

SEQ ID NO: 44937 - protein, 31 aa, Artificial Sequence
  GFR-binding peptide
  MOD_RES (31), (31): Xaa is C or S
VPQDLSSLSILFFVGRTPKVLKVYPMVVKSX

SEQ ID NO: 44938 - protein, 38 aa, Artificial Sequence
  GFR-binding peptide
  MOD_RES (5), (6): Xaa is C or S
  MOD_RES (20), (21), (22), (23), (24): Xaa is A or G
  MOD_RES (25), (26), (27), (28): Xaa is A or G or is absent
VPKAXXAPTKLSSLSVLFFXXXXXXXXXLKVYPNMVVK

SEQ ID NO: 44939 - protein, 36 aa, Artificial Sequence
  GFR-binding peptide
  MOD_RES (4), (5): Xaa is C or S
PASXXVPARLSSLSILFFDAANNVVLKVYPDMVVEA

SEQ ID NO: 44940 - protein, 35 aa, Artificial Sequence
  GFR-binding peptide
  MOD_RES (2), (3), (34): Xaa is C or S
PXXVPQALSSLSILFFVGRKPKVLKVYPMIVRSXK

SEQ ID NO: 44941 - protein, 40 aa, Artificial Sequence
  GFR-binding peptide
  MOD_RES (3), (4), (37), (39): Xaa is C or S
  MOD_RES (18), (19), (20), (21), (22): Xaa is A or G
  MOD_RES (23), (24), (25), (26): Xaa is A or G or is absent
APXXVPQALSSLSILFFXXXXXXXXXLKVYPMIVRSXKXS

SEQ ID NO: 44942 - protein, 38 aa, Artificial Sequence
  GFR-binding peptide
  MOD_RES (6), (7): Xaa is C or S
YVPKPXXAPTKLSSLSVLFFDDSSNVILKVYPNMVVRS

SEQ ID NO: 44943 - protein, 35 aa, Artificial Sequence
  GFR-binding peptide
  MOD_RES (33), (35): Xaa is C or S
  MOD_RES (14), (15), (16), (17), (18): Xaa is A or G
  MOD_RES (19), (20), (21), (22): Xaa is A or G or is absent
VSQDLSSLSILFFXXXXXXXXXLKVYPMIVKSXKX

SEQ ID NO: 44944 - protein, 33 aa, Artificial Sequence
  GFR-binding peptide
  MOD_RES (2), (3): Xaa is C or S
PXXVPQALSSLSILFFVGRKPKVLKVYPMIVRS

SEQ ID NO: 44945 - protein, 40 aa, Artificial Sequence
  GFR-binding peptide
  MOD_RES (5), (6): Xaa is C or S
  MOD_RES (20), (21), (22), (23), (24): Xaa is A or G
  MOD_RES (25), (26), (27), (28): Xaa is A or G or is absent
VGKAXXVPTKLSSLSVLFFXXXXXXXXXLKVYPEGMSVAE

SEQ ID NO: 44946 - protein, 32 aa, Artificial Sequence
  GFR-binding peptide
  MOD_RES (14), (15), (16), (17), (18): Xaa is A or G
  MOD_RES (19), (20), (21), (22): Xaa is A or G or is absent
VPTKLSSLSILFFXXXXXXXXXLKVYPGMAVS

SEQ ID NO: 44947 - protein, 40 aa, Artificial Sequence
  GFR-binding peptide
  MOD_RES (5), (39): Xaa is C or S
  MOD_RES (19), (20), (21), (22), (23): Xaa is A or G
  MOD_RES (24), (25), (26), (27): Xaa is A or G or is absent
TKPTXAPTKLSSLSVLFFXXXXXXXXXLKVYPNMVVRSXG

SEQ ID NO: 44948 - protein, 40 aa, Artificial Sequence
  GFR-binding peptide
  MOD_RES (4), (5), (37), (39): Xaa is C or S
PPTXXVPTRLSSLSILFFDSANNVVLKVYPDMVVESXGXR

SEQ ID NO: 44949 - protein, 40 aa, Artificial Sequence
  GFR-binding peptide
  MOD_RES (7), (39): Xaa is C or S
HVTKPTXAPTKLSSLSVLFFDDSSNVILKVYPNMVVRSXG

SEQ ID NO: 44950 - protein, 33 aa, Artificial Sequence
  GFR-binding peptide
  MOD_RES (2), (3): Xaa is C or S
PXXAPTKLSSLSVLFFDDSSNVILKVYPNMVVR

SEQ ID NO: 44951 - protein, 39 aa, Artificial Sequence
  GFR-binding peptide
  MOD_RES (6), (7): Xaa is C or S
  MOD_RES (21), (22), (23), (24), (25): Xaa is A or G
  MOD_RES (26), (27), (28), (29): Xaa is A or G or is absent
STPPTXXVPTRLSSLSILFFXXXXXXXXXLKVYPDMVVE

SEQ ID NO: 44952 - protein, 39 aa, Artificial Sequence
  GFR-binding peptide
  MOD_RES (3), (4), (38): Xaa is C or S
  MOD_RES (18), (19), (20), (21), (22): Xaa is A or G
  MOD_RES (23), (24), (25), (26): Xaa is A or G or is absent
KAXXVPTKLSSLSILFFXXXXXXXXXLKVYPGMAVSEXG

SEQ ID NO: 44953 - protein, 34 aa, Artificial Sequence
  GFR-binding peptide
  MOD_RES (32), (34): Xaa is C or S
APTKLSSLSVLFFDDSSNVILKVYPNMVVRSXGX

SEQ ID NO: 44954 - protein, 36 aa, Artificial Sequence
  GFR-binding peptide
  MOD_RES (2), (2): Xaa is C or S
  MOD_RES (18), (19), (20), (21), (22): Xaa is A or G
  MOD_RES (23), (24), (25), (26): Xaa is A or G or is absent
KXQPSRVHHSSLSVLFFXXXXXXXXXLKVYPRLEEH

SEQ ID NO: 44955 - protein, 38 aa, Artificial Sequence
  GFR-binding peptide
  MOD_RES (3), (4), (35), (37): Xaa is C or S
SPXXVPQDLSSLSILFFVGRTPKVLKVYPMVVKSXKXS

SEQ ID NO: 44956 - protein, 38 aa, Artificial Sequence
  GFR-binding peptide
  MOD_RES (6), (7), (38): Xaa is C or S
RVPSTXXAPVKTSSLSMLFFDNGRVLLLKVYPMIVEEX

SEQ ID NO: 44957 - protein, 36 aa, Artificial Sequence
  GFR-binding peptide
  MOD_RES (1), (2), (34), (36): Xaa is C or S
XXVPARLSSLSILFFDAANNVVLKVYPDMVVEAXGX

SEQ ID NO: 44958 - protein, 33 aa, Artificial Sequence
  GFR-binding peptide
  MOD_RES (2), (3): Xaa is C or S
TXXVPTRLSSLSILFFDSANNVVLKVYPDMVVE

SEQ ID NO: 44959 - protein, 36 aa, Artificial Sequence
  GFR-binding peptide
  MOD_RES (1), (35): Xaa is C or S
  MOD_RES (15), (16), (17), (18), (19): Xaa is A or G
  MOD_RES (20), (21), (22), (23): Xaa is A or G or is absent
XAPTKLSSLSVLFFXXXXXXXXXLKVYPNMVVKAXG

SEQ ID NO: 44960 - protein, 37 aa, Artificial Sequence
  GFR-binding peptide
  MOD_RES (5), (5): Xaa is C or S
EGLEXVPTEESSLSMLFFRIKPHQGQHLKVYPFLQHN

SEQ ID NO: 44961 - protein, 41 aa, Artificial Sequence
  GFR-binding peptide
  MOD_RES (6), (7), (39), (41): Xaa is C or S
AAPASXXVPARLSSLSILFFDAANNVVLKVYPDMVVEAXGX

SEQ ID NO: 44962 - protein, 41 aa, Artificial Sequence
  GFR-binding peptide
  MOD_RES (5), (6), (40): Xaa is C or S
  MOD_RES (20), (21), (22), (23), (24): Xaa is A or G
  MOD_RES (25), (26), (27), (28): Xaa is A or G or is absent
VPKAXXAPTKLSSLSVLFFXXXXXXXXXLKVYPNMVVKAXG

SEQ ID NO: 44963 - protein, 38 aa, Artificial Sequence
  GFR-binding peptide
  MOD_RES (3), (4), (37): Xaa is C or S
KAXXVPTKLSSLSVLFFDDMGVPTLKVYPEGMSVAEXG

SEQ ID NO: 44964 - protein, 38 aa, Artificial Sequence
  GFR-binding peptide
  MOD_RES (1), (2), (35), (37): Xaa is C or S
  MOD_RES (16), (17), (18), (19), (20): Xaa is A or G
  MOD_RES (21), (22), (23), (24): Xaa is A or G or is absent
XXAPVKTSSLSMLFFXXXXXXXXXLKVYPMIVEEXGXL

SEQ ID NO: 44965 - protein, 35 aa, Artificial Sequence
  GFR-binding peptide
  MOD_RES (1), (35): Xaa is C or S
  MOD_RES (15), (16), (17), (18), (19): Xaa is A or G
  MOD_RES (20), (21), (22), (23): Xaa is A or G or is absent
XVPEKMSSLSILFFXXXXXXXXXLKVYPNMTVESX

SEQ ID NO: 44966 - protein, 42 aa, Artificial Sequence
  GFR-binding peptide
  MOD_RES (5), (6), (40), (42): Xaa is C or S
  MOD_RES (20), (21), (22), (23), (24): Xaa is A or G
  MOD_RES (25), (26), (27), (28): Xaa is A or G or is absent
TPPTXXVPTRLSSLSILFFXXXXXXXXXLKVYPDMVVESXGX

SEQ ID NO: 44967 - protein, 33 aa, Artificial Sequence
  GFR-binding peptide
  MOD_RES (2), (2): Xaa is C or S
TXAPTKLSSLSVLFFDDSSNVILKVYPNMVVRS

SEQ ID NO: 44968 - protein, 32 aa, Artificial Sequence
  GFR-binding peptide
  MOD_RES (31), (31): Xaa is C or S
VSQDLSSLSILFFIGKTPKILKVYPMIVKSXK

SEQ ID NO: 44969 - protein, 34 aa, Artificial Sequence
  GFR-binding peptide
  MOD_RES (1), (2): Xaa is C or S
XXVPTKLSSLSVLFFDDMGVPTLKVYPEGMSVAE

SEQ ID NO: 44970 - protein, 35 aa, Artificial Sequence
  GFR-binding peptide
  MOD_RES (35), (35): Xaa is C or S
  MOD_RES (14), (15), (16), (17), (18): Xaa is A or G
  MOD_RES (19), (20), (21), (22): Xaa is A or G or is absent
SRVHHSSLSVLFFXXXXXXXXXLKVYPRLEEHLEX

SEQ ID NO: 44971 - protein, 34 aa, Artificial Sequence
  GFR-binding peptide
  MOD_RES (32), (34): Xaa is C or S
TPTKMSSLSMLFFNDKQQIILKVYPGMVVDRXGX

SEQ ID NO: 44972 - protein, 37 aa, Artificial Sequence
  GFR-binding peptide
  MOD_RES (4), (5): Xaa is C or S
  MOD_RES (19), (20), (21), (22), (23): Xaa is A or G
  MOD_RES (24), (25), (26), (27): Xaa is A or G or is absent
PKAXXVPTELSSLSMLFFXXXXXXXXXLKVYPEMVVE

SEQ ID NO: 44973 - protein, 38 aa, Artificial Sequence
  GFR-binding peptide
  MOD_RES (4), (5), (37): Xaa is C or S
PKPXXAPTQLSSLSVLFFDDSSNVILKVYPNMVVRAXG

SEQ ID NO: 44974 - protein, 39 aa, Artificial Sequence
  GFR-binding peptide
  MOD_RES (4), (5), (36), (38): Xaa is C or S
ASPXXVSQDLSSLSILFFIGKTPKILKVYPMIVKSXKXS

SEQ ID NO: 44975 - protein, 34 aa, Artificial Sequence
  GFR-binding peptide
  MOD_RES (1), (1): Xaa is C or S
  MOD_RES (15), (16), (17), (18), (19): Xaa is A or G
  MOD_RES (20), (21), (22), (23): Xaa is A or G or is absent
XAPTKLSSLSVLFFXXXXXXXXXLKVYPNMVVKA

SEQ ID NO: 44976 - protein, 38 aa, Artificial Sequence
  GFR-binding peptide
  MOD_RES (4), (5), (37): Xaa is C or S
PEPXXVPEKMSSLSILFFDENKNVVLKVYPNMTVESXA

SEQ ID NO: 44977 - protein, 34 aa, Artificial Sequence
  GFR-binding peptide
  MOD_RES (1), (33): Xaa is C or S
XVPEKMSSLSILFFDENKNVVLKVYPNMTVESXA

SEQ ID NO: 44978 - protein, 39 aa, Artificial Sequence
  GFR-binding peptide
  MOD_RES (5), (6), (37), (39): Xaa is C or S
SASPXXVSQDLSSLSILFFIGKTPKILKVYPMIVKSXKX

SEQ ID NO: 44979 - protein, 42 aa, Artificial Sequence
  GFR-binding peptide
  MOD_RES (5), (6), (40), (42): Xaa is C or S
  MOD_RES (20), (21), (22), (23), (24): Xaa is A or G
  MOD_RES (25), (26), (27), (28): Xaa is A or G or is absent
IPEPXXVPEKMSSLSILFFXXXXXXXXXLKVYPNMTVESXAX

SEQ ID NO: 44980 - protein, 37 aa, Artificial Sequence
  GFR-binding peptide
  MOD_RES (1), (2), (34), (36): Xaa is C or S
XXVPTRLSSLSILFFDSANNVVLKVYPDMVVESXGXR

SEQ ID NO: 44981 - protein, 37 aa, Artificial Sequence
  GFR-binding peptide
  MOD_RES (2), (36): Xaa is C or S
  MOD_RES (16), (17), (18), (19), (20): Xaa is A or G
  MOD_RES (21), (22), (23), (24): Xaa is A or G or is absent
TXAPTKLSSLSVLFFXXXXXXXXXLKVYPNMVVRSXG

SEQ ID NO: 44982 - protein, 38 aa, Artificial Sequence
  GFR-binding peptide
  MOD_RES (4), (5), (38): Xaa is C or S
GKAXXVPTKLSSLSVLFFDDMGVPTLKVYPEGMSVAEX

SEQ ID NO: 44983 - protein, 37 aa, Artificial Sequence
  GFR-binding peptide
  MOD_RES (4), (5), (36): Xaa is C or S
PSTXXAPVKTSSLSMLFFDNGRVLLLKVYPMIVEEXG

SEQ ID NO: 44984 - protein, 39 aa, Artificial Sequence
  GFR-binding peptide
  MOD_RES (5), (6), (38): Xaa is C or S
VPKPXXAPTQLSSLSVLFFDDSSNVILKVYPNMVVRAXG

SEQ ID NO: 44985 - protein, 41 aa, Artificial Sequence
  GFR-binding peptide
  MOD_RES (5), (6), (40): Xaa is C or S
  MOD_RES (20), (21), (22), (23), (24): Xaa is A or G
  MOD_RES (25), (26), (27), (28): Xaa is A or G or is absent
VPKPXXAPTQLSSLSVLFFXXXXXXXXXLKVYPNMVVRAXG

SEQ ID NO: 44986 - protein, 41 aa, Artificial Sequence
  GFR-binding peptide
  MOD_RES (1), (38), (40): Xaa is C or S
XQPSRVHHSSLSVLFFEYVRKKPKLLKVYPRLEEHLEXAXA

SEQ ID NO: 44987 - protein, 34 aa, Artificial Sequence
  GFR-binding peptide
  MOD_RES (34), (34): Xaa is C or S
  MOD_RES (14), (15), (16), (17), (18): Xaa is A or G
  MOD_RES (19), (20), (21), (22): Xaa is A or G or is absent
TPTKMSSLSMLFFXXXXXXXXXLKVYPGMVVDRX

SEQ ID NO: 44988 - protein, 39 aa, Artificial Sequence
  GFR-binding peptide
  MOD_RES (2), (36), (38): Xaa is C or S
  MOD_RES (16), (17), (18), (19), (20): Xaa is A or G
  MOD_RES (21), (22), (23), (24): Xaa is A or G or is absent
TXAPTKLSSLSVLFFXXXXXXXXXLKVYPNMVVRSXGXH

SEQ ID NO: 44989 - protein, 30 aa, Artificial Sequence; identical to SEQ ID NO: 661
  GFR-binding peptide

SEQ ID NO: 44990 - protein, 40 aa, Artificial Sequence
  GFR-binding peptide
  MOD_RES (3), (40): Xaa is C or S
  MOD_RES (19), (20), (21), (22), (23): Xaa is A or G
  MOD_RES (24), (25), (26), (27): Xaa is A or G or is absent
VKXQPSRVHHSSLSVLFFXXXXXXXXXLKVYPRLEEHLEX

SEQ ID NO: 44991 - protein, 37 aa, Artificial Sequence
  GFR-binding peptide
  MOD_RES (1), (35), (37): Xaa is C or S
  MOD_RES (15), (16), (17), (18), (19): Xaa is A or G
  MOD_RES (20), (21), (22), (23): Xaa is A or G or is absent
XVPEKMSSLSILFFXXXXXXXXXLKVYPNMTVESXAX

SEQ ID NO: 44992 - protein, 38 aa, Artificial Sequence
  GFR-binding peptide
  MOD_RES (4), (5), (38): Xaa is C or S
  MOD_RES (19), (20), (21), (22), (23): Xaa is A or G
  MOD_RES (24), (25), (26), (27): Xaa is A or G or is absent
ASPXXVSQDLSSLSILFFXXXXXXXXXLKVYPMIVKSX

SEQ ID NO: 44993 - protein, 34 aa, Artificial Sequence
  GFR-binding peptide
  MOD_RES (14), (15), (16), (17), (18): Xaa is A or G
  MOD_RES (19), (20), (21), (22): Xaa is A or G or is absent
VPTKLSSLSVLFFXXXXXXXXXLKVYPEGMSVAE

SEQ ID NO: 44994 - protein, 33 aa, Artificial Sequence
  GFR-binding peptide
  MOD_RES (14), (15), (16), (17), (18): Xaa is A or G
  MOD_RES (19), (20), (21), (22): Xaa is A or G or is absent
VPTEESSLSMLFFXXXXXXXXXLKVYPFLQHNK

SEQ ID NO: 44995 - protein, 40 aa, Artificial Sequence
  GFR-binding peptide
  MOD_RES (3), (4), (37), (39): Xaa is C or S
  MOD_RES (18), (19), (20), (21), (22): Xaa is A or G
  MOD_RES (23), (24), (25), (26): Xaa is A or G or is absent
SPXXVPQDLSSLSILFFXXXXXXXXXLKVYPMVVKSXKXS

SEQ ID NO: 44996 - protein, 39 aa, Artificial Sequence
  GFR-binding peptide
  MOD_RES (3), (4), (38): Xaa is C or S
  MOD_RES (18), (19), (20), (21), (22): Xaa is A or G
  MOD_RES (23), (24), (25), (26): Xaa is A or G or is absent
EPXXVPEKMSSLSILFFXXXXXXXXXLKVYPNMTVESXA

SEQ ID NO: 44997 - protein, 37 aa, Artificial Sequence
  GFR-binding peptide
  MOD_RES (3), (37): Xaa is C or S
LEXVPTEESSLSMLFFRIKPHQGQHLKVYPFLQHNKX

SEQ ID NO: 44998 - protein, 43 aa, Artificial Sequence
  GFR-binding peptide
  MOD_RES (6), (7), (41), (43): Xaa is C or S
  MOD_RES (21), (22), (23), (24), (25): Xaa is A or G
  MOD_RES (26), (27), (28), (29): Xaa is A or G or is absent
AVPKAXXAPTKLSSLSVLFFXXXXXXXXXLKVYPNMVVKAXGX

SEQ ID NO: 44999 - protein, 44 aa, Artificial Sequence
  GFR-binding peptide
  MOD_RES (6), (7), (41), (43): Xaa is C or S
  MOD_RES (21), (22), (23), (24), (25): Xaa is A or G
  MOD_RES (26), (27), (28), (29): Xaa is A or G or is absent
YVPKPXXAPTKLSSLSVLFFXXXXXXXXXLKVYPNMVVRSXGXH

SEQ ID NO: 45000 - protein, 40 aa, Artificial Sequence
  GFR-binding peptide
  MOD_RES (6), (7): Xaa is C or S
  MOD_RES (21), (22), (23), (24), (25): Xaa is A or G
  MOD_RES (26), (27), (28), (29): Xaa is A or G or is absent
SIPKAXXVPTELSSLSMLFFXXXXXXXXXLKVYPEMVVEG

SEQ ID NO: 45001 - protein, 41 aa, Artificial Sequence
  GFR-binding peptide
  MOD_RES (3), (4), (38), (40): Xaa is C or S
  MOD_RES (18), (19), (20), (21), (22): Xaa is A or G
  MOD_RES (23), (24), (25), (26): Xaa is A or G or is absent
KAXXAPTKLSSLSVLFFXXXXXXXXXLKVYPNMVVKAXGXH

SEQ ID NO: 45002 - protein, 42 aa, Artificial Sequence
  GFR-binding peptide
  MOD_RES (3), (40), (42): Xaa is C or S
  MOD_RES (19), (20), (21), (22), (23): Xaa is A or G
  MOD_RES (24), (25), (26), (27): Xaa is A or G or is absent
VKXQPSRVHHSSLSVLFFXXXXXXXXXLKVYPRLEEHLEXAX

SEQ ID NO: 45003 - protein, 38 aa, Artificial Sequence
  GFR-binding peptide
  MOD_RES (3), (4), (37): Xaa is C or S
  MOD_RES (18), (19), (20), (21), (22): Xaa is A or G
  MOD_RES (23), (24), (25), (26): Xaa is A or G or is absent
SPXXVPQDLSSLSILFFXXXXXXXXXLKVYPMVVKSXK

SEQ ID NO: 45004 - protein, 37 aa, Artificial Sequence
  GFR-binding peptide
  MOD_RES (3), (4), (36): Xaa is C or S
KPXXAPTKLSSLSVLFFDDSSNVILKVYPNMVVRSXG

SEQ ID NO: 45005 - protein, 34 aa, Artificial Sequence
  GFR-binding peptide
  MOD_RES (34), (34): Xaa is C or S
  MOD_RES (14), (15), (16), (17), (18): Xaa is A or G
  MOD_RES (19), (20), (21), (22): Xaa is A or G or is absent
VPTEESSLSMLFFXXXXXXXXXLKVYPFLQHNKX

SEQ ID NO: 45006 - protein, 34 aa, Artificial Sequence
  GFR-binding peptide
  MOD_RES (2), (34): Xaa is C or S
TXAPTKLSSLSVLFFDDSSNVILKVYPNMVVRSX

SEQ ID NO: 45007 - protein, 34 aa, Artificial Sequence
  GFR-binding peptide
  MOD_RES (1), (2), (33): Xaa is C or S
XXAPVKTSSLSMLFFDNGRVLLLKVYPMIVEEXG

SEQ ID NO: 45008 - protein, 34 aa, Artificial Sequence
  GFR-binding peptide
  MOD_RES (1), (2): Xaa is C or S
  MOD_RES (16), (17), (18), (19), (20): Xaa is A or G
  MOD_RES (21), (22), (23), (24): Xaa is A or G or is absent
XXVPQDLSSLSILFFXXXXXXXXXLKVYPMVVKS

SEQ ID NO: 45009 - protein, 32 aa, Artificial Sequence
  GFR-binding peptide
  MOD_RES (32), (32): Xaa is C or S
VPARLSSLSILFFDAANNVVLKVYPDMVVEAX

SEQ ID NO: 45010 - protein, 36 aa, Artificial Sequence
  GFR-binding peptide
  MOD_RES (1), (2), (36): Xaa is C or S
  MOD_RES (16), (17), (18), (19), (20): Xaa is A or G
  MOD_RES (21), (22), (23), (24): Xaa is A or G or is absent
XXVPARLSSLSILFFXXXXXXXXXLKVYPDMVVEAX

SEQ ID NO: 45011 - protein, 34 aa, Artificial Sequence
  GFR-binding peptide
  MOD_RES (1), (2): Xaa is C or S
  MOD_RES (16), (17), (18), (19), (20): Xaa is A or G
  MOD_RES (21), (22), (23), (24): Xaa is A or G or is absent
XXTPTKMSSLSMLFFXXXXXXXXXLKVYPGMVVD

SEQ ID NO: 45012 - protein, 37 aa, Artificial Sequence
  GFR-binding peptide
  MOD_RES (34), (36): Xaa is C or S
  MOD_RES (14), (15), (16), (17), (18): Xaa is A or G
  MOD_RES (19), (20), (21), (22): Xaa is A or G or is absent
APTKLSSLSVLFFXXXXXXXXXLKVYPNMVVRSXGXH

SEQ ID NO: 45013 - protein, 40 aa, Artificial Sequence
  GFR-binding peptide
  MOD_RES (5), (39): Xaa is C or S
EGLEXVPTEESSLSMLFFRIKPHQGQHLKVYPFLQHNKXE

SEQ ID NO: 45014 - protein, 39 aa, Artificial Sequence
  GFR-binding peptide
  MOD_RES (5), (5): Xaa is C or S
  MOD_RES (21), (22), (23), (24), (25): Xaa is A or G
  MOD_RES (26), (27), (28), (29): Xaa is A or G or is absent
SSVKXQPSRVHHSSLSVLFFXXXXXXXXXLKVYPRLEEH

SEQ ID NO: 45015 - protein, 36 aa, Artificial Sequence
  GFR-binding peptide
  MOD_RES (1), (35): Xaa is C or S
XVPTEESSLSMLFFRIKPHQGQHLKVYPFLQHNKXE

SEQ ID NO: 45016 - protein, 38 aa, Artificial Sequence
  GFR-binding peptide
  MOD_RES (5), (6): Xaa is C or S
VGKAXXVPTKLSSLSVLFFDDMGVPTLKVYPEGMSVAE

SEQ ID NO: 45017 - protein, 34 aa, Artificial Sequence
  GFR-binding peptide
  MOD_RES (1), (2), (33): Xaa is C or S
XXVSQDLSSLSILFFIGKTPKILKVYPMIVKSXK

SEQ ID NO: 45018 - protein, 42 aa, Artificial Sequence
  GFR-binding peptide
  MOD_RES (4), (41): Xaa is C or S
SVKXQPSRVHHSSLSVLFFEYVRKKPKLLKVYPRLEEHLEXA

SEQ ID NO: 45019 - protein, 41 aa, Artificial Sequence
  GFR-binding peptide
  MOD_RES (6), (7), (39), (41): Xaa is C or S
YVPKPXXAPTKLSSLSVLFFDDSSNVILKVYPNMVVRSXGX

SEQ ID NO: 45020 - protein, 38 aa, Artificial Sequence
  GFR-binding peptide
  MOD_RES (3), (37): Xaa is C or S
LEXVPTEESSLSMLFFRIKPHQGQHLKVYPFLQHNKXE

SEQ ID NO: 45021 - protein, 38 aa, Artificial Sequence
  GFR-binding peptide
  MOD_RES (6), (7), (38): Xaa is C or S
ASASPXXVSQDLSSLSILFFIGKTPKILKVYPMIVKSX

SEQ ID NO: 45022 - protein, 39 aa, Artificial Sequence
  GFR-binding peptide
  MOD_RES (1), (38): Xaa is C or S
  MOD_RES (17), (18), (19), (20), (21): Xaa is A or G
  MOD_RES (22), (23), (24), (25): Xaa is A or G or is absent
XQPSRVHHSSLSVLFFXXXXXXXXXLKVYPRLEEHLEXA

SEQ ID NO: 45023 - protein, 42 aa, Artificial Sequence
  GFR-binding peptide
  MOD_RES (5), (6), (40), (42): Xaa is C or S
  MOD_RES (20), (21), (22), (23), (24): Xaa is A or G
  MOD_RES (25), (26), (27), (28): Xaa is A or G or is absent
APASXXVPARLSSLSILFFXXXXXXXXXLKVYPDMVVEAXGX

SEQ ID NO: 45024 - protein, 39 aa, Artificial Sequence
  GFR-binding peptide
  MOD_RES (6), (7), (39): Xaa is C or S
HVPKPXXAPTKLSSLSVLFFDDSSNVILKVYPNMVVRSX

SEQ ID NO: 45025 - protein, 39 aa, Artificial Sequence
  GFR-binding peptide
  MOD_RES (4), (5), (37), (39): Xaa is C or S
PASXXVPARLSSLSILFFDAANNVVLKVYPDMVVEAXGX

SEQ ID NO: 45026 - protein, 38 aa, Artificial Sequence
  GFR-binding peptide
  MOD_RES (4), (5), (36), (38): Xaa is C or S
ASPXXVPQDLSSLSILFFVGRTPKVLKVYPMVVKSXKX

SEQ ID NO: 45027 - protein, 39 aa, Artificial Sequence
  GFR-binding peptide
  MOD_RES (5), (6), (37), (39): Xaa is C or S
SASPXXVPQDLSSLSILFFVGRTPKVLKVYPMVVKSXKX

SEQ ID NO: 45028 - protein, 35 aa, Artificial Sequence
  GFR-binding peptide
  MOD_RES (32), (34): Xaa is C or S
TPTKMSSLSMLFFNDKQQIILKVYPGMVVDRXGXS

SEQ ID NO: 45029 - protein, 37 aa, Artificial Sequence
  GFR-binding peptide
  MOD_RES (3), (4), (36): Xaa is C or S
ASXXVPARLSSLSILFFDAANNVVLKVYPDMVVEAXG

SEQ ID NO: 45030 - protein, 33 aa, Artificial Sequence
  GFR-binding peptide
SRVHHSSLSVLFFEYVRKKPKLLKVYPRLEEHL

SEQ ID NO: 45031 - protein, 36 aa, Artificial Sequence
  GFR-binding peptide
  MOD_RES (2), (3), (36): Xaa is C or S
  MOD_RES (17), (18), (19), (20), (21): Xaa is A or G
  MOD_RES (22), (23), (24), (25): Xaa is A or G or is absent
PXXVSQDLSSLSILFFXXXXXXXXXLKVYPMIVKSX

SEQ ID NO: 45032 - protein, 40 aa, Artificial Sequence
  GFR-binding peptide
  MOD_RES (5), (6), (39): Xaa is C or S
  MOD_RES (20), (21), (22), (23), (24): Xaa is A or G
  MOD_RES (25), (26), (27), (28): Xaa is A or G or is absent
SASPXXVPQDLSSLSILFFXXXXXXXXXLKVYPMVVKSXK

SEQ ID NO: 45033 - protein, 36 aa, Artificial Sequence
  GFR-binding peptide
  MOD_RES (1), (35): Xaa is C or S
  MOD_RES (15), (16), (17), (18), (19): Xaa is A or G
  MOD_RES (20), (21), (22), (23): Xaa is A or G or is absent
XVPTRLSSLSILFFXXXXXXXXXLKVYPDMVVESXG

SEQ ID NO: 45034 - protein, 30 aa, Artificial Sequence; identical to SEQ ID NO: 658
  GFR-binding peptide

SEQ ID NO: 45035 - protein, 41 aa, Artificial Sequence
  GFR-binding peptide
  MOD_RES (6), (7), (41): Xaa is C or S
  MOD_RES (21), (22), (23), (24), (25): Xaa is A or G
  MOD_RES (26), (27), (28), (29): Xaa is A or G or is absent
GSAGPXXTPTKMSSLSMLFFXXXXXXXXXLKVYPGMVVDRX

SEQ ID NO: 45036 - protein, 33 aa, Artificial Sequence
  GFR-binding peptide
  MOD_RES (1), (1): Xaa is C or S
  MOD_RES (15), (16), (17), (18), (19): Xaa is A or G
  MOD_RES (20), (21), (22), (23): Xaa is A or G or is absent
XTPTKMSSLSMLFFXXXXXXXXXLKVYPGMVVD

SEQ ID NO: 45037 - protein, 40 aa, Artificial Sequence
  GFR-binding peptide
  MOD_RES (4), (5), (39): Xaa is C or S
  MOD_RES (19), (20), (21), (22), (23): Xaa is A or G
  MOD_RES (24), (25), (26), (27): Xaa is A or G or is absent
PKAXXVPTELSSLSMLFFXXXXXXXXXLKVYPEMVVEGXG

SEQ ID NO: 45038 - protein, 36 aa, Artificial Sequence
  GFR-binding peptide
  MOD_RES (34), (36): Xaa is C or S
  MOD_RES (14), (15), (16), (17), (18): Xaa is A or G
  MOD_RES (19), (20), (21), (22): Xaa is A or G or is absent
VPTKLSSLSILFFXXXXXXXXXLKVYPGMAVSEXGX

SEQ ID NO: 45039 - protein, 36 aa, Artificial Sequence
  GFR-binding peptide
  MOD_RES (4), (5), (36): Xaa is C or S
ASPXXVSQDLSSLSILFFIGKTPKILKVYPMIVKSX

SEQ ID NO: 45040 - protein, 38 aa, Artificial Sequence
  GFR-binding peptide
  MOD_RES (4), (4): Xaa is C or S
SVKXQPSRVHHSSLSVLFFEYVRKKPKLLKVYPRLEEH

SEQ ID NO: 45041 - protein, 37 aa, Artificial Sequence
  GFR-binding peptide
  MOD_RES (5), (6): Xaa is C or S
ASKAXXVPTKLSSLSILFFDKGVVTYLKVYPGMAVSE

SEQ ID NO: 45042 - protein, 37 aa, Artificial Sequence
  GFR-binding peptide
  MOD_RES (2), (3), (34), (36): Xaa is C or S
TXXAPVKTSSLSMLFFDNGRVLLLKVYPMIVEEXGXL

SEQ ID NO: 45043 - protein, 37 aa, Artificial Sequence
  GFR-binding peptide
  MOD_RES (1), (2), (35), (37): Xaa is C or S
  MOD_RES (16), (17), (18), (19), (20): Xaa is A or G
  MOD_RES (21), (22), (23), (24): Xaa is A or G or is absent
XXVSQDLSSLSILFFXXXXXXXXXLKVYPMIVKSXKX

SEQ ID NO: 45044 - protein, 33 aa, Artificial Sequence
  GFR-binding peptide
  MOD_RES (2), (3): Xaa is C or S
PXXAPTQLSSLSVLFFDDSSNVILKVYPNMVVR

SEQ ID NO: 45045 - protein, 35 aa, Artificial Sequence
  GFR-binding peptide
  MOD_RES (16), (17), (18), (19), (20): Xaa is A or G
  MOD_RES (21), (22), (23), (24): Xaa is A or G or is absent
QPSRVHHSSLSVLFFXXXXXXXXXLKVYPRLEEHL

SEQ ID NO: 45046 - protein, 41 aa, Artificial Sequence
  GFR-binding peptide
  MOD_RES (4), (41): Xaa is C or S
SVKXQPSRVHHSSLSVLFFEYVRKKPKLLKVYPRLEEHLEX

SEQ ID NO: 45047 - protein, 37 aa, Artificial Sequence
  GFR-binding peptide
  MOD_RES (2), (3), (34), (36): Xaa is C or S
PXXVPQDLSSLSILFFVGRTPKVLKVYPMVVKSXKXS

SEQ ID NO: 45048 - protein, 39 aa, Artificial Sequence
  GFR-binding peptide
  MOD_RES (3), (37), (39): Xaa is C or S
  MOD_RES (17), (18), (19), (20), (21): Xaa is A or G
  MOD_RES (22), (23), (24), (25): Xaa is A or G or is absent
LEXVPTEESSLSMLFFXXXXXXXXXLKVYPFLQHNKXEX

SEQ ID NO: 45049 - protein, 43 aa, Artificial Sequence
  GFR-binding peptide
  MOD_RES (4), (5), (40), (42): Xaa is C or S
  MOD_RES (19), (20), (21), (22), (23): Xaa is A or G
  MOD_RES (24), (25), (26), (27): Xaa is A or G or is absent
GKAXXVPTKLSSLSVLFFXXXXXXXXXLKVYPEGMSVAEXGXR

SEQ ID NO: 45050 - protein, 36 aa, Artificial Sequence
  GFR-binding peptide
  MOD_RES (3), (4): Xaa is C or S
  MOD_RES (18), (19), (20), (21), (22): Xaa is A or G
  MOD_RES (23), (24), (25), (26): Xaa is A or G or is absent
PTXXVPTRLSSLSILFFXXXXXXXXXLKVYPDMVVE

SEQ ID NO: 45051 - protein, 42 aa, Artificial Sequence
  GFR-binding peptide
  MOD_RES (7), (39), (41): Xaa is C or S
HVTKPTXAPTKLSSLSVLFFDDSSNVILKVYPNMVVRSXGXH

SEQ ID NO: 45052 - protein, 36 aa, Artificial Sequence
  GFR-binding peptide
  MOD_RES (2), (36): Xaa is C or S
  MOD_RES (16), (17), (18), (19), (20): Xaa is A or G
  MOD_RES (21), (22), (23), (24): Xaa is A or G or is absent
TXAPTKLSSLSVLFFXXXXXXXXXLKVYPNMVVRSX

SEQ ID NO: 45053 - protein, 41 aa, Artificial Sequence
  GFR-binding peptide
  MOD_RES (6), (40): Xaa is C or S
  MOD_RES (20), (21), (22), (23), (24): Xaa is A or G
  MOD_RES (25), (26), (27), (28): Xaa is A or G or is absent
VTKPTXAPTKLSSLSVLFFXXXXXXXXXLKVYPNMVVRSXG

SEQ ID NO: 45054 - protein, 37 aa, Artificial Sequence
  GFR-binding peptide
  MOD_RES (34), (36): Xaa is C or S
  MOD_RES (14), (15), (16), (17), (18): Xaa is A or G
  MOD_RES (19), (20), (21), (22): Xaa is A or G or is absent
VPARLSSLSILFFXXXXXXXXXLKVYPDMVVEAXGXR

SEQ ID NO: 45055 - protein, 34 aa, Artificial Sequence
  GFR-binding peptide
  MOD_RES (34), (34): Xaa is C or S
  MOD_RES (14), (15), (16), (17), (18): Xaa is A or G
  MOD_RES (19), (20), (21), (22): Xaa is A or G or is absent
APTKLSSLSVLFFXXXXXXXXXLKVYPNMVVKAX

SEQ ID NO: 45056 - protein, 34 aa, Artificial Sequence
  GFR-binding peptide
  MOD_RES (1), (2), (34): Xaa is C or S
XXAPTQLSSLSVLFFDDSSNVILKVYPNMVVRAX

SEQ ID NO: 45057 - protein, 39 aa, Artificial Sequence
  GFR-binding peptide
  MOD_RES (4), (5), (36), (38): Xaa is C or S
PSTXXAPVKTSSLSMLFFDNGRVLLLKVYPMIVEEXGXL

SEQ ID NO: 45058 - protein, 35 aa, Artificial Sequence
  GFR-binding peptide
  MOD_RES (2), (3), (35): Xaa is C or S
AXXVPTKLSSLSILFFDKGVVTYLKVYPGMAVSEX

SEQ ID NO: 45059 - protein, 44 aa, Artificial Sequence
  GFR-binding peptide
  MOD_RES (6), (7), (41), (43): Xaa is C or S
  MOD_RES (21), (22), (23), (24), (25): Xaa is A or G
  MOD_RES (26), (27), (28), (29): Xaa is A or G or is absent
SIPKAXXVPTELSSLSMLFFXXXXXXXXXLKVYPEMVVEGXGXR

SEQ ID NO: 45060 - protein, 36 aa, Artificial Sequence
  GFR-binding peptide
  MOD_RES (5), (6): Xaa is C or S
TPPTXXVPTRLSSLSILFFDSANNVVLKVYPDMVVE

SEQ ID NO: 45061 - protein, 39 aa, Artificial Sequence
  GFR-binding peptide
  MOD_RES (1), (2), (36), (38): Xaa is C or S
  MOD_RES (16), (17), (18), (19), (20): Xaa is A or G
  MOD_RES (21), (22), (23), (24): Xaa is A or G or is absent
XXVPTRLSSLSILFFXXXXXXXXXLKVYPDMVVESXGXR

SEQ ID NO: 45062 - protein, 36 aa, Artificial Sequence
  GFR-binding peptide
  MOD_RES (4), (36): Xaa is C or S
KPTXAPTKLSSLSVLFFDDSSNVILKVYPNMVVRSX

SEQ ID NO: 45063 - protein, 36 aa, Artificial Sequence
  GFR-binding peptide
  MOD_RES (4), (5), (36): Xaa is C or S
PSTXXAPVKTSSLSMLFFDNGRVLLLKVYPMIVEEX

SEQ ID NO: 45064 - protein, 35 aa, Artificial Sequence
  GFR-binding peptide
  MOD_RES (1), (35): Xaa is C or S
  MOD_RES (15), (16), (17), (18), (19): Xaa is A or G
  MOD_RES (20), (21), (22), (23): Xaa is A or G or is absent
XVPARLSSLSILFFXXXXXXXXXLKVYPDMVVEAX

SEQ ID NO: 45065 - protein, 31 aa, Artificial Sequence
  GFR-binding peptide
  MOD_RES (1), (1): Xaa is C or S
XTPTKMSSLSMLFFNDKQQIILKVYPGMVVD

SEQ ID NO: 45066 - protein, 31 aa, Artificial Sequence
  GFR-binding peptide
VPTRLSSLSILFFDSANNVVLKVYPDMVVES

SEQ ID NO: 45067 - protein, 36 aa, Artificial Sequence
  GFR-binding peptide
  MOD_RES (5), (6): Xaa is C or S
ASKAXXVPTKLSSLSILFFDKGVVTYLKVYPGMAVS

SEQ ID NO: 45068 - protein, 34 aa, Artificial Sequence
  GFR-binding peptide
  MOD_RES (31), (33): Xaa is C or S
VPQALSSLSILFFVGRKPKVLKVYPMIVRSXKXS

SEQ ID NO: 45069 - protein, 42 aa, Artificial Sequence
  GFR-binding peptide
  MOD_RES (5), (6), (39), (41): Xaa is C or S
  MOD_RES (20), (21), (22), (23), (24): Xaa is A or G
  MOD_RES (25), (26), (27), (28): Xaa is A or G or is absent
VPSTXXAPVKTSSLSMLFFXXXXXXXXXLKVYPMIVEEXGXL

SEQ ID NO: 45070 - protein, 37 aa, Artificial Sequence
  GFR-binding peptide
  MOD_RES (5), (5): Xaa is C or S
  MOD_RES (19), (20), (21), (22), (23): Xaa is A or G
  MOD_RES (24), (25), (26), (27): Xaa is A or G or is absent
TKPTXAPTKLSSLSVLFFXXXXXXXXXLKVYPNMVVR

SEQ ID NO: 45071 - protein, 41 aa, Artificial Sequence
  GFR-binding peptide
  MOD_RES (5), (6), (40): Xaa is C or S
  MOD_RES (20), (21), (22), (23), (24): Xaa is A or G
  MOD_RES (25), (26), (27), (28): Xaa is A or G or is absent
SAGPXXTPTKMSSLSMLFFXXXXXXXXXLKVYPGMVVDRXG

SEQ ID NO: 45072 - protein, 40 aa, Artificial Sequence
  GFR-binding peptide
  MOD_RES (5), (6), (37), (39): Xaa is C or S
SASPXXVPQDLSSLSILFFVGRTPKVLKVYPMVVKSXKXS

SEQ ID NO: 45073 - protein, 34 aa, Artificial Sequence
  GFR-binding peptide
  MOD_RES (32), (34): Xaa is C or S
VPTKLSSLSILFFDKGVVTYLKVYPGMAVSEXGX

SEQ ID NO: 45074 - protein, 43 aa, Artificial Sequence
  GFR-binding peptide
  MOD_RES (6), (7), (40), (42): Xaa is C or S
  MOD_RES (21), (22), (23), (24), (25): Xaa is A or G
  MOD_RES (26), (27), (28), (29): Xaa is A or G or is absent
RVPSTXXAPVKTSSLSMLFFXXXXXXXXXLKVYPMIVEEXGXL

SEQ ID NO: 45075 - protein, 36 aa, Artificial Sequence
  GFR-binding peptide
  MOD_RES (2), (3), (36): Xaa is C or S
  MOD_RES (17), (18), (19), (20), (21): Xaa is A or G
  MOD_RES (22), (23), (24), (25): Xaa is A or G or is absent
PXXVPQDLSSLSILFFXXXXXXXXXLKVYPMVVKSX

SEQ ID NO: 45076 - protein, 38 aa, Artificial Sequence
  GFR-binding peptide
  MOD_RES (5), (37): Xaa is C or S
TKPTXAPTKLSSLSVLFFDDSSNVILKVYPNMVVRSXG

SEQ ID NO: 45077 - protein, 41 aa, Artificial Sequence
  GFR-binding peptide
  MOD_RES (6), (7), (39), (41): Xaa is C or S
TVPKPXXAPTQLSSLSVLFFDDSSNVILKVYPNMVVRAXGX

SEQ ID NO: 45078 - protein, 39 aa, Artificial Sequence
  GFR-binding peptide
  MOD_RES (3), (4), (36), (38): Xaa is C or S
KPXXAPTQLSSLSVLFFDDSSNVILKVYPNMVVRAXGXH

SEQ ID NO: 45079 - protein, 33 aa, Artificial Sequence
  GFR-binding peptide
  MOD_RES (1), (33): Xaa is C or S
XAPTQLSSLSVLFFDDSSNVILKVYPNMVVRAX

SEQ ID NO: 45080 - protein, 37 aa, Artificial Sequence
  GFR-binding peptide
  MOD_RES (6), (6): Xaa is C or S
VTKPTXAPTKLSSLSVLFFDDSSNVILKVYPNMVVRS

SEQ ID NO: 45081 - protein, 41 aa, Artificial Sequence
  GFR-binding peptide
  MOD_RES (7), (41): Xaa is C or S
  MOD_RES (21), (22), (23), (24), (25): Xaa is A or G
  MOD_RES (26), (27), (28), (29): Xaa is A or G or is absent
HVTKPTXAPTKLSSLSVLFFXXXXXXXXXLKVYPNMVVRSX

SEQ ID NO: 45082 - protein, 35 aa, Artificial Sequence
  GFR-binding peptide
  MOD_RES (2), (2): Xaa is C or S
  MOD_RES (16), (17), (18), (19), (20): Xaa is A or G
  MOD_RES (21), (22), (23), (24): Xaa is A or G or is absent
TXAPTKLSSLSVLFFXXXXXXXXXLKVYPNMVVRS

SEQ ID NO: 45083 - protein, 35 aa, Artificial Sequence
  GFR-binding peptide
  MOD_RES (34), (34): Xaa is C or S
  MOD_RES (14), (15), (16), (17), (18): Xaa is A or G
  MOD_RES (19), (20), (21), (22): Xaa is A or G or is absent
VPTEESSLSMLFFXXXXXXXXXLKVYPFLQHNKXE

SEQ ID NO: 45084 - protein, 33 aa, Artificial Sequence
  GFR-binding peptide
  MOD_RES (1), (1): Xaa is C or S
  MOD_RES (15), (16), (17), (18), (19): Xaa is A or G
  MOD_RES (20), (21), (22), (23): Xaa is A or G or is absent
XAPTKLSSLSVLFFXXXXXXXXXLKVYPNMVVR

SEQ ID NO: 45085 - protein, 41 aa, Artificial Sequence
  GFR-binding peptide
  MOD_RES (6), (7), (40): Xaa is C or S
  MOD_RES (21), (22), (23), (24), (25): Xaa is A or G
  MOD_RES (26), (27), (28), (29): Xaa is A or G or is absent
ASAAPXXVPQALSSLSILFFXXXXXXXXXLKVYPMIVRSXK

SEQ ID NO: 45086 - protein, 33 aa, Artificial Sequence
  GFR-binding peptide
  MOD_RES (1), (1): Xaa is C or S
  MOD_RES (15), (16), (17), (18), (19): Xaa is A or G
  MOD_RES (20), (21), (22), (23): Xaa is A or G or is absent
XAPTKLSSLSVLFFXXXXXXXXXLKVYPNMVVK

SEQ ID NO: 45087 - protein, 34 aa, Artificial Sequence
  GFR-binding peptide
  MOD_RES (1), (1): Xaa is C or S
XVPTEESSLSMLFFRIKPHQGQHLKVYPFLQHNK

SEQ ID NO: 45088 - protein, 37 aa, Artificial Sequence
  GFR-binding peptide
  MOD_RES (4), (5), (37): Xaa is C or S
PKPXXAPTKLSSLSVLFFDDSSNVILKVYPNMVVRSX

SEQ ID NO: 45089 - protein, 38 aa, Artificial Sequence
  GFR-binding peptide
  MOD_RES (5), (5): Xaa is C or S
  MOD_RES (19), (20), (21), (22), (23): Xaa is A or G
  MOD_RES (24), (25), (26), (27): Xaa is A or G or is absent
TKPTXAPTKLSSLSVLFFXXXXXXXXXLKVYPNMVVRS

SEQ ID NO: 45090 - protein, 38 aa, Artificial Sequence
  GFR-binding peptide
  MOD_RES (4), (38): Xaa is C or S
GLEXVPTEESSLSMLFFRIKPHQGQHLKVYPFLQHNKX

SEQ ID NO: 45091 - protein, 42 aa, Artificial Sequence
  GFR-binding peptide
  MOD_RES (6), (40), (42): Xaa is C or S
DEGLEXVPTEESSLSMLFFRIKPHQGQHLKVYPFLQHNKXEX

SEQ ID NO: 45092 - protein, 41 aa, Artificial Sequence
  GFR-binding peptide
  MOD_RES (5), (6), (38), (40): Xaa is C or S
ASKAXXVPTKLSSLSILFFDKGVVTYLKVYPGMAVSEXGXR

SEQ ID NO: 45093 - protein, 37 aa, Artificial Sequence
  GFR-binding peptide
  MOD_RES (5), (37): Xaa is C or S
TKPTXAPTKLSSLSVLFFDDSSNVILKVYPNMVVRSX

SEQ ID NO: 45094 - protein, 32 aa, Artificial Sequence
  GFR-binding peptide
  MOD_RES (32), (32): Xaa is C or S
APTKLSSLSVLFFDDSSNVILKVYPNMVVRSX

SEQ ID NO: 45095 - protein, 38 aa, Artificial Sequence
  GFR-binding peptide
  MOD_RES (4), (5): Xaa is C or S
  MOD_RES (19), (20), (21), (22), (23): Xaa is A or G
  MOD_RES (24), (25), (26), (27): Xaa is A or G or is absent
PEPXXVPEKMSSLSILFFXXXXXXXXXLKVYPNMTVES

SEQ ID NO: 45096 - protein, 36 aa, Artificial Sequence
  GFR-binding peptide
  MOD_RES (33), (35): Xaa is C or S
  MOD_RES (14), (15), (16), (17), (18): Xaa is A or G
  MOD_RES (19), (20), (21), (22): Xaa is A or G or is absent
APVKTSSLSMLFFXXXXXXXXXLKVYPMIVEEXGXL

SEQ ID NO: 45097 - protein, 43 aa, Artificial Sequence
  GFR-binding peptide
  MOD_RES (5), (6), (40), (42): Xaa is C or S
  MOD_RES (20), (21), (22), (23), (24): Xaa is A or G
  MOD_RES (25), (26), (27), (28): Xaa is A or G or is absent
VPKAXXAPTKLSSLSVLFFXXXXXXXXXLKVYPNMVVKAXGXH

SEQ ID NO: 45098 - protein, 39 aa, Artificial Sequence
  GFR-binding peptide
  MOD_RES (4), (5), (36), (38): Xaa is C or S
AAPXXVPQALSSLSILFFVGRKPKVLKVYPMIVRSXKXS

SEQ ID NO: 45099 - protein, 35 aa, Artificial Sequence
  GFR-binding peptide
  MOD_RES (34), (34): Xaa is C or S
  MOD_RES (14), (15), (16), (17), (18): Xaa is A or G
  MOD_RES (19), (20), (21), (22): Xaa is A or G or is absent
VPTRLSSLSILFFXXXXXXXXXLKVYPDMVVESXG

SEQ ID NO: 45100 - protein, 40 aa, Artificial Sequence
  GFR-binding peptide
  MOD_RES (4), (5), (38), (40): Xaa is C or S
  MOD_RES (19), (20), (21), (22), (23): Xaa is A or G
  MOD_RES (24), (25), (26), (27): Xaa is A or G or is absent
ASPXXVPQDLSSLSILFFXXXXXXXXXLKVYPMVVKSXKX

SEQ ID NO: 45101 - protein, 36 aa, Artificial Sequence
  GFR-binding peptide
  MOD_RES (34), (36): Xaa is C or S
  MOD_RES (14), (15), (16), (17), (18): Xaa is A or G
  MOD_RES (19), (20), (21), (22): Xaa is A or G or is absent
APTKLSSLSVLFFXXXXXXXXXLKVYPNMVVRSXGX

SEQ ID NO: 45102 - protein, 37 aa, Artificial Sequence
  GFR-binding peptide
  MOD_RES (4), (5), (36): Xaa is C or S
ASPXXVSQDLSSLSILFFIGKTPKILKVYPMIVKSXK

SEQ ID NO: 45103 - protein, 35 aa, Artificial Sequence
  GFR-binding peptide
  MOD_RES (1), (2), (33), (35): Xaa is C or S
XXVPQALSSLSILFFVGRKPKVLKVYPMIVRSXKX

SEQ ID NO: 45104 - protein, 33 aa, Artificial Sequence
  GFR-binding peptide
  MOD_RES (1), (2): Xaa is C or S
XXVPEKMSSLSILFFDENKNVVLKVYPNMTVES

SEQ ID NO: 45105 - protein, 37 aa, Artificial Sequence
  GFR-binding peptide
  MOD_RES (2), (3), (36): Xaa is C or S
  MOD_RES (17), (18), (19), (20), (21): Xaa is A or G
  MOD_RES (22), (23), (24), (25): Xaa is A or G or is absent
PXXVPQALSSLSILFFXXXXXXXXXLKVYPMIVRSXK

SEQ ID NO: 45106 - protein, 31 aa, Artificial Sequence
  GFR-binding peptide
APTKLSSLSVLFFDDSSNVILKVYPNMVVRS

SEQ ID NO: 45107 - protein, 33 aa, Artificial Sequence
  GFR-binding peptide
  MOD_RES (33), (33): Xaa is C or S
  MOD_RES (14), (15), (16), (17), (18): Xaa is A or G
  MOD_RES (19), (20), (21), (22): Xaa is A or G or is absent
VPQDLSSLSILFFXXXXXXXXXLKVYPMVVKSX

SEQ ID NO: 45108 - protein, 34 aa, Artificial Sequence
  GFR-binding peptide
  MOD_RES (4), (4): Xaa is C or S
KPTXAPTKLSSLSVLFFDDSSNVILKVYPNMVVR

SEQ ID NO: 45109 - protein, 38 aa, Artificial Sequence
  GFR-binding peptide
  MOD_RES (4), (5): Xaa is C or S
  MOD_RES (19), (20), (21), (22), (23): Xaa is A or G
  MOD_RES (24), (25), (26), (27): Xaa is A or G or is absent
PPTXXVPTRLSSLSILFFXXXXXXXXXLKVYPDMVVES

SEQ ID NO: 45110 - protein, 33 aa, Artificial Sequence
  GFR-binding peptide
  MOD_RES (3), (3): Xaa is C or S
PTXAPTKLSSLSVLFFDDSSNVILKVYPNMVVR

SEQ ID NO: 45111 - protein, 33 aa, Artificial Sequence
  GFR-binding peptide
  MOD_RES (1), (2), (33): Xaa is C or S
XXVPQALSSLSILFFVGRKPKVLKVYPMIVRSX

SEQ ID NO: 45112 - protein, 37 aa, Artificial Sequence
  GFR-binding peptide
  MOD_RES (2), (3), (35), (37): Xaa is C or S
TXXVPTRLSSLSILFFDSANNVVLKVYPDMVVESXGX

SEQ ID NO: 45113 - protein, 36 aa, Artificial Sequence
  GFR-binding peptide
  MOD_RES (1), (34), (36): Xaa is C or S
  MOD_RES (15), (16), (17), (18), (19): Xaa is A or G
  MOD_RES (20), (21), (22), (23): Xaa is A or G or is absent
XVSQDLSSLSILFFXXXXXXXXXLKVYPMIVKSXKX

SEQ ID NO: 45114 - protein, 41 aa, Artificial Sequence
  GFR-binding peptide
  MOD_RES (6), (7), (41): Xaa is C or S
  MOD_RES (21), (22), (23), (24), (25): Xaa is A or G
  MOD_RES (26), (27), (28), (29): Xaa is A or G or is absent
TVPKPXXAPTQLSSLSVLFFXXXXXXXXXLKVYPNMVVRAX

SEQ ID NO: 45115 - protein, 36 aa, Artificial Sequence
  GFR-binding peptide
  MOD_RES (3), (4), (36): Xaa is C or S
KPXXAPTQLSSLSVLFFDDSSNVILKVYPNMVVRAX

SEQ ID NO: 45116 - protein, 38 aa, Artificial Sequence
  GFR-binding peptide
  MOD_RES (1), (2), (36), (38): Xaa is C or S
  MOD_RES (16), (17), (18), (19), (20): Xaa is A or G
  MOD_RES (21), (22), (23), (24): Xaa is A or G or is absent
XXVPTRLSSLSILFFXXXXXXXXXLKVYPDMVVESXGX

SEQ ID NO: 45117 - protein, 36 aa, Artificial Sequence
  GFR-binding peptide
  MOD_RES (1), (33), (35): Xaa is C or S
XVPTRLSSLSILFFDSANNVVLKVYPDMVVESXGXR

SEQ ID NO: 45118 - protein, 35 aa, Artificial Sequence
  GFR-binding peptide
  MOD_RES (2), (3), (35): Xaa is C or S
SXXVPARLSSLSILFFDAANNVVLKVYPDMVVEAX

SEQ ID NO: 45119 - protein, 32 aa, Artificial Sequence
  GFR-binding peptide
  MOD_RES (1), (2): Xaa is C or S
XXTPTKMSSLSMLFFNDKQQIILKVYPGMVVD

SEQ ID NO: 45120 - protein, 40 aa, Artificial Sequence
  GFR-binding peptide
  MOD_RES (5), (6), (38), (40): Xaa is C or S
APASXXVPARLSSLSILFFDAANNVVLKVYPDMVVEAXGX

SEQ ID NO: 45121 - protein, 33 aa, Artificial Sequence
  GFR-binding peptide
  MOD_RES (31), (33): Xaa is C or S
APVKTSSLSMLFFDNGRVLLLKVYPMIVEEXGX

SEQ ID NO: 45122 - protein, 35 aa, Artificial Sequence
  GFR-binding peptide
  MOD_RES (4), (4): Xaa is C or S
KPTXAPTKLSSLSVLFFDDSSNVILKVYPNMVVRS

SEQ ID NO: 45123 - protein, 37 aa, Artificial Sequence
  GFR-binding peptide
  MOD_RES (37), (37): Xaa is C or S
QPSRVHHSSLSVLFFEYVRKKPKLLKVYPRLEEHLEX

SEQ ID NO: 45124 - protein, 38 aa, Artificial Sequence
  GFR-binding peptide
  MOD_RES (2), (3), (38): Xaa is C or S
  MOD_RES (17), (18), (19), (20), (21): Xaa is A or G
  MOD_RES (22), (23), (24), (25): Xaa is A or G or is absent
AXXVPTKLSSLSVLFFXXXXXXXXXLKVYPEGMSVAEX

SEQ ID NO: 45125 - protein, 33 aa, Artificial Sequence
  GFR-binding peptide
  MOD_RES (2), (3): Xaa is C or S
TXXAPVKTSSLSMLFFDNGRVLLLKVYPMIVEE

SEQ ID NO: 45126 - protein, 35 aa, Artificial Sequence
  GFR-binding peptide
  MOD_RES (34), (34): Xaa is C or S
  MOD_RES (14), (15), (16), (17), (18): Xaa is A or G
  MOD_RES (19), (20), (21), (22): Xaa is A or G or is absent
VPEKMSSLSILFFXXXXXXXXXLKVYPNMTVESXA

SEQ ID NO: 45127 - protein, 36 aa, Artificial Sequence
  GFR-binding peptide
  MOD_RES (1), (2), (34), (36): Xaa is C or S
XXAPTKLSSLSVLFFDDSSNVILKVYPNMVVRSXGX

SEQ ID NO: 45128 - protein, 37 aa, Artificial Sequence
  GFR-binding peptide
  MOD_RES (3), (4), (36): Xaa is C or S
KAXXAPTKLSSLSVLFFDSSNNVILKVYPNMVVKAXG

SEQ ID NO: 45129 - protein, 41 aa, Artificial Sequence
  GFR-binding peptide
  MOD_RES (6), (7), (41): Xaa is C or S
  MOD_RES (21), (22), (23), (24), (25): Xaa is A or G
  MOD_RES (26), (27), (28), (29): Xaa is A or G or is absent
SIPKAXXVPTELSSLSMLFFXXXXXXXXXLKVYPEMVVEGX

SEQ ID NO: 45130 - protein, 34 aa, Artificial Sequence
  GFR-binding peptide
  MOD_RES (31), (33): Xaa is C or S
VPQDLSSLSILFFVGRTPKVLKVYPMVVKSXKXS

SEQ ID NO: 45131 - protein, 38 aa, Artificial Sequence
  GFR-binding peptide
  MOD_RES (2), (3), (36), (38): Xaa is C or S
AXXVPTKLSSLSVLFFDDMGVPTLKVYPEGMSVAEXGX

SEQ ID NO: 45132 - protein, 34 aa, Artificial Sequence
  GFR-binding peptide
  MOD_RES (1), (1): Xaa is C or S
  MOD_RES (15), (16), (17), (18), (19): Xaa is A or G
  MOD_RES (20), (21), (22), (23): Xaa is A or G or is absent
XVPARLSSLSILFFXXXXXXXXXLKVYPDMVVEA

SEQ ID NO: 45133 - protein, 37 aa, Artificial Sequence
  GFR-binding peptide
  MOD_RES (3), (35), (37): Xaa is C or S
PTXAPTKLSSLSVLFFDDSSNVILKVYPNMVVRSXGX

SEQ ID NO: 45134 - protein, 36 aa, Artificial Sequence
  GFR-binding peptide
  MOD_RES (4), (5), (36): Xaa is C or S
AAPXXVPQALSSLSILFFVGRKPKVLKVYPMIVRSX

SEQ ID NO: 45135 - protein, 34 aa, Artificial Sequence
  GFR-binding peptide
  MOD_RES (3), (4): Xaa is C or S
KAXXAPTKLSSLSVLFFDSSNNVILKVYPNMVVK

SEQ ID NO: 45136 - protein, 41 aa, Artificial Sequence
  GFR-binding peptide
  MOD_RES (4), (5), (39), (41): Xaa is C or S
  MOD_RES (19), (20), (21), (22), (23): Xaa is A or G
  MOD_RES (24), (25), (26), (27): Xaa is A or G or is absent
PEPXXVPEKMSSLSILFFXXXXXXXXXLKVYPNMTVESXAX

SEQ ID NO: 45137 - protein, 33 aa, Artificial Sequence
  GFR-binding peptide
  MOD_RES (1), (2): Xaa is C or S
XXVPTRLSSLSILFFDSANNVVLKVYPDMVVES

SEQ ID NO: 45138 - protein, 37 aa, Artificial Sequence
  GFR-binding peptide
  MOD_RES (3), (4), (36): Xaa is C or S
KPXXAPTQLSSLSVLFFDDSSNVILKVYPNMVVRAXG

SEQ ID NO: 45139 - protein, 37 aa, Artificial Sequence
  GFR-binding peptide
  MOD_RES (1), (35), (37): Xaa is C or S
  MOD_RES (15), (16), (17), (18), (19): Xaa is A or G
  MOD_RES (20), (21), (22), (23): Xaa is A or G or is absent
XAPTKLSSLSVLFFXXXXXXXXXLKVYPNMVVKAXGX

SEQ ID NO: 45140 - protein, 34 aa, Artificial Sequence
  GFR-binding peptide
  MOD_RES (34), (34): Xaa is C or S
  MOD_RES (14), (15), (16), (17), (18): Xaa is A or G
  MOD_RES (19), (20), (21), (22): Xaa is A or G or is absent
VPTELSSLSMLFFXXXXXXXXXLKVYPEMVVEGX

SEQ ID NO: 45141 - protein, 44 aa, Artificial Sequence
  GFR-binding peptide
  MOD_RES (5), (42), (44): Xaa is C or S
SSVKXQPSRVHHSSLSVLFFEYVRKKPKLLKVYPRLEEHLEXAX

SEQ ID NO: 45142 - protein, 38 aa, Artificial Sequence
  GFR-binding peptide
  MOD_RES (2), (3), (37): Xaa is C or S
  MOD_RES (17), (18), (19), (20), (21): Xaa is A or G
  MOD_RES (22), (23), (24), (25): Xaa is A or G or is absent
PXXTPTKMSSLSMLFFXXXXXXXXXLKVYPGMVVDRXG

SEQ ID NO: 45143 - protein, 38 aa, Artificial Sequence
  GFR-binding peptide
  MOD_RES (2), (3), (35), (37): Xaa is C or S
PXXAPTKLSSLSVLFFDDSSNVILKVYPNMVVRSXGXH

SEQ ID NO: 45144 - protein, 36 aa, Artificial Sequence
  GFR-binding peptide
  MOD_RES (1), (2), (34), (36): Xaa is C or S
XXTPTKMSSLSMLFFNDKQQIILKVYPGMVVDRXGX

SEQ ID NO: 45145 - protein, 34 aa, Artificial Sequence
  GFR-binding peptide
  MOD_RES (1), (1): Xaa is C or S
  MOD_RES (15), (16), (17), (18), (19): Xaa is A or G
  MOD_RES (20), (21), (22), (23): Xaa is A or G or is absent
XVPTELSSLSMLFFXXXXXXXXXLKVYPEMVVEG

SEQ ID NO: 45146 - protein, 34 aa, Artificial Sequence
  GFR-binding peptide
  MOD_RES (1), (34): Xaa is C or S
XVPTKLSSLSVLFFDDMGVPTLKVYPEGMSVAEX

SEQ ID NO: 45147 - protein, 33 aa, Artificial Sequence
  GFR-binding peptide
  MOD_RES (14), (15), (16), (17), (18): Xaa is A or G
  MOD_RES (19), (20), (21), (22): Xaa is A or G or is absent
VPEKMSSLSILFFXXXXXXXXXLKVYPNMTVES

SEQ ID NO: 45148 - protein, 39 aa, Artificial Sequence
  GFR-binding peptide
  MOD_RES (2), (3), (37), (39): Xaa is C or S
  MOD_RES (17), (18), (19), (20), (21): Xaa is A or G
  MOD_RES (22), (23), (24), (25): Xaa is A or G or is absent
AXXAPTKLSSLSVLFFXXXXXXXXXLKVYPNMVVKAXGX

SEQ ID NO: 45149 - protein, 36 aa, Artificial Sequence
  GFR-binding peptide
  MOD_RES (4), (5): Xaa is C or S
AGPXXTPTKMSSLSMLFFNDKQQIILKVYPGMVVDR

SEQ ID NO: 45150 - protein, 34 aa, Artificial Sequence
  GFR-binding peptide
  MOD_RES (33), (33): Xaa is C or S
VPTKLSSLSVLFFDDMGVPTLKVYPEGMSVAEXG

SEQ ID NO: 45151 - protein, 35 aa, Artificial Sequence
  GFR-binding peptide
  MOD_RES (34), (34): Xaa is C or S
  MOD_RES (14), (15), (16), (17), (18): Xaa is A or G
  MOD_RES (19), (20), (21), (22): Xaa is A or G or is absent
TPTKMSSLSMLFFXXXXXXXXXLKVYPGMVVDRXG

SEQ ID NO: 45152 - protein, 38 aa, Artificial Sequence
  GFR-binding peptide
  MOD_RES (37), (37): Xaa is C or S
  MOD_RES (16), (17), (18), (19), (20): Xaa is A or G
  MOD_RES (21), (22), (23), (24): Xaa is A or G or is absent
QPSRVHHSSLSVLFFXXXXXXXXXLKVYPRLEEHLEXA

SEQ ID NO: 45153 - protein, 35 aa, Artificial Sequence
  GFR-binding peptide
  MOD_RES (1), (2): Xaa is C or S
  MOD_RES (16), (17), (18), (19), (20): Xaa is A or G
  MOD_RES (21), (22), (23), (24): Xaa is A or G or is absent
XXVPTELSSLSMLFFXXXXXXXXXLKVYPEMVVEG

SEQ ID NO: 45154 - protein, 40 aa, Artificial Sequence
  GFR-binding peptide
  MOD_RES (4), (5), (37), (39): Xaa is C or S
PEPXXVPEKMSSLSILFFDENKNVVLKVYPNMTVESXAXR

SEQ ID NO: 45155 - protein, 38 aa, Artificial Sequence
  GFR-binding peptide
  MOD_RES (4), (5), (38): Xaa is C or S
  MOD_RES (19), (20), (21), (22), (23): Xaa is A or G
  MOD_RES (24), (25), (26), (27): Xaa is A or G or is absent
ASPXXVPQDLSSLSILFFXXXXXXXXXLKVYPMVVKSX

SEQ ID NO: 45156 - protein, 36 aa, Artificial Sequence
  GFR-binding peptide
  MOD_RES (1), (2), (35): Xaa is C or S
  MOD_RES (16), (17), (18), (19), (20): Xaa is A or G
  MOD_RES (21), (22), (23), (24): Xaa is A or G or is absent
XXVSQDLSSLSILFFXXXXXXXXXLKVYPMIVKSXK

SEQ ID NO: 45157 - protein, 40 aa, Artificial Sequence
  GFR-binding peptide
  MOD_RES (3), (4), (38), (40): Xaa is C or S
  MOD_RES (18), (19), (20), (21), (22): Xaa is A or G
  MOD_RES (23), (24), (25), (26): Xaa is A or G or is absent
PTXXVPTRLSSLSILFFXXXXXXXXXLKVYPDMVVESXGX

SEQ ID NO: 45158 - protein, 37 aa, Artificial Sequence
  GFR-binding peptide
  MOD_RES (1), (1): Xaa is C or S
  MOD_RES (17), (18), (19), (20), (21): Xaa is A or G
  MOD_RES (22), (23), (24), (25): Xaa is A or G or is absent
XQPSRVHHSSLSVLFFXXXXXXXXXLKVYPRLEEHLE

SEQ ID NO: 45159 - protein, 31 aa, Artificial Sequence
  GFR-binding peptide
TPTKMSSLSMLFFNDKQQIILKVYPGMVVDR

SEQ ID NO: 45160 - protein, 41 aa, Artificial Sequence
  GFR-binding peptide
  MOD_RES (6), (7), (41): Xaa is C or S
  MOD_RES (21), (22), (23), (24), (25): Xaa is A or G
  MOD_RES (26), (27), (28), (29): Xaa is A or G or is absent
STPPTXXVPTRLSSLSILFFXXXXXXXXXLKVYPDMVVESX

SEQ ID NO: 45161 - protein, 36 aa, Artificial Sequence
  GFR-binding peptide
  MOD_RES (2), (3), (35): Xaa is C or S
PXXAPTKLSSLSVLFFDDSSNVILKVYPNMVVRSXG

SEQ ID NO: 45162 - protein, 30 aa, Artificial Sequence
  GFR-binding peptide
APTKLSSLSVLFFDDSSNVILKVYPNMVVR

SEQ ID NO: 45163 - protein, 33 aa, Artificial Sequence
  GFR-binding peptide
  MOD_RES (1), (2): Xaa is C or S
XXAPTQLSSLSVLFFDDSSNVILKVYPNMVVRA

SEQ ID NO: 45164 - protein, 36 aa, Artificial Sequence
  GFR-binding peptide
  MOD_RES (1), (35): Xaa is C or S
  MOD_RES (15), (16), (17), (18), (19): Xaa is A or G
  MOD_RES (20), (21), (22), (23): Xaa is A or G or is absent
XVPTKLSSLSILFFXXXXXXXXXLKVYPGMAVSEXG

SEQ ID NO: 45165 - protein, 36 aa, Artificial Sequence
  GFR-binding peptide
  MOD_RES (4), (5): Xaa is C or S
SKAXXVPTKLSSLSILFFDKGVVTYLKVYPGMAVSE

SEQ ID NO: 45166 - protein, 31 aa, Artificial Sequence
  GFR-binding peptide
  MOD_RES (1), (1): Xaa is C or S
XAPTKLSSLSVLFFDSSNNVILKVYPNMVVK

SEQ ID NO: 45167 - protein, 36 aa, Artificial Sequence
  GFR-binding peptide
  MOD_RES (3), (4), (36): Xaa is C or S
GPXXTPTKMSSLSMLFFNDKQQIILKVYPGMVVDRX

SEQ ID NO: 45168 - protein, 40 aa, Artificial Sequence
  GFR-binding peptide
  MOD_RES (5), (6), (38), (40): Xaa is C or S
VPKPXXAPTQLSSLSVLFFDDSSNVILKVYPNMVVRAXGX

SEQ ID NO: 45169 - protein, 39 aa, Artificial Sequence
  GFR-binding peptide
  MOD_RES (5), (6), (39): Xaa is C or S
  MOD_RES (20), (21), (22), (23), (24): Xaa is A or G
  MOD_RES (25), (26), (27), (28): Xaa is A or G or is absent
SAAPXXVPQALSSLSILFFXXXXXXXXXLKVYPMIVRSX

SEQ ID NO: 45170 - protein, 39 aa, Artificial Sequence
  GFR-binding peptide
  MOD_RES (2), (39): Xaa is C or S
KXQPSRVHHSSLSVLFFEYVRKKPKLLKVYPRLEEHLEX

SEQ ID NO: 45171 - protein, 38 aa, Artificial Sequence
  GFR-binding peptide
  MOD_RES (6), (6): Xaa is C or S
  MOD_RES (20), (21), (22), (23), (24): Xaa is A or G
  MOD_RES (25), (26), (27), (28): Xaa is A or G or is absent
DEGLEXVPTEESSLSMLFFXXXXXXXXXLKVYPFLQHN

SEQ ID NO: 45172 - protein, 38 aa, Artificial Sequence
  GFR-binding peptide
  MOD_RES (1), (35), (37): Xaa is C or S
  MOD_RES (15), (16), (17), (18), (19): Xaa is A or G
  MOD_RES (20), (21), (22), (23): Xaa is A or G or is absent
XVPARLSSLSILFFXXXXXXXXXLKVYPDMVVEAXGXR

SEQ ID NO: 45173 - protein, 38 aa, Artificial Sequence
  GFR-binding peptide
  MOD_RES (3), (4), (38): Xaa is C or S
  MOD_RES (18), (19), (20), (21), (22): Xaa is A or G
  MOD_RES (23), (24), (25), (26): Xaa is A or G or is absent
ASXXVPARLSSLSILFFXXXXXXXXXLKVYPDMVVEAX

SEQ ID NO: 45174 - protein, 33 aa, Artificial Sequence
  GFR-binding peptide
  MOD_RES (33), (33): Xaa is C or S
  MOD_RES (14), (15), (16), (17), (18): Xaa is A or G
  MOD_RES (19), (20), (21), (22): Xaa is A or G or is absent
VSQDLSSLSILFFXXXXXXXXXLKVYPMIVKSX

SEQ ID NO: 45175 - protein, 32 aa, Artificial Sequence
  GFR-binding peptide
  MOD_RES (32), (32): Xaa is C or S
TPTKMSSLSMLFFNDKQQIILKVYPGMVVDRX

SEQ ID NO: 45176 - protein, 39 aa, Artificial Sequence
  GFR-binding peptide
  MOD_RES (6), (7): Xaa is C or S
  MOD_RES (21), (22), (23), (24), (25): Xaa is A or G
  MOD_RES (26), (27), (28), (29): Xaa is A or G or is absent
YVPKPXXAPTKLSSLSVLFFXXXXXXXXXLKVYPNMVVR

SEQ ID NO: 45177 - protein, 36 aa, Artificial Sequence
  GFR-binding peptide
  MOD_RES (33), (35): Xaa is C or S
VPTKLSSLSVLFFDDMGVPTLKVYPEGMSVAEXGXR

SEQ ID NO: 45178 - protein, 36 aa, Artificial Sequence
  GFR-binding peptide
  MOD_RES (1), (2), (36): Xaa is C or S
  MOD_RES (16), (17), (18), (19), (20): Xaa is A or G
  MOD_RES (21), (22), (23), (24): Xaa is A or G or is absent
XXVPTRLSSLSILFFXXXXXXXXXLKVYPDMVVESX

SEQ ID NO: 45179 - protein, 39 aa, Artificial Sequence
  GFR-binding peptide
  MOD_RES (3), (4), (38): Xaa is C or S
  MOD_RES (18), (19), (20), (21), (22): Xaa is A or G
  MOD_RES (23), (24), (25), (26): Xaa is A or G or is absent
GPXXTPTKMSSLSMLFFXXXXXXXXXLKVYPGMVVDRXG

SEQ ID NO: 45180 - protein, 39 aa, Artificial Sequence
  GFR-binding peptide
  MOD_RES (6), (7): Xaa is C or S
  MOD_RES (21), (22), (23), (24), (25): Xaa is A or G
  MOD_RES (26), (27), (28), (29): Xaa is A or G or is absent
GIPEPXXVPEKMSSLSILFFXXXXXXXXXLKVYPNMTVE

SEQ ID NO: 45181 - protein, 35 aa, Artificial Sequence
  GFR-binding peptide
  MOD_RES (1), (2), (34): Xaa is C or S
XXVPTRLSSLSILFFDSANNVVLKVYPDMVVESXG

SEQ ID NO: 45182 - protein, 40 aa, Artificial Sequence
  GFR-binding peptide
  MOD_RES (7), (7): Xaa is C or S
NDEGLEXVPTEESSLSMLFFRIKPHQGQHLKVYPFLQHNK

SEQ ID NO: 45183 - protein, 32 aa, Artificial Sequence
  GFR-binding peptide
  MOD_RES (1), (1): Xaa is C or S
XVPARLSSLSILFFDAANNVVLKVYPDMVVEA

SEQ ID NO: 45184 - protein, 39 aa, Artificial Sequence
  GFR-binding peptide
  MOD_RES (3), (4), (36), (38): Xaa is C or S
EPXXVPEKMSSLSILFFDENKNVVLKVYPNMTVESXAXR

SEQ ID NO: 45185 - protein, 43 aa, Artificial Sequence
  GFR-binding peptide
  MOD_RES (7), (41), (43): Xaa is C or S
NDEGLEXVPTEESSLSMLFFRIKPHQGQHLKVYPFLQHNKXEX

SEQ ID NO: 45186 - protein, 34 aa, Artificial Sequence
  GFR-binding peptide
  MOD_RES (1), (1): Xaa is C or S
  MOD_RES (15), (16), (17), (18), (19): Xaa is A or G
  MOD_RES (20), (21), (22), (23): Xaa is A or G or is absent
XTPTKMSSLSMLFFXXXXXXXXXLKVYPGMVVDR

SEQ ID NO: 45187 - protein, 38 aa, Artificial Sequence
  GFR-binding peptide
  MOD_RES (4), (5), (38): Xaa is C or S
  MOD_RES (19), (20), (21), (22), (23): Xaa is A or G
  MOD_RES (24), (25), (26), (27): Xaa is A or G or is absent
PSTXXAPVKTSSLSMLFFXXXXXXXXXLKVYPMIVEEX

SEQ ID NO: 45188 - protein, 37 aa, Artificial Sequence
  GFR-binding peptide
  MOD_RES (3), (4): Xaa is C or S
  MOD_RES (18), (19), (20), (21), (22): Xaa is A or G
  MOD_RES (23), (24), (25), (26): Xaa is A or G or is absent
EPXXVPEKMSSLSILFFXXXXXXXXXLKVYPNMTVES

SEQ ID NO: 45189 - protein, 36 aa, Artificial Sequence
  GFR-binding peptide
  MOD_RES (3), (4), (36): Xaa is C or S
ASXXVPARLSSLSILFFDAANNVVLKVYPDMVVEAX

SEQ ID NO: 45190 - protein, 40 aa, Artificial Sequence
  GFR-binding peptide
  MOD_RES (4), (5), (39): Xaa is C or S
  MOD_RES (19), (20), (21), (22), (23): Xaa is A or G
  MOD_RES (24), (25), (26), (27): Xaa is A or G or is absent
PPTXXVPTRLSSLSILFFXXXXXXXXXLKVYPDMVVESXG

SEQ ID NO: 45191 - protein, 34 aa, Artificial Sequence
  GFR-binding peptide
  MOD_RES (15), (16), (17), (18), (19): Xaa is A or G
  MOD_RES (20), (21), (22), (23): Xaa is A or G or is absent
PSRVHHSSLSVLFFXXXXXXXXXLKVYPRLEEHL

SEQ ID NO: 45192 - protein, 41 aa, Artificial Sequence
  GFR-binding peptide
  MOD_RES (3), (40): Xaa is C or S
  MOD_RES (19), (20), (21), (22), (23): Xaa is A or G
  MOD_RES (24), (25), (26), (27): Xaa is A or G or is absent
VKXQPSRVHHSSLSVLFFXXXXXXXXXLKVYPRLEEHLEXA

SEQ ID NO: 45193 - protein, 38 aa, Artificial Sequence
  GFR-binding peptide
  MOD_RES (1), (35), (37): Xaa is C or S
XVPTEESSLSMLFFRIKPHQGQHLKVYPFLQHNKXEXR

SEQ ID NO: 45194 - protein, 36 aa, Artificial Sequence
  GFR-binding peptide
  MOD_RES (2), (3), (36): Xaa is C or S
  MOD_RES (17), (18), (19), (20), (21): Xaa is A or G
  MOD_RES (22), (23), (24), (25): Xaa is A or G or is absent
PXXVPQALSSLSILFFXXXXXXXXXLKVYPMIVRSX

SEQ ID NO: 45195 - protein, 32 aa, Artificial Sequence
  GFR-binding peptide
  MOD_RES (14), (15), (16), (17), (18): Xaa is A or G
  MOD_RES (19), (20), (21), (22): Xaa is A or G or is absent
APTKLSSLSVLFFXXXXXXXXXLKVYPNMVVR

SEQ ID NO: 45196 - protein, 37 aa, Artificial Sequence
  GFR-binding peptide
  MOD_RES (1), (2), (36): Xaa is C or S
  MOD_RES (16), (17), (18), (19), (20): Xaa is A or G
  MOD_RES (21), (22), (23), (24): Xaa is A or G or is absent
XXAPTQLSSLSVLFFXXXXXXXXXLKVYPNMVVRAXG

SEQ ID NO: 45197 - protein, 38 aa, Artificial Sequence
  GFR-binding peptide
  MOD_RES (5), (6), (38): Xaa is C or S
VPKPXXAPTQLSSLSVLFFDDSSNVILKVYPNMVVRAX

SEQ ID NO: 45198 - protein, 33 aa, Artificial Sequence
  GFR-binding peptide
  MOD_RES (14), (15), (16), (17), (18): Xaa is A or G
  MOD_RES (19), (20), (21), (22): Xaa is A or G or is absent
VPTKLSSLSILFFXXXXXXXXXLKVYPGMAVSE

SEQ ID NO: 45199 - protein, 39 aa, Artificial Sequence
  GFR-binding peptide
  MOD_RES (3), (4), (36), (38): Xaa is C or S
KAXXAPTKLSSLSVLFFDSSNNVILKVYPNMVVKAXGXH

SEQ ID NO: 45200 - protein, 35 aa, Artificial Sequence
  GFR-binding peptide
  MOD_RES (1), (2), (33), (35): Xaa is C or S
XXVPQDLSSLSILFFVGRTPKVLKVYPMVVKSXKX

SEQ ID NO: 45201 - protein, 35 aa, Artificial Sequence
  GFR-binding peptide
  MOD_RES (1), (33), (35): Xaa is C or S
XVPTKLSSLSILFFDKGVVTYLKVYPGMAVSEXGX

SEQ ID NO: 45202 - protein, 35 aa, Artificial Sequence
  GFR-binding peptide
  MOD_RES (4), (5): Xaa is C or S
PEPXXVPEKMSSLSILFFDENKNVVLKVYPNMTVE

SEQ ID NO: 45203 - protein, 41 aa, Artificial Sequence
  GFR-binding peptide
  MOD_RES (4), (5), (39), (41): Xaa is C or S
  MOD_RES (19), (20), (21), (22), (23): Xaa is A or G
  MOD_RES (24), (25), (26), (27): Xaa is A or G or is absent
PKAXXVPTELSSLSMLFFXXXXXXXXXLKVYPEMVVEGXGX

SEQ ID NO: 45204 - protein, 44 aa, Artificial Sequence
  GFR-binding peptide
  MOD_RES (7), (41), (43): Xaa is C or S
  MOD_RES (21), (22), (23), (24), (25): Xaa is A or G
  MOD_RES (26), (27), (28), (29): Xaa is A or G or is absent
HVTKPTXAPTKLSSLSVLFFXXXXXXXXXLKVYPNMVVRSXGXH

SEQ ID NO: 45205 - protein, 37 aa, Artificial Sequence
  GFR-binding peptide
  MOD_RES (3), (4), (35), (37): Xaa is C or S
APXXVPQALSSLSILFFVGRKPKVLKVYPMIVRSXKX

SEQ ID NO: 45206 - protein, 32 aa, Artificial Sequence
  GFR-binding peptide
  MOD_RES (1), (2): Xaa is C or S
XXVPQDLSSLSILFFVGRTPKVLKVYPMVVKS

SEQ ID NO: 45207 - protein, 41 aa, Artificial Sequence
  GFR-binding peptide
  MOD_RES (3), (4), (38), (40): Xaa is C or S
  MOD_RES (18), (19), (20), (21), (22): Xaa is A or G
  MOD_RES (23), (24), (25), (26): Xaa is A or G or is absent
KPXXAPTKLSSLSVLFFXXXXXXXXXLKVYPNMVVRSXGXH

SEQ ID NO: 45208 - protein, 35 aa, Artificial Sequence
  GFR-binding peptide
  MOD_RES (2), (3): Xaa is C or S
  MOD_RES (17), (18), (19), (20), (21): Xaa is A or G
  MOD_RES (22), (23), (24), (25): Xaa is A or G or is absent
TXXAPVKTSSLSMLFFXXXXXXXXXLKVYPMIVEE

SEQ ID NO: 45209 - protein, 37 aa, Artificial Sequence
  GFR-binding peptide
  MOD_RES (5), (6): Xaa is C or S
VPKPXXAPTKLSSLSVLFFDDSSNVILKVYPNMVVRS

SEQ ID NO: 45210 - protein, 39 aa, Artificial Sequence
  GFR-binding peptide
  MOD_RES (5), (5): Xaa is C or S
SSVKXQPSRVHHSSLSVLFFEYVRKKPKLLKVYPRLEEH

SEQ ID NO: 45211 - protein, 37 aa, Artificial Sequence
  GFR-binding peptide
  MOD_RES (5), (6), (37): Xaa is C or S
VPSTXXAPVKTSSLSMLFFDNGRVLLLKVYPMIVEEX

SEQ ID NO: 45212 - protein, 40 aa, Artificial Sequence
  GFR-binding peptide
  MOD_RES (5), (6), (38), (40): Xaa is C or S
SAGPXXTPTKMSSLSMLFFNDKQQIILKVYPGMVVDRXGX

SEQ ID NO: 45213 - protein, 38 aa, Artificial Sequence
  GFR-binding peptide
  MOD_RES (6), (7): Xaa is C or S
STPPTXXVPTRLSSLSILFFDSANNVVLKVYPDMVVES

SEQ ID NO: 45214 - protein, 40 aa, Artificial Sequence
  GFR-binding peptide
  MOD_RES (5), (6), (38), (40): Xaa is C or S
IPEPXXVPEKMSSLSILFFDENKNVVLKVYPNMTVESXAX

SEQ ID NO: 45215 - protein, 37 aa, Artificial Sequence
  GFR-binding peptide
  MOD_RES (36), (36): Xaa is C or S
  MOD_RES (15), (16), (17), (18), (19): Xaa is A or G
  MOD_RES (20), (21), (22), (23): Xaa is A or G or is absent
PSRVHHSSLSVLFFXXXXXXXXXLKVYPRLEEHLEXA

SEQ ID NO: 45216 - protein, 34 aa, Artificial Sequence
  GFR-binding peptide
  MOD_RES (1), (1): Xaa is C or S
  MOD_RES (15), (16), (17), (18), (19): Xaa is A or G
  MOD_RES (20), (21), (22), (23): Xaa is A or G or is absent
XAPTQLSSLSVLFFXXXXXXXXXLKVYPNMVVRA

SEQ ID NO: 45217 - protein, 40 aa, Artificial Sequence
  GFR-binding peptide
  MOD_RES (4), (5), (37), (39): Xaa is C or S
AGPXXTPTKMSSLSMLFFNDKQQIILKVYPGMVVDRXGXS

SEQ ID NO: 45218 - protein, 40 aa, Artificial Sequence
  GFR-binding peptide
  MOD_RES (5), (5): Xaa is C or S
SSVKXQPSRVHHSSLSVLFFEYVRKKPKLLKVYPRLEEHL

SEQ ID NO: 45219 - protein, 40 aa, Artificial Sequence
  GFR-binding peptide
  MOD_RES (5), (6), (40): Xaa is C or S
  MOD_RES (20), (21), (22), (23), (24): Xaa is A or G
  MOD_RES (25), (26), (27), (28): Xaa is A or G or is absent
TPPTXXVPTRLSSLSILFFXXXXXXXXXLKVYPDMVVESX

SEQ ID NO: 45220 - protein, 38 aa, Artificial Sequence
  GFR-binding peptide
  MOD_RES (2), (3), (37): Xaa is C or S
  MOD_RES (17), (18), (19), (20), (21): Xaa is A or G
  MOD_RES (22), (23), (24), (25): Xaa is A or G or is absent
PXXAPTKLSSLSVLFFXXXXXXXXXLKVYPNMVVRSXG

SEQ ID NO: 45221 - protein, 38 aa, Artificial Sequence
  GFR-binding peptide
  MOD_RES (3), (4), (36), (38): Xaa is C or S
GPXXTPTKMSSLSMLFFNDKQQIILKVYPGMVVDRXGX

SEQ ID NO: 45222 - protein, 39 aa, Artificial Sequence
  GFR-binding peptide
  MOD_RES (2), (3), (36), (38): Xaa is C or S
  MOD_RES (17), (18), (19), (20), (21): Xaa is A or G
  MOD_RES (22), (23), (24), (25): Xaa is A or G or is absent
PXXVPQALSSLSILFFXXXXXXXXXLKVYPMIVRSXKXS

SEQ ID NO: 45223 - protein, 40 aa, Artificial Sequence
  GFR-binding peptide
  MOD_RES (3), (4), (38), (40): Xaa is C or S
  MOD_RES (18), (19), (20), (21), (22): Xaa is A or G
  MOD_RES (23), (24), (25), (26): Xaa is A or G or is absent
KAXXAPTKLSSLSVLFFXXXXXXXXXLKVYPNMVVKAXGX

SEQ ID NO: 45224 - protein, 40 aa, Artificial Sequence
  GFR-binding peptide
  MOD_RES (5), (6), (40): Xaa is C or S
  MOD_RES (20), (21), (22), (23), (24): Xaa is A or G
  MOD_RES (25), (26), (27), (28): Xaa is A or G or is absent
SAGPXXTPTKMSSLSMLFFXXXXXXXXXLKVYPGMVVDRX

SEQ ID NO: 45225 - protein, 42 aa, Artificial Sequence
  GFR-binding peptide
  MOD_RES (3), (40), (42): Xaa is C or S
VKXQPSRVHHSSLSVLFFEYVRKKPKLLKVYPRLEEHLEXAX

SEQ ID NO: 45226 - protein, 37 aa, Artificial Sequence
  GFR-binding peptide
  MOD_RES (1), (2), (37): Xaa is C or S
  MOD_RES (16), (17), (18), (19), (20): Xaa is A or G
  MOD_RES (21), (22), (23), (24): Xaa is A or G or is absent
XXVPTKLSSLSVLFFXXXXXXXXXLKVYPEGMSVAEX

SEQ ID NO: 45227 - protein, 36 aa, Artificial Sequence
  GFR-binding peptide
  MOD_RES (1), (35): Xaa is C or S
  MOD_RES (15), (16), (17), (18), (19): Xaa is A or G
  MOD_RES (20), (21), (22), (23): Xaa is A or G or is absent
XTPTKMSSLSMLFFXXXXXXXXXLKVYPGMVVDRXG

SEQ ID NO: 45228 - protein, 36 aa, Artificial Sequence
  GFR-binding peptide
  MOD_RES (2), (3), (35): Xaa is C or S
TXXVPTRLSSLSILFFDSANNVVLKVYPDMVVESXG

SEQ ID NO: 45229 - protein, 42 aa, Artificial Sequence
  GFR-binding peptide
  MOD_RES (6), (7), (41): Xaa is C or S
  MOD_RES (21), (22), (23), (24), (25): Xaa is A or G
  MOD_RES (26), (27), (28), (29): Xaa is A or G or is absent
GIPEPXXVPEKMSSLSILFFXXXXXXXXXLKVYPNMTVESXA

SEQ ID NO: 45230 - protein, 33 aa, Artificial Sequence
  GFR-binding peptide
  MOD_RES (15), (16), (17), (18), (19): Xaa is A or G
  MOD_RES (20), (21), (22), (23): Xaa is A or G or is absent
PSRVHHSSLSVLFFXXXXXXXXXLKVYPRLEEH

SEQ ID NO: 45231 - protein, 42 aa, Artificial Sequence
  GFR-binding peptide
  MOD_RES (5), (39), (41): Xaa is C or S
  MOD_RES (19), (20), (21), (22), (23): Xaa is A or G
  MOD_RES (24), (25), (26), (27): Xaa is A or G or is absent
EGLEXVPTEESSLSMLFFXXXXXXXXXLKVYPFLQHNKXEXR

SEQ ID NO: 45232 - protein, 33 aa, Artificial Sequence
  GFR-binding peptide
  MOD_RES (31), (33): Xaa is C or S
VPQALSSLSILFFVGRKPKVLKVYPMIVRSXKX

SEQ ID NO: 45233 - protein, 39 aa, Artificial Sequence
  GFR-binding peptide
  MOD_RES (37), (39): Xaa is C or S
  MOD_RES (16), (17), (18), (19), (20): Xaa is A or G
  MOD_RES (21), (22), (23), (24): Xaa is A or G or is absent
QPSRVHHSSLSVLFFXXXXXXXXXLKVYPRLEEHLEXAX

SEQ ID NO: 45234 - protein, 43 aa, Artificial Sequence
  GFR-binding peptide
  MOD_RES (4), (41), (43): Xaa is C or S
SVKXQPSRVHHSSLSVLFFEYVRKKPKLLKVYPRLEEHLEXAX

SEQ ID NO: 45235 - protein, 33 aa, Artificial Sequence
  GFR-binding peptide
  MOD_RES (31), (33): Xaa is C or S
VSQDLSSLSILFFIGKTPKILKVYPMIVKSXKX

SEQ ID NO: 45236 - protein, 40 aa, Artificial Sequence
  GFR-binding peptide
  MOD_RES (3), (4), (38), (40): Xaa is C or S
  MOD_RES (18), (19), (20), (21), (22): Xaa is A or G
  MOD_RES (23), (24), (25), (26): Xaa is A or G or is absent
KPXXAPTQLSSLSVLFFXXXXXXXXXLKVYPNMVVRAXGX

SEQ ID NO: 45237 - protein, 41 aa, Artificial Sequence
  GFR-binding peptide
  MOD_RES (2), (39), (41): Xaa is C or S
  MOD_RES (18), (19), (20), (21), (22): Xaa is A or G
  MOD_RES (23), (24), (25), (26): Xaa is A or G or is absent
KXQPSRVHHSSLSVLFFXXXXXXXXXLKVYPRLEEHLEXAX

SEQ ID NO: 45238 - protein, 39 aa, Artificial Sequence
  GFR-binding peptide
  MOD_RES (5), (6), (37), (39): Xaa is C or S
SAAPXXVPQALSSLSILFFVGRKPKVLKVYPMIVRSXKX

SEQ ID NO: 45239 - protein, 36 aa, Artificial Sequence
  GFR-binding peptide
  MOD_RES (2), (3), (35): Xaa is C or S
SXXVPARLSSLSILFFDAANNVVLKVYPDMVVEAXG

SEQ ID NO: 45240 - protein, 41 aa, Artificial Sequence
  GFR-binding peptide
  MOD_RES (7), (41): Xaa is C or S
  MOD_RES (21), (22), (23), (24), (25): Xaa is A or G
  MOD_RES (26), (27), (28), (29): Xaa is A or G or is absent
NDEGLEXVPTEESSLSMLFFXXXXXXXXXLKVYPFLQHNKX

SEQ ID NO: 45241 - protein, 38 aa, Artificial Sequence
  GFR-binding peptide
  MOD_RES (3), (4), (38): Xaa is C or S
  MOD_RES (18), (19), (20), (21), (22): Xaa is A or G
  MOD_RES (23), (24), (25), (26): Xaa is A or G or is absent
EPXXVPEKMSSLSILFFXXXXXXXXXLKVYPNMTVESX

SEQ ID NO: 45242 - protein, 35 aa, Artificial Sequence
  GFR-binding peptide
  MOD_RES (1), (32), (34): Xaa is C or S
XVPQDLSSLSILFFVGRTPKVLKVYPMVVKSXKXS

SEQ ID NO: 45243 - protein, 34 aa, Artificial Sequence
  GFR-binding peptide
  MOD_RES (2), (2): Xaa is C or S
  MOD_RES (16), (17), (18), (19), (20): Xaa is A or G
  MOD_RES (21), (22), (23), (24): Xaa is A or G or is absent
EXVPTEESSLSMLFFXXXXXXXXXLKVYPFLQHN

SEQ ID NO: 45244 - protein, 39 aa, Artificial Sequence
  GFR-binding peptide
  MOD_RES (3), (4), (38): Xaa is C or S
  MOD_RES (18), (19), (20), (21), (22): Xaa is A or G
  MOD_RES (23), (24), (25), (26): Xaa is A or G or is absent
PTXXVPTRLSSLSILFFXXXXXXXXXLKVYPDMVVESXG

SEQ ID NO: 45245 - protein, 37 aa, Artificial Sequence
  GFR-binding peptide
  MOD_RES (35), (37): Xaa is C or S
  MOD_RES (14), (15), (16), (17), (18): Xaa is A or G
  MOD_RES (19), (20), (21), (22): Xaa is A or G or is absent
VPTKLSSLSVLFFXXXXXXXXXLKVYPEGMSVAEXGX

SEQ ID NO: 45246 - protein, 32 aa, Artificial Sequence
  GFR-binding peptide
  MOD_RES (14), (15), (16), (17), (18): Xaa is A or G
  MOD_RES (19), (20), (21), (22): Xaa is A or G or is absent
APVKTSSLSMLFFXXXXXXXXXLKVYPMIVEE

SEQ ID NO: 45247 - protein, 38 aa, Artificial Sequence
  GFR-binding peptide
  MOD_RES (3), (4), (36), (38): Xaa is C or S
KAXXVPTKLSSLSILFFDKGVVTYLKVYPGMAVSEXGX

SEQ ID NO: 45248 - protein, 41 aa, Artificial Sequence
  GFR-binding peptide
  MOD_RES (7), (41): Xaa is C or S
NDEGLEXVPTEESSLSMLFFRIKPHQGQHLKVYPFLQHNKX

SEQ ID NO: 45249 - protein, 37 aa, Artificial Sequence
  GFR-binding peptide
  MOD_RES (2), (3), (37): Xaa is C or S
  MOD_RES (17), (18), (19), (20), (21): Xaa is A or G
  MOD_RES (22), (23), (24), (25): Xaa is A or G or is absent
PXXVPEKMSSLSILFFXXXXXXXXXLKVYPNMTVESX

SEQ ID NO: 45250 - protein, 38 aa, Artificial Sequence
  GFR-binding peptide
  MOD_RES (1), (35), (37): Xaa is C or S
  MOD_RES (15), (16), (17), (18), (19): Xaa is A or G
  MOD_RES (20), (21), (22), (23): Xaa is A or G or is absent
XVPTELSSLSMLFFXXXXXXXXXLKVYPEMVVEGXGXR

SEQ ID NO: 45251 - protein, 38 aa, Artificial Sequence
  GFR-binding peptide
  MOD_RES (5), (6), (37): Xaa is C or S
SAAPXXVPQALSSLSILFFVGRKPKVLKVYPMIVRSXK

SEQ ID NO: 45252 - protein, 36 aa, Artificial Sequence
  GFR-binding peptide
  MOD_RES (5), (6): Xaa is C or S
SAAPXXVPQALSSLSILFFVGRKPKVLKVYPMIVRS

SEQ ID NO: 45253 - protein, 42 aa, Artificial Sequence
  GFR-binding peptide
  MOD_RES (6), (40), (42): Xaa is C or S
  MOD_RES (20), (21), (22), (23), (24): Xaa is A or G
  MOD_RES (25), (26), (27), (28): Xaa is A or G or is absent
DEGLEXVPTEESSLSMLFFXXXXXXXXXLKVYPFLQHNKXEX

SEQ ID NO: 45254 - protein, 33 aa, Artificial Sequence
  GFR-binding peptide
  MOD_RES (1), (2): Xaa is C or S
XXAPTKLSSLSVLFFDDSSNVILKVYPNMVVRS

SEQ ID NO: 45255 - protein, 36 aa, Artificial Sequence
  GFR-binding peptide
  MOD_RES (35), (35): Xaa is C or S
  MOD_RES (14), (15), (16), (17), (18): Xaa is A or G
  MOD_RES (19), (20), (21), (22): Xaa is A or G or is absent
SRVHHSSLSVLFFXXXXXXXXXLKVYPRLEEHLEXA

SEQ ID NO: 45256 - protein, 34 aa, Artificial Sequence
  GFR-binding peptide
  MOD_RES (3), (4): Xaa is C or S
KPXXAPTQLSSLSVLFFDDSSNVILKVYPNMVVR

SEQ ID NO: 45257 - protein, 36 aa, Artificial Sequence
  GFR-binding peptide
  MOD_RES (1), (2), (34), (36): Xaa is C or S
XXVPEKMSSLSILFFDENKNVVLKVYPNMTVESXAX

SEQ ID NO: 45258 - protein, 33 aa, Artificial Sequence
  GFR-binding peptide
  MOD_RES (1), (33): Xaa is C or S
XAPTKLSSLSVLFFDDSSNVILKVYPNMVVRSX

SEQ ID NO: 45259 - protein, 40 aa, Artificial Sequence
  GFR-binding peptide
  MOD_RES (5), (6), (38), (40): Xaa is C or S
ASKAXXVPTKLSSLSILFFDKGVVTYLKVYPGMAVSEXGX

SEQ ID NO: 45260 - protein, 40 aa, Artificial Sequence
  GFR-binding peptide
  MOD_RES (7), (7): Xaa is C or S
  MOD_RES (21), (22), (23), (24), (25): Xaa is A or G
  MOD_RES (26), (27), (28), (29): Xaa is A or G or is absent
NDEGLEXVPTEESSLSMLFFXXXXXXXXXLKVYPFLQHNK

SEQ ID NO: 45261 - protein, 38 aa, Artificial Sequence
  GFR-binding peptide
  MOD_RES (3), (4), (38): Xaa is C or S
  MOD_RES (18), (19), (20), (21), (22): Xaa is A or G
  MOD_RES (23), (24), (25), (26): Xaa is A or G or is absent
KAXXVPTKLSSLSILFFXXXXXXXXXLKVYPGMAVSEX

SEQ ID NO: 45262 - protein, 36 aa, Artificial Sequence
  GFR-binding peptide
  MOD_RES (3), (4), (36): Xaa is C or S
PTXXVPTRLSSLSILFFDSANNVVLKVYPDMVVESX

SEQ ID NO: 45263 - protein, 38 aa, Artificial Sequence
  GFR-binding peptide
  MOD_RES (5), (6): Xaa is C or S
  MOD_RES (20), (21), (22), (23), (24): Xaa is A or G
  MOD_RES (25), (26), (27), (28): Xaa is A or G or is absent
TPPTXXVPTRLSSLSILFFXXXXXXXXXLKVYPDMVVE

SEQ ID NO: 45264 - protein, 37 aa, Artificial Sequence
  GFR-binding peptide
  MOD_RES (4), (5): Xaa is C or S
  MOD_RES (19), (20), (21), (22), (23): Xaa is A or G
  MOD_RES (24), (25), (26), (27): Xaa is A or G or is absent
PEPXXVPEKMSSLSILFFXXXXXXXXXLKVYPNMTVE

SEQ ID NO: 45265 - protein, 39 aa, Artificial Sequence
  GFR-binding peptide
  MOD_RES (6), (7), (39): Xaa is C or S
GSAGPXXTPTKMSSLSMLFFNDKQQIILKVYPGMVVDRX

SEQ ID NO: 45266 - protein, 36 aa, Artificial Sequence
  GFR-binding peptide
  MOD_RES (3), (4): Xaa is C or S
  MOD_RES (18), (19), (20), (21), (22): Xaa is A or G
  MOD_RES (23), (24), (25), (26): Xaa is A or G or is absent
SPXXVSQDLSSLSILFFXXXXXXXXXLKVYPMIVKS

SEQ ID NO: 45267 - protein, 32 aa, Artificial Sequence
  GFR-binding peptide
  MOD_RES (14), (15), (16), (17), (18): Xaa is A or G
  MOD_RES (19), (20), (21), (22): Xaa is A or G or is absent
APTKLSSLSVLFFXXXXXXXXXLKVYPNMVVK

SEQ ID NO: 45268 - protein, 36 aa, Artificial Sequence
  GFR-binding peptide
  MOD_RES (3), (4): Xaa is C or S
  MOD_RES (18), (19), (20), (21), (22): Xaa is A or G
  MOD_RES (23), (24), (25), (26): Xaa is A or G or is absent
GPXXTPTKMSSLSMLFFXXXXXXXXXLKVYPGMVVD

SEQ ID NO: 45269 - protein, 39 aa, Artificial Sequence
  GFR-binding peptide
  MOD_RES (5), (6), (39): Xaa is C or S
  MOD_RES (20), (21), (22), (23), (24): Xaa is A or G
  MOD_RES (25), (26), (27), (28): Xaa is A or G or is absent
SASPXXVPQDLSSLSILFFXXXXXXXXXLKVYPMVVKSX

SEQ ID NO: 45270 - protein, 37 aa, Artificial Sequence
  GFR-binding peptide
  MOD_RES (5), (6): Xaa is C or S
SAGPXXTPTKMSSLSMLFFNDKQQIILKVYPGMVVDR

SEQ ID NO: 45271 - protein, 36 aa, Artificial Sequence
  GFR-binding peptide
  MOD_RES (2), (3): Xaa is C or S
  MOD_RES (17), (18), (19), (20), (21): Xaa is A or G
  MOD_RES (22), (23), (24), (25): Xaa is A or G or is absent
SXXVPARLSSLSILFFXXXXXXXXXLKVYPDMVVEA

SEQ ID NO: 45272 - protein, 37 aa, Artificial Sequence
  GFR-binding peptide
  MOD_RES (4), (5): Xaa is C or S
  MOD_RES (19), (20), (21), (22), (23): Xaa is A or G
  MOD_RES (24), (25), (26), (27): Xaa is A or G or is absent
PKPXXAPTQLSSLSVLFFXXXXXXXXXLKVYPNMVVR

SEQ ID NO: 45273 - protein, 33 aa, Artificial Sequence
  GFR-binding peptide
  MOD_RES (1), (2): Xaa is C or S
XXVPTKLSSLSILFFDKGVVTYLKVYPGMAVSE

SEQ ID NO: 45274 - protein, 42 aa, Artificial Sequence; identical to SEQ ID NO: 148
  GFR-binding peptide
  MOD_RES (6), (7), (39), (41): Xaa is C or S

SEQ ID NO: 45275 - protein, 33 aa, Artificial Sequence
  GFR-binding peptide
  MOD_RES (1), (32): Xaa is C or S
XVPQALSSLSILFFVGRKPKVLKVYPMIVRSXK

SEQ ID NO: 45276 - protein, 35 aa, Artificial Sequence
  GFR-binding peptide
  MOD_RES (1), (35): Xaa is C or S
  MOD_RES (15), (16), (17), (18), (19): Xaa is A or G
  MOD_RES (20), (21), (22), (23): Xaa is A or G or is absent
XVPTRLSSLSILFFXXXXXXXXXLKVYPDMVVESX

SEQ ID NO: 45277 - protein, 38 aa, Artificial Sequence
  GFR-binding peptide
  MOD_RES (2), (3), (35), (37): Xaa is C or S
TXXVPTRLSSLSILFFDSANNVVLKVYPDMVVESXGXR

SEQ ID NO: 45278 - protein, 36 aa, Artificial Sequence
  GFR-binding peptide
  MOD_RES (2), (3), (34), (36): Xaa is C or S
TXXAPVKTSSLSMLFFDNGRVLLLKVYPMIVEEXGX

SEQ ID NO: 45279 - protein, 41 aa, Artificial Sequence
  GFR-binding peptide
  MOD_RES (5), (6), (38), (40): Xaa is C or S
VPKAXXAPTKLSSLSVLFFDSSNNVILKVYPNMVVKAXGXH

SEQ ID NO: 45280 - protein, 39 aa, Artificial Sequence
  GFR-binding peptide
  MOD_RES (6), (7), (39): Xaa is C or S
TVPKPXXAPTQLSSLSVLFFDDSSNVILKVYPNMVVRAX

SEQ ID NO: 45281 - protein, 36 aa, Artificial Sequence
  GFR-binding peptide
  MOD_RES (5), (6): Xaa is C or S
SASPXXVPQDLSSLSILFFVGRTPKVLKVYPMVVKS

SEQ ID NO: 45282 - protein, 43 aa, Artificial Sequence
  GFR-binding peptide
  MOD_RES (5), (6), (40), (42): Xaa is C or S
  MOD_RES (20), (21), (22), (23), (24): Xaa is A or G
  MOD_RES (25), (26), (27), (28): Xaa is A or G or is absent
IPEPXXVPEKMSSLSILFFXXXXXXXXXLKVYPNMTVESXAXR

SEQ ID NO: 45283 - protein, 37 aa, Artificial Sequence
  GFR-binding peptide
  MOD_RES (6), (7): Xaa is C or S
ASAAPXXVPQALSSLSILFFVGRKPKVLKVYPMIVRS

SEQ ID NO: 45284 - protein, 37 aa, Artificial Sequence
  GFR-binding peptide
  MOD_RES (4), (5): Xaa is C or S
  MOD_RES (19), (20), (21), (22), (23): Xaa is A or G
  MOD_RES (24), (25), (26), (27): Xaa is A or G or is absent
AAPXXVPQALSSLSILFFXXXXXXXXXLKVYPMIVRS

SEQ ID NO: 45285 - protein, 33 aa, Artificial Sequence
  GFR-binding peptide
  MOD_RES (1), (1): Xaa is C or S
  MOD_RES (15), (16), (17), (18), (19): Xaa is A or G
  MOD_RES (20), (21), (22), (23): Xaa is A or G or is absent
XVPTRLSSLSILFFXXXXXXXXXLKVYPDMVVE

SEQ ID NO: 45286 - protein, 37 aa, Artificial Sequence
  GFR-binding peptide
  MOD_RES (2), (3), (37): Xaa is C or S
  MOD_RES (17), (18), (19), (20), (21): Xaa is A or G
  MOD_RES (22), (23), (24), (25): Xaa is A or G or is absent
AXXAPTKLSSLSVLFFXXXXXXXXXLKVYPNMVVKAX

SEQ ID NO: 45287 - protein, 32 aa, Artificial Sequence
  GFR-binding peptide
  MOD_RES (1), (1): Xaa is C or S
XAPTQLSSLSVLFFDDSSNVILKVYPNMVVRA

SEQ ID NO: 45288 - protein, 39 aa, Artificial Sequence
  GFR-binding peptide
  MOD_RES (4), (5), (36), (38): Xaa is C or S
ASPXXVPQDLSSLSILFFVGRTPKVLKVYPMVVKSXKXS

SEQ ID NO: 45289 - protein, 39 aa, Artificial Sequence
  GFR-binding peptide
  MOD_RES (3), (4), (36), (38): Xaa is C or S
PTXXVPTRLSSLSILFFDSANNVVLKVYPDMVVESXGXR

SEQ ID NO: 45290 - protein, 39 aa, Artificial Sequence
  GFR-binding peptide
  MOD_RES (4), (5): Xaa is C or S
  MOD_RES (19), (20), (21), (22), (23): Xaa is A or G
  MOD_RES (24), (25), (26), (27): Xaa is A or G or is absent
GKAXXVPTKLSSLSVLFFXXXXXXXXXLKVYPEGMSVAE

SEQ ID NO: 45291 - protein, 35 aa, Artificial Sequence
  GFR-binding peptide
  MOD_RES (4), (5): Xaa is C or S
PKPXXAPTKLSSLSVLFFDDSSNVILKVYPNMVVR

SEQ ID NO: 45292 - protein, 37 aa, Artificial Sequence
  GFR-binding peptide
  MOD_RES (2), (3), (35), (37): Xaa is C or S
PXXAPTKLSSLSVLFFDDSSNVILKVYPNMVVRSXGX

SEQ ID NO: 45293 - protein, 38 aa, Artificial Sequence
  GFR-binding peptide
  MOD_RES (4), (5), (37): Xaa is C or S
PKAXXAPTKLSSLSVLFFDSSNNVILKVYPNMVVKAXG

SEQ ID NO: 45294 - protein, 37 aa, Artificial Sequence
  GFR-binding peptide
  MOD_RES (4), (5): Xaa is C or S
  MOD_RES (19), (20), (21), (22), (23): Xaa is A or G
  MOD_RES (24), (25), (26), (27): Xaa is A or G or is absent
ASPXXVSQDLSSLSILFFXXXXXXXXXLKVYPMIVKS

SEQ ID NO: 45295 - protein, 41 aa, Artificial Sequence
  GFR-binding peptide
  MOD_RES (3), (4), (38), (40): Xaa is C or S
  MOD_RES (18), (19), (20), (21), (22): Xaa is A or G
  MOD_RES (23), (24), (25), (26): Xaa is A or G or is absent
KAXXVPTELSSLSMLFFXXXXXXXXXLKVYPEMVVEGXGXR

SEQ ID NO: 45296 - protein, 40 aa, Artificial Sequence
  GFR-binding peptide
  MOD_RES (4), (5), (38), (40): Xaa is C or S
GKAXXVPTKLSSLSVLFFDDMGVPTLKVYPEGMSVAEXGX

SEQ ID NO: 45297 - protein, 40 aa, Artificial Sequence
  GFR-binding peptide
  MOD_RES (5), (6), (39): Xaa is C or S
  MOD_RES (20), (21), (22), (23), (24): Xaa is A or G
  MOD_RES (25), (26), (27), (28): Xaa is A or G or is absent
SASPXXVSQDLSSLSILFFXXXXXXXXXLKVYPMIVKSXK

SEQ ID NO: 45298 - protein, 36 aa, Artificial Sequence
  GFR-binding peptide
  MOD_RES (2), (3), (34), (36): Xaa is C or S
PXXVSQDLSSLSILFFIGKTPKILKVYPMIVKSXKX

SEQ ID NO: 45299 - protein, 36 aa, Artificial Sequence
  GFR-binding peptide
  MOD_RES (2), (3), (34), (36): Xaa is C or S
PXXVPQALSSLSILFFVGRKPKVLKVYPMIVRSXKX

SEQ ID NO: 45300 - protein, 41 aa, Artificial Sequence
  GFR-binding peptide
  MOD_RES (6), (7), (40): Xaa is C or S
KVGKAXXVPTKLSSLSVLFFDDMGVPTLKVYPEGMSVAEXG

SEQ ID NO: 45301 - protein, 37 aa, Artificial Sequence
  GFR-binding peptide
  MOD_RES (1), (2), (34), (36): Xaa is C or S
XXTPTKMSSLSMLFFNDKQQIILKVYPGMVVDRXGXS

SEQ ID NO: 45302 - protein, 41 aa, Artificial Sequence
  GFR-binding peptide
  MOD_RES (2), (3), (38), (40): Xaa is C or S
  MOD_RES (17), (18), (19), (20), (21): Xaa is A or G
  MOD_RES (22), (23), (24), (25): Xaa is A or G or is absent
AXXVPTKLSSLSVLFFXXXXXXXXXLKVYPEGMSVAEXGXR

SEQ ID NO: 45303 - protein, 42 aa, Artificial Sequence
  GFR-binding peptide
  MOD_RES (6), (7), (41): Xaa is C or S
  MOD_RES (21), (22), (23), (24), (25): Xaa is A or G
  MOD_RES (26), (27), (28), (29): Xaa is A or G or is absent
HVPKPXXAPTKLSSLSVLFFXXXXXXXXXLKVYPNMVVRSXG

SEQ ID NO: 45304 - protein, 37 aa, Artificial Sequence
  GFR-binding peptide
  MOD_RES (4), (5), (37): Xaa is C or S
SKAXXVPTKLSSLSILFFDKGVVTYLKVYPGMAVSEX

SEQ ID NO: 45305 - protein, 39 aa, Artificial Sequence
  GFR-binding peptide
  MOD_RES (1), (2), (36), (38): Xaa is C or S
  MOD_RES (16), (17), (18), (19), (20): Xaa is A or G
  MOD_RES (21), (22), (23), (24): Xaa is A or G or is absent
XXVPEKMSSLSILFFXXXXXXXXXLKVYPNMTVESXAXR

SEQ ID NO: 45306 - protein, 42 aa, Artificial Sequence
  GFR-binding peptide
  MOD_RES (5), (6), (41): Xaa is C or S
  MOD_RES (20), (21), (22), (23), (24): Xaa is A or G
  MOD_RES (25), (26), (27), (28): Xaa is A or G or is absent
VGKAXXVPTKLSSLSVLFFXXXXXXXXXLKVYPEGMSVAEXG

SEQ ID NO: 45307 - protein, 36 aa, Artificial Sequence
  GFR-binding peptide
  MOD_RES (16), (17), (18), (19), (20): Xaa is A or G
  MOD_RES (21), (22), (23), (24): Xaa is A or G or is absent
QPSRVHHSSLSVLFFXXXXXXXXXLKVYPRLEEHLE

SEQ ID NO: 45308 - protein, 40 aa, Artificial Sequence
  GFR-binding peptide
  MOD_RES (6), (7), (38), (40): Xaa is C or S
ASASPXXVPQDLSSLSILFFVGRTPKVLKVYPMVVKSXKX

SEQ ID NO: 45309 - protein, 41 aa, Artificial Sequence
  GFR-binding peptide
  MOD_RES (4), (5), (39), (41): Xaa is C or S
  MOD_RES (19), (20), (21), (22), (23): Xaa is A or G
  MOD_RES (24), (25), (26), (27): Xaa is A or G or is absent
PPTXXVPTRLSSLSILFFXXXXXXXXXLKVYPDMVVESXGX

SEQ ID NO: 45310 - protein, 38 aa, Artificial Sequence
  GFR-binding peptide
  MOD_RES (5), (6), (38): Xaa is C or S
ASKAXXVPTKLSSLSILFFDKGVVTYLKVYPGMAVSEX

SEQ ID NO: 45311 - protein, 40 aa, Artificial Sequence
  GFR-binding peptide
  MOD_RES (2), (3), (38), (40): Xaa is C or S
  MOD_RES (17), (18), (19), (20), (21): Xaa is A or G
  MOD_RES (22), (23), (24), (25): Xaa is A or G or is absent
AXXVPTKLSSLSVLFFXXXXXXXXXLKVYPEGMSVAEXGX

SEQ ID NO: 45312 - protein, 37 aa, Artificial Sequence
  GFR-binding peptide
  MOD_RES (1), (2), (36): Xaa is C or S
  MOD_RES (16), (17), (18), (19), (20): Xaa is A or G
  MOD_RES (21), (22), (23), (24): Xaa is A or G or is absent
XXAPTKLSSLSVLFFXXXXXXXXXLKVYPNMVVKAXG

SEQ ID NO: 45313 - protein, 35 aa, Artificial Sequence
  GFR-binding peptide
  MOD_RES (1), (2), (35): Xaa is C or S
XXVPTKLSSLSVLFFDDMGVPTLKVYPEGMSVAEX

SEQ ID NO: 45314 - protein, 37 aa, Artificial Sequence
  GFR-binding peptide
  MOD_RES (1), (34), (36): Xaa is C or S
  MOD_RES (15), (16), (17), (18), (19): Xaa is A or G
  MOD_RES (20), (21), (22), (23): Xaa is A or G or is absent
XVSQDLSSLSILFFXXXXXXXXXLKVYPMIVKSXKXS

SEQ ID NO: 45315 - protein, 38 aa, Artificial Sequence
  GFR-binding peptide
  MOD_RES (3), (3): Xaa is C or S
  MOD_RES (19), (20), (21), (22), (23): Xaa is A or G
  MOD_RES (24), (25), (26), (27): Xaa is A or G or is absent
VKXQPSRVHHSSLSVLFFXXXXXXXXXLKVYPRLEEHL

SEQ ID NO: 45316 - protein, 39 aa, Artificial Sequence
  GFR-binding peptide
  MOD_RES (5), (6): Xaa is C or S
  MOD_RES (20), (21), (22), (23), (24): Xaa is A or G
  MOD_RES (25), (26), (27), (28): Xaa is A or G or is absent
SAGPXXTPTKMSSLSMLFFXXXXXXXXXLKVYPGMVVDR

SEQ ID NO: 45317 - protein, 35 aa, Artificial Sequence
  GFR-binding peptide
  MOD_RES (3), (4): Xaa is C or S
KPXXAPTKLSSLSVLFFDDSSNVILKVYPNMVVRS

SEQ ID NO: 45318 - protein, 32 aa, Artificial Sequence
  GFR-binding peptide
  MOD_RES (14), (15), (16), (17), (18): Xaa is A or G
  MOD_RES (19), (20), (21), (22): Xaa is A or G or is absent
VPTRLSSLSILFFXXXXXXXXXLKVYPDMVVE

SEQ ID NO: 45319 - protein, 37 aa, Artificial Sequence
  GFR-binding peptide
  MOD_RES (5), (6), (37): Xaa is C or S
SAAPXXVPQALSSLSILFFVGRKPKVLKVYPMIVRSX

SEQ ID NO: 45320 - protein, 37 aa, Artificial Sequence
  GFR-binding peptide
  MOD_RES (2), (3), (34), (36): Xaa is C or S
PXXVSQDLSSLSILFFIGKTPKILKVYPMIVKSXKXS

SEQ ID NO: 45321 - protein, 31 aa, Artificial Sequence
  GFR-binding peptide
  MOD_RES (1), (1): Xaa is C or S
XVSQDLSSLSILFFIGKTPKILKVYPMIVKS

SEQ ID NO: 45322 - protein, 40 aa, Artificial Sequence
  GFR-binding peptide
  MOD_RES (37), (39): Xaa is C or S
  MOD_RES (16), (17), (18), (19), (20): Xaa is A or G
  MOD_RES (21), (22), (23), (24): Xaa is A or G or is absent
QPSRVHHSSLSVLFFXXXXXXXXXLKVYPRLEEHLEXAXA

SEQ ID NO: 45323 - protein, 32 aa, Artificial Sequence
  GFR-binding peptide
  MOD_RES (1), (2): Xaa is C or S
XXAPVKTSSLSMLFFDNGRVLLLKVYPMIVEE

SEQ ID NO: 45324 - protein, 31 aa, Artificial Sequence
  GFR-binding peptide
  MOD_RES (1), (1): Xaa is C or S
XVPQALSSLSILFFVGRKPKVLKVYPMIVRS

SEQ ID NO: 45325 - protein, 34 aa, Artificial Sequence
  GFR-binding peptide
  MOD_RES (1), (33): Xaa is C or S
XAPTKLSSLSVLFFDDSSNVILKVYPNMVVRSXG

SEQ ID NO: 45326 - protein, 38 aa, Artificial Sequence
  GFR-binding peptide
  MOD_RES (5), (6), (37): Xaa is C or S
VPSTXXAPVKTSSLSMLFFDNGRVLLLKVYPMIVEEXG

SEQ ID NO: 45327 - protein, 31 aa, Artificial Sequence
  GFR-binding peptide
  MOD_RES (1), (1): Xaa is C or S
XAPTKLSSLSVLFFDDSSNVILKVYPNMVVR

SEQ ID NO: 45328 - protein, 38 aa, Artificial Sequence
  GFR-binding peptide
  MOD_RES (3), (4), (38): Xaa is C or S
  MOD_RES (18), (19), (20), (21), (22): Xaa is A or G
  MOD_RES (23), (24), (25), (26): Xaa is A or G or is absent
GPXXTPTKMSSLSMLFFXXXXXXXXXLKVYPGMVVDRX

SEQ ID NO: 45329 - protein, 42 aa, Artificial Sequence
  GFR-binding peptide
  MOD_RES (6), (7), (40), (42): Xaa is C or S
  MOD_RES (21), (22), (23), (24), (25): Xaa is A or G
  MOD_RES (26), (27), (28), (29): Xaa is A or G or is absent
ASASPXXVSQDLSSLSILFFXXXXXXXXXLKVYPMIVKSXKX

SEQ ID NO: 45330 - protein, 41 aa, Artificial Sequence
  GFR-binding peptide
  MOD_RES (5), (6), (39), (41): Xaa is C or S
  MOD_RES (20), (21), (22), (23), (24): Xaa is A or G
  MOD_RES (25), (26), (27), (28): Xaa is A or G or is absent
SASPXXVSQDLSSLSILFFXXXXXXXXXLKVYPMIVKSXKX

SEQ ID NO: 45331 - protein, 41 aa, Artificial Sequence
  GFR-binding peptide
  MOD_RES (4), (5), (39), (41): Xaa is C or S
  MOD_RES (19), (20), (21), (22), (23): Xaa is A or G
  MOD_RES (24), (25), (26), (27): Xaa is A or G or is absent
PKPXXAPTQLSSLSVLFFXXXXXXXXXLKVYPNMVVRAXGX

SEQ ID NO: 45332 - protein, 34 aa, Artificial Sequence
  GFR-binding peptide
  MOD_RES (34), (34): Xaa is C or S
  MOD_RES (14), (15), (16), (17), (18): Xaa is A or G
  MOD_RES (19), (20), (21), (22): Xaa is A or G or is absent
VPEKMSSLSILFFXXXXXXXXXLKVYPNMTVESX

SEQ ID NO: 45333 - protein, 34 aa, Artificial Sequence
  GFR-binding peptide
  MOD_RES (2), (3): Xaa is C or S
AXXAPTKLSSLSVLFFDSSNNVILKVYPNMVVKA

SEQ ID NO: 45334 - protein, 36 aa, Artificial Sequence
  GFR-binding peptide
  MOD_RES (3), (4): Xaa is C or S
  MOD_RES (18), (19), (20), (21), (22): Xaa is A or G
  MOD_RES (23), (24), (25), (26): Xaa is A or G or is absent
SPXXVPQDLSSLSILFFXXXXXXXXXLKVYPMVVKS

SEQ ID NO: 45335 - protein, 41 aa, Artificial Sequence
  GFR-binding peptide
  MOD_RES (5), (6), (40): Xaa is C or S
  MOD_RES (20), (21), (22), (23), (24): Xaa is A or G
  MOD_RES (25), (26), (27), (28): Xaa is A or G or is absent
IPEPXXVPEKMSSLSILFFXXXXXXXXXLKVYPNMTVESXA

SEQ ID NO: 45336 - protein, 41 aa, Artificial Sequence
  GFR-binding peptide
  MOD_RES (5), (6), (38), (40): Xaa is C or S
VPKPXXAPTQLSSLSVLFFDDSSNVILKVYPNMVVRAXGXH

SEQ ID NO: 45337 - protein, 38 aa, Artificial Sequence
  GFR-binding peptide
  MOD_RES (6), (7): Xaa is C or S
HVPKPXXAPTKLSSLSVLFFDDSSNVILKVYPNMVVRS

SEQ ID NO: 45338 - protein, 43 aa, Artificial Sequence
  GFR-binding peptide
  MOD_RES (5), (6), (41), (43): Xaa is C or S
  MOD_RES (20), (21), (22), (23), (24): Xaa is A or G
  MOD_RES (25), (26), (27), (28): Xaa is A or G or is absent
VGKAXXVPTKLSSLSVLFFXXXXXXXXXLKVYPEGMSVAEXGX

SEQ ID NO: 45339 - protein, 35 aa, Artificial Sequence
  GFR-binding peptide
  MOD_RES (2), (3): Xaa is C or S
  MOD_RES (17), (18), (19), (20), (21): Xaa is A or G
  MOD_RES (22), (23), (24), (25): Xaa is A or G or is absent
TXXVPTRLSSLSILFFXXXXXXXXXLKVYPDMVVE

SEQ ID NO: 45340 - protein, 32 aa, Artificial Sequence
  GFR-binding peptide
  MOD_RES (14), (15), (16), (17), (18): Xaa is A or G
  MOD_RES (19), (20), (21), (22): Xaa is A or G or is absent
VPEKMSSLSILFFXXXXXXXXXLKVYPNMTVE

SEQ ID NO: 45341 - protein, 37 aa, Artificial Sequence
  GFR-binding peptide
  MOD_RES (1), (36): Xaa is C or S
  MOD_RES (15), (16), (17), (18), (19): Xaa is A or G
  MOD_RES (20), (21), (22), (23): Xaa is A or G or is absent
XVPTKLSSLSVLFFXXXXXXXXXLKVYPEGMSVAEXG

SEQ ID NO: 45342 - protein, 35 aa, Artificial Sequence
  GFR-binding peptide
  MOD_RES (2), (2): Xaa is C or S
EXVPTEESSLSMLFFRIKPHQGQHLKVYPFLQHNK

SEQ ID NO: 45343 - protein, 42 aa, Artificial Sequence
  GFR-binding peptide
  MOD_RES (6), (7), (40), (42): Xaa is C or S
  MOD_RES (21), (22), (23), (24), (25): Xaa is A or G
  MOD_RES (26), (27), (28), (29): Xaa is A or G or is absent
ASAAPXXVPQALSSLSILFFXXXXXXXXXLKVYPMIVRSXKX

SEQ ID NO: 45344 - protein, 42 aa, Artificial Sequence
  GFR-binding peptide
  MOD_RES (5), (6), (40), (42): Xaa is C or S
  MOD_RES (20), (21), (22), (23), (24): Xaa is A or G
  MOD_RES (25), (26), (27), (28): Xaa is A or G or is absent
SAGPXXTPTKMSSLSMLFFXXXXXXXXXLKVYPGMVVDRXGX

SEQ ID NO: 45345 - protein, 38 aa, Artificial Sequence
  GFR-binding peptide
  MOD_RES (1), (2), (35), (37): Xaa is C or S
  MOD_RES (16), (17), (18), (19), (20): Xaa is A or G
  MOD_RES (21), (22), (23), (24): Xaa is A or G or is absent
XXVPQALSSLSILFFXXXXXXXXXLKVYPMIVRSXKXS

SEQ ID NO: 45346 - protein, 38 aa, Artificial Sequence
  GFR-binding peptide
  MOD_RES (2), (3), (35), (37): Xaa is C or S
AXXVPTKLSSLSILFFDKGVVTYLKVYPGMAVSEXGXR

SEQ ID NO: 45347 - protein, 37 aa, Artificial Sequence
  GFR-binding peptide
  MOD_RES (3), (4): Xaa is C or S
  MOD_RES (18), (19), (20), (21), (22): Xaa is A or G
  MOD_RES (23), (24), (25), (26): Xaa is A or G or is absent
KAXXVPTKLSSLSILFFXXXXXXXXXLKVYPGMAVSE

SEQ ID NO: 45348 - protein, 37 aa, Artificial Sequence
  GFR-binding peptide
  MOD_RES (3), (4): Xaa is C or S
  MOD_RES (18), (19), (20), (21), (22): Xaa is A or G
  MOD_RES (23), (24), (25), (26): Xaa is A or G or is absent
PTXXVPTRLSSLSILFFXXXXXXXXXLKVYPDMVVES

SEQ ID NO: 45349 - protein, 41 aa, Artificial Sequence
  GFR-binding peptide
  MOD_RES (5), (39), (41): Xaa is C or S
  MOD_RES (19), (20), (21), (22), (23): Xaa is A or G
  MOD_RES (24), (25), (26), (27): Xaa is A or G or is absent
EGLEXVPTEESSLSMLFFXXXXXXXXXLKVYPFLQHNKXEX

SEQ ID NO: 45350 - protein, 34 aa, Artificial Sequence
  GFR-binding peptide
  MOD_RES (1), (33): Xaa is C or S
XVPTKLSSLSILFFDKGVVTYLKVYPGMAVSEXG

SEQ ID NO: 45351 - protein, 38 aa, Artificial Sequence
  GFR-binding peptide
  MOD_RES (3), (4), (37): Xaa is C or S
  MOD_RES (18), (19), (20), (21), (22): Xaa is A or G
  MOD_RES (23), (24), (25), (26): Xaa is A or G or is absent
STXXAPVKTSSLSMLFFXXXXXXXXXLKVYPMIVEEXG

SEQ ID NO: 45352 - protein, 39 aa, Artificial Sequence
  GFR-binding peptide
  MOD_RES (6), (6): Xaa is C or S
  MOD_RES (20), (21), (22), (23), (24): Xaa is A or G
  MOD_RES (25), (26), (27), (28): Xaa is A or G or is absent
VTKPTXAPTKLSSLSVLFFXXXXXXXXXLKVYPNMVVRS

SEQ ID NO: 45353 - protein, 34 aa, Artificial Sequence
  GFR-binding peptide
  MOD_RES (1), (32), (34): Xaa is C or S
XVPQDLSSLSILFFVGRTPKVLKVYPMVVKSXKX

SEQ ID NO: 45354 - protein, 42 aa, Artificial Sequence
  GFR-binding peptide
  MOD_RES (6), (7), (42): Xaa is C or S
  MOD_RES (21), (22), (23), (24), (25): Xaa is A or G
  MOD_RES (26), (27), (28), (29): Xaa is A or G or is absent
KVGKAXXVPTKLSSLSVLFFXXXXXXXXXLKVYPEGMSVAEX

SEQ ID NO: 45355 - protein, 32 aa, Artificial Sequence
  GFR-binding peptide
  MOD_RES (1), (1): Xaa is C or S
XVPEKMSSLSILFFDENKNVVLKVYPNMTVES

SEQ ID NO: 45356 - protein, 35 aa, Artificial Sequence
  GFR-binding peptide
  MOD_RES (35), (35): Xaa is C or S
SRVHHSSLSVLFFEYVRKKPKLLKVYPRLEEHLEX

SEQ ID NO: 45357 - protein, 38 aa, Artificial Sequence
  GFR-binding peptide
  MOD_RES (2), (36), (38): Xaa is C or S
  MOD_RES (16), (17), (18), (19), (20): Xaa is A or G
  MOD_RES (21), (22), (23), (24): Xaa is A or G or is absent
EXVPTEESSLSMLFFXXXXXXXXXLKVYPFLQHNKXEX

SEQ ID NO: 45358 - protein, 34 aa, Artificial Sequence
  GFR-binding peptide
QPSRVHHSSLSVLFFEYVRKKPKLLKVYPRLEEH

SEQ ID NO: 45359 - protein, 30 aa, Artificial Sequence
  GFR-binding peptide
APTKLSSLSVLFFDSSNNVILKVYPNMVVK

SEQ ID NO: 45360 - protein, 38 aa, Artificial Sequence
  GFR-binding peptide
  MOD_RES (1), (35), (37): Xaa is C or S
  MOD_RES (15), (16), (17), (18), (19): Xaa is A or G
  MOD_RES (20), (21), (22), (23): Xaa is A or G or is absent
XAPTQLSSLSVLFFXXXXXXXXXLKVYPNMVVRAXGXH

SEQ ID NO: 45361 - protein, 38 aa, Artificial Sequence
  GFR-binding peptide
  MOD_RES (3), (4), (38): Xaa is C or S
  MOD_RES (18), (19), (20), (21), (22): Xaa is A or G
  MOD_RES (23), (24), (25), (26): Xaa is A or G or is absent
KPXXAPTQLSSLSVLFFXXXXXXXXXLKVYPNMVVRAX

SEQ ID NO: 45362 - protein, 35 aa, Artificial Sequence
  GFR-binding peptide
  MOD_RES (34), (34): Xaa is C or S
  MOD_RES (14), (15), (16), (17), (18): Xaa is A or G
  MOD_RES (19), (20), (21), (22): Xaa is A or G or is absent
VPTKLSSLSILFFXXXXXXXXXLKVYPGMAVSEXG

SEQ ID NO: 45363 - protein, 38 aa, Artificial Sequence
  GFR-binding peptide
  MOD_RES (1), (2), (36), (38): Xaa is C or S
  MOD_RES (16), (17), (18), (19), (20): Xaa is A or G
  MOD_RES (21), (22), (23), (24): Xaa is A or G or is absent
XXVPARLSSLSILFFXXXXXXXXXLKVYPDMVVEAXGX

SEQ ID NO: 45364 - protein, 39 aa, Artificial Sequence
  GFR-binding peptide
  MOD_RES (1), (2), (36), (38): Xaa is C or S
  MOD_RES (16), (17), (18), (19), (20): Xaa is A or G
  MOD_RES (21), (22), (23), (24): Xaa is A or G or is absent
XXTPTKMSSLSMLFFXXXXXXXXXLKVYPGMVVDRXGXS

SEQ ID NO: 45365 - protein, 36 aa, Artificial Sequence
  GFR-binding peptide
  MOD_RES (4), (4): Xaa is C or S
  MOD_RES (18), (19), (20), (21), (22): Xaa is A or G
  MOD_RES (23), (24), (25), (26): Xaa is A or G or is absent
KPTXAPTKLSSLSVLFFXXXXXXXXXLKVYPNMVVR

SEQ ID NO: 45366 - protein, 38 aa, Artificial Sequence
  GFR-binding peptide
  MOD_RES (35), (37): Xaa is C or S
SRVHHSSLSVLFFEYVRKKPKLLKVYPRLEEHLEXAXA

SEQ ID NO: 45367 - protein, 39 aa, Artificial Sequence
  GFR-binding peptide
  MOD_RES (1), (2), (36), (38): Xaa is C or S
  MOD_RES (16), (17), (18), (19), (20): Xaa is A or G
  MOD_RES (21), (22), (23), (24): Xaa is A or G or is absent
XXVPARLSSLSILFFXXXXXXXXXLKVYPDMVVEAXGXR

SEQ ID NO: 45368 - protein, 42 aa, Artificial Sequence
  GFR-binding peptide
  MOD_RES (3), (4), (39), (41): Xaa is C or S
  MOD_RES (18), (19), (20), (21), (22): Xaa is A or G
  MOD_RES (23), (24), (25), (26): Xaa is A or G or is absent
KAXXVPTKLSSLSVLFFXXXXXXXXXLKVYPEGMSVAEXGXR

SEQ ID NO: 45369 - protein, 37 aa, Artificial Sequence
  GFR-binding peptide
  MOD_RES (2), (3), (37): Xaa is C or S
  MOD_RES (17), (18), (19), (20), (21): Xaa is A or G
  MOD_RES (22), (23), (24), (25): Xaa is A or G or is absent
AXXVPTELSSLSMLFFXXXXXXXXXLKVYPEMVVEGX

SEQ ID NO: 45370 - protein, 36 aa, Artificial Sequence
  GFR-binding peptide
  MOD_RES (3), (4), (36): Xaa is C or S
KPXXAPTKLSSLSVLFFDDSSNVILKVYPNMVVRSX

SEQ ID NO: 45371 - protein, 40 aa, Artificial Sequence
  GFR-binding peptide
  MOD_RES (3), (4), (38), (40): Xaa is C or S
  MOD_RES (18), (19), (20), (21), (22): Xaa is A or G
  MOD_RES (23), (24), (25), (26): Xaa is A or G or is absent
EPXXVPEKMSSLSILFFXXXXXXXXXLKVYPNMTVESXAX

SEQ ID NO: 45372 - protein, 34 aa, Artificial Sequence
  GFR-binding peptide
  MOD_RES (1), (33): Xaa is C or S
XVPTRLSSLSILFFDSANNVVLKVYPDMVVESXG

SEQ ID NO: 45373 - protein, 38 aa, Artificial Sequence
  GFR-binding peptide
  MOD_RES (4), (5): Xaa is C or S
  MOD_RES (19), (20), (21), (22), (23): Xaa is A or G
  MOD_RES (24), (25), (26), (27): Xaa is A or G or is absent
PKPXXAPTQLSSLSVLFFXXXXXXXXXLKVYPNMVVRA

SEQ ID NO: 45374 - protein, 43 aa, Artificial Sequence
  GFR-binding peptide
  MOD_RES (6), (7), (40), (42): Xaa is C or S
  MOD_RES (21), (22), (23), (24), (25): Xaa is A or G
  MOD_RES (26), (27), (28), (29): Xaa is A or G or is absent
ASASPXXVSQDLSSLSILFFXXXXXXXXXLKVYPMIVKSXKXS

SEQ ID NO: 45375 - protein, 35 aa, Artificial Sequence
  GFR-binding peptide
  MOD_RES (3), (35): Xaa is C or S
PTXAPTKLSSLSVLFFDDSSNVILKVYPNMVVRSX

SEQ ID NO: 45376 - protein, 37 aa, Artificial Sequence
  GFR-binding peptide
  MOD_RES (34), (36): Xaa is C or S
  MOD_RES (14), (15), (16), (17), (18): Xaa is A or G
  MOD_RES (19), (20), (21), (22): Xaa is A or G or is absent
VPTRLSSLSILFFXXXXXXXXXLKVYPDMVVESXGXR

SEQ ID NO: 45377 - protein, 36 aa, Artificial Sequence
  GFR-binding peptide
  MOD_RES (3), (4): Xaa is C or S
  MOD_RES (18), (19), (20), (21), (22): Xaa is A or G
  MOD_RES (23), (24), (25), (26): Xaa is A or G or is absent
KAXXVPTELSSLSMLFFXXXXXXXXXLKVYPEMVVE

SEQ ID NO: 45378 - protein, 35 aa, Artificial Sequence
  GFR-binding peptide
  MOD_RES (3), (4), (35): Xaa is C or S
SPXXVPQDLSSLSILFFVGRTPKVLKVYPMVVKSX

SEQ ID NO: 45379 - protein, 39 aa, Artificial Sequence
  GFR-binding peptide
  MOD_RES (6), (7): Xaa is C or S
  MOD_RES (21), (22), (23), (24), (25): Xaa is A or G
  MOD_RES (26), (27), (28), (29): Xaa is A or G or is absent
TVPKPXXAPTQLSSLSVLFFXXXXXXXXXLKVYPNMVVR

SEQ ID NO: 45380 - protein, 35 aa, Artificial Sequence
  GFR-binding peptide
  MOD_RES (1), (33), (35): Xaa is C or S
XAPTKLSSLSVLFFDDSSNVILKVYPNMVVRSXGX

SEQ ID NO: 45381 - protein, 34 aa, Artificial Sequence
  GFR-binding peptide
  MOD_RES (1), (33): Xaa is C or S
XVPARLSSLSILFFDAANNVVLKVYPDMVVEAXG

SEQ ID NO: 45382 - protein, 35 aa, Artificial Sequence
  GFR-binding peptide
  MOD_RES (3), (4): Xaa is C or S
KPXXAPTQLSSLSVLFFDDSSNVILKVYPNMVVRA

SEQ ID NO: 45383 - protein, 38 aa, Artificial Sequence
  GFR-binding peptide
  MOD_RES (3), (4): Xaa is C or S
  MOD_RES (18), (19), (20), (21), (22): Xaa is A or G
  MOD_RES (23), (24), (25), (26): Xaa is A or G or is absent
KAXXVPTKLSSLSVLFFXXXXXXXXXLKVYPEGMSVAE

SEQ ID NO: 45384 - protein, 34 aa, Artificial Sequence
  GFR-binding peptide
PSRVHHSSLSVLFFEYVRKKPKLLKVYPRLEEHL

SEQ ID NO: 45385 - protein, 33 aa, Artificial Sequence
  GFR-binding peptide
  MOD_RES (1), (2), (33): Xaa is C or S
XXVSQDLSSLSILFFIGKTPKILKVYPMIVKSX

SEQ ID NO: 45386 - protein, 35 aa, Artificial Sequence
  GFR-binding peptide
  MOD_RES (1), (2), (35): Xaa is C or S
  MOD_RES (16), (17), (18), (19), (20): Xaa is A or G
  MOD_RES (21), (22), (23), (24): Xaa is A or G or is absent
XXVSQDLSSLSILFFXXXXXXXXXLKVYPMIVKSX

SEQ ID NO: 45387 - protein, 40 aa, Artificial Sequence
  GFR-binding peptide
  MOD_RES (3), (4), (39): Xaa is C or S
  MOD_RES (18), (19), (20), (21), (22): Xaa is A or G
  MOD_RES (23), (24), (25), (26): Xaa is A or G or is absent
KAXXVPTKLSSLSVLFFXXXXXXXXXLKVYPEGMSVAEXG

SEQ ID NO: 45388 - protein, 37 aa, Artificial Sequence
  GFR-binding peptide
  MOD_RES (4), (5): Xaa is C or S
  MOD_RES (19), (20), (21), (22), (23): Xaa is A or G
  MOD_RES (24), (25), (26), (27): Xaa is A or G or is absent
AGPXXTPTKMSSLSMLFFXXXXXXXXXLKVYPGMVVD

SEQ ID NO: 45389 - protein, 35 aa, Artificial Sequence
  GFR-binding peptide
  MOD_RES (2), (3), (34): Xaa is C or S
PXXVSQDLSSLSILFFIGKTPKILKVYPMIVKSXK

SEQ ID NO: 45390 - protein, 38 aa, Artificial Sequence
  GFR-binding peptide
  MOD_RES (2), (3), (37): Xaa is C or S
  MOD_RES (17), (18), (19), (20), (21): Xaa is A or G
  MOD_RES (22), (23), (24), (25): Xaa is A or G or is absent
PXXAPTQLSSLSVLFFXXXXXXXXXLKVYPNMVVRAXG

SEQ ID NO: 45391 - protein, 37 aa, Artificial Sequence
  GFR-binding peptide
  MOD_RES (3), (4): Xaa is C or S
  MOD_RES (18), (19), (20), (21), (22): Xaa is A or G
  MOD_RES (23), (24), (25), (26): Xaa is A or G or is absent
ASXXVPARLSSLSILFFXXXXXXXXXLKVYPDMVVEA

SEQ ID NO: 45392 - protein, 43 aa, Artificial Sequence
  GFR-binding peptide
  MOD_RES (6), (7), (41), (43): Xaa is C or S
  MOD_RES (21), (22), (23), (24), (25): Xaa is A or G
  MOD_RES (26), (27), (28), (29): Xaa is A or G or is absent
STPPTXXVPTRLSSLSILFFXXXXXXXXXLKVYPDMVVESXGX

SEQ ID NO: 45393 - protein, 40 aa, Artificial Sequence
  GFR-binding peptide
  MOD_RES (5), (5): Xaa is C or S
  MOD_RES (21), (22), (23), (24), (25): Xaa is A or G
  MOD_RES (26), (27), (28), (29): Xaa is A or G or is absent
SSVKXQPSRVHHSSLSVLFFXXXXXXXXXLKVYPRLEEHL

SEQ ID NO: 45394 - protein, 39 aa, Artificial Sequence
  GFR-binding peptide
  MOD_RES (4), (5), (38): Xaa is C or S
  MOD_RES (19), (20), (21), (22), (23): Xaa is A or G
  MOD_RES (24), (25), (26), (27): Xaa is A or G or is absent
ASPXXVPQDLSSLSILFFXXXXXXXXXLKVYPMVVKSXK

SEQ ID NO: 45395 - protein, 33 aa, Artificial Sequence
  GFR-binding peptide
  MOD_RES (1), (1): Xaa is C or S
  MOD_RES (15), (16), (17), (18), (19): Xaa is A or G
  MOD_RES (20), (21), (22), (23): Xaa is A or G or is absent
XVPEKMSSLSILFFXXXXXXXXXLKVYPNMTVE

SEQ ID NO: 45396 - protein, 38 aa, Artificial Sequence
  GFR-binding peptide
  MOD_RES (4), (36), (38): Xaa is C or S
KPTXAPTKLSSLSVLFFDDSSNVILKVYPNMVVRSXGX

SEQ ID NO: 45397 - protein, 44 aa, Artificial Sequence
  GFR-binding peptide
  MOD_RES (6), (7), (41), (43): Xaa is C or S
  MOD_RES (21), (22), (23), (24), (25): Xaa is A or G
  MOD_RES (26), (27), (28), (29): Xaa is A or G or is absent
GSAGPXXTPTKMSSLSMLFFXXXXXXXXXLKVYPGMVVDRXGXS

SEQ ID NO: 45398 - protein, 37 aa, Artificial Sequence
  GFR-binding peptide
  MOD_RES (1), (35), (37): Xaa is C or S
  MOD_RES (15), (16), (17), (18), (19): Xaa is A or G
  MOD_RES (20), (21), (22), (23): Xaa is A or G or is absent
XVPTEESSLSMLFFXXXXXXXXXLKVYPFLQHNKXEX

SEQ ID NO: 45399 - protein, 38 aa, Artificial Sequence
  GFR-binding peptide
  MOD_RES (3), (37): Xaa is C or S
  MOD_RES (17), (18), (19), (20), (21): Xaa is A or G
  MOD_RES (22), (23), (24), (25): Xaa is A or G or is absent
LEXVPTEESSLSMLFFXXXXXXXXXLKVYPFLQHNKXE

SEQ ID NO: 45400 - protein, 39 aa, Artificial Sequence
  GFR-binding peptide
  MOD_RES (2), (3), (37), (39): Xaa is C or S
  MOD_RES (17), (18), (19), (20), (21): Xaa is A or G
  MOD_RES (22), (23), (24), (25): Xaa is A or G or is absent
PXXVPEKMSSLSILFFXXXXXXXXXLKVYPNMTVESXAX

SEQ ID NO: 45401 - protein, 37 aa, Artificial Sequence
  GFR-binding peptide
  MOD_RES (4), (5), (36): Xaa is C or S
ASPXXVPQDLSSLSILFFVGRTPKVLKVYPMVVKSXK

SEQ ID NO: 45402 - protein, 35 aa, Artificial Sequence
  GFR-binding peptide
  MOD_RES (3), (4): Xaa is C or S
KAXXVPTKLSSLSILFFDKGVVTYLKVYPGMAVSE

SEQ ID NO: 45403 - protein, 40 aa, Artificial Sequence
  GFR-binding peptide
  MOD_RES (3), (4), (38), (40): Xaa is C or S
  MOD_RES (18), (19), (20), (21), (22): Xaa is A or G
  MOD_RES (23), (24), (25), (26): Xaa is A or G or is absent
GPXXTPTKMSSLSMLFFXXXXXXXXXLKVYPGMVVDRXGX

SEQ ID NO: 45404 - protein, 40 aa, Artificial Sequence
  GFR-binding peptide
  MOD_RES (3), (37), (39): Xaa is C or S
  MOD_RES (17), (18), (19), (20), (21): Xaa is A or G
  MOD_RES (22), (23), (24), (25): Xaa is A or G or is absent
LEXVPTEESSLSMLFFXXXXXXXXXLKVYPFLQHNKXEXR

SEQ ID NO: 45405 - protein, 32 aa, Artificial Sequence
  GFR-binding peptide
  MOD_RES (1), (1): Xaa is C or S
XVPTKLSSLSILFFDKGVVTYLKVYPGMAVSE

SEQ ID NO: 45406 - protein, 43 aa, Artificial Sequence
  GFR-binding peptide
  MOD_RES (6), (7), (41), (43): Xaa is C or S
  MOD_RES (21), (22), (23), (24), (25): Xaa is A or G
  MOD_RES (26), (27), (28), (29): Xaa is A or G or is absent
KASKAXXVPTKLSSLSILFFXXXXXXXXXLKVYPGMAVSEXGX

SEQ ID NO: 45407 - protein, 39 aa, Artificial Sequence
  GFR-binding peptide
  MOD_RES (4), (5), (39): Xaa is C or S
  MOD_RES (19), (20), (21), (22), (23): Xaa is A or G
  MOD_RES (24), (25), (26), (27): Xaa is A or G or is absent
PPTXXVPTRLSSLSILFFXXXXXXXXXLKVYPDMVVESX

SEQ ID NO: 45408 - protein, 41 aa, Artificial Sequence; identical to SEQ ID NO: 153
  GFR-binding peptide
  MOD_RES (6), (7), (38), (40): Xaa is C or S

SEQ ID NO: 45409 - protein, 44 aa, Artificial Sequence
  GFR-binding peptide
  MOD_RES (6), (7), (41), (43): Xaa is C or S
  MOD_RES (21), (22), (23), (24), (25): Xaa is A or G
  MOD_RES (26), (27), (28), (29): Xaa is A or G or is absent
AVPKAXXAPTKLSSLSVLFFXXXXXXXXXLKVYPNMVVKAXGXH

SEQ ID NO: 45410 - protein, 39 aa, Artificial Sequence
  GFR-binding peptide
  MOD_RES (4), (5), (39): Xaa is C or S
  MOD_RES (19), (20), (21), (22), (23): Xaa is A or G
  MOD_RES (24), (25), (26), (27): Xaa is A or G or is absent
PKPXXAPTKLSSLSVLFFXXXXXXXXXLKVYPNMVVRSX

SEQ ID NO: 45411 - protein, 34 aa, Artificial Sequence
  GFR-binding peptide
  MOD_RES (34), (34): Xaa is C or S
  MOD_RES (14), (15), (16), (17), (18): Xaa is A or G
  MOD_RES (19), (20), (21), (22): Xaa is A or G or is absent
VPTRLSSLSILFFXXXXXXXXXLKVYPDMVVESX

SEQ ID NO: 45412 - protein, 36 aa, Artificial Sequence
  GFR-binding peptide
  MOD_RES (3), (4), (35): Xaa is C or S
STXXAPVKTSSLSMLFFDNGRVLLLKVYPMIVEEXG

SEQ ID NO: 45413 - protein, 39 aa, Artificial Sequence
  GFR-binding peptide
  MOD_RES (5), (39): Xaa is C or S
  MOD_RES (19), (20), (21), (22), (23): Xaa is A or G
  MOD_RES (24), (25), (26), (27): Xaa is A or G or is absent
EGLEXVPTEESSLSMLFFXXXXXXXXXLKVYPFLQHNKX

SEQ ID NO: 45414 - protein, 40 aa, Artificial Sequence
  GFR-binding peptide
  MOD_RES (3), (40): Xaa is C or S
VKXQPSRVHHSSLSVLFFEYVRKKPKLLKVYPRLEEHLEX

SEQ ID NO: 45415 - protein, 42 aa, Artificial Sequence; identical to SEQ ID NO: 145
  GFR-binding peptide
  MOD_RES (6), (7), (39), (41): Xaa is C or S

SEQ ID NO: 45416 - protein, 35 aa, Artificial Sequence
  GFR-binding peptide
  MOD_RES (1), (2), (33), (35): Xaa is C or S
XXAPVKTSSLSMLFFDNGRVLLLKVYPMIVEEXGX

SEQ ID NO: 45417 - protein, 40 aa, Artificial Sequence
  GFR-binding peptide
  MOD_RES (4), (38), (40): Xaa is C or S
  MOD_RES (18), (19), (20), (21), (22): Xaa is A or G
  MOD_RES (23), (24), (25), (26): Xaa is A or G or is absent
KPTXAPTKLSSLSVLFFXXXXXXXXXLKVYPNMVVRSXGX

SEQ ID NO: 45418 - protein, 37 aa, Artificial Sequence
  GFR-binding peptide
  MOD_RES (2), (3), (35), (37): Xaa is C or S
PXXVPEKMSSLSILFFDENKNVVLKVYPNMTVESXAX

SEQ ID NO: 45419 - protein, 38 aa, Artificial Sequence
  GFR-binding peptide
  MOD_RES (2), (2): Xaa is C or S
  MOD_RES (18), (19), (20), (21), (22): Xaa is A or G
  MOD_RES (23), (24), (25), (26): Xaa is A or G or is absent
KXQPSRVHHSSLSVLFFXXXXXXXXXLKVYPRLEEHLE

SEQ ID NO: 45420 - protein, 37 aa, Artificial Sequence
  GFR-binding peptide
  MOD_RES (1), (2), (35), (37): Xaa is C or S
XXVPTKLSSLSVLFFDDMGVPTLKVYPEGMSVAEXGX

SEQ ID NO: 45421 - protein, 37 aa, Artificial Sequence
  GFR-binding peptide
  MOD_RES (1), (2), (35), (37): Xaa is C or S
  MOD_RES (16), (17), (18), (19), (20): Xaa is A or G
  MOD_RES (21), (22), (23), (24): Xaa is A or G or is absent
XXVPQDLSSLSILFFXXXXXXXXXLKVYPMVVKSXKX

SEQ ID NO: 45422 - protein, 39 aa, Artificial Sequence
  GFR-binding peptide
  MOD_RES (2), (3), (37), (39): Xaa is C or S
  MOD_RES (17), (18), (19), (20), (21): Xaa is A or G
  MOD_RES (22), (23), (24), (25): Xaa is A or G or is absent
SXXVPARLSSLSILFFXXXXXXXXXLKVYPDMVVEAXGX

SEQ ID NO: 45423 - protein, 40 aa, Artificial Sequence
  GFR-binding peptide
  MOD_RES (6), (7), (40): Xaa is C or S
  MOD_RES (21), (22), (23), (24), (25): Xaa is A or G
  MOD_RES (26), (27), (28), (29): Xaa is A or G or is absent
RVPSTXXAPVKTSSLSMLFFXXXXXXXXXLKVYPMIVEEX

SEQ ID NO: 45424 - protein, 34 aa, Artificial Sequence
  GFR-binding peptide
  MOD_RES (1), (34): Xaa is C or S
  MOD_RES (15), (16), (17), (18), (19): Xaa is A or G
  MOD_RES (20), (21), (22), (23): Xaa is A or G or is absent
XVPQDLSSLSILFFXXXXXXXXXLKVYPMVVKSX

SEQ ID NO: 45425 - protein, 39 aa, Artificial Sequence
  GFR-binding peptide
  MOD_RES (3), (4), (37), (39): Xaa is C or S
  MOD_RES (18), (19), (20), (21), (22): Xaa is A or G
  MOD_RES (23), (24), (25), (26): Xaa is A or G or is absent
STXXAPVKTSSLSMLFFXXXXXXXXXLKVYPMIVEEXGX

SEQ ID NO: 45426 - protein, 37 aa, Artificial Sequence
  GFR-binding peptide
  MOD_RES (1), (34), (36): Xaa is C or S
XVPTKLSSLSVLFFDDMGVPTLKVYPEGMSVAEXGXR

SEQ ID NO: 45427 - protein, 35 aa, Artificial Sequence
  GFR-binding peptide
  MOD_RES (2), (3), (35): Xaa is C or S
PXXAPTQLSSLSVLFFDDSSNVILKVYPNMVVRAX

SEQ ID NO: 45428 - protein, 43 aa, Artificial Sequence
  GFR-binding peptide
  MOD_RES (5), (6), (40), (42): Xaa is C or S
  MOD_RES (20), (21), (22), (23), (24): Xaa is A or G
  MOD_RES (25), (26), (27), (28): Xaa is A or G or is absent
VPKPXXAPTQLSSLSVLFFXXXXXXXXXLKVYPNMVVRAXGXH

SEQ ID NO: 45429 - protein, 39 aa, Artificial Sequence
  GFR-binding peptide
  MOD_RES (5), (39): Xaa is C or S
EGLEXVPTEESSLSMLFFRIKPHQGQHLKVYPFLQHNKX

SEQ ID NO: 45430 - protein, 35 aa, Artificial Sequence
  GFR-binding peptide
  MOD_RES (3), (4): Xaa is C or S
ASXXVPARLSSLSILFFDAANNVVLKVYPDMVVEA

SEQ ID NO: 45431 - protein, 34 aa, Artificial Sequence
  GFR-binding peptide
  MOD_RES (1), (33): Xaa is C or S
XTPTKMSSLSMLFFNDKQQIILKVYPGMVVDRXG

SEQ ID NO: 45432 - protein, 39 aa, Artificial Sequence
  GFR-binding peptide
  MOD_RES (3), (3): Xaa is C or S
VKXQPSRVHHSSLSVLFFEYVRKKPKLLKVYPRLEEHLE

SEQ ID NO: 45433 - protein, 34 aa, Artificial Sequence
  GFR-binding peptide
  MOD_RES (1), (2): Xaa is C or S
  MOD_RES (16), (17), (18), (19), (20): Xaa is A or G
  MOD_RES (21), (22), (23), (24): Xaa is A or G or is absent
XXVPARLSSLSILFFXXXXXXXXXLKVYPDMVVE

SEQ ID NO: 45434 - protein, 35 aa, Artificial Sequence
  GFR-binding peptide
  MOD_RES (1), (1): Xaa is C or S
  MOD_RES (17), (18), (19), (20), (21): Xaa is A or G
  MOD_RES (22), (23), (24), (25): Xaa is A or G or is absent
XQPSRVHHSSLSVLFFXXXXXXXXXLKVYPRLEEH

SEQ ID NO: 45435 - protein, 33 aa, Artificial Sequence
  GFR-binding peptide
  MOD_RES (14), (15), (16), (17), (18): Xaa is A or G
  MOD_RES (19), (20), (21), (22): Xaa is A or G or is absent
APTQLSSLSVLFFXXXXXXXXXLKVYPNMVVRA

SEQ ID NO: 45436 - protein, 39 aa, Artificial Sequence
  GFR-binding peptide
  MOD_RES (1), (2), (36), (38): Xaa is C or S
  MOD_RES (16), (17), (18), (19), (20): Xaa is A or G
  MOD_RES (21), (22), (23), (24): Xaa is A or G or is absent
XXAPTKLSSLSVLFFXXXXXXXXXLKVYPNMVVRSXGXH

SEQ ID NO: 45437 - protein, 32 aa, Artificial Sequence
  GFR-binding peptide
  MOD_RES (14), (15), (16), (17), (18): Xaa is A or G
  MOD_RES (19), (20), (21), (22): Xaa is A or G or is absent
SRVHHSSLSVLFFXXXXXXXXXLKVYPRLEEH

SEQ ID NO: 45438 - protein, 32 aa, Artificial Sequence
  GFR-binding peptide
  MOD_RES (1), (1): Xaa is C or S
XAPTKLSSLSVLFFDDSSNVILKVYPNMVVRS

SEQ ID NO: 45439 - protein, 40 aa, Artificial Sequence
  GFR-binding peptide
  MOD_RES (4), (5), (39): Xaa is C or S
  MOD_RES (19), (20), (21), (22), (23): Xaa is A or G
  MOD_RES (24), (25), (26), (27): Xaa is A or G or is absent
SKAXXVPTKLSSLSILFFXXXXXXXXXLKVYPGMAVSEXG

SEQ ID NO: 45440 - protein, 37 aa, Artificial Sequence
  GFR-binding peptide
  MOD_RES (2), (3), (37): Xaa is C or S
  MOD_RES (17), (18), (19), (20), (21): Xaa is A or G
  MOD_RES (22), (23), (24), (25): Xaa is A or G or is absent
AXXVPTKLSSLSILFFXXXXXXXXXLKVYPGMAVSEX

SEQ ID NO: 45441 - protein, 40 aa, Artificial Sequence
  GFR-binding peptide
  MOD_RES (6), (7): Xaa is C or S
  MOD_RES (21), (22), (23), (24), (25): Xaa is A or G
  MOD_RES (26), (27), (28), (29): Xaa is A or G or is absent
YVPKPXXAPTKLSSLSVLFFXXXXXXXXXLKVYPNMVVRS

SEQ ID NO: 45442 - protein, 40 aa, Artificial Sequence
  GFR-binding peptide
  MOD_RES (6), (7): Xaa is C or S
  MOD_RES (21), (22), (23), (24), (25): Xaa is A or G
  MOD_RES (26), (27), (28), (29): Xaa is A or G or is absent
AVPKAXXAPTKLSSLSVLFFXXXXXXXXXLKVYPNMVVKA

SEQ ID NO: 45443 - protein, 40 aa, Artificial Sequence
  GFR-binding peptide
  MOD_RES (6), (7), (38), (40): Xaa is C or S
ASASPXXVSQDLSSLSILFFIGKTPKILKVYPMIVKSXKX

SEQ ID NO: 45444 - protein, 42 aa, Artificial Sequence
  GFR-binding peptide
  MOD_RES (6), (7), (40), (42): Xaa is C or S
KVGKAXXVPTKLSSLSVLFFDDMGVPTLKVYPEGMSVAEXGX

SEQ ID NO: 45445 - protein, 37 aa, Artificial Sequence
  GFR-binding peptide
  MOD_RES (1), (35), (37): Xaa is C or S
  MOD_RES (15), (16), (17), (18), (19): Xaa is A or G
  MOD_RES (20), (21), (22), (23): Xaa is A or G or is absent
XVPARLSSLSILFFXXXXXXXXXLKVYPDMVVEAXGX

SEQ ID NO: 45446 - protein, 36 aa, Artificial Sequence
  GFR-binding peptide
  MOD_RES (1), (35): Xaa is C or S
  MOD_RES (15), (16), (17), (18), (19): Xaa is A or G
  MOD_RES (20), (21), (22), (23): Xaa is A or G or is absent
XVPTEESSLSMLFFXXXXXXXXXLKVYPFLQHNKXE

SEQ ID NO: 45447 - protein, 35 aa, Artificial Sequence
  GFR-binding peptide
  MOD_RES (2), (3): Xaa is C or S
  MOD_RES (17), (18), (19), (20), (21): Xaa is A or G
  MOD_RES (22), (23), (24), (25): Xaa is A or G or is absent
SXXVPARLSSLSILFFXXXXXXXXXLKVYPDMVVE

SEQ ID NO: 45448 - protein, 38 aa, Artificial Sequence
  GFR-binding peptide
  MOD_RES (4), (5): Xaa is C or S
  MOD_RES (19), (20), (21), (22), (23): Xaa is A or G
  MOD_RES (24), (25), (26), (27): Xaa is A or G or is absent
PASXXVPARLSSLSILFFXXXXXXXXXLKVYPDMVVEA

SEQ ID NO: 45449 - protein, 42 aa, Artificial Sequence; identical to SEQ ID NO: 147
  GFR-binding peptide
  MOD_RES (6), (7), (39), (41): Xaa is C or S

SEQ ID NO: 45450 - protein, 40 aa, Artificial Sequence
  GFR-binding peptide
  MOD_RES (4), (5), (39): Xaa is C or S
  MOD_RES (19), (20), (21), (22), (23): Xaa is A or G
  MOD_RES (24), (25), (26), (27): Xaa is A or G or is absent
PKPXXAPTKLSSLSVLFFXXXXXXXXXLKVYPNMVVRSXG

SEQ ID NO: 45451 - protein, 37 aa, Artificial Sequence
  GFR-binding peptide
  MOD_RES (4), (5): Xaa is C or S
  MOD_RES (19), (20), (21), (22), (23): Xaa is A or G
  MOD_RES (24), (25), (26), (27): Xaa is A or G or is absent
ASPXXVPQDLSSLSILFFXXXXXXXXXLKVYPMVVKS

SEQ ID NO: 45452 - protein, 39 aa, Artificial Sequence
  GFR-binding peptide
  MOD_RES (4), (5), (38): Xaa is C or S
  MOD_RES (19), (20), (21), (22), (23): Xaa is A or G
  MOD_RES (24), (25), (26), (27): Xaa is A or G or is absent
AAPXXVPQALSSLSILFFXXXXXXXXXLKVYPMIVRSXK

SEQ ID NO: 45453 - protein, 33 aa, Artificial Sequence
  GFR-binding peptide
  MOD_RES (32), (32): Xaa is C or S
APTKLSSLSVLFFDSSNNVILKVYPNMVVKAXG

SEQ ID NO: 45454 - protein, 40 aa, Artificial Sequence
  GFR-binding peptide
  MOD_RES (6), (7), (40): Xaa is C or S
  MOD_RES (21), (22), (23), (24), (25): Xaa is A or G
  MOD_RES (26), (27), (28), (29): Xaa is A or G or is absent
ASASPXXVSQDLSSLSILFFXXXXXXXXXLKVYPMIVKSX

SEQ ID NO: 45455 - protein, 41 aa, Artificial Sequence
  GFR-binding peptide
  MOD_RES (3), (40): Xaa is C or S
VKXQPSRVHHSSLSVLFFEYVRKKPKLLKVYPRLEEHLEXA

SEQ ID NO: 45456 - protein, 37 aa, Artificial Sequence
  GFR-binding peptide
  MOD_RES (2), (3), (35), (37): Xaa is C or S
SXXVPARLSSLSILFFDAANNVVLKVYPDMVVEAXGX

SEQ ID NO: 45457 - protein, 38 aa, Artificial Sequence
  GFR-binding peptide
  MOD_RES (3), (4), (36), (38): Xaa is C or S
EPXXVPEKMSSLSILFFDENKNVVLKVYPNMTVESXAX

SEQ ID NO: 45458 - protein, 37 aa, Artificial Sequence
  GFR-binding peptide
  MOD_RES (1), (2), (36): Xaa is C or S
  MOD_RES (16), (17), (18), (19), (20): Xaa is A or G
  MOD_RES (21), (22), (23), (24): Xaa is A or G or is absent
XXAPTKLSSLSVLFFXXXXXXXXXLKVYPNMVVRSXG

SEQ ID NO: 45459 - protein, 36 aa, Artificial Sequence
  GFR-binding peptide
  MOD_RES (2), (3): Xaa is C or S
  MOD_RES (17), (18), (19), (20), (21): Xaa is A or G
  MOD_RES (22), (23), (24), (25): Xaa is A or G or is absent
AXXVPTKLSSLSILFFXXXXXXXXXLKVYPGMAVSE

SEQ ID NO: 45460 - protein, 40 aa, Artificial Sequence
  GFR-binding peptide
  MOD_RES (6), (7), (39): Xaa is C or S
YVPKPXXAPTKLSSLSVLFFDDSSNVILKVYPNMVVRSXG

SEQ ID NO: 45461 - protein, 38 aa, Artificial Sequence
  GFR-binding peptide
  MOD_RES (1), (2), (36), (38): Xaa is C or S
  MOD_RES (16), (17), (18), (19), (20): Xaa is A or G
  MOD_RES (21), (22), (23), (24): Xaa is A or G or is absent
XXVPEKMSSLSILFFXXXXXXXXXLKVYPNMTVESXAX

SEQ ID NO: 45462 - protein, 42 aa, Artificial Sequence
  GFR-binding peptide
  MOD_RES (6), (7), (41): Xaa is C or S
  MOD_RES (21), (22), (23), (24), (25): Xaa is A or G
  MOD_RES (26), (27), (28), (29): Xaa is A or G or is absent
SIPKAXXVPTELSSLSMLFFXXXXXXXXXLKVYPEMVVEGXG

SEQ ID NO: 45463 - protein, 35 aa, Artificial Sequence
  GFR-binding peptide
  MOD_RES (1), (2): Xaa is C or S
  MOD_RES (16), (17), (18), (19), (20): Xaa is A or G
  MOD_RES (21), (22), (23), (24): Xaa is A or G or is absent
XXAPTQLSSLSVLFFXXXXXXXXXLKVYPNMVVRA

SEQ ID NO: 45464 - protein, 35 aa, Artificial Sequence
  GFR-binding peptide
  MOD_RES (1), (33), (35): Xaa is C or S
XAPTQLSSLSVLFFDDSSNVILKVYPNMVVRAXGX

SEQ ID NO: 45465 - protein, 39 aa, Artificial Sequence
  GFR-binding peptide
  MOD_RES (5), (6): Xaa is C or S
  MOD_RES (20), (21), (22), (23), (24): Xaa is A or G
  MOD_RES (25), (26), (27), (28): Xaa is A or G or is absent
VPKPXXAPTQLSSLSVLFFXXXXXXXXXLKVYPNMVVRA

SEQ ID NO: 45466 - protein, 36 aa, Artificial Sequence
  GFR-binding peptide
  MOD_RES (34), (36): Xaa is C or S
  MOD_RES (14), (15), (16), (17), (18): Xaa is A or G
  MOD_RES (19), (20), (21), (22): Xaa is A or G or is absent
APTKLSSLSVLFFXXXXXXXXXLKVYPNMVVKAXGX

SEQ ID NO: 45467 - protein, 37 aa, Artificial Sequence
  GFR-binding peptide
  MOD_RES (2), (3), (35), (37): Xaa is C or S
PXXAPTQLSSLSVLFFDDSSNVILKVYPNMVVRAXGX

SEQ ID NO: 45468 - protein, 43 aa, Artificial Sequence
  GFR-binding peptide
  MOD_RES (3), (40), (42): Xaa is C or S
VKXQPSRVHHSSLSVLFFEYVRKKPKLLKVYPRLEEHLEXAXA

SEQ ID NO: 45469 - protein, 38 aa, Artificial Sequence
  GFR-binding peptide
  MOD_RES (36), (38): Xaa is C or S
PSRVHHSSLSVLFFEYVRKKPKLLKVYPRLEEHLEXAX

SEQ ID NO: 45470 - protein, 35 aa, Artificial Sequence
  GFR-binding peptide
  MOD_RES (2), (3): Xaa is C or S
  MOD_RES (17), (18), (19), (20), (21): Xaa is A or G
  MOD_RES (22), (23), (24), (25): Xaa is A or G or is absent
PXXTPTKMSSLSMLFFXXXXXXXXXLKVYPGMVVD

SEQ ID NO: 45471 - protein, 32 aa, Artificial Sequence
  GFR-binding peptide
  MOD_RES (14), (15), (16), (17), (18): Xaa is A or G
  MOD_RES (19), (20), (21), (22): Xaa is A or G or is absent
VSQDLSSLSILFFXXXXXXXXXLKVYPMIVKS

SEQ ID NO: 45472 - protein, 41 aa, Artificial Sequence
  GFR-binding peptide
  MOD_RES (5), (6), (39), (41): Xaa is C or S
  MOD_RES (20), (21), (22), (23), (24): Xaa is A or G
  MOD_RES (25), (26), (27), (28): Xaa is A or G or is absent
SAAPXXVPQALSSLSILFFXXXXXXXXXLKVYPMIVRSXKX

SEQ ID NO: 45473 - protein, 35 aa, Artificial Sequence
  GFR-binding peptide
  MOD_RES (2), (3): Xaa is C or S
  MOD_RES (17), (18), (19), (20), (21): Xaa is A or G
  MOD_RES (22), (23), (24), (25): Xaa is A or G or is absent
AXXVPTKLSSLSILFFXXXXXXXXXLKVYPGMAVS

SEQ ID NO: 45474 - protein, 37 aa, Artificial Sequence
  GFR-binding peptide
  MOD_RES (1), (1): Xaa is C or S
XQPSRVHHSSLSVLFFEYVRKKPKLLKVYPRLEEHLE

SEQ ID NO: 45475 - protein, 39 aa, Artificial Sequence
  GFR-binding peptide
  MOD_RES (4), (5), (37), (39): Xaa is C or S
PEPXXVPEKMSSLSILFFDENKNVVLKVYPNMTVESXAX

SEQ ID NO: 45476 - protein, 33 aa, Artificial Sequence
  GFR-binding peptide
  MOD_RES (1), (1): Xaa is C or S
  MOD_RES (15), (16), (17), (18), (19): Xaa is A or G
  MOD_RES (20), (21), (22), (23): Xaa is A or G or is absent
XVPQALSSLSILFFXXXXXXXXXLKVYPMIVRS

SEQ ID NO: 45477 - protein, 38 aa, Artificial Sequence
  GFR-binding peptide
  MOD_RES (2), (3), (37): Xaa is C or S
  MOD_RES (17), (18), (19), (20), (21): Xaa is A or G
  MOD_RES (22), (23), (24), (25): Xaa is A or G or is absent
AXXVPTELSSLSMLFFXXXXXXXXXLKVYPEMVVEGXG

SEQ ID NO: 45478 - protein, 37 aa, Artificial Sequence
  GFR-binding peptide
  MOD_RES (2), (36): Xaa is C or S
  MOD_RES (16), (17), (18), (19), (20): Xaa is A or G
  MOD_RES (21), (22), (23), (24): Xaa is A or G or is absent
EXVPTEESSLSMLFFXXXXXXXXXLKVYPFLQHNKXE

SEQ ID NO: 45479 - protein, 42 aa, Artificial Sequence
  GFR-binding peptide
  MOD_RES (6), (7), (39), (41): Xaa is C or S
AVPKAXXAPTKLSSLSVLFFDSSNNVILKVYPNMVVKAXGXH

SEQ ID NO: 45480 - protein, 36 aa, Artificial Sequence
  GFR-binding peptide
  MOD_RES (1), (34), (36): Xaa is C or S
  MOD_RES (15), (16), (17), (18), (19): Xaa is A or G
  MOD_RES (20), (21), (22), (23): Xaa is A or G or is absent
XAPVKTSSLSMLFFXXXXXXXXXLKVYPMIVEEXGX

SEQ ID NO: 45481 - protein, 34 aa, Artificial Sequence
  GFR-binding peptide
  MOD_RES (3), (4): Xaa is C or S
KPXXAPTKLSSLSVLFFDDSSNVILKVYPNMVVR

SEQ ID NO: 45482 - protein, 34 aa, Artificial Sequence
  GFR-binding peptide
  MOD_RES (31), (33): Xaa is C or S
APVKTSSLSMLFFDNGRVLLLKVYPMIVEEXGXL

SEQ ID NO: 45483 - protein, 32 aa, Artificial Sequence
  GFR-binding peptide
  MOD_RES (1), (32): Xaa is C or S
XAPVKTSSLSMLFFDNGRVLLLKVYPMIVEEX

SEQ ID NO: 45484 - protein, 35 aa, Artificial Sequence
  GFR-binding peptide
  MOD_RES (1), (2), (33), (35): Xaa is C or S
XXVSQDLSSLSILFFIGKTPKILKVYPMIVKSXKX

SEQ ID NO: 45485 - protein, 40 aa, Artificial Sequence
  GFR-binding peptide
  MOD_RES (1), (38), (40): Xaa is C or S
XQPSRVHHSSLSVLFFEYVRKKPKLLKVYPRLEEHLEXAX

SEQ ID NO: 45486 - protein, 37 aa, Artificial Sequence
  GFR-binding peptide
  MOD_RES (3), (4), (36): Xaa is C or S
EPXXVPEKMSSLSILFFDENKNVVLKVYPNMTVESXA

SEQ ID NO: 45487 - protein, 42 aa, Artificial Sequence
  GFR-binding peptide
  MOD_RES (6), (7), (41): Xaa is C or S
  MOD_RES (21), (22), (23), (24), (25): Xaa is A or G
  MOD_RES (26), (27), (28), (29): Xaa is A or G or is absent
AVPKAXXAPTKLSSLSVLFFXXXXXXXXXLKVYPNMVVKAXG

SEQ ID NO: 45488 - protein, 39 aa, Artificial Sequence
  GFR-binding peptide
  MOD_RES (4), (5), (37), (39): Xaa is C or S
SKAXXVPTKLSSLSILFFDKGVVTYLKVYPGMAVSEXGX

SEQ ID NO: 45489 - protein, 38 aa, Artificial Sequence
  GFR-binding peptide
  MOD_RES (1), (2), (36), (38): Xaa is C or S
  MOD_RES (16), (17), (18), (19), (20): Xaa is A or G
  MOD_RES (21), (22), (23), (24): Xaa is A or G or is absent
XXAPTKLSSLSVLFFXXXXXXXXXLKVYPNMVVKAXGX

SEQ ID NO: 45490 - protein, 38 aa, Artificial Sequence
  GFR-binding peptide
  MOD_RES (6), (7): Xaa is C or S
TVPKPXXAPTQLSSLSVLFFDDSSNVILKVYPNMVVRA

SEQ ID NO: 45491 - protein, 36 aa, Artificial Sequence
  GFR-binding peptide
  MOD_RES (2), (3): Xaa is C or S
  MOD_RES (17), (18), (19), (20), (21): Xaa is A or G
  MOD_RES (22), (23), (24), (25): Xaa is A or G or is absent
AXXAPTKLSSLSVLFFXXXXXXXXXLKVYPNMVVKA

SEQ ID NO: 45492 - protein, 39 aa, Artificial Sequence
  GFR-binding peptide
  MOD_RES (5), (6): Xaa is C or S
  MOD_RES (20), (21), (22), (23), (24): Xaa is A or G
  MOD_RES (25), (26), (27), (28): Xaa is A or G or is absent
APASXXVPARLSSLSILFFXXXXXXXXXLKVYPDMVVEA

SEQ ID NO: 45493 - protein, 38 aa, Artificial Sequence
  GFR-binding peptide
  MOD_RES (2), (3), (35), (37): Xaa is C or S
PXXAPTQLSSLSVLFFDDSSNVILKVYPNMVVRAXGXH

SEQ ID NO: 45494 - protein, 37 aa, Artificial Sequence
  GFR-binding peptide
  MOD_RES (36), (36): Xaa is C or S
PSRVHHSSLSVLFFEYVRKKPKLLKVYPRLEEHLEXA

SEQ ID NO: 45495 - protein, 36 aa, Artificial Sequence
  GFR-binding peptide
  MOD_RES (4), (5): Xaa is C or S
PPTXXVPTRLSSLSILFFDSANNVVLKVYPDMVVES

SEQ ID NO: 45496 - protein, 36 aa, Artificial Sequence
  GFR-binding peptide
  MOD_RES (1), (33), (35): Xaa is C or S
XVPEKMSSLSILFFDENKNVVLKVYPNMTVESXAXR

SEQ ID NO: 45497 - protein, 44 aa, Artificial Sequence
  GFR-binding peptide
  MOD_RES (6), (7), (41), (43): Xaa is C or S
  MOD_RES (21), (22), (23), (24), (25): Xaa is A or G
  MOD_RES (26), (27), (28), (29): Xaa is A or G or is absent
HVPKPXXAPTKLSSLSVLFFXXXXXXXXXLKVYPNMVVRSXGXH

SEQ ID NO: 45498 - protein, 37 aa, Artificial Sequence
  GFR-binding peptide
  MOD_RES (1), (2), (34), (36): Xaa is C or S
XXVPTKLSSLSILFFDKGVVTYLKVYPGMAVSEXGXR

SEQ ID NO: 45499 - protein, 34 aa, Artificial Sequence
  GFR-binding peptide
  MOD_RES (2), (3), (34): Xaa is C or S
PXXVPQALSSLSILFFVGRKPKVLKVYPMIVRSX

SEQ ID NO: 45500 - protein, 33 aa, Artificial Sequence
  GFR-binding peptide
  MOD_RES (1), (1): Xaa is C or S
  MOD_RES (15), (16), (17), (18), (19): Xaa is A or G
  MOD_RES (20), (21), (22), (23): Xaa is A or G or is absent
XVPTELSSLSMLFFXXXXXXXXXLKVYPEMVVE

SEQ ID NO: 45501 - protein, 35 aa, Artificial Sequence
  GFR-binding peptide
  MOD_RES (5), (5): Xaa is C or S
TKPTXAPTKLSSLSVLFFDDSSNVILKVYPNMVVR

SEQ ID NO: 45502 - protein, 34 aa, Artificial Sequence
  GFR-binding peptide
  MOD_RES (32), (34): Xaa is C or S
VPARLSSLSILFFDAANNVVLKVYPDMVVEAXGX

SEQ ID NO: 45503 - protein, 35 aa, Artificial Sequence
  GFR-binding peptide
  MOD_RES (1), (33), (35): Xaa is C or S
XVPTRLSSLSILFFDSANNVVLKVYPDMVVESXGX

SEQ ID NO: 45504 - protein, 39 aa, Artificial Sequence
  GFR-binding peptide
  MOD_RES (3), (4), (37), (39): Xaa is C or S
  MOD_RES (18), (19), (20), (21), (22): Xaa is A or G
  MOD_RES (23), (24), (25), (26): Xaa is A or G or is absent
SPXXVSQDLSSLSILFFXXXXXXXXXLKVYPMIVKSXKX

SEQ ID NO: 45505 - protein, 37 aa, Artificial Sequence
  GFR-binding peptide
  MOD_RES (34), (36): Xaa is C or S
  MOD_RES (14), (15), (16), (17), (18): Xaa is A or G
  MOD_RES (19), (20), (21), (22): Xaa is A or G or is absent
VPEKMSSLSILFFXXXXXXXXXLKVYPNMTVESXAXR

SEQ ID NO: 45506 - protein, 40 aa, Artificial Sequence
  GFR-binding peptide
  MOD_RES (5), (6), (38), (40): Xaa is C or S
TPPTXXVPTRLSSLSILFFDSANNVVLKVYPDMVVESXGX

SEQ ID NO: 45507 - protein, 35 aa, Artificial Sequence
  GFR-binding peptide
  MOD_RES (4), (5): Xaa is C or S
PSTXXAPVKTSSLSMLFFDNGRVLLLKVYPMIVEE

SEQ ID NO: 45508 - protein, 36 aa, Artificial Sequence
  GFR-binding peptide
  MOD_RES (5), (6): Xaa is C or S
SASPXXVSQDLSSLSILFFIGKTPKILKVYPMIVKS

SEQ ID NO: 45509 - protein, 41 aa, Artificial Sequence
  GFR-binding peptide
  MOD_RES (4), (38), (40): Xaa is C or S
  MOD_RES (18), (19), (20), (21), (22): Xaa is A or G
  MOD_RES (23), (24), (25), (26): Xaa is A or G or is absent
KPTXAPTKLSSLSVLFFXXXXXXXXXLKVYPNMVVRSXGXH

SEQ ID NO: 45510 - protein, 43 aa, Artificial Sequence
  GFR-binding peptide
  MOD_RES (5), (6), (40), (42): Xaa is C or S
  MOD_RES (20), (21), (22), (23), (24): Xaa is A or G
  MOD_RES (25), (26), (27), (28): Xaa is A or G or is absent
TPPTXXVPTRLSSLSILFFXXXXXXXXXLKVYPDMVVESXGXR

SEQ ID NO: 45511 - protein, 37 aa, Artificial Sequence
  GFR-binding peptide
  MOD_RES (3), (4), (36): Xaa is C or S
KAXXVPTKLSSLSILFFDKGVVTYLKVYPGMAVSEXG

SEQ ID NO: 45512 - protein, 34 aa, Artificial Sequence
  GFR-binding peptide
  MOD_RES (1), (34): Xaa is C or S
  MOD_RES (15), (16), (17), (18), (19): Xaa is A or G
  MOD_RES (20), (21), (22), (23): Xaa is A or G or is absent
XVPQALSSLSILFFXXXXXXXXXLKVYPMIVRSX

SEQ ID NO: 45513 - protein, 42 aa, Artificial Sequence
  GFR-binding peptide
  MOD_RES (6), (40), (42): Xaa is C or S
  MOD_RES (20), (21), (22), (23), (24): Xaa is A or G
  MOD_RES (25), (26), (27), (28): Xaa is A or G or is absent
VTKPTXAPTKLSSLSVLFFXXXXXXXXXLKVYPNMVVRSXGX

SEQ ID NO: 45514 - protein, 37 aa, Artificial Sequence
  GFR-binding peptide
  MOD_RES (5), (6): Xaa is C or S
VPKPXXAPTQLSSLSVLFFDDSSNVILKVYPNMVVRA

SEQ ID NO: 45515 - protein, 40 aa, Artificial Sequence
  GFR-binding peptide
  MOD_RES (4), (5), (37), (39): Xaa is C or S
PKPXXAPTKLSSLSVLFFDDSSNVILKVYPNMVVRSXGXH

SEQ ID NO: 45516 - protein, 32 aa, Artificial Sequence
  GFR-binding peptide
  MOD_RES (14), (15), (16), (17), (18): Xaa is A or G
  MOD_RES (19), (20), (21), (22): Xaa is A or G or is absent
VPTELSSLSMLFFXXXXXXXXXLKVYPEMVVE

SEQ ID NO: 45517 - protein, 37 aa, Artificial Sequence
  GFR-binding peptide
  MOD_RES (35), (37): Xaa is C or S
SRVHHSSLSVLFFEYVRKKPKLLKVYPRLEEHLEXAX

SEQ ID NO: 45518 - protein, 37 aa, Artificial Sequence
  GFR-binding peptide
  MOD_RES (3), (37): Xaa is C or S
  MOD_RES (17), (18), (19), (20), (21): Xaa is A or G
  MOD_RES (22), (23), (24), (25): Xaa is A or G or is absent
PTXAPTKLSSLSVLFFXXXXXXXXXLKVYPNMVVRSX

SEQ ID NO: 45519 - protein, 36 aa, Artificial Sequence
  GFR-binding peptide
  MOD_RES (2), (3), (35): Xaa is C or S
PXXTPTKMSSLSMLFFNDKQQIILKVYPGMVVDRXG

SEQ ID NO: 45520 - protein, 39 aa, Artificial Sequence
  GFR-binding peptide
  MOD_RES (6), (7), (39): Xaa is C or S
STPPTXXVPTRLSSLSILFFDSANNVVLKVYPDMVVESX

SEQ ID NO: 45521 - protein, 40 aa, Artificial Sequence
  GFR-binding peptide
  MOD_RES (2), (3), (37), (39): Xaa is C or S
  MOD_RES (17), (18), (19), (20), (21): Xaa is A or G
  MOD_RES (22), (23), (24), (25): Xaa is A or G or is absent
PXXAPTQLSSLSVLFFXXXXXXXXXLKVYPNMVVRAXGXH

SEQ ID NO: 45522 - protein, 37 aa, Artificial Sequence
  GFR-binding peptide
  MOD_RES (4), (5), (37): Xaa is C or S
PPTXXVPTRLSSLSILFFDSANNVVLKVYPDMVVESX

SEQ ID NO: 45523 - protein, 38 aa, Artificial Sequence
  GFR-binding peptide
  MOD_RES (4), (5), (36), (38): Xaa is C or S
PSTXXAPVKTSSLSMLFFDNGRVLLLKVYPMIVEEXGX

SEQ ID NO: 45524 - protein, 30 aa, Artificial Sequence
  GFR-binding peptide
VPEKMSSLSILFFDENKNVVLKVYPNMTVE

SEQ ID NO: 45525 - protein, 40 aa, Artificial Sequence
  GFR-binding peptide
  MOD_RES (6), (7), (39): Xaa is C or S
GIPEPXXVPEKMSSLSILFFDENKNVVLKVYPNMTVESXA

SEQ ID NO: 45526 - protein, 37 aa, Artificial Sequence
  GFR-binding peptide
  MOD_RES (1), (2), (36): Xaa is C or S
  MOD_RES (16), (17), (18), (19), (20): Xaa is A or G
  MOD_RES (21), (22), (23), (24): Xaa is A or G or is absent
XXVPTELSSLSMLFFXXXXXXXXXLKVYPEMVVEGXG

SEQ ID NO: 45527 - protein, 34 aa, Artificial Sequence
  GFR-binding peptide
  MOD_RES (1), (2): Xaa is C or S
  MOD_RES (16), (17), (18), (19), (20): Xaa is A or G
  MOD_RES (21), (22), (23), (24): Xaa is A or G or is absent
XXVPTKLSSLSILFFXXXXXXXXXLKVYPGMAVS

SEQ ID NO: 45528 - protein, 37 aa, Artificial Sequence
  GFR-binding peptide
  MOD_RES (6), (7): Xaa is C or S
ASASPXXVSQDLSSLSILFFIGKTPKILKVYPMIVKS

SEQ ID NO: 45529 - protein, 39 aa, Artificial Sequence
  GFR-binding peptide
  MOD_RES (36), (38): Xaa is C or S
PSRVHHSSLSVLFFEYVRKKPKLLKVYPRLEEHLEXAXA

SEQ ID NO: 45530 - protein, 36 aa, Artificial Sequence
  GFR-binding peptide
  MOD_RES (34), (36): Xaa is C or S
VPTEESSLSMLFFRIKPHQGQHLKVYPFLQHNKXEX

SEQ ID NO: 45531 - protein, 38 aa, Artificial Sequence
  GFR-binding peptide
  MOD_RES (1), (38): Xaa is C or S
XQPSRVHHSSLSVLFFEYVRKKPKLLKVYPRLEEHLEX

SEQ ID NO: 45532 - protein, 33 aa, Artificial Sequence
  GFR-binding peptide
  MOD_RES (32), (32): Xaa is C or S
VPEKMSSLSILFFDENKNVVLKVYPNMTVESXA

SEQ ID NO: 45533 - protein, 39 aa, Artificial Sequence
  GFR-binding peptide
  MOD_RES (2), (36), (38): Xaa is C or S
  MOD_RES (16), (17), (18), (19), (20): Xaa is A or G
  MOD_RES (21), (22), (23), (24): Xaa is A or G or is absent
EXVPTEESSLSMLFFXXXXXXXXXLKVYPFLQHNKXEXR

SEQ ID NO: 45534 - protein, 43 aa, Artificial Sequence
  GFR-binding peptide
  MOD_RES (6), (7), (40), (42): Xaa is C or S
  MOD_RES (21), (22), (23), (24), (25): Xaa is A or G
  MOD_RES (26), (27), (28), (29): Xaa is A or G or is absent
ASASPXXVPQDLSSLSILFFXXXXXXXXXLKVYPMVVKSXKXS

SEQ ID NO: 45535 - protein, 37 aa, Artificial Sequence
  GFR-binding peptide
  MOD_RES (3), (4): Xaa is C or S
  MOD_RES (18), (19), (20), (21), (22): Xaa is A or G
  MOD_RES (23), (24), (25), (26): Xaa is A or G or is absent
KPXXAPTQLSSLSVLFFXXXXXXXXXLKVYPNMVVRA

SEQ ID NO: 45536 - protein, 41 aa, Artificial Sequence
  GFR-binding peptide
  MOD_RES (4), (5), (39), (41): Xaa is C or S
  MOD_RES (19), (20), (21), (22), (23): Xaa is A or G
  MOD_RES (24), (25), (26), (27): Xaa is A or G or is absent
PKPXXAPTKLSSLSVLFFXXXXXXXXXLKVYPNMVVRSXGX

SEQ ID NO: 45537 - protein, 41 aa, Artificial Sequence
  GFR-binding peptide
  MOD_RES (5), (6), (40): Xaa is C or S
  MOD_RES (20), (21), (22), (23), (24): Xaa is A or G
  MOD_RES (25), (26), (27), (28): Xaa is A or G or is absent
VPKPXXAPTKLSSLSVLFFXXXXXXXXXLKVYPNMVVRSXG

SEQ ID NO: 45538 - protein, 31 aa, Artificial Sequence
  GFR-binding peptide
  MOD_RES (1), (1): Xaa is C or S
XVPQDLSSLSILFFVGRTPKVLKVYPMVVKS

SEQ ID NO: 45539 - protein, 36 aa, Artificial Sequence
  GFR-binding peptide
  MOD_RES (2), (3): Xaa is C or S
  MOD_RES (17), (18), (19), (20), (21): Xaa is A or G
  MOD_RES (22), (23), (24), (25): Xaa is A or G or is absent
PXXTPTKMSSLSMLFFXXXXXXXXXLKVYPGMVVDR

SEQ ID NO: 45540 - protein, 38 aa, Artificial Sequence
  GFR-binding peptide
  MOD_RES (6), (7): Xaa is C or S
AVPKAXXAPTKLSSLSVLFFDSSNNVILKVYPNMVVKA

SEQ ID NO: 45541 - protein, 42 aa, Artificial Sequence
  GFR-binding peptide
  MOD_RES (4), (5), (39), (41): Xaa is C or S
  MOD_RES (19), (20), (21), (22), (23): Xaa is A or G
  MOD_RES (24), (25), (26), (27): Xaa is A or G or is absent
PKPXXAPTQLSSLSVLFFXXXXXXXXXLKVYPNMVVRAXGXH

SEQ ID NO: 45542 - protein, 36 aa, Artificial Sequence
  GFR-binding peptide
  MOD_RES (5), (6): Xaa is C or S
VPSTXXAPVKTSSLSMLFFDNGRVLLLKVYPMIVEE

SEQ ID NO: 45543 - protein, 39 aa, Artificial Sequence
  GFR-binding peptide
  MOD_RES (4), (5), (39): Xaa is C or S
  MOD_RES (19), (20), (21), (22), (23): Xaa is A or G
  MOD_RES (24), (25), (26), (27): Xaa is A or G or is absent
AGPXXTPTKMSSLSMLFFXXXXXXXXXLKVYPGMVVDRX

SEQ ID NO: 45544 - protein, 33 aa, Artificial Sequence
  GFR-binding peptide
  MOD_RES (1), (2), (33): Xaa is C or S
XXVPQDLSSLSILFFVGRTPKVLKVYPMVVKSX

SEQ ID NO: 45545 - protein, 42 aa, Artificial Sequence
  GFR-binding peptide
  MOD_RES (7), (41): Xaa is C or S
  MOD_RES (21), (22), (23), (24), (25): Xaa is A or G
  MOD_RES (26), (27), (28), (29): Xaa is A or G or is absent
HVTKPTXAPTKLSSLSVLFFXXXXXXXXXLKVYPNMVVRSXG

SEQ ID NO: 45546 - protein, 38 aa, Artificial Sequence
  GFR-binding peptide
  MOD_RES (5), (6): Xaa is C or S
  MOD_RES (20), (21), (22), (23), (24): Xaa is A or G
  MOD_RES (25), (26), (27), (28): Xaa is A or G or is absent
VPKPXXAPTQLSSLSVLFFXXXXXXXXXLKVYPNMVVR

SEQ ID NO: 45547 - protein, 33 aa, Artificial Sequence
  GFR-binding peptide
  MOD_RES (1), (1): Xaa is C or S
XVPTKLSSLSVLFFDDMGVPTLKVYPEGMSVAE

SEQ ID NO: 45548 - protein, 43 aa, Artificial Sequence
  GFR-binding peptide
  MOD_RES (6), (40), (42): Xaa is C or S
  MOD_RES (20), (21), (22), (23), (24): Xaa is A or G
  MOD_RES (25), (26), (27), (28): Xaa is A or G or is absent
VTKPTXAPTKLSSLSVLFFXXXXXXXXXLKVYPNMVVRSXGXH

SEQ ID NO: 45549 - protein, 33 aa, Artificial Sequence
  GFR-binding peptide
  MOD_RES (2), (3): Xaa is C or S
PXXVPQDLSSLSILFFVGRTPKVLKVYPMVVKS

SEQ ID NO: 45550 - protein, 37 aa, Artificial Sequence
  GFR-binding peptide
  MOD_RES (4), (4): Xaa is C or S
GLEXVPTEESSLSMLFFRIKPHQGQHLKVYPFLQHNK

SEQ ID NO: 45551 - protein, 45 aa, Artificial Sequence
  GFR-binding peptide
  MOD_RES (5), (42), (44): Xaa is C or S
  MOD_RES (21), (22), (23), (24), (25): Xaa is A or G
  MOD_RES (26), (27), (28), (29): Xaa is A or G or is absent
SSVKXQPSRVHHSSLSVLFFXXXXXXXXXLKVYPRLEEHLEXAXA

SEQ ID NO: 45552 - protein, 31 aa, Artificial Sequence
  GFR-binding peptide
  MOD_RES (31), (31): Xaa is C or S
APVKTSSLSMLFFDNGRVLLLKVYPMIVEEX

SEQ ID NO: 45553 - protein, 30 aa, Artificial Sequence
  GFR-binding peptide
APTQLSSLSVLFFDDSSNVILKVYPNMVVR

SEQ ID NO: 45554 - protein, 32 aa, Artificial Sequence
  GFR-binding peptide
  MOD_RES (31), (31): Xaa is C or S
VPQALSSLSILFFVGRKPKVLKVYPMIVRSXK

SEQ ID NO: 45555 - protein, 41 aa, Artificial Sequence
  GFR-binding peptide
  MOD_RES (5), (6), (39), (41): Xaa is C or S
  MOD_RES (20), (21), (22), (23), (24): Xaa is A or G
  MOD_RES (25), (26), (27), (28): Xaa is A or G or is absent
VPSTXXAPVKTSSLSMLFFXXXXXXXXXLKVYPMIVEEXGX

SEQ ID NO: 45556 - protein, 43 aa, Artificial Sequence
  GFR-binding peptide
  MOD_RES (6), (7), (41), (43): Xaa is C or S
  MOD_RES (21), (22), (23), (24), (25): Xaa is A or G
  MOD_RES (26), (27), (28), (29): Xaa is A or G or is absent
AAPASXXVPARLSSLSILFFXXXXXXXXXLKVYPDMVVEAXGX

SEQ ID NO: 45557 - protein, 41 aa, Artificial Sequence
  GFR-binding peptide
  MOD_RES (3), (4), (38), (40): Xaa is C or S
  MOD_RES (18), (19), (20), (21), (22): Xaa is A or G
  MOD_RES (23), (24), (25), (26): Xaa is A or G or is absent
PTXXVPTRLSSLSILFFXXXXXXXXXLKVYPDMVVESXGXR

SEQ ID NO: 45558 - protein, 37 aa, Artificial Sequence
  GFR-binding peptide
  MOD_RES (37), (37): Xaa is C or S
  MOD_RES (16), (17), (18), (19), (20): Xaa is A or G
  MOD_RES (21), (22), (23), (24): Xaa is A or G or is absent
QPSRVHHSSLSVLFFXXXXXXXXXLKVYPRLEEHLEX

SEQ ID NO: 45559 - protein, 39 aa, Artificial Sequence
  GFR-binding peptide
  MOD_RES (3), (4), (37), (39): Xaa is C or S
  MOD_RES (18), (19), (20), (21), (22): Xaa is A or G
  MOD_RES (23), (24), (25), (26): Xaa is A or G or is absent
APXXVPQALSSLSILFFXXXXXXXXXLKVYPMIVRSXKX

SEQ ID NO: 45560 - protein, 38 aa, Artificial Sequence
  GFR-binding peptide
  MOD_RES (1), (35), (37): Xaa is C or S
  MOD_RES (15), (16), (17), (18), (19): Xaa is A or G
  MOD_RES (20), (21), (22), (23): Xaa is A or G or is absent
XVPTEESSLSMLFFXXXXXXXXXLKVYPFLQHNKXEXR

SEQ ID NO: 45561 - protein, 36 aa, Artificial Sequence
  GFR-binding peptide
  MOD_RES (1), (33), (35): Xaa is C or S
XAPTQLSSLSVLFFDDSSNVILKVYPNMVVRAXGXH

SEQ ID NO: 45562 - protein, 39 aa, Artificial Sequence
  GFR-binding peptide
  MOD_RES (5), (6): Xaa is C or S
  MOD_RES (20), (21), (22), (23), (24): Xaa is A or G
  MOD_RES (25), (26), (27), (28): Xaa is A or G or is absent
IPEPXXVPEKMSSLSILFFXXXXXXXXXLKVYPNMTVES

SEQ ID NO: 45563 - protein, 37 aa, Artificial Sequence
  GFR-binding peptide
  MOD_RES (3), (3): Xaa is C or S
VKXQPSRVHHSSLSVLFFEYVRKKPKLLKVYPRLEEH

SEQ ID NO: 45564 - protein, 32 aa, Artificial Sequence
  GFR-binding peptide
  MOD_RES (14), (15), (16), (17), (18): Xaa is A or G
  MOD_RES (19), (20), (21), (22): Xaa is A or G or is absent
APTQLSSLSVLFFXXXXXXXXXLKVYPNMVVR

SEQ ID NO: 45565 - protein, 40 aa, Artificial Sequence
  GFR-binding peptide
  MOD_RES (3), (4), (38), (40): Xaa is C or S
  MOD_RES (18), (19), (20), (21), (22): Xaa is A or G
  MOD_RES (23), (24), (25), (26): Xaa is A or G or is absent
KAXXVPTKLSSLSILFFXXXXXXXXXLKVYPGMAVSEXGX

SEQ ID NO: 45566 - protein, 37 aa, Artificial Sequence
  GFR-binding peptide
  MOD_RES (4), (5): Xaa is C or S
  MOD_RES (19), (20), (21), (22), (23): Xaa is A or G
  MOD_RES (24), (25), (26), (27): Xaa is A or G or is absent
PASXXVPARLSSLSILFFXXXXXXXXXLKVYPDMVVE

SEQ ID NO: 45567 - protein, 41 aa, Artificial Sequence
  GFR-binding peptide
  MOD_RES (1), (38), (40): Xaa is C or S
  MOD_RES (17), (18), (19), (20), (21): Xaa is A or G
  MOD_RES (22), (23), (24), (25): Xaa is A or G or is absent
XQPSRVHHSSLSVLFFXXXXXXXXXLKVYPRLEEHLEXAXA

SEQ ID NO: 45568 - protein, 35 aa, Artificial Sequence
  GFR-binding peptide
  MOD_RES (4), (5): Xaa is C or S
PPTXXVPTRLSSLSILFFDSANNVVLKVYPDMVVE

SEQ ID NO: 45569 - protein, 32 aa, Artificial Sequence
  GFR-binding peptide
VPTKLSSLSVLFFDDMGVPTLKVYPEGMSVAE

SEQ ID NO: 45570 - protein, 42 aa, Artificial Sequence
  GFR-binding peptide
  MOD_RES (6), (7), (39), (41): Xaa is C or S
YVPKPXXAPTKLSSLSVLFFDDSSNVILKVYPNMVVRSXGXH

SEQ ID NO: 45571 - protein, 35 aa, Artificial Sequence
  GFR-binding peptide
  MOD_RES (1), (33), (35): Xaa is C or S
XAPTKLSSLSVLFFDSSNNVILKVYPNMVVKAXGX

SEQ ID NO: 45572 - protein, 33 aa, Artificial Sequence
  GFR-binding peptide
  MOD_RES (1), (1): Xaa is C or S
  MOD_RES (15), (16), (17), (18), (19): Xaa is A or G
  MOD_RES (20), (21), (22), (23): Xaa is A or G or is absent
XAPTQLSSLSVLFFXXXXXXXXXLKVYPNMVVR

SEQ ID NO: 45573 - protein, 43 aa, Artificial Sequence
  GFR-binding peptide
  MOD_RES (5), (6), (40), (42): Xaa is C or S
  MOD_RES (20), (21), (22), (23), (24): Xaa is A or G
  MOD_RES (25), (26), (27), (28): Xaa is A or G or is absent
APASXXVPARLSSLSILFFXXXXXXXXXLKVYPDMVVEAXGXR

SEQ ID NO: 45574 - protein, 39 aa, Artificial Sequence
  GFR-binding peptide
  MOD_RES (6), (7), (38): Xaa is C or S
RVPSTXXAPVKTSSLSMLFFDNGRVLLLKVYPMIVEEXG

SEQ ID NO: 45575 - protein, 35 aa, Artificial Sequence
  GFR-binding peptide
  MOD_RES (2), (3): Xaa is C or S
  MOD_RES (17), (18), (19), (20), (21): Xaa is A or G
  MOD_RES (22), (23), (24), (25): Xaa is A or G or is absent
PXXAPTQLSSLSVLFFXXXXXXXXXLKVYPNMVVR

SEQ ID NO: 45576 - protein, 35 aa, Artificial Sequence
  GFR-binding peptide
  MOD_RES (1), (35): Xaa is C or S
  MOD_RES (15), (16), (17), (18), (19): Xaa is A or G
  MOD_RES (20), (21), (22), (23): Xaa is A or G or is absent
XAPTQLSSLSVLFFXXXXXXXXXLKVYPNMVVRAX

SEQ ID NO: 45577 - protein, 39 aa, Artificial Sequence
  GFR-binding peptide
  MOD_RES (6), (7): Xaa is C or S
  MOD_RES (21), (22), (23), (24), (25): Xaa is A or G
  MOD_RES (26), (27), (28), (29): Xaa is A or G or is absent
AVPKAXXAPTKLSSLSVLFFXXXXXXXXXLKVYPNMVVK

SEQ ID NO: 45578 - protein, 40 aa, Artificial Sequence
  GFR-binding peptide
  MOD_RES (4), (4): Xaa is C or S
SVKXQPSRVHHSSLSVLFFEYVRKKPKLLKVYPRLEEHLE

SEQ ID NO: 45579 - protein, 35 aa, Artificial Sequence
  GFR-binding peptide
  MOD_RES (1), (2), (35): Xaa is C or S
  MOD_RES (16), (17), (18), (19), (20): Xaa is A or G
  MOD_RES (21), (22), (23), (24): Xaa is A or G or is absent
XXVPQALSSLSILFFXXXXXXXXXLKVYPMIVRSX

SEQ ID NO: 45580 - protein, 38 aa, Artificial Sequence
  GFR-binding peptide
  MOD_RES (1), (2), (36), (38): Xaa is C or S
  MOD_RES (16), (17), (18), (19), (20): Xaa is A or G
  MOD_RES (21), (22), (23), (24): Xaa is A or G or is absent
XXTPTKMSSLSMLFFXXXXXXXXXLKVYPGMVVDRXGX

SEQ ID NO: 45581 - protein, 38 aa, Artificial Sequence
  GFR-binding peptide
  MOD_RES (36), (38): Xaa is C or S
  MOD_RES (15), (16), (17), (18), (19): Xaa is A or G
  MOD_RES (20), (21), (22), (23): Xaa is A or G or is absent
PSRVHHSSLSVLFFXXXXXXXXXLKVYPRLEEHLEXAX

SEQ ID NO: 45582 - protein, 36 aa, Artificial Sequence
  GFR-binding peptide
  MOD_RES (1), (33), (35): Xaa is C or S
XVPTKLSSLSILFFDKGVVTYLKVYPGMAVSEXGXR

SEQ ID NO: 45583 - protein, 36 aa, Artificial Sequence
  GFR-binding peptide
  MOD_RES (1), (33), (35): Xaa is C or S
XAPTKLSSLSVLFFDDSSNVILKVYPNMVVRSXGXH

SEQ ID NO: 45584 - protein, 32 aa, Artificial Sequence
  GFR-binding peptide
  MOD_RES (1), (2): Xaa is C or S
XXVPQALSSLSILFFVGRKPKVLKVYPMIVRS

SEQ ID NO: 45585 - protein, 41 aa, Artificial Sequence
  GFR-binding peptide
  MOD_RES (4), (5), (40): Xaa is C or S
  MOD_RES (19), (20), (21), (22), (23): Xaa is A or G
  MOD_RES (24), (25), (26), (27): Xaa is A or G or is absent
GKAXXVPTKLSSLSVLFFXXXXXXXXXLKVYPEGMSVAEXG

SEQ ID NO: 45586 - protein, 40 aa, Artificial Sequence
  GFR-binding peptide
  MOD_RES (5), (6), (38), (40): Xaa is C or S
VPKAXXAPTKLSSLSVLFFDSSNNVILKVYPNMVVKAXGX

SEQ ID NO: 45587 - protein, 36 aa, Artificial Sequence
  GFR-binding peptide
  MOD_RES (1), (35): Xaa is C or S
  MOD_RES (15), (16), (17), (18), (19): Xaa is A or G
  MOD_RES (20), (21), (22), (23): Xaa is A or G or is absent
XVPEKMSSLSILFFXXXXXXXXXLKVYPNMTVESXA

SEQ ID NO: 45588 - protein, 40 aa, Artificial Sequence
  GFR-binding peptide
  MOD_RES (5), (6), (37), (39): Xaa is C or S
SAAPXXVPQALSSLSILFFVGRKPKVLKVYPMIVRSXKXS

SEQ ID NO: 45589 - protein, 39 aa, Artificial Sequence
  GFR-binding peptide
  MOD_RES (3), (4), (39): Xaa is C or S
  MOD_RES (18), (19), (20), (21), (22): Xaa is A or G
  MOD_RES (23), (24), (25), (26): Xaa is A or G or is absent
KAXXVPTKLSSLSVLFFXXXXXXXXXLKVYPEGMSVAEX

SEQ ID NO: 45590 - protein, 41 aa, Artificial Sequence; identical to SEQ ID NO: 151
  GFR-binding peptide
  MOD_RES (6), (7), (38), (40): Xaa is C or S

SEQ ID NO: 45591 - protein, 36 aa, Artificial Sequence
  GFR-binding peptide
  MOD_RES (2), (3), (35): Xaa is C or S
PXXAPTQLSSLSVLFFDDSSNVILKVYPNMVVRAXG

SEQ ID NO: 45592 - protein, 37 aa, Artificial Sequence
  GFR-binding peptide
  MOD_RES (7), (7): Xaa is C or S
HVTKPTXAPTKLSSLSVLFFDDSSNVILKVYPNMVVR

SEQ ID NO: 45593 - protein, 35 aa, Artificial Sequence
  GFR-binding peptide
  MOD_RES (2), (3): Xaa is C or S
  MOD_RES (17), (18), (19), (20), (21): Xaa is A or G
  MOD_RES (22), (23), (24), (25): Xaa is A or G or is absent
PXXVPQALSSLSILFFXXXXXXXXXLKVYPMIVRS

SEQ ID NO: 45594 - protein, 34 aa, Artificial Sequence
  GFR-binding peptide
  MOD_RES (3), (4): Xaa is C or S
EPXXVPEKMSSLSILFFDENKNVVLKVYPNMTVE

SEQ ID NO: 45595 - protein, 39 aa, Artificial Sequence
  GFR-binding peptide
  MOD_RES (1), (2), (36), (38): Xaa is C or S
  MOD_RES (16), (17), (18), (19), (20): Xaa is A or G
  MOD_RES (21), (22), (23), (24): Xaa is A or G or is absent
XXAPTQLSSLSVLFFXXXXXXXXXLKVYPNMVVRAXGXH

SEQ ID NO: 45596 - protein, 38 aa, Artificial Sequence
  GFR-binding peptide
  MOD_RES (2), (2): Xaa is C or S
KXQPSRVHHSSLSVLFFEYVRKKPKLLKVYPRLEEHLE

SEQ ID NO: 45597 - protein, 35 aa, Artificial Sequence
  GFR-binding peptide
  MOD_RES (2), (3): Xaa is C or S
AXXVPTKLSSLSVLFFDDMGVPTLKVYPEGMSVAE

SEQ ID NO: 45598 - protein, 41 aa, Artificial Sequence
  GFR-binding peptide
  MOD_RES (6), (7): Xaa is C or S
  MOD_RES (21), (22), (23), (24), (25): Xaa is A or G
  MOD_RES (26), (27), (28), (29): Xaa is A or G or is absent
KVGKAXXVPTKLSSLSVLFFXXXXXXXXXLKVYPEGMSVAE

SEQ ID NO: 45599 - protein, 32 aa, Artificial Sequence
  GFR-binding peptide
  MOD_RES (1), (1): Xaa is C or S
XVPTRLSSLSILFFDSANNVVLKVYPDMVVES

SEQ ID NO: 45600 - protein, 36 aa, Artificial Sequence
  GFR-binding peptide
  MOD_RES (4), (5), (36): Xaa is C or S
ASPXXVPQDLSSLSILFFVGRTPKVLKVYPMVVKSX

SEQ ID NO: 45601 - protein, 31 aa, Artificial Sequence
  GFR-binding peptide
  MOD_RES (1), (1): Xaa is C or S
XAPTQLSSLSVLFFDDSSNVILKVYPNMVVR

SEQ ID NO: 45602 - protein, 36 aa, Artificial Sequence
  GFR-binding peptide
  MOD_RES (4), (5): Xaa is C or S
PEPXXVPEKMSSLSILFFDENKNVVLKVYPNMTVES

SEQ ID NO: 45603 - protein, 40 aa, Artificial Sequence
  GFR-binding peptide
  MOD_RES (6), (40): Xaa is C or S
DEGLEXVPTEESSLSMLFFRIKPHQGQHLKVYPFLQHNKX

SEQ ID NO: 45604 - protein, 37 aa, Artificial Sequence
  GFR-binding peptide
  MOD_RES (1), (35), (37): Xaa is C or S
  MOD_RES (15), (16), (17), (18), (19): Xaa is A or G
  MOD_RES (20), (21), (22), (23): Xaa is A or G or is absent
XAPTKLSSLSVLFFXXXXXXXXXLKVYPNMVVRSXGX

SEQ ID NO: 45605 - protein, 42 aa, Artificial Sequence
  GFR-binding peptide
  MOD_RES (5), (6), (39), (41): Xaa is C or S
  MOD_RES (20), (21), (22), (23), (24): Xaa is A or G
  MOD_RES (25), (26), (27), (28): Xaa is A or G or is absent
SAAPXXVPQALSSLSILFFXXXXXXXXXLKVYPMIVRSXKXS

SEQ ID NO: 45606 - protein, 40 aa, Artificial Sequence
  GFR-binding peptide
  MOD_RES (5), (6), (37), (39): Xaa is C or S
VPSTXXAPVKTSSLSMLFFDNGRVLLLKVYPMIVEEXGXL

SEQ ID NO: 45607 - protein, 36 aa, Artificial Sequence
  GFR-binding peptide
  MOD_RES (1), (33), (35): Xaa is C or S
XAPTKLSSLSVLFFDSSNNVILKVYPNMVVKAXGXH

SEQ ID NO: 45608 - protein, 41 aa, Artificial Sequence
  GFR-binding peptide
  MOD_RES (6), (7), (40): Xaa is C or S
  MOD_RES (21), (22), (23), (24), (25): Xaa is A or G
  MOD_RES (26), (27), (28), (29): Xaa is A or G or is absent
ASASPXXVSQDLSSLSILFFXXXXXXXXXLKVYPMIVKSXK

SEQ ID NO: 45609 - protein, 39 aa, Artificial Sequence
  GFR-binding peptide
  MOD_RES (2), (3), (37), (39): Xaa is C or S
  MOD_RES (17), (18), (19), (20), (21): Xaa is A or G
  MOD_RES (22), (23), (24), (25): Xaa is A or G or is absent
PXXAPTKLSSLSVLFFXXXXXXXXXLKVYPNMVVRSXGX

SEQ ID NO: 45610 - protein, 35 aa, Artificial Sequence
  GFR-binding peptide
  MOD_RES (32), (34): Xaa is C or S
APTKLSSLSVLFFDDSSNVILKVYPNMVVRSXGXH

SEQ ID NO: 45611 - protein, 39 aa, Artificial Sequence
  GFR-binding peptide
  MOD_RES (6), (7): Xaa is C or S
KVGKAXXVPTKLSSLSVLFFDDMGVPTLKVYPEGMSVAE

SEQ ID NO: 45612 - protein, 41 aa, Artificial Sequence
  GFR-binding peptide
  MOD_RES (5), (6), (38), (40): Xaa is C or S
APASXXVPARLSSLSILFFDAANNVVLKVYPDMVVEAXGXR

SEQ ID NO: 45613 - protein, 37 aa, Artificial Sequence
  GFR-binding peptide
  MOD_RES (3), (4), (36): Xaa is C or S
PTXXVPTRLSSLSILFFDSANNVVLKVYPDMVVESXG

SEQ ID NO: 45614 - protein, 38 aa, Artificial Sequence
  GFR-binding peptide
  MOD_RES (2), (3), (36), (38): Xaa is C or S
  MOD_RES (17), (18), (19), (20), (21): Xaa is A or G
  MOD_RES (22), (23), (24), (25): Xaa is A or G or is absent
PXXVPQDLSSLSILFFXXXXXXXXXLKVYPMVVKSXKX

SEQ ID NO: 45615 - protein, 39 aa, Artificial Sequence
  GFR-binding peptide
  MOD_RES (5), (6), (38): Xaa is C or S
APASXXVPARLSSLSILFFDAANNVVLKVYPDMVVEAXG

SEQ ID NO: 45616 - protein, 37 aa, Artificial Sequence
  GFR-binding peptide
  MOD_RES (5), (6), (37): Xaa is C or S
SASPXXVSQDLSSLSILFFIGKTPKILKVYPMIVKSX

SEQ ID NO: 45617 - protein, 39 aa, Artificial Sequence
  GFR-binding peptide
  MOD_RES (6), (7), (38): Xaa is C or S
ASASPXXVSQDLSSLSILFFIGKTPKILKVYPMIVKSXK

SEQ ID NO: 45618 - protein, 40 aa, Artificial Sequence
  GFR-binding peptide
  MOD_RES (4), (5), (39): Xaa is C or S
  MOD_RES (19), (20), (21), (22), (23): Xaa is A or G
  MOD_RES (24), (25), (26), (27): Xaa is A or G or is absent
PKPXXAPTQLSSLSVLFFXXXXXXXXXLKVYPNMVVRAXG

SEQ ID NO: 45619 - protein, 35 aa, Artificial Sequence
  GFR-binding peptide
  MOD_RES (1), (2): Xaa is C or S
  MOD_RES (16), (17), (18), (19), (20): Xaa is A or G
  MOD_RES (21), (22), (23), (24): Xaa is A or G or is absent
XXVPTKLSSLSILFFXXXXXXXXXLKVYPGMAVSE

SEQ ID NO: 45620 - protein, 41 aa, Artificial Sequence
  GFR-binding peptide
  MOD_RES (6), (7), (41): Xaa is C or S
  MOD_RES (21), (22), (23), (24), (25): Xaa is A or G
  MOD_RES (26), (27), (28), (29): Xaa is A or G or is absent
YVPKPXXAPTKLSSLSVLFFXXXXXXXXXLKVYPNMVVRSX

SEQ ID NO: 45621 - protein, 42 aa, Artificial Sequence
  GFR-binding peptide
  MOD_RES (6), (7), (41): Xaa is C or S
  MOD_RES (21), (22), (23), (24), (25): Xaa is A or G
  MOD_RES (26), (27), (28), (29): Xaa is A or G or is absent
STPPTXXVPTRLSSLSILFFXXXXXXXXXLKVYPDMVVESXG

SEQ ID NO: 45622 - protein, 33 aa, Artificial Sequence
  GFR-binding peptide
  MOD_RES (2), (3): Xaa is C or S
PXXTPTKMSSLSMLFFNDKQQIILKVYPGMVVD

SEQ ID NO: 45623 - protein, 43 aa, Artificial Sequence
  GFR-binding peptide
  MOD_RES (6), (7), (41), (43): Xaa is C or S
  MOD_RES (21), (22), (23), (24), (25): Xaa is A or G
  MOD_RES (26), (27), (28), (29): Xaa is A or G or is absent
GIPEPXXVPEKMSSLSILFFXXXXXXXXXLKVYPNMTVESXAX

SEQ ID NO: 45624 - protein, 35 aa, Artificial Sequence
  GFR-binding peptide
  MOD_RES (32), (34): Xaa is C or S
VPARLSSLSILFFDAANNVVLKVYPDMVVEAXGXR

SEQ ID NO: 45625 - protein, 37 aa, Artificial Sequence
  GFR-binding peptide
  MOD_RES (5), (6): Xaa is C or S
IPEPXXVPEKMSSLSILFFDENKNVVLKVYPNMTVES

SEQ ID NO: 45626 - protein, 35 aa, Artificial Sequence
  GFR-binding peptide
  MOD_RES (1), (32), (34): Xaa is C or S
XVPQALSSLSILFFVGRKPKVLKVYPMIVRSXKXS

SEQ ID NO: 45627 - protein, 36 aa, Artificial Sequence
  GFR-binding peptide
  MOD_RES (33), (35): Xaa is C or S
  MOD_RES (14), (15), (16), (17), (18): Xaa is A or G
  MOD_RES (19), (20), (21), (22): Xaa is A or G or is absent
VPQALSSLSILFFXXXXXXXXXLKVYPMIVRSXKXS

SEQ ID NO: 45628 - protein, 37 aa, Artificial Sequence
  GFR-binding peptide
  MOD_RES (2), (3), (36): Xaa is C or S
  MOD_RES (17), (18), (19), (20), (21): Xaa is A or G
  MOD_RES (22), (23), (24), (25): Xaa is A or G or is absent
PXXVPQDLSSLSILFFXXXXXXXXXLKVYPMVVKSXK

SEQ ID NO: 45629 - protein, 37 aa, Artificial Sequence
  GFR-binding peptide
  MOD_RES (6), (7): Xaa is C or S
HVPKPXXAPTKLSSLSVLFFDDSSNVILKVYPNMVVR

SEQ ID NO: 45630 - protein, 35 aa, Artificial Sequence
  GFR-binding peptide
  MOD_RES (32), (34): Xaa is C or S
APTKLSSLSVLFFDSSNNVILKVYPNMVVKAXGXH

SEQ ID NO: 45631 - protein, 40 aa, Artificial Sequence
  GFR-binding peptide
  MOD_RES (2), (3), (37), (39): Xaa is C or S
  MOD_RES (17), (18), (19), (20), (21): Xaa is A or G
  MOD_RES (22), (23), (24), (25): Xaa is A or G or is absent
PXXVPEKMSSLSILFFXXXXXXXXXLKVYPNMTVESXAXR

SEQ ID NO: 45632 - protein, 38 aa, Artificial Sequence
  GFR-binding peptide
  MOD_RES (35), (37): Xaa is C or S
  MOD_RES (14), (15), (16), (17), (18): Xaa is A or G
  MOD_RES (19), (20), (21), (22): Xaa is A or G or is absent
SRVHHSSLSVLFFXXXXXXXXXLKVYPRLEEHLEXAXA

SEQ ID NO: 45633 - protein, 36 aa, Artificial Sequence
  GFR-binding peptide
  MOD_RES (1), (2), (36): Xaa is C or S
  MOD_RES (16), (17), (18), (19), (20): Xaa is A or G
  MOD_RES (21), (22), (23), (24): Xaa is A or G or is absent
XXAPTQLSSLSVLFFXXXXXXXXXLKVYPNMVVRAX

SEQ ID NO: 45634 - protein, 42 aa, Artificial Sequence
  GFR-binding peptide
  MOD_RES (6), (7), (41): Xaa is C or S
  MOD_RES (21), (22), (23), (24), (25): Xaa is A or G
  MOD_RES (26), (27), (28), (29): Xaa is A or G or is absent
KASKAXXVPTKLSSLSILFFXXXXXXXXXLKVYPGMAVSEXG

SEQ ID NO: 45635 - protein, 33 aa, Artificial Sequence
  GFR-binding peptide
VPTEESSLSMLFFRIKPHQGQHLKVYPFLQHNK

SEQ ID NO: 45636 - protein, 36 aa, Artificial Sequence
  GFR-binding peptide
  MOD_RES (2), (3): Xaa is C or S
  MOD_RES (17), (18), (19), (20), (21): Xaa is A or G
  MOD_RES (22), (23), (24), (25): Xaa is A or G or is absent
PXXAPTKLSSLSVLFFXXXXXXXXXLKVYPNMVVRS

SEQ ID NO: 45637 - protein, 35 aa, Artificial Sequence
  GFR-binding peptide
  MOD_RES (2), (3), (35): Xaa is C or S
PXXAPTKLSSLSVLFFDDSSNVILKVYPNMVVRSX

SEQ ID NO: 45638 - protein, 38 aa, Artificial Sequence
  GFR-binding peptide
  MOD_RES (4), (4): Xaa is C or S
  MOD_RES (20), (21), (22), (23), (24): Xaa is A or G
  MOD_RES (25), (26), (27), (28): Xaa is A or G or is absent
SVKXQPSRVHHSSLSVLFFXXXXXXXXXLKVYPRLEEH

SEQ ID NO: 45639 - protein, 42 aa, Artificial Sequence
  GFR-binding peptide
  MOD_RES (6), (7), (39), (41): Xaa is C or S
TVPKPXXAPTQLSSLSVLFFDDSSNVILKVYPNMVVRAXGXH

SEQ ID NO: 45640 - protein, 42 aa, Artificial Sequence
  GFR-binding peptide
  MOD_RES (5), (6), (40), (42): Xaa is C or S
  MOD_RES (20), (21), (22), (23), (24): Xaa is A or G
  MOD_RES (25), (26), (27), (28): Xaa is A or G or is absent
ASKAXXVPTKLSSLSILFFXXXXXXXXXLKVYPGMAVSEXGX

SEQ ID NO: 45641 - protein, 39 aa, Artificial Sequence
  GFR-binding peptide
  MOD_RES (7), (7): Xaa is C or S
  MOD_RES (21), (22), (23), (24), (25): Xaa is A or G
  MOD_RES (26), (27), (28), (29): Xaa is A or G or is absent
NDEGLEXVPTEESSLSMLFFXXXXXXXXXLKVYPFLQHN

SEQ ID NO: 45642 - protein, 39 aa, Artificial Sequence
  GFR-binding peptide
  MOD_RES (6), (7), (38): Xaa is C or S
ASASPXXVPQDLSSLSILFFVGRTPKVLKVYPMVVKSXK

SEQ ID NO: 45643 - protein, 41 aa, Artificial Sequence
  GFR-binding peptide
  MOD_RES (6), (7), (41): Xaa is C or S
  MOD_RES (21), (22), (23), (24), (25): Xaa is A or G
  MOD_RES (26), (27), (28), (29): Xaa is A or G or is absent
AAPASXXVPARLSSLSILFFXXXXXXXXXLKVYPDMVVEAX

SEQ ID NO: 45644 - protein, 36 aa, Artificial Sequence
  GFR-binding peptide
  MOD_RES (3), (4), (35): Xaa is C or S
SPXXVPQDLSSLSILFFVGRTPKVLKVYPMVVKSXK

SEQ ID NO: 45645 - protein, 42 aa, Artificial Sequence
  GFR-binding peptide
  MOD_RES (4), (5), (39), (41): Xaa is C or S
  MOD_RES (19), (20), (21), (22), (23): Xaa is A or G
  MOD_RES (24), (25), (26), (27): Xaa is A or G or is absent
SKAXXVPTKLSSLSILFFXXXXXXXXXLKVYPGMAVSEXGXR

SEQ ID NO: 45646 - protein, 34 aa, Artificial Sequence
  GFR-binding peptide
  MOD_RES (32), (34): Xaa is C or S
APTQLSSLSVLFFDDSSNVILKVYPNMVVRAXGX

SEQ ID NO: 45647 - protein, 34 aa, Artificial Sequence
  GFR-binding peptide
  MOD_RES (1), (2): Xaa is C or S
  MOD_RES (16), (17), (18), (19), (20): Xaa is A or G
  MOD_RES (21), (22), (23), (24): Xaa is A or G or is absent
XXAPVKTSSLSMLFFXXXXXXXXXLKVYPMIVEE

SEQ ID NO: 45648 - protein, 39 aa, Artificial Sequence
  GFR-binding peptide
  MOD_RES (3), (37), (39): Xaa is C or S
LEXVPTEESSLSMLFFRIKPHQGQHLKVYPFLQHNKXEX

SEQ ID NO: 45649 - protein, 36 aa, Artificial Sequence
  GFR-binding peptide
  MOD_RES (2), (2): Xaa is C or S
KXQPSRVHHSSLSVLFFEYVRKKPKLLKVYPRLEEH

SEQ ID NO: 45650 - protein, 36 aa, Artificial Sequence
  GFR-binding peptide
  MOD_RES (2), (3), (34), (36): Xaa is C or S
PXXVPQDLSSLSILFFVGRTPKVLKVYPMVVKSXKX

SEQ ID NO: 45651 - protein, 38 aa, Artificial Sequence
  GFR-binding peptide
  MOD_RES (1), (35), (37): Xaa is C or S
  MOD_RES (15), (16), (17), (18), (19): Xaa is A or G
  MOD_RES (20), (21), (22), (23): Xaa is A or G or is absent
XAPTKLSSLSVLFFXXXXXXXXXLKVYPNMVVKAXGXH

SEQ ID NO: 45652 - protein, 39 aa, Artificial Sequence
  GFR-binding peptide
  MOD_RES (6), (7): Xaa is C or S
  MOD_RES (21), (22), (23), (24), (25): Xaa is A or G
  MOD_RES (26), (27), (28), (29): Xaa is A or G or is absent
AAPASXXVPARLSSLSILFFXXXXXXXXXLKVYPDMVVE

SEQ ID NO: 45653 - protein, 39 aa, Artificial Sequence
  GFR-binding peptide
  MOD_RES (4), (5), (38): Xaa is C or S
  MOD_RES (19), (20), (21), (22), (23): Xaa is A or G
  MOD_RES (24), (25), (26), (27): Xaa is A or G or is absent
PSTXXAPVKTSSLSMLFFXXXXXXXXXLKVYPMIVEEXG

SEQ ID NO: 45654 - protein, 40 aa, Artificial Sequence
  GFR-binding peptide
  MOD_RES (4), (5), (37), (39): Xaa is C or S
PASXXVPARLSSLSILFFDAANNVVLKVYPDMVVEAXGXR

SEQ ID NO: 45655 - protein, 40 aa, Artificial Sequence
  GFR-binding peptide
  MOD_RES (6), (7), (39): Xaa is C or S
KASKAXXVPTKLSSLSILFFDKGVVTYLKVYPGMAVSEXG

SEQ ID NO: 45656 - protein, 32 aa, Artificial Sequence
  GFR-binding peptide
  MOD_RES (14), (15), (16), (17), (18): Xaa is A or G
  MOD_RES (19), (20), (21), (22): Xaa is A or G or is absent
VPQALSSLSILFFXXXXXXXXXLKVYPMIVRS

SEQ ID NO: 45657 - protein, 42 aa, Artificial Sequence
  GFR-binding peptide
  MOD_RES (6), (7), (41): Xaa is C or S
  MOD_RES (21), (22), (23), (24), (25): Xaa is A or G
  MOD_RES (26), (27), (28), (29): Xaa is A or G or is absent
YVPKPXXAPTKLSSLSVLFFXXXXXXXXXLKVYPNMVVRSXG

SEQ ID NO: 45658 - protein, 36 aa, Artificial Sequence
  GFR-binding peptide
  MOD_RES (3), (4): Xaa is C or S
KAXXVPTKLSSLSVLFFDDMGVPTLKVYPEGMSVAE

SEQ ID NO: 45659 - protein, 36 aa, Artificial Sequence
  GFR-binding peptide
  MOD_RES (1), (33), (35): Xaa is C or S
XVPARLSSLSILFFDAANNVVLKVYPDMVVEAXGXR

SEQ ID NO: 45660 - protein, 37 aa, Artificial Sequence
  GFR-binding peptide
  MOD_RES (1), (2), (35), (37): Xaa is C or S
  MOD_RES (16), (17), (18), (19), (20): Xaa is A or G
  MOD_RES (21), (22), (23), (24): Xaa is A or G or is absent
XXAPVKTSSLSMLFFXXXXXXXXXLKVYPMIVEEXGX

SEQ ID NO: 45661 - protein, 34 aa, Artificial Sequence
  GFR-binding peptide
  MOD_RES (1), (2), (34): Xaa is C or S
XXAPTKLSSLSVLFFDSSNNVILKVYPNMVVKAX

SEQ ID NO: 45662 - protein, 36 aa, Artificial Sequence
  GFR-binding peptide
  MOD_RES (1), (36): Xaa is C or S
  MOD_RES (15), (16), (17), (18), (19): Xaa is A or G
  MOD_RES (20), (21), (22), (23): Xaa is A or G or is absent
XVPTKLSSLSVLFFXXXXXXXXXLKVYPEGMSVAEX

SEQ ID NO: 45663 - protein, 41 aa, Artificial Sequence
  GFR-binding peptide
  MOD_RES (3), (4), (38), (40): Xaa is C or S
  MOD_RES (18), (19), (20), (21), (22): Xaa is A or G
  MOD_RES (23), (24), (25), (26): Xaa is A or G or is absent
EPXXVPEKMSSLSILFFXXXXXXXXXLKVYPNMTVESXAXR

SEQ ID NO: 45664 - protein, 35 aa, Artificial Sequence
  GFR-binding peptide
  MOD_RES (3), (3): Xaa is C or S
  MOD_RES (17), (18), (19), (20), (21): Xaa is A or G
  MOD_RES (22), (23), (24), (25): Xaa is A or G or is absent
PTXAPTKLSSLSVLFFXXXXXXXXXLKVYPNMVVR

SEQ ID NO: 45665 - protein, 37 aa, Artificial Sequence
  GFR-binding peptide
  MOD_RES (2), (36): Xaa is C or S
EXVPTEESSLSMLFFRIKPHQGQHLKVYPFLQHNKXE

SEQ ID NO: 45666 - protein, 41 aa, Artificial Sequence
  GFR-binding peptide
  MOD_RES (5), (6), (40): Xaa is C or S
  MOD_RES (20), (21), (22), (23), (24): Xaa is A or G
  MOD_RES (25), (26), (27), (28): Xaa is A or G or is absent
IPKAXXVPTELSSLSMLFFXXXXXXXXXLKVYPEMVVEGXG

SEQ ID NO: 45667 - protein, 40 aa, Artificial Sequence
  GFR-binding peptide
  MOD_RES (1), (38), (40): Xaa is C or S
  MOD_RES (17), (18), (19), (20), (21): Xaa is A or G
  MOD_RES (22), (23), (24), (25): Xaa is A or G or is absent
XQPSRVHHSSLSVLFFXXXXXXXXXLKVYPRLEEHLEXAX

SEQ ID NO: 45668 - protein, 35 aa, Artificial Sequence
  GFR-binding peptide
  MOD_RES (1), (34): Xaa is C or S
  MOD_RES (15), (16), (17), (18), (19): Xaa is A or G
  MOD_RES (20), (21), (22), (23): Xaa is A or G or is absent
XVPQALSSLSILFFXXXXXXXXXLKVYPMIVRSXK

SEQ ID NO: 45669 - protein, 35 aa, Artificial Sequence
  GFR-binding peptide
  MOD_RES (34), (34): Xaa is C or S
VPTEESSLSMLFFRIKPHQGQHLKVYPFLQHNKXE

SEQ ID NO: 45670 - protein, 34 aa, Artificial Sequence
  GFR-binding peptide
  MOD_RES (3), (4): Xaa is C or S
ASXXVPARLSSLSILFFDAANNVVLKVYPDMVVE

SEQ ID NO: 45671 - protein, 37 aa, Artificial Sequence
  GFR-binding peptide
  MOD_RES (34), (36): Xaa is C or S
  MOD_RES (14), (15), (16), (17), (18): Xaa is A or G
  MOD_RES (19), (20), (21), (22): Xaa is A or G or is absent
TPTKMSSLSMLFFXXXXXXXXXLKVYPGMVVDRXGXS

SEQ ID NO: 45672 - protein, 40 aa, Artificial Sequence
  GFR-binding peptide
  MOD_RES (37), (39): Xaa is C or S
QPSRVHHSSLSVLFFEYVRKKPKLLKVYPRLEEHLEXAXA

SEQ ID NO: 45673 - protein, 36 aa, Artificial Sequence
  GFR-binding peptide
  MOD_RES (3), (4), (35): Xaa is C or S
SPXXVSQDLSSLSILFFIGKTPKILKVYPMIVKSXK

SEQ ID NO: 45674 - protein, 42 aa, Artificial Sequence
  GFR-binding peptide
  MOD_RES (5), (6), (40), (42): Xaa is C or S
  MOD_RES (20), (21), (22), (23), (24): Xaa is A or G
  MOD_RES (25), (26), (27), (28): Xaa is A or G or is absent
VPKPXXAPTKLSSLSVLFFXXXXXXXXXLKVYPNMVVRSXGX

SEQ ID NO: 45675 - protein, 39 aa, Artificial Sequence
  GFR-binding peptide
  MOD_RES (1), (2), (36), (38): Xaa is C or S
  MOD_RES (16), (17), (18), (19), (20): Xaa is A or G
  MOD_RES (21), (22), (23), (24): Xaa is A or G or is absent
XXVPTELSSLSMLFFXXXXXXXXXLKVYPEMVVEGXGXR

SEQ ID NO: 45676 - protein, 40 aa, Artificial Sequence
  GFR-binding peptide
  MOD_RES (2), (3), (37), (39): Xaa is C or S
  MOD_RES (17), (18), (19), (20), (21): Xaa is A or G
  MOD_RES (22), (23), (24), (25): Xaa is A or G or is absent
SXXVPARLSSLSILFFXXXXXXXXXLKVYPDMVVEAXGXR

SEQ ID NO: 45677 - protein, 34 aa, Artificial Sequence
  GFR-binding peptide
  MOD_RES (1), (32), (34): Xaa is C or S
XVSQDLSSLSILFFIGKTPKILKVYPMIVKSXKX

SEQ ID NO: 45678 - protein, 39 aa, Artificial Sequence
  GFR-binding peptide
  MOD_RES (7), (7): Xaa is C or S
  MOD_RES (21), (22), (23), (24), (25): Xaa is A or G
  MOD_RES (26), (27), (28), (29): Xaa is A or G or is absent
HVTKPTXAPTKLSSLSVLFFXXXXXXXXXLKVYPNMVVR

SEQ ID NO: 45679 - protein, 45 aa, Artificial Sequence
  GFR-binding peptide
  MOD_RES (6), (7), (42), (44): Xaa is C or S
  MOD_RES (21), (22), (23), (24), (25): Xaa is A or G
  MOD_RES (26), (27), (28), (29): Xaa is A or G or is absent
KVGKAXXVPTKLSSLSVLFFXXXXXXXXXLKVYPEGMSVAEXGXR

SEQ ID NO: 45680 - protein, 37 aa, Artificial Sequence
  GFR-binding peptide
  MOD_RES (6), (7): Xaa is C or S
ASASPXXVPQDLSSLSILFFVGRTPKVLKVYPMVVKS

SEQ ID NO: 45681 - protein, 35 aa, Artificial Sequence
  GFR-binding peptide
  MOD_RES (2), (3), (35): Xaa is C or S
AXXAPTKLSSLSVLFFDSSNNVILKVYPNMVVKAX

SEQ ID NO: 45682 - protein, 39 aa, Artificial Sequence
  GFR-binding peptide
  MOD_RES (5), (6): Xaa is C or S
  MOD_RES (20), (21), (22), (23), (24): Xaa is A or G
  MOD_RES (25), (26), (27), (28): Xaa is A or G or is absent
TPPTXXVPTRLSSLSILFFXXXXXXXXXLKVYPDMVVES

SEQ ID NO: 45683 - protein, 35 aa, Artificial Sequence
  GFR-binding peptide
  MOD_RES (32), (34): Xaa is C or S
VPEKMSSLSILFFDENKNVVLKVYPNMTVESXAXR

SEQ ID NO: 45684 - protein, 37 aa, Artificial Sequence
  GFR-binding peptide
  MOD_RES (5), (5): Xaa is C or S
  MOD_RES (19), (20), (21), (22), (23): Xaa is A or G
  MOD_RES (24), (25), (26), (27): Xaa is A or G or is absent
EGLEXVPTEESSLSMLFFXXXXXXXXXLKVYPFLQHN

SEQ ID NO: 45685 - protein, 38 aa, Artificial Sequence
  GFR-binding peptide
  MOD_RES (2), (3), (35), (37): Xaa is C or S
PXXTPTKMSSLSMLFFNDKQQIILKVYPGMVVDRXGXS

SEQ ID NO: 45686 - protein, 38 aa, Artificial Sequence
  GFR-binding peptide
  MOD_RES (2), (3), (36), (38): Xaa is C or S
  MOD_RES (17), (18), (19), (20), (21): Xaa is A or G
  MOD_RES (22), (23), (24), (25): Xaa is A or G or is absent
TXXAPVKTSSLSMLFFXXXXXXXXXLKVYPMIVEEXGX

SEQ ID NO: 45687 - protein, 32 aa, Artificial Sequence
  GFR-binding peptide
  MOD_RES (1), (1): Xaa is C or S
XTPTKMSSLSMLFFNDKQQIILKVYPGMVVDR

SEQ ID NO: 45688 - protein, 39 aa, Artificial Sequence
  GFR-binding peptide
  MOD_RES (4), (38): Xaa is C or S
  MOD_RES (18), (19), (20), (21), (22): Xaa is A or G
  MOD_RES (23), (24), (25), (26): Xaa is A or G or is absent
GLEXVPTEESSLSMLFFXXXXXXXXXLKVYPFLQHNKXE

SEQ ID NO: 45689 - protein, 36 aa, Artificial Sequence
  GFR-binding peptide
  MOD_RES (2), (3), (36): Xaa is C or S
  MOD_RES (17), (18), (19), (20), (21): Xaa is A or G
  MOD_RES (22), (23), (24), (25): Xaa is A or G or is absent
TXXAPVKTSSLSMLFFXXXXXXXXXLKVYPMIVEEX

SEQ ID NO: 45690 - protein, 30 aa, Artificial Sequence; identical to SEQ ID NO: 665
  GFR-binding peptide

SEQ ID NO: 45691 - protein, 33 aa, Artificial Sequence
  GFR-binding peptide
  MOD_RES (2), (3): Xaa is C or S
PXXVSQDLSSLSILFFIGKTPKILKVYPMIVKS

SEQ ID NO: 45692 - protein, 37 aa, Artificial Sequence
  GFR-binding peptide
  MOD_RES (6), (7): Xaa is C or S
GIPEPXXVPEKMSSLSILFFDENKNVVLKVYPNMTVE

SEQ ID NO: 45693 - protein, 42 aa, Artificial Sequence
  GFR-binding peptide
  MOD_RES (4), (5), (40), (42): Xaa is C or S
  MOD_RES (19), (20), (21), (22), (23): Xaa is A or G
  MOD_RES (24), (25), (26), (27): Xaa is A or G or is absent
GKAXXVPTKLSSLSVLFFXXXXXXXXXLKVYPEGMSVAEXGX

SEQ ID NO: 45694 - protein, 36 aa, Artificial Sequence
  GFR-binding peptide
  MOD_RES (3), (4): Xaa is C or S
  MOD_RES (18), (19), (20), (21), (22): Xaa is A or G
  MOD_RES (23), (24), (25), (26): Xaa is A or G or is absent
EPXXVPEKMSSLSILFFXXXXXXXXXLKVYPNMTVE

SEQ ID NO: 45695 - protein, 40 aa, Artificial Sequence
  GFR-binding peptide
  MOD_RES (3), (4), (37), (39): Xaa is C or S
KAXXVPTKLSSLSVLFFDDMGVPTLKVYPEGMSVAEXGXR

SEQ ID NO: 45696 - protein, 36 aa, Artificial Sequence
  GFR-binding peptide
  MOD_RES (2), (34), (36): Xaa is C or S
TXAPTKLSSLSVLFFDDSSNVILKVYPNMVVRSXGX

SEQ ID NO: 45697 - protein, 42 aa, Artificial Sequence
  GFR-binding peptide
  MOD_RES (6), (7), (39), (41): Xaa is C or S
GIPEPXXVPEKMSSLSILFFDENKNVVLKVYPNMTVESXAXR

SEQ ID NO: 45698 - protein, 37 aa, Artificial Sequence
  GFR-binding peptide
  MOD_RES (3), (4): Xaa is C or S
  MOD_RES (18), (19), (20), (21), (22): Xaa is A or G
  MOD_RES (23), (24), (25), (26): Xaa is A or G or is absent
KAXXVPTELSSLSMLFFXXXXXXXXXLKVYPEMVVEG

SEQ ID NO: 45699 - protein, 37 aa, Artificial Sequence
  GFR-binding peptide
  MOD_RES (6), (7): Xaa is C or S
AAPASXXVPARLSSLSILFFDAANNVVLKVYPDMVVE

SEQ ID NO: 45700 - protein, 35 aa, Artificial Sequence
  GFR-binding peptide
  MOD_RES (1), (2): Xaa is C or S
  MOD_RES (16), (17), (18), (19), (20): Xaa is A or G
  MOD_RES (21), (22), (23), (24): Xaa is A or G or is absent
XXVPTRLSSLSILFFXXXXXXXXXLKVYPDMVVES

SEQ ID NO: 45701 - protein, 36 aa, Artificial Sequence
  GFR-binding peptide
  MOD_RES (3), (4): Xaa is C or S
  MOD_RES (18), (19), (20), (21), (22): Xaa is A or G
  MOD_RES (23), (24), (25), (26): Xaa is A or G or is absent
KAXXAPTKLSSLSVLFFXXXXXXXXXLKVYPNMVVK

SEQ ID NO: 45702 - protein, 37 aa, Artificial Sequence
  GFR-binding peptide
  MOD_RES (34), (36): Xaa is C or S
  MOD_RES (14), (15), (16), (17), (18): Xaa is A or G
  MOD_RES (19), (20), (21), (22): Xaa is A or G or is absent
VPTKLSSLSILFFXXXXXXXXXLKVYPGMAVSEXGXR

SEQ ID NO: 45703 - protein, 38 aa, Artificial Sequence
  GFR-binding peptide
  MOD_RES (6), (7), (38): Xaa is C or S
ASASPXXVPQDLSSLSILFFVGRTPKVLKVYPMVVKSX

SEQ ID NO: 45704 - protein, 41 aa, Artificial Sequence
  GFR-binding peptide
  MOD_RES (5), (39), (41): Xaa is C or S
EGLEXVPTEESSLSMLFFRIKPHQGQHLKVYPFLQHNKXEX

SEQ ID NO: 45705 - protein, 37 aa, Artificial Sequence
  GFR-binding peptide
  MOD_RES (1), (35), (37): Xaa is C or S
  MOD_RES (15), (16), (17), (18), (19): Xaa is A or G
  MOD_RES (20), (21), (22), (23): Xaa is A or G or is absent
XVPTKLSSLSILFFXXXXXXXXXLKVYPGMAVSEXGX

SEQ ID NO: 45706 - protein, 39 aa, Artificial Sequence
  GFR-binding peptide
  MOD_RES (3), (37), (39): Xaa is C or S
  MOD_RES (17), (18), (19), (20), (21): Xaa is A or G
  MOD_RES (22), (23), (24), (25): Xaa is A or G or is absent
PTXAPTKLSSLSVLFFXXXXXXXXXLKVYPNMVVRSXGX

SEQ ID NO: 45707 - protein, 37 aa, Artificial Sequence
  GFR-binding peptide
  MOD_RES (3), (4): Xaa is C or S
  MOD_RES (18), (19), (20), (21), (22): Xaa is A or G
  MOD_RES (23), (24), (25), (26): Xaa is A or G or is absent
GPXXTPTKMSSLSMLFFXXXXXXXXXLKVYPGMVVDR

SEQ ID NO: 45708 - protein, 41 aa, Artificial Sequence
  GFR-binding peptide
  MOD_RES (6), (38), (40): Xaa is C or S
VTKPTXAPTKLSSLSVLFFDDSSNVILKVYPNMVVRSXGXH

SEQ ID NO: 45709 - protein, 39 aa, Artificial Sequence
  GFR-binding peptide
  MOD_RES (5), (6), (38): Xaa is C or S
VPKPXXAPTKLSSLSVLFFDDSSNVILKVYPNMVVRSXG

SEQ ID NO: 45710 - protein, 33 aa, Artificial Sequence
  GFR-binding peptide
  MOD_RES (1), (33): Xaa is C or S
XVPARLSSLSILFFDAANNVVLKVYPDMVVEAX

SEQ ID NO: 45711 - protein, 37 aa, Artificial Sequence
  GFR-binding peptide
  MOD_RES (34), (36): Xaa is C or S
  MOD_RES (14), (15), (16), (17), (18): Xaa is A or G
  MOD_RES (19), (20), (21), (22): Xaa is A or G or is absent
APTKLSSLSVLFFXXXXXXXXXLKVYPNMVVKAXGXH

SEQ ID NO: 45712 - protein, 40 aa, Artificial Sequence
  GFR-binding peptide
  MOD_RES (5), (6), (37), (39): Xaa is C or S
SASPXXVSQDLSSLSILFFIGKTPKILKVYPMIVKSXKXS

SEQ ID NO: 45713 - protein, 36 aa, Artificial Sequence
  GFR-binding peptide
  MOD_RES (2), (3), (36): Xaa is C or S
AXXVPTKLSSLSVLFFDDMGVPTLKVYPEGMSVAEX

SEQ ID NO: 45714 - protein, 38 aa, Artificial Sequence
  GFR-binding peptide
  MOD_RES (5), (5): Xaa is C or S
EGLEXVPTEESSLSMLFFRIKPHQGQHLKVYPFLQHNK

SEQ ID NO: 45715 - protein, 40 aa, Artificial Sequence
  GFR-binding peptide
  MOD_RES (6), (7): Xaa is C or S
  MOD_RES (21), (22), (23), (24), (25): Xaa is A or G
  MOD_RES (26), (27), (28), (29): Xaa is A or G or is absent
TVPKPXXAPTQLSSLSVLFFXXXXXXXXXLKVYPNMVVRA

SEQ ID NO: 45716 - protein, 37 aa, Artificial Sequence
  GFR-binding peptide
  MOD_RES (1), (35), (37): Xaa is C or S
  MOD_RES (15), (16), (17), (18), (19): Xaa is A or G
  MOD_RES (20), (21), (22), (23): Xaa is A or G or is absent
XVPTELSSLSMLFFXXXXXXXXXLKVYPEMVVEGXGX

SEQ ID NO: 45717 - protein, 35 aa, Artificial Sequence
  GFR-binding peptide
  MOD_RES (4), (5): Xaa is C or S
PKPXXAPTQLSSLSVLFFDDSSNVILKVYPNMVVR

SEQ ID NO: 45718 - protein, 32 aa, Artificial Sequence
  GFR-binding peptide
  MOD_RES (1), (2): Xaa is C or S
XXVPARLSSLSILFFDAANNVVLKVYPDMVVE

SEQ ID NO: 45719 - protein, 40 aa, Artificial Sequence
  GFR-binding peptide
  MOD_RES (4), (38), (40): Xaa is C or S
GLEXVPTEESSLSMLFFRIKPHQGQHLKVYPFLQHNKXEX

SEQ ID NO: 45720 - protein, 41 aa, Artificial Sequence
  GFR-binding peptide
  MOD_RES (4), (5), (38), (40): Xaa is C or S
  MOD_RES (19), (20), (21), (22), (23): Xaa is A or G
  MOD_RES (24), (25), (26), (27): Xaa is A or G or is absent
PSTXXAPVKTSSLSMLFFXXXXXXXXXLKVYPMIVEEXGXL

SEQ ID NO: 45721 - protein, 35 aa, Artificial Sequence
  GFR-binding peptide
  MOD_RES (33), (35): Xaa is C or S
VPTKLSSLSVLFFDDMGVPTLKVYPEGMSVAEXGX

SEQ ID NO: 45722 - protein, 39 aa, Artificial Sequence
  GFR-binding peptide
  MOD_RES (5), (6), (38): Xaa is C or S
TPPTXXVPTRLSSLSILFFDSANNVVLKVYPDMVVESXG

SEQ ID NO: 45723 - protein, 32 aa, Artificial Sequence
  GFR-binding peptide
  MOD_RES (14), (15), (16), (17), (18): Xaa is A or G
  MOD_RES (19), (20), (21), (22): Xaa is A or G or is absent
VPTEESSLSMLFFXXXXXXXXXLKVYPFLQHN

SEQ ID NO: 45724 - protein, 35 aa, Artificial Sequence
  GFR-binding peptide
  MOD_RES (33), (35): Xaa is C or S
  MOD_RES (14), (15), (16), (17), (18): Xaa is A or G
  MOD_RES (19), (20), (21), (22): Xaa is A or G or is absent
APVKTSSLSMLFFXXXXXXXXXLKVYPMIVEEXGX

SEQ ID NO: 45725 - protein, 39 aa, Artificial Sequence
  GFR-binding peptide
  MOD_RES (2), (3), (37), (39): Xaa is C or S
  MOD_RES (17), (18), (19), (20), (21): Xaa is A or G
  MOD_RES (22), (23), (24), (25): Xaa is A or G or is absent
AXXVPTKLSSLSILFFXXXXXXXXXLKVYPGMAVSEXGX

SEQ ID NO: 45726 - protein, 37 aa, Artificial Sequence
  GFR-binding peptide
  MOD_RES (4), (5): Xaa is C or S
  MOD_RES (19), (20), (21), (22), (23): Xaa is A or G
  MOD_RES (24), (25), (26), (27): Xaa is A or G or is absent
PKPXXAPTKLSSLSVLFFXXXXXXXXXLKVYPNMVVR

SEQ ID NO: 45727 - protein, 40 aa, Artificial Sequence
  GFR-binding peptide
  MOD_RES (2), (39): Xaa is C or S
KXQPSRVHHSSLSVLFFEYVRKKPKLLKVYPRLEEHLEXA

SEQ ID NO: 45728 - protein, 35 aa, Artificial Sequence
  GFR-binding peptide
  MOD_RES (1), (35): Xaa is C or S
XVPTEESSLSMLFFRIKPHQGQHLKVYPFLQHNKX

SEQ ID NO: 45729 - protein, 37 aa, Artificial Sequence
  GFR-binding peptide
  MOD_RES (4), (5): Xaa is C or S
  MOD_RES (19), (20), (21), (22), (23): Xaa is A or G
  MOD_RES (24), (25), (26), (27): Xaa is A or G or is absent
PSTXXAPVKTSSLSMLFFXXXXXXXXXLKVYPMIVEE

SEQ ID NO: 45730 - protein, 37 aa, Artificial Sequence
  GFR-binding peptide
  MOD_RES (1), (2), (34), (36): Xaa is C or S
XXVPEKMSSLSILFFDENKNVVLKVYPNMTVESXAXR

SEQ ID NO: 45731 - protein, 37 aa, Artificial Sequence
  GFR-binding peptide
  MOD_RES (1), (2), (34), (36): Xaa is C or S
XXAPTKLSSLSVLFFDDSSNVILKVYPNMVVRSXGXH

SEQ ID NO: 45732 - protein, 39 aa, Artificial Sequence
  GFR-binding peptide
  MOD_RES (3), (4), (38): Xaa is C or S
  MOD_RES (18), (19), (20), (21), (22): Xaa is A or G
  MOD_RES (23), (24), (25), (26): Xaa is A or G or is absent
KPXXAPTKLSSLSVLFFXXXXXXXXXLKVYPNMVVRSXG

SEQ ID NO: 45733 - protein, 36 aa, Artificial Sequence
  GFR-binding peptide
  MOD_RES (1), (35): Xaa is C or S
  MOD_RES (15), (16), (17), (18), (19): Xaa is A or G
  MOD_RES (20), (21), (22), (23): Xaa is A or G or is absent
XAPTQLSSLSVLFFXXXXXXXXXLKVYPNMVVRAXG

SEQ ID NO: 45734 - protein, 44 aa, Artificial Sequence
  GFR-binding peptide
  MOD_RES (5), (6), (41), (43): Xaa is C or S
  MOD_RES (20), (21), (22), (23), (24): Xaa is A or G
  MOD_RES (25), (26), (27), (28): Xaa is A or G or is absent
VGKAXXVPTKLSSLSVLFFXXXXXXXXXLKVYPEGMSVAEXGXR

SEQ ID NO: 45735 - protein, 41 aa, Artificial Sequence
  GFR-binding peptide
  MOD_RES (6), (7), (39), (41): Xaa is C or S
AVPKAXXAPTKLSSLSVLFFDSSNNVILKVYPNMVVKAXGX

SEQ ID NO: 45736 - protein, 41 aa, Artificial Sequence
  GFR-binding peptide
  MOD_RES (5), (6), (40): Xaa is C or S
  MOD_RES (20), (21), (22), (23), (24): Xaa is A or G
  MOD_RES (25), (26), (27), (28): Xaa is A or G or is absent
ASKAXXVPTKLSSLSILFFXXXXXXXXXLKVYPGMAVSEXG

SEQ ID NO: 45737 - protein, 41 aa, Artificial Sequence
  GFR-binding peptide
  MOD_RES (4), (5), (39), (41): Xaa is C or S
  MOD_RES (19), (20), (21), (22), (23): Xaa is A or G
  MOD_RES (24), (25), (26), (27): Xaa is A or G or is absent
AGPXXTPTKMSSLSMLFFXXXXXXXXXLKVYPGMVVDRXGX

SEQ ID NO: 45738 - protein, 36 aa, Artificial Sequence
  GFR-binding peptide
  MOD_RES (3), (4): Xaa is C or S
  MOD_RES (18), (19), (20), (21), (22): Xaa is A or G
  MOD_RES (23), (24), (25), (26): Xaa is A or G or is absent
APXXVPQALSSLSILFFXXXXXXXXXLKVYPMIVRS

SEQ ID NO: 45739 - protein, 38 aa, Artificial Sequence
  GFR-binding peptide
  MOD_RES (6), (7): Xaa is C or S
AAPASXXVPARLSSLSILFFDAANNVVLKVYPDMVVEA

SEQ ID NO: 45740 - protein, 31 aa, Artificial Sequence
  GFR-binding peptide
  MOD_RES (1), (1): Xaa is C or S
XAPVKTSSLSMLFFDNGRVLLLKVYPMIVEE

SEQ ID NO: 45741 - protein, 34 aa, Artificial Sequence
  GFR-binding peptide
  MOD_RES (1), (2), (34): Xaa is C or S
XXTPTKMSSLSMLFFNDKQQIILKVYPGMVVDRX

SEQ ID NO: 45742 - protein, 33 aa, Artificial Sequence
  GFR-binding peptide
  MOD_RES (14), (15), (16), (17), (18): Xaa is A or G
  MOD_RES (19), (20), (21), (22): Xaa is A or G or is absent
TPTKMSSLSMLFFXXXXXXXXXLKVYPGMVVDR

SEQ ID NO: 45743 - protein, 40 aa, Artificial Sequence
  GFR-binding peptide
  MOD_RES (3), (4), (38), (40): Xaa is C or S
  MOD_RES (18), (19), (20), (21), (22): Xaa is A or G
  MOD_RES (23), (24), (25), (26): Xaa is A or G or is absent
ASXXVPARLSSLSILFFXXXXXXXXXLKVYPDMVVEAXGX

SEQ ID NO: 45744 - protein, 36 aa, Artificial Sequence
  GFR-binding peptide
  MOD_RES (34), (36): Xaa is C or S
  MOD_RES (14), (15), (16), (17), (18): Xaa is A or G
  MOD_RES (19), (20), (21), (22): Xaa is A or G or is absent
VPEKMSSLSILFFXXXXXXXXXLKVYPNMTVESXAX

SEQ ID NO: 45745 - protein, 34 aa, Artificial Sequence
  GFR-binding peptide
  MOD_RES (3), (3): Xaa is C or S
PTXAPTKLSSLSVLFFDDSSNVILKVYPNMVVRS

SEQ ID NO: 45746 - protein, 31 aa, Artificial Sequence
  GFR-binding peptide
VPTKLSSLSILFFDKGVVTYLKVYPGMAVSE

SEQ ID NO: 45747 - protein, 37 aa, Artificial Sequence
  GFR-binding peptide
  MOD_RES (1), (2), (35), (37): Xaa is C or S
  MOD_RES (16), (17), (18), (19), (20): Xaa is A or G
  MOD_RES (21), (22), (23), (24): Xaa is A or G or is absent
XXVPQALSSLSILFFXXXXXXXXXLKVYPMIVRSXKX

SEQ ID NO: 45748 - protein, 34 aa, Artificial Sequence
  GFR-binding peptide
  MOD_RES (1), (33): Xaa is C or S
XAPTQLSSLSVLFFDDSSNVILKVYPNMVVRAXG

SEQ ID NO: 45749 - protein, 32 aa, Artificial Sequence
  GFR-binding peptide
  MOD_RES (1), (2): Xaa is C or S
XXAPTKLSSLSVLFFDDSSNVILKVYPNMVVR

SEQ ID NO: 45750 - protein, 41 aa, Artificial Sequence
  GFR-binding peptide
  MOD_RES (4), (5), (39), (41): Xaa is C or S
  MOD_RES (19), (20), (21), (22), (23): Xaa is A or G
  MOD_RES (24), (25), (26), (27): Xaa is A or G or is absent
SKAXXVPTKLSSLSILFFXXXXXXXXXLKVYPGMAVSEXGX

SEQ ID NO: 45751 - protein, 37 aa, Artificial Sequence
  GFR-binding peptide
  MOD_RES (2), (3), (37): Xaa is C or S
  MOD_RES (17), (18), (19), (20), (21): Xaa is A or G
  MOD_RES (22), (23), (24), (25): Xaa is A or G or is absent
TXXVPTRLSSLSILFFXXXXXXXXXLKVYPDMVVESX

SEQ ID NO: 45752 - protein, 41 aa, Artificial Sequence
  GFR-binding peptide
  MOD_RES (5), (6), (38), (40): Xaa is C or S
SAGPXXTPTKMSSLSMLFFNDKQQIILKVYPGMVVDRXGXS

SEQ ID NO: 45753 - protein, 34 aa, Artificial Sequence
  GFR-binding peptide
  MOD_RES (1), (32), (34): Xaa is C or S
XAPVKTSSLSMLFFDNGRVLLLKVYPMIVEEXGX

SEQ ID NO: 45754 - protein, 34 aa, Artificial Sequence
  GFR-binding peptide
  MOD_RES (2), (3), (34): Xaa is C or S
PXXVSQDLSSLSILFFIGKTPKILKVYPMIVKSX

SEQ ID NO: 45755 - protein, 35 aa, Artificial Sequence
  GFR-binding peptide
  MOD_RES (3), (3): Xaa is C or S
  MOD_RES (17), (18), (19), (20), (21): Xaa is A or G
  MOD_RES (22), (23), (24), (25): Xaa is A or G or is absent
LEXVPTEESSLSMLFFXXXXXXXXXLKVYPFLQHN

SEQ ID NO: 45756 - protein, 34 aa, Artificial Sequence
  GFR-binding peptide
  MOD_RES (1), (33): Xaa is C or S
XAPTKLSSLSVLFFDSSNNVILKVYPNMVVKAXG

SEQ ID NO: 45757 - protein, 38 aa, Artificial Sequence
  GFR-binding peptide
  MOD_RES (3), (4), (35), (37): Xaa is C or S
SPXXVSQDLSSLSILFFIGKTPKILKVYPMIVKSXKXS

SEQ ID NO: 45758 - protein, 33 aa, Artificial Sequence
  GFR-binding peptide
  MOD_RES (1), (1): Xaa is C or S
  MOD_RES (15), (16), (17), (18), (19): Xaa is A or G
  MOD_RES (20), (21), (22), (23): Xaa is A or G or is absent
XVPTEESSLSMLFFXXXXXXXXXLKVYPFLQHN

SEQ ID NO: 45759 - protein, 40 aa, Artificial Sequence
  GFR-binding peptide
  MOD_RES (5), (6), (39): Xaa is C or S
  MOD_RES (20), (21), (22), (23), (24): Xaa is A or G
  MOD_RES (25), (26), (27), (28): Xaa is A or G or is absent
SAAPXXVPQALSSLSILFFXXXXXXXXXLKVYPMIVRSXK

SEQ ID NO: 45760 - protein, 38 aa, Artificial Sequence
  GFR-binding peptide
  MOD_RES (4), (5): Xaa is C or S
  MOD_RES (19), (20), (21), (22), (23): Xaa is A or G
  MOD_RES (24), (25), (26), (27): Xaa is A or G or is absent
PKAXXAPTKLSSLSVLFFXXXXXXXXXLKVYPNMVVKA

SEQ ID NO: 45761 - protein, 41 aa, Artificial Sequence
  GFR-binding peptide
  MOD_RES (4), (5), (38), (40): Xaa is C or S
GKAXXVPTKLSSLSVLFFDDMGVPTLKVYPEGMSVAEXGXR

SEQ ID NO: 45762 - protein, 43 aa, Artificial Sequence
  GFR-binding peptide
  MOD_RES (6), (40), (42): Xaa is C or S
  MOD_RES (20), (21), (22), (23), (24): Xaa is A or G
  MOD_RES (25), (26), (27), (28): Xaa is A or G or is absent
DEGLEXVPTEESSLSMLFFXXXXXXXXXLKVYPFLQHNKXEXR

SEQ ID NO: 45763 - protein, 36 aa, Artificial Sequence
  GFR-binding peptide
  MOD_RES (4), (5): Xaa is C or S
PKAXXAPTKLSSLSVLFFDSSNNVILKVYPNMVVKA

SEQ ID NO: 45764 - protein, 33 aa, Artificial Sequence
  GFR-binding peptide
  MOD_RES (14), (15), (16), (17), (18): Xaa is A or G
  MOD_RES (19), (20), (21), (22): Xaa is A or G or is absent
VPTRLSSLSILFFXXXXXXXXXLKVYPDMVVES

SEQ ID NO: 45765 - protein, 39 aa, Artificial Sequence
  GFR-binding peptide
  MOD_RES (1), (36), (38): Xaa is C or S
  MOD_RES (15), (16), (17), (18), (19): Xaa is A or G
  MOD_RES (20), (21), (22), (23): Xaa is A or G or is absent
XVPTKLSSLSVLFFXXXXXXXXXLKVYPEGMSVAEXGXR

SEQ ID NO: 45766 - protein, 40 aa, Artificial Sequence
  GFR-binding peptide
  MOD_RES (4), (5), (39): Xaa is C or S
  MOD_RES (19), (20), (21), (22), (23): Xaa is A or G
  MOD_RES (24), (25), (26), (27): Xaa is A or G or is absent
PEPXXVPEKMSSLSILFFXXXXXXXXXLKVYPNMTVESXA

SEQ ID NO: 45767 - protein, 38 aa, Artificial Sequence
  GFR-binding peptide
  MOD_RES (5), (6): Xaa is C or S
  MOD_RES (20), (21), (22), (23), (24): Xaa is A or G
  MOD_RES (25), (26), (27), (28): Xaa is A or G or is absent
ASKAXXVPTKLSSLSILFFXXXXXXXXXLKVYPGMAVS

SEQ ID NO: 45768 - protein, 36 aa, Artificial Sequence
  GFR-binding peptide
  MOD_RES (4), (5): Xaa is C or S
PKPXXAPTQLSSLSVLFFDDSSNVILKVYPNMVVRA

SEQ ID NO: 45769 - protein, 42 aa, Artificial Sequence
  GFR-binding peptide
  MOD_RES (5), (39), (41): Xaa is C or S
EGLEXVPTEESSLSMLFFRIKPHQGQHLKVYPFLQHNKXEXR

SEQ ID NO: 45770 - protein, 37 aa, Artificial Sequence
  GFR-binding peptide
  MOD_RES (2), (3), (36): Xaa is C or S
AXXVPTKLSSLSVLFFDDMGVPTLKVYPEGMSVAEXG

SEQ ID NO: 45771 - protein, 37 aa, Artificial Sequence
  GFR-binding peptide
  MOD_RES (4), (5), (36): Xaa is C or S
AAPXXVPQALSSLSILFFVGRKPKVLKVYPMIVRSXK

SEQ ID NO: 45772 - protein, 35 aa, Artificial Sequence
  GFR-binding peptide
  MOD_RES (1), (2): Xaa is C or S
  MOD_RES (16), (17), (18), (19), (20): Xaa is A or G
  MOD_RES (21), (22), (23), (24): Xaa is A or G or is absent
XXVPARLSSLSILFFXXXXXXXXXLKVYPDMVVEA

SEQ ID NO: 45773 - protein, 38 aa, Artificial Sequence
  GFR-binding peptide
  MOD_RES (5), (6), (38): Xaa is C or S
SAGPXXTPTKMSSLSMLFFNDKQQIILKVYPGMVVDRX

SEQ ID NO: 45774 - protein, 36 aa, Artificial Sequence
  GFR-binding peptide
  MOD_RES (2), (3): Xaa is C or S
  MOD_RES (17), (18), (19), (20), (21): Xaa is A or G
  MOD_RES (22), (23), (24), (25): Xaa is A or G or is absent
PXXVPEKMSSLSILFFXXXXXXXXXLKVYPNMTVES

SEQ ID NO: 45775 - protein, 38 aa, Artificial Sequence
  GFR-binding peptide
  MOD_RES (5), (6), (38): Xaa is C or S
VPKPXXAPTKLSSLSVLFFDDSSNVILKVYPNMVVRSX

SEQ ID NO: 45776 - protein, 37 aa, Artificial Sequence
  GFR-binding peptide
  MOD_RES (3), (4), (37): Xaa is C or S
  MOD_RES (18), (19), (20), (21), (22): Xaa is A or G
  MOD_RES (23), (24), (25), (26): Xaa is A or G or is absent
APXXVPQALSSLSILFFXXXXXXXXXLKVYPMIVRSX

SEQ ID NO: 45777 - protein, 38 aa, Artificial Sequence
  GFR-binding peptide
  MOD_RES (1), (2), (35), (37): Xaa is C or S
XXVPTKLSSLSVLFFDDMGVPTLKVYPEGMSVAEXGXR

SEQ ID NO: 45778 - protein, 41 aa, Artificial Sequence
  GFR-binding peptide
  MOD_RES (5), (6), (40): Xaa is C or S
  MOD_RES (20), (21), (22), (23), (24): Xaa is A or G
  MOD_RES (25), (26), (27), (28): Xaa is A or G or is absent
TPPTXXVPTRLSSLSILFFXXXXXXXXXLKVYPDMVVESXG

SEQ ID NO: 45779 - protein, 34 aa, Artificial Sequence
  GFR-binding peptide
  MOD_RES (1), (2), (33): Xaa is C or S
XXVPQALSSLSILFFVGRKPKVLKVYPMIVRSXK

SEQ ID NO: 45780 - protein, 39 aa, Artificial Sequence
  GFR-binding peptide
  MOD_RES (2), (3), (38): Xaa is C or S
  MOD_RES (17), (18), (19), (20), (21): Xaa is A or G
  MOD_RES (22), (23), (24), (25): Xaa is A or G or is absent
AXXVPTKLSSLSVLFFXXXXXXXXXLKVYPEGMSVAEXG

SEQ ID NO: 45781 - protein, 43 aa, Artificial Sequence
  GFR-binding peptide
  MOD_RES (3), (40), (42): Xaa is C or S
  MOD_RES (19), (20), (21), (22), (23): Xaa is A or G
  MOD_RES (24), (25), (26), (27): Xaa is A or G or is absent
VKXQPSRVHHSSLSVLFFXXXXXXXXXLKVYPRLEEHLEXAXA

SEQ ID NO: 45782 - protein, 36 aa, Artificial Sequence
  GFR-binding peptide
  MOD_RES (1), (1): Xaa is C or S
  MOD_RES (17), (18), (19), (20), (21): Xaa is A or G
  MOD_RES (22), (23), (24), (25): Xaa is A or G or is absent
XQPSRVHHSSLSVLFFXXXXXXXXXLKVYPRLEEHL

SEQ ID NO: 45783 - protein, 39 aa, Artificial Sequence
  GFR-binding peptide
  MOD_RES (4), (5), (39): Xaa is C or S
  MOD_RES (19), (20), (21), (22), (23): Xaa is A or G
  MOD_RES (24), (25), (26), (27): Xaa is A or G or is absent
PKAXXVPTELSSLSMLFFXXXXXXXXXLKVYPEMVVEGX

SEQ ID NO: 45784 - protein, 36 aa, Artificial Sequence
  GFR-binding peptide
  MOD_RES (3), (4): Xaa is C or S
  MOD_RES (18), (19), (20), (21), (22): Xaa is A or G
  MOD_RES (23), (24), (25), (26): Xaa is A or G or is absent
STXXAPVKTSSLSMLFFXXXXXXXXXLKVYPMIVEE

SEQ ID NO: 45785 - protein, 32 aa, Artificial Sequence
  GFR-binding peptide
  MOD_RES (1), (2): Xaa is C or S
XXAPTQLSSLSVLFFDDSSNVILKVYPNMVVR

SEQ ID NO: 45786 - protein, 38 aa, Artificial Sequence
  GFR-binding peptide
  MOD_RES (6), (6): Xaa is C or S
DEGLEXVPTEESSLSMLFFRIKPHQGQHLKVYPFLQHN

SEQ ID NO: 45787 - protein, 40 aa, Artificial Sequence
  GFR-binding peptide
  MOD_RES (3), (37), (39): Xaa is C or S
  MOD_RES (17), (18), (19), (20), (21): Xaa is A or G
  MOD_RES (22), (23), (24), (25): Xaa is A or G or is absent
PTXAPTKLSSLSVLFFXXXXXXXXXLKVYPNMVVRSXGXH

SEQ ID NO: 45788 - protein, 42 aa, Artificial Sequence
  GFR-binding peptide
  MOD_RES (4), (5), (39), (41): Xaa is C or S
  MOD_RES (19), (20), (21), (22), (23): Xaa is A or G
  MOD_RES (24), (25), (26), (27): Xaa is A or G or is absent
PKAXXAPTKLSSLSVLFFXXXXXXXXXLKVYPNMVVKAXGXH

SEQ ID NO: 45789 - protein, 35 aa, Artificial Sequence
  GFR-binding peptide
  MOD_RES (34), (34): Xaa is C or S
  MOD_RES (14), (15), (16), (17), (18): Xaa is A or G
  MOD_RES (19), (20), (21), (22): Xaa is A or G or is absent
APTKLSSLSVLFFXXXXXXXXXLKVYPNMVVRSXG

SEQ ID NO: 45790 - protein, 34 aa, Artificial Sequence
  GFR-binding peptide
  MOD_RES (33), (33): Xaa is C or S
  MOD_RES (14), (15), (16), (17), (18): Xaa is A or G
  MOD_RES (19), (20), (21), (22): Xaa is A or G or is absent
VPQALSSLSILFFXXXXXXXXXLKVYPMIVRSXK

SEQ ID NO: 45791 - protein, 39 aa, Artificial Sequence
  GFR-binding peptide
  MOD_RES (6), (7): Xaa is C or S
  MOD_RES (21), (22), (23), (24), (25): Xaa is A or G
  MOD_RES (26), (27), (28), (29): Xaa is A or G or is absent
HVPKPXXAPTKLSSLSVLFFXXXXXXXXXLKVYPNMVVR

SEQ ID NO: 45792 - protein, 34 aa, Artificial Sequence
  GFR-binding peptide
  MOD_RES (2), (3): Xaa is C or S
PXXAPTKLSSLSVLFFDDSSNVILKVYPNMVVRS

SEQ ID NO: 45793 - protein, 38 aa, Artificial Sequence
  GFR-binding peptide
  MOD_RES (3), (4), (36), (38): Xaa is C or S
ASXXVPARLSSLSILFFDAANNVVLKVYPDMVVEAXGX

SEQ ID NO: 45794 - protein, 36 aa, Artificial Sequence
  GFR-binding peptide
  MOD_RES (1), (2), (36): Xaa is C or S
  MOD_RES (16), (17), (18), (19), (20): Xaa is A or G
  MOD_RES (21), (22), (23), (24): Xaa is A or G or is absent
XXTPTKMSSLSMLFFXXXXXXXXXLKVYPGMVVDRX

SEQ ID NO: 45795 - protein, 41 aa, Artificial Sequence
  GFR-binding peptide
  MOD_RES (5), (6), (39), (41): Xaa is C or S
VGKAXXVPTKLSSLSVLFFDDMGVPTLKVYPEGMSVAEXGX

SEQ ID NO: 45796 - protein, 42 aa, Artificial Sequence
  GFR-binding peptide
  MOD_RES (5), (42): Xaa is C or S
  MOD_RES (21), (22), (23), (24), (25): Xaa is A or G
  MOD_RES (26), (27), (28), (29): Xaa is A or G or is absent
SSVKXQPSRVHHSSLSVLFFXXXXXXXXXLKVYPRLEEHLEX

SEQ ID NO: 45797 - protein, 39 aa, Artificial Sequence
  GFR-binding peptide
  MOD_RES (2), (3), (37), (39): Xaa is C or S
  MOD_RES (17), (18), (19), (20), (21): Xaa is A or G
  MOD_RES (22), (23), (24), (25): Xaa is A or G or is absent
AXXVPTELSSLSMLFFXXXXXXXXXLKVYPEMVVEGXGX

SEQ ID NO: 45798 - protein, 36 aa, Artificial Sequence
  GFR-binding peptide
  MOD_RES (1), (35): Xaa is C or S
  MOD_RES (15), (16), (17), (18), (19): Xaa is A or G
  MOD_RES (20), (21), (22), (23): Xaa is A or G or is absent
XVPTELSSLSMLFFXXXXXXXXXLKVYPEMVVEGXG

SEQ ID NO: 45799 - protein, 40 aa, Artificial Sequence
  GFR-binding peptide
  MOD_RES (6), (7): Xaa is C or S
  MOD_RES (21), (22), (23), (24), (25): Xaa is A or G
  MOD_RES (26), (27), (28), (29): Xaa is A or G or is absent
STPPTXXVPTRLSSLSILFFXXXXXXXXXLKVYPDMVVES

SEQ ID NO: 45800 - protein, 32 aa, Artificial Sequence
  GFR-binding peptide
  MOD_RES (31), (31): Xaa is C or S
APVKTSSLSMLFFDNGRVLLLKVYPMIVEEXG

SEQ ID NO: 45801 - protein, 37 aa, Artificial Sequence
  GFR-binding peptide
  MOD_RES (4), (5): Xaa is C or S
  MOD_RES (19), (20), (21), (22), (23): Xaa is A or G
  MOD_RES (24), (25), (26), (27): Xaa is A or G or is absent
PKAXXAPTKLSSLSVLFFXXXXXXXXXLKVYPNMVVK

SEQ ID NO: 45802 - protein, 38 aa, Artificial Sequence
  GFR-binding peptide
  MOD_RES (5), (6), (38): Xaa is C or S
IPEPXXVPEKMSSLSILFFDENKNVVLKVYPNMTVESX

SEQ ID NO: 45803 - protein, 38 aa, Artificial Sequence
  GFR-binding peptide
  MOD_RES (2), (3), (35), (37): Xaa is C or S
SXXVPARLSSLSILFFDAANNVVLKVYPDMVVEAXGXR

SEQ ID NO: 45804 - protein, 36 aa, Artificial Sequence
  GFR-binding peptide
  MOD_RES (1), (2), (35): Xaa is C or S
  MOD_RES (16), (17), (18), (19), (20): Xaa is A or G
  MOD_RES (21), (22), (23), (24): Xaa is A or G or is absent
XXVPQALSSLSILFFXXXXXXXXXLKVYPMIVRSXK

SEQ ID NO: 45805 - protein, 43 aa, Artificial Sequence
  GFR-binding peptide
  MOD_RES (6), (7), (41), (43): Xaa is C or S
  MOD_RES (21), (22), (23), (24), (25): Xaa is A or G
  MOD_RES (26), (27), (28), (29): Xaa is A or G or is absent
GSAGPXXTPTKMSSLSMLFFXXXXXXXXXLKVYPGMVVDRXGX

SEQ ID NO: 45806 - protein, 36 aa, Artificial Sequence
  GFR-binding peptide
  MOD_RES (1), (2), (33), (35): Xaa is C or S
XXAPVKTSSLSMLFFDNGRVLLLKVYPMIVEEXGXL

SEQ ID NO: 45807 - protein, 42 aa, Artificial Sequence
  GFR-binding peptide
  MOD_RES (4), (5), (39), (41): Xaa is C or S
  MOD_RES (19), (20), (21), (22), (23): Xaa is A or G
  MOD_RES (24), (25), (26), (27): Xaa is A or G or is absent
PASXXVPARLSSLSILFFXXXXXXXXXLKVYPDMVVEAXGXR

SEQ ID NO: 45808 - protein, 44 aa, Artificial Sequence
  GFR-binding peptide
  MOD_RES (4), (41), (43): Xaa is C or S
SVKXQPSRVHHSSLSVLFFEYVRKKPKLLKVYPRLEEHLEXAXA

SEQ ID NO: 45809 - protein, 37 aa, Artificial Sequence
  GFR-binding peptide
  MOD_RES (2), (2): Xaa is C or S
  MOD_RES (18), (19), (20), (21), (22): Xaa is A or G
  MOD_RES (23), (24), (25), (26): Xaa is A or G or is absent
KXQPSRVHHSSLSVLFFXXXXXXXXXLKVYPRLEEHL

SEQ ID NO: 45810 - protein, 40 aa, Artificial Sequence
  GFR-binding peptide
  MOD_RES (6), (7): Xaa is C or S
  MOD_RES (21), (22), (23), (24), (25): Xaa is A or G
  MOD_RES (26), (27), (28), (29): Xaa is A or G or is absent
GSAGPXXTPTKMSSLSMLFFXXXXXXXXXLKVYPGMVVDR

SEQ ID NO: 45811 - protein, 38 aa, Artificial Sequence
  GFR-binding peptide
  MOD_RES (2), (3), (37): Xaa is C or S
  MOD_RES (17), (18), (19), (20), (21): Xaa is A or G
  MOD_RES (22), (23), (24), (25): Xaa is A or G or is absent
AXXAPTKLSSLSVLFFXXXXXXXXXLKVYPNMVVKAXG

SEQ ID NO: 45812 - protein, 39 aa, Artificial Sequence
  GFR-binding peptide
  MOD_RES (5), (6), (38): Xaa is C or S
VPKAXXAPTKLSSLSVLFFDSSNNVILKVYPNMVVKAXG

SEQ ID NO: 45813 - protein, 39 aa, Artificial Sequence
  GFR-binding peptide
  MOD_RES (3), (4), (38): Xaa is C or S
  MOD_RES (18), (19), (20), (21), (22): Xaa is A or G
  MOD_RES (23), (24), (25), (26): Xaa is A or G or is absent
KAXXVPTELSSLSMLFFXXXXXXXXXLKVYPEMVVEGXG

SEQ ID NO: 45814 - protein, 39 aa, Artificial Sequence
  GFR-binding peptide
  MOD_RES (5), (6): Xaa is C or S
  MOD_RES (20), (21), (22), (23), (24): Xaa is A or G
  MOD_RES (25), (26), (27), (28): Xaa is A or G or is absent
VPKAXXAPTKLSSLSVLFFXXXXXXXXXLKVYPNMVVKA

SEQ ID NO: 45815 - protein, 38 aa, Artificial Sequence
  GFR-binding peptide
  MOD_RES (3), (35), (37): Xaa is C or S
PTXAPTKLSSLSVLFFDDSSNVILKVYPNMVVRSXGXH

SEQ ID NO: 45816 - protein, 34 aa, Artificial Sequence
  GFR-binding peptide
  MOD_RES (3), (4): Xaa is C or S
PTXXVPTRLSSLSILFFDSANNVVLKVYPDMVVE

SEQ ID NO: 45817 - protein, 42 aa, Artificial Sequence
  GFR-binding peptide
  MOD_RES (6), (7), (40), (42): Xaa is C or S
  MOD_RES (21), (22), (23), (24), (25): Xaa is A or G
  MOD_RES (26), (27), (28), (29): Xaa is A or G or is absent
ASASPXXVPQDLSSLSILFFXXXXXXXXXLKVYPMVVKSXKX

SEQ ID NO: 45818 - protein, 40 aa, Artificial Sequence
  GFR-binding peptide
  MOD_RES (5), (6), (40): Xaa is C or S
  MOD_RES (20), (21), (22), (23), (24): Xaa is A or G
  MOD_RES (25), (26), (27), (28): Xaa is A or G or is absent
VPKAXXAPTKLSSLSVLFFXXXXXXXXXLKVYPNMVVKAX

SEQ ID NO: 45819 - protein, 35 aa, Artificial Sequence
  GFR-binding peptide
  MOD_RES (2), (3), (35): Xaa is C or S
PXXVPEKMSSLSILFFDENKNVVLKVYPNMTVESX

SEQ ID NO: 45820 - protein, 41 aa, Artificial Sequence
  GFR-binding peptide
  MOD_RES (4), (38), (40): Xaa is C or S
GLEXVPTEESSLSMLFFRIKPHQGQHLKVYPFLQHNKXEXR

SEQ ID NO: 45821 - protein, 31 aa, Artificial Sequence
  GFR-binding peptide
APTQLSSLSVLFFDDSSNVILKVYPNMVVRA

SEQ ID NO: 45822 - protein, 36 aa, Artificial Sequence
  GFR-binding peptide
  MOD_RES (1), (34), (36): Xaa is C or S
  MOD_RES (15), (16), (17), (18), (19): Xaa is A or G
  MOD_RES (20), (21), (22), (23): Xaa is A or G or is absent
XVPQALSSLSILFFXXXXXXXXXLKVYPMIVRSXKX

SEQ ID NO: 45823 - protein, 38 aa, Artificial Sequence
  GFR-binding peptide
  MOD_RES (3), (3): Xaa is C or S
VKXQPSRVHHSSLSVLFFEYVRKKPKLLKVYPRLEEHL

SEQ ID NO: 45824 - protein, 35 aa, Artificial Sequence
  GFR-binding peptide
  MOD_RES (2), (2): Xaa is C or S
  MOD_RES (16), (17), (18), (19), (20): Xaa is A or G
  MOD_RES (21), (22), (23), (24): Xaa is A or G or is absent
EXVPTEESSLSMLFFXXXXXXXXXLKVYPFLQHNK

SEQ ID NO: 45825 - protein, 38 aa, Artificial Sequence
  GFR-binding peptide
  MOD_RES (4), (5), (37): Xaa is C or S
PPTXXVPTRLSSLSILFFDSANNVVLKVYPDMVVESXG

SEQ ID NO: 45826 - protein, 33 aa, Artificial Sequence
  GFR-binding peptide
  MOD_RES (1), (1): Xaa is C or S
  MOD_RES (15), (16), (17), (18), (19): Xaa is A or G
  MOD_RES (20), (21), (22), (23): Xaa is A or G or is absent
XAPVKTSSLSMLFFXXXXXXXXXLKVYPMIVEE

SEQ ID NO: 45827 - protein, 34 aa, Artificial Sequence
  GFR-binding peptide
  MOD_RES (2), (3): Xaa is C or S
PXXVPEKMSSLSILFFDENKNVVLKVYPNMTVES

SEQ ID NO: 45828 - protein, 35 aa, Artificial Sequence
  GFR-binding peptide
  MOD_RES (1), (2), (35): Xaa is C or S
  MOD_RES (16), (17), (18), (19), (20): Xaa is A or G
  MOD_RES (21), (22), (23), (24): Xaa is A or G or is absent
XXAPVKTSSLSMLFFXXXXXXXXXLKVYPMIVEEX

SEQ ID NO: 45829 - protein, 34 aa, Artificial Sequence
  GFR-binding peptide
  MOD_RES (2), (3): Xaa is C or S
PXXTPTKMSSLSMLFFNDKQQIILKVYPGMVVDR

SEQ ID NO: 45830 - protein, 38 aa, Artificial Sequence
  GFR-binding peptide
  MOD_RES (5), (6): Xaa is C or S
  MOD_RES (20), (21), (22), (23), (24): Xaa is A or G
  MOD_RES (25), (26), (27), (28): Xaa is A or G or is absent
IPKAXXVPTELSSLSMLFFXXXXXXXXXLKVYPEMVVE

SEQ ID NO: 45831 - protein, 32 aa, Artificial Sequence
  GFR-binding peptide
  MOD_RES (14), (15), (16), (17), (18): Xaa is A or G
  MOD_RES (19), (20), (21), (22): Xaa is A or G or is absent
VPARLSSLSILFFXXXXXXXXXLKVYPDMVVE

SEQ ID NO: 45832 - protein, 37 aa, Artificial Sequence
  GFR-binding peptide
  MOD_RES (4), (5), (37): Xaa is C or S
PASXXVPARLSSLSILFFDAANNVVLKVYPDMVVEAX

SEQ ID NO: 45833 - protein, 40 aa, Artificial Sequence
  GFR-binding peptide
  MOD_RES (3), (4), (37), (39): Xaa is C or S
  MOD_RES (18), (19), (20), (21), (22): Xaa is A or G
  MOD_RES (23), (24), (25), (26): Xaa is A or G or is absent
SPXXVSQDLSSLSILFFXXXXXXXXXLKVYPMIVKSXKXS

SEQ ID NO: 45834 - protein, 38 aa, Artificial Sequence
  GFR-binding peptide
  MOD_RES (4), (38): Xaa is C or S
  MOD_RES (18), (19), (20), (21), (22): Xaa is A or G
  MOD_RES (23), (24), (25), (26): Xaa is A or G or is absent
GLEXVPTEESSLSMLFFXXXXXXXXXLKVYPFLQHNKX

SEQ ID NO: 45835 - protein, 36 aa, Artificial Sequence
  GFR-binding peptide
  MOD_RES (3), (3): Xaa is C or S
  MOD_RES (17), (18), (19), (20), (21): Xaa is A or G
  MOD_RES (22), (23), (24), (25): Xaa is A or G or is absent
LEXVPTEESSLSMLFFXXXXXXXXXLKVYPFLQHNK

SEQ ID NO: 45836 - protein, 40 aa, Artificial Sequence
  GFR-binding peptide
  MOD_RES (5), (39): Xaa is C or S
  MOD_RES (19), (20), (21), (22), (23): Xaa is A or G
  MOD_RES (24), (25), (26), (27): Xaa is A or G or is absent
EGLEXVPTEESSLSMLFFXXXXXXXXXLKVYPFLQHNKXE

SEQ ID NO: 45837 - protein, 38 aa, Artificial Sequence
  GFR-binding peptide
  MOD_RES (1), (2), (37): Xaa is C or S
  MOD_RES (16), (17), (18), (19), (20): Xaa is A or G
  MOD_RES (21), (22), (23), (24): Xaa is A or G or is absent
XXVPTKLSSLSVLFFXXXXXXXXXLKVYPEGMSVAEXG

SEQ ID NO: 45838 - protein, 34 aa, Artificial Sequence
  GFR-binding peptide
  MOD_RES (34), (34): Xaa is C or S
  MOD_RES (14), (15), (16), (17), (18): Xaa is A or G
  MOD_RES (19), (20), (21), (22): Xaa is A or G or is absent
VPARLSSLSILFFXXXXXXXXXLKVYPDMVVEAX

SEQ ID NO: 45839 - protein, 42 aa, Artificial Sequence
  GFR-binding peptide
  MOD_RES (7), (41): Xaa is C or S
  MOD_RES (21), (22), (23), (24), (25): Xaa is A or G
  MOD_RES (26), (27), (28), (29): Xaa is A or G or is absent
NDEGLEXVPTEESSLSMLFFXXXXXXXXXLKVYPFLQHNKXE

SEQ ID NO: 45840 - protein, 39 aa, Artificial Sequence
  GFR-binding peptide
  MOD_RES (6), (7), (39): Xaa is C or S
GIPEPXXVPEKMSSLSILFFDENKNVVLKVYPNMTVESX

SEQ ID NO: 45841 - protein, 34 aa, Artificial Sequence
  GFR-binding peptide
  MOD_RES (3), (4): Xaa is C or S
STXXAPVKTSSLSMLFFDNGRVLLLKVYPMIVEE

SEQ ID NO: 45842 - protein, 39 aa, Artificial Sequence
  GFR-binding peptide
  MOD_RES (4), (5), (37), (39): Xaa is C or S
AGPXXTPTKMSSLSMLFFNDKQQIILKVYPGMVVDRXGX

SEQ ID NO: 45843 - protein, 38 aa, Artificial Sequence
  GFR-binding peptide
  MOD_RES (6), (6): Xaa is C or S
  MOD_RES (20), (21), (22), (23), (24): Xaa is A or G
  MOD_RES (25), (26), (27), (28): Xaa is A or G or is absent
VTKPTXAPTKLSSLSVLFFXXXXXXXXXLKVYPNMVVR

SEQ ID NO: 45844 - protein, 34 aa, Artificial Sequence
  GFR-binding peptide
  MOD_RES (2), (2): Xaa is C or S
EXVPTEESSLSMLFFRIKPHQGQHLKVYPFLQHN

SEQ ID NO: 45845 - protein, 45 aa, Artificial Sequence
  GFR-binding peptide
  MOD_RES (5), (42), (44): Xaa is C or S
SSVKXQPSRVHHSSLSVLFFEYVRKKPKLLKVYPRLEEHLEXAXA

SEQ ID NO: 45846 - protein, 35 aa, Artificial Sequence
  GFR-binding peptide
  MOD_RES (2), (3), (34): Xaa is C or S
PXXVPQDLSSLSILFFVGRTPKVLKVYPMVVKSXK

SEQ ID NO: 45847 - protein, 37 aa, Artificial Sequence
  GFR-binding peptide
  MOD_RES (6), (7): Xaa is C or S
RVPSTXXAPVKTSSLSMLFFDNGRVLLLKVYPMIVEE

SEQ ID NO: 45848 - protein, 32 aa, Artificial Sequence
  GFR-binding peptide
  MOD_RES (1), (2): Xaa is C or S
XXAPTKLSSLSVLFFDSSNNVILKVYPNMVVK

SEQ ID NO: 45849 - protein, 35 aa, Artificial Sequence
  GFR-binding peptide
  MOD_RES (2), (3): Xaa is C or S
  MOD_RES (17), (18), (19), (20), (21): Xaa is A or G
  MOD_RES (22), (23), (24), (25): Xaa is A or G or is absent
PXXAPTKLSSLSVLFFXXXXXXXXXLKVYPNMVVR

SEQ ID NO: 45850 - protein, 39 aa, Artificial Sequence
  GFR-binding peptide
  MOD_RES (4), (5), (39): Xaa is C or S
  MOD_RES (19), (20), (21), (22), (23): Xaa is A or G
  MOD_RES (24), (25), (26), (27): Xaa is A or G or is absent
SKAXXVPTKLSSLSILFFXXXXXXXXXLKVYPGMAVSEX

SEQ ID NO: 45851 - protein, 37 aa, Artificial Sequence
  GFR-binding peptide
  MOD_RES (4), (5): Xaa is C or S
GKAXXVPTKLSSLSVLFFDDMGVPTLKVYPEGMSVAE

SEQ ID NO: 45852 - protein, 39 aa, Artificial Sequence
  GFR-binding peptide
  MOD_RES (5), (6), (38): Xaa is C or S
IPEPXXVPEKMSSLSILFFDENKNVVLKVYPNMTVESXA

SEQ ID NO: 45853 - protein, 38 aa, Artificial Sequence
  GFR-binding peptide
  MOD_RES (37), (37): Xaa is C or S
QPSRVHHSSLSVLFFEYVRKKPKLLKVYPRLEEHLEXA

SEQ ID NO: 45854 - protein, 32 aa, Artificial Sequence
  GFR-binding peptide
  MOD_RES (32), (32): Xaa is C or S
APTQLSSLSVLFFDDSSNVILKVYPNMVVRAX

SEQ ID NO: 45855 - protein, 33 aa, Artificial Sequence
  GFR-binding peptide
  MOD_RES (14), (15), (16), (17), (18): Xaa is A or G
  MOD_RES (19), (20), (21), (22): Xaa is A or G or is absent
APTKLSSLSVLFFXXXXXXXXXLKVYPNMVVKA

SEQ ID NO: 45856 - protein, 43 aa, Artificial Sequence
  GFR-binding peptide
  MOD_RES (5), (42): Xaa is C or S
  MOD_RES (21), (22), (23), (24), (25): Xaa is A or G
  MOD_RES (26), (27), (28), (29): Xaa is A or G or is absent
SSVKXQPSRVHHSSLSVLFFXXXXXXXXXLKVYPRLEEHLEXA

SEQ ID NO: 45857 - protein, 37 aa, Artificial Sequence
  GFR-binding peptide
  MOD_RES (6), (7): Xaa is C or S
YVPKPXXAPTKLSSLSVLFFDDSSNVILKVYPNMVVR

SEQ ID NO: 45858 - protein, 37 aa, Artificial Sequence
  GFR-binding peptide
  MOD_RES (3), (4), (37): Xaa is C or S
  MOD_RES (18), (19), (20), (21), (22): Xaa is A or G
  MOD_RES (23), (24), (25), (26): Xaa is A or G or is absent
SPXXVPQDLSSLSILFFXXXXXXXXXLKVYPMVVKSX

SEQ ID NO: 45859 - protein, 39 aa, Artificial Sequence
  GFR-binding peptide
  MOD_RES (3), (4), (36), (38): Xaa is C or S
GPXXTPTKMSSLSMLFFNDKQQIILKVYPGMVVDRXGXS

SEQ ID NO: 45860 - protein, 44 aa, Artificial Sequence
  GFR-binding peptide
  MOD_RES (6), (7), (41), (43): Xaa is C or S
  MOD_RES (21), (22), (23), (24), (25): Xaa is A or G
  MOD_RES (26), (27), (28), (29): Xaa is A or G or is absent
AAPASXXVPARLSSLSILFFXXXXXXXXXLKVYPDMVVEAXGXR

SEQ ID NO: 45861 - protein, 36 aa, Artificial Sequence
  GFR-binding peptide
  MOD_RES (35), (35): Xaa is C or S
SRVHHSSLSVLFFEYVRKKPKLLKVYPRLEEHLEXA

SEQ ID NO: 45862 - protein, 34 aa, Artificial Sequence
  GFR-binding peptide
  MOD_RES (1), (1): Xaa is C or S
  MOD_RES (15), (16), (17), (18), (19): Xaa is A or G
  MOD_RES (20), (21), (22), (23): Xaa is A or G or is absent
XVPTKLSSLSILFFXXXXXXXXXLKVYPGMAVSE

SEQ ID NO: 45863 - protein, 36 aa, Artificial Sequence
  GFR-binding peptide
  MOD_RES (34), (36): Xaa is C or S
  MOD_RES (14), (15), (16), (17), (18): Xaa is A or G
  MOD_RES (19), (20), (21), (22): Xaa is A or G or is absent
VPARLSSLSILFFXXXXXXXXXLKVYPDMVVEAXGX

SEQ ID NO: 45864 - protein, 38 aa, Artificial Sequence
  GFR-binding peptide
  MOD_RES (2), (3), (37): Xaa is C or S
  MOD_RES (17), (18), (19), (20), (21): Xaa is A or G
  MOD_RES (22), (23), (24), (25): Xaa is A or G or is absent
PXXVPEKMSSLSILFFXXXXXXXXXLKVYPNMTVESXA

SEQ ID NO: 45865 - protein, 38 aa, Artificial Sequence
  GFR-binding peptide
  MOD_RES (1), (35), (37): Xaa is C or S
  MOD_RES (15), (16), (17), (18), (19): Xaa is A or G
  MOD_RES (20), (21), (22), (23): Xaa is A or G or is absent
XVPTKLSSLSILFFXXXXXXXXXLKVYPGMAVSEXGXR

SEQ ID NO: 45866 - protein, 39 aa, Artificial Sequence
  GFR-binding peptide
  MOD_RES (6), (7): Xaa is C or S
  MOD_RES (21), (22), (23), (24), (25): Xaa is A or G
  MOD_RES (26), (27), (28), (29): Xaa is A or G or is absent
ASASPXXVSQDLSSLSILFFXXXXXXXXXLKVYPMIVKS

SEQ ID NO: 45867 - protein, 39 aa, Artificial Sequence
  GFR-binding peptide
  MOD_RES (2), (3), (37), (39): Xaa is C or S
  MOD_RES (17), (18), (19), (20), (21): Xaa is A or G
  MOD_RES (22), (23), (24), (25): Xaa is A or G or is absent
TXXVPTRLSSLSILFFXXXXXXXXXLKVYPDMVVESXGX

SEQ ID NO: 45868 - protein, 38 aa, Artificial Sequence
  GFR-binding peptide
  MOD_RES (1), (38): Xaa is C or S
  MOD_RES (17), (18), (19), (20), (21): Xaa is A or G
  MOD_RES (22), (23), (24), (25): Xaa is A or G or is absent
XQPSRVHHSSLSVLFFXXXXXXXXXLKVYPRLEEHLEX

SEQ ID NO: 45869 - protein, 36 aa, Artificial Sequence
  GFR-binding peptide
  MOD_RES (1), (2), (34), (36): Xaa is C or S
XXAPTQLSSLSVLFFDDSSNVILKVYPNMVVRAXGX

SEQ ID NO: 45870 - protein, 37 aa, Artificial Sequence
  GFR-binding peptide
  MOD_RES (1), (34), (36): Xaa is C or S
  MOD_RES (15), (16), (17), (18), (19): Xaa is A or G
  MOD_RES (20), (21), (22), (23): Xaa is A or G or is absent
XVPQDLSSLSILFFXXXXXXXXXLKVYPMVVKSXKXS

SEQ ID NO: 45871 - protein, 38 aa, Artificial Sequence
  GFR-binding peptide
  MOD_RES (6), (7): Xaa is C or S
KASKAXXVPTKLSSLSILFFDKGVVTYLKVYPGMAVSE

SEQ ID NO: 45872 - protein, 34 aa, Artificial Sequence
  GFR-binding peptide
  MOD_RES (34), (34): Xaa is C or S
  MOD_RES (14), (15), (16), (17), (18): Xaa is A or G
  MOD_RES (19), (20), (21), (22): Xaa is A or G or is absent
APTQLSSLSVLFFXXXXXXXXXLKVYPNMVVRAX

SEQ ID NO: 45873 - protein, 41 aa, Artificial Sequence
  GFR-binding peptide
  MOD_RES (6), (7), (41): Xaa is C or S
  MOD_RES (21), (22), (23), (24), (25): Xaa is A or G
  MOD_RES (26), (27), (28), (29): Xaa is A or G or is absent
AVPKAXXAPTKLSSLSVLFFXXXXXXXXXLKVYPNMVVKAX

SEQ ID NO: 45874 - protein, 40 aa, Artificial Sequence
  GFR-binding peptide
  MOD_RES (4), (5), (37), (39): Xaa is C or S
PKPXXAPTQLSSLSVLFFDDSSNVILKVYPNMVVRAXGXH

SEQ ID NO: 45875 - protein, 35 aa, Artificial Sequence
  GFR-binding peptide
  MOD_RES (1), (2), (34): Xaa is C or S
XXAPTKLSSLSVLFFDSSNNVILKVYPNMVVKAXG

SEQ ID NO: 45876 - protein, 39 aa, Artificial Sequence
  GFR-binding peptide
  MOD_RES (4), (5), (39): Xaa is C or S
  MOD_RES (19), (20), (21), (22), (23): Xaa is A or G
  MOD_RES (24), (25), (26), (27): Xaa is A or G or is absent
PKAXXAPTKLSSLSVLFFXXXXXXXXXLKVYPNMVVKAX

SEQ ID NO: 45877 - protein, 41 aa, Artificial Sequence
  GFR-binding peptide
  MOD_RES (6), (7), (41): Xaa is C or S
  MOD_RES (21), (22), (23), (24), (25): Xaa is A or G
  MOD_RES (26), (27), (28), (29): Xaa is A or G or is absent
HVPKPXXAPTKLSSLSVLFFXXXXXXXXXLKVYPNMVVRSX

SEQ ID NO: 45878 - protein, 35 aa, Artificial Sequence
  GFR-binding peptide
  MOD_RES (2), (3), (35): Xaa is C or S
TXXVPTRLSSLSILFFDSANNVVLKVYPDMVVESX

SEQ ID NO: 45879 - protein, 34 aa, Artificial Sequence
  GFR-binding peptide
  MOD_RES (1), (2): Xaa is C or S
  MOD_RES (16), (17), (18), (19), (20): Xaa is A or G
  MOD_RES (21), (22), (23), (24): Xaa is A or G or is absent
XXVPEKMSSLSILFFXXXXXXXXXLKVYPNMTVE

SEQ ID NO: 45880 - protein, 39 aa, Artificial Sequence
  GFR-binding peptide
  MOD_RES (6), (7): Xaa is C or S
  MOD_RES (21), (22), (23), (24), (25): Xaa is A or G
  MOD_RES (26), (27), (28), (29): Xaa is A or G or is absent
GSAGPXXTPTKMSSLSMLFFXXXXXXXXXLKVYPGMVVD

SEQ ID NO: 45881 - protein, 35 aa, Artificial Sequence
  GFR-binding peptide
  MOD_RES (2), (3): Xaa is C or S
  MOD_RES (17), (18), (19), (20), (21): Xaa is A or G
  MOD_RES (22), (23), (24), (25): Xaa is A or G or is absent
AXXVPTELSSLSMLFFXXXXXXXXXLKVYPEMVVE

SEQ ID NO: 45882 - protein, 35 aa, Artificial Sequence
  GFR-binding peptide
  MOD_RES (1), (35): Xaa is C or S
  MOD_RES (15), (16), (17), (18), (19): Xaa is A or G
  MOD_RES (20), (21), (22), (23): Xaa is A or G or is absent
XTPTKMSSLSMLFFXXXXXXXXXLKVYPGMVVDRX

SEQ ID NO: 45883 - protein, 36 aa, Artificial Sequence
  GFR-binding peptide
  MOD_RES (2), (3): Xaa is C or S
  MOD_RES (17), (18), (19), (20), (21): Xaa is A or G
  MOD_RES (22), (23), (24), (25): Xaa is A or G or is absent
PXXAPTQLSSLSVLFFXXXXXXXXXLKVYPNMVVRA

SEQ ID NO: 45884 - protein, 37 aa, Artificial Sequence
  GFR-binding peptide
  MOD_RES (2), (3), (37): Xaa is C or S
  MOD_RES (17), (18), (19), (20), (21): Xaa is A or G
  MOD_RES (22), (23), (24), (25): Xaa is A or G or is absent
PXXTPTKMSSLSMLFFXXXXXXXXXLKVYPGMVVDRX

SEQ ID NO: 45885 - protein, 37 aa, Artificial Sequence
  GFR-binding peptide
  MOD_RES (3), (37): Xaa is C or S
  MOD_RES (17), (18), (19), (20), (21): Xaa is A or G
  MOD_RES (22), (23), (24), (25): Xaa is A or G or is absent
LEXVPTEESSLSMLFFXXXXXXXXXLKVYPFLQHNKX

SEQ ID NO: 45886 - protein, 36 aa, Artificial Sequence
  GFR-binding peptide
  MOD_RES (1), (2), (34), (36): Xaa is C or S
XXAPTKLSSLSVLFFDSSNNVILKVYPNMVVKAXGX

SEQ ID NO: 45887 - protein, 38 aa, Artificial Sequence
  GFR-binding peptide
  MOD_RES (3), (4), (37): Xaa is C or S
  MOD_RES (18), (19), (20), (21), (22): Xaa is A or G
  MOD_RES (23), (24), (25), (26): Xaa is A or G or is absent
APXXVPQALSSLSILFFXXXXXXXXXLKVYPMIVRSXK

SEQ ID NO: 45888 - protein, 41 aa, Artificial Sequence; identical to SEQ ID NO: 152
  GFR-binding peptide
  MOD_RES (6), (7), (38), (40): Xaa is C or S

SEQ ID NO: 45889 - protein, 40 aa, Artificial Sequence
  GFR-binding peptide
  MOD_RES (6), (7), (38), (40): Xaa is C or S
ASAAPXXVPQALSSLSILFFVGRKPKVLKVYPMIVRSXKX

SEQ ID NO: 45890 - protein, 41 aa, Artificial Sequence
  GFR-binding peptide
  MOD_RES (6), (7), (41): Xaa is C or S
  MOD_RES (21), (22), (23), (24), (25): Xaa is A or G
  MOD_RES (26), (27), (28), (29): Xaa is A or G or is absent
GIPEPXXVPEKMSSLSILFFXXXXXXXXXLKVYPNMTVESX

SEQ ID NO: 45891 - protein, 41 aa, Artificial Sequence
  GFR-binding peptide
  MOD_RES (6), (7), (40): Xaa is C or S
  MOD_RES (21), (22), (23), (24), (25): Xaa is A or G
  MOD_RES (26), (27), (28), (29): Xaa is A or G or is absent
ASASPXXVPQDLSSLSILFFXXXXXXXXXLKVYPMVVKSXK

SEQ ID NO: 45892 - protein, 42 aa, Artificial Sequence
  GFR-binding peptide
  MOD_RES (6), (7), (41): Xaa is C or S
  MOD_RES (21), (22), (23), (24), (25): Xaa is A or G
  MOD_RES (26), (27), (28), (29): Xaa is A or G or is absent
TVPKPXXAPTQLSSLSVLFFXXXXXXXXXLKVYPNMVVRAXG

SEQ ID NO: 45893 - protein, 36 aa, Artificial Sequence
  GFR-binding peptide
  MOD_RES (1), (2), (33), (35): Xaa is C or S
XXVSQDLSSLSILFFIGKTPKILKVYPMIVKSXKXS

SEQ ID NO: 45894 - protein, 36 aa, Artificial Sequence
  GFR-binding peptide
  MOD_RES (5), (6): Xaa is C or S
VPKPXXAPTKLSSLSVLFFDDSSNVILKVYPNMVVR

SEQ ID NO: 45895 - protein, 33 aa, Artificial Sequence
  GFR-binding peptide
  MOD_RES (32), (32): Xaa is C or S
APTQLSSLSVLFFDDSSNVILKVYPNMVVRAXG

SEQ ID NO: 45896 - protein, 38 aa, Artificial Sequence
  GFR-binding peptide
  MOD_RES (3), (4), (35), (37): Xaa is C or S
STXXAPVKTSSLSMLFFDNGRVLLLKVYPMIVEEXGXL

SEQ ID NO: 45897 - protein, 40 aa, Artificial Sequence
  GFR-binding peptide
  MOD_RES (4), (5), (40): Xaa is C or S
  MOD_RES (19), (20), (21), (22), (23): Xaa is A or G
  MOD_RES (24), (25), (26), (27): Xaa is A or G or is absent
GKAXXVPTKLSSLSVLFFXXXXXXXXXLKVYPEGMSVAEX

SEQ ID NO: 45898 - protein, 36 aa, Artificial Sequence
  GFR-binding peptide
  MOD_RES (3), (4): Xaa is C or S
  MOD_RES (18), (19), (20), (21), (22): Xaa is A or G
  MOD_RES (23), (24), (25), (26): Xaa is A or G or is absent
KPXXAPTQLSSLSVLFFXXXXXXXXXLKVYPNMVVR

SEQ ID NO: 45899 - protein, 34 aa, Artificial Sequence
  GFR-binding peptide
  MOD_RES (1), (1): Xaa is C or S
  MOD_RES (15), (16), (17), (18), (19): Xaa is A or G
  MOD_RES (20), (21), (22), (23): Xaa is A or G or is absent
XVPTEESSLSMLFFXXXXXXXXXLKVYPFLQHNK

SEQ ID NO: 45900 - protein, 33 aa, Artificial Sequence
  GFR-binding peptide
  MOD_RES (32), (32): Xaa is C or S
VPARLSSLSILFFDAANNVVLKVYPDMVVEAXG

SEQ ID NO: 45901 - protein, 38 aa, Artificial Sequence
  GFR-binding peptide
  MOD_RES (2), (3), (36), (38): Xaa is C or S
  MOD_RES (17), (18), (19), (20), (21): Xaa is A or G
  MOD_RES (22), (23), (24), (25): Xaa is A or G or is absent
PXXVSQDLSSLSILFFXXXXXXXXXLKVYPMIVKSXKX

SEQ ID NO: 45902 - protein, 42 aa, Artificial Sequence
  GFR-binding peptide
  MOD_RES (4), (5), (39), (41): Xaa is C or S
  MOD_RES (19), (20), (21), (22), (23): Xaa is A or G
  MOD_RES (24), (25), (26), (27): Xaa is A or G or is absent
PKAXXVPTELSSLSMLFFXXXXXXXXXLKVYPEMVVEGXGXR

SEQ ID NO: 45903 - protein, 36 aa, Artificial Sequence
  GFR-binding peptide
  MOD_RES (35), (35): Xaa is C or S
  MOD_RES (14), (15), (16), (17), (18): Xaa is A or G
  MOD_RES (19), (20), (21), (22): Xaa is A or G or is absent
VPTKLSSLSVLFFXXXXXXXXXLKVYPEGMSVAEXG

SEQ ID NO: 45904 - protein, 39 aa, Artificial Sequence
  GFR-binding peptide
  MOD_RES (36), (38): Xaa is C or S
  MOD_RES (15), (16), (17), (18), (19): Xaa is A or G
  MOD_RES (20), (21), (22), (23): Xaa is A or G or is absent
PSRVHHSSLSVLFFXXXXXXXXXLKVYPRLEEHLEXAXA

SEQ ID NO: 45905 - protein, 35 aa, Artificial Sequence
  GFR-binding peptide
  MOD_RES (15), (16), (17), (18), (19): Xaa is A or G
  MOD_RES (20), (21), (22), (23): Xaa is A or G or is absent
PSRVHHSSLSVLFFXXXXXXXXXLKVYPRLEEHLE

SEQ ID NO: 45906 - protein, 37 aa, Artificial Sequence
  GFR-binding peptide
  MOD_RES (2), (3), (37): Xaa is C or S
  MOD_RES (17), (18), (19), (20), (21): Xaa is A or G
  MOD_RES (22), (23), (24), (25): Xaa is A or G or is absent
SXXVPARLSSLSILFFXXXXXXXXXLKVYPDMVVEAX

SEQ ID NO: 45907 - protein, 40 aa, Artificial Sequence
  GFR-binding peptide
  MOD_RES (6), (7): Xaa is C or S
  MOD_RES (21), (22), (23), (24), (25): Xaa is A or G
  MOD_RES (26), (27), (28), (29): Xaa is A or G or is absent
KASKAXXVPTKLSSLSILFFXXXXXXXXXLKVYPGMAVSE

SEQ ID NO: 45908 - protein, 33 aa, Artificial Sequence
  GFR-binding peptide
  MOD_RES (2), (3): Xaa is C or S
AXXVPTKLSSLSILFFDKGVVTYLKVYPGMAVS

SEQ ID NO: 45909 - protein, 38 aa, Artificial Sequence
  GFR-binding peptide
  MOD_RES (2), (3), (37): Xaa is C or S
  MOD_RES (17), (18), (19), (20), (21): Xaa is A or G
  MOD_RES (22), (23), (24), (25): Xaa is A or G or is absent
SXXVPARLSSLSILFFXXXXXXXXXLKVYPDMVVEAXG

SEQ ID NO: 45910 - protein, 38 aa, Artificial Sequence
  GFR-binding peptide
  MOD_RES (3), (4), (37): Xaa is C or S
  MOD_RES (18), (19), (20), (21), (22): Xaa is A or G
  MOD_RES (23), (24), (25), (26): Xaa is A or G or is absent
SPXXVSQDLSSLSILFFXXXXXXXXXLKVYPMIVKSXK

SEQ ID NO: 45911 - protein, 40 aa, Artificial Sequence
  GFR-binding peptide
  MOD_RES (6), (40): Xaa is C or S
  MOD_RES (20), (21), (22), (23), (24): Xaa is A or G
  MOD_RES (25), (26), (27), (28): Xaa is A or G or is absent
VTKPTXAPTKLSSLSVLFFXXXXXXXXXLKVYPNMVVRSX

SEQ ID NO: 45912 - protein, 37 aa, Artificial Sequence
  GFR-binding peptide
  MOD_RES (1), (2), (34), (36): Xaa is C or S
XXVPARLSSLSILFFDAANNVVLKVYPDMVVEAXGXR

SEQ ID NO: 45913 - protein, 44 aa, Artificial Sequence
  GFR-binding peptide
  MOD_RES (6), (7), (41), (43): Xaa is C or S
  MOD_RES (21), (22), (23), (24), (25): Xaa is A or G
  MOD_RES (26), (27), (28), (29): Xaa is A or G or is absent
KASKAXXVPTKLSSLSILFFXXXXXXXXXLKVYPGMAVSEXGXR

SEQ ID NO: 45914 - protein, 41 aa, Artificial Sequence
  GFR-binding peptide
  MOD_RES (3), (4), (38), (40): Xaa is C or S
  MOD_RES (18), (19), (20), (21), (22): Xaa is A or G
  MOD_RES (23), (24), (25), (26): Xaa is A or G or is absent
ASXXVPARLSSLSILFFXXXXXXXXXLKVYPDMVVEAXGXR

SEQ ID NO: 45915 - protein, 41 aa, Artificial Sequence
  GFR-binding peptide
  MOD_RES (6), (7), (39), (41): Xaa is C or S
HVPKPXXAPTKLSSLSVLFFDDSSNVILKVYPNMVVRSXGX

SEQ ID NO: 45916 - protein, 40 aa, Artificial Sequence
  GFR-binding peptide
  MOD_RES (5), (6), (39): Xaa is C or S
  MOD_RES (20), (21), (22), (23), (24): Xaa is A or G
  MOD_RES (25), (26), (27), (28): Xaa is A or G or is absent
VPSTXXAPVKTSSLSMLFFXXXXXXXXXLKVYPMIVEEXG

SEQ ID NO: 45917 - protein, 35 aa, Artificial Sequence
  GFR-binding peptide
  MOD_RES (1), (2), (34): Xaa is C or S
XXVPEKMSSLSILFFDENKNVVLKVYPNMTVESXA

SEQ ID NO: 45918 - protein, 39 aa, Artificial Sequence
  GFR-binding peptide
  MOD_RES (5), (37), (39): Xaa is C or S
TKPTXAPTKLSSLSVLFFDDSSNVILKVYPNMVVRSXGX

SEQ ID NO: 45919 - protein, 41 aa, Artificial Sequence
  GFR-binding peptide
  MOD_RES (6), (7), (39), (41): Xaa is C or S
GSAGPXXTPTKMSSLSMLFFNDKQQIILKVYPGMVVDRXGX

SEQ ID NO: 45920 - protein, 33 aa, Artificial Sequence
  GFR-binding peptide
  MOD_RES (32), (32): Xaa is C or S
VPTKLSSLSILFFDKGVVTYLKVYPGMAVSEXG

SEQ ID NO: 45921 - protein, 33 aa, Artificial Sequence
  GFR-binding peptide
  MOD_RES (32), (32): Xaa is C or S
APTKLSSLSVLFFDDSSNVILKVYPNMVVRSXG

SEQ ID NO: 45922 - protein, 36 aa, Artificial Sequence
  GFR-binding peptide
  MOD_RES (34), (36): Xaa is C or S
  MOD_RES (14), (15), (16), (17), (18): Xaa is A or G
  MOD_RES (19), (20), (21), (22): Xaa is A or G or is absent
VPTEESSLSMLFFXXXXXXXXXLKVYPFLQHNKXEX

SEQ ID NO: 45923 - protein, 36 aa, Artificial Sequence
  GFR-binding peptide
  MOD_RES (1), (2), (34), (36): Xaa is C or S
XXVPTRLSSLSILFFDSANNVVLKVYPDMVVESXGX

SEQ ID NO: 45924 - protein, 41 aa, Artificial Sequence
  GFR-binding peptide
  MOD_RES (6), (7), (40): Xaa is C or S
  MOD_RES (21), (22), (23), (24), (25): Xaa is A or G
  MOD_RES (26), (27), (28), (29): Xaa is A or G or is absent
RVPSTXXAPVKTSSLSMLFFXXXXXXXXXLKVYPMIVEEXG

SEQ ID NO: 45925 - protein, 40 aa, Artificial Sequence
  GFR-binding peptide
  MOD_RES (6), (7), (40): Xaa is C or S
KVGKAXXVPTKLSSLSVLFFDDMGVPTLKVYPEGMSVAEX

SEQ ID NO: 45926 - protein, 37 aa, Artificial Sequence
  GFR-binding peptide
  MOD_RES (3), (4): Xaa is C or S
  MOD_RES (18), (19), (20), (21), (22): Xaa is A or G
  MOD_RES (23), (24), (25), (26): Xaa is A or G or is absent
KAXXAPTKLSSLSVLFFXXXXXXXXXLKVYPNMVVKA

SEQ ID NO: 45927 - protein, 33 aa, Artificial Sequence
  GFR-binding peptide
  MOD_RES (1), (32): Xaa is C or S
XVSQDLSSLSILFFIGKTPKILKVYPMIVKSXK

SEQ ID NO: 45928 - protein, 40 aa, Artificial Sequence
  GFR-binding peptide
  MOD_RES (5), (6), (40): Xaa is C or S
  MOD_RES (20), (21), (22), (23), (24): Xaa is A or G
  MOD_RES (25), (26), (27), (28): Xaa is A or G or is absent
VPKPXXAPTQLSSLSVLFFXXXXXXXXXLKVYPNMVVRAX

SEQ ID NO: 45929 - protein, 36 aa, Artificial Sequence
  GFR-binding peptide
  MOD_RES (34), (36): Xaa is C or S
  MOD_RES (14), (15), (16), (17), (18): Xaa is A or G
  MOD_RES (19), (20), (21), (22): Xaa is A or G or is absent
APTQLSSLSVLFFXXXXXXXXXLKVYPNMVVRAXGX

SEQ ID NO: 45930 - protein, 37 aa, Artificial Sequence
  GFR-binding peptide
  MOD_RES (1), (35), (37): Xaa is C or S
XVPTEESSLSMLFFRIKPHQGQHLKVYPFLQHNKXEX

SEQ ID NO: 45931 - protein, 31 aa, Artificial Sequence
  GFR-binding peptide
  MOD_RES (1), (1): Xaa is C or S
XVPARLSSLSILFFDAANNVVLKVYPDMVVE

SEQ ID NO: 45932 - protein, 33 aa, Artificial Sequence
  GFR-binding peptide
  MOD_RES (14), (15), (16), (17), (18): Xaa is A or G
  MOD_RES (19), (20), (21), (22): Xaa is A or G or is absent
APTKLSSLSVLFFXXXXXXXXXLKVYPNMVVRS

SEQ ID NO: 45933 - protein, 30 aa, Artificial Sequence; identical to SEQ ID NO: 660
  GFR-binding peptide

SEQ ID NO: 45934 - protein, 43 aa, Artificial Sequence
  GFR-binding peptide
  MOD_RES (6), (7), (41), (43): Xaa is C or S
  MOD_RES (21), (22), (23), (24), (25): Xaa is A or G
  MOD_RES (26), (27), (28), (29): Xaa is A or G or is absent
YVPKPXXAPTKLSSLSVLFFXXXXXXXXXLKVYPNMVVRSXGX

SEQ ID NO: 45935 - protein, 37 aa, Artificial Sequence
  GFR-binding peptide
  MOD_RES (2), (3), (37): Xaa is C or S
  MOD_RES (17), (18), (19), (20), (21): Xaa is A or G
  MOD_RES (22), (23), (24), (25): Xaa is A or G or is absent
PXXAPTQLSSLSVLFFXXXXXXXXXLKVYPNMVVRAX

SEQ ID NO: 45936 - protein, 36 aa, Artificial Sequence
  GFR-binding peptide
  MOD_RES (3), (4), (36): Xaa is C or S
KAXXAPTKLSSLSVLFFDSSNNVILKVYPNMVVKAX

SEQ ID NO: 45937 - protein, 36 aa, Artificial Sequence
  GFR-binding peptide
  MOD_RES (2), (3): Xaa is C or S
  MOD_RES (17), (18), (19), (20), (21): Xaa is A or G
  MOD_RES (22), (23), (24), (25): Xaa is A or G or is absent
AXXVPTELSSLSMLFFXXXXXXXXXLKVYPEMVVEG

SEQ ID NO: 45938 - protein, 37 aa, Artificial Sequence
  GFR-binding peptide
  MOD_RES (3), (4): Xaa is C or S
  MOD_RES (18), (19), (20), (21), (22): Xaa is A or G
  MOD_RES (23), (24), (25), (26): Xaa is A or G or is absent
KPXXAPTKLSSLSVLFFXXXXXXXXXLKVYPNMVVRS

SEQ ID NO: 45939 - protein, 38 aa, Artificial Sequence
  GFR-binding peptide
  MOD_RES (2), (36), (38): Xaa is C or S
EXVPTEESSLSMLFFRIKPHQGQHLKVYPFLQHNKXEX

SEQ ID NO: 45940 - protein, 41 aa, Artificial Sequence
  GFR-binding peptide
  MOD_RES (4), (38), (40): Xaa is C or S
  MOD_RES (18), (19), (20), (21), (22): Xaa is A or G
  MOD_RES (23), (24), (25), (26): Xaa is A or G or is absent
GLEXVPTEESSLSMLFFXXXXXXXXXLKVYPFLQHNKXEXR

SEQ ID NO: 45941 - protein, 36 aa, Artificial Sequence
  GFR-binding peptide
  MOD_RES (1), (2), (35): Xaa is C or S
  MOD_RES (16), (17), (18), (19), (20): Xaa is A or G
  MOD_RES (21), (22), (23), (24): Xaa is A or G or is absent
XXVPQDLSSLSILFFXXXXXXXXXLKVYPMVVKSXK

SEQ ID NO: 45942 - protein, 34 aa, Artificial Sequence
  GFR-binding peptide
  MOD_RES (14), (15), (16), (17), (18): Xaa is A or G
  MOD_RES (19), (20), (21), (22): Xaa is A or G or is absent
SRVHHSSLSVLFFXXXXXXXXXLKVYPRLEEHLE

SEQ ID NO: 45943 - protein, 39 aa, Artificial Sequence
  GFR-binding peptide
  MOD_RES (2), (3), (36), (38): Xaa is C or S
  MOD_RES (17), (18), (19), (20), (21): Xaa is A or G
  MOD_RES (22), (23), (24), (25): Xaa is A or G or is absent
TXXAPVKTSSLSMLFFXXXXXXXXXLKVYPMIVEEXGXL

SEQ ID NO: 45944 - protein, 38 aa, Artificial Sequence
  GFR-binding peptide
  MOD_RES (4), (5), (37): Xaa is C or S
PKPXXAPTKLSSLSVLFFDDSSNVILKVYPNMVVRSXG

SEQ ID NO: 45945 - protein, 34 aa, Artificial Sequence
  GFR-binding peptide
  MOD_RES (1), (2): Xaa is C or S
  MOD_RES (16), (17), (18), (19), (20): Xaa is A or G
  MOD_RES (21), (22), (23), (24): Xaa is A or G or is absent
XXAPTQLSSLSVLFFXXXXXXXXXLKVYPNMVVR

SEQ ID NO: 45946 - protein, 39 aa, Artificial Sequence
  GFR-binding peptide
  MOD_RES (1), (2), (36), (38): Xaa is C or S
  MOD_RES (16), (17), (18), (19), (20): Xaa is A or G
  MOD_RES (21), (22), (23), (24): Xaa is A or G or is absent
XXAPTKLSSLSVLFFXXXXXXXXXLKVYPNMVVKAXGXH

SEQ ID NO: 45947 - protein, 41 aa, Artificial Sequence
  GFR-binding peptide
  MOD_RES (6), (40): Xaa is C or S
DEGLEXVPTEESSLSMLFFRIKPHQGQHLKVYPFLQHNKXE

SEQ ID NO: 45948 - protein, 37 aa, Artificial Sequence
  GFR-binding peptide
  MOD_RES (34), (36): Xaa is C or S
  MOD_RES (14), (15), (16), (17), (18): Xaa is A or G
  MOD_RES (19), (20), (21), (22): Xaa is A or G or is absent
APTQLSSLSVLFFXXXXXXXXXLKVYPNMVVRAXGXH

SEQ ID NO: 45949 - protein, 36 aa, Artificial Sequence
  GFR-binding peptide
  MOD_RES (1), (2), (36): Xaa is C or S
  MOD_RES (16), (17), (18), (19), (20): Xaa is A or G
  MOD_RES (21), (22), (23), (24): Xaa is A or G or is absent
XXVPTELSSLSMLFFXXXXXXXXXLKVYPEMVVEGX

SEQ ID NO: 45950 - protein, 39 aa, Artificial Sequence
  GFR-binding peptide
  MOD_RES (3), (4), (36), (38): Xaa is C or S
ASXXVPARLSSLSILFFDAANNVVLKVYPDMVVEAXGXR

SEQ ID NO: 45951 - protein, 31 aa, Artificial Sequence
  GFR-binding peptide
  MOD_RES (31), (31): Xaa is C or S
VPQALSSLSILFFVGRKPKVLKVYPMIVRSX

SEQ ID NO: 45952 - protein, 38 aa, Artificial Sequence
  GFR-binding peptide
  MOD_RES (2), (3), (37): Xaa is C or S
  MOD_RES (17), (18), (19), (20), (21): Xaa is A or G
  MOD_RES (22), (23), (24), (25): Xaa is A or G or is absent
AXXVPTKLSSLSILFFXXXXXXXXXLKVYPGMAVSEXG

SEQ ID NO: 45953 - protein, 35 aa, Artificial Sequence
  GFR-binding peptide
  MOD_RES (1), (2): Xaa is C or S
  MOD_RES (16), (17), (18), (19), (20): Xaa is A or G
  MOD_RES (21), (22), (23), (24): Xaa is A or G or is absent
XXTPTKMSSLSMLFFXXXXXXXXXLKVYPGMVVDR

SEQ ID NO: 45954 - protein, 39 aa, Artificial Sequence
  GFR-binding peptide
  MOD_RES (3), (4), (37), (39): Xaa is C or S
  MOD_RES (18), (19), (20), (21), (22): Xaa is A or G
  MOD_RES (23), (24), (25), (26): Xaa is A or G or is absent
SPXXVPQDLSSLSILFFXXXXXXXXXLKVYPMVVKSXKX

SEQ ID NO: 45955 - protein, 35 aa, Artificial Sequence
  GFR-binding peptide
  MOD_RES (1), (35): Xaa is C or S
  MOD_RES (15), (16), (17), (18), (19): Xaa is A or G
  MOD_RES (20), (21), (22), (23): Xaa is A or G or is absent
XVPTELSSLSMLFFXXXXXXXXXLKVYPEMVVEGX

SEQ ID NO: 45956 - protein, 38 aa, Artificial Sequence
  GFR-binding peptide
  MOD_RES (4), (5): Xaa is C or S
  MOD_RES (19), (20), (21), (22), (23): Xaa is A or G
  MOD_RES (24), (25), (26), (27): Xaa is A or G or is absent
SKAXXVPTKLSSLSILFFXXXXXXXXXLKVYPGMAVSE

SEQ ID NO: 45957 - protein, 40 aa, Artificial Sequence
  GFR-binding peptide
  MOD_RES (5), (6), (40): Xaa is C or S
  MOD_RES (20), (21), (22), (23), (24): Xaa is A or G
  MOD_RES (25), (26), (27), (28): Xaa is A or G or is absent
IPEPXXVPEKMSSLSILFFXXXXXXXXXLKVYPNMTVESX

SEQ ID NO: 45958 - protein, 36 aa, Artificial Sequence
  GFR-binding peptide
  MOD_RES (3), (4): Xaa is C or S
  MOD_RES (18), (19), (20), (21), (22): Xaa is A or G
  MOD_RES (23), (24), (25), (26): Xaa is A or G or is absent
KPXXAPTKLSSLSVLFFXXXXXXXXXLKVYPNMVVR

SEQ ID NO: 45959 - protein, 39 aa, Artificial Sequence
  GFR-binding peptide
  MOD_RES (4), (5), (39): Xaa is C or S
  MOD_RES (19), (20), (21), (22), (23): Xaa is A or G
  MOD_RES (24), (25), (26), (27): Xaa is A or G or is absent
PASXXVPARLSSLSILFFXXXXXXXXXLKVYPDMVVEAX

SEQ ID NO: 45960 - protein, 33 aa, Artificial Sequence
  GFR-binding peptide
  MOD_RES (1), (33): Xaa is C or S
XAPTKLSSLSVLFFDSSNNVILKVYPNMVVKAX

SEQ ID NO: 45961 - protein, 31 aa, Artificial Sequence
  GFR-binding peptide
APTKLSSLSVLFFDSSNNVILKVYPNMVVKA

SEQ ID NO: 45962 - protein, 38 aa, Artificial Sequence
  GFR-binding peptide
  MOD_RES (5), (6), (37): Xaa is C or S
SASPXXVSQDLSSLSILFFIGKTPKILKVYPMIVKSXK

SEQ ID NO: 45963 - protein, 36 aa, Artificial Sequence
  GFR-binding peptide
  MOD_RES (3), (4): Xaa is C or S
  MOD_RES (18), (19), (20), (21), (22): Xaa is A or G
  MOD_RES (23), (24), (25), (26): Xaa is A or G or is absent
ASXXVPARLSSLSILFFXXXXXXXXXLKVYPDMVVE

SEQ ID NO: 45964 - protein, 40 aa, Artificial Sequence
  GFR-binding peptide
  MOD_RES (2), (3), (37), (39): Xaa is C or S
  MOD_RES (17), (18), (19), (20), (21): Xaa is A or G
  MOD_RES (22), (23), (24), (25): Xaa is A or G or is absent
AXXVPTELSSLSMLFFXXXXXXXXXLKVYPEMVVEGXGXR

SEQ ID NO: 45965 - protein, 31 aa, Artificial Sequence
  GFR-binding peptide
VPEKMSSLSILFFDENKNVVLKVYPNMTVES

SEQ ID NO: 45966 - protein, 36 aa, Artificial Sequence
  GFR-binding peptide
  MOD_RES (5), (6): Xaa is C or S
SAGPXXTPTKMSSLSMLFFNDKQQIILKVYPGMVVD

SEQ ID NO: 45967 - protein, 39 aa, Artificial Sequence
  GFR-binding peptide
  MOD_RES (5), (6), (39): Xaa is C or S
  MOD_RES (20), (21), (22), (23), (24): Xaa is A or G
  MOD_RES (25), (26), (27), (28): Xaa is A or G or is absent
VPSTXXAPVKTSSLSMLFFXXXXXXXXXLKVYPMIVEEX

SEQ ID NO: 45968 - protein, 35 aa, Artificial Sequence
  GFR-binding peptide
  MOD_RES (1), (35): Xaa is C or S
  MOD_RES (15), (16), (17), (18), (19): Xaa is A or G
  MOD_RES (20), (21), (22), (23): Xaa is A or G or is absent
XVPTKLSSLSILFFXXXXXXXXXLKVYPGMAVSEX

SEQ ID NO: 45969 - protein, 41 aa, Artificial Sequence
  GFR-binding peptide
  MOD_RES (6), (7), (41): Xaa is C or S
  MOD_RES (21), (22), (23), (24), (25): Xaa is A or G
  MOD_RES (26), (27), (28), (29): Xaa is A or G or is absent
KASKAXXVPTKLSSLSILFFXXXXXXXXXLKVYPGMAVSEX

SEQ ID NO: 45970 - protein, 43 aa, Artificial Sequence
  GFR-binding peptide
  MOD_RES (5), (6), (40), (42): Xaa is C or S
  MOD_RES (20), (21), (22), (23), (24): Xaa is A or G
  MOD_RES (25), (26), (27), (28): Xaa is A or G or is absent
SAGPXXTPTKMSSLSMLFFXXXXXXXXXLKVYPGMVVDRXGXS

SEQ ID NO: 45971 - protein, 39 aa, Artificial Sequence
  GFR-binding peptide
  MOD_RES (1), (38): Xaa is C or S
XQPSRVHHSSLSVLFFEYVRKKPKLLKVYPRLEEHLEXA

SEQ ID NO: 45972 - protein, 39 aa, Artificial Sequence
  GFR-binding peptide
  MOD_RES (2), (3), (36), (38): Xaa is C or S
  MOD_RES (17), (18), (19), (20), (21): Xaa is A or G
  MOD_RES (22), (23), (24), (25): Xaa is A or G or is absent
PXXVSQDLSSLSILFFXXXXXXXXXLKVYPMIVKSXKXS

SEQ ID NO: 45973 - protein, 39 aa, Artificial Sequence
  GFR-binding peptide
  MOD_RES (6), (7), (39): Xaa is C or S
AAPASXXVPARLSSLSILFFDAANNVVLKVYPDMVVEAX

SEQ ID NO: 45974 - protein, 37 aa, Artificial Sequence
  GFR-binding peptide
  MOD_RES (2), (3), (36): Xaa is C or S
  MOD_RES (17), (18), (19), (20), (21): Xaa is A or G
  MOD_RES (22), (23), (24), (25): Xaa is A or G or is absent
TXXAPVKTSSLSMLFFXXXXXXXXXLKVYPMIVEEXG

SEQ ID NO: 45975 - protein, 34 aa, Artificial Sequence
  GFR-binding peptide
  MOD_RES (32), (34): Xaa is C or S
VPTRLSSLSILFFDSANNVVLKVYPDMVVESXGX

SEQ ID NO: 45976 - protein, 37 aa, Artificial Sequence
  GFR-binding peptide
  MOD_RES (5), (6): Xaa is C or S
VPKAXXAPTKLSSLSVLFFDSSNNVILKVYPNMVVKA

SEQ ID NO: 45977 - protein, 39 aa, Artificial Sequence
  GFR-binding peptide
  MOD_RES (3), (4), (38): Xaa is C or S
  MOD_RES (18), (19), (20), (21), (22): Xaa is A or G
  MOD_RES (23), (24), (25), (26): Xaa is A or G or is absent
ASXXVPARLSSLSILFFXXXXXXXXXLKVYPDMVVEAXG

SEQ ID NO: 45978 - protein, 37 aa, Artificial Sequence
  GFR-binding peptide
  MOD_RES (1), (34), (36): Xaa is C or S
  MOD_RES (15), (16), (17), (18), (19): Xaa is A or G
  MOD_RES (20), (21), (22), (23): Xaa is A or G or is absent
XVPQALSSLSILFFXXXXXXXXXLKVYPMIVRSXKXS

SEQ ID NO: 45979 - protein, 38 aa, Artificial Sequence
  GFR-binding peptide
  MOD_RES (2), (3), (35), (37): Xaa is C or S
AXXAPTKLSSLSVLFFDSSNNVILKVYPNMVVKAXGXH

SEQ ID NO: 45980 - protein, 37 aa, Artificial Sequence
  GFR-binding peptide
  MOD_RES (3), (4), (37): Xaa is C or S
  MOD_RES (18), (19), (20), (21), (22): Xaa is A or G
  MOD_RES (23), (24), (25), (26): Xaa is A or G or is absent
SPXXVSQDLSSLSILFFXXXXXXXXXLKVYPMIVKSX

SEQ ID NO: 45981 - protein, 36 aa, Artificial Sequence
  GFR-binding peptide
  MOD_RES (36), (36): Xaa is C or S
  MOD_RES (15), (16), (17), (18), (19): Xaa is A or G
  MOD_RES (20), (21), (22), (23): Xaa is A or G or is absent
PSRVHHSSLSVLFFXXXXXXXXXLKVYPRLEEHLEX

SEQ ID NO: 45982 - protein, 42 aa, Artificial Sequence
  GFR-binding peptide
  MOD_RES (5), (6), (39), (41): Xaa is C or S
  MOD_RES (20), (21), (22), (23), (24): Xaa is A or G
  MOD_RES (25), (26), (27), (28): Xaa is A or G or is absent
SASPXXVSQDLSSLSILFFXXXXXXXXXLKVYPMIVKSXKXS

SEQ ID NO: 45983 - protein, 38 aa, Artificial Sequence
  GFR-binding peptide
  MOD_RES (2), (3), (36), (38): Xaa is C or S
  MOD_RES (17), (18), (19), (20), (21): Xaa is A or G
  MOD_RES (22), (23), (24), (25): Xaa is A or G or is absent
PXXVPQALSSLSILFFXXXXXXXXXLKVYPMIVRSXKX

SEQ ID NO: 45984 - protein, 39 aa, Artificial Sequence
  GFR-binding peptide
  MOD_RES (6), (7), (39): Xaa is C or S
YVPKPXXAPTKLSSLSVLFFDDSSNVILKVYPNMVVRSX

SEQ ID NO: 45985 - protein, 32 aa, Artificial Sequence
  GFR-binding peptide
  MOD_RES (32), (32): Xaa is C or S
VPTKLSSLSILFFDKGVVTYLKVYPGMAVSEX

SEQ ID NO: 45986 - protein, 32 aa, Artificial Sequence
  GFR-binding peptide
  MOD_RES (1), (2): Xaa is C or S
XXVPTRLSSLSILFFDSANNVVLKVYPDMVVE

SEQ ID NO: 45987 - protein, 35 aa, Artificial Sequence
  GFR-binding peptide
QPSRVHHSSLSVLFFEYVRKKPKLLKVYPRLEEHL

SEQ ID NO: 45988 - protein, 42 aa, Artificial Sequence
  GFR-binding peptide
  MOD_RES (4), (5), (39), (41): Xaa is C or S
  MOD_RES (19), (20), (21), (22), (23): Xaa is A or G
  MOD_RES (24), (25), (26), (27): Xaa is A or G or is absent
AGPXXTPTKMSSLSMLFFXXXXXXXXXLKVYPGMVVDRXGXS

SEQ ID NO: 45989 - protein, 38 aa, Artificial Sequence
  GFR-binding peptide
  MOD_RES (5), (6): Xaa is C or S
  MOD_RES (20), (21), (22), (23), (24): Xaa is A or G
  MOD_RES (25), (26), (27), (28): Xaa is A or G or is absent
SASPXXVSQDLSSLSILFFXXXXXXXXXLKVYPMIVKS

SEQ ID NO: 45990 - protein, 43 aa, Artificial Sequence
  GFR-binding peptide
  MOD_RES (6), (40), (42): Xaa is C or S
DEGLEXVPTEESSLSMLFFRIKPHQGQHLKVYPFLQHNKXEXR

SEQ ID NO: 45991 - protein, 34 aa, Artificial Sequence
  GFR-binding peptide
  MOD_RES (1), (2): Xaa is C or S
  MOD_RES (16), (17), (18), (19), (20): Xaa is A or G
  MOD_RES (21), (22), (23), (24): Xaa is A or G or is absent
XXVPQALSSLSILFFXXXXXXXXXLKVYPMIVRS

SEQ ID NO: 45992 - protein, 34 aa, Artificial Sequence
  GFR-binding peptide
  MOD_RES (33), (33): Xaa is C or S
  MOD_RES (14), (15), (16), (17), (18): Xaa is A or G
  MOD_RES (19), (20), (21), (22): Xaa is A or G or is absent
APVKTSSLSMLFFXXXXXXXXXLKVYPMIVEEXG

SEQ ID NO: 45993 - protein, 34 aa, Artificial Sequence
  GFR-binding peptide
  MOD_RES (3), (4): Xaa is C or S
GPXXTPTKMSSLSMLFFNDKQQIILKVYPGMVVD

SEQ ID NO: 45994 - protein, 39 aa, Artificial Sequence
  GFR-binding peptide
  MOD_RES (4), (5), (39): Xaa is C or S
  MOD_RES (19), (20), (21), (22), (23): Xaa is A or G
  MOD_RES (24), (25), (26), (27): Xaa is A or G or is absent
PKPXXAPTQLSSLSVLFFXXXXXXXXXLKVYPNMVVRAX

SEQ ID NO: 45995 - protein, 38 aa, Artificial Sequence
  GFR-binding peptide
  MOD_RES (4), (5), (38): Xaa is C or S
  MOD_RES (19), (20), (21), (22), (23): Xaa is A or G
  MOD_RES (24), (25), (26), (27): Xaa is A or G or is absent
AAPXXVPQALSSLSILFFXXXXXXXXXLKVYPMIVRSX

SEQ ID NO: 45996 - protein, 43 aa, Artificial Sequence
  GFR-binding peptide
  MOD_RES (6), (7), (41), (43): Xaa is C or S
  MOD_RES (21), (22), (23), (24), (25): Xaa is A or G
  MOD_RES (26), (27), (28), (29): Xaa is A or G or is absent
SIPKAXXVPTELSSLSMLFFXXXXXXXXXLKVYPEMVVEGXGX

SEQ ID NO: 45997 - protein, 38 aa, Artificial Sequence
  GFR-binding peptide
  MOD_RES (5), (6): Xaa is C or S
  MOD_RES (20), (21), (22), (23), (24): Xaa is A or G
  MOD_RES (25), (26), (27), (28): Xaa is A or G or is absent
SAGPXXTPTKMSSLSMLFFXXXXXXXXXLKVYPGMVVD

SEQ ID NO: 45998 - protein, 39 aa, Artificial Sequence
  GFR-binding peptide
  MOD_RES (6), (7): Xaa is C or S
  MOD_RES (21), (22), (23), (24), (25): Xaa is A or G
  MOD_RES (26), (27), (28), (29): Xaa is A or G or is absent
RVPSTXXAPVKTSSLSMLFFXXXXXXXXXLKVYPMIVEE

SEQ ID NO: 45999 - protein, 40 aa, Artificial Sequence
  GFR-binding peptide
  MOD_RES (6), (7), (39): Xaa is C or S
HVPKPXXAPTKLSSLSVLFFDDSSNVILKVYPNMVVRSXG

SEQ ID NO: 46000 - protein, 38 aa, Artificial Sequence
  GFR-binding peptide
  MOD_RES (3), (4), (38): Xaa is C or S
  MOD_RES (18), (19), (20), (21), (22): Xaa is A or G
  MOD_RES (23), (24), (25), (26): Xaa is A or G or is absent
PTXXVPTRLSSLSILFFXXXXXXXXXLKVYPDMVVESX

SEQ ID NO: 46001 - protein, 35 aa, Artificial Sequence
  GFR-binding peptide
  MOD_RES (1), (2), (34): Xaa is C or S
XXTPTKMSSLSMLFFNDKQQIILKVYPGMVVDRXG

SEQ ID NO: 46002 - protein, 37 aa, Artificial Sequence
  GFR-binding peptide
  MOD_RES (4), (5), (37): Xaa is C or S
AGPXXTPTKMSSLSMLFFNDKQQIILKVYPGMVVDRX

SEQ ID NO: 46003 - protein, 39 aa, Artificial Sequence
  GFR-binding peptide
  MOD_RES (3), (4), (36), (38): Xaa is C or S
KAXXVPTKLSSLSILFFDKGVVTYLKVYPGMAVSEXGXR

SEQ ID NO: 46004 - protein, 36 aa, Artificial Sequence
  GFR-binding peptide
  MOD_RES (5), (6): Xaa is C or S
APASXXVPARLSSLSILFFDAANNVVLKVYPDMVVE

SEQ ID NO: 46005 - protein, 37 aa, Artificial Sequence
  GFR-binding peptide
  MOD_RES (34), (36): Xaa is C or S
VPTEESSLSMLFFRIKPHQGQHLKVYPFLQHNKXEXR

SEQ ID NO: 46006 - protein, 35 aa, Artificial Sequence
  GFR-binding peptide
  MOD_RES (35), (35): Xaa is C or S
  MOD_RES (14), (15), (16), (17), (18): Xaa is A or G
  MOD_RES (19), (20), (21), (22): Xaa is A or G or is absent
VPTKLSSLSVLFFXXXXXXXXXLKVYPEGMSVAEX

SEQ ID NO: 46007 - protein, 33 aa, Artificial Sequence
  GFR-binding peptide
  MOD_RES (14), (15), (16), (17), (18): Xaa is A or G
  MOD_RES (19), (20), (21), (22): Xaa is A or G or is absent
SRVHHSSLSVLFFXXXXXXXXXLKVYPRLEEHL

SEQ ID NO: 46008 - protein, 41 aa, Artificial Sequence
  GFR-binding peptide
  MOD_RES (5), (6), (38), (40): Xaa is C or S
TPPTXXVPTRLSSLSILFFDSANNVVLKVYPDMVVESXGXR

SEQ ID NO: 46009 - protein, 39 aa, Artificial Sequence
  GFR-binding peptide
  MOD_RES (6), (38): Xaa is C or S
VTKPTXAPTKLSSLSVLFFDDSSNVILKVYPNMVVRSXG

SEQ ID NO: 46010 - protein, 38 aa, Artificial Sequence
  GFR-binding peptide
  MOD_RES (3), (4), (38): Xaa is C or S
  MOD_RES (18), (19), (20), (21), (22): Xaa is A or G
  MOD_RES (23), (24), (25), (26): Xaa is A or G or is absent
KAXXAPTKLSSLSVLFFXXXXXXXXXLKVYPNMVVKAX

SEQ ID NO: 46011 - protein, 43 aa, Artificial Sequence
  GFR-binding peptide
  MOD_RES (6), (7), (42): Xaa is C or S
  MOD_RES (21), (22), (23), (24), (25): Xaa is A or G
  MOD_RES (26), (27), (28), (29): Xaa is A or G or is absent
KVGKAXXVPTKLSSLSVLFFXXXXXXXXXLKVYPEGMSVAEXG

SEQ ID NO: 46012 - protein, 33 aa, Artificial Sequence
  GFR-binding peptide
  MOD_RES (1), (33): Xaa is C or S
XVPEKMSSLSILFFDENKNVVLKVYPNMTVESX

SEQ ID NO: 46013 - protein, 40 aa, Artificial Sequence
  GFR-binding peptide
  MOD_RES (6), (7), (39): Xaa is C or S
STPPTXXVPTRLSSLSILFFDSANNVVLKVYPDMVVESXG

SEQ ID NO: 46014 - protein, 40 aa, Artificial Sequence
  GFR-binding peptide
  MOD_RES (6), (7), (39): Xaa is C or S
TVPKPXXAPTQLSSLSVLFFDDSSNVILKVYPNMVVRAXG

SEQ ID NO: 46015 - protein, 37 aa, Artificial Sequence
  GFR-binding peptide
  MOD_RES (5), (6): Xaa is C or S
APASXXVPARLSSLSILFFDAANNVVLKVYPDMVVEA

SEQ ID NO: 46016 - protein, 40 aa, Artificial Sequence
  GFR-binding peptide
  MOD_RES (3), (4), (37), (39): Xaa is C or S
  MOD_RES (18), (19), (20), (21), (22): Xaa is A or G
  MOD_RES (23), (24), (25), (26): Xaa is A or G or is absent
STXXAPVKTSSLSMLFFXXXXXXXXXLKVYPMIVEEXGXL

SEQ ID NO: 46017 - protein, 40 aa, Artificial Sequence
  GFR-binding peptide
  MOD_RES (2), (39): Xaa is C or S
  MOD_RES (18), (19), (20), (21), (22): Xaa is A or G
  MOD_RES (23), (24), (25), (26): Xaa is A or G or is absent
KXQPSRVHHSSLSVLFFXXXXXXXXXLKVYPRLEEHLEXA

SEQ ID NO: 46018 - protein, 40 aa, Artificial Sequence
  GFR-binding peptide
  MOD_RES (6), (38), (40): Xaa is C or S
VTKPTXAPTKLSSLSVLFFDDSSNVILKVYPNMVVRSXGX

SEQ ID NO: 46019 - protein, 38 aa, Artificial Sequence
  GFR-binding peptide
  MOD_RES (4), (5), (37): Xaa is C or S
PASXXVPARLSSLSILFFDAANNVVLKVYPDMVVEAXG

SEQ ID NO: 46020 - protein, 38 aa, Artificial Sequence
  GFR-binding peptide
  MOD_RES (4), (5), (37): Xaa is C or S
AGPXXTPTKMSSLSMLFFNDKQQIILKVYPGMVVDRXG

SEQ ID NO: 46021 - protein, 39 aa, Artificial Sequence
  GFR-binding peptide
  MOD_RES (4), (38): Xaa is C or S
GLEXVPTEESSLSMLFFRIKPHQGQHLKVYPFLQHNKXE

SEQ ID NO: 46022 - protein, 37 aa, Artificial Sequence
  GFR-binding peptide
  MOD_RES (3), (4), (36): Xaa is C or S
GPXXTPTKMSSLSMLFFNDKQQIILKVYPGMVVDRXG

SEQ ID NO: 46023 - protein, 37 aa, Artificial Sequence
  GFR-binding peptide
  MOD_RES (4), (4): Xaa is C or S
  MOD_RES (18), (19), (20), (21), (22): Xaa is A or G
  MOD_RES (23), (24), (25), (26): Xaa is A or G or is absent
GLEXVPTEESSLSMLFFXXXXXXXXXLKVYPFLQHNK

SEQ ID NO: 46024 - protein, 33 aa, Artificial Sequence
  GFR-binding peptide
  MOD_RES (1), (1): Xaa is C or S
  MOD_RES (15), (16), (17), (18), (19): Xaa is A or G
  MOD_RES (20), (21), (22), (23): Xaa is A or G or is absent
XVPARLSSLSILFFXXXXXXXXXLKVYPDMVVE

SEQ ID NO: 46025 - protein, 33 aa, Artificial Sequence
  GFR-binding peptide
PSRVHHSSLSVLFFEYVRKKPKLLKVYPRLEEH

SEQ ID NO: 46026 - protein, 32 aa, Artificial Sequence
  GFR-binding peptide
  MOD_RES (1), (32): Xaa is C or S
XVPQDLSSLSILFFVGRTPKVLKVYPMVVKSX

SEQ ID NO: 46027 - protein, 38 aa, Artificial Sequence
  GFR-binding peptide
  MOD_RES (1), (35), (37): Xaa is C or S
  MOD_RES (15), (16), (17), (18), (19): Xaa is A or G
  MOD_RES (20), (21), (22), (23): Xaa is A or G or is absent
XAPTKLSSLSVLFFXXXXXXXXXLKVYPNMVVRSXGXH

SEQ ID NO: 46028 - protein, 39 aa, Artificial Sequence
  GFR-binding peptide
  MOD_RES (3), (4), (37), (39): Xaa is C or S
KAXXVPTKLSSLSVLFFDDMGVPTLKVYPEGMSVAEXGX

SEQ ID NO: 46029 - protein, 38 aa, Artificial Sequence
  GFR-binding peptide
  MOD_RES (1), (2), (35), (37): Xaa is C or S
  MOD_RES (16), (17), (18), (19), (20): Xaa is A or G
  MOD_RES (21), (22), (23), (24): Xaa is A or G or is absent
XXVPQDLSSLSILFFXXXXXXXXXLKVYPMVVKSXKXS

SEQ ID NO: 46030 - protein, 36 aa, Artificial Sequence
  GFR-binding peptide
  MOD_RES (1), (2), (36): Xaa is C or S
  MOD_RES (16), (17), (18), (19), (20): Xaa is A or G
  MOD_RES (21), (22), (23), (24): Xaa is A or G or is absent
XXAPTKLSSLSVLFFXXXXXXXXXLKVYPNMVVRSX

SEQ ID NO: 46031 - protein, 39 aa, Artificial Sequence
  GFR-binding peptide
  MOD_RES (4), (5), (37), (39): Xaa is C or S
PPTXXVPTRLSSLSILFFDSANNVVLKVYPDMVVESXGX

SEQ ID NO: 46032 - protein, 37 aa, Artificial Sequence
  GFR-binding peptide
  MOD_RES (2), (3), (35), (37): Xaa is C or S
PXXTPTKMSSLSMLFFNDKQQIILKVYPGMVVDRXGX

SEQ ID NO: 46033 - protein, 38 aa, Artificial Sequence
  GFR-binding peptide
  MOD_RES (3), (4), (36), (38): Xaa is C or S
KPXXAPTQLSSLSVLFFDDSSNVILKVYPNMVVRAXGX

SEQ ID NO: 46034 - protein, 38 aa, Artificial Sequence
  GFR-binding peptide
  MOD_RES (5), (6): Xaa is C or S
  MOD_RES (20), (21), (22), (23), (24): Xaa is A or G
  MOD_RES (25), (26), (27), (28): Xaa is A or G or is absent
IPEPXXVPEKMSSLSILFFXXXXXXXXXLKVYPNMTVE

SEQ ID NO: 46035 - protein, 44 aa, Artificial Sequence
  GFR-binding peptide
  MOD_RES (5), (42), (44): Xaa is C or S
  MOD_RES (21), (22), (23), (24), (25): Xaa is A or G
  MOD_RES (26), (27), (28), (29): Xaa is A or G or is absent
SSVKXQPSRVHHSSLSVLFFXXXXXXXXXLKVYPRLEEHLEXAX

SEQ ID NO: 46036 - protein, 31 aa, Artificial Sequence
  GFR-binding peptide
  MOD_RES (31), (31): Xaa is C or S
VSQDLSSLSILFFIGKTPKILKVYPMIVKSX

SEQ ID NO: 46037 - protein, 36 aa, Artificial Sequence
  GFR-binding peptide
  MOD_RES (2), (3), (35): Xaa is C or S
AXXAPTKLSSLSVLFFDSSNNVILKVYPNMVVKAXG

SEQ ID NO: 46038 - protein, 37 aa, Artificial Sequence
  GFR-binding peptide
  MOD_RES (4), (5), (37): Xaa is C or S
PEPXXVPEKMSSLSILFFDENKNVVLKVYPNMTVESX

SEQ ID NO: 46039 - protein, 42 aa, Artificial Sequence
  GFR-binding peptide
  MOD_RES (4), (41): Xaa is C or S
  MOD_RES (20), (21), (22), (23), (24): Xaa is A or G
  MOD_RES (25), (26), (27), (28): Xaa is A or G or is absent
SVKXQPSRVHHSSLSVLFFXXXXXXXXXLKVYPRLEEHLEXA

SEQ ID NO: 46040 - protein, 34 aa, Artificial Sequence
  GFR-binding peptide
  MOD_RES (31), (33): Xaa is C or S
VSQDLSSLSILFFIGKTPKILKVYPMIVKSXKXS

SEQ ID NO: 46041 - protein, 41 aa, Artificial Sequence
  GFR-binding peptide
  MOD_RES (6), (7), (39), (41): Xaa is C or S
GIPEPXXVPEKMSSLSILFFDENKNVVLKVYPNMTVESXAX

SEQ ID NO: 46042 - protein, 38 aa, Artificial Sequence
  GFR-binding peptide
  MOD_RES (5), (5): Xaa is C or S
  MOD_RES (19), (20), (21), (22), (23): Xaa is A or G
  MOD_RES (24), (25), (26), (27): Xaa is A or G or is absent
EGLEXVPTEESSLSMLFFXXXXXXXXXLKVYPFLQHNK

SEQ ID NO: 46043 - protein, 39 aa, Artificial Sequence
  GFR-binding peptide
  MOD_RES (5), (6): Xaa is C or S
  MOD_RES (20), (21), (22), (23), (24): Xaa is A or G
  MOD_RES (25), (26), (27), (28): Xaa is A or G or is absent
ASKAXXVPTKLSSLSILFFXXXXXXXXXLKVYPGMAVSE

SEQ ID NO: 46044 - protein, 33 aa, Artificial Sequence
  GFR-binding peptide
  MOD_RES (2), (3): Xaa is C or S
SXXVPARLSSLSILFFDAANNVVLKVYPDMVVE

SEQ ID NO: 46045 - protein, 36 aa, Artificial Sequence
  GFR-binding peptide
  MOD_RES (3), (4), (36): Xaa is C or S
KAXXVPTKLSSLSILFFDKGVVTYLKVYPGMAVSEX

SEQ ID NO: 46046 - protein, 38 aa, Artificial Sequence
  GFR-binding peptide
  MOD_RES (5), (6), (37): Xaa is C or S
SASPXXVPQDLSSLSILFFVGRTPKVLKVYPMVVKSXK

SEQ ID NO: 46047 - protein, 35 aa, Artificial Sequence
  GFR-binding peptide
  MOD_RES (32), (34): Xaa is C or S
VPTRLSSLSILFFDSANNVVLKVYPDMVVESXGXR

SEQ ID NO: 46048 - protein, 38 aa, Artificial Sequence
  GFR-binding peptide
  MOD_RES (4), (5), (36), (38): Xaa is C or S
ASPXXVSQDLSSLSILFFIGKTPKILKVYPMIVKSXKX

SEQ ID NO: 46049 - protein, 42 aa, Artificial Sequence
  GFR-binding peptide
  MOD_RES (5), (6), (39), (41): Xaa is C or S
  MOD_RES (20), (21), (22), (23), (24): Xaa is A or G
  MOD_RES (25), (26), (27), (28): Xaa is A or G or is absent
SASPXXVPQDLSSLSILFFXXXXXXXXXLKVYPMVVKSXKXS

SEQ ID NO: 46050 - protein, 38 aa, Artificial Sequence
  GFR-binding peptide
  MOD_RES (1), (35), (37): Xaa is C or S
  MOD_RES (15), (16), (17), (18), (19): Xaa is A or G
  MOD_RES (20), (21), (22), (23): Xaa is A or G or is absent
XVPTRLSSLSILFFXXXXXXXXXLKVYPDMVVESXGXR

SEQ ID NO: 46051 - protein, 41 aa, Artificial Sequence
  GFR-binding peptide
  MOD_RES (5), (6), (41): Xaa is C or S
  MOD_RES (20), (21), (22), (23), (24): Xaa is A or G
  MOD_RES (25), (26), (27), (28): Xaa is A or G or is absent
VGKAXXVPTKLSSLSVLFFXXXXXXXXXLKVYPEGMSVAEX

SEQ ID NO: 46052 - protein, 42 aa, Artificial Sequence
  GFR-binding peptide
  MOD_RES (7), (41): Xaa is C or S
NDEGLEXVPTEESSLSMLFFRIKPHQGQHLKVYPFLQHNKXE

SEQ ID NO: 46053 - protein, 37 aa, Artificial Sequence
  GFR-binding peptide
  MOD_RES (3), (4), (37): Xaa is C or S
KAXXVPTKLSSLSVLFFDDMGVPTLKVYPEGMSVAEX

SEQ ID NO: 46054 - protein, 35 aa, Artificial Sequence
  GFR-binding peptide
  MOD_RES (3), (4), (35): Xaa is C or S
APXXVPQALSSLSILFFVGRKPKVLKVYPMIVRSX

SEQ ID NO: 46055 - protein, 39 aa, Artificial Sequence
  GFR-binding peptide
  MOD_RES (5), (6): Xaa is C or S
  MOD_RES (20), (21), (22), (23), (24): Xaa is A or G
  MOD_RES (25), (26), (27), (28): Xaa is A or G or is absent
VPKPXXAPTKLSSLSVLFFXXXXXXXXXLKVYPNMVVRS

SEQ ID NO: 46056 - protein, 35 aa, Artificial Sequence
  GFR-binding peptide
  MOD_RES (3), (4): Xaa is C or S
PTXXVPTRLSSLSILFFDSANNVVLKVYPDMVVES

SEQ ID NO: 46057 - protein, 41 aa, Artificial Sequence
  GFR-binding peptide
  MOD_RES (5), (5): Xaa is C or S
SSVKXQPSRVHHSSLSVLFFEYVRKKPKLLKVYPRLEEHLE

SEQ ID NO: 46058 - protein, 32 aa, Artificial Sequence
  GFR-binding peptide
  MOD_RES (1), (2): Xaa is C or S
XXVPTKLSSLSILFFDKGVVTYLKVYPGMAVS

SEQ ID NO: 46059 - protein, 36 aa, Artificial Sequence
  GFR-binding peptide
  MOD_RES (1), (2), (36): Xaa is C or S
  MOD_RES (16), (17), (18), (19), (20): Xaa is A or G
  MOD_RES (21), (22), (23), (24): Xaa is A or G or is absent
XXVPTKLSSLSILFFXXXXXXXXXLKVYPGMAVSEX

SEQ ID NO: 46060 - protein, 34 aa, Artificial Sequence
  GFR-binding peptide
  MOD_RES (1), (1): Xaa is C or S
  MOD_RES (15), (16), (17), (18), (19): Xaa is A or G
  MOD_RES (20), (21), (22), (23): Xaa is A or G or is absent
XVPTRLSSLSILFFXXXXXXXXXLKVYPDMVVES

SEQ ID NO: 46061 - protein, 39 aa, Artificial Sequence
  GFR-binding peptide
  MOD_RES (4), (5), (37), (39): Xaa is C or S
PKPXXAPTQLSSLSVLFFDDSSNVILKVYPNMVVRAXGX

SEQ ID NO: 46062 - protein, 44 aa, Artificial Sequence
  GFR-binding peptide
  MOD_RES (6), (7), (41), (43): Xaa is C or S
  MOD_RES (21), (22), (23), (24), (25): Xaa is A or G
  MOD_RES (26), (27), (28), (29): Xaa is A or G or is absent
GIPEPXXVPEKMSSLSILFFXXXXXXXXXLKVYPNMTVESXAXR

SEQ ID NO: 46063 - protein, 42 aa, Artificial Sequence
  GFR-binding peptide
  MOD_RES (6), (7), (40), (42): Xaa is C or S
  MOD_RES (21), (22), (23), (24), (25): Xaa is A or G
  MOD_RES (26), (27), (28), (29): Xaa is A or G or is absent
RVPSTXXAPVKTSSLSMLFFXXXXXXXXXLKVYPMIVEEXGX

SEQ ID NO: 46064 - protein, 31 aa, Artificial Sequence
  GFR-binding peptide
VPARLSSLSILFFDAANNVVLKVYPDMVVEA

SEQ ID NO: 46065 - protein, 37 aa, Artificial Sequence
  GFR-binding peptide
  MOD_RES (2), (3), (36): Xaa is C or S
  MOD_RES (17), (18), (19), (20), (21): Xaa is A or G
  MOD_RES (22), (23), (24), (25): Xaa is A or G or is absent
PXXVSQDLSSLSILFFXXXXXXXXXLKVYPMIVKSXK

SEQ ID NO: 46066 - protein, 34 aa, Artificial Sequence
  GFR-binding peptide
  MOD_RES (3), (4): Xaa is C or S
APXXVPQALSSLSILFFVGRKPKVLKVYPMIVRS

SEQ ID NO: 46067 - protein, 35 aa, Artificial Sequence
  GFR-binding peptide
  MOD_RES (4), (5): Xaa is C or S
PASXXVPARLSSLSILFFDAANNVVLKVYPDMVVE

SEQ ID NO: 46068 - protein, 40 aa, Artificial Sequence
  GFR-binding peptide
  MOD_RES (5), (6), (38), (40): Xaa is C or S
VPKPXXAPTKLSSLSVLFFDDSSNVILKVYPNMVVRSXGX

SEQ ID NO: 46069 - protein, 41 aa, Artificial Sequence
  GFR-binding peptide
  MOD_RES (5), (6), (39), (41): Xaa is C or S
  MOD_RES (20), (21), (22), (23), (24): Xaa is A or G
  MOD_RES (25), (26), (27), (28): Xaa is A or G or is absent
SASPXXVPQDLSSLSILFFXXXXXXXXXLKVYPMVVKSXKX

SEQ ID NO: 46070 - protein, 39 aa, Artificial Sequence
  GFR-binding peptide
  MOD_RES (6), (7): Xaa is C or S
  MOD_RES (21), (22), (23), (24), (25): Xaa is A or G
  MOD_RES (26), (27), (28), (29): Xaa is A or G or is absent
ASAAPXXVPQALSSLSILFFXXXXXXXXXLKVYPMIVRS

SEQ ID NO: 46071 - protein, 39 aa, Artificial Sequence
  GFR-binding peptide
  MOD_RES (7), (7): Xaa is C or S
NDEGLEXVPTEESSLSMLFFRIKPHQGQHLKVYPFLQHN

SEQ ID NO: 46072 - protein, 37 aa, Artificial Sequence
  GFR-binding peptide
  MOD_RES (2), (3), (34), (36): Xaa is C or S
PXXVPQALSSLSILFFVGRKPKVLKVYPMIVRSXKXS

SEQ ID NO: 46073 - protein, 39 aa, Artificial Sequence
  GFR-binding peptide
  MOD_RES (1), (2), (36), (38): Xaa is C or S
  MOD_RES (16), (17), (18), (19), (20): Xaa is A or G
  MOD_RES (21), (22), (23), (24): Xaa is A or G or is absent
XXVPTKLSSLSILFFXXXXXXXXXLKVYPGMAVSEXGXR

SEQ ID NO: 46074 - protein, 36 aa, Artificial Sequence
  GFR-binding peptide
  MOD_RES (5), (5): Xaa is C or S
TKPTXAPTKLSSLSVLFFDDSSNVILKVYPNMVVRS

SEQ ID NO: 46075 - protein, 35 aa, Artificial Sequence
  GFR-binding peptide
  MOD_RES (4), (5): Xaa is C or S
AGPXXTPTKMSSLSMLFFNDKQQIILKVYPGMVVD

SEQ ID NO: 46076 - protein, 36 aa, Artificial Sequence
  GFR-binding peptide
  MOD_RES (1), (33), (35): Xaa is C or S
XTPTKMSSLSMLFFNDKQQIILKVYPGMVVDRXGXS

SEQ ID NO: 46077 - protein, 34 aa, Artificial Sequence
  GFR-binding peptide
  MOD_RES (2), (3): Xaa is C or S
PXXAPTQLSSLSVLFFDDSSNVILKVYPNMVVRA

SEQ ID NO: 46078 - protein, 31 aa, Artificial Sequence
  GFR-binding peptide
  MOD_RES (1), (1): Xaa is C or S
XVPEKMSSLSILFFDENKNVVLKVYPNMTVE

SEQ ID NO: 46079 - protein, 40 aa, Artificial Sequence
  GFR-binding peptide
  MOD_RES (3), (4), (38), (40): Xaa is C or S
  MOD_RES (18), (19), (20), (21), (22): Xaa is A or G
  MOD_RES (23), (24), (25), (26): Xaa is A or G or is absent
KPXXAPTKLSSLSVLFFXXXXXXXXXLKVYPNMVVRSXGX

SEQ ID NO: 46080 - protein, 42 aa, Artificial Sequence
  GFR-binding peptide
  MOD_RES (6), (7), (41): Xaa is C or S
  MOD_RES (21), (22), (23), (24), (25): Xaa is A or G
  MOD_RES (26), (27), (28), (29): Xaa is A or G or is absent
GSAGPXXTPTKMSSLSMLFFXXXXXXXXXLKVYPGMVVDRXG

SEQ ID NO: 46081 - protein, 34 aa, Artificial Sequence
  GFR-binding peptide
  MOD_RES (1), (2): Xaa is C or S
  MOD_RES (16), (17), (18), (19), (20): Xaa is A or G
  MOD_RES (21), (22), (23), (24): Xaa is A or G or is absent
XXVPTELSSLSMLFFXXXXXXXXXLKVYPEMVVE

SEQ ID NO: 46082 - protein, 34 aa, Artificial Sequence
  GFR-binding peptide
  MOD_RES (1), (1): Xaa is C or S
  MOD_RES (15), (16), (17), (18), (19): Xaa is A or G
  MOD_RES (20), (21), (22), (23): Xaa is A or G or is absent
XVPEKMSSLSILFFXXXXXXXXXLKVYPNMTVES

SEQ ID NO: 46083 - protein, 34 aa, Artificial Sequence
  GFR-binding peptide
  MOD_RES (3), (4): Xaa is C or S
KAXXVPTKLSSLSILFFDKGVVTYLKVYPGMAVS

SEQ ID NO: 46084 - protein, 37 aa, Artificial Sequence
  GFR-binding peptide
  MOD_RES (35), (37): Xaa is C or S
  MOD_RES (14), (15), (16), (17), (18): Xaa is A or G
  MOD_RES (19), (20), (21), (22): Xaa is A or G or is absent
SRVHHSSLSVLFFXXXXXXXXXLKVYPRLEEHLEXAX

SEQ ID NO: 46085 - protein, 37 aa, Artificial Sequence
  GFR-binding peptide
  MOD_RES (2), (34), (36): Xaa is C or S
TXAPTKLSSLSVLFFDDSSNVILKVYPNMVVRSXGXH

SEQ ID NO: 46086 - protein, 41 aa, Artificial Sequence
  GFR-binding peptide
  MOD_RES (5), (6), (38), (40): Xaa is C or S
IPEPXXVPEKMSSLSILFFDENKNVVLKVYPNMTVESXAXR

SEQ ID NO: 46087 - protein, 33 aa, Artificial Sequence
  GFR-binding peptide
  MOD_RES (1), (33): Xaa is C or S
XTPTKMSSLSMLFFNDKQQIILKVYPGMVVDRX

SEQ ID NO: 46088 - protein, 35 aa, Artificial Sequence
  GFR-binding peptide
  MOD_RES (1), (33), (35): Xaa is C or S
XVPARLSSLSILFFDAANNVVLKVYPDMVVEAXGX

SEQ ID NO: 46089 - protein, 35 aa, Artificial Sequence
  GFR-binding peptide
  MOD_RES (4), (5): Xaa is C or S
ASPXXVSQDLSSLSILFFIGKTPKILKVYPMIVKS

SEQ ID NO: 46090 - protein, 42 aa, Artificial Sequence
  GFR-binding peptide
  MOD_RES (5), (42): Xaa is C or S
SSVKXQPSRVHHSSLSVLFFEYVRKKPKLLKVYPRLEEHLEX

SEQ ID NO: 46091 - protein, 40 aa, Artificial Sequence
  GFR-binding peptide
  MOD_RES (4), (5), (39): Xaa is C or S
  MOD_RES (19), (20), (21), (22), (23): Xaa is A or G
  MOD_RES (24), (25), (26), (27): Xaa is A or G or is absent
PASXXVPARLSSLSILFFXXXXXXXXXLKVYPDMVVEAXG

SEQ ID NO: 46092 - protein, 39 aa, Artificial Sequence
  GFR-binding peptide
  MOD_RES (5), (6), (39): Xaa is C or S
  MOD_RES (20), (21), (22), (23), (24): Xaa is A or G
  MOD_RES (25), (26), (27), (28): Xaa is A or G or is absent
SASPXXVSQDLSSLSILFFXXXXXXXXXLKVYPMIVKSX

SEQ ID NO: 46093 - protein, 38 aa, Artificial Sequence
  GFR-binding peptide
  MOD_RES (3), (4), (36), (38): Xaa is C or S
KAXXAPTKLSSLSVLFFDSSNNVILKVYPNMVVKAXGX

SEQ ID NO: 46094 - protein, 35 aa, Artificial Sequence
  GFR-binding peptide
  MOD_RES (1), (35): Xaa is C or S
  MOD_RES (15), (16), (17), (18), (19): Xaa is A or G
  MOD_RES (20), (21), (22), (23): Xaa is A or G or is absent
XAPTKLSSLSVLFFXXXXXXXXXLKVYPNMVVKAX

SEQ ID NO: 46095 - protein, 34 aa, Artificial Sequence
  GFR-binding peptide
  MOD_RES (34), (34): Xaa is C or S
VPTEESSLSMLFFRIKPHQGQHLKVYPFLQHNKX

SEQ ID NO: 46096 - protein, 33 aa, Artificial Sequence
  GFR-binding peptide
  MOD_RES (33), (33): Xaa is C or S
  MOD_RES (14), (15), (16), (17), (18): Xaa is A or G
  MOD_RES (19), (20), (21), (22): Xaa is A or G or is absent
VPQALSSLSILFFXXXXXXXXXLKVYPMIVRSX

SEQ ID NO: 46097 - protein, 38 aa, Artificial Sequence
  GFR-binding peptide
  MOD_RES (2), (3), (37): Xaa is C or S
  MOD_RES (17), (18), (19), (20), (21): Xaa is A or G
  MOD_RES (22), (23), (24), (25): Xaa is A or G or is absent
TXXVPTRLSSLSILFFXXXXXXXXXLKVYPDMVVESXG

SEQ ID NO: 46098 - protein, 38 aa, Artificial Sequence
  GFR-binding peptide
  MOD_RES (6), (38): Xaa is C or S
VTKPTXAPTKLSSLSVLFFDDSSNVILKVYPNMVVRSX

SEQ ID NO: 46099 - protein, 36 aa, Artificial Sequence
  GFR-binding peptide
  MOD_RES (34), (36): Xaa is C or S
  MOD_RES (14), (15), (16), (17), (18): Xaa is A or G
  MOD_RES (19), (20), (21), (22): Xaa is A or G or is absent
VPTELSSLSMLFFXXXXXXXXXLKVYPEMVVEGXGX

SEQ ID NO: 46100 - protein, 38 aa, Artificial Sequence
  GFR-binding peptide
  MOD_RES (1), (2), (35), (37): Xaa is C or S
  MOD_RES (16), (17), (18), (19), (20): Xaa is A or G
  MOD_RES (21), (22), (23), (24): Xaa is A or G or is absent
XXVSQDLSSLSILFFXXXXXXXXXLKVYPMIVKSXKXS

SEQ ID NO: 46101 - protein, 33 aa, Artificial Sequence
  GFR-binding peptide
  MOD_RES (1), (1): Xaa is C or S
  MOD_RES (15), (16), (17), (18), (19): Xaa is A or G
  MOD_RES (20), (21), (22), (23): Xaa is A or G or is absent
XVPTKLSSLSILFFXXXXXXXXXLKVYPGMAVS

SEQ ID NO: 46102 - protein, 34 aa, Artificial Sequence
  GFR-binding peptide
  MOD_RES (1), (2), (34): Xaa is C or S
XXVPARLSSLSILFFDAANNVVLKVYPDMVVEAX

SEQ ID NO: 46103 - protein, 32 aa, Artificial Sequence
  GFR-binding peptide
  MOD_RES (31), (31): Xaa is C or S
VPQDLSSLSILFFVGRTPKVLKVYPMVVKSXK

SEQ ID NO: 46104 - protein, 38 aa, Artificial Sequence
  GFR-binding peptide
  MOD_RES (3), (4), (38): Xaa is C or S
  MOD_RES (18), (19), (20), (21), (22): Xaa is A or G
  MOD_RES (23), (24), (25), (26): Xaa is A or G or is absent
KAXXVPTELSSLSMLFFXXXXXXXXXLKVYPEMVVEGX

SEQ ID NO: 46105 - protein, 41 aa, Artificial Sequence
  GFR-binding peptide
  MOD_RES (7), (39), (41): Xaa is C or S
HVTKPTXAPTKLSSLSVLFFDDSSNVILKVYPNMVVRSXGX

SEQ ID NO: 46106 - protein, 38 aa, Artificial Sequence
  GFR-binding peptide
  MOD_RES (3), (37): Xaa is C or S
  MOD_RES (17), (18), (19), (20), (21): Xaa is A or G
  MOD_RES (22), (23), (24), (25): Xaa is A or G or is absent
PTXAPTKLSSLSVLFFXXXXXXXXXLKVYPNMVVRSXG

SEQ ID NO: 46107 - protein, 40 aa, Artificial Sequence
  GFR-binding peptide
  MOD_RES (5), (6), (40): Xaa is C or S
  MOD_RES (20), (21), (22), (23), (24): Xaa is A or G
  MOD_RES (25), (26), (27), (28): Xaa is A or G or is absent
APASXXVPARLSSLSILFFXXXXXXXXXLKVYPDMVVEAX

SEQ ID NO: 46108 - protein, 39 aa, Artificial Sequence
  GFR-binding peptide
  MOD_RES (4), (4): Xaa is C or S
SVKXQPSRVHHSSLSVLFFEYVRKKPKLLKVYPRLEEHL

SEQ ID NO: 46109 - protein, 37 aa, Artificial Sequence
  GFR-binding peptide
  MOD_RES (1), (2), (36): Xaa is C or S
  MOD_RES (16), (17), (18), (19), (20): Xaa is A or G
  MOD_RES (21), (22), (23), (24): Xaa is A or G or is absent
XXVPEKMSSLSILFFXXXXXXXXXLKVYPNMTVESXA

SEQ ID NO: 46110 - protein, 38 aa, Artificial Sequence
  GFR-binding peptide
  MOD_RES (3), (4), (36), (38): Xaa is C or S
PTXXVPTRLSSLSILFFDSANNVVLKVYPDMVVESXGX

SEQ ID NO: 46111 - protein, 43 aa, Artificial Sequence
  GFR-binding peptide
  MOD_RES (6), (7), (40), (42): Xaa is C or S
  MOD_RES (21), (22), (23), (24), (25): Xaa is A or G
  MOD_RES (26), (27), (28), (29): Xaa is A or G or is absent
ASAAPXXVPQALSSLSILFFXXXXXXXXXLKVYPMIVRSXKXS

SEQ ID NO: 46112 - protein, 42 aa, Artificial Sequence
  GFR-binding peptide
  MOD_RES (4), (5), (39), (41): Xaa is C or S
  MOD_RES (19), (20), (21), (22), (23): Xaa is A or G
  MOD_RES (24), (25), (26), (27): Xaa is A or G or is absent
PEPXXVPEKMSSLSILFFXXXXXXXXXLKVYPNMTVESXAXR

SEQ ID NO: 46113 - protein, 32 aa, Artificial Sequence
  GFR-binding peptide
  MOD_RES (1), (2): Xaa is C or S
XXVPEKMSSLSILFFDENKNVVLKVYPNMTVE

SEQ ID NO: 46114 - protein, 39 aa, Artificial Sequence
  GFR-binding peptide
  MOD_RES (6), (6): Xaa is C or S
  MOD_RES (20), (21), (22), (23), (24): Xaa is A or G
  MOD_RES (25), (26), (27), (28): Xaa is A or G or is absent
DEGLEXVPTEESSLSMLFFXXXXXXXXXLKVYPFLQHNK

SEQ ID NO: 46115 - protein, 38 aa, Artificial Sequence
  GFR-binding peptide
  MOD_RES (5), (6): Xaa is C or S
  MOD_RES (20), (21), (22), (23), (24): Xaa is A or G
  MOD_RES (25), (26), (27), (28): Xaa is A or G or is absent
SASPXXVPQDLSSLSILFFXXXXXXXXXLKVYPMVVKS

SEQ ID NO: 46116 - protein, 37 aa, Artificial Sequence
  GFR-binding peptide
  MOD_RES (6), (7): Xaa is C or S
KASKAXXVPTKLSSLSILFFDKGVVTYLKVYPGMAVS

SEQ ID NO: 46117 - protein, 37 aa, Artificial Sequence
  GFR-binding peptide
  MOD_RES (4), (36): Xaa is C or S
KPTXAPTKLSSLSVLFFDDSSNVILKVYPNMVVRSXG

SEQ ID NO: 46118 - protein, 33 aa, Artificial Sequence
  GFR-binding peptide
  MOD_RES (1), (2), (33): Xaa is C or S
XXAPVKTSSLSMLFFDNGRVLLLKVYPMIVEEX

SEQ ID NO: 46119 - protein, 34 aa, Artificial Sequence
  GFR-binding peptide
  MOD_RES (1), (34): Xaa is C or S
  MOD_RES (15), (16), (17), (18), (19): Xaa is A or G
  MOD_RES (20), (21), (22), (23): Xaa is A or G or is absent
XVSQDLSSLSILFFXXXXXXXXXLKVYPMIVKSX

SEQ ID NO: 46120 - protein, 33 aa, Artificial Sequence
  GFR-binding peptide
  MOD_RES (2), (3): Xaa is C or S
PXXVPEKMSSLSILFFDENKNVVLKVYPNMTVE

SEQ ID NO: 46121 - protein, 33 aa, Artificial Sequence
  GFR-binding peptide
  MOD_RES (1), (2): Xaa is C or S
XXVPARLSSLSILFFDAANNVVLKVYPDMVVEA

SEQ ID NO: 46122 - protein, 41 aa, Artificial Sequence
  GFR-binding peptide
  MOD_RES (3), (4), (38), (40): Xaa is C or S
  MOD_RES (18), (19), (20), (21), (22): Xaa is A or G
  MOD_RES (23), (24), (25), (26): Xaa is A or G or is absent
GPXXTPTKMSSLSMLFFXXXXXXXXXLKVYPGMVVDRXGXS

SEQ ID NO: 46123 - protein, 39 aa, Artificial Sequence
  GFR-binding peptide
  MOD_RES (6), (7): Xaa is C or S
  MOD_RES (21), (22), (23), (24), (25): Xaa is A or G
  MOD_RES (26), (27), (28), (29): Xaa is A or G or is absent
ASASPXXVPQDLSSLSILFFXXXXXXXXXLKVYPMVVKS

SEQ ID NO: 46124 - protein, 34 aa, Artificial Sequence
  GFR-binding peptide
  MOD_RES (1), (2), (34): Xaa is C or S
XXVPTRLSSLSILFFDSANNVVLKVYPDMVVESX

SEQ ID NO: 46125 - protein, 32 aa, Artificial Sequence
  GFR-binding peptide
  MOD_RES (32), (32): Xaa is C or S
VPEKMSSLSILFFDENKNVVLKVYPNMTVESX

SEQ ID NO: 46126 - protein, 41 aa, Artificial Sequence
  GFR-binding peptide
  MOD_RES (4), (5), (38), (40): Xaa is C or S
  MOD_RES (19), (20), (21), (22), (23): Xaa is A or G
  MOD_RES (24), (25), (26), (27): Xaa is A or G or is absent
ASPXXVPQDLSSLSILFFXXXXXXXXXLKVYPMVVKSXKXS

SEQ ID NO: 46127 - protein, 34 aa, Artificial Sequence
  GFR-binding peptide
  MOD_RES (32), (34): Xaa is C or S
APTKLSSLSVLFFDSSNNVILKVYPNMVVKAXGX

SEQ ID NO: 46128 - protein, 38 aa, Artificial Sequence
  GFR-binding peptide
  MOD_RES (4), (38): Xaa is C or S
  MOD_RES (18), (19), (20), (21), (22): Xaa is A or G
  MOD_RES (23), (24), (25), (26): Xaa is A or G or is absent
KPTXAPTKLSSLSVLFFXXXXXXXXXLKVYPNMVVRSX

SEQ ID NO: 46129 - protein, 40 aa, Artificial Sequence
  GFR-binding peptide
  MOD_RES (6), (7): Xaa is C or S
  MOD_RES (21), (22), (23), (24), (25): Xaa is A or G
  MOD_RES (26), (27), (28), (29): Xaa is A or G or is absent
GIPEPXXVPEKMSSLSILFFXXXXXXXXXLKVYPNMTVES

SEQ ID NO: 46130 - protein, 33 aa, Artificial Sequence
  GFR-binding peptide
  MOD_RES (14), (15), (16), (17), (18): Xaa is A or G
  MOD_RES (19), (20), (21), (22): Xaa is A or G or is absent
VPTELSSLSMLFFXXXXXXXXXLKVYPEMVVEG

SEQ ID NO: 46131 - protein, 37 aa, Artificial Sequence
  GFR-binding peptide
  MOD_RES (5), (6): Xaa is C or S
TPPTXXVPTRLSSLSILFFDSANNVVLKVYPDMVVES

SEQ ID NO: 46132 - protein, 40 aa, Artificial Sequence
  GFR-binding peptide
  MOD_RES (6), (7), (38), (40): Xaa is C or S
RVPSTXXAPVKTSSLSMLFFDNGRVLLLKVYPMIVEEXGX

SEQ ID NO: 46133 - protein, 37 aa, Artificial Sequence
  GFR-binding peptide
  MOD_RES (34), (36): Xaa is C or S
  MOD_RES (14), (15), (16), (17), (18): Xaa is A or G
  MOD_RES (19), (20), (21), (22): Xaa is A or G or is absent
VPTEESSLSMLFFXXXXXXXXXLKVYPFLQHNKXEXR

SEQ ID NO: 46134 - protein, 41 aa, Artificial Sequence
  GFR-binding peptide
  MOD_RES (3), (4), (39), (41): Xaa is C or S
  MOD_RES (18), (19), (20), (21), (22): Xaa is A or G
  MOD_RES (23), (24), (25), (26): Xaa is A or G or is absent
KAXXVPTKLSSLSVLFFXXXXXXXXXLKVYPEGMSVAEXGX

SEQ ID NO: 46135 - protein, 33 aa, Artificial Sequence
  GFR-binding peptide
  MOD_RES (2), (3): Xaa is C or S
AXXAPTKLSSLSVLFFDSSNNVILKVYPNMVVK

SEQ ID NO: 46136 - protein, 39 aa, Artificial Sequence
  GFR-binding peptide
  MOD_RES (5), (39): Xaa is C or S
  MOD_RES (19), (20), (21), (22), (23): Xaa is A or G
  MOD_RES (24), (25), (26), (27): Xaa is A or G or is absent
TKPTXAPTKLSSLSVLFFXXXXXXXXXLKVYPNMVVRSX

SEQ ID NO: 46137 - protein, 37 aa, Artificial Sequence
  GFR-binding peptide
  MOD_RES (3), (3): Xaa is C or S
  MOD_RES (19), (20), (21), (22), (23): Xaa is A or G
  MOD_RES (24), (25), (26), (27): Xaa is A or G or is absent
VKXQPSRVHHSSLSVLFFXXXXXXXXXLKVYPRLEEH

SEQ ID NO: 46138 - protein, 36 aa, Artificial Sequence
  GFR-binding peptide
  MOD_RES (33), (35): Xaa is C or S
  MOD_RES (14), (15), (16), (17), (18): Xaa is A or G
  MOD_RES (19), (20), (21), (22): Xaa is A or G or is absent
VPQDLSSLSILFFXXXXXXXXXLKVYPMVVKSXKXS

SEQ ID NO: 46139 - protein, 31 aa, Artificial Sequence
  GFR-binding peptide
  MOD_RES (1), (1): Xaa is C or S
XVPTRLSSLSILFFDSANNVVLKVYPDMVVE

SEQ ID NO: 46140 - protein, 38 aa, Artificial Sequence
  GFR-binding peptide
  MOD_RES (5), (6): Xaa is C or S
  MOD_RES (20), (21), (22), (23), (24): Xaa is A or G
  MOD_RES (25), (26), (27), (28): Xaa is A or G or is absent
APASXXVPARLSSLSILFFXXXXXXXXXLKVYPDMVVE

SEQ ID NO: 46141 - protein, 39 aa, Artificial Sequence
  GFR-binding peptide
  MOD_RES (4), (5), (37), (39): Xaa is C or S
PKPXXAPTKLSSLSVLFFDDSSNVILKVYPNMVVRSXGX

SEQ ID NO: 46142 - protein, 40 aa, Artificial Sequence
  GFR-binding peptide
  MOD_RES (3), (4), (38), (40): Xaa is C or S
  MOD_RES (18), (19), (20), (21), (22): Xaa is A or G
  MOD_RES (23), (24), (25), (26): Xaa is A or G or is absent
KAXXVPTELSSLSMLFFXXXXXXXXXLKVYPEMVVEGXGX

SEQ ID NO: 46143 - protein, 41 aa, Artificial Sequence
  GFR-binding peptide
  MOD_RES (3), (4), (38), (40): Xaa is C or S
  MOD_RES (18), (19), (20), (21), (22): Xaa is A or G
  MOD_RES (23), (24), (25), (26): Xaa is A or G or is absent
KPXXAPTQLSSLSVLFFXXXXXXXXXLKVYPNMVVRAXGXH

SEQ ID NO: 46144 - protein, 35 aa, Artificial Sequence
  GFR-binding peptide
  MOD_RES (1), (2): Xaa is C or S
  MOD_RES (16), (17), (18), (19), (20): Xaa is A or G
  MOD_RES (21), (22), (23), (24): Xaa is A or G or is absent
XXVPEKMSSLSILFFXXXXXXXXXLKVYPNMTVES

SEQ ID NO: 46145 - protein, 33 aa, Artificial Sequence
  GFR-binding peptide
  MOD_RES (32), (32): Xaa is C or S
TPTKMSSLSMLFFNDKQQIILKVYPGMVVDRXG

SEQ ID NO: 46146 - protein, 35 aa, Artificial Sequence
  GFR-binding peptide
  MOD_RES (1), (2), (34): Xaa is C or S
XXAPTKLSSLSVLFFDDSSNVILKVYPNMVVRSXG

SEQ ID NO: 46147 - protein, 41 aa, Artificial Sequence
  GFR-binding peptide
  MOD_RES (5), (5): Xaa is C or S
  MOD_RES (21), (22), (23), (24), (25): Xaa is A or G
  MOD_RES (26), (27), (28), (29): Xaa is A or G or is absent
SSVKXQPSRVHHSSLSVLFFXXXXXXXXXLKVYPRLEEHLE

SEQ ID NO: 46148 - protein, 36 aa, Artificial Sequence
  GFR-binding peptide
  MOD_RES (1), (34), (36): Xaa is C or S
  MOD_RES (15), (16), (17), (18), (19): Xaa is A or G
  MOD_RES (20), (21), (22), (23): Xaa is A or G or is absent
XVPQDLSSLSILFFXXXXXXXXXLKVYPMVVKSXKX

SEQ ID NO: 46149 - protein, 34 aa, Artificial Sequence
  GFR-binding peptide
  MOD_RES (16), (17), (18), (19), (20): Xaa is A or G
  MOD_RES (21), (22), (23), (24): Xaa is A or G or is absent
QPSRVHHSSLSVLFFXXXXXXXXXLKVYPRLEEH

SEQ ID NO: 46150 - protein, 43 aa, Artificial Sequence
  GFR-binding peptide
  MOD_RES (5), (6), (40), (42): Xaa is C or S
  MOD_RES (20), (21), (22), (23), (24): Xaa is A or G
  MOD_RES (25), (26), (27), (28): Xaa is A or G or is absent
ASKAXXVPTKLSSLSILFFXXXXXXXXXLKVYPGMAVSEXGXR

SEQ ID NO: 46151 - protein, 36 aa, Artificial Sequence
  GFR-binding peptide
  MOD_RES (6), (6): Xaa is C or S
VTKPTXAPTKLSSLSVLFFDDSSNVILKVYPNMVVR

SEQ ID NO: 46152 - protein, 34 aa, Artificial Sequence
  GFR-binding peptide
  MOD_RES (33), (33): Xaa is C or S
  MOD_RES (14), (15), (16), (17), (18): Xaa is A or G
  MOD_RES (19), (20), (21), (22): Xaa is A or G or is absent
VSQDLSSLSILFFXXXXXXXXXLKVYPMIVKSXK

SEQ ID NO: 46153 - protein, 37 aa, Artificial Sequence
  GFR-binding peptide
  MOD_RES (1), (34), (36): Xaa is C or S
  MOD_RES (15), (16), (17), (18), (19): Xaa is A or G
  MOD_RES (20), (21), (22), (23): Xaa is A or G or is absent
XAPVKTSSLSMLFFXXXXXXXXXLKVYPMIVEEXGXL

SEQ ID NO: 46154 - protein, 38 aa, Artificial Sequence
  GFR-binding peptide
  MOD_RES (3), (4), (36), (38): Xaa is C or S
KPXXAPTKLSSLSVLFFDDSSNVILKVYPNMVVRSXGX

SEQ ID NO: 46155 - protein, 40 aa, Artificial Sequence
  GFR-binding peptide
  MOD_RES (6), (7), (40): Xaa is C or S
  MOD_RES (21), (22), (23), (24), (25): Xaa is A or G
  MOD_RES (26), (27), (28), (29): Xaa is A or G or is absent
ASASPXXVPQDLSSLSILFFXXXXXXXXXLKVYPMVVKSX

SEQ ID NO: 46156 - protein, 37 aa, Artificial Sequence
  GFR-binding peptide
  MOD_RES (5), (6), (37): Xaa is C or S
SASPXXVPQDLSSLSILFFVGRTPKVLKVYPMVVKSX

SEQ ID NO: 46157 - protein, 39 aa, Artificial Sequence
  GFR-binding peptide
  MOD_RES (4), (5), (39): Xaa is C or S
  MOD_RES (19), (20), (21), (22), (23): Xaa is A or G
  MOD_RES (24), (25), (26), (27): Xaa is A or G or is absent
PEPXXVPEKMSSLSILFFXXXXXXXXXLKVYPNMTVESX

SEQ ID NO: 46158 - protein, 34 aa, Artificial Sequence
  GFR-binding peptide
  MOD_RES (2), (2): Xaa is C or S
  MOD_RES (16), (17), (18), (19), (20): Xaa is A or G
  MOD_RES (21), (22), (23), (24): Xaa is A or G or is absent
TXAPTKLSSLSVLFFXXXXXXXXXLKVYPNMVVR

SEQ ID NO: 46159 - protein, 34 aa, Artificial Sequence
  GFR-binding peptide
  MOD_RES (1), (2): Xaa is C or S
  MOD_RES (16), (17), (18), (19), (20): Xaa is A or G
  MOD_RES (21), (22), (23), (24): Xaa is A or G or is absent
XXVPTRLSSLSILFFXXXXXXXXXLKVYPDMVVE

SEQ ID NO: 46160 - protein, 42 aa, Artificial Sequence
  GFR-binding peptide
  MOD_RES (6), (7), (39), (41): Xaa is C or S
HVPKPXXAPTKLSSLSVLFFDDSSNVILKVYPNMVVRSXGXH

SEQ ID NO: 46161 - protein, 36 aa, Artificial Sequence
  GFR-binding peptide
  MOD_RES (2), (3), (35): Xaa is C or S
AXXVPTKLSSLSILFFDKGVVTYLKVYPGMAVSEXG

SEQ ID NO: 46162 - protein, 33 aa, Artificial Sequence
  GFR-binding peptide
  MOD_RES (14), (15), (16), (17), (18): Xaa is A or G
  MOD_RES (19), (20), (21), (22): Xaa is A or G or is absent
VPARLSSLSILFFXXXXXXXXXLKVYPDMVVEA

SEQ ID NO: 46163 - protein, 32 aa, Artificial Sequence
  GFR-binding peptide
  MOD_RES (32), (32): Xaa is C or S
APTKLSSLSVLFFDSSNNVILKVYPNMVVKAX

SEQ ID NO: 46164 - protein, 39 aa, Artificial Sequence
  GFR-binding peptide
  MOD_RES (37), (39): Xaa is C or S
QPSRVHHSSLSVLFFEYVRKKPKLLKVYPRLEEHLEXAX

SEQ ID NO: 46165 - protein, 43 aa, Artificial Sequence
  GFR-binding peptide
  MOD_RES (6), (7), (40), (42): Xaa is C or S
KVGKAXXVPTKLSSLSVLFFDDMGVPTLKVYPEGMSVAEXGXR

SEQ ID NO: 46166 - protein, 37 aa, Artificial Sequence
  GFR-binding peptide
  MOD_RES (1), (2), (36): Xaa is C or S
  MOD_RES (16), (17), (18), (19), (20): Xaa is A or G
  MOD_RES (21), (22), (23), (24): Xaa is A or G or is absent
XXVPTRLSSLSILFFXXXXXXXXXLKVYPDMVVESXG

SEQ ID NO: 46167 - protein, 41 aa, Artificial Sequence
  GFR-binding peptide
  MOD_RES (2), (39), (41): Xaa is C or S
KXQPSRVHHSSLSVLFFEYVRKKPKLLKVYPRLEEHLEXAX

SEQ ID NO: 46168 - protein, 38 aa, Artificial Sequence
  GFR-binding peptide
  MOD_RES (4), (5): Xaa is C or S
  MOD_RES (19), (20), (21), (22), (23): Xaa is A or G
  MOD_RES (24), (25), (26), (27): Xaa is A or G or is absent
AGPXXTPTKMSSLSMLFFXXXXXXXXXLKVYPGMVVDR

SEQ ID NO: 46169 - protein, 36 aa, Artificial Sequence
  GFR-binding peptide
  MOD_RES (2), (3): Xaa is C or S
  MOD_RES (17), (18), (19), (20), (21): Xaa is A or G
  MOD_RES (22), (23), (24), (25): Xaa is A or G or is absent
TXXVPTRLSSLSILFFXXXXXXXXXLKVYPDMVVES

SEQ ID NO: 46170 - protein, 39 aa, Artificial Sequence
  GFR-binding peptide
  MOD_RES (5), (6), (39): Xaa is C or S
VGKAXXVPTKLSSLSVLFFDDMGVPTLKVYPEGMSVAEX

SEQ ID NO: 46171 - protein, 41 aa, Artificial Sequence
  GFR-binding peptide
  MOD_RES (4), (41): Xaa is C or S
  MOD_RES (20), (21), (22), (23), (24): Xaa is A or G
  MOD_RES (25), (26), (27), (28): Xaa is A or G or is absent
SVKXQPSRVHHSSLSVLFFXXXXXXXXXLKVYPRLEEHLEX

SEQ ID NO: 46172 - protein, 44 aa, Artificial Sequence
  GFR-binding peptide
  MOD_RES (6), (7), (41), (43): Xaa is C or S
  MOD_RES (21), (22), (23), (24), (25): Xaa is A or G
  MOD_RES (26), (27), (28), (29): Xaa is A or G or is absent
STPPTXXVPTRLSSLSILFFXXXXXXXXXLKVYPDMVVESXGXR

SEQ ID NO: 46173 - protein, 40 aa, Artificial Sequence
  GFR-binding peptide
  MOD_RES (6), (7), (39): Xaa is C or S
AAPASXXVPARLSSLSILFFDAANNVVLKVYPDMVVEAXG

SEQ ID NO: 46174 - protein, 37 aa, Artificial Sequence
  GFR-binding peptide
  MOD_RES (2), (3), (37): Xaa is C or S
  MOD_RES (17), (18), (19), (20), (21): Xaa is A or G
  MOD_RES (22), (23), (24), (25): Xaa is A or G or is absent
PXXAPTKLSSLSVLFFXXXXXXXXXLKVYPNMVVRSX

SEQ ID NO: 46175 - protein, 37 aa, Artificial Sequence
  GFR-binding peptide
  MOD_RES (3), (4), (35), (37): Xaa is C or S
STXXAPVKTSSLSMLFFDNGRVLLLKVYPMIVEEXGX

SEQ ID NO: 46176 - protein, 37 aa, Artificial Sequence
  GFR-binding peptide
  MOD_RES (6), (7): Xaa is C or S
STPPTXXVPTRLSSLSILFFDSANNVVLKVYPDMVVE

SEQ ID NO: 46177 - protein, 31 aa, Artificial Sequence
  GFR-binding peptide
  MOD_RES (1), (1): Xaa is C or S
XVPTKLSSLSILFFDKGVVTYLKVYPGMAVS

SEQ ID NO: 46178 - protein, 42 aa, Artificial Sequence
  GFR-binding peptide
  MOD_RES (4), (5), (39), (41): Xaa is C or S
  MOD_RES (19), (20), (21), (22), (23): Xaa is A or G
  MOD_RES (24), (25), (26), (27): Xaa is A or G or is absent
PPTXXVPTRLSSLSILFFXXXXXXXXXLKVYPDMVVESXGXR

SEQ ID NO: 46179 - protein, 40 aa, Artificial Sequence
  GFR-binding peptide
  MOD_RES (5), (6), (40): Xaa is C or S
  MOD_RES (20), (21), (22), (23), (24): Xaa is A or G
  MOD_RES (25), (26), (27), (28): Xaa is A or G or is absent
VPKPXXAPTKLSSLSVLFFXXXXXXXXXLKVYPNMVVRSX

SEQ ID NO: 46180 - protein, 35 aa, Artificial Sequence
  GFR-binding peptide
  MOD_RES (3), (4), (35): Xaa is C or S
STXXAPVKTSSLSMLFFDNGRVLLLKVYPMIVEEX

SEQ ID NO: 46181 - protein, 40 aa, Artificial Sequence
  GFR-binding peptide
  MOD_RES (4), (5), (38), (40): Xaa is C or S
  MOD_RES (19), (20), (21), (22), (23): Xaa is A or G
  MOD_RES (24), (25), (26), (27): Xaa is A or G or is absent
PSTXXAPVKTSSLSMLFFXXXXXXXXXLKVYPMIVEEXGX

SEQ ID NO: 46182 - protein, 35 aa, Artificial Sequence
  GFR-binding peptide
  MOD_RES (33), (35): Xaa is C or S
  MOD_RES (14), (15), (16), (17), (18): Xaa is A or G
  MOD_RES (19), (20), (21), (22): Xaa is A or G or is absent
VPQALSSLSILFFXXXXXXXXXLKVYPMIVRSXKX

SEQ ID NO: 46183 - protein, 32 aa, Artificial Sequence
  GFR-binding peptide
  MOD_RES (1), (32): Xaa is C or S
XVSQDLSSLSILFFIGKTPKILKVYPMIVKSX

SEQ ID NO: 46184 - protein, 36 aa, Artificial Sequence
  GFR-binding peptide
  MOD_RES (33), (35): Xaa is C or S
  MOD_RES (14), (15), (16), (17), (18): Xaa is A or G
  MOD_RES (19), (20), (21), (22): Xaa is A or G or is absent
VSQDLSSLSILFFXXXXXXXXXLKVYPMIVKSXKXS

SEQ ID NO: 46185 - protein, 35 aa, Artificial Sequence
  GFR-binding peptide
  MOD_RES (2), (34): Xaa is C or S
TXAPTKLSSLSVLFFDDSSNVILKVYPNMVVRSXG

SEQ ID NO: 46186 - protein, 36 aa, Artificial Sequence
  GFR-binding peptide
  MOD_RES (1), (35): Xaa is C or S
  MOD_RES (15), (16), (17), (18), (19): Xaa is A or G
  MOD_RES (20), (21), (22), (23): Xaa is A or G or is absent
XVPARLSSLSILFFXXXXXXXXXLKVYPDMVVEAXG

SEQ ID NO: 46187 - protein, 33 aa, Artificial Sequence
  GFR-binding peptide
  MOD_RES (1), (33): Xaa is C or S
XVPTRLSSLSILFFDSANNVVLKVYPDMVVESX

SEQ ID NO: 46188 - protein, 34 aa, Artificial Sequence
  GFR-binding peptide
  MOD_RES (1), (1): Xaa is C or S
  MOD_RES (15), (16), (17), (18), (19): Xaa is A or G
  MOD_RES (20), (21), (22), (23): Xaa is A or G or is absent
XAPTKLSSLSVLFFXXXXXXXXXLKVYPNMVVRS

SEQ ID NO: 46189 - protein, 40 aa, Artificial Sequence
  GFR-binding peptide
  MOD_RES (4), (5), (39): Xaa is C or S
  MOD_RES (19), (20), (21), (22), (23): Xaa is A or G
  MOD_RES (24), (25), (26), (27): Xaa is A or G or is absent
PKAXXAPTKLSSLSVLFFXXXXXXXXXLKVYPNMVVKAXG

SEQ ID NO: 46190 - protein, 36 aa, Artificial Sequence
  GFR-binding peptide
  MOD_RES (4), (5): Xaa is C or S
PKPXXAPTKLSSLSVLFFDDSSNVILKVYPNMVVRS

SEQ ID NO: 46191 - protein, 38 aa, Artificial Sequence
  GFR-binding peptide
  MOD_RES (4), (5), (37): Xaa is C or S
SKAXXVPTKLSSLSILFFDKGVVTYLKVYPGMAVSEXG

SEQ ID NO: 46192 - protein, 35 aa, Artificial Sequence
  GFR-binding peptide
  MOD_RES (3), (4): Xaa is C or S
KAXXAPTKLSSLSVLFFDSSNNVILKVYPNMVVKA

SEQ ID NO: 46193 - protein, 40 aa, Artificial Sequence
  GFR-binding peptide
  MOD_RES (2), (3), (37), (39): Xaa is C or S
  MOD_RES (17), (18), (19), (20), (21): Xaa is A or G
  MOD_RES (22), (23), (24), (25): Xaa is A or G or is absent
PXXAPTKLSSLSVLFFXXXXXXXXXLKVYPNMVVRSXGXH

SEQ ID NO: 46194 - protein, 41 aa, Artificial Sequence
  GFR-binding peptide
  MOD_RES (5), (6), (38), (40): Xaa is C or S
VPKPXXAPTKLSSLSVLFFDDSSNVILKVYPNMVVRSXGXH

SEQ ID NO: 46195 - protein, 38 aa, Artificial Sequence
  GFR-binding peptide
  MOD_RES (35), (37): Xaa is C or S
  MOD_RES (14), (15), (16), (17), (18): Xaa is A or G
  MOD_RES (19), (20), (21), (22): Xaa is A or G or is absent
VPTKLSSLSVLFFXXXXXXXXXLKVYPEGMSVAEXGXR

SEQ ID NO: 46196 - protein, 41 aa, Artificial Sequence
  GFR-binding peptide
  MOD_RES (4), (5), (39), (41): Xaa is C or S
  MOD_RES (19), (20), (21), (22), (23): Xaa is A or G
  MOD_RES (24), (25), (26), (27): Xaa is A or G or is absent
PKAXXAPTKLSSLSVLFFXXXXXXXXXLKVYPNMVVKAXGX

SEQ ID NO: 46197 - protein, 35 aa, Artificial Sequence
  GFR-binding peptide
  MOD_RES (2), (3), (34): Xaa is C or S
TXXAPVKTSSLSMLFFDNGRVLLLKVYPMIVEEXG

SEQ ID NO: 46198 - protein, 35 aa, Artificial Sequence
  GFR-binding peptide
PSRVHHSSLSVLFFEYVRKKPKLLKVYPRLEEHLE

SEQ ID NO: 46199 - protein, 37 aa, Artificial Sequence
  GFR-binding peptide
  MOD_RES (1), (2), (34), (36): Xaa is C or S
XXAPTQLSSLSVLFFDDSSNVILKVYPNMVVRAXGXH

SEQ ID NO: 46200 - protein, 32 aa, Artificial Sequence
  GFR-binding peptide
  MOD_RES (32), (32): Xaa is C or S
VPTRLSSLSILFFDSANNVVLKVYPDMVVESX

SEQ ID NO: 46201 - protein, 35 aa, Artificial Sequence
  GFR-binding peptide
  MOD_RES (1), (32), (34): Xaa is C or S
XAPVKTSSLSMLFFDNGRVLLLKVYPMIVEEXGXL

SEQ ID NO: 46202 - protein, 44 aa, Artificial Sequence
  GFR-binding peptide
  MOD_RES (6), (7), (42), (44): Xaa is C or S
  MOD_RES (21), (22), (23), (24), (25): Xaa is A or G
  MOD_RES (26), (27), (28), (29): Xaa is A or G or is absent
KVGKAXXVPTKLSSLSVLFFXXXXXXXXXLKVYPEGMSVAEXGX

SEQ ID NO: 46203 - protein, 43 aa, Artificial Sequence
  GFR-binding peptide
  MOD_RES (4), (41), (43): Xaa is C or S
  MOD_RES (20), (21), (22), (23), (24): Xaa is A or G
  MOD_RES (25), (26), (27), (28): Xaa is A or G or is absent
SVKXQPSRVHHSSLSVLFFXXXXXXXXXLKVYPRLEEHLEXAX

SEQ ID NO: 46204 - protein, 34 aa, Artificial Sequence
  GFR-binding peptide
SRVHHSSLSVLFFEYVRKKPKLLKVYPRLEEHLE

SEQ ID NO: 46205 - protein, 39 aa, Artificial Sequence
  GFR-binding peptide
  MOD_RES (5), (6), (37), (39): Xaa is C or S
VPSTXXAPVKTSSLSMLFFDNGRVLLLKVYPMIVEEXGX

SEQ ID NO: 46206 - protein, 35 aa, Artificial Sequence
  GFR-binding peptide
  MOD_RES (2), (3): Xaa is C or S
  MOD_RES (17), (18), (19), (20), (21): Xaa is A or G
  MOD_RES (22), (23), (24), (25): Xaa is A or G or is absent
PXXVPQDLSSLSILFFXXXXXXXXXLKVYPMVVKS

SEQ ID NO: 46207 - protein, 39 aa, Artificial Sequence
  GFR-binding peptide
  MOD_RES (4), (5), (37), (39): Xaa is C or S
PKAXXAPTKLSSLSVLFFDSSNNVILKVYPNMVVKAXGX

SEQ ID NO: 46208 - protein, 38 aa, Artificial Sequence
  GFR-binding peptide
  MOD_RES (4), (5): Xaa is C or S
  MOD_RES (19), (20), (21), (22), (23): Xaa is A or G
  MOD_RES (24), (25), (26), (27): Xaa is A or G or is absent
PKAXXVPTELSSLSMLFFXXXXXXXXXLKVYPEMVVEG

SEQ ID NO: 46209 - protein, 30 aa, Artificial Sequence; identical to SEQ ID NO: 664
  GFR-binding peptide

SEQ ID NO: 46210 - protein, 38 aa, Artificial Sequence
  GFR-binding peptide
  MOD_RES (1), (2), (36), (38): Xaa is C or S
  MOD_RES (16), (17), (18), (19), (20): Xaa is A or G
  MOD_RES (21), (22), (23), (24): Xaa is A or G or is absent
XXAPTQLSSLSVLFFXXXXXXXXXLKVYPNMVVRAXGX

SEQ ID NO: 46211 - protein, 42 aa, Artificial Sequence
  GFR-binding peptide
  MOD_RES (2), (39), (41): Xaa is C or S
  MOD_RES (18), (19), (20), (21), (22): Xaa is A or G
  MOD_RES (23), (24), (25), (26): Xaa is A or G or is absent
KXQPSRVHHSSLSVLFFXXXXXXXXXLKVYPRLEEHLEXAXA

SEQ ID NO: 46212 - protein, 43 aa, Artificial Sequence
  GFR-binding peptide
  MOD_RES (6), (7), (41), (43): Xaa is C or S
  MOD_RES (21), (22), (23), (24), (25): Xaa is A or G
  MOD_RES (26), (27), (28), (29): Xaa is A or G or is absent
TVPKPXXAPTQLSSLSVLFFXXXXXXXXXLKVYPNMVVRAXGX

SEQ ID NO: 46213 - protein, 43 aa, Artificial Sequence
  GFR-binding peptide
  MOD_RES (5), (6), (40), (42): Xaa is C or S
  MOD_RES (20), (21), (22), (23), (24): Xaa is A or G
  MOD_RES (25), (26), (27), (28): Xaa is A or G or is absent
VPKPXXAPTKLSSLSVLFFXXXXXXXXXLKVYPNMVVRSXGXH

SEQ ID NO: 46214 - protein, 35 aa, Artificial Sequence
  GFR-binding peptide
  MOD_RES (4), (5): Xaa is C or S
PKAXXAPTKLSSLSVLFFDSSNNVILKVYPNMVVK

SEQ ID NO: 46215 - protein, 38 aa, Artificial Sequence
  GFR-binding peptide
  MOD_RES (5), (6), (38): Xaa is C or S
VPKAXXAPTKLSSLSVLFFDSSNNVILKVYPNMVVKAX

SEQ ID NO: 46216 - protein, 36 aa, Artificial Sequence
  GFR-binding peptide
  MOD_RES (1), (2), (36): Xaa is C or S
  MOD_RES (16), (17), (18), (19), (20): Xaa is A or G
  MOD_RES (21), (22), (23), (24): Xaa is A or G or is absent
XXAPTKLSSLSVLFFXXXXXXXXXLKVYPNMVVKAX

SEQ ID NO: 46217 - protein, 39 aa, Artificial Sequence
  GFR-binding peptide
  MOD_RES (2), (3), (36), (38): Xaa is C or S
  MOD_RES (17), (18), (19), (20), (21): Xaa is A or G
  MOD_RES (22), (23), (24), (25): Xaa is A or G or is absent
PXXVPQDLSSLSILFFXXXXXXXXXLKVYPMVVKSXKXS

SEQ ID NO: 46218 - protein, 35 aa, Artificial Sequence
  GFR-binding peptide
  MOD_RES (2), (3): Xaa is C or S
  MOD_RES (17), (18), (19), (20), (21): Xaa is A or G
  MOD_RES (22), (23), (24), (25): Xaa is A or G or is absent
PXXVSQDLSSLSILFFXXXXXXXXXLKVYPMIVKS

SEQ ID NO: 46219 - protein, 36 aa, Artificial Sequence
  GFR-binding peptide
  MOD_RES (3), (3): Xaa is C or S
  MOD_RES (17), (18), (19), (20), (21): Xaa is A or G
  MOD_RES (22), (23), (24), (25): Xaa is A or G or is absent
PTXAPTKLSSLSVLFFXXXXXXXXXLKVYPNMVVRS

SEQ ID NO: 46220 - protein, 34 aa, Artificial Sequence
  GFR-binding peptide
  MOD_RES (3), (4): Xaa is C or S
SPXXVPQDLSSLSILFFVGRTPKVLKVYPMVVKS

SEQ ID NO: 46221 - protein, 35 aa, Artificial Sequence
  GFR-binding peptide
  MOD_RES (4), (5): Xaa is C or S
SKAXXVPTKLSSLSILFFDKGVVTYLKVYPGMAVS

SEQ ID NO: 46222 - protein, 42 aa, Artificial Sequence
  GFR-binding peptide
  MOD_RES (5), (6), (40), (42): Xaa is C or S
  MOD_RES (20), (21), (22), (23), (24): Xaa is A or G
  MOD_RES (25), (26), (27), (28): Xaa is A or G or is absent
IPKAXXVPTELSSLSMLFFXXXXXXXXXLKVYPEMVVEGXGX

SEQ ID NO: 46223 - protein, 35 aa, Artificial Sequence
  GFR-binding peptide
  MOD_RES (2), (3): Xaa is C or S
  MOD_RES (17), (18), (19), (20), (21): Xaa is A or G
  MOD_RES (22), (23), (24), (25): Xaa is A or G or is absent
AXXAPTKLSSLSVLFFXXXXXXXXXLKVYPNMVVK

SEQ ID NO: 46224 - protein, 34 aa, Artificial Sequence
  GFR-binding peptide
  MOD_RES (34), (34): Xaa is C or S
  MOD_RES (14), (15), (16), (17), (18): Xaa is A or G
  MOD_RES (19), (20), (21), (22): Xaa is A or G or is absent
VPTKLSSLSILFFXXXXXXXXXLKVYPGMAVSEX

SEQ ID NO: 46225 - protein, 36 aa, Artificial Sequence
  GFR-binding peptide
  MOD_RES (2), (36): Xaa is C or S
EXVPTEESSLSMLFFRIKPHQGQHLKVYPFLQHNKX

SEQ ID NO: 46226 - protein, 34 aa, Artificial Sequence
  GFR-binding peptide
  MOD_RES (1), (2), (33): Xaa is C or S
XXVPQDLSSLSILFFVGRTPKVLKVYPMVVKSXK

SEQ ID NO: 46227 - protein, 36 aa, Artificial Sequence
  GFR-binding peptide
  MOD_RES (1), (2), (33), (35): Xaa is C or S
XXVPQALSSLSILFFVGRKPKVLKVYPMIVRSXKXS

SEQ ID NO: 46228 - protein, 36 aa, Artificial Sequence
  GFR-binding peptide
  MOD_RES (34), (36): Xaa is C or S
  MOD_RES (14), (15), (16), (17), (18): Xaa is A or G
  MOD_RES (19), (20), (21), (22): Xaa is A or G or is absent
TPTKMSSLSMLFFXXXXXXXXXLKVYPGMVVDRXGX

SEQ ID NO: 46229 - protein, 40 aa, Artificial Sequence
  GFR-binding peptide
  MOD_RES (5), (37), (39): Xaa is C or S
TKPTXAPTKLSSLSVLFFDDSSNVILKVYPNMVVRSXGXH

SEQ ID NO: 46230 - protein, 36 aa, Artificial Sequence
  GFR-binding peptide
  MOD_RES (5), (6): Xaa is C or S
VPKPXXAPTQLSSLSVLFFDDSSNVILKVYPNMVVR

SEQ ID NO: 46231 - protein, 41 aa, Artificial Sequence
  GFR-binding peptide
  MOD_RES (6), (7), (39), (41): Xaa is C or S
KASKAXXVPTKLSSLSILFFDKGVVTYLKVYPGMAVSEXGX

SEQ ID NO: 46232 - protein, 40 aa, Artificial Sequence
  GFR-binding peptide
  MOD_RES (4), (5), (39): Xaa is C or S
  MOD_RES (19), (20), (21), (22), (23): Xaa is A or G
  MOD_RES (24), (25), (26), (27): Xaa is A or G or is absent
AGPXXTPTKMSSLSMLFFXXXXXXXXXLKVYPGMVVDRXG

SEQ ID NO: 46233 - protein, 40 aa, Artificial Sequence
  GFR-binding peptide
  MOD_RES (1), (2), (37), (39): Xaa is C or S
  MOD_RES (16), (17), (18), (19), (20): Xaa is A or G
  MOD_RES (21), (22), (23), (24): Xaa is A or G or is absent
XXVPTKLSSLSVLFFXXXXXXXXXLKVYPEGMSVAEXGXR

SEQ ID NO: 46234 - protein, 36 aa, Artificial Sequence
  GFR-binding peptide
  MOD_RES (5), (6): Xaa is C or S
IPEPXXVPEKMSSLSILFFDENKNVVLKVYPNMTVE

SEQ ID NO: 46235 - protein, 35 aa, Artificial Sequence
  GFR-binding peptide
  MOD_RES (4), (5): Xaa is C or S
AAPXXVPQALSSLSILFFVGRKPKVLKVYPMIVRS

SEQ ID NO: 46236 - protein, 37 aa, Artificial Sequence
  GFR-binding peptide
  MOD_RES (6), (7): Xaa is C or S
AVPKAXXAPTKLSSLSVLFFDSSNNVILKVYPNMVVK

SEQ ID NO: 46237 - protein, 39 aa, Artificial Sequence
  GFR-binding peptide
  MOD_RES (2), (3), (36), (38): Xaa is C or S
AXXVPTKLSSLSVLFFDDMGVPTLKVYPEGMSVAEXGXR

SEQ ID NO: 46238 - protein, 39 aa, Artificial Sequence
  GFR-binding peptide
  MOD_RES (6), (7), (39): Xaa is C or S
KASKAXXVPTKLSSLSILFFDKGVVTYLKVYPGMAVSEX

SEQ ID NO: 46239 - protein, 33 aa, Artificial Sequence
  GFR-binding peptide
  MOD_RES (1), (33): Xaa is C or S
XVPTKLSSLSILFFDKGVVTYLKVYPGMAVSEX

SEQ ID NO: 46240 - protein, 41 aa, Artificial Sequence
  GFR-binding peptide
  MOD_RES (4), (5), (38), (40): Xaa is C or S
  MOD_RES (19), (20), (21), (22), (23): Xaa is A or G
  MOD_RES (24), (25), (26), (27): Xaa is A or G or is absent
ASPXXVSQDLSSLSILFFXXXXXXXXXLKVYPMIVKSXKXS

SEQ ID NO: 46241 - protein, 36 aa, Artificial Sequence
  GFR-binding peptide
  MOD_RES (1), (2), (34), (36): Xaa is C or S
XXVPTKLSSLSILFFDKGVVTYLKVYPGMAVSEXGX

SEQ ID NO: 46242 - protein, 37 aa, Artificial Sequence
  GFR-binding peptide
  MOD_RES (1), (2), (36): Xaa is C or S
  MOD_RES (16), (17), (18), (19), (20): Xaa is A or G
  MOD_RES (21), (22), (23), (24): Xaa is A or G or is absent
XXVPTKLSSLSILFFXXXXXXXXXLKVYPGMAVSEXG

SEQ ID NO: 46243 - protein, 35 aa, Artificial Sequence
  GFR-binding peptide
  MOD_RES (1), (2), (35): Xaa is C or S
  MOD_RES (16), (17), (18), (19), (20): Xaa is A or G
  MOD_RES (21), (22), (23), (24): Xaa is A or G or is absent
XXVPQDLSSLSILFFXXXXXXXXXLKVYPMVVKSX

SEQ ID NO: 46244 - protein, 36 aa, Artificial Sequence
  GFR-binding peptide
  MOD_RES (4), (4): Xaa is C or S
  MOD_RES (18), (19), (20), (21), (22): Xaa is A or G
  MOD_RES (23), (24), (25), (26): Xaa is A or G or is absent
GLEXVPTEESSLSMLFFXXXXXXXXXLKVYPFLQHN

SEQ ID NO: 46245 - protein, 35 aa, Artificial Sequence
  GFR-binding peptide
  MOD_RES (2), (3): Xaa is C or S
  MOD_RES (17), (18), (19), (20), (21): Xaa is A or G
  MOD_RES (22), (23), (24), (25): Xaa is A or G or is absent
PXXVPEKMSSLSILFFXXXXXXXXXLKVYPNMTVE

SEQ ID NO: 46246 - protein, 40 aa, Artificial Sequence
  GFR-binding peptide
  MOD_RES (6), (7), (40): Xaa is C or S
  MOD_RES (21), (22), (23), (24), (25): Xaa is A or G
  MOD_RES (26), (27), (28), (29): Xaa is A or G or is absent
ASAAPXXVPQALSSLSILFFXXXXXXXXXLKVYPMIVRSX

SEQ ID NO: 46247 - protein, 34 aa, Artificial Sequence
  GFR-binding peptide
  MOD_RES (34), (34): Xaa is C or S
  MOD_RES (14), (15), (16), (17), (18): Xaa is A or G
  MOD_RES (19), (20), (21), (22): Xaa is A or G or is absent
APTKLSSLSVLFFXXXXXXXXXLKVYPNMVVRSX

SEQ ID NO: 46248 - protein, 42 aa, Artificial Sequence
  GFR-binding peptide
  MOD_RES (5), (6), (39), (41): Xaa is C or S
VGKAXXVPTKLSSLSVLFFDDMGVPTLKVYPEGMSVAEXGXR

SEQ ID NO: 46249 - protein, 37 aa, Artificial Sequence
  GFR-binding peptide
  MOD_RES (1), (2), (34), (36): Xaa is C or S
XXAPTKLSSLSVLFFDSSNNVILKVYPNMVVKAXGXH

SEQ ID NO: 46250 - protein, 35 aa, Artificial Sequence
  GFR-binding peptide
  MOD_RES (1), (34): Xaa is C or S
  MOD_RES (15), (16), (17), (18), (19): Xaa is A or G
  MOD_RES (20), (21), (22), (23): Xaa is A or G or is absent
XAPVKTSSLSMLFFXXXXXXXXXLKVYPMIVEEXG

SEQ ID NO: 46251 - protein, 40 aa, Artificial Sequence
  GFR-binding peptide
  MOD_RES (4), (5), (37), (39): Xaa is C or S
SKAXXVPTKLSSLSILFFDKGVVTYLKVYPGMAVSEXGXR

SEQ ID NO: 46252 - protein, 44 aa, Artificial Sequence
  GFR-binding peptide
  MOD_RES (7), (41), (43): Xaa is C or S
  MOD_RES (21), (22), (23), (24), (25): Xaa is A or G
  MOD_RES (26), (27), (28), (29): Xaa is A or G or is absent
NDEGLEXVPTEESSLSMLFFXXXXXXXXXLKVYPFLQHNKXEXR

SEQ ID NO: 46253 - protein, 38 aa, Artificial Sequence
  GFR-binding peptide
  MOD_RES (6), (7): Xaa is C or S
GIPEPXXVPEKMSSLSILFFDENKNVVLKVYPNMTVES

SEQ ID NO: 46254 - protein, 36 aa, Artificial Sequence
  GFR-binding peptide
  MOD_RES (5), (6): Xaa is C or S
VPKAXXAPTKLSSLSVLFFDSSNNVILKVYPNMVVK

SEQ ID NO: 46255 - protein, 37 aa, Artificial Sequence
  GFR-binding peptide
  MOD_RES (1), (35), (37): Xaa is C or S
  MOD_RES (15), (16), (17), (18), (19): Xaa is A or G
  MOD_RES (20), (21), (22), (23): Xaa is A or G or is absent
XVPTRLSSLSILFFXXXXXXXXXLKVYPDMVVESXGX

SEQ ID NO: 46256 - protein, 39 aa, Artificial Sequence
  GFR-binding peptide
  MOD_RES (4), (36), (38): Xaa is C or S
KPTXAPTKLSSLSVLFFDDSSNVILKVYPNMVVRSXGXH

SEQ ID NO: 46257 - protein, 34 aa, Artificial Sequence
  GFR-binding peptide
  MOD_RES (2), (3): Xaa is C or S
TXXVPTRLSSLSILFFDSANNVVLKVYPDMVVES

SEQ ID NO: 46258 - protein, 35 aa, Artificial Sequence
  GFR-binding peptide
  MOD_RES (4), (5): Xaa is C or S
ASPXXVPQDLSSLSILFFVGRTPKVLKVYPMVVKS

SEQ ID NO: 46259 - protein, 37 aa, Artificial Sequence
  GFR-binding peptide
  MOD_RES (2), (3): Xaa is C or S
  MOD_RES (17), (18), (19), (20), (21): Xaa is A or G
  MOD_RES (22), (23), (24), (25): Xaa is A or G or is absent
AXXVPTKLSSLSVLFFXXXXXXXXXLKVYPEGMSVAE

SEQ ID NO: 46260 - protein, 39 aa, Artificial Sequence
  GFR-binding peptide
  MOD_RES (4), (4): Xaa is C or S
  MOD_RES (20), (21), (22), (23), (24): Xaa is A or G
  MOD_RES (25), (26), (27), (28): Xaa is A or G or is absent
SVKXQPSRVHHSSLSVLFFXXXXXXXXXLKVYPRLEEHL

SEQ ID NO: 46261 - protein, 35 aa, Artificial Sequence
  GFR-binding peptide
  MOD_RES (34), (34): Xaa is C or S
  MOD_RES (14), (15), (16), (17), (18): Xaa is A or G
  MOD_RES (19), (20), (21), (22): Xaa is A or G or is absent
APTQLSSLSVLFFXXXXXXXXXLKVYPNMVVRAXG

SEQ ID NO: 46262 - protein, 35 aa, Artificial Sequence
  GFR-binding peptide
  MOD_RES (1), (34): Xaa is C or S
  MOD_RES (15), (16), (17), (18), (19): Xaa is A or G
  MOD_RES (20), (21), (22), (23): Xaa is A or G or is absent
XVPQDLSSLSILFFXXXXXXXXXLKVYPMVVKSXK

SEQ ID NO: 46263 - protein, 35 aa, Artificial Sequence
  GFR-binding peptide
  MOD_RES (1), (35): Xaa is C or S
  MOD_RES (15), (16), (17), (18), (19): Xaa is A or G
  MOD_RES (20), (21), (22), (23): Xaa is A or G or is absent
XAPTKLSSLSVLFFXXXXXXXXXLKVYPNMVVRSX

SEQ ID NO: 46264 - protein, 38 aa, Artificial Sequence
  GFR-binding peptide
  MOD_RES (2), (36), (38): Xaa is C or S
  MOD_RES (16), (17), (18), (19), (20): Xaa is A or G
  MOD_RES (21), (22), (23), (24): Xaa is A or G or is absent
TXAPTKLSSLSVLFFXXXXXXXXXLKVYPNMVVRSXGX

SEQ ID NO: 46265 - protein, 38 aa, Artificial Sequence
  GFR-binding peptide
  MOD_RES (3), (4), (35), (37): Xaa is C or S
APXXVPQALSSLSILFFVGRKPKVLKVYPMIVRSXKXS

SEQ ID NO: 46266 - protein, 30 aa, Artificial Sequence; identical to SEQ ID NO: 663
  GFR-binding peptide

SEQ ID NO: 46267 - protein, 37 aa, Artificial Sequence
  GFR-binding peptide
  MOD_RES (3), (4), (35), (37): Xaa is C or S
SPXXVSQDLSSLSILFFIGKTPKILKVYPMIVKSXKX

SEQ ID NO: 46268 - protein, 34 aa, Artificial Sequence
  GFR-binding peptide
  MOD_RES (32), (34): Xaa is C or S
VPEKMSSLSILFFDENKNVVLKVYPNMTVESXAX

SEQ ID NO: 46269 - protein, 40 aa, Artificial Sequence
  GFR-binding peptide
  MOD_RES (5), (6), (40): Xaa is C or S
  MOD_RES (20), (21), (22), (23), (24): Xaa is A or G
  MOD_RES (25), (26), (27), (28): Xaa is A or G or is absent
IPKAXXVPTELSSLSMLFFXXXXXXXXXLKVYPEMVVEGX

SEQ ID NO: 46270 - protein, 37 aa, Artificial Sequence
  GFR-binding peptide
  MOD_RES (4), (5), (37): Xaa is C or S
PKAXXAPTKLSSLSVLFFDSSNNVILKVYPNMVVKAX

SEQ ID NO: 46271 - protein, 37 aa, Artificial Sequence
  GFR-binding peptide
  MOD_RES (2), (3), (35), (37): Xaa is C or S
AXXVPTKLSSLSILFFDKGVVTYLKVYPGMAVSEXGX

SEQ ID NO: 46272 - protein, 33 aa, Artificial Sequence
  GFR-binding peptide
  MOD_RES (32), (32): Xaa is C or S
VPTRLSSLSILFFDSANNVVLKVYPDMVVESXG

SEQ ID NO: 46273 - protein, 40 aa, Artificial Sequence
  GFR-binding peptide
  MOD_RES (4), (4): Xaa is C or S
  MOD_RES (20), (21), (22), (23), (24): Xaa is A or G
  MOD_RES (25), (26), (27), (28): Xaa is A or G or is absent
SVKXQPSRVHHSSLSVLFFXXXXXXXXXLKVYPRLEEHLE

SEQ ID NO: 46274 - protein, 37 aa, Artificial Sequence
  GFR-binding peptide
  MOD_RES (34), (36): Xaa is C or S
  MOD_RES (14), (15), (16), (17), (18): Xaa is A or G
  MOD_RES (19), (20), (21), (22): Xaa is A or G or is absent
VPTELSSLSMLFFXXXXXXXXXLKVYPEMVVEGXGXR

SEQ ID NO: 46275 - protein, 36 aa, Artificial Sequence
  GFR-binding peptide
  MOD_RES (2), (36): Xaa is C or S
  MOD_RES (16), (17), (18), (19), (20): Xaa is A or G
  MOD_RES (21), (22), (23), (24): Xaa is A or G or is absent
EXVPTEESSLSMLFFXXXXXXXXXLKVYPFLQHNKX

SEQ ID NO: 46276 - protein, 36 aa, Artificial Sequence
  GFR-binding peptide
  MOD_RES (4), (4): Xaa is C or S
GLEXVPTEESSLSMLFFRIKPHQGQHLKVYPFLQHN

SEQ ID NO: 46277 - protein, 35 aa, Artificial Sequence
  GFR-binding peptide
  MOD_RES (1), (2), (34): Xaa is C or S
XXVPTKLSSLSILFFDKGVVTYLKVYPGMAVSEXG

SEQ ID NO: 46278 - protein, 36 aa, Artificial Sequence
  GFR-binding peptide
  MOD_RES (1), (2): Xaa is C or S
  MOD_RES (16), (17), (18), (19), (20): Xaa is A or G
  MOD_RES (21), (22), (23), (24): Xaa is A or G or is absent
XXVPTKLSSLSVLFFXXXXXXXXXLKVYPEGMSVAE

SEQ ID NO: 46279 - protein, 40 aa, Artificial Sequence
  GFR-binding peptide
  MOD_RES (6), (7), (39): Xaa is C or S
AVPKAXXAPTKLSSLSVLFFDSSNNVILKVYPNMVVKAXG

SEQ ID NO: 46280 - protein, 36 aa, Artificial Sequence
  GFR-binding peptide
  MOD_RES (1), (34), (36): Xaa is C or S
XVPTKLSSLSVLFFDDMGVPTLKVYPEGMSVAEXGX

SEQ ID NO: 46281 - protein, 44 aa, Artificial Sequence
  GFR-binding peptide
  MOD_RES (4), (41), (43): Xaa is C or S
  MOD_RES (20), (21), (22), (23), (24): Xaa is A or G
  MOD_RES (25), (26), (27), (28): Xaa is A or G or is absent
SVKXQPSRVHHSSLSVLFFXXXXXXXXXLKVYPRLEEHLEXAXA

SEQ ID NO: 46282 - protein, 35 aa, Artificial Sequence
  GFR-binding peptide
  MOD_RES (1), (2), (34): Xaa is C or S
XXAPTQLSSLSVLFFDDSSNVILKVYPNMVVRAXG

SEQ ID NO: 46283 - protein, 39 aa, Artificial Sequence
  GFR-binding peptide
  MOD_RES (3), (4), (36), (38): Xaa is C or S
KPXXAPTKLSSLSVLFFDDSSNVILKVYPNMVVRSXGXH

SEQ ID NO: 46284 - protein, 35 aa, Artificial Sequence
  GFR-binding peptide
  MOD_RES (1), (33), (35): Xaa is C or S
XTPTKMSSLSMLFFNDKQQIILKVYPGMVVDRXGX

SEQ ID NO: 46285 - protein, 38 aa, Artificial Sequence
  GFR-binding peptide
  MOD_RES (1), (35), (37): Xaa is C or S
  MOD_RES (15), (16), (17), (18), (19): Xaa is A or G
  MOD_RES (20), (21), (22), (23): Xaa is A or G or is absent
XTPTKMSSLSMLFFXXXXXXXXXLKVYPGMVVDRXGXS

SEQ ID NO: 46286 - protein, 32 aa, Artificial Sequence
  GFR-binding peptide
  MOD_RES (1), (1): Xaa is C or S
XAPTKLSSLSVLFFDSSNNVILKVYPNMVVKA

SEQ ID NO: 46287 - protein, 38 aa, Artificial Sequence
  GFR-binding peptide
  MOD_RES (6), (7): Xaa is C or S
GSAGPXXTPTKMSSLSMLFFNDKQQIILKVYPGMVVDR

SEQ ID NO: 46288 - protein, 39 aa, Artificial Sequence
  GFR-binding peptide
  MOD_RES (2), (39): Xaa is C or S
  MOD_RES (18), (19), (20), (21), (22): Xaa is A or G
  MOD_RES (23), (24), (25), (26): Xaa is A or G or is absent
KXQPSRVHHSSLSVLFFXXXXXXXXXLKVYPRLEEHLEX

SEQ ID NO: 46289 - protein, 35 aa, Artificial Sequence
  GFR-binding peptide
  MOD_RES (1), (2), (34): Xaa is C or S
XXVPARLSSLSILFFDAANNVVLKVYPDMVVEAXG

SEQ ID NO: 46290 - protein, 35 aa, Artificial Sequence
  GFR-binding peptide
  MOD_RES (34), (34): Xaa is C or S
  MOD_RES (14), (15), (16), (17), (18): Xaa is A or G
  MOD_RES (19), (20), (21), (22): Xaa is A or G or is absent
APTKLSSLSVLFFXXXXXXXXXLKVYPNMVVKAXG

SEQ ID NO: 46291 - protein, 35 aa, Artificial Sequence
  GFR-binding peptide
  MOD_RES (1), (1): Xaa is C or S
XQPSRVHHSSLSVLFFEYVRKKPKLLKVYPRLEEH

SEQ ID NO: 46292 - protein, 37 aa, Artificial Sequence
  GFR-binding peptide
  MOD_RES (3), (4), (35), (37): Xaa is C or S
SPXXVPQDLSSLSILFFVGRTPKVLKVYPMVVKSXKX

SEQ ID NO: 46293 - protein, 38 aa, Artificial Sequence
  GFR-binding peptide
  MOD_RES (1), (36), (38): Xaa is C or S
  MOD_RES (15), (16), (17), (18), (19): Xaa is A or G
  MOD_RES (20), (21), (22), (23): Xaa is A or G or is absent
XVPTKLSSLSVLFFXXXXXXXXXLKVYPEGMSVAEXGX

SEQ ID NO: 46294 - protein, 35 aa, Artificial Sequence
  GFR-binding peptide
  MOD_RES (32), (34): Xaa is C or S
VPTKLSSLSILFFDKGVVTYLKVYPGMAVSEXGXR

SEQ ID NO: 46295 - protein, 39 aa, Artificial Sequence
  GFR-binding peptide
  MOD_RES (3), (4), (38): Xaa is C or S
  MOD_RES (18), (19), (20), (21), (22): Xaa is A or G
  MOD_RES (23), (24), (25), (26): Xaa is A or G or is absent
KAXXAPTKLSSLSVLFFXXXXXXXXXLKVYPNMVVKAXG

SEQ ID NO: 46296 - protein, 43 aa, Artificial Sequence
  GFR-binding peptide
  MOD_RES (7), (41), (43): Xaa is C or S
  MOD_RES (21), (22), (23), (24), (25): Xaa is A or G
  MOD_RES (26), (27), (28), (29): Xaa is A or G or is absent
NDEGLEXVPTEESSLSMLFFXXXXXXXXXLKVYPFLQHNKXEX

SEQ ID NO: 46297 - protein, 33 aa, Artificial Sequence
  GFR-binding peptide
  MOD_RES (1), (32): Xaa is C or S
XVPQDLSSLSILFFVGRTPKVLKVYPMVVKSXK

SEQ ID NO: 46298 - protein, 41 aa, Artificial Sequence
  GFR-binding peptide
  MOD_RES (2), (39): Xaa is C or S
AXELHEELRNSLQELKPKKRVYEYYLVTLPEHHVRSPQXKV

SEQ ID NO: 46299 - protein, 34 aa, Artificial Sequence
  GFR-binding peptide
  MOD_RES (1), (33), (34): Xaa is C or S
XGEVVMEVQVEKVVKDYEDVKAMKVSRLETPVXX

SEQ ID NO: 46300 - protein, 36 aa, Artificial Sequence; identical to SEQ ID NO: 9780
  GFR-binding peptide
  MOD_RES (2), (4), (36): Xaa is C or S

SEQ ID NO: 46301 - protein, 35 aa, Artificial Sequence
  GFR-binding peptide
  MOD_RES (2), (34), (35): Xaa is C or S
GXGEVVMEVQVEKVVKDYEDVKAMKVSRLETPVXX

SEQ ID NO: 46302 - protein, 36 aa, Artificial Sequence
  GFR-binding peptide
  MOD_RES (35), (35): Xaa is C or S
  MOD_RES (11), (12), (13), (14), (15): Xaa is A or G
  MOD_RES (16), (17), (18), (19): Xaa is A or G or is absent
HDELTNSLQEXXXXXXXXXYYLVTLPELQVQTPRXQ

SEQ ID NO: 46303 - protein, 39 aa, Artificial Sequence
  GFR-binding peptide
  MOD_RES (1), (3), (35), (36): Xaa is C or S
XGXSRVVMNVQVEKIVNSSDDVKAVKVSRLKTPAXXPKP

SEQ ID NO: 46304 - protein, 34 aa, Artificial Sequence
  GFR-binding peptide
  MOD_RES (1), (3), (34): Xaa is C or S
XKXSRVIMVQVEKVKPKRGVVKAIKVSRLAQPVX

SEQ ID NO: 46305 - protein, 35 aa, Artificial Sequence; identical to SEQ ID NO: 9784
  GFR-binding peptide
  MOD_RES (1), (33), (34): Xaa is C or S

SEQ ID NO: 46306 - protein, 34 aa, Artificial Sequence; identical to SEQ ID NO: 9785
  GFR-binding peptide
  MOD_RES (2), (34): Xaa is C or S

SEQ ID NO: 46307 - protein, 38 aa, Artificial Sequence
  GFR-binding peptide
  MOD_RES (2), (4), (38): Xaa is C or S
  MOD_RES (16), (17), (18), (19), (20): Xaa is A or G
  MOD_RES (21), (22), (23), (24): Xaa is A or G or is absent
RXEXKNHQLFNSLQEXXXXXXXXXYYLMTLPEEETPVX

SEQ ID NO: 46308 - protein, 38 aa, Artificial Sequence
  GFR-binding peptide
  MOD_RES (2), (4), (36): Xaa is C or S
HXGXSRVVMNSMEGIIVNSSDDMIQVTINSLKTPAXTP

SEQ ID NO: 46309 - protein, 40 aa, Artificial Sequence; identical to SEQ ID NO: 9786
  GFR-binding peptide
  MOD_RES (2), (34), (35): Xaa is C or S

SEQ ID NO: 46310 - protein, 38 aa, Artificial Sequence; identical to SEQ ID NO: 17054
  GFR-binding peptide
  MOD_RES (1), (3): Xaa is C or S
  MOD_RES (16), (17), (18), (19), (20): Xaa is A or G
  MOD_RES (21), (22), (23), (24): Xaa is A or G or is absent

SEQ ID NO: 46311 - protein, 41 aa, Artificial Sequence
  GFR-binding peptide
  MOD_RES (2), (4), (38): Xaa is C or S
RXEXKNHQLFNSLQEHQGQHPKIRYYVMPLPEEETPVXELG

SEQ ID NO: 46312 - protein, 42 aa, Artificial Sequence
  GFR-binding peptide
  MOD_RES (1), (3), (37), (38): Xaa is C or S
  MOD_RES (15), (16), (17), (18), (19): Xaa is A or G
  MOD_RES (20), (21), (22), (23): Xaa is A or G or is absent
XGXARVVMNVQVEKXXXXXXXXXVKAVKVSRLQTPAXXPKPV

SEQ ID NO: 46313 - protein, 36 aa, Artificial Sequence; identical to SEQ ID NO: 9790
  GFR-binding peptide
  MOD_RES (1), (35), (36): Xaa is C or S
  MOD_RES (13), (14), (15), (16), (17): Xaa is A or G
  MOD_RES (18), (19), (20), (21): Xaa is A or G or is absent

SEQ ID NO: 46314 - protein, 36 aa, Artificial Sequence
  GFR-binding peptide
  MOD_RES (2), (4): Xaa is C or S
  MOD_RES (15), (16), (17), (18), (19): Xaa is A or G
  MOD_RES (20), (21), (22), (23): Xaa is A or G or is absent
SXKXSKVIMVTAKKXXXXXXXXXIKRIQVPRLDQSV

SEQ ID NO: 46315 - protein, 39 aa, Artificial Sequence; identical to SEQ ID NO: 17056
  GFR-binding peptide
  MOD_RES (2), (36): Xaa is C or S
  MOD_RES (14), (15), (16), (17), (18): Xaa is A or G
  MOD_RES (19), (20), (21), (22): Xaa is A or G or is absent

SEQ ID NO: 46316 - protein, 38 aa, Artificial Sequence
  GFR-binding peptide
  MOD_RES (1), (3), (37): Xaa is C or S
XEXKNHQLFNSLQEHQGQHPKIRYYVMPLPEEETPVXE

SEQ ID NO: 46317 - protein, 41 aa, Artificial Sequence; identical to SEQ ID NO: 9791
  GFR-binding peptide
  MOD_RES (1), (3), (37), (38): Xaa is C or S
  MOD_RES (15), (16), (17), (18), (19): Xaa is A or G
  MOD_RES (20), (21), (22), (23): Xaa is A or G or is absent

SEQ ID NO: 46318 - protein, 39 aa, Artificial Sequence
  GFR-binding peptide
  MOD_RES (1), (35): Xaa is C or S
  MOD_RES (13), (14), (15), (16), (17): Xaa is A or G
  MOD_RES (18), (19), (20), (21): Xaa is A or G or is absent
XSRVVMNSMEGIXXXXXXXXXMIQVTINSLKTPAXTPKT

SEQ ID NO: 46319 - protein, 40 aa, Artificial Sequence
  GFR-binding peptide
  MOD_RES (2), (34), (35): Xaa is C or S
GXGEVVMEVTAKKVVKDYEDIKRMQVPRLETPVXXAKPIS

SEQ ID NO: 46320 - protein, 33 aa, Artificial Sequence
  GFR-binding peptide
  MOD_RES (33), (33): Xaa is C or S
  MOD_RES (11), (12), (13), (14), (15): Xaa is A or G
  MOD_RES (16), (17), (18), (19): Xaa is A or G or is absent
RVVMNSMEGIXXXXXXXXXMIQVTINSLQTPAX

SEQ ID NO: 46321 - protein, 36 aa, Artificial Sequence
  GFR-binding peptide
  MOD_RES (2), (33), (34): Xaa is C or S
KXSKVIMVQVEKIKPTKGIVKAIKVSRLDQSVXXPS

SEQ ID NO: 46322 - protein, 43 aa, Artificial Sequence
  GFR-binding peptide
  MOD_RES (1), (3), (40): Xaa is C or S
  MOD_RES (16), (17), (18), (19), (20): Xaa is A or G
  MOD_RES (21), (22), (23), (24): Xaa is A or G or is absent
XAXELHEELRNSLQEXXXXXXXXXYYVVPLPEHHVRSPQXKVS

SEQ ID NO: 46323 - protein, 32 aa, Artificial Sequence; identical to SEQ ID NO: 17057
  GFR-binding peptide

SEQ ID NO: 46324 - protein, 42 aa, Artificial Sequence; identical to SEQ ID NO: 9793
  GFR-binding peptide
  MOD_RES (1), (3), (36), (37): Xaa is C or S
  MOD_RES (14), (15), (16), (17), (18): Xaa is A or G
  MOD_RES (19), (20), (21), (22): Xaa is A or G or is absent

SEQ ID NO: 46325 - protein, 42 aa, Artificial Sequence; identical to SEQ ID NO: 17058
  GFR-binding peptide
  MOD_RES (1), (38): Xaa is C or S

SEQ ID NO: 46326 - protein, 35 aa, Artificial Sequence; identical to SEQ ID NO: 17060
  GFR-binding peptide
  MOD_RES (35), (35): Xaa is C or S
  MOD_RES (11), (12), (13), (14), (15): Xaa is A or G
  MOD_RES (16), (17), (18), (19): Xaa is A or G or is absent

SEQ ID NO: 46327 - protein, 35 aa, Artificial Sequence; identical to SEQ ID NO: 9797
  GFR-binding peptide
  MOD_RES (2), (34), (35): Xaa is C or S

SEQ ID NO: 46328 - protein, 35 aa, Artificial Sequence
  GFR-binding peptide
  MOD_RES (12), (13), (14), (15), (16): Xaa is A or G
  MOD_RES (17), (18), (19), (20): Xaa is A or G or is absent
LHDELTNSLQEXXXXXXXXXYYLVTLPELQVQTPR

SEQ ID NO: 46329 - protein, 42 aa, Artificial Sequence
  GFR-binding peptide
  MOD_RES (1), (3), (40): Xaa is C or S
  MOD_RES (16), (17), (18), (19), (20): Xaa is A or G
  MOD_RES (21), (22), (23), (24): Xaa is A or G or is absent
XKXALHDELTNSLQEXXXXXXXXXYYLVTLPELQVQTPRXQV

SEQ ID NO: 46330 - protein, 34 aa, Artificial Sequence
  GFR-binding peptide
  MOD_RES (33), (34): Xaa is C or S
  MOD_RES (11), (12), (13), (14), (15): Xaa is A or G
  MOD_RES (16), (17), (18), (19): Xaa is A or G or is absent
RVVMNVQVEKXXXXXXXXXVKAVKVSRLKTPAXX

SEQ ID NO: 46331 - protein, 35 aa, Artificial Sequence
  GFR-binding peptide
  MOD_RES (2), (4): Xaa is C or S
RXGXGEVVMDVQVEKVVKENEDVKAMKVSRLETPV

SEQ ID NO: 46332 - protein, 33 aa, Artificial Sequence; identical to SEQ ID NO: 9800
  GFR-binding peptide
  MOD_RES (12), (13), (14), (15), (16): Xaa is A or G
  MOD_RES (17), (18), (19), (20): Xaa is A or G or is absent

SEQ ID NO: 46333 - protein, 39 aa, Artificial Sequence; identical to SEQ ID NO: 9803
  GFR-binding peptide
  MOD_RES (1), (3), (34), (35): Xaa is C or S

SEQ ID NO: 46334 - protein, 30 aa, Artificial Sequence
  GFR-binding peptide
SKVVMVTAKKVKPTRGVIKRIQVPRLDQPV

SEQ ID NO: 46335 - protein, 38 aa, Artificial Sequence
  GFR-binding peptide
  MOD_RES (34), (34): Xaa is C or S
  MOD_RES (12), (13), (14), (15), (16): Xaa is A or G
  MOD_RES (17), (18), (19), (20): Xaa is A or G or is absent
KNHQLFNSLQEXXXXXXXXXYYVMPLPEEETPVXELGE

SEQ ID NO: 46336 - protein, 39 aa, Artificial Sequence; identical to SEQ ID NO: 9805
  GFR-binding peptide
  MOD_RES (1), (3), (37): Xaa is C or S
  MOD_RES (15), (16), (17), (18), (19): Xaa is A or G
  MOD_RES (20), (21), (22), (23): Xaa is A or G or is absent

SEQ ID NO: 46337 - protein, 39 aa, Artificial Sequence
  GFR-binding peptide
  MOD_RES (33), (33): Xaa is C or S
  MOD_RES (11), (12), (13), (14), (15): Xaa is A or G
  MOD_RES (16), (17), (18), (19): Xaa is A or G or is absent
NHQLFNSLQEXXXXXXXXXYYVMPLPEEETPVXELGEDN

SEQ ID NO: 46338 - protein, 40 aa, Artificial Sequence
  GFR-binding peptide
  MOD_RES (1), (3), (35): Xaa is C or S
XGXSRVVMNVTAKKIVNSSDDIKRVQVPRLKTPAXTPKTV

SEQ ID NO: 46339 - protein, 36 aa, Artificial Sequence; identical to SEQ ID NO: 35556
  GFR-binding peptide
  MOD_RES (1), (32), (33): Xaa is C or S

SEQ ID NO: 46340 - protein, 37 aa, Artificial Sequence; identical to SEQ ID NO: 9809
  GFR-binding peptide
  MOD_RES (32), (33): Xaa is C or S

SEQ ID NO: 46341 - protein, 33 aa, Artificial Sequence
  GFR-binding peptide
  MOD_RES (1), (32), (33): Xaa is C or S
XSKVIMVQVEKIKPTKGIVKAIKVSRLDQSVXX

SEQ ID NO: 46342 - protein, 39 aa, Artificial Sequence; identical to SEQ ID NO: 17069
  GFR-binding peptide
  MOD_RES (1), (38): Xaa is C or S

SEQ ID NO: 46343 - protein, 36 aa, Artificial Sequence; identical to SEQ ID NO: 9813
  GFR-binding peptide
  MOD_RES (33), (34): Xaa is C or S
  MOD_RES (11), (12), (13), (14), (15): Xaa is A or G
  MOD_RES (16), (17), (18), (19): Xaa is A or G or is absent

SEQ ID NO: 46344 - protein, 39 aa, Artificial Sequence
  GFR-binding peptide
  MOD_RES (2), (33), (34): Xaa is C or S
KXSKVIMVQVEKIKPTKGIVKAIKVSRLDQSVXXPSASA

SEQ ID NO: 46345 - protein, 38 aa, Artificial Sequence
  GFR-binding peptide
  MOD_RES (34), (35): Xaa is C or S
  MOD_RES (12), (13), (14), (15), (16): Xaa is A or G
  MOD_RES (17), (18), (19), (20): Xaa is A or G or is absent
SRVVMNSMEGIXXXXXXXXXMIQVTINSLKTPAXXPKP

SEQ ID NO: 46346 - protein, 41 aa, Artificial Sequence; identical to SEQ ID NO: 9815
  GFR-binding peptide
  MOD_RES (1), (3), (36), (37): Xaa is C or S
  MOD_RES (14), (15), (16), (17), (18): Xaa is A or G
  MOD_RES (19), (20), (21), (22): Xaa is A or G or is absent

SEQ ID NO: 46347 - protein, 40 aa, Artificial Sequence; identical to SEQ ID NO: 17072
  GFR-binding peptide
  MOD_RES (2), (39): Xaa is C or S
  MOD_RES (15), (16), (17), (18), (19): Xaa is A or G
  MOD_RES (20), (21), (22), (23): Xaa is A or G or is absent

SEQ ID NO: 46348 - protein, 39 aa, Artificial Sequence; identical to SEQ ID NO: 9817
  GFR-binding peptide
  MOD_RES (1), (3), (36), (37): Xaa is C or S
  MOD_RES (14), (15), (16), (17), (18): Xaa is A or G
  MOD_RES (19), (20), (21), (22): Xaa is A or G or is absent

SEQ ID NO: 46349 - protein, 37 aa, Artificial Sequence; identical to SEQ ID NO: 17074
  GFR-binding peptide
  MOD_RES (36), (36): Xaa is C or S
  MOD_RES (12), (13), (14), (15), (16): Xaa is A or G
  MOD_RES (17), (18), (19), (20): Xaa is A or G or is absent

SEQ ID NO: 46350 - protein, 39 aa, Artificial Sequence
  GFR-binding peptide
  MOD_RES (2), (4), (36), (37): Xaa is C or S
HXGXSRVVMNSMEGIIVNSSDDMIQVTINSLKTPAXXPK

SEQ ID NO: 46351 - protein, 40 aa, Artificial Sequence
  GFR-binding peptide
  MOD_RES (1), (35), (36): Xaa is C or S
  MOD_RES (13), (14), (15), (16), (17): Xaa is A or G
  MOD_RES (18), (19), (20), (21): Xaa is A or G or is absent
XGEVVMDVQVEKXXXXXXXXXVKAMKVSRLETPVXXAKPI

SEQ ID NO: 46352 - protein, 31 aa, Artificial Sequence
  GFR-binding peptide
  MOD_RES (31), (31): Xaa is C or S
RVVMNVQVEKIVNSSDDVKAVKVSRLKTPAX

SEQ ID NO: 46353 - protein, 40 aa, Artificial Sequence
  GFR-binding peptide
  MOD_RES (1), (3), (37), (38): Xaa is C or S
  MOD_RES (15), (16), (17), (18), (19): Xaa is A or G
  MOD_RES (20), (21), (22), (23): Xaa is A or G or is absent
XGXGEVVMDVQVEKXXXXXXXXXVKAMKVSRLETPVXXAK

SEQ ID NO: 46354 - protein, 41 aa, Artificial Sequence
  GFR-binding peptide
  MOD_RES (2), (36), (37): Xaa is C or S
  MOD_RES (14), (15), (16), (17), (18): Xaa is A or G
  MOD_RES (19), (20), (21), (22): Xaa is A or G or is absent
GXGEVVMDSMEGIXXXXXXXXXMIQMTINSLETPVXXAKPI

SEQ ID NO: 46355 - protein, 33 aa, Artificial Sequence
  GFR-binding peptide
  MOD_RES (1), (33): Xaa is C or S
XSRVVMNSMEGIIVNSSDDMIQVTINSLKTPAX

SEQ ID NO: 46356 - protein, 36 aa, Artificial Sequence
  GFR-binding peptide
  MOD_RES (13), (14), (15), (16), (17): Xaa is A or G
  MOD_RES (18), (19), (20), (21): Xaa is A or G or is absent
ELHEELRNSLQEXXXXXXXXXYYLVTLPEHHVRSPQ

SEQ ID NO: 46357 - protein, 37 aa, Artificial Sequence
  GFR-binding peptide
  MOD_RES (36), (36): Xaa is C or S
  MOD_RES (12), (13), (14), (15), (16): Xaa is A or G
  MOD_RES (17), (18), (19), (20): Xaa is A or G or is absent
LHDELTNSLQEXXXXXXXXXYYLVTLPELQVQTPRXQ

SEQ ID NO: 46358 - protein, 37 aa, Artificial Sequence
  GFR-binding peptide
  MOD_RES (34), (35): Xaa is C or S
  MOD_RES (12), (13), (14), (15), (16): Xaa is A or G
  MOD_RES (17), (18), (19), (20): Xaa is A or G or is absent
SRVVMNVTAKKXXXXXXXXXIKRVQVPRLKTPAXXPK

SEQ ID NO: 46359 - protein, 36 aa, Artificial Sequence
  GFR-binding peptide
  MOD_RES (2), (34), (35): Xaa is C or S
GXARVVMNVTAKKIVNSSDDIKRVQVPRLQTPAXXP

SEQ ID NO: 46360 - protein, 32 aa, Artificial Sequence
  GFR-binding peptide
  MOD_RES (1), (1): Xaa is C or S
XGEVVMDVQVEKVVKENEDVKAMKVSRLETPV

SEQ ID NO: 46361 - protein, 36 aa, Artificial Sequence
  GFR-binding peptide
  MOD_RES (32), (33): Xaa is C or S
GEVVMEVQVEKVVKDYEDVKAMKVSRLETPVXXAKP

SEQ ID NO: 46362 - protein, 35 aa, Artificial Sequence; identical to SEQ ID NO: 17083
  GFR-binding peptide
  MOD_RES (35), (35): Xaa is C or S

SEQ ID NO: 46363 - protein, 40 aa, Artificial Sequence
  GFR-binding peptide
  MOD_RES (1), (35): Xaa is C or S
  MOD_RES (13), (14), (15), (16), (17): Xaa is A or G
  MOD_RES (18), (19), (20), (21): Xaa is A or G or is absent
XSRVVMNVQVEKXXXXXXXXXVKAVKVSRLKTPAXTPKTV

SEQ ID NO: 46364 - protein, 42 aa, Artificial Sequence
  GFR-binding peptide
  MOD_RES (1), (3), (37): Xaa is C or S
  MOD_RES (15), (16), (17), (18), (19): Xaa is A or G
  MOD_RES (20), (21), (22), (23): Xaa is A or G or is absent
XEXKNHQLFNSLQEXXXXXXXXXYYVMPLPEEETPVXELGED

SEQ ID NO: 46365 - protein, 42 aa, Artificial Sequence
  GFR-binding peptide
  MOD_RES (1), (3), (37), (38): Xaa is C or S
  MOD_RES (15), (16), (17), (18), (19): Xaa is A or G
  MOD_RES (20), (21), (22), (23): Xaa is A or G or is absent
XGXSRVVMNSMEGIXXXXXXXXXMIQVTINSLKTPAXXPKPV

SEQ ID NO: 46366 - protein, 33 aa, Artificial Sequence
  GFR-binding peptide
  MOD_RES (2), (2): Xaa is C or S
GXGEVVMESMEGIVVKDYEDMIQMTINSLETPV

SEQ ID NO: 46367 - protein, 38 aa, Artificial Sequence
  GFR-binding peptide
  MOD_RES (2), (35), (36): Xaa is C or S
  MOD_RES (13), (14), (15), (16), (17): Xaa is A or G
  MOD_RES (18), (19), (20), (21): Xaa is A or G or is absent
KXSKVIMVTAKKXXXXXXXXXIKRIQVPRLDQSVXXPS

SEQ ID NO: 46368 - protein, 43 aa, Artificial Sequence
  GFR-binding peptide
  MOD_RES (1), (3), (37), (38): Xaa is C or S
  MOD_RES (15), (16), (17), (18), (19): Xaa is A or G
  MOD_RES (20), (21), (22), (23): Xaa is A or G or is absent
XGXGEVVMDVQVEKXXXXXXXXXVKAMKVSRLETPVXXAKPIK

SEQ ID NO: 46369 - protein, 37 aa, Artificial Sequence
  GFR-binding peptide
  MOD_RES (1), (35), (36): Xaa is C or S
  MOD_RES (13), (14), (15), (16), (17): Xaa is A or G
  MOD_RES (18), (19), (20), (21): Xaa is A or G or is absent
XSRVVMNSMEGIXXXXXXXXXMIQVTINSLKTPAXXP

SEQ ID NO: 46370 - protein, 33 aa, Artificial Sequence
  GFR-binding peptide
  MOD_RES (1), (3): Xaa is C or S
XKXSRVIMVTAKKVKPKRGVIKRIQVPRLAQPV

SEQ ID NO: 46371 - protein, 36 aa, Artificial Sequence; identical to SEQ ID NO: 9823
  GFR-binding peptide
  MOD_RES (1), (3): Xaa is C or S
  MOD_RES (15), (16), (17), (18), (19): Xaa is A or G
  MOD_RES (20), (21), (22), (23): Xaa is A or G or is absent

SEQ ID NO: 46372 - protein, 41 aa, Artificial Sequence
  GFR-binding peptide
  MOD_RES (37), (37): Xaa is C or S
ELHEELRNSLQELKPKKRVYEYYVVPLPEHHVRSPQXKVSS

SEQ ID NO: 46373 - protein, 40 aa, Artificial Sequence; identical to SEQ ID NO: 17088
  GFR-binding peptide
  MOD_RES (1), (3), (37): Xaa is C or S
  MOD_RES (15), (16), (17), (18), (19): Xaa is A or G
  MOD_RES (20), (21), (22), (23): Xaa is A or G or is absent

SEQ ID NO: 46374 - protein, 43 aa, Artificial Sequence
  GFR-binding peptide
  MOD_RES (1), (3), (37): Xaa is C or S
  MOD_RES (15), (16), (17), (18), (19): Xaa is A or G
  MOD_RES (20), (21), (22), (23): Xaa is A or G or is absent
XGXSRVVMNVQVEKXXXXXXXXXVKAVKVSRLKTPAXTPKTVH

SEQ ID NO: 46375 - protein, 38 aa, Artificial Sequence
  GFR-binding peptide
  MOD_RES (36), (36): Xaa is C or S
  MOD_RES (12), (13), (14), (15), (16): Xaa is A or G
  MOD_RES (17), (18), (19), (20): Xaa is A or G or is absent
LHEELRNSLQEXXXXXXXXXYYVVPLPEHHVRSPQXKV

SEQ ID NO: 46376 - protein, 40 aa, Artificial Sequence
  GFR-binding peptide
  MOD_RES (1), (3), (37): Xaa is C or S
XEXKNHQLFNSLQEHQGQHPKIRYYLMTLPEEETPVXELG

SEQ ID NO: 46377 - protein, 38 aa, Artificial Sequence; identical to SEQ ID NO: 9824
  GFR-binding peptide
  MOD_RES (2), (4), (38): Xaa is C or S
  MOD_RES (16), (17), (18), (19), (20): Xaa is A or G
  MOD_RES (21), (22), (23), (24): Xaa is A or G or is absent

SEQ ID NO: 46378 - protein, 34 aa, Artificial Sequence
  GFR-binding peptide
  MOD_RES (33), (34): Xaa is C or S
  MOD_RES (11), (12), (13), (14), (15): Xaa is A or G
  MOD_RES (16), (17), (18), (19): Xaa is A or G or is absent
EVVMESMEGIXXXXXXXXXMIQMTINSLETPVXX

SEQ ID NO: 46379 - protein, 35 aa, Artificial Sequence; identical to SEQ ID NO: 9827
  GFR-binding peptide
  MOD_RES (2), (4): Xaa is C or S

SEQ ID NO: 46380 - protein, 40 aa, Artificial Sequence; identical to SEQ ID NO: 35596
  GFR-binding peptide
  MOD_RES (1), (3), (34), (35): Xaa is C or S

SEQ ID NO: 46381 - protein, 35 aa, Artificial Sequence
  GFR-binding peptide
  MOD_RES (1), (3), (34), (35): Xaa is C or S
XKXSRVIMVQVEKVKPKRGVVKAIKVSRLAQPVXX

SEQ ID NO: 46382 - protein, 38 aa, Artificial Sequence; identical to SEQ ID NO: 9830
  GFR-binding peptide
  MOD_RES (33), (34): Xaa is C or S
  MOD_RES (11), (12), (13), (14), (15): Xaa is A or G
  MOD_RES (16), (17), (18), (19): Xaa is A or G or is absent

SEQ ID NO: 46383 - protein, 38 aa, Artificial Sequence; identical to SEQ ID NO: 17096
  GFR-binding peptide
  MOD_RES (2), (2): Xaa is C or S

SEQ ID NO: 46384 - protein, 38 aa, Artificial Sequence
  GFR-binding peptide
  MOD_RES (1), (3), (34), (35): Xaa is C or S
XKXSKVIMSMEGIIKPTKGIMIQITINSLDQSVXXPSA

SEQ ID NO: 46385 - protein, 31 aa, Artificial Sequence; identical to SEQ ID NO: 9831
  GFR-binding peptide

SEQ ID NO: 46386 - protein, 32 aa, Artificial Sequence; identical to SEQ ID NO: 9834
  GFR-binding peptide
  MOD_RES (1), (1): Xaa is C or S

SEQ ID NO: 46387 - protein, 37 aa, Artificial Sequence; identical to SEQ ID NO: 17100
  GFR-binding peptide
  MOD_RES (35), (35): Xaa is C or S

SEQ ID NO: 46388 - protein, 41 aa, Artificial Sequence; identical to SEQ ID NO: 9835
  GFR-binding peptide
  MOD_RES (2), (4), (38), (39): Xaa is C or S
  MOD_RES (16), (17), (18), (19), (20): Xaa is A or G
  MOD_RES (21), (22), (23), (24): Xaa is A or G or is absent

SEQ ID NO: 46389 - protein, 33 aa, Artificial Sequence; identical to SEQ ID NO: 35610
  GFR-binding peptide
  MOD_RES (1), (1): Xaa is C or S
  MOD_RES (12), (13), (14), (15), (16): Xaa is A or G
  MOD_RES (17), (18), (19), (20): Xaa is A or G or is absent

SEQ ID NO: 46390 - protein, 38 aa, Artificial Sequence; identical to SEQ ID NO: 17101
  GFR-binding peptide
  MOD_RES (36), (36): Xaa is C or S

SEQ ID NO: 46391 - protein, 34 aa, Artificial Sequence
  GFR-binding peptide
  MOD_RES (2), (2): Xaa is C or S
  MOD_RES (13), (14), (15), (16), (17): Xaa is A or G
  MOD_RES (18), (19), (20), (21): Xaa is A or G or is absent
KXSRVIMSMEGIXXXXXXXXXMIQITINSLAQPV

SEQ ID NO: 46392 - protein, 37 aa, Artificial Sequence
  GFR-binding peptide
  MOD_RES (32), (32): Xaa is C or S
SRVVMNVTAKKIVNSSDDIKRVQVPRLKTPAXTPKTV

SEQ ID NO: 46393 - protein, 43 aa, Artificial Sequence; identical to SEQ ID NO: 17103
  GFR-binding peptide
  MOD_RES (2), (39): Xaa is C or S
  MOD_RES (15), (16), (17), (18), (19): Xaa is A or G
  MOD_RES (20), (21), (22), (23): Xaa is A or G or is absent

SEQ ID NO: 46394 - protein, 35 aa, Artificial Sequence; identical to SEQ ID NO: 9836
  GFR-binding peptide
  MOD_RES (31), (32): Xaa is C or S

SEQ ID NO: 46395 - protein, 42 aa, Artificial Sequence; identical to SEQ ID NO: 17104
  GFR-binding peptide
  MOD_RES (1), (3), (37): Xaa is C or S

SEQ ID NO: 46396 - protein, 34 aa, Artificial Sequence
  GFR-binding peptide
  MOD_RES (32), (33): Xaa is C or S
GEVVMEVTAKKVVKDYEDIKRMQVPRLETPVXXA

SEQ ID NO: 46397 - protein, 42 aa, Artificial Sequence; identical to SEQ ID NO: 9838
  GFR-binding peptide
  MOD_RES (2), (4), (37), (38): Xaa is C or S
  MOD_RES (15), (16), (17), (18), (19): Xaa is A or G
  MOD_RES (20), (21), (22), (23): Xaa is A or G or is absent

SEQ ID NO: 46398 - protein, 35 aa, Artificial Sequence
  GFR-binding peptide
  MOD_RES (34), (35): Xaa is C or S
  MOD_RES (12), (13), (14), (15), (16): Xaa is A or G
  MOD_RES (17), (18), (19), (20): Xaa is A or G or is absent
ARVVMNSMEGIXXXXXXXXXMIQVTINSLQTPAXX

SEQ ID NO: 46399 - protein, 35 aa, Artificial Sequence; identical to SEQ ID NO: 17106
  GFR-binding peptide
  MOD_RES (13), (14), (15), (16), (17): Xaa is A or G
  MOD_RES (18), (19), (20), (21): Xaa is A or G or is absent

SEQ ID NO: 46400 - protein, 35 aa, Artificial Sequence
  GFR-binding peptide
  MOD_RES (2), (35): Xaa is C or S
  MOD_RES (13), (14), (15), (16), (17): Xaa is A or G
  MOD_RES (18), (19), (20), (21): Xaa is A or G or is absent
KXSRVIMVQVEKXXXXXXXXXVKAIKVSRLAQPVX

SEQ ID NO: 46401 - protein, 37 aa, Artificial Sequence
  GFR-binding peptide
  MOD_RES (2), (36): Xaa is C or S
EXKNHQLFNSLQEHQGQHPKIRYYLMTLPEEETPVXE

SEQ ID NO: 46402 - protein, 35 aa, Artificial Sequence; identical to SEQ ID NO: 35621
  GFR-binding peptide
  MOD_RES (2), (33), (34): Xaa is C or S

SEQ ID NO: 46403 - protein, 37 aa, Artificial Sequence; identical to SEQ ID NO: 9843
  GFR-binding peptide
  MOD_RES (2), (36), (37): Xaa is C or S
  MOD_RES (14), (15), (16), (17), (18): Xaa is A or G
  MOD_RES (19), (20), (21), (22): Xaa is A or G or is absent

SEQ ID NO: 46404 - protein, 40 aa, Artificial Sequence
  GFR-binding peptide
  MOD_RES (2), (4), (38), (39): Xaa is C or S
  MOD_RES (16), (17), (18), (19), (20): Xaa is A or G
  MOD_RES (21), (22), (23), (24): Xaa is A or G or is absent
HXGXSRVVMNVTAKKXXXXXXXXXIKRVQVPRLKTPAXXP

SEQ ID NO: 46405 - protein, 39 aa, Artificial Sequence; identical to SEQ ID NO: 9847
  GFR-binding peptide
  MOD_RES (2), (4), (38): Xaa is C or S
  MOD_RES (16), (17), (18), (19), (20): Xaa is A or G
  MOD_RES (21), (22), (23), (24): Xaa is A or G or is absent

SEQ ID NO: 46406 - protein, 41 aa, Artificial Sequence
  GFR-binding peptide
  MOD_RES (2), (39): Xaa is C or S
KXALHDELTNSLQEFIPKKRVIEYYLVTLPELQVQTPRXQV

SEQ ID NO: 46407 - protein, 39 aa, Artificial Sequence
  GFR-binding peptide
  MOD_RES (1), (3), (35), (36): Xaa is C or S
XGXGEVVMDVTAKKVVKENEDIKRMQVPRLETPVXXAKP

SEQ ID NO: 46408 - protein, 37 aa, Artificial Sequence; identical to SEQ ID NO: 9850
  GFR-binding peptide
  MOD_RES (2), (4): Xaa is C or S
  MOD_RES (16), (17), (18), (19), (20): Xaa is A or G
  MOD_RES (21), (22), (23), (24): Xaa is A or G or is absent

SEQ ID NO: 46409 - protein, 35 aa, Artificial Sequence; identical to SEQ ID NO: 17114
  GFR-binding peptide
  MOD_RES (33), (33): Xaa is C or S

SEQ ID NO: 46410 - protein, 40 aa, Artificial Sequence; identical to SEQ ID NO: 17115
  GFR-binding peptide
  MOD_RES (37), (37): Xaa is C or S
  MOD_RES (13), (14), (15), (16), (17): Xaa is A or G
  MOD_RES (18), (19), (20), (21): Xaa is A or G or is absent

SEQ ID NO: 46411 - protein, 38 aa, Artificial Sequence
  GFR-binding peptide
  MOD_RES (1), (32), (33): Xaa is C or S
XSKVVMVTAKKVKPTRGVIKRIQVPRLDQPVXXPSASA

SEQ ID NO: 46412 - protein, 40 aa, Artificial Sequence
  GFR-binding peptide
  MOD_RES (2), (4), (38), (39): Xaa is C or S
  MOD_RES (16), (17), (18), (19), (20): Xaa is A or G
  MOD_RES (21), (22), (23), (24): Xaa is A or G or is absent
HXGXSRVVMNVQVEKXXXXXXXXXVKAVKVSRLKTPAXXP

SEQ ID NO: 46413 - protein, 38 aa, Artificial Sequence; identical to SEQ ID NO: 9855
  GFR-binding peptide
  MOD_RES (2), (33), (34): Xaa is C or S

SEQ ID NO: 46414 - protein, 40 aa, Artificial Sequence
  GFR-binding peptide
  MOD_RES (2), (4), (36): Xaa is C or S
HXGXSRVVMNVQVEKIVNSSDDVKAVKVSRLKTPAXTPKT

SEQ ID NO: 46415 - protein, 39 aa, Artificial Sequence; identical to SEQ ID NO: 17120
  GFR-binding peptide
  MOD_RES (1), (3), (37): Xaa is C or S

SEQ ID NO: 46416 - protein, 37 aa, Artificial Sequence
  GFR-binding peptide
  MOD_RES (33), (34): Xaa is C or S
  MOD_RES (11), (12), (13), (14), (15): Xaa is A or G
  MOD_RES (16), (17), (18), (19): Xaa is A or G or is absent
SRVIMSMEGIXXXXXXXXXMIQITINSLAQPVXXPAA

SEQ ID NO: 46417 - protein, 34 aa, Artificial Sequence
  GFR-binding peptide
  MOD_RES (31), (31): Xaa is C or S
RVVMNSMEGIIVNSSDDMIQVTINSLKTPAXTPK

SEQ ID NO: 46418 - protein, 32 aa, Artificial Sequence; identical to SEQ ID NO: 17126
  GFR-binding peptide

SEQ ID NO: 46419 - protein, 32 aa, Artificial Sequence; identical to SEQ ID NO: 9866
  GFR-binding peptide
  MOD_RES (32), (32): Xaa is C or S

SEQ ID NO: 46420 - protein, 39 aa, Artificial Sequence; identical to SEQ ID NO: 9867
  GFR-binding peptide
  MOD_RES (1), (3), (35), (36): Xaa is C or S

SEQ ID NO: 46421 - protein, 44 aa, Artificial Sequence
  GFR-binding peptide
  MOD_RES (1), (3), (40): Xaa is C or S
XAXELHEELRNSLQELKPKKRVYEYYLVTLPEHHVRSPQXKVSS

SEQ ID NO: 46422 - protein, 40 aa, Artificial Sequence
  GFR-binding peptide
  MOD_RES (1), (3), (34), (35): Xaa is C or S
XKXSKVVMVTAKKVKPTRGVIKRIQVPRLDQPVXXPSASA

SEQ ID NO: 46423 - protein, 38 aa, Artificial Sequence
  GFR-binding peptide
  MOD_RES (35), (35): Xaa is C or S
  MOD_RES (11), (12), (13), (14), (15): Xaa is A or G
  MOD_RES (16), (17), (18), (19): Xaa is A or G or is absent
HEELRNSLQEXXXXXXXXXYYVVPLPEHHVRSPQXKVS

SEQ ID NO: 46424 - protein, 38 aa, Artificial Sequence; identical to SEQ ID NO: 9871
  GFR-binding peptide
  MOD_RES (1), (35): Xaa is C or S
  MOD_RES (13), (14), (15), (16), (17): Xaa is A or G
  MOD_RES (18), (19), (20), (21): Xaa is A or G or is absent

SEQ ID NO: 46425 - protein, 36 aa, Artificial Sequence
  GFR-binding peptide
  MOD_RES (2), (35), (36): Xaa is C or S
  MOD_RES (13), (14), (15), (16), (17): Xaa is A or G
  MOD_RES (18), (19), (20), (21): Xaa is A or G or is absent
KXSRVIMVQVEKXXXXXXXXXVKAIKVSRLAQPVXX

SEQ ID NO: 46426 - protein, 39 aa, Artificial Sequence; identical to SEQ ID NO: 17133
  GFR-binding peptide
  MOD_RES (2), (4): Xaa is C or S
  MOD_RES (17), (18), (19), (20), (21): Xaa is A or G
  MOD_RES (22), (23), (24), (25): Xaa is A or G or is absent

SEQ ID NO: 46427 - protein, 40 aa, Artificial Sequence
  GFR-binding peptide
  MOD_RES (2), (34), (35): Xaa is C or S
GXGEVVMDVQVEKVVKENEDVKAMKVSRLETPVXXAKPIK

SEQ ID NO: 46428 - protein, 37 aa, Artificial Sequence
  GFR-binding peptide
  MOD_RES (1), (3), (37): Xaa is C or S
  MOD_RES (15), (16), (17), (18), (19): Xaa is A or G
  MOD_RES (20), (21), (22), (23): Xaa is A or G or is absent
XGXSRVVMNSMEGIXXXXXXXXXMIQVTINSLKTPAX

SEQ ID NO: 46429 - protein, 39 aa, Artificial Sequence
  GFR-binding peptide
  MOD_RES (2), (4), (35), (36): Xaa is C or S
SXKXSKVVMVTAKKVKPTRGVIKRIQVPRLDQPVXXPSA

SEQ ID NO: 46430 - protein, 37 aa, Artificial Sequence
  GFR-binding peptide
  MOD_RES (2), (4), (36): Xaa is C or S
HXGXSRVVMNVQVEKIVNSSDDVKAVKVSRLKTPAXT

SEQ ID NO: 46431 - protein, 35 aa, Artificial Sequence
  GFR-binding peptide
  MOD_RES (31), (32): Xaa is C or S
EVVMDSMEGIVVKENEDMIQMTINSLETPVXXAKP

SEQ ID NO: 46432 - protein, 31 aa, Artificial Sequence; identical to SEQ ID NO: 9875
  GFR-binding peptide
  MOD_RES (31), (31): Xaa is C or S

SEQ ID NO: 46433 - protein, 34 aa, Artificial Sequence
  GFR-binding peptide
  MOD_RES (33), (34): Xaa is C or S
  MOD_RES (11), (12), (13), (14), (15): Xaa is A or G
  MOD_RES (16), (17), (18), (19): Xaa is A or G or is absent
SRVIMSMEGIXXXXXXXXXMIQITINSLAQPVXX

SEQ ID NO: 46434 - protein, 36 aa, Artificial Sequence; identical to SEQ ID NO: 17135
  GFR-binding peptide
  MOD_RES (34), (34): Xaa is C or S
  MOD_RES (12), (13), (14), (15), (16): Xaa is A or G
  MOD_RES (17), (18), (19), (20): Xaa is A or G or is absent

SEQ ID NO: 46435 - protein, 35 aa, Artificial Sequence
  GFR-binding peptide
  MOD_RES (2), (4), (35): Xaa is C or S
SXKXSKVIMSMEGIIKPTKGIMIQITINSLDQSVX

SEQ ID NO: 46436 - protein, 38 aa, Artificial Sequence; identical to SEQ ID NO: 9881
  GFR-binding peptide
  MOD_RES (2), (4), (37), (38): Xaa is C or S
  MOD_RES (15), (16), (17), (18), (19): Xaa is A or G
  MOD_RES (20), (21), (22), (23): Xaa is A or G or is absent

SEQ ID NO: 46437 - protein, 41 aa, Artificial Sequence; identical to SEQ ID NO: 17140
  GFR-binding peptide
  MOD_RES (37), (37): Xaa is C or S

SEQ ID NO: 46438 - protein, 39 aa, Artificial Sequence; identical to SEQ ID NO: 9882
  GFR-binding peptide
  MOD_RES (33), (33): Xaa is C or S
  MOD_RES (11), (12), (13), (14), (15): Xaa is A or G
  MOD_RES (16), (17), (18), (19): Xaa is A or G or is absent

SEQ ID NO: 46439 - protein, 37 aa, Artificial Sequence
  GFR-binding peptide
  MOD_RES (2), (33), (34): Xaa is C or S
KXSKVIMSMEGIIKPTKGIMIQITINSLDQSVXXPSA

SEQ ID NO: 46440 - protein, 39 aa, Artificial Sequence; identical to SEQ ID NO: 9883
  GFR-binding peptide
  MOD_RES (1), (3), (36), (37): Xaa is C or S
  MOD_RES (14), (15), (16), (17), (18): Xaa is A or G
  MOD_RES (19), (20), (21), (22): Xaa is A or G or is absent

SEQ ID NO: 46441 - protein, 35 aa, Artificial Sequence; identical to SEQ ID NO: 17141
  GFR-binding peptide
  MOD_RES (2), (2): Xaa is C or S

SEQ ID NO: 46442 - protein, 37 aa, Artificial Sequence
  GFR-binding peptide
  MOD_RES (33), (33): Xaa is C or S
  MOD_RES (11), (12), (13), (14), (15): Xaa is A or G
  MOD_RES (16), (17), (18), (19): Xaa is A or G or is absent
NHQLFNSLQEXXXXXXXXXYYLMTLPEEETPVXELGE

SEQ ID NO: 46443 - protein, 35 aa, Artificial Sequence; identical to SEQ ID NO: 9884
  GFR-binding peptide
  MOD_RES (33), (34): Xaa is C or S
  MOD_RES (11), (12), (13), (14), (15): Xaa is A or G
  MOD_RES (16), (17), (18), (19): Xaa is A or G or is absent

SEQ ID NO: 46444 - protein, 32 aa, Artificial Sequence
  GFR-binding peptide
  MOD_RES (32), (32): Xaa is C or S
ARVVMNVTAKKIVNSSDDIKRVQVPRLQTPAX

SEQ ID NO: 46445 - protein, 37 aa, Artificial Sequence; identical to SEQ ID NO: 9885
  GFR-binding peptide
  MOD_RES (34), (35): Xaa is C or S
  MOD_RES (12), (13), (14), (15), (16): Xaa is A or G
  MOD_RES (17), (18), (19), (20): Xaa is A or G or is absent

SEQ ID NO: 46446 - protein, 34 aa, Artificial Sequence; identical to SEQ ID NO: 9886
  GFR-binding peptide
  MOD_RES (31), (31): Xaa is C or S

SEQ ID NO: 46447 - protein, 40 aa, Artificial Sequence
  GFR-binding peptide
  MOD_RES (1), (3), (40): Xaa is C or S
XAXELHEELRNSLQELKPKKRVYEYYVVPLPEHHVRSPQX

SEQ ID NO: 46448 - protein, 36 aa, Artificial Sequence
  GFR-binding peptide
  MOD_RES (2), (2): Xaa is C or S
KXALHDELTNSLQEFIPKKRVIEYYLVTLPELQVQT

SEQ ID NO: 46449 - protein, 37 aa, Artificial Sequence
  GFR-binding peptide
  MOD_RES (37), (37): Xaa is C or S
ELHEELRNSLQELKPKKRVYEYYVVPLPEHHVRSPQX

SEQ ID NO: 46450 - protein, 37 aa, Artificial Sequence; identical to SEQ ID NO: 17142
  GFR-binding peptide
  MOD_RES (2), (36): Xaa is C or S
  MOD_RES (14), (15), (16), (17), (18): Xaa is A or G
  MOD_RES (19), (20), (21), (22): Xaa is A or G or is absent

SEQ ID NO: 46451 - protein, 38 aa, Artificial Sequence; identical to SEQ ID NO: 17143
  GFR-binding peptide
  MOD_RES (37), (37): Xaa is C or S
  MOD_RES (13), (14), (15), (16), (17): Xaa is A or G
  MOD_RES (18), (19), (20), (21): Xaa is A or G or is absent

SEQ ID NO: 46452 - protein, 35 aa, Artificial Sequence
  GFR-binding peptide
  MOD_RES (1), (33), (34): Xaa is C or S
XSRVVMNVTAKKIVNSSDDIKRVQVPRLKTPAXXP

SEQ ID NO: 46453 - protein, 42 aa, Artificial Sequence; identical to SEQ ID NO: 9891
  GFR-binding peptide
  MOD_RES (1), (3), (37): Xaa is C or S
  MOD_RES (15), (16), (17), (18), (19): Xaa is A or G
  MOD_RES (20), (21), (22), (23): Xaa is A or G or is absent

SEQ ID NO: 46454 - protein, 38 aa, Artificial Sequence
  GFR-binding peptide
  MOD_RES (35), (35): Xaa is C or S
  MOD_RES (11), (12), (13), (14), (15): Xaa is A or G
  MOD_RES (16), (17), (18), (19): Xaa is A or G or is absent
HDELTNSLQEXXXXXXXXXYYVVPLPELQVQTPRXQVN

SEQ ID NO: 46455 - protein, 39 aa, Artificial Sequence; identical to SEQ ID NO: 9892
  GFR-binding peptide
  MOD_RES (2), (4), (37), (38): Xaa is C or S
  MOD_RES (15), (16), (17), (18), (19): Xaa is A or G
  MOD_RES (20), (21), (22), (23): Xaa is A or G or is absent

SEQ ID NO: 46456 - protein, 40 aa, Artificial Sequence
  GFR-binding peptide
  MOD_RES (36), (36): Xaa is C or S
  MOD_RES (12), (13), (14), (15), (16): Xaa is A or G
  MOD_RES (17), (18), (19), (20): Xaa is A or G or is absent
LHEELRNSLQEXXXXXXXXXYYLVTLPEHHVRSPQXKVSS

SEQ ID NO: 46457 - protein, 31 aa, Artificial Sequence
  GFR-binding peptide
ARVVMNSMEGIIVNSSDDMIQVTINSLQTPA

SEQ ID NO: 46458 - protein, 42 aa, Artificial Sequence
  GFR-binding peptide
  MOD_RES (2), (4), (38): Xaa is C or S
RXEXKNHQLFNSLQEHQGQHPKIRYYVMPLPEEETPVXELGE

SEQ ID NO: 46459 - protein, 40 aa, Artificial Sequence
  GFR-binding peptide
  MOD_RES (2), (4): Xaa is C or S
  MOD_RES (17), (18), (19), (20), (21): Xaa is A or G
  MOD_RES (22), (23), (24), (25): Xaa is A or G or is absent
AXAXELHEELRNSLQEXXXXXXXXXYYLVTLPEHHVRSPQ

SEQ ID NO: 46460 - protein, 37 aa, Artificial Sequence; identical to SEQ ID NO: 9894
  GFR-binding peptide
  MOD_RES (2), (4), (37): Xaa is C or S
  MOD_RES (15), (16), (17), (18), (19): Xaa is A or G
  MOD_RES (20), (21), (22), (23): Xaa is A or G or is absent

SEQ ID NO: 46461 - protein, 40 aa, Artificial Sequence
  GFR-binding peptide
  MOD_RES (1), (34), (35): Xaa is C or S
  MOD_RES (12), (13), (14), (15), (16): Xaa is A or G
  MOD_RES (17), (18), (19), (20): Xaa is A or G or is absent
XSKVIMVQVEKXXXXXXXXXVKAIKVSRLDQSVXXPSASA

SEQ ID NO: 46462 - protein, 39 aa, Artificial Sequence; identical to SEQ ID NO: 9896
  GFR-binding peptide
  MOD_RES (1), (35), (36): Xaa is C or S
  MOD_RES (13), (14), (15), (16), (17): Xaa is A or G
  MOD_RES (18), (19), (20), (21): Xaa is A or G or is absent

SEQ ID NO: 46463 - protein, 39 aa, Artificial Sequence
  GFR-binding peptide
  MOD_RES (2), (4), (38), (39): Xaa is C or S
  MOD_RES (16), (17), (18), (19), (20): Xaa is A or G
  MOD_RES (21), (22), (23), (24): Xaa is A or G or is absent
HXGXARVVMNSMEGIXXXXXXXXXMIQVTINSLQTPAXX

SEQ ID NO: 46464 - protein, 36 aa, Artificial Sequence; identical to SEQ ID NO: 9897
  GFR-binding peptide
  MOD_RES (33), (34): Xaa is C or S
  MOD_RES (11), (12), (13), (14), (15): Xaa is A or G
  MOD_RES (16), (17), (18), (19): Xaa is A or G or is absent

SEQ ID NO: 46465 - protein, 38 aa, Artificial Sequence; identical to SEQ ID NO: 9898
  GFR-binding peptide
  MOD_RES (1), (3), (37), (38): Xaa is C or S
  MOD_RES (15), (16), (17), (18), (19): Xaa is A or G
  MOD_RES (20), (21), (22), (23): Xaa is A or G or is absent

SEQ ID NO: 46466 - protein, 41 aa, Artificial Sequence; identical to SEQ ID NO: 17148
  GFR-binding peptide
  MOD_RES (1), (38): Xaa is C or S

SEQ ID NO: 46467 - protein, 40 aa, Artificial Sequence
  GFR-binding peptide
  MOD_RES (37), (37): Xaa is C or S
  MOD_RES (13), (14), (15), (16), (17): Xaa is A or G
  MOD_RES (18), (19), (20), (21): Xaa is A or G or is absent
ELHEELRNSLQEXXXXXXXXXYYVVPLPEHHVRSPQXKVS

SEQ ID NO: 46468 - protein, 38 aa, Artificial Sequence; identical to SEQ ID NO: 17149
  GFR-binding peptide
  MOD_RES (33), (33): Xaa is C or S
  MOD_RES (11), (12), (13), (14), (15): Xaa is A or G
  MOD_RES (16), (17), (18), (19): Xaa is A or G or is absent

SEQ ID NO: 46469 - protein, 42 aa, Artificial Sequence
  GFR-binding peptide
  MOD_RES (1), (38): Xaa is C or S
  MOD_RES (14), (15), (16), (17), (18): Xaa is A or G
  MOD_RES (19), (20), (21), (22): Xaa is A or G or is absent
XELHEELRNSLQEXXXXXXXXXYYLVTLPEHHVRSPQXKVSS

SEQ ID NO: 46470 - protein, 34 aa, Artificial Sequence
  GFR-binding peptide
  MOD_RES (1), (3), (34): Xaa is C or S
XKXSKVIMSMEGIIKPTKGIMIQITINSLDQSVX

SEQ ID NO: 46471 - protein, 39 aa, Artificial Sequence
  GFR-binding peptide
  MOD_RES (2), (36): Xaa is C or S
  MOD_RES (14), (15), (16), (17), (18): Xaa is A or G
  MOD_RES (19), (20), (21), (22): Xaa is A or G or is absent
EXKNHQLFNSLQEXXXXXXXXXYYVMPLPEEETPVXELG

SEQ ID NO: 46472 - protein, 35 aa, Artificial Sequence
  GFR-binding peptide
  MOD_RES (2), (2): Xaa is C or S
  MOD_RES (14), (15), (16), (17), (18): Xaa is A or G
  MOD_RES (19), (20), (21), (22): Xaa is A or G or is absent
GXGEVVMESMEGIXXXXXXXXXMIQMTINSLETPV

SEQ ID NO: 46473 - protein, 36 aa, Artificial Sequence; identical to SEQ ID NO: 17151
  GFR-binding peptide
  MOD_RES (13), (14), (15), (16), (17): Xaa is A or G
  MOD_RES (18), (19), (20), (21): Xaa is A or G or is absent

SEQ ID NO: 46474 - protein, 37 aa, Artificial Sequence; identical to SEQ ID NO: 9901
  GFR-binding peptide
  MOD_RES (33), (34): Xaa is C or S
  MOD_RES (11), (12), (13), (14), (15): Xaa is A or G
  MOD_RES (16), (17), (18), (19): Xaa is A or G or is absent

SEQ ID NO: 46475 - protein, 41 aa, Artificial Sequence; identical to SEQ ID NO: 9904
  GFR-binding peptide
  MOD_RES (2), (35), (36): Xaa is C or S
  MOD_RES (13), (14), (15), (16), (17): Xaa is A or G
  MOD_RES (18), (19), (20), (21): Xaa is A or G or is absent

SEQ ID NO: 46476 - protein, 36 aa, Artificial Sequence; identical to SEQ ID NO: 17152
  GFR-binding peptide
  MOD_RES (1), (35): Xaa is C or S

SEQ ID NO: 46477 - protein, 35 aa, Artificial Sequence; identical to SEQ ID NO: 9907
  GFR-binding peptide
  MOD_RES (1), (3), (34), (35): Xaa is C or S

SEQ ID NO: 46478 - protein, 37 aa, Artificial Sequence; identical to SEQ ID NO: 17153
  GFR-binding peptide
  MOD_RES (37), (37): Xaa is C or S

SEQ ID NO: 46479 - protein, 35 aa, Artificial Sequence
  GFR-binding peptide
  MOD_RES (33), (34): Xaa is C or S
  MOD_RES (11), (12), (13), (14), (15): Xaa is A or G
  MOD_RES (16), (17), (18), (19): Xaa is A or G or is absent
SKVVMVTAKKXXXXXXXXXIKRIQVPRLDQPVXXP

SEQ ID NO: 46480 - protein, 38 aa, Artificial Sequence; identical to SEQ ID NO: 9908
  GFR-binding peptide
  MOD_RES (2), (4), (36), (37): Xaa is C or S

SEQ ID NO: 46481 - protein, 40 aa, Artificial Sequence; identical to SEQ ID NO: 17154
  GFR-binding peptide
  MOD_RES (1), (38): Xaa is C or S

SEQ ID NO: 46482 - protein, 34 aa, Artificial Sequence; identical to SEQ ID NO: 9910
  GFR-binding peptide
  MOD_RES (32), (33): Xaa is C or S

SEQ ID NO: 46483 - protein, 39 aa, Artificial Sequence; identical to SEQ ID NO: 17158
  GFR-binding peptide
  MOD_RES (1), (3): Xaa is C or S
  MOD_RES (16), (17), (18), (19), (20): Xaa is A or G
  MOD_RES (21), (22), (23), (24): Xaa is A or G or is absent

SEQ ID NO: 46484 - protein, 40 aa, Artificial Sequence
  GFR-binding peptide
  MOD_RES (2), (34), (35): Xaa is C or S
GXSRVVMNSMEGIIVNSSDDMIQVTINSLKTPAXXPKPVY

SEQ ID NO: 46485 - protein, 33 aa, Artificial Sequence; identical to SEQ ID NO: 17160
  GFR-binding peptide
  MOD_RES (11), (12), (13), (14), (15): Xaa is A or G
  MOD_RES (16), (17), (18), (19): Xaa is A or G or is absent

SEQ ID NO: 46486 - protein, 35 aa, Artificial Sequence; identical to SEQ ID NO: 17162
  GFR-binding peptide
  MOD_RES (34), (34): Xaa is C or S

SEQ ID NO: 46487 - protein, 40 aa, Artificial Sequence
  GFR-binding peptide
  MOD_RES (1), (3), (34), (35): Xaa is C or S
XKXSKVIMVQVEKIKPTKGIVKAIKVSRLDQSVXXPSASA

SEQ ID NO: 46488 - protein, 35 aa, Artificial Sequence
  GFR-binding peptide
  MOD_RES (34), (35): Xaa is C or S
  MOD_RES (12), (13), (14), (15), (16): Xaa is A or G
  MOD_RES (17), (18), (19), (20): Xaa is A or G or is absent
SRVVMNSMEGIXXXXXXXXXMIQVTINSLKTPAXX

SEQ ID NO: 46489 - protein, 41 aa, Artificial Sequence; identical to SEQ ID NO: 9916
  GFR-binding peptide
  MOD_RES (1), (35): Xaa is C or S
  MOD_RES (13), (14), (15), (16), (17): Xaa is A or G
  MOD_RES (18), (19), (20), (21): Xaa is A or G or is absent

SEQ ID NO: 46490 - protein, 35 aa, Artificial Sequence; identical to SEQ ID NO: 17165
  GFR-binding peptide

SEQ ID NO: 46491 - protein, 30 aa, Artificial Sequence; identical to SEQ ID NO: 9919
  GFR-binding peptide

SEQ ID NO: 46492 - protein, 40 aa, Artificial Sequence; identical to SEQ ID NO: 9920
  GFR-binding peptide
  MOD_RES (34), (35): Xaa is C or S
  MOD_RES (12), (13), (14), (15), (16): Xaa is A or G
  MOD_RES (17), (18), (19), (20): Xaa is A or G or is absent

SEQ ID NO: 46493 - protein, 34 aa, Artificial Sequence
  GFR-binding peptide
  MOD_RES (31), (32): Xaa is C or S
SRVIMSMEGIVKPKRGVMIQITINSLAQPVXXPA

SEQ ID NO: 46494 - protein, 39 aa, Artificial Sequence
  GFR-binding peptide
  MOD_RES (1), (3), (37), (38): Xaa is C or S
  MOD_RES (15), (16), (17), (18), (19): Xaa is A or G
  MOD_RES (20), (21), (22), (23): Xaa is A or G or is absent
XGXSRVVMNSMEGIXXXXXXXXXMIQVTINSLKTPAXXP

SEQ ID NO: 46495 - protein, 38 aa, Artificial Sequence; identical to SEQ ID NO: 17167
  GFR-binding peptide
  MOD_RES (36), (36): Xaa is C or S
  MOD_RES (12), (13), (14), (15), (16): Xaa is A or G
  MOD_RES (17), (18), (19), (20): Xaa is A or G or is absent

SEQ ID NO: 46496 - protein, 40 aa, Artificial Sequence
  GFR-binding peptide
  MOD_RES (1), (35), (36): Xaa is C or S
  MOD_RES (13), (14), (15), (16), (17): Xaa is A or G
  MOD_RES (18), (19), (20), (21): Xaa is A or G or is absent
XSRVVMNSMEGIXXXXXXXXXMIQVTINSLKTPAXXPKPV

SEQ ID NO: 46497 - protein, 35 aa, Artificial Sequence
  GFR-binding peptide
  MOD_RES (33), (34): Xaa is C or S
  MOD_RES (11), (12), (13), (14), (15): Xaa is A or G
  MOD_RES (16), (17), (18), (19): Xaa is A or G or is absent
SKVVMVQVEKXXXXXXXXXVKAIKVSRLDQPVXXP

SEQ ID NO: 46498 - protein, 40 aa, Artificial Sequence; identical to SEQ ID NO: 17169
  GFR-binding peptide
  MOD_RES (2), (4): Xaa is C or S
  MOD_RES (17), (18), (19), (20), (21): Xaa is A or G
  MOD_RES (22), (23), (24), (25): Xaa is A or G or is absent

SEQ ID NO: 46499 - protein, 40 aa, Artificial Sequence; identical to SEQ ID NO: 35739
  GFR-binding peptide
  MOD_RES (2), (4), (37), (38): Xaa is C or S
  MOD_RES (15), (16), (17), (18), (19): Xaa is A or G
  MOD_RES (20), (21), (22), (23): Xaa is A or G or is absent

SEQ ID NO: 46500 - protein, 32 aa, Artificial Sequence; identical to SEQ ID NO: 9922
  GFR-binding peptide
  MOD_RES (11), (12), (13), (14), (15): Xaa is A or G
  MOD_RES (16), (17), (18), (19): Xaa is A or G or is absent

SEQ ID NO: 46501 - protein, 42 aa, Artificial Sequence
  GFR-binding peptide
  MOD_RES (1), (3), (37), (38): Xaa is C or S
  MOD_RES (15), (16), (17), (18), (19): Xaa is A or G
  MOD_RES (20), (21), (22), (23): Xaa is A or G or is absent
XGXARVVMNVTAKKXXXXXXXXXIKRVQVPRLQTPAXXPKPV

SEQ ID NO: 46502 - protein, 32 aa, Artificial Sequence
  GFR-binding peptide
  MOD_RES (31), (32): Xaa is C or S
RVVMNVTAKKIVNSSDDIKRVQVPRLQTPAXX

SEQ ID NO: 46503 - protein, 42 aa, Artificial Sequence
  GFR-binding peptide
  MOD_RES (2), (4), (38), (39): Xaa is C or S
  MOD_RES (16), (17), (18), (19), (20): Xaa is A or G
  MOD_RES (21), (22), (23), (24): Xaa is A or G or is absent
HXGXARVVMNVTAKKXXXXXXXXXIKRVQVPRLQTPAXXPKP

SEQ ID NO: 46504 - protein, 37 aa, Artificial Sequence
  GFR-binding peptide
  MOD_RES (2), (35), (36): Xaa is C or S
  MOD_RES (13), (14), (15), (16), (17): Xaa is A or G
  MOD_RES (18), (19), (20), (21): Xaa is A or G or is absent
KXSKVIMSMEGIXXXXXXXXXMIQITINSLDQSVXXP

SEQ ID NO: 46505 - protein, 38 aa, Artificial Sequence; identical to SEQ ID NO: 9924
  GFR-binding peptide
  MOD_RES (2), (4), (36), (37): Xaa is C or S

SEQ ID NO: 46506 - protein, 37 aa, Artificial Sequence; identical to SEQ ID NO: 9925
  GFR-binding peptide
  MOD_RES (1), (3), (37): Xaa is C or S
  MOD_RES (15), (16), (17), (18), (19): Xaa is A or G
  MOD_RES (20), (21), (22), (23): Xaa is A or G or is absent

SEQ ID NO: 46507 - protein, 36 aa, Artificial Sequence; identical to SEQ ID NO: 35748
  GFR-binding peptide
  MOD_RES (1), (34), (35): Xaa is C or S
  MOD_RES (12), (13), (14), (15), (16): Xaa is A or G
  MOD_RES (17), (18), (19), (20): Xaa is A or G or is absent

SEQ ID NO: 46508 - protein, 31 aa, Artificial Sequence; identical to SEQ ID NO: 9927
  GFR-binding peptide
  MOD_RES (31), (31): Xaa is C or S

SEQ ID NO: 46509 - protein, 34 aa, Artificial Sequence
  GFR-binding peptide
  MOD_RES (2), (33), (34): Xaa is C or S
KXSRVIMVTAKKVKPKRGVIKRIQVPRLAQPVXX

SEQ ID NO: 46510 - protein, 38 aa, Artificial Sequence
  GFR-binding peptide
  MOD_RES (33), (34): Xaa is C or S
  MOD_RES (11), (12), (13), (14), (15): Xaa is A or G
  MOD_RES (16), (17), (18), (19): Xaa is A or G or is absent
SKVVMSMEGIXXXXXXXXXMIQITINSLDQPVXXPSAS

SEQ ID NO: 46511 - protein, 40 aa, Artificial Sequence
  GFR-binding peptide
  MOD_RES (1), (3), (37), (38): Xaa is C or S
  MOD_RES (15), (16), (17), (18), (19): Xaa is A or G
  MOD_RES (20), (21), (22), (23): Xaa is A or G or is absent
XGXGEVVMDVTAKKXXXXXXXXXIKRMQVPRLETPVXXAK

SEQ ID NO: 46512 - protein, 35 aa, Artificial Sequence
  GFR-binding peptide
  MOD_RES (1), (32), (33): Xaa is C or S
XSRVIMVQVEKVKPKRGVVKAIKVSRLAQPVXXPA

SEQ ID NO: 46513 - protein, 36 aa, Artificial Sequence; identical to SEQ ID NO: 9931
  GFR-binding peptide
  MOD_RES (2), (36): Xaa is C or S
  MOD_RES (14), (15), (16), (17), (18): Xaa is A or G
  MOD_RES (19), (20), (21), (22): Xaa is A or G or is absent

SEQ ID NO: 46514 - protein, 32 aa, Artificial Sequence; identical to SEQ ID NO: 9932
  GFR-binding peptide
  MOD_RES (1), (32): Xaa is C or S

SEQ ID NO: 46515 - protein, 32 aa, Artificial Sequence
  GFR-binding peptide
  MOD_RES (11), (12), (13), (14), (15): Xaa is A or G
  MOD_RES (16), (17), (18), (19): Xaa is A or G or is absent
RVVMNVTAKKXXXXXXXXXIKRVQVPRLKTPA

SEQ ID NO: 46516 - protein, 38 aa, Artificial Sequence
  GFR-binding peptide
  MOD_RES (1), (3), (37): Xaa is C or S
  MOD_RES (15), (16), (17), (18), (19): Xaa is A or G
  MOD_RES (20), (21), (22), (23): Xaa is A or G or is absent
XGXSRVVMNVTAKKXXXXXXXXXIKRVQVPRLKTPAXT

SEQ ID NO: 46517 - protein, 38 aa, Artificial Sequence
  GFR-binding peptide
  MOD_RES (1), (38): Xaa is C or S
XELHEELRNSLQELKPKKRVYEYYVVPLPEHHVRSPQX

SEQ ID NO: 46518 - protein, 37 aa, Artificial Sequence
  GFR-binding peptide
  MOD_RES (2), (4): Xaa is C or S
  MOD_RES (16), (17), (18), (19), (20): Xaa is A or G
  MOD_RES (21), (22), (23), (24): Xaa is A or G or is absent
RXEXKNHQLFNSLQEXXXXXXXXXYYLMTLPEEETPV

SEQ ID NO: 46519 - protein, 39 aa, Artificial Sequence
  GFR-binding peptide
  MOD_RES (1), (3), (34), (35): Xaa is C or S
XKXSKVVMVQVEKVKPTRGVVKAIKVSRLDQPVXXPSAS

SEQ ID NO: 46520 - protein, 38 aa, Artificial Sequence
  GFR-binding peptide
  MOD_RES (37), (37): Xaa is C or S
  MOD_RES (13), (14), (15), (16), (17): Xaa is A or G
  MOD_RES (18), (19), (20), (21): Xaa is A or G or is absent
ELHEELRNSLQEXXXXXXXXXYYVVPLPEHHVRSPQXK

SEQ ID NO: 46521 - protein, 36 aa, Artificial Sequence; identical to SEQ ID NO: 9936
  GFR-binding peptide
  MOD_RES (32), (33): Xaa is C or S

SEQ ID NO: 46522 - protein, 38 aa, Artificial Sequence; identical to SEQ ID NO: 17178
  GFR-binding peptide
  MOD_RES (34), (34): Xaa is C or S

SEQ ID NO: 46523 - protein, 34 aa, Artificial Sequence
  GFR-binding peptide
  MOD_RES (31), (31): Xaa is C or S
RVVMNVQVEKIVNSSDDVKAVKVSRLKTPAXTPK

SEQ ID NO: 46524 - protein, 40 aa, Artificial Sequence; identical to SEQ ID NO: 9937
  GFR-binding peptide
  MOD_RES (2), (4), (35), (36): Xaa is C or S

SEQ ID NO: 46525 - protein, 37 aa, Artificial Sequence; identical to SEQ ID NO: 9938
  GFR-binding peptide
  MOD_RES (1), (3), (37): Xaa is C or S
  MOD_RES (15), (16), (17), (18), (19): Xaa is A or G
  MOD_RES (20), (21), (22), (23): Xaa is A or G or is absent

SEQ ID NO: 46526 - protein, 39 aa, Artificial Sequence
  GFR-binding peptide
  MOD_RES (1), (35): Xaa is C or S
XKNHQLFNSLQEHQGQHPKIRYYLMTLPEEETPVXELGE

SEQ ID NO: 46527 - protein, 31 aa, Artificial Sequence; identical to SEQ ID NO: 9940
  GFR-binding peptide
  MOD_RES (1), (1): Xaa is C or S

SEQ ID NO: 46528 - protein, 32 aa, Artificial Sequence; identical to SEQ ID NO: 9941
  GFR-binding peptide
  MOD_RES (11), (12), (13), (14), (15): Xaa is A or G
  MOD_RES (16), (17), (18), (19): Xaa is A or G or is absent

SEQ ID NO: 46529 - protein, 34 aa, Artificial Sequence; identical to SEQ ID NO: 9942
  GFR-binding peptide
  MOD_RES (1), (3): Xaa is C or S

SEQ ID NO: 46530 - protein, 35 aa, Artificial Sequence; identical to SEQ ID NO: 17179
  GFR-binding peptide

SEQ ID NO: 46531 - protein, 38 aa, Artificial Sequence
  GFR-binding peptide
  MOD_RES (1), (3), (35), (36): Xaa is C or S
XGXARVVMNVQVEKIVNSSDDVKAVKVSRLQTPAXXPK

SEQ ID NO: 46532 - protein, 40 aa, Artificial Sequence; identical to SEQ ID NO: 9944
  GFR-binding peptide
  MOD_RES (34), (35): Xaa is C or S
  MOD_RES (12), (13), (14), (15), (16): Xaa is A or G
  MOD_RES (17), (18), (19), (20): Xaa is A or G or is absent

SEQ ID NO: 46533 - protein, 34 aa, Artificial Sequence; identical to SEQ ID NO: 9946
  GFR-binding peptide
  MOD_RES (34), (34): Xaa is C or S
  MOD_RES (12), (13), (14), (15), (16): Xaa is A or G
  MOD_RES (17), (18), (19), (20): Xaa is A or G or is absent

SEQ ID NO: 46534 - protein, 41 aa, Artificial Sequence
  GFR-binding peptide
  MOD_RES (1), (3), (40): Xaa is C or S
XAXELHEELRNSLQELKPKKRVYEYYLVTLPEHHVRSPQXK

SEQ ID NO: 46535 - protein, 40 aa, Artificial Sequence
  GFR-binding peptide
  MOD_RES (1), (3), (35): Xaa is C or S
XGXSRVVMNVQVEKIVNSSDDVKAVKVSRLKTPAXTPKTV

SEQ ID NO: 46536 - protein, 36 aa, Artificial Sequence; identical to SEQ ID NO: 17180
  GFR-binding peptide
  MOD_RES (1), (3): Xaa is C or S
  MOD_RES (15), (16), (17), (18), (19): Xaa is A or G
  MOD_RES (20), (21), (22), (23): Xaa is A or G or is absent

SEQ ID NO: 46537 - protein, 38 aa, Artificial Sequence; identical to SEQ ID NO: 17181
  GFR-binding peptide
  MOD_RES (1), (35): Xaa is C or S

SEQ ID NO: 46538 - protein, 36 aa, Artificial Sequence
  GFR-binding peptide
  MOD_RES (2), (4): Xaa is C or S
  MOD_RES (15), (16), (17), (18), (19): Xaa is A or G
  MOD_RES (20), (21), (22), (23): Xaa is A or G or is absent
SXKXSKVIMVQVEKXXXXXXXXXVKAIKVSRLDQSV

SEQ ID NO: 46539 - protein, 37 aa, Artificial Sequence
  GFR-binding peptide
  MOD_RES (34), (35): Xaa is C or S
  MOD_RES (12), (13), (14), (15), (16): Xaa is A or G
  MOD_RES (17), (18), (19), (20): Xaa is A or G or is absent
GEVVMDSMEGIXXXXXXXXXMIQMTINSLETPVXXAK

SEQ ID NO: 46540 - protein, 39 aa, Artificial Sequence; identical to SEQ ID NO: 9951
  GFR-binding peptide
  MOD_RES (34), (35): Xaa is C or S
  MOD_RES (12), (13), (14), (15), (16): Xaa is A or G
  MOD_RES (17), (18), (19), (20): Xaa is A or G or is absent

SEQ ID NO: 46541 - protein, 37 aa, Artificial Sequence
  GFR-binding peptide
  MOD_RES (34), (35): Xaa is C or S
  MOD_RES (12), (13), (14), (15), (16): Xaa is A or G
  MOD_RES (17), (18), (19), (20): Xaa is A or G or is absent
GEVVMEVQVEKXXXXXXXXXVKAMKVSRLETPVXXAK

SEQ ID NO: 46542 - protein, 41 aa, Artificial Sequence; identical to SEQ ID NO: 17183
  GFR-binding peptide
  MOD_RES (2), (39): Xaa is C or S

SEQ ID NO: 46543 - protein, 33 aa, Artificial Sequence
  GFR-binding peptide
LHEELRNSLQELKPKKRVYEYYVVPLPEHHVRS

SEQ ID NO: 46544 - protein, 37 aa, Artificial Sequence; identical to SEQ ID NO: 17184
  GFR-binding peptide
  MOD_RES (1), (1): Xaa is C or S
  MOD_RES (14), (15), (16), (17), (18): Xaa is A or G
  MOD_RES (19), (20), (21), (22): Xaa is A or G or is absent

SEQ ID NO: 46545 - protein, 42 aa, Artificial Sequence
  GFR-binding peptide
  MOD_RES (2), (36), (37): Xaa is C or S
  MOD_RES (14), (15), (16), (17), (18): Xaa is A or G
  MOD_RES (19), (20), (21), (22): Xaa is A or G or is absent
GXGEVVMEVTAKKXXXXXXXXXIKRMQVPRLETPVXXAKPIS

SEQ ID NO: 46546 - protein, 38 aa, Artificial Sequence
  GFR-binding peptide
  MOD_RES (2), (36), (37): Xaa is C or S
  MOD_RES (14), (15), (16), (17), (18): Xaa is A or G
  MOD_RES (19), (20), (21), (22): Xaa is A or G or is absent
GXGEVVMEVTAKKXXXXXXXXXIKRMQVPRLETPVXXA

SEQ ID NO: 46547 - protein, 42 aa, Artificial Sequence
  GFR-binding peptide
  MOD_RES (2), (4), (38), (39): Xaa is C or S
  MOD_RES (16), (17), (18), (19), (20): Xaa is A or G
  MOD_RES (21), (22), (23), (24): Xaa is A or G or is absent
HXGXARVVMNSMEGIXXXXXXXXXMIQVTINSLQTPAXXPKP

SEQ ID NO: 46548 - protein, 35 aa, Artificial Sequence
  GFR-binding peptide
  MOD_RES (31), (32): Xaa is C or S
SKVIMVTAKKIKPTKGIIKRIQVPRLDQSVXXPSA

SEQ ID NO: 46549 - protein, 42 aa, Artificial Sequence; identical to SEQ ID NO: 9955
  GFR-binding peptide
  MOD_RES (2), (4), (37), (38): Xaa is C or S
  MOD_RES (15), (16), (17), (18), (19): Xaa is A or G
  MOD_RES (20), (21), (22), (23): Xaa is A or G or is absent

SEQ ID NO: 46550 - protein, 37 aa, Artificial Sequence
  GFR-binding peptide
  MOD_RES (2), (36), (37): Xaa is C or S
  MOD_RES (14), (15), (16), (17), (18): Xaa is A or G
  MOD_RES (19), (20), (21), (22): Xaa is A or G or is absent
GXSRVVMNVQVEKXXXXXXXXXVKAVKVSRLKTPAXX

SEQ ID NO: 46551 - protein, 33 aa, Artificial Sequence; identical to SEQ ID NO: 9957
  GFR-binding peptide
  MOD_RES (1), (33): Xaa is C or S

SEQ ID NO: 46552 - protein, 37 aa, Artificial Sequence; identical to SEQ ID NO: 9960
  GFR-binding peptide
  MOD_RES (32), (33): Xaa is C or S

SEQ ID NO: 46553 - protein, 32 aa, Artificial Sequence
  GFR-binding peptide
  MOD_RES (31), (32): Xaa is C or S
SKVVMVQVEKVKPTRGVVKAIKVSRLDQPVXX

SEQ ID NO: 46554 - protein, 38 aa, Artificial Sequence; identical to SEQ ID NO: 9962
  GFR-binding peptide
  MOD_RES (2), (4), (37), (38): Xaa is C or S
  MOD_RES (15), (16), (17), (18), (19): Xaa is A or G
  MOD_RES (20), (21), (22), (23): Xaa is A or G or is absent

SEQ ID NO: 46555 - protein, 35 aa, Artificial Sequence
  GFR-binding peptide
  MOD_RES (2), (4): Xaa is C or S
RXGXGEVVMEVTAKKVVKDYEDIKRMQVPRLETPV

SEQ ID NO: 46556 - protein, 37 aa, Artificial Sequence; identical to SEQ ID NO: 9965
  GFR-binding peptide
  MOD_RES (1), (3), (34), (35): Xaa is C or S

SEQ ID NO: 46557 - protein, 35 aa, Artificial Sequence; identical to SEQ ID NO: 9966
  GFR-binding peptide
  MOD_RES (1), (32), (33): Xaa is C or S

SEQ ID NO: 46558 - protein, 40 aa, Artificial Sequence; identical to SEQ ID NO: 17196
  GFR-binding peptide
  MOD_RES (2), (39): Xaa is C or S
  MOD_RES (15), (16), (17), (18), (19): Xaa is A or G
  MOD_RES (20), (21), (22), (23): Xaa is A or G or is absent

SEQ ID NO: 46559 - protein, 43 aa, Artificial Sequence; identical to SEQ ID NO: 17197
  GFR-binding peptide
  MOD_RES (2), (39): Xaa is C or S

SEQ ID NO: 46560 - protein, 42 aa, Artificial Sequence
  GFR-binding peptide
  MOD_RES (1), (3), (36), (37): Xaa is C or S
  MOD_RES (14), (15), (16), (17), (18): Xaa is A or G
  MOD_RES (19), (20), (21), (22): Xaa is A or G or is absent
XKXSKVVMVQVEKXXXXXXXXXVKAIKVSRLDQPVXXPSASA

SEQ ID NO: 46561 - protein, 37 aa, Artificial Sequence
  GFR-binding peptide
  MOD_RES (2), (4): Xaa is C or S
  MOD_RES (16), (17), (18), (19), (20): Xaa is A or G
  MOD_RES (21), (22), (23), (24): Xaa is A or G or is absent
HXGXARVVMNVTAKKXXXXXXXXXIKRVQVPRLQTPA

SEQ ID NO: 46562 - protein, 40 aa, Artificial Sequence; identical to SEQ ID NO: 9969
  GFR-binding peptide
  MOD_RES (2), (4), (38), (39): Xaa is C or S
  MOD_RES (16), (17), (18), (19), (20): Xaa is A or G
  MOD_RES (21), (22), (23), (24): Xaa is A or G or is absent

SEQ ID NO: 46563 - protein, 35 aa, Artificial Sequence; identical to SEQ ID NO: 17200
  GFR-binding peptide
  MOD_RES (1), (1): Xaa is C or S
  MOD_RES (14), (15), (16), (17), (18): Xaa is A or G
  MOD_RES (19), (20), (21), (22): Xaa is A or G or is absent

SEQ ID NO: 46564 - protein, 34 aa, Artificial Sequence
  GFR-binding peptide
  MOD_RES (1), (3): Xaa is C or S
XGXSRVVMNSMEGIIVNSSDDMIQVTINSLKTPA

SEQ ID NO: 46565 - protein, 39 aa, Artificial Sequence
  GFR-binding peptide
  MOD_RES (1), (35), (36): Xaa is C or S
  MOD_RES (13), (14), (15), (16), (17): Xaa is A or G
  MOD_RES (18), (19), (20), (21): Xaa is A or G or is absent
XARVVMNVTAKKXXXXXXXXXIKRVQVPRLQTPAXXPKP

SEQ ID NO: 46566 - protein, 31 aa, Artificial Sequence
  GFR-binding peptide
  MOD_RES (1), (1): Xaa is C or S
XSRVIMVQVEKVKPKRGVVKAIKVSRLAQPV

SEQ ID NO: 46567 - protein, 37 aa, Artificial Sequence
  GFR-binding peptide
  MOD_RES (2), (4), (36), (37): Xaa is C or S
RXGXGEVVMEVTAKKVVKDYEDIKRMQVPRLETPVXX

SEQ ID NO: 46568 - protein, 32 aa, Artificial Sequence
  GFR-binding peptide
  MOD_RES (11), (12), (13), (14), (15): Xaa is A or G
  MOD_RES (16), (17), (18), (19): Xaa is A or G or is absent
SKVIMVTAKKXXXXXXXXXIKRIQVPRLDQSV

SEQ ID NO: 46569 - protein, 35 aa, Artificial Sequence
  GFR-binding peptide
  MOD_RES (2), (34): Xaa is C or S
GXSRVVMNVTAKKIVNSSDDIKRVQVPRLKTPAXT

SEQ ID NO: 46570 - protein, 35 aa, Artificial Sequence
  GFR-binding peptide
  MOD_RES (2), (2): Xaa is C or S
  MOD_RES (14), (15), (16), (17), (18): Xaa is A or G
  MOD_RES (19), (20), (21), (22): Xaa is A or G or is absent
GXGEVVMDVTAKKXXXXXXXXXIKRMQVPRLETPV

SEQ ID NO: 46571 - protein, 36 aa, Artificial Sequence; identical to SEQ ID NO: 17205
  GFR-binding peptide
  MOD_RES (36), (36): Xaa is C or S
  MOD_RES (12), (13), (14), (15), (16): Xaa is A or G
  MOD_RES (17), (18), (19), (20): Xaa is A or G or is absent

SEQ ID NO: 46572 - protein, 36 aa, Artificial Sequence
  GFR-binding peptide
  MOD_RES (34), (35): Xaa is C or S
  MOD_RES (12), (13), (14), (15), (16): Xaa is A or G
  MOD_RES (17), (18), (19), (20): Xaa is A or G or is absent
GEVVMDVTAKKXXXXXXXXXIKRMQVPRLETPVXXA

SEQ ID NO: 46573 - protein, 35 aa, Artificial Sequence; identical to SEQ ID NO: 9976
  GFR-binding peptide
  MOD_RES (33), (34): Xaa is C or S
  MOD_RES (11), (12), (13), (14), (15): Xaa is A or G
  MOD_RES (16), (17), (18), (19): Xaa is A or G or is absent

SEQ ID NO: 46574 - protein, 34 aa, Artificial Sequence; identical to SEQ ID NO: 9977
  GFR-binding peptide
  MOD_RES (1), (33), (34): Xaa is C or S

SEQ ID NO: 46575 - protein, 34 aa, Artificial Sequence; identical to SEQ ID NO: 9978
  GFR-binding peptide
  MOD_RES (1), (34): Xaa is C or S
  MOD_RES (12), (13), (14), (15), (16): Xaa is A or G
  MOD_RES (17), (18), (19), (20): Xaa is A or G or is absent

SEQ ID NO: 46576 - protein, 39 aa, Artificial Sequence
  GFR-binding peptide
  MOD_RES (1), (34), (35): Xaa is C or S
  MOD_RES (12), (13), (14), (15), (16): Xaa is A or G
  MOD_RES (17), (18), (19), (20): Xaa is A or G or is absent
XSRVIMVQVEKXXXXXXXXXVKAIKVSRLAQPVXXPAAS

SEQ ID NO: 46577 - protein, 34 aa, Artificial Sequence
  GFR-binding peptide
  MOD_RES (31), (32): Xaa is C or S
SKVVMVQVEKVKPTRGVVKAIKVSRLDQPVXXPS

SEQ ID NO: 46578 - protein, 39 aa, Artificial Sequence; identical to SEQ ID NO: 9980
  GFR-binding peptide
  MOD_RES (2), (4), (35), (36): Xaa is C or S

SEQ ID NO: 46579 - protein, 40 aa, Artificial Sequence
  GFR-binding peptide
  MOD_RES (2), (36): Xaa is C or S
  MOD_RES (14), (15), (16), (17), (18): Xaa is A or G
  MOD_RES (19), (20), (21), (22): Xaa is A or G or is absent
EXKNHQLFNSLQEXXXXXXXXXYYLMTLPEEETPVXELGE

SEQ ID NO: 46580 - protein, 38 aa, Artificial Sequence
  GFR-binding peptide
  MOD_RES (1), (3), (37): Xaa is C or S
  MOD_RES (15), (16), (17), (18), (19): Xaa is A or G
  MOD_RES (20), (21), (22), (23): Xaa is A or G or is absent
XEXKNHQLFNSLQEXXXXXXXXXYYLMTLPEEETPVXE

SEQ ID NO: 46581 - protein, 31 aa, Artificial Sequence; identical to SEQ ID NO: 9982
  GFR-binding peptide
  MOD_RES (1), (1): Xaa is C or S

SEQ ID NO: 46582 - protein, 34 aa, Artificial Sequence; identical to SEQ ID NO: 9986
  GFR-binding peptide
  MOD_RES (32), (32): Xaa is C or S

SEQ ID NO: 46583 - protein, 36 aa, Artificial Sequence
  GFR-binding peptide
  MOD_RES (33), (34): Xaa is C or S
  MOD_RES (11), (12), (13), (14), (15): Xaa is A or G
  MOD_RES (16), (17), (18), (19): Xaa is A or G or is absent
RVVMNSMEGIXXXXXXXXXMIQVTINSLKTPAXXPK

SEQ ID NO: 46584 - protein, 33 aa, Artificial Sequence
  GFR-binding peptide
  MOD_RES (12), (13), (14), (15), (16): Xaa is A or G
  MOD_RES (17), (18), (19), (20): Xaa is A or G or is absent
GEVVMEVQVEKXXXXXXXXXVKAMKVSRLETPV

SEQ ID NO: 46585 - protein, 32 aa, Artificial Sequence
  GFR-binding peptide
  MOD_RES (11), (12), (13), (14), (15): Xaa is A or G
  MOD_RES (16), (17), (18), (19): Xaa is A or G or is absent
SKVIMVQVEKXXXXXXXXXVKAIKVSRLDQSV

SEQ ID NO: 46586 - protein, 37 aa, Artificial Sequence; identical to SEQ ID NO: 9989
  GFR-binding peptide
  MOD_RES (1), (34), (35): Xaa is C or S
  MOD_RES (12), (13), (14), (15), (16): Xaa is A or G
  MOD_RES (17), (18), (19), (20): Xaa is A or G or is absent

SEQ ID NO: 46587 - protein, 37 aa, Artificial Sequence
  GFR-binding peptide
  MOD_RES (2), (2): Xaa is C or S
  MOD_RES (15), (16), (17), (18), (19): Xaa is A or G
  MOD_RES (20), (21), (22), (23): Xaa is A or G or is absent
AXELHEELRNSLQEXXXXXXXXXYYLVTLPEHHVRSP

SEQ ID NO: 46588 - protein, 38 aa, Artificial Sequence
  GFR-binding peptide
  MOD_RES (33), (33): Xaa is C or S
NHQLFNSLQEHQGQHPKIRYYVMPLPEEETPVXELGED

SEQ ID NO: 46589 - protein, 34 aa, Artificial Sequence
  GFR-binding peptide
  MOD_RES (1), (34): Xaa is C or S
  MOD_RES (12), (13), (14), (15), (16): Xaa is A or G
  MOD_RES (17), (18), (19), (20): Xaa is A or G or is absent
XSKVVMSMEGIXXXXXXXXXMIQITINSLDQPVX

SEQ ID NO: 46590 - protein, 39 aa, Artificial Sequence
  GFR-binding peptide
  MOD_RES (2), (4), (38): Xaa is C or S
RXEXKNHQLFNSLQEHQGQHPKIRYYLMTLPEEETPVXE

SEQ ID NO: 46591 - protein, 38 aa, Artificial Sequence
  GFR-binding peptide
  MOD_RES (1), (33), (34): Xaa is C or S
XGEVVMEVTAKKVVKDYEDIKRMQVPRLETPVXXAKPI

SEQ ID NO: 46592 - protein, 40 aa, Artificial Sequence
  GFR-binding peptide
  MOD_RES (1), (3), (35), (36): Xaa is C or S
XGXARVVMNVTAKKIVNSSDDIKRVQVPRLQTPAXXPKPV

SEQ ID NO: 46593 - protein, 37 aa, Artificial Sequence; identical to SEQ ID NO: 17217
  GFR-binding peptide
  MOD_RES (34), (34): Xaa is C or S

SEQ ID NO: 46594 - protein, 43 aa, Artificial Sequence; identical to SEQ ID NO: 17219
  GFR-binding peptide
  MOD_RES (2), (4), (38): Xaa is C or S
  MOD_RES (16), (17), (18), (19), (20): Xaa is A or G
  MOD_RES (21), (22), (23), (24): Xaa is A or G or is absent

SEQ ID NO: 46595 - protein, 39 aa, Artificial Sequence; identical to SEQ ID NO: 9995
  GFR-binding peptide
  MOD_RES (34), (35): Xaa is C or S
  MOD_RES (12), (13), (14), (15), (16): Xaa is A or G
  MOD_RES (17), (18), (19), (20): Xaa is A or G or is absent

SEQ ID NO: 46596 - protein, 34 aa, Artificial Sequence
  GFR-binding peptide
  MOD_RES (13), (14), (15), (16), (17): Xaa is A or G
  MOD_RES (18), (19), (20), (21): Xaa is A or G or is absent
ELHEELRNSLQEXXXXXXXXXYYVVPLPEHHVRS

SEQ ID NO: 46597 - protein, 37 aa, Artificial Sequence
  GFR-binding peptide
  MOD_RES (34), (35): Xaa is C or S
  MOD_RES (12), (13), (14), (15), (16): Xaa is A or G
  MOD_RES (17), (18), (19), (20): Xaa is A or G or is absent
ARVVMNVTAKKXXXXXXXXXIKRVQVPRLQTPAXXPK

SEQ ID NO: 46598 - protein, 33 aa, Artificial Sequence
  GFR-binding peptide
  MOD_RES (31), (32): Xaa is C or S
RVVMNSMEGIIVNSSDDMIQVTINSLQTPAXXP

SEQ ID NO: 46599 - protein, 32 aa, Artificial Sequence
  GFR-binding peptide
  MOD_RES (11), (12), (13), (14), (15): Xaa is A or G
  MOD_RES (16), (17), (18), (19): Xaa is A or G or is absent
EVVMDVQVEKXXXXXXXXXVKAMKVSRLETPV

SEQ ID NO: 46600 - protein, 38 aa, Artificial Sequence; identical to SEQ ID NO: 17222
  GFR-binding peptide
  MOD_RES (37), (37): Xaa is C or S

SEQ ID NO: 46601 - protein, 38 aa, Artificial Sequence
  GFR-binding peptide
  MOD_RES (2), (35), (36): Xaa is C or S
  MOD_RES (13), (14), (15), (16), (17): Xaa is A or G
  MOD_RES (18), (19), (20), (21): Xaa is A or G or is absent
KXSRVIMSMEGIXXXXXXXXXMIQITINSLAQPVXXPA

SEQ ID NO: 46602 - protein, 39 aa, Artificial Sequence; identical to SEQ ID NO: 10002
  GFR-binding peptide
  MOD_RES (2), (4), (38), (39): Xaa is C or S
  MOD_RES (16), (17), (18), (19), (20): Xaa is A or G
  MOD_RES (21), (22), (23), (24): Xaa is A or G or is absent

SEQ ID NO: 46603 - protein, 35 aa, Artificial Sequence
  GFR-binding peptide
  MOD_RES (32), (33): Xaa is C or S
GEVVMDSMEGIVVKENEDMIQMTINSLETPVXXAK

SEQ ID NO: 46604 - protein, 38 aa, Artificial Sequence; identical to SEQ ID NO: 10004
  GFR-binding peptide
  MOD_RES (1), (32), (33): Xaa is C or S

SEQ ID NO: 46605 - protein, 34 aa, Artificial Sequence; identical to SEQ ID NO: 10005
  GFR-binding peptide
  MOD_RES (1), (33), (34): Xaa is C or S

SEQ ID NO: 46606 - protein, 37 aa, Artificial Sequence; identical to SEQ ID NO: 17228
  GFR-binding peptide
  MOD_RES (35), (35): Xaa is C or S
  MOD_RES (11), (12), (13), (14), (15): Xaa is A or G
  MOD_RES (16), (17), (18), (19): Xaa is A or G or is absent

SEQ ID NO: 46607 - protein, 39 aa, Artificial Sequence
  GFR-binding peptide
  MOD_RES (2), (36), (37): Xaa is C or S
  MOD_RES (14), (15), (16), (17), (18): Xaa is A or G
  MOD_RES (19), (20), (21), (22): Xaa is A or G or is absent
GXARVVMNSMEGIXXXXXXXXXMIQVTINSLQTPAXXPK

SEQ ID NO: 46608 - protein, 30 aa, Artificial Sequence; identical to SEQ ID NO: 10007
  GFR-binding peptide

SEQ ID NO: 46609 - protein, 35 aa, Artificial Sequence
  GFR-binding peptide
  MOD_RES (2), (33), (34): Xaa is C or S
KXSKVVMVQVEKVKPTRGVVKAIKVSRLDQPVXXP

SEQ ID NO: 46610 - protein, 37 aa, Artificial Sequence; identical to SEQ ID NO: 17230
  GFR-binding peptide
  MOD_RES (35), (35): Xaa is C or S
  MOD_RES (11), (12), (13), (14), (15): Xaa is A or G
  MOD_RES (16), (17), (18), (19): Xaa is A or G or is absent

SEQ ID NO: 46611 - protein, 34 aa, Artificial Sequence
  GFR-binding peptide
  MOD_RES (34), (34): Xaa is C or S
  MOD_RES (12), (13), (14), (15), (16): Xaa is A or G
  MOD_RES (17), (18), (19), (20): Xaa is A or G or is absent
GEVVMESMEGIXXXXXXXXXMIQMTINSLETPVX

SEQ ID NO: 46612 - protein, 36 aa, Artificial Sequence
  GFR-binding peptide
  MOD_RES (33), (33): Xaa is C or S
NHQLFNSLQEHQGQHPKIRYYLMTLPEEETPVXELG

SEQ ID NO: 46613 - protein, 33 aa, Artificial Sequence; identical to SEQ ID NO: 17232
  GFR-binding peptide
  MOD_RES (33), (33): Xaa is C or S
  MOD_RES (11), (12), (13), (14), (15): Xaa is A or G
  MOD_RES (16), (17), (18), (19): Xaa is A or G or is absent

SEQ ID NO: 46614 - protein, 35 aa, Artificial Sequence
  GFR-binding peptide
  MOD_RES (2), (33), (34): Xaa is C or S
KXSKVIMVQVEKIKPTKGIVKAIKVSRLDQSVXXP

SEQ ID NO: 46615 - protein, 41 aa, Artificial Sequence; identical to SEQ ID NO: 17233
  GFR-binding peptide
  MOD_RES (2), (39): Xaa is C or S

SEQ ID NO: 46616 - protein, 30 aa, Artificial Sequence
  GFR-binding peptide
SKVIMVQVEKIKPTKGIVKAIKVSRLDQSV

SEQ ID NO: 46617 - protein, 36 aa, Artificial Sequence; identical to SEQ ID NO: 17236
  GFR-binding peptide
  MOD_RES (13), (14), (15), (16), (17): Xaa is A or G
  MOD_RES (18), (19), (20), (21): Xaa is A or G or is absent

SEQ ID NO: 46618 - protein, 42 aa, Artificial Sequence; identical to SEQ ID NO: 17239
  GFR-binding peptide
  MOD_RES (1), (3), (40): Xaa is C or S

SEQ ID NO: 46619 - protein, 40 aa, Artificial Sequence
  GFR-binding peptide
  MOD_RES (1), (3), (37), (38): Xaa is C or S
  MOD_RES (15), (16), (17), (18), (19): Xaa is A or G
  MOD_RES (20), (21), (22), (23): Xaa is A or G or is absent
XGXGEVVMEVTAKKXXXXXXXXXIKRMQVPRLETPVXXAK

SEQ ID NO: 46620 - protein, 39 aa, Artificial Sequence; identical to SEQ ID NO: 10012
  GFR-binding peptide
  MOD_RES (2), (34), (35): Xaa is C or S

SEQ ID NO: 46621 - protein, 35 aa, Artificial Sequence
  GFR-binding peptide
  MOD_RES (2), (2): Xaa is C or S
  MOD_RES (14), (15), (16), (17), (18): Xaa is A or G
  MOD_RES (19), (20), (21), (22): Xaa is A or G or is absent
GXSRVVMNVTAKKXXXXXXXXXIKRVQVPRLKTPA

SEQ ID NO: 46622 - protein, 39 aa, Artificial Sequence; identical to SEQ ID NO: 17241
  GFR-binding peptide
  MOD_RES (34), (34): Xaa is C or S
  MOD_RES (12), (13), (14), (15), (16): Xaa is A or G
  MOD_RES (17), (18), (19), (20): Xaa is A or G or is absent

SEQ ID NO: 46623 - protein, 43 aa, Artificial Sequence
  GFR-binding peptide
  MOD_RES (1), (3), (37), (38): Xaa is C or S
  MOD_RES (15), (16), (17), (18), (19): Xaa is A or G
  MOD_RES (20), (21), (22), (23): Xaa is A or G or is absent
XGXGEVVMDVTAKKXXXXXXXXXIKRMQVPRLETPVXXAKPIK

SEQ ID NO: 46624 - protein, 35 aa, Artificial Sequence; identical to SEQ ID NO: 10014
  GFR-binding peptide
  MOD_RES (34), (35): Xaa is C or S
  MOD_RES (12), (13), (14), (15), (16): Xaa is A or G
  MOD_RES (17), (18), (19), (20): Xaa is A or G or is absent

SEQ ID NO: 46625 - protein, 35 aa, Artificial Sequence; identical to SEQ ID NO: 10015
  GFR-binding peptide
  MOD_RES (31), (32): Xaa is C or S

SEQ ID NO: 46626 - protein, 37 aa, Artificial Sequence
  GFR-binding peptide
  MOD_RES (31), (32): Xaa is C or S
RVVMNVQVEKIVNSSDDVKAVKVSRLKTPAXXPKPVY

SEQ ID NO: 46627 - protein, 35 aa, Artificial Sequence; identical to SEQ ID NO: 10016
  GFR-binding peptide
  MOD_RES (1), (33), (34): Xaa is C or S

SEQ ID NO: 46628 - protein, 36 aa, Artificial Sequence; identical to SEQ ID NO: 10017
  GFR-binding peptide
  MOD_RES (2), (34), (35): Xaa is C or S

SEQ ID NO: 46629 - protein, 34 aa, Artificial Sequence
  GFR-binding peptide
  MOD_RES (1), (3), (34): Xaa is C or S
XKXSKVVMSMEGIVKPTRGVMIQITINSLDQPVX

SEQ ID NO: 46630 - protein, 36 aa, Artificial Sequence; identical to SEQ ID NO: 10018
  GFR-binding peptide
  MOD_RES (2), (34), (35): Xaa is C or S

SEQ ID NO: 46631 - protein, 33 aa, Artificial Sequence
  GFR-binding peptide
  MOD_RES (1), (32), (33): Xaa is C or S
XSKVIMSMEGIIKPTKGIMIQITINSLDQSVXX

SEQ ID NO: 46632 - protein, 39 aa, Artificial Sequence
  GFR-binding peptide
  MOD_RES (35), (35): Xaa is C or S
  MOD_RES (11), (12), (13), (14), (15): Xaa is A or G
  MOD_RES (16), (17), (18), (19): Xaa is A or G or is absent
HDELTNSLQEXXXXXXXXXYYVVPLPELQVQTPRXQVNR

SEQ ID NO: 46633 - protein, 37 aa, Artificial Sequence
  GFR-binding peptide
  MOD_RES (1), (35): Xaa is C or S
  MOD_RES (13), (14), (15), (16), (17): Xaa is A or G
  MOD_RES (18), (19), (20), (21): Xaa is A or G or is absent
XSRVVMNVQVEKXXXXXXXXXVKAVKVSRLKTPAXTP

SEQ ID NO: 46634 - protein, 35 aa, Artificial Sequence
  GFR-binding peptide
  MOD_RES (1), (34), (35): Xaa is C or S
  MOD_RES (12), (13), (14), (15), (16): Xaa is A or G
  MOD_RES (17), (18), (19), (20): Xaa is A or G or is absent
XSKVIMVQVEKXXXXXXXXXVKAIKVSRLDQSVXX

SEQ ID NO: 46635 - protein, 40 aa, Artificial Sequence
  GFR-binding peptide
  MOD_RES (1), (38): Xaa is C or S
XALHDELTNSLQEFIPKKRVIEYYVVPLPELQVQTPRXQV

SEQ ID NO: 46636 - protein, 36 aa, Artificial Sequence
  GFR-binding peptide
  MOD_RES (33), (34): Xaa is C or S
  MOD_RES (11), (12), (13), (14), (15): Xaa is A or G
  MOD_RES (16), (17), (18), (19): Xaa is A or G or is absent
SRVIMSMEGIXXXXXXXXXMIQITINSLAQPVXXPA

SEQ ID NO: 46637 - protein, 39 aa, Artificial Sequence; identical to SEQ ID NO: 10024
  GFR-binding peptide
  MOD_RES (1), (3), (35), (36): Xaa is C or S

SEQ ID NO: 46638 - protein, 35 aa, Artificial Sequence; identical to SEQ ID NO: 35903
  GFR-binding peptide
  MOD_RES (1), (32), (33): Xaa is C or S

SEQ ID NO: 46639 - protein, 38 aa, Artificial Sequence
  GFR-binding peptide
  MOD_RES (2), (35), (36): Xaa is C or S
  MOD_RES (13), (14), (15), (16), (17): Xaa is A or G
  MOD_RES (18), (19), (20), (21): Xaa is A or G or is absent
KXSKVVMVTAKKXXXXXXXXXIKRIQVPRLDQPVXXPS

SEQ ID NO: 46640 - protein, 32 aa, Artificial Sequence; identical to SEQ ID NO: 10029
  GFR-binding peptide
  MOD_RES (1), (1): Xaa is C or S

SEQ ID NO: 46641 - protein, 37 aa, Artificial Sequence
  GFR-binding peptide
  MOD_RES (2), (33), (34): Xaa is C or S
KXSKVVMSMEGIVKPTRGVMIQITINSLDQPVXXPSA

SEQ ID NO: 46642 - protein, 38 aa, Artificial Sequence
  GFR-binding peptide
  MOD_RES (1), (3), (37), (38): Xaa is C or S
  MOD_RES (15), (16), (17), (18), (19): Xaa is A or G
  MOD_RES (20), (21), (22), (23): Xaa is A or G or is absent
XGXARVVMNSMEGIXXXXXXXXXMIQVTINSLQTPAXX

SEQ ID NO: 46643 - protein, 39 aa, Artificial Sequence
  GFR-binding peptide
  MOD_RES (1), (35), (36): Xaa is C or S
  MOD_RES (13), (14), (15), (16), (17): Xaa is A or G
  MOD_RES (18), (19), (20), (21): Xaa is A or G or is absent
XARVVMNVQVEKXXXXXXXXXVKAVKVSRLQTPAXXPKP

SEQ ID NO: 46644 - protein, 41 aa, Artificial Sequence
  GFR-binding peptide
  MOD_RES (2), (39): Xaa is C or S
KXALHDELTNSLQEFIPKKRVIEYYVVPLPELQVQTPRXQV

SEQ ID NO: 46645 - protein, 42 aa, Artificial Sequence; identical to SEQ ID NO: 10034
  GFR-binding peptide
  MOD_RES (2), (36), (37): Xaa is C or S
  MOD_RES (14), (15), (16), (17), (18): Xaa is A or G
  MOD_RES (19), (20), (21), (22): Xaa is A or G or is absent

SEQ ID NO: 46646 - protein, 40 aa, Artificial Sequence; identical to SEQ ID NO: 17256
  GFR-binding peptide
  MOD_RES (34), (34): Xaa is C or S
  MOD_RES (12), (13), (14), (15), (16): Xaa is A or G
  MOD_RES (17), (18), (19), (20): Xaa is A or G or is absent

SEQ ID NO: 46647 - protein, 36 aa, Artificial Sequence
  GFR-binding peptide
  MOD_RES (33), (34): Xaa is C or S
  MOD_RES (11), (12), (13), (14), (15): Xaa is A or G
  MOD_RES (16), (17), (18), (19): Xaa is A or G or is absent
EVVMDSMEGIXXXXXXXXXMIQMTINSLETPVXXAK

SEQ ID NO: 46648 - protein, 39 aa, Artificial Sequence
  GFR-binding peptide
  MOD_RES (33), (34): Xaa is C or S
  MOD_RES (11), (12), (13), (14), (15): Xaa is A or G
  MOD_RES (16), (17), (18), (19): Xaa is A or G or is absent
RVVMNVQVEKXXXXXXXXXVKAVKVSRLKTPAXXPKPVY

SEQ ID NO: 46649 - protein, 35 aa, Artificial Sequence
  GFR-binding peptide
  MOD_RES (1), (1): Xaa is C or S
XALHDELTNSLQEFIPKKRVIEYYVVPLPELQVQT

SEQ ID NO: 46650 - protein, 39 aa, Artificial Sequence; identical to SEQ ID NO: 17259
  GFR-binding peptide
  MOD_RES (37), (37): Xaa is C or S

SEQ ID NO: 46651 - protein, 39 aa, Artificial Sequence
  GFR-binding peptide
  MOD_RES (2), (34), (35): Xaa is C or S
GXGEVVMDSMEGIVVKENEDMIQMTINSLETPVXXAKPI

SEQ ID NO: 46652 - protein, 37 aa, Artificial Sequence
  GFR-binding peptide
  MOD_RES (2), (35), (36): Xaa is C or S
  MOD_RES (13), (14), (15), (16), (17): Xaa is A or G
  MOD_RES (18), (19), (20), (21): Xaa is A or G or is absent
KXSKVVMVQVEKXXXXXXXXXVKAIKVSRLDQPVXXP

SEQ ID NO: 46653 - protein, 40 aa, Artificial Sequence; identical to SEQ ID NO: 10035
  GFR-binding peptide
  MOD_RES (1), (3), (37): Xaa is C or S
  MOD_RES (15), (16), (17), (18), (19): Xaa is A or G
  MOD_RES (20), (21), (22), (23): Xaa is A or G or is absent

SEQ ID NO: 46654 - protein, 43 aa, Artificial Sequence; identical to SEQ ID NO: 10036
  GFR-binding peptide
  MOD_RES (2), (4), (37), (38): Xaa is C or S
  MOD_RES (15), (16), (17), (18), (19): Xaa is A or G
  MOD_RES (20), (21), (22), (23): Xaa is A or G or is absent

SEQ ID NO: 46655 - protein, 40 aa, Artificial Sequence
  GFR-binding peptide
  MOD_RES (2), (4): Xaa is C or S
EXKXALHDELTNSLQEFIPKKRVIEYYVVPLPELQVQTPR

SEQ ID NO: 46656 - protein, 36 aa, Artificial Sequence; identical to SEQ ID NO: 10042
  GFR-binding peptide
  MOD_RES (2), (4): Xaa is C or S
  MOD_RES (15), (16), (17), (18), (19): Xaa is A or G
  MOD_RES (20), (21), (22), (23): Xaa is A or G or is absent

SEQ ID NO: 46657 - protein, 39 aa, Artificial Sequence; identical to SEQ ID NO: 35934
  GFR-binding peptide
  MOD_RES (2), (33), (34): Xaa is C or S

SEQ ID NO: 46658 - protein, 31 aa, Artificial Sequence; identical to SEQ ID NO: 10044
  GFR-binding peptide
  MOD_RES (31), (31): Xaa is C or S

SEQ ID NO: 46659 - protein, 33 aa, Artificial Sequence
  GFR-binding peptide
  MOD_RES (32), (33): Xaa is C or S
GEVVMDSMEGIVVKENEDMIQMTINSLETPVXX

SEQ ID NO: 46660 - protein, 39 aa, Artificial Sequence
  GFR-binding peptide
  MOD_RES (2), (35), (36): Xaa is C or S
  MOD_RES (13), (14), (15), (16), (17): Xaa is A or G
  MOD_RES (18), (19), (20), (21): Xaa is A or G or is absent
KXSRVIMVTAKKXXXXXXXXXIKRIQVPRLAQPVXXPAA

SEQ ID NO: 46661 - protein, 34 aa, Artificial Sequence
  GFR-binding peptide
  MOD_RES (1), (32), (33): Xaa is C or S
XSKVVMVQVEKVKPTRGVVKAIKVSRLDQPVXXP

SEQ ID NO: 46662 - protein, 36 aa, Artificial Sequence
  GFR-binding peptide
  MOD_RES (1), (35), (36): Xaa is C or S
  MOD_RES (13), (14), (15), (16), (17): Xaa is A or G
  MOD_RES (18), (19), (20), (21): Xaa is A or G or is absent
XARVVMNSMEGIXXXXXXXXXMIQVTINSLQTPAXX

SEQ ID NO: 46663 - protein, 41 aa, Artificial Sequence; identical to SEQ ID NO: 10049
  GFR-binding peptide
  MOD_RES (2), (4), (36): Xaa is C or S

SEQ ID NO: 46664 - protein, 39 aa, Artificial Sequence
  GFR-binding peptide
  MOD_RES (36), (36): Xaa is C or S
  MOD_RES (12), (13), (14), (15), (16): Xaa is A or G
  MOD_RES (17), (18), (19), (20): Xaa is A or G or is absent
LHDELTNSLQEXXXXXXXXXYYLVTLPELQVQTPRXQVN

SEQ ID NO: 46665 - protein, 34 aa, Artificial Sequence; identical to SEQ ID NO: 17267
  GFR-binding peptide
  MOD_RES (13), (14), (15), (16), (17): Xaa is A or G
  MOD_RES (18), (19), (20), (21): Xaa is A or G or is absent

SEQ ID NO: 46666 - protein, 39 aa, Artificial Sequence; identical to SEQ ID NO: 17268
  GFR-binding peptide
  MOD_RES (1), (3), (37): Xaa is C or S
  MOD_RES (15), (16), (17), (18), (19): Xaa is A or G
  MOD_RES (20), (21), (22), (23): Xaa is A or G or is absent

SEQ ID NO: 46667 - protein, 39 aa, Artificial Sequence
  GFR-binding peptide
  MOD_RES (34), (35): Xaa is C or S
  MOD_RES (12), (13), (14), (15), (16): Xaa is A or G
  MOD_RES (17), (18), (19), (20): Xaa is A or G or is absent
GEVVMDVQVEKXXXXXXXXXVKAMKVSRLETPVXXAKPI

SEQ ID NO: 46668 - protein, 31 aa, Artificial Sequence
  GFR-binding peptide
  MOD_RES (31), (31): Xaa is C or S
RVVMNSMEGIIVNSSDDMIQVTINSLKTPAX

SEQ ID NO: 46669 - protein, 35 aa, Artificial Sequence; identical to SEQ ID NO: 17272
  GFR-binding peptide
  MOD_RES (35), (35): Xaa is C or S
  MOD_RES (11), (12), (13), (14), (15): Xaa is A or G
  MOD_RES (16), (17), (18), (19): Xaa is A or G or is absent

SEQ ID NO: 46670 - protein, 37 aa, Artificial Sequence; identical to SEQ ID NO: 10053
  GFR-binding peptide
  MOD_RES (1), (3), (37): Xaa is C or S
  MOD_RES (15), (16), (17), (18), (19): Xaa is A or G
  MOD_RES (20), (21), (22), (23): Xaa is A or G or is absent

SEQ ID NO: 46671 - protein, 35 aa, Artificial Sequence
  GFR-binding peptide
  MOD_RES (1), (35): Xaa is C or S
  MOD_RES (13), (14), (15), (16), (17): Xaa is A or G
  MOD_RES (18), (19), (20), (21): Xaa is A or G or is absent
XARVVMNSMEGIXXXXXXXXXMIQVTINSLQTPAX

SEQ ID NO: 46672 - protein, 37 aa, Artificial Sequence
  GFR-binding peptide
  MOD_RES (1), (1): Xaa is C or S
  MOD_RES (14), (15), (16), (17), (18): Xaa is A or G
  MOD_RES (19), (20), (21), (22): Xaa is A or G or is absent
XELHEELRNSLQEXXXXXXXXXYYLVTLPEHHVRSPQ

SEQ ID NO: 46673 - protein, 39 aa, Artificial Sequence
  GFR-binding peptide
  MOD_RES (1), (3), (37), (38): Xaa is C or S
  MOD_RES (15), (16), (17), (18), (19): Xaa is A or G
  MOD_RES (20), (21), (22), (23): Xaa is A or G or is absent
XGXARVVMNVTAKKXXXXXXXXXIKRVQVPRLQTPAXXP

SEQ ID NO: 46674 - protein, 40 aa, Artificial Sequence
  GFR-binding peptide
  MOD_RES (2), (36), (37): Xaa is C or S
  MOD_RES (14), (15), (16), (17), (18): Xaa is A or G
  MOD_RES (19), (20), (21), (22): Xaa is A or G or is absent
GXGEVVMDVTAKKXXXXXXXXXIKRMQVPRLETPVXXAKP

SEQ ID NO: 46675 - protein, 39 aa, Artificial Sequence
  GFR-binding peptide
  MOD_RES (2), (4), (38), (39): Xaa is C or S
  MOD_RES (16), (17), (18), (19), (20): Xaa is A or G
  MOD_RES (21), (22), (23), (24): Xaa is A or G or is absent
HXGXARVVMNVQVEKXXXXXXXXXVKAVKVSRLQTPAXX

SEQ ID NO: 46676 - protein, 36 aa, Artificial Sequence; identical to SEQ ID NO: 17280
  GFR-binding peptide
  MOD_RES (35), (35): Xaa is C or S
  MOD_RES (11), (12), (13), (14), (15): Xaa is A or G
  MOD_RES (16), (17), (18), (19): Xaa is A or G or is absent

SEQ ID NO: 46677 - protein, 33 aa, Artificial Sequence
  GFR-binding peptide
  MOD_RES (33), (33): Xaa is C or S
  MOD_RES (11), (12), (13), (14), (15): Xaa is A or G
  MOD_RES (16), (17), (18), (19): Xaa is A or G or is absent
SKVVMVQVEKXXXXXXXXXVKAIKVSRLDQPVX

SEQ ID NO: 46678 - protein, 40 aa, Artificial Sequence
  GFR-binding peptide
  MOD_RES (34), (35): Xaa is C or S
  MOD_RES (12), (13), (14), (15), (16): Xaa is A or G
  MOD_RES (17), (18), (19), (20): Xaa is A or G or is absent
ARVVMNVQVEKXXXXXXXXXVKAVKVSRLQTPAXXPKPVT

SEQ ID NO: 46679 - protein, 39 aa, Artificial Sequence; identical to SEQ ID NO: 17283
  GFR-binding peptide
  MOD_RES (1), (38): Xaa is C or S
  MOD_RES (14), (15), (16), (17), (18): Xaa is A or G
  MOD_RES (19), (20), (21), (22): Xaa is A or G or is absent

SEQ ID NO: 46680 - protein, 33 aa, Artificial Sequence
  GFR-binding peptide
  MOD_RES (33), (33): Xaa is C or S
  MOD_RES (11), (12), (13), (14), (15): Xaa is A or G
  MOD_RES (16), (17), (18), (19): Xaa is A or G or is absent
SRVIMVTAKKXXXXXXXXXIKRIQVPRLAQPVX

SEQ ID NO: 46681 - protein, 39 aa, Artificial Sequence
  GFR-binding peptide
  MOD_RES (2), (36), (37): Xaa is C or S
  MOD_RES (14), (15), (16), (17), (18): Xaa is A or G
  MOD_RES (19), (20), (21), (22): Xaa is A or G or is absent
GXSRVVMNVQVEKXXXXXXXXXVKAVKVSRLKTPAXXPK

SEQ ID NO: 46682 - protein, 37 aa, Artificial Sequence; identical to SEQ ID NO: 10058
  GFR-binding peptide
  MOD_RES (34), (35): Xaa is C or S
  MOD_RES (12), (13), (14), (15), (16): Xaa is A or G
  MOD_RES (17), (18), (19), (20): Xaa is A or G or is absent

SEQ ID NO: 46683 - protein, 36 aa, Artificial Sequence; identical to SEQ ID NO: 10059
  GFR-binding peptide
  MOD_RES (1), (3): Xaa is C or S
  MOD_RES (15), (16), (17), (18), (19): Xaa is A or G
  MOD_RES (20), (21), (22), (23): Xaa is A or G or is absent

SEQ ID NO: 46684 - protein, 39 aa, Artificial Sequence; identical to SEQ ID NO: 17289
  GFR-binding peptide
  MOD_RES (1), (38): Xaa is C or S

SEQ ID NO: 46685 - protein, 40 aa, Artificial Sequence; identical to SEQ ID NO: 10063
  GFR-binding peptide
  MOD_RES (1), (3), (35): Xaa is C or S

SEQ ID NO: 46686 - protein, 35 aa, Artificial Sequence; identical to SEQ ID NO: 10064
  GFR-binding peptide
  MOD_RES (2), (33), (34): Xaa is C or S

SEQ ID NO: 46687 - protein, 39 aa, Artificial Sequence; identical to SEQ ID NO: 17292
  GFR-binding peptide
  MOD_RES (36), (36): Xaa is C or S

SEQ ID NO: 46688 - protein, 38 aa, Artificial Sequence; identical to SEQ ID NO: 17293
  GFR-binding peptide
  MOD_RES (1), (3): Xaa is C or S
  MOD_RES (16), (17), (18), (19), (20): Xaa is A or G
  MOD_RES (21), (22), (23), (24): Xaa is A or G or is absent

SEQ ID NO: 46689 - protein, 42 aa, Artificial Sequence; identical to SEQ ID NO: 10066
  GFR-binding peptide
  MOD_RES (2), (4), (36), (37): Xaa is C or S

SEQ ID NO: 46690 - protein, 37 aa, Artificial Sequence; identical to SEQ ID NO: 10067
  GFR-binding peptide
  MOD_RES (2), (36), (37): Xaa is C or S
  MOD_RES (14), (15), (16), (17), (18): Xaa is A or G
  MOD_RES (19), (20), (21), (22): Xaa is A or G or is absent

SEQ ID NO: 46691 - protein, 36 aa, Artificial Sequence; identical to SEQ ID NO: 10069
  GFR-binding peptide
  MOD_RES (2), (4), (35), (36): Xaa is C or S

SEQ ID NO: 46692 - protein, 35 aa, Artificial Sequence
  GFR-binding peptide
  MOD_RES (35), (35): Xaa is C or S
HDELTNSLQEFIPKKRVIEYYLVTLPELQVQTPRX

SEQ ID NO: 46693 - protein, 39 aa, Artificial Sequence; identical to SEQ ID NO: 35981
  GFR-binding peptide
  MOD_RES (1), (34), (35): Xaa is C or S
  MOD_RES (12), (13), (14), (15), (16): Xaa is A or G
  MOD_RES (17), (18), (19), (20): Xaa is A or G or is absent

SEQ ID NO: 46694 - protein, 42 aa, Artificial Sequence
  GFR-binding peptide
  MOD_RES (2), (36), (37): Xaa is C or S
  MOD_RES (14), (15), (16), (17), (18): Xaa is A or G
  MOD_RES (19), (20), (21), (22): Xaa is A or G or is absent
GXSRVVMNVQVEKXXXXXXXXXVKAVKVSRLKTPAXXPKPVY

SEQ ID NO: 46695 - protein, 41 aa, Artificial Sequence; identical to SEQ ID NO: 17297
  GFR-binding peptide
  MOD_RES (1), (3), (37): Xaa is C or S
  MOD_RES (15), (16), (17), (18), (19): Xaa is A or G
  MOD_RES (20), (21), (22), (23): Xaa is A or G or is absent

SEQ ID NO: 46696 - protein, 42 aa, Artificial Sequence; identical to SEQ ID NO: 17298
  GFR-binding peptide
  MOD_RES (2), (39): Xaa is C or S

SEQ ID NO: 46697 - protein, 40 aa, Artificial Sequence
  GFR-binding peptide
  MOD_RES (2), (4), (37), (38): Xaa is C or S
  MOD_RES (15), (16), (17), (18), (19): Xaa is A or G
  MOD_RES (20), (21), (22), (23): Xaa is A or G or is absent
SXKXSKVVMVQVEKXXXXXXXXXVKAIKVSRLDQPVXXPS

SEQ ID NO: 46698 - protein, 43 aa, Artificial Sequence; identical to SEQ ID NO: 17299
  GFR-binding peptide
  MOD_RES (1), (3), (37): Xaa is C or S

SEQ ID NO: 46699 - protein, 33 aa, Artificial Sequence; identical to SEQ ID NO: 10072
  GFR-binding peptide
  MOD_RES (1), (3): Xaa is C or S

SEQ ID NO: 46700 - protein, 38 aa, Artificial Sequence; identical to SEQ ID NO: 10073
  GFR-binding peptide
  MOD_RES (34), (35): Xaa is C or S
  MOD_RES (12), (13), (14), (15), (16): Xaa is A or G
  MOD_RES (17), (18), (19), (20): Xaa is A or G or is absent

SEQ ID NO: 46701 - protein, 40 aa, Artificial Sequence
  GFR-binding peptide
  MOD_RES (37), (37): Xaa is C or S
ALHDELTNSLQEFIPKKRVIEYYVVPLPELQVQTPRXQVN

SEQ ID NO: 46702 - protein, 39 aa, Artificial Sequence; identical to SEQ ID NO: 10074
  GFR-binding peptide
  MOD_RES (2), (4), (38), (39): Xaa is C or S
  MOD_RES (16), (17), (18), (19), (20): Xaa is A or G
  MOD_RES (21), (22), (23), (24): Xaa is A or G or is absent

SEQ ID NO: 46703 - protein, 34 aa, Artificial Sequence; identical to SEQ ID NO: 17302
  GFR-binding peptide

SEQ ID NO: 46704 - protein, 33 aa, Artificial Sequence
  GFR-binding peptide
  MOD_RES (1), (32), (33): Xaa is C or S
XSRVIMVQVEKVKPKRGVVKAIKVSRLAQPVXX

SEQ ID NO: 46705 - protein, 38 aa, Artificial Sequence
  GFR-binding peptide
  MOD_RES (2), (4), (35), (36): Xaa is C or S
SXKXSKVVMSMEGIVKPTRGVMIQITINSLDQPVXXPS

SEQ ID NO: 46706 - protein, 34 aa, Artificial Sequence
  GFR-binding peptide
  MOD_RES (1), (1): Xaa is C or S
  MOD_RES (13), (14), (15), (16), (17): Xaa is A or G
  MOD_RES (18), (19), (20), (21): Xaa is A or G or is absent
XARVVMNSMEGIXXXXXXXXXMIQVTINSLQTPA

SEQ ID NO: 46707 - protein, 34 aa, Artificial Sequence; identical to SEQ ID NO: 17305
  GFR-binding peptide
  MOD_RES (34), (34): Xaa is C or S

SEQ ID NO: 46708 - protein, 39 aa, Artificial Sequence
  GFR-binding peptide
  MOD_RES (1), (3), (37): Xaa is C or S
  MOD_RES (15), (16), (17), (18), (19): Xaa is A or G
  MOD_RES (20), (21), (22), (23): Xaa is A or G or is absent
XGXSRVVMNSMEGIXXXXXXXXXMIQVTINSLKTPAXTP

SEQ ID NO: 46709 - protein, 38 aa, Artificial Sequence
  GFR-binding peptide
  MOD_RES (33), (34): Xaa is C or S
  MOD_RES (11), (12), (13), (14), (15): Xaa is A or G
  MOD_RES (16), (17), (18), (19): Xaa is A or G or is absent
EVVMESMEGIXXXXXXXXXMIQMTINSLETPVXXAKPI

SEQ ID NO: 46710 - protein, 39 aa, Artificial Sequence
  GFR-binding peptide
  MOD_RES (1), (3), (37): Xaa is C or S
XEXKNHQLFNSLQEHQGQHPKIRYYLMTLPEEETPVXEL

SEQ ID NO: 46711 - protein, 38 aa, Artificial Sequence; identical to SEQ ID NO: 17309
  GFR-binding peptide
  MOD_RES (34), (34): Xaa is C or S
  MOD_RES (12), (13), (14), (15), (16): Xaa is A or G
  MOD_RES (17), (18), (19), (20): Xaa is A or G or is absent

SEQ ID NO: 46712 - protein, 32 aa, Artificial Sequence
  GFR-binding peptide
  MOD_RES (2), (2): Xaa is C or S
KXSRVIMSMEGIVKPKRGVMIQITINSLAQPV

SEQ ID NO: 46713 - protein, 40 aa, Artificial Sequence
  GFR-binding peptide
  MOD_RES (1), (3), (40): Xaa is C or S
XAXELHEELRNSLQELKPKKRVYEYYLVTLPEHHVRSPQX

SEQ ID NO: 46714 - protein, 37 aa, Artificial Sequence; identical to SEQ ID NO: 10087
  GFR-binding peptide
  MOD_RES (31), (32): Xaa is C or S

SEQ ID NO: 46715 - protein, 35 aa, Artificial Sequence; identical to SEQ ID NO: 17315
  GFR-binding peptide
  MOD_RES (1), (35): Xaa is C or S

SEQ ID NO: 46716 - protein, 38 aa, Artificial Sequence
  GFR-binding peptide
  MOD_RES (1), (33): Xaa is C or S
XSRVVMNSMEGIIVNSSDDMIQVTINSLKTPAXTPKTV

SEQ ID NO: 46717 - protein, 43 aa, Artificial Sequence
  GFR-binding peptide
  MOD_RES (2), (4), (38), (39): Xaa is C or S
  MOD_RES (16), (17), (18), (19), (20): Xaa is A or G
  MOD_RES (21), (22), (23), (24): Xaa is A or G or is absent
HXGXARVVMNSMEGIXXXXXXXXXMIQVTINSLQTPAXXPKPV

SEQ ID NO: 46718 - protein, 37 aa, Artificial Sequence
  GFR-binding peptide
  MOD_RES (34), (34): Xaa is C or S
KNHQLFNSLQEHQGQHPKIRYYVMPLPEEETPVXELG

SEQ ID NO: 46719 - protein, 37 aa, Artificial Sequence; identical to SEQ ID NO: 10090
  GFR-binding peptide
  MOD_RES (2), (4), (36), (37): Xaa is C or S

SEQ ID NO: 46720 - protein, 40 aa, Artificial Sequence
  GFR-binding peptide
  MOD_RES (1), (3), (35), (36): Xaa is C or S
XGXGEVVMDSMEGIVVKENEDMIQMTINSLETPVXXAKPI

SEQ ID NO: 46721 - protein, 43 aa, Artificial Sequence
  GFR-binding peptide
  MOD_RES (1), (3), (37), (38): Xaa is C or S
  MOD_RES (15), (16), (17), (18), (19): Xaa is A or G
  MOD_RES (20), (21), (22), (23): Xaa is A or G or is absent
XGXARVVMNVTAKKXXXXXXXXXIKRVQVPRLQTPAXXPKPVT

SEQ ID NO: 46722 - protein, 32 aa, Artificial Sequence
  GFR-binding peptide
  MOD_RES (1), (1): Xaa is C or S
XARVVMNVQVEKIVNSSDDVKAVKVSRLQTPA

SEQ ID NO: 46723 - protein, 38 aa, Artificial Sequence
  GFR-binding peptide
  MOD_RES (32), (33): Xaa is C or S
GEVVMDVQVEKVVKENEDVKAMKVSRLETPVXXAKPIK

SEQ ID NO: 46724 - protein, 42 aa, Artificial Sequence; identical to SEQ ID NO: 17323
  GFR-binding peptide
  MOD_RES (1), (3), (37): Xaa is C or S

SEQ ID NO: 46725 - protein, 38 aa, Artificial Sequence; identical to SEQ ID NO: 10092
  GFR-binding peptide
  MOD_RES (1), (33), (34): Xaa is C or S

SEQ ID NO: 46726 - protein, 33 aa, Artificial Sequence; identical to SEQ ID NO: 10095
  GFR-binding peptide
  MOD_RES (31), (32): Xaa is C or S

SEQ ID NO: 46727 - protein, 41 aa, Artificial Sequence
  GFR-binding peptide
  MOD_RES (1), (35): Xaa is C or S
  MOD_RES (13), (14), (15), (16), (17): Xaa is A or G
  MOD_RES (18), (19), (20), (21): Xaa is A or G or is absent
XKNHQLFNSLQEXXXXXXXXXYYVMPLPEEETPVXELGEDN

SEQ ID NO: 46728 - protein, 34 aa, Artificial Sequence
  GFR-binding peptide
  MOD_RES (33), (34): Xaa is C or S
  MOD_RES (11), (12), (13), (14), (15): Xaa is A or G
  MOD_RES (16), (17), (18), (19): Xaa is A or G or is absent
RVVMNVTAKKXXXXXXXXXIKRVQVPRLQTPAXX

SEQ ID NO: 46729 - protein, 40 aa, Artificial Sequence
  GFR-binding peptide
  MOD_RES (2), (34): Xaa is C or S
GXSRVVMNVQVEKIVNSSDDVKAVKVSRLKTPAXTPKTVH

SEQ ID NO: 46730 - protein, 33 aa, Artificial Sequence; identical to SEQ ID NO: 17325
  GFR-binding peptide
  MOD_RES (12), (13), (14), (15), (16): Xaa is A or G
  MOD_RES (17), (18), (19), (20): Xaa is A or G or is absent

SEQ ID NO: 46731 - protein, 38 aa, Artificial Sequence; identical to SEQ ID NO: 10096
  GFR-binding peptide
  MOD_RES (1), (34), (35): Xaa is C or S
  MOD_RES (12), (13), (14), (15), (16): Xaa is A or G
  MOD_RES (17), (18), (19), (20): Xaa is A or G or is absent

SEQ ID NO: 46732 - protein, 36 aa, Artificial Sequence
  GFR-binding peptide
  MOD_RES (1), (3), (35), (36): Xaa is C or S
XGXGEVVMEVQVEKVVKDYEDVKAMKVSRLETPVXX

SEQ ID NO: 46733 - protein, 39 aa, Artificial Sequence; identical to SEQ ID NO: 17328
  GFR-binding peptide
  MOD_RES (33), (33): Xaa is C or S

SEQ ID NO: 46734 - protein, 38 aa, Artificial Sequence; identical to SEQ ID NO: 10097
  GFR-binding peptide
  MOD_RES (1), (3), (34), (35): Xaa is C or S

SEQ ID NO: 46735 - protein, 36 aa, Artificial Sequence; identical to SEQ ID NO: 10098
  GFR-binding peptide
  MOD_RES (33), (34): Xaa is C or S
  MOD_RES (11), (12), (13), (14), (15): Xaa is A or G
  MOD_RES (16), (17), (18), (19): Xaa is A or G or is absent

SEQ ID NO: 46736 - protein, 38 aa, Artificial Sequence
  GFR-binding peptide
  MOD_RES (32), (33): Xaa is C or S
SRVVMNVTAKKIVNSSDDIKRVQVPRLKTPAXXPKPVY

SEQ ID NO: 46737 - protein, 38 aa, Artificial Sequence
  GFR-binding peptide
  MOD_RES (2), (4), (36): Xaa is C or S
HXGXSRVVMNVQVEKIVNSSDDVKAVKVSRLKTPAXTP

SEQ ID NO: 46738 - protein, 34 aa, Artificial Sequence; identical to SEQ ID NO: 10101
  GFR-binding peptide
  MOD_RES (1), (3): Xaa is C or S

SEQ ID NO: 46739 - protein, 33 aa, Artificial Sequence
  GFR-binding peptide
  MOD_RES (12), (13), (14), (15), (16): Xaa is A or G
  MOD_RES (17), (18), (19), (20): Xaa is A or G or is absent
SRVVMNVQVEKXXXXXXXXXVKAVKVSRLKTPA

SEQ ID NO: 46740 - protein, 36 aa, Artificial Sequence
  GFR-binding peptide
  MOD_RES (2), (34), (35): Xaa is C or S
GXSRVVMNVQVEKIVNSSDDVKAVKVSRLKTPAXXP

SEQ ID NO: 46741 - protein, 35 aa, Artificial Sequence; identical to SEQ ID NO: 17330
  GFR-binding peptide
  MOD_RES (33), (33): Xaa is C or S

SEQ ID NO: 46742 - protein, 38 aa, Artificial Sequence
  GFR-binding peptide
  MOD_RES (35), (35): Xaa is C or S
  MOD_RES (11), (12), (13), (14), (15): Xaa is A or G
  MOD_RES (16), (17), (18), (19): Xaa is A or G or is absent
HEELRNSLQEXXXXXXXXXYYLVTLPEHHVRSPQXKVS

SEQ ID NO: 46743 - protein, 39 aa, Artificial Sequence; identical to SEQ ID NO: 10104
  GFR-binding peptide
  MOD_RES (2), (4), (37), (38): Xaa is C or S
  MOD_RES (15), (16), (17), (18), (19): Xaa is A or G
  MOD_RES (20), (21), (22), (23): Xaa is A or G or is absent

SEQ ID NO: 46744 - protein, 39 aa, Artificial Sequence
  GFR-binding peptide
  MOD_RES (2), (4), (35), (36): Xaa is C or S
SXKXSRVIMSMEGIVKPKRGVMIQITINSLAQPVXXPAA

SEQ ID NO: 46745 - protein, 36 aa, Artificial Sequence
  GFR-binding peptide
  MOD_RES (2), (34), (35): Xaa is C or S
GXGEVVMEVQVEKVVKDYEDVKAMKVSRLETPVXXA

SEQ ID NO: 46746 - protein, 40 aa, Artificial Sequence; identical to SEQ ID NO: 10105
  GFR-binding peptide
  MOD_RES (1), (3), (36), (37): Xaa is C or S
  MOD_RES (14), (15), (16), (17), (18): Xaa is A or G
  MOD_RES (19), (20), (21), (22): Xaa is A or G or is absent

SEQ ID NO: 46747 - protein, 36 aa, Artificial Sequence; identical to SEQ ID NO: 10106
  GFR-binding peptide
  MOD_RES (1), (32), (33): Xaa is C or S

SEQ ID NO: 46748 - protein, 38 aa, Artificial Sequence
  GFR-binding peptide
  MOD_RES (1), (3), (36), (37): Xaa is C or S
  MOD_RES (14), (15), (16), (17), (18): Xaa is A or G
  MOD_RES (19), (20), (21), (22): Xaa is A or G or is absent
XKXSKVVMVQVEKXXXXXXXXXVKAIKVSRLDQPVXXP

SEQ ID NO: 46749 - protein, 37 aa, Artificial Sequence; identical to SEQ ID NO: 17335
  GFR-binding peptide
  MOD_RES (2), (2): Xaa is C or S
  MOD_RES (15), (16), (17), (18), (19): Xaa is A or G
  MOD_RES (20), (21), (22), (23): Xaa is A or G or is absent

SEQ ID NO: 46750 - protein, 40 aa, Artificial Sequence; identical to SEQ ID NO: 10109
  GFR-binding peptide
  MOD_RES (1), (3), (35), (36): Xaa is C or S

SEQ ID NO: 46751 - protein, 36 aa, Artificial Sequence
  GFR-binding peptide
  MOD_RES (13), (14), (15), (16), (17): Xaa is A or G
  MOD_RES (18), (19), (20), (21): Xaa is A or G or is absent
ALHDELTNSLQEXXXXXXXXXYYLVTLPELQVQTPR

SEQ ID NO: 46752 - protein, 33 aa, Artificial Sequence; identical to SEQ ID NO: 17336
  GFR-binding peptide
  MOD_RES (11), (12), (13), (14), (15): Xaa is A or G
  MOD_RES (16), (17), (18), (19): Xaa is A or G or is absent

SEQ ID NO: 46753 - protein, 40 aa, Artificial Sequence; identical to SEQ ID NO: 10112
  GFR-binding peptide
  MOD_RES (2), (4), (36), (37): Xaa is C or S

SEQ ID NO: 46754 - protein, 36 aa, Artificial Sequence; identical to SEQ ID NO: 10113
  GFR-binding peptide
  MOD_RES (34), (35): Xaa is C or S
  MOD_RES (12), (13), (14), (15), (16): Xaa is A or G
  MOD_RES (17), (18), (19), (20): Xaa is A or G or is absent

SEQ ID NO: 46755 - protein, 39 aa, Artificial Sequence
  GFR-binding peptide
  MOD_RES (2), (34), (35): Xaa is C or S
GXSRVVMNVTAKKIVNSSDDIKRVQVPRLKTPAXXPKPV

SEQ ID NO: 46756 - protein, 39 aa, Artificial Sequence
  GFR-binding peptide
  MOD_RES (33), (34): Xaa is C or S
  MOD_RES (11), (12), (13), (14), (15): Xaa is A or G
  MOD_RES (16), (17), (18), (19): Xaa is A or G or is absent
EVVMDVTAKKXXXXXXXXXIKRMQVPRLETPVXXAKPIK

SEQ ID NO: 46757 - protein, 36 aa, Artificial Sequence
  GFR-binding peptide
  MOD_RES (2), (36): Xaa is C or S
  MOD_RES (14), (15), (16), (17), (18): Xaa is A or G
  MOD_RES (19), (20), (21), (22): Xaa is A or G or is absent
GXGEVVMDSMEGIXXXXXXXXXMIQMTINSLETPVX

SEQ ID NO: 46758 - protein, 35 aa, Artificial Sequence; identical to SEQ ID NO: 10118
  GFR-binding peptide
  MOD_RES (33), (34): Xaa is C or S
  MOD_RES (11), (12), (13), (14), (15): Xaa is A or G
  MOD_RES (16), (17), (18), (19): Xaa is A or G or is absent

SEQ ID NO: 46759 - protein, 43 aa, Artificial Sequence
  GFR-binding peptide
  MOD_RES (2), (39): Xaa is C or S
KXALHDELTNSLQEFIPKKRVIEYYLVTLPELQVQTPRXQVNR

SEQ ID NO: 46760 - protein, 36 aa, Artificial Sequence
  GFR-binding peptide
  MOD_RES (1), (32), (33): Xaa is C or S
XSRVIMSMEGIVKPKRGVMIQITINSLAQPVXXPAA

SEQ ID NO: 46761 - protein, 40 aa, Artificial Sequence; identical to SEQ ID NO: 10120
  GFR-binding peptide
  MOD_RES (1), (3), (34), (35): Xaa is C or S

SEQ ID NO: 46762 - protein, 37 aa, Artificial Sequence
  GFR-binding peptide
  MOD_RES (2), (4), (36), (37): Xaa is C or S
RXGXGEVVMDVQVEKVVKENEDVKAMKVSRLETPVXX

SEQ ID NO: 46763 - protein, 34 aa, Artificial Sequence
  GFR-binding peptide
  MOD_RES (31), (32): Xaa is C or S
SRVIMVQVEKVKPKRGVVKAIKVSRLAQPVXXPA

SEQ ID NO: 46764 - protein, 35 aa, Artificial Sequence; identical to SEQ ID NO: 10124
  GFR-binding peptide
  MOD_RES (1), (3), (35): Xaa is C or S

SEQ ID NO: 46765 - protein, 33 aa, Artificial Sequence
  GFR-binding peptide
  MOD_RES (1), (32), (33): Xaa is C or S
XSRVIMSMEGIVKPKRGVMIQITINSLAQPVXX

SEQ ID NO: 46766 - protein, 39 aa, Artificial Sequence
  GFR-binding peptide
  MOD_RES (33), (34): Xaa is C or S
  MOD_RES (11), (12), (13), (14), (15): Xaa is A or G
  MOD_RES (16), (17), (18), (19): Xaa is A or G or is absent
SRVIMVTAKKXXXXXXXXXIKRIQVPRLAQPVXXPAASA

SEQ ID NO: 46767 - protein, 38 aa, Artificial Sequence; identical to SEQ ID NO: 10125
  GFR-binding peptide
  MOD_RES (2), (4), (38): Xaa is C or S
  MOD_RES (16), (17), (18), (19), (20): Xaa is A or G
  MOD_RES (21), (22), (23), (24): Xaa is A or G or is absent

SEQ ID NO: 46768 - protein, 37 aa, Artificial Sequence; identical to SEQ ID NO: 10126
  GFR-binding peptide
  MOD_RES (2), (4): Xaa is C or S
  MOD_RES (16), (17), (18), (19), (20): Xaa is A or G
  MOD_RES (21), (22), (23), (24): Xaa is A or G or is absent

SEQ ID NO: 46769 - protein, 36 aa, Artificial Sequence; identical to SEQ ID NO: 10128
  GFR-binding peptide
  MOD_RES (1), (3), (35): Xaa is C or S

SEQ ID NO: 46770 - protein, 39 aa, Artificial Sequence; identical to SEQ ID NO: 10131
  GFR-binding peptide
  MOD_RES (33), (34): Xaa is C or S
  MOD_RES (11), (12), (13), (14), (15): Xaa is A or G
  MOD_RES (16), (17), (18), (19): Xaa is A or G or is absent

SEQ ID NO: 46771 - protein, 33 aa, Artificial Sequence
  GFR-binding peptide
  MOD_RES (31), (32): Xaa is C or S
EVVMDVTAKKVVKENEDIKRMQVPRLETPVXXA

SEQ ID NO: 46772 - protein, 40 aa, Artificial Sequence
  GFR-binding peptide
  MOD_RES (1), (3), (37), (38): Xaa is C or S
  MOD_RES (15), (16), (17), (18), (19): Xaa is A or G
  MOD_RES (20), (21), (22), (23): Xaa is A or G or is absent
XGXARVVMNSMEGIXXXXXXXXXMIQVTINSLQTPAXXPK

SEQ ID NO: 46773 - protein, 37 aa, Artificial Sequence; identical to SEQ ID NO: 17354
  GFR-binding peptide
  MOD_RES (33), (33): Xaa is C or S
  MOD_RES (11), (12), (13), (14), (15): Xaa is A or G
  MOD_RES (16), (17), (18), (19): Xaa is A or G or is absent

SEQ ID NO: 46774 - protein, 38 aa, Artificial Sequence; identical to SEQ ID NO: 10133
  GFR-binding peptide
  MOD_RES (33), (34): Xaa is C or S
  MOD_RES (11), (12), (13), (14), (15): Xaa is A or G
  MOD_RES (16), (17), (18), (19): Xaa is A or G or is absent

SEQ ID NO: 46775 - protein, 41 aa, Artificial Sequence; identical to SEQ ID NO: 36077
  GFR-binding peptide
  MOD_RES (2), (4), (37), (38): Xaa is C or S
  MOD_RES (15), (16), (17), (18), (19): Xaa is A or G
  MOD_RES (20), (21), (22), (23): Xaa is A or G or is absent

SEQ ID NO: 46776 - protein, 41 aa, Artificial Sequence
  GFR-binding peptide
  MOD_RES (1), (3), (35), (36): Xaa is C or S
XGXARVVMNSMEGIIVNSSDDMIQVTINSLQTPAXXPKPVT

SEQ ID NO: 46777 - protein, 37 aa, Artificial Sequence
  GFR-binding peptide
  MOD_RES (1), (35), (36): Xaa is C or S
  MOD_RES (13), (14), (15), (16), (17): Xaa is A or G
  MOD_RES (18), (19), (20), (21): Xaa is A or G or is absent
XSRVVMNVQVEKXXXXXXXXXVKAVKVSRLKTPAXXP

SEQ ID NO: 46778 - protein, 45 aa, Artificial Sequence
  GFR-binding peptide
  MOD_RES (2), (4), (41): Xaa is C or S
EXKXALHDELTNSLQEFIPKKRVIEYYVVPLPELQVQTPRXQVNR

SEQ ID NO: 46779 - protein, 36 aa, Artificial Sequence
  GFR-binding peptide
  MOD_RES (1), (32), (33): Xaa is C or S
XSRVIMVQVEKVKPKRGVVKAIKVSRLAQPVXXPAA

SEQ ID NO: 46780 - protein, 39 aa, Artificial Sequence; identical to SEQ ID NO: 17359
  GFR-binding peptide
  MOD_RES (37), (37): Xaa is C or S
  MOD_RES (13), (14), (15), (16), (17): Xaa is A or G
  MOD_RES (18), (19), (20), (21): Xaa is A or G or is absent

SEQ ID NO: 46781 - protein, 34 aa, Artificial Sequence
  GFR-binding peptide
  MOD_RES (2), (4): Xaa is C or S
SXKXSKVVMSMEGIVKPTRGVMIQITINSLDQPV

SEQ ID NO: 46782 - protein, 37 aa, Artificial Sequence; identical to SEQ ID NO: 10136
  GFR-binding peptide
  MOD_RES (2), (4): Xaa is C or S
  MOD_RES (16), (17), (18), (19), (20): Xaa is A or G
  MOD_RES (21), (22), (23), (24): Xaa is A or G or is absent

SEQ ID NO: 46783 - protein, 33 aa, Artificial Sequence
  GFR-binding peptide
  MOD_RES (2), (2): Xaa is C or S
GXSRVVMNVQVEKIVNSSDDVKAVKVSRLKTPA

SEQ ID NO: 46784 - protein, 40 aa, Artificial Sequence; identical to SEQ ID NO: 10140
  GFR-binding peptide
  MOD_RES (1), (3), (36), (37): Xaa is C or S
  MOD_RES (14), (15), (16), (17), (18): Xaa is A or G
  MOD_RES (19), (20), (21), (22): Xaa is A or G or is absent

SEQ ID NO: 46785 - protein, 39 aa, Artificial Sequence
  GFR-binding peptide
  MOD_RES (2), (4), (36), (37): Xaa is C or S
RXGXGEVVMEVTAKKVVKDYEDIKRMQVPRLETPVXXAK

SEQ ID NO: 46786 - protein, 40 aa, Artificial Sequence
  GFR-binding peptide
  MOD_RES (34), (35): Xaa is C or S
  MOD_RES (12), (13), (14), (15), (16): Xaa is A or G
  MOD_RES (17), (18), (19), (20): Xaa is A or G or is absent
ARVVMNVTAKKXXXXXXXXXIKRVQVPRLQTPAXXPKPVT

SEQ ID NO: 46787 - protein, 33 aa, Artificial Sequence
  GFR-binding peptide
  MOD_RES (33), (33): Xaa is C or S
  MOD_RES (11), (12), (13), (14), (15): Xaa is A or G
  MOD_RES (16), (17), (18), (19): Xaa is A or G or is absent
NHQLFNSLQEXXXXXXXXXYYVMPLPEEETPVX

SEQ ID NO: 46788 - protein, 37 aa, Artificial Sequence
  GFR-binding peptide
  MOD_RES (1), (3), (37): Xaa is C or S
  MOD_RES (15), (16), (17), (18), (19): Xaa is A or G
  MOD_RES (20), (21), (22), (23): Xaa is A or G or is absent
XGXARVVMNVQVEKXXXXXXXXXVKAVKVSRLQTPAX

SEQ ID NO: 46789 - protein, 40 aa, Artificial Sequence
  GFR-binding peptide
  MOD_RES (1), (35): Xaa is C or S
XKNHQLFNSLQEHQGQHPKIRYYVMPLPEEETPVXELGED

SEQ ID NO: 46790 - protein, 37 aa, Artificial Sequence
  GFR-binding peptide
  MOD_RES (1), (35), (36): Xaa is C or S
  MOD_RES (13), (14), (15), (16), (17): Xaa is A or G
  MOD_RES (18), (19), (20), (21): Xaa is A or G or is absent
XGEVVMDVTAKKXXXXXXXXXIKRMQVPRLETPVXXA

SEQ ID NO: 46791 - protein, 42 aa, Artificial Sequence
  GFR-binding peptide
  MOD_RES (2), (4), (38), (39): Xaa is C or S
  MOD_RES (16), (17), (18), (19), (20): Xaa is A or G
  MOD_RES (21), (22), (23), (24): Xaa is A or G or is absent
HXGXARVVMNVQVEKXXXXXXXXXVKAVKVSRLQTPAXXPKP

SEQ ID NO: 46792 - protein, 35 aa, Artificial Sequence; identical to SEQ ID NO: 10147
  GFR-binding peptide
  MOD_RES (2), (4), (35): Xaa is C or S

SEQ ID NO: 46793 - protein, 38 aa, Artificial Sequence; identical to SEQ ID NO: 17361
  GFR-binding peptide
  MOD_RES (1), (38): Xaa is C or S

SEQ ID NO: 46794 - protein, 40 aa, Artificial Sequence; identical to SEQ ID NO: 10149
  GFR-binding peptide
  MOD_RES (2), (36), (37): Xaa is C or S
  MOD_RES (14), (15), (16), (17), (18): Xaa is A or G
  MOD_RES (19), (20), (21), (22): Xaa is A or G or is absent

SEQ ID NO: 46795 - protein, 42 aa, Artificial Sequence; identical to SEQ ID NO: 10152
  GFR-binding peptide
  MOD_RES (2), (4), (38), (39): Xaa is C or S
  MOD_RES (16), (17), (18), (19), (20): Xaa is A or G
  MOD_RES (21), (22), (23), (24): Xaa is A or G or is absent

SEQ ID NO: 46796 - protein, 41 aa, Artificial Sequence; identical to SEQ ID NO: 17365
  GFR-binding peptide
  MOD_RES (37), (37): Xaa is C or S
  MOD_RES (13), (14), (15), (16), (17): Xaa is A or G
  MOD_RES (18), (19), (20), (21): Xaa is A or G or is absent

SEQ ID NO: 46797 - protein, 41 aa, Artificial Sequence
  GFR-binding peptide
  MOD_RES (2), (4), (36), (37): Xaa is C or S
HXGXARVVMNSMEGIIVNSSDDMIQVTINSLQTPAXXPKPV

SEQ ID NO: 46798 - protein, 38 aa, Artificial Sequence; identical to SEQ ID NO: 10158
  GFR-binding peptide
  MOD_RES (1), (3), (34), (35): Xaa is C or S

SEQ ID NO: 46799 - protein, 36 aa, Artificial Sequence; identical to SEQ ID NO: 17369
  GFR-binding peptide

SEQ ID NO: 46800 - protein, 33 aa, Artificial Sequence; identical to SEQ ID NO: 10160
  GFR-binding peptide
  MOD_RES (31), (32): Xaa is C or S

SEQ ID NO: 46801 - protein, 31 aa, Artificial Sequence
  GFR-binding peptide
  MOD_RES (1), (1): Xaa is C or S
XSRVIMSMEGIVKPKRGVMIQITINSLAQPV

SEQ ID NO: 46802 - protein, 38 aa, Artificial Sequence; identical to SEQ ID NO: 10161
  GFR-binding peptide
  MOD_RES (34), (35): Xaa is C or S
  MOD_RES (12), (13), (14), (15), (16): Xaa is A or G
  MOD_RES (17), (18), (19), (20): Xaa is A or G or is absent

SEQ ID NO: 46803 - protein, 36 aa, Artificial Sequence
  GFR-binding peptide
  MOD_RES (2), (35), (36): Xaa is C or S
  MOD_RES (13), (14), (15), (16), (17): Xaa is A or G
  MOD_RES (18), (19), (20), (21): Xaa is A or G or is absent
KXSRVIMSMEGIXXXXXXXXXMIQITINSLAQPVXX

SEQ ID NO: 46804 - protein, 39 aa, Artificial Sequence
  GFR-binding peptide
  MOD_RES (2), (4), (35), (36): Xaa is C or S
SXKXSKVVMVQVEKVKPTRGVVKAIKVSRLDQPVXXPSA

SEQ ID NO: 46805 - protein, 35 aa, Artificial Sequence
  GFR-binding peptide
  MOD_RES (1), (3), (35): Xaa is C or S
XGXGEVVMDSMEGIVVKENEDMIQMTINSLETPVX

SEQ ID NO: 46806 - protein, 38 aa, Artificial Sequence
  GFR-binding peptide
  MOD_RES (2), (36), (37): Xaa is C or S
  MOD_RES (14), (15), (16), (17), (18): Xaa is A or G
  MOD_RES (19), (20), (21), (22): Xaa is A or G or is absent
GXARVVMNVQVEKXXXXXXXXXVKAVKVSRLQTPAXXP

SEQ ID NO: 46807 - protein, 41 aa, Artificial Sequence; identical to SEQ ID NO: 17370
  GFR-binding peptide
  MOD_RES (2), (4), (41): Xaa is C or S
  MOD_RES (17), (18), (19), (20), (21): Xaa is A or G
  MOD_RES (22), (23), (24), (25): Xaa is A or G or is absent

SEQ ID NO: 46808 - protein, 36 aa, Artificial Sequence
  GFR-binding peptide
  MOD_RES (2), (33), (34): Xaa is C or S
KXSKVVMVQVEKVKPTRGVVKAIKVSRLDQPVXXPS

SEQ ID NO: 46809 - protein, 34 aa, Artificial Sequence; identical to SEQ ID NO: 10163
  GFR-binding peptide
  MOD_RES (1), (3), (34): Xaa is C or S

SEQ ID NO: 46810 - protein, 35 aa, Artificial Sequence; identical to SEQ ID NO: 17371
  GFR-binding peptide
  MOD_RES (1), (1): Xaa is C or S

SEQ ID NO: 46811 - protein, 37 aa, Artificial Sequence
  GFR-binding peptide
  MOD_RES (2), (2): Xaa is C or S
  MOD_RES (15), (16), (17), (18), (19): Xaa is A or G
  MOD_RES (20), (21), (22), (23): Xaa is A or G or is absent
AXELHEELRNSLQEXXXXXXXXXYYVVPLPEHHVRSP

SEQ ID NO: 46812 - protein, 39 aa, Artificial Sequence; identical to SEQ ID NO: 10166
  GFR-binding peptide
  MOD_RES (2), (36), (37): Xaa is C or S
  MOD_RES (14), (15), (16), (17), (18): Xaa is A or G
  MOD_RES (19), (20), (21), (22): Xaa is A or G or is absent

SEQ ID NO: 46813 - protein, 44 aa, Artificial Sequence; identical to SEQ ID NO: 17374
  GFR-binding peptide
  MOD_RES (2), (4), (38): Xaa is C or S
  MOD_RES (16), (17), (18), (19), (20): Xaa is A or G
  MOD_RES (21), (22), (23), (24): Xaa is A or G or is absent

SEQ ID NO: 46814 - protein, 40 aa, Artificial Sequence; identical to SEQ ID NO: 17375
  GFR-binding peptide
  MOD_RES (2), (4), (38): Xaa is C or S
  MOD_RES (16), (17), (18), (19), (20): Xaa is A or G
  MOD_RES (21), (22), (23), (24): Xaa is A or G or is absent

SEQ ID NO: 46815 - protein, 37 aa, Artificial Sequence
  GFR-binding peptide
  MOD_RES (1), (34), (35): Xaa is C or S
  MOD_RES (12), (13), (14), (15), (16): Xaa is A or G
  MOD_RES (17), (18), (19), (20): Xaa is A or G or is absent
XSKVVMVTAKKXXXXXXXXXIKRIQVPRLDQPVXXPS

SEQ ID NO: 46816 - protein, 37 aa, Artificial Sequence
  GFR-binding peptide
  MOD_RES (1), (3), (35), (36): Xaa is C or S
XGXSRVVMNVTAKKIVNSSDDIKRVQVPRLKTPAXXP

SEQ ID NO: 46817 - protein, 41 aa, Artificial Sequence; identical to SEQ ID NO: 10170
  GFR-binding peptide
  MOD_RES (2), (4), (36), (37): Xaa is C or S

SEQ ID NO: 46818 - protein, 41 aa, Artificial Sequence
  GFR-binding peptide
  MOD_RES (2), (4), (41): Xaa is C or S
AXAXELHEELRNSLQELKPKKRVYEYYVVPLPEHHVRSPQX

SEQ ID NO: 46819 - protein, 31 aa, Artificial Sequence; identical to SEQ ID NO: 10173
  GFR-binding peptide
  MOD_RES (31), (31): Xaa is C or S

SEQ ID NO: 46820 - protein, 38 aa, Artificial Sequence
  GFR-binding peptide
  MOD_RES (1), (3), (36), (37): Xaa is C or S
  MOD_RES (14), (15), (16), (17), (18): Xaa is A or G
  MOD_RES (19), (20), (21), (22): Xaa is A or G or is absent
XKXSRVIMSMEGIXXXXXXXXXMIQITINSLAQPVXXP

SEQ ID NO: 46821 - protein, 36 aa, Artificial Sequence
  GFR-binding peptide
  MOD_RES (33), (34): Xaa is C or S
  MOD_RES (11), (12), (13), (14), (15): Xaa is A or G
  MOD_RES (16), (17), (18), (19): Xaa is A or G or is absent
RVVMNSMEGIXXXXXXXXXMIQVTINSLQTPAXXPK

SEQ ID NO: 46822 - protein, 34 aa, Artificial Sequence
  GFR-binding peptide
  MOD_RES (32), (33): Xaa is C or S
GEVVMDVTAKKVVKENEDIKRMQVPRLETPVXXA

SEQ ID NO: 46823 - protein, 34 aa, Artificial Sequence; identical to SEQ ID NO: 17377
  GFR-binding peptide

SEQ ID NO: 46824 - protein, 40 aa, Artificial Sequence
  GFR-binding peptide
  MOD_RES (36), (36): Xaa is C or S
  MOD_RES (12), (13), (14), (15), (16): Xaa is A or G
  MOD_RES (17), (18), (19), (20): Xaa is A or G or is absent
LHDELTNSLQEXXXXXXXXXYYLVTLPELQVQTPRXQVNR

SEQ ID NO: 46825 - protein, 38 aa, Artificial Sequence; identical to SEQ ID NO: 10175
  GFR-binding peptide
  MOD_RES (33), (34): Xaa is C or S
  MOD_RES (11), (12), (13), (14), (15): Xaa is A or G
  MOD_RES (16), (17), (18), (19): Xaa is A or G or is absent

SEQ ID NO: 46826 - protein, 42 aa, Artificial Sequence; identical to SEQ ID NO: 10177
  GFR-binding peptide
  MOD_RES (1), (3), (37), (38): Xaa is C or S
  MOD_RES (15), (16), (17), (18), (19): Xaa is A or G
  MOD_RES (20), (21), (22), (23): Xaa is A or G or is absent

SEQ ID NO: 46827 - protein, 34 aa, Artificial Sequence; identical to SEQ ID NO: 17379
  GFR-binding peptide
  MOD_RES (1), (1): Xaa is C or S

SEQ ID NO: 46828 - protein, 34 aa, Artificial Sequence; identical to SEQ ID NO: 10178
  GFR-binding peptide
  MOD_RES (1), (3), (34): Xaa is C or S

SEQ ID NO: 46829 - protein, 36 aa, Artificial Sequence; identical to SEQ ID NO: 10179
  GFR-binding peptide
  MOD_RES (33), (34): Xaa is C or S
  MOD_RES (11), (12), (13), (14), (15): Xaa is A or G
  MOD_RES (16), (17), (18), (19): Xaa is A or G or is absent

SEQ ID NO: 46830 - protein, 32 aa, Artificial Sequence
  GFR-binding peptide
  MOD_RES (32), (32): Xaa is C or S
SRVVMNSMEGIIVNSSDDMIQVTINSLKTPAX

SEQ ID NO: 46831 - protein, 40 aa, Artificial Sequence; identical to SEQ ID NO: 10181
  GFR-binding peptide
  MOD_RES (2), (4), (38), (39): Xaa is C or S
  MOD_RES (16), (17), (18), (19), (20): Xaa is A or G
  MOD_RES (21), (22), (23), (24): Xaa is A or G or is absent

SEQ ID NO: 46832 - protein, 39 aa, Artificial Sequence
  GFR-binding peptide
  MOD_RES (2), (35), (36): Xaa is C or S
  MOD_RES (13), (14), (15), (16), (17): Xaa is A or G
  MOD_RES (18), (19), (20), (21): Xaa is A or G or is absent
KXSRVIMVQVEKXXXXXXXXXVKAIKVSRLAQPVXXPAA

SEQ ID NO: 46833 - protein, 39 aa, Artificial Sequence; identical to SEQ ID NO: 10184
  GFR-binding peptide
  MOD_RES (1), (35), (36): Xaa is C or S
  MOD_RES (13), (14), (15), (16), (17): Xaa is A or G
  MOD_RES (18), (19), (20), (21): Xaa is A or G or is absent

SEQ ID NO: 46834 - protein, 34 aa, Artificial Sequence; identical to SEQ ID NO: 17383
  GFR-binding peptide

SEQ ID NO: 46835 - protein, 36 aa, Artificial Sequence
  GFR-binding peptide
  MOD_RES (2), (4), (36): Xaa is C or S
RXGXGEVVMEVTAKKVVKDYEDIKRMQVPRLETPVX

SEQ ID NO: 46836 - protein, 39 aa, Artificial Sequence; identical to SEQ ID NO: 10189
  GFR-binding peptide
  MOD_RES (34), (35): Xaa is C or S
  MOD_RES (12), (13), (14), (15), (16): Xaa is A or G
  MOD_RES (17), (18), (19), (20): Xaa is A or G or is absent

SEQ ID NO: 46837 - protein, 34 aa, Artificial Sequence
  GFR-binding peptide
  MOD_RES (2), (34): Xaa is C or S
GXGEVVMEVTAKKVVKDYEDIKRMQVPRLETPVX

SEQ ID NO: 46838 - protein, 35 aa, Artificial Sequence
  GFR-binding peptide
  MOD_RES (1), (33), (34): Xaa is C or S
XARVVMNSMEGIIVNSSDDMIQVTINSLQTPAXXP

SEQ ID NO: 46839 - protein, 40 aa, Artificial Sequence
  GFR-binding peptide
  MOD_RES (36), (36): Xaa is C or S
LHDELTNSLQEFIPKKRVIEYYVVPLPELQVQTPRXQVNR

SEQ ID NO: 46840 - protein, 35 aa, Artificial Sequence
  GFR-binding peptide
  MOD_RES (31), (32): Xaa is C or S
RVVMNSMEGIIVNSSDDMIQVTINSLKTPAXXPKP

SEQ ID NO: 46841 - protein, 40 aa, Artificial Sequence
  GFR-binding peptide
  MOD_RES (1), (3), (36), (37): Xaa is C or S
  MOD_RES (14), (15), (16), (17), (18): Xaa is A or G
  MOD_RES (19), (20), (21), (22): Xaa is A or G or is absent
XKXSKVVMSMEGIXXXXXXXXXMIQITINSLDQPVXXPSA

SEQ ID NO: 46842 - protein, 41 aa, Artificial Sequence; identical to SEQ ID NO: 10194
  GFR-binding peptide
  MOD_RES (2), (4), (35), (36): Xaa is C or S

SEQ ID NO: 46843 - protein, 35 aa, Artificial Sequence
  GFR-binding peptide
  MOD_RES (1), (3), (34), (35): Xaa is C or S
XKXSKVIMSMEGIIKPTKGIMIQITINSLDQSVXX

SEQ ID NO: 46844 - protein, 33 aa, Artificial Sequence; identical to SEQ ID NO: 17393
  GFR-binding peptide

SEQ ID NO: 46845 - protein, 39 aa, Artificial Sequence; identical to SEQ ID NO: 17394
  GFR-binding peptide
  MOD_RES (36), (36): Xaa is C or S
  MOD_RES (12), (13), (14), (15), (16): Xaa is A or G
  MOD_RES (17), (18), (19), (20): Xaa is A or G or is absent

SEQ ID NO: 46846 - protein, 34 aa, Artificial Sequence; identical to SEQ ID NO: 10198
  GFR-binding peptide
  MOD_RES (31), (31): Xaa is C or S

SEQ ID NO: 46847 - protein, 35 aa, Artificial Sequence; identical to SEQ ID NO: 10199
  GFR-binding peptide
  MOD_RES (34), (35): Xaa is C or S
  MOD_RES (12), (13), (14), (15), (16): Xaa is A or G
  MOD_RES (17), (18), (19), (20): Xaa is A or G or is absent

SEQ ID NO: 46848 - protein, 36 aa, Artificial Sequence
  GFR-binding peptide
  MOD_RES (2), (36): Xaa is C or S
  MOD_RES (14), (15), (16), (17), (18): Xaa is A or G
  MOD_RES (19), (20), (21), (22): Xaa is A or G or is absent
GXARVVMNVTAKKXXXXXXXXXIKRVQVPRLQTPAX

SEQ ID NO: 46849 - protein, 43 aa, Artificial Sequence
  GFR-binding peptide
  MOD_RES (2), (4), (38), (39): Xaa is C or S
  MOD_RES (16), (17), (18), (19), (20): Xaa is A or G
  MOD_RES (21), (22), (23), (24): Xaa is A or G or is absent
HXGXSRVVMNVQVEKXXXXXXXXXVKAVKVSRLKTPAXXPKPV

SEQ ID NO: 46850 - protein, 36 aa, Artificial Sequence
  GFR-binding peptide
  MOD_RES (35), (35): Xaa is C or S
  MOD_RES (11), (12), (13), (14), (15): Xaa is A or G
  MOD_RES (16), (17), (18), (19): Xaa is A or G or is absent
HDELTNSLQEXXXXXXXXXYYVVPLPELQVQTPRXQ

SEQ ID NO: 46851 - protein, 40 aa, Artificial Sequence
  GFR-binding peptide
  MOD_RES (2), (4), (35), (36): Xaa is C or S
SXKXSKVVMSMEGIVKPTRGVMIQITINSLDQPVXXPSAS

SEQ ID NO: 46852 - protein, 38 aa, Artificial Sequence
  GFR-binding peptide
  MOD_RES (1), (35), (36): Xaa is C or S
  MOD_RES (13), (14), (15), (16), (17): Xaa is A or G
  MOD_RES (18), (19), (20), (21): Xaa is A or G or is absent
XGEVVMDSMEGIXXXXXXXXXMIQMTINSLETPVXXAK

SEQ ID NO: 46853 - protein, 37 aa, Artificial Sequence; identical to SEQ ID NO: 10201
  GFR-binding peptide
  MOD_RES (31), (31): Xaa is C or S

SEQ ID NO: 46854 - protein, 36 aa, Artificial Sequence; identical to SEQ ID NO: 17395
  GFR-binding peptide
  MOD_RES (2), (2): Xaa is C or S

SEQ ID NO: 46855 - protein, 38 aa, Artificial Sequence; identical to SEQ ID NO: 17396
  GFR-binding peptide
  MOD_RES (36), (36): Xaa is C or S
  MOD_RES (12), (13), (14), (15), (16): Xaa is A or G
  MOD_RES (17), (18), (19), (20): Xaa is A or G or is absent

SEQ ID NO: 46856 - protein, 41 aa, Artificial Sequence
  GFR-binding peptide
  MOD_RES (1), (35), (36): Xaa is C or S
  MOD_RES (13), (14), (15), (16), (17): Xaa is A or G
  MOD_RES (18), (19), (20), (21): Xaa is A or G or is absent
XGEVVMDSMEGIXXXXXXXXXMIQMTINSLETPVXXAKPIK

SEQ ID NO: 46857 - protein, 35 aa, Artificial Sequence
  GFR-binding peptide
  MOD_RES (1), (1): Xaa is C or S
  MOD_RES (14), (15), (16), (17), (18): Xaa is A or G
  MOD_RES (19), (20), (21), (22): Xaa is A or G or is absent
XALHDELTNSLQEXXXXXXXXXYYVVPLPELQVQT

SEQ ID NO: 46858 - protein, 36 aa, Artificial Sequence
  GFR-binding peptide
  MOD_RES (1), (33), (34): Xaa is C or S
XGEVVMDVQVEKVVKENEDVKAMKVSRLETPVXXAK

SEQ ID NO: 46859 - protein, 32 aa, Artificial Sequence
  GFR-binding peptide
  MOD_RES (1), (1): Xaa is C or S
XGEVVMEVQVEKVVKDYEDVKAMKVSRLETPV

SEQ ID NO: 46860 - protein, 41 aa, Artificial Sequence; identical to SEQ ID NO: 10204
  GFR-binding peptide
  MOD_RES (2), (35), (36): Xaa is C or S
  MOD_RES (13), (14), (15), (16), (17): Xaa is A or G
  MOD_RES (18), (19), (20), (21): Xaa is A or G or is absent

SEQ ID NO: 46861 - protein, 35 aa, Artificial Sequence
  GFR-binding peptide
  MOD_RES (1), (3), (34), (35): Xaa is C or S
XKXSKVVMSMEGIVKPTRGVMIQITINSLDQPVXX

SEQ ID NO: 46862 - protein, 39 aa, Artificial Sequence
  GFR-binding peptide
  MOD_RES (2), (35), (36): Xaa is C or S
  MOD_RES (13), (14), (15), (16), (17): Xaa is A or G
  MOD_RES (18), (19), (20), (21): Xaa is A or G or is absent
KXSKVIMVTAKKXXXXXXXXXIKRIQVPRLDQSVXXPSA

SEQ ID NO: 46863 - protein, 37 aa, Artificial Sequence
  GFR-binding peptide
  MOD_RES (1), (33), (34): Xaa is C or S
XGEVVMESMEGIVVKDYEDMIQMTINSLETPVXXAKP

SEQ ID NO: 46864 - protein, 34 aa, Artificial Sequence; identical to SEQ ID NO: 10208
  GFR-binding peptide
  MOD_RES (1), (33): Xaa is C or S

SEQ ID NO: 46865 - protein, 35 aa, Artificial Sequence
  GFR-binding peptide
  MOD_RES (1), (32), (33): Xaa is C or S
XSRVIMSMEGIVKPKRGVMIQITINSLAQPVXXPA

SEQ ID NO: 46866 - protein, 36 aa, Artificial Sequence; identical to SEQ ID NO: 10211
  GFR-binding peptide
  MOD_RES (1), (33), (34): Xaa is C or S

SEQ ID NO: 46867 - protein, 36 aa, Artificial Sequence
  GFR-binding peptide
  MOD_RES (2), (4), (36): Xaa is C or S
RXGXGEVVMDVQVEKVVKENEDVKAMKVSRLETPVX

SEQ ID NO: 46868 - protein, 38 aa, Artificial Sequence
  GFR-binding peptide
  MOD_RES (2), (33), (34): Xaa is C or S
KXSKVVMVQVEKVKPTRGVVKAIKVSRLDQPVXXPSAS

SEQ ID NO: 46869 - protein, 41 aa, Artificial Sequence
  GFR-binding peptide
  MOD_RES (2), (4), (37), (38): Xaa is C or S
  MOD_RES (15), (16), (17), (18), (19): Xaa is A or G
  MOD_RES (20), (21), (22), (23): Xaa is A or G or is absent
SXKXSKVVMVTAKKXXXXXXXXXIKRIQVPRLDQPVXXPSA

SEQ ID NO: 46870 - protein, 35 aa, Artificial Sequence
  GFR-binding peptide
  MOD_RES (33), (34): Xaa is C or S
  MOD_RES (11), (12), (13), (14), (15): Xaa is A or G
  MOD_RES (16), (17), (18), (19): Xaa is A or G or is absent
EVVMDSMEGIXXXXXXXXXMIQMTINSLETPVXXA

SEQ ID NO: 46871 - protein, 38 aa, Artificial Sequence; identical to SEQ ID NO: 17403
  GFR-binding peptide
  MOD_RES (1), (38): Xaa is C or S

SEQ ID NO: 46872 - protein, 38 aa, Artificial Sequence
  GFR-binding peptide
  MOD_RES (2), (36): Xaa is C or S
  MOD_RES (14), (15), (16), (17), (18): Xaa is A or G
  MOD_RES (19), (20), (21), (22): Xaa is A or G or is absent
EXKNHQLFNSLQEXXXXXXXXXYYLMTLPEEETPVXEL

SEQ ID NO: 46873 - protein, 34 aa, Artificial Sequence
  GFR-binding peptide
  MOD_RES (33), (34): Xaa is C or S
  MOD_RES (11), (12), (13), (14), (15): Xaa is A or G
  MOD_RES (16), (17), (18), (19): Xaa is A or G or is absent
SKVIMVTAKKXXXXXXXXXIKRIQVPRLDQSVXX

SEQ ID NO: 46874 - protein, 36 aa, Artificial Sequence
  GFR-binding peptide
  MOD_RES (36), (36): Xaa is C or S
LHDELTNSLQEFIPKKRVIEYYVVPLPELQVQTPRX

SEQ ID NO: 46875 - protein, 33 aa, Artificial Sequence
  GFR-binding peptide
  MOD_RES (33), (33): Xaa is C or S
  MOD_RES (11), (12), (13), (14), (15): Xaa is A or G
  MOD_RES (16), (17), (18), (19): Xaa is A or G or is absent
NHQLFNSLQEXXXXXXXXXYYLMTLPEEETPVX

SEQ ID NO: 46876 - protein, 38 aa, Artificial Sequence; identical to SEQ ID NO: 10221
  GFR-binding peptide
  MOD_RES (1), (3), (37), (38): Xaa is C or S
  MOD_RES (15), (16), (17), (18), (19): Xaa is A or G
  MOD_RES (20), (21), (22), (23): Xaa is A or G or is absent

SEQ ID NO: 46877 - protein, 37 aa, Artificial Sequence
  GFR-binding peptide
  MOD_RES (1), (35): Xaa is C or S
  MOD_RES (13), (14), (15), (16), (17): Xaa is A or G
  MOD_RES (18), (19), (20), (21): Xaa is A or G or is absent
XKNHQLFNSLQEXXXXXXXXXYYVMPLPEEETPVXEL

SEQ ID NO: 46878 - protein, 35 aa, Artificial Sequence
  GFR-binding peptide
  MOD_RES (32), (33): Xaa is C or S
SRVVMNVQVEKIVNSSDDVKAVKVSRLKTPAXXPK

SEQ ID NO: 46879 - protein, 37 aa, Artificial Sequence; identical to SEQ ID NO: 17415
  GFR-binding peptide
  MOD_RES (2), (2): Xaa is C or S

SEQ ID NO: 46880 - protein, 34 aa, Artificial Sequence; identical to SEQ ID NO: 10225
  GFR-binding peptide
  MOD_RES (34), (34): Xaa is C or S
  MOD_RES (12), (13), (14), (15), (16): Xaa is A or G
  MOD_RES (17), (18), (19), (20): Xaa is A or G or is absent

SEQ ID NO: 46881 - protein, 41 aa, Artificial Sequence
  GFR-binding peptide
  MOD_RES (2), (36), (37): Xaa is C or S
  MOD_RES (14), (15), (16), (17), (18): Xaa is A or G
  MOD_RES (19), (20), (21), (22): Xaa is A or G or is absent
GXSRVVMNSMEGIXXXXXXXXXMIQVTINSLKTPAXXPKPV

SEQ ID NO: 46882 - protein, 35 aa, Artificial Sequence
  GFR-binding peptide
  MOD_RES (31), (32): Xaa is C or S
RVVMNVQVEKIVNSSDDVKAVKVSRLKTPAXXPKP

SEQ ID NO: 46883 - protein, 40 aa, Artificial Sequence; identical to SEQ ID NO: 10227
  GFR-binding peptide
  MOD_RES (2), (34): Xaa is C or S

SEQ ID NO: 46884 - protein, 35 aa, Artificial Sequence
  GFR-binding peptide
  MOD_RES (31), (32): Xaa is C or S
SRVIMVTAKKVKPKRGVIKRIQVPRLAQPVXXPAA

SEQ ID NO: 46885 - protein, 34 aa, Artificial Sequence
  GFR-binding peptide
  MOD_RES (33), (34): Xaa is C or S
  MOD_RES (11), (12), (13), (14), (15): Xaa is A or G
  MOD_RES (16), (17), (18), (19): Xaa is A or G or is absent
EVVMDVQVEKXXXXXXXXXVKAMKVSRLETPVXX

SEQ ID NO: 46886 - protein, 37 aa, Artificial Sequence
  GFR-binding peptide
  MOD_RES (1), (33), (34): Xaa is C or S
XGEVVMDSMEGIVVKENEDMIQMTINSLETPVXXAKP

SEQ ID NO: 46887 - protein, 43 aa, Artificial Sequence; identical to SEQ ID NO: 17420
  GFR-binding peptide
  MOD_RES (2), (4), (41): Xaa is C or S

SEQ ID NO: 46888 - protein, 39 aa, Artificial Sequence
  GFR-binding peptide
  MOD_RES (1), (3), (35), (36): Xaa is C or S
XGXGEVVMESMEGIVVKDYEDMIQMTINSLETPVXXAKP

SEQ ID NO: 46889 - protein, 40 aa, Artificial Sequence; identical to SEQ ID NO: 10229
  GFR-binding peptide
  MOD_RES (1), (35), (36): Xaa is C or S
  MOD_RES (13), (14), (15), (16), (17): Xaa is A or G
  MOD_RES (18), (19), (20), (21): Xaa is A or G or is absent

SEQ ID NO: 46890 - protein, 31 aa, Artificial Sequence; identical to SEQ ID NO: 10230
  GFR-binding peptide

SEQ ID NO: 46891 - protein, 38 aa, Artificial Sequence
  GFR-binding peptide
  MOD_RES (2), (4), (36), (37): Xaa is C or S
HXGXSRVVMNVTAKKIVNSSDDIKRVQVPRLKTPAXXP

SEQ ID NO: 46892 - protein, 37 aa, Artificial Sequence; identical to SEQ ID NO: 10233
  GFR-binding peptide
  MOD_RES (34), (35): Xaa is C or S
  MOD_RES (12), (13), (14), (15), (16): Xaa is A or G
  MOD_RES (17), (18), (19), (20): Xaa is A or G or is absent

SEQ ID NO: 46893 - protein, 38 aa, Artificial Sequence; identical to SEQ ID NO: 10234
  GFR-binding peptide
  MOD_RES (2), (4), (38): Xaa is C or S
  MOD_RES (16), (17), (18), (19), (20): Xaa is A or G
  MOD_RES (21), (22), (23), (24): Xaa is A or G or is absent

SEQ ID NO: 46894 - protein, 43 aa, Artificial Sequence
  GFR-binding peptide
  MOD_RES (2), (4), (38), (39): Xaa is C or S
  MOD_RES (16), (17), (18), (19), (20): Xaa is A or G
  MOD_RES (21), (22), (23), (24): Xaa is A or G or is absent
RXGXGEVVMDVQVEKXXXXXXXXXVKAMKVSRLETPVXXAKPI

SEQ ID NO: 46895 - protein, 34 aa, Artificial Sequence
  GFR-binding peptide
  MOD_RES (33), (34): Xaa is C or S
  MOD_RES (11), (12), (13), (14), (15): Xaa is A or G
  MOD_RES (16), (17), (18), (19): Xaa is A or G or is absent
SKVIMVQVEKXXXXXXXXXVKAIKVSRLDQSVXX

SEQ ID NO: 46896 - protein, 37 aa, Artificial Sequence
  GFR-binding peptide
  MOD_RES (1), (3): Xaa is C or S
  MOD_RES (16), (17), (18), (19), (20): Xaa is A or G
  MOD_RES (21), (22), (23), (24): Xaa is A or G or is absent
XAXELHEELRNSLQEXXXXXXXXXYYVVPLPEHHVRS

SEQ ID NO: 46897 - protein, 43 aa, Artificial Sequence
  GFR-binding peptide
  MOD_RES (2), (39): Xaa is C or S
  MOD_RES (15), (16), (17), (18), (19): Xaa is A or G
  MOD_RES (20), (21), (22), (23): Xaa is A or G or is absent
AXELHEELRNSLQEXXXXXXXXXYYLVTLPEHHVRSPQXKVSS

SEQ ID NO: 46898 - protein, 40 aa, Artificial Sequence; identical to SEQ ID NO: 17423
  GFR-binding peptide
  MOD_RES (1), (38): Xaa is C or S

SEQ ID NO: 46899 - protein, 36 aa, Artificial Sequence; identical to SEQ ID NO: 10237
  GFR-binding peptide
  MOD_RES (1), (3), (35), (36): Xaa is C or S

SEQ ID NO: 46900 - protein, 40 aa, Artificial Sequence; identical to SEQ ID NO: 17426
  GFR-binding peptide
  MOD_RES (1), (3), (37): Xaa is C or S
  MOD_RES (15), (16), (17), (18), (19): Xaa is A or G
  MOD_RES (20), (21), (22), (23): Xaa is A or G or is absent

SEQ ID NO: 46901 - protein, 35 aa, Artificial Sequence
  GFR-binding peptide
  MOD_RES (34), (35): Xaa is C or S
  MOD_RES (12), (13), (14), (15), (16): Xaa is A or G
  MOD_RES (17), (18), (19), (20): Xaa is A or G or is absent
GEVVMEVQVEKXXXXXXXXXVKAMKVSRLETPVXX

SEQ ID NO: 46902 - protein, 36 aa, Artificial Sequence
  GFR-binding peptide
  MOD_RES (2), (2): Xaa is C or S
AXELHEELRNSLQELKPKKRVYEYYLVTLPEHHVRS

SEQ ID NO: 46903 - protein, 43 aa, Artificial Sequence; identical to SEQ ID NO: 17427
  GFR-binding peptide
  MOD_RES (2), (4), (38): Xaa is C or S
  MOD_RES (16), (17), (18), (19), (20): Xaa is A or G
  MOD_RES (21), (22), (23), (24): Xaa is A or G or is absent

SEQ ID NO: 46904 - protein, 42 aa, Artificial Sequence; identical to SEQ ID NO: 10243
  GFR-binding peptide
  MOD_RES (1), (3), (37), (38): Xaa is C or S
  MOD_RES (15), (16), (17), (18), (19): Xaa is A or G
  MOD_RES (20), (21), (22), (23): Xaa is A or G or is absent

SEQ ID NO: 46905 - protein, 30 aa, Artificial Sequence; identical to SEQ ID NO: 10244
  GFR-binding peptide

SEQ ID NO: 46906 - protein, 41 aa, Artificial Sequence
  GFR-binding peptide
  MOD_RES (2), (39): Xaa is C or S
AXELHEELRNSLQELKPKKRVYEYYVVPLPEHHVRSPQXKV

SEQ ID NO: 46907 - protein, 35 aa, Artificial Sequence
  GFR-binding peptide
  MOD_RES (31), (31): Xaa is C or S
RVVMNVTAKKIVNSSDDIKRVQVPRLKTPAXTPKT

SEQ ID NO: 46908 - protein, 40 aa, Artificial Sequence; identical to SEQ ID NO: 17432
  GFR-binding peptide
  MOD_RES (36), (36): Xaa is C or S
  MOD_RES (12), (13), (14), (15), (16): Xaa is A or G
  MOD_RES (17), (18), (19), (20): Xaa is A or G or is absent

SEQ ID NO: 46909 - protein, 40 aa, Artificial Sequence; identical to SEQ ID NO: 17433
  GFR-binding peptide
  MOD_RES (1), (3), (40): Xaa is C or S
  MOD_RES (16), (17), (18), (19), (20): Xaa is A or G
  MOD_RES (21), (22), (23), (24): Xaa is A or G or is absent

SEQ ID NO: 46910 - protein, 36 aa, Artificial Sequence
  GFR-binding peptide
  MOD_RES (36), (36): Xaa is C or S
  MOD_RES (12), (13), (14), (15), (16): Xaa is A or G
  MOD_RES (17), (18), (19), (20): Xaa is A or G or is absent
LHDELTNSLQEXXXXXXXXXYYLVTLPELQVQTPRX

SEQ ID NO: 46911 - protein, 37 aa, Artificial Sequence; identical to SEQ ID NO: 10245
  GFR-binding peptide
  MOD_RES (31), (32): Xaa is C or S

SEQ ID NO: 46912 - protein, 34 aa, Artificial Sequence
  GFR-binding peptide
  MOD_RES (2), (2): Xaa is C or S
  MOD_RES (13), (14), (15), (16), (17): Xaa is A or G
  MOD_RES (18), (19), (20), (21): Xaa is A or G or is absent
KXSKVIMVTAKKXXXXXXXXXIKRIQVPRLDQSV

SEQ ID NO: 46913 - protein, 36 aa, Artificial Sequence; identical to SEQ ID NO: 10247
  GFR-binding peptide
  MOD_RES (2), (4), (36): Xaa is C or S

SEQ ID NO: 46914 - protein, 35 aa, Artificial Sequence
  GFR-binding peptide
  MOD_RES (33), (34): Xaa is C or S
  MOD_RES (11), (12), (13), (14), (15): Xaa is A or G
  MOD_RES (16), (17), (18), (19): Xaa is A or G or is absent
RVVMNSMEGIXXXXXXXXXMIQVTINSLKTPAXXP

SEQ ID NO: 46915 - protein, 43 aa, Artificial Sequence; identical to SEQ ID NO: 10249
  GFR-binding peptide
  MOD_RES (2), (4), (37), (38): Xaa is C or S
  MOD_RES (15), (16), (17), (18), (19): Xaa is A or G
  MOD_RES (20), (21), (22), (23): Xaa is A or G or is absent

SEQ ID NO: 46916 - protein, 41 aa, Artificial Sequence
  GFR-binding peptide
  MOD_RES (1), (35), (36): Xaa is C or S
  MOD_RES (13), (14), (15), (16), (17): Xaa is A or G
  MOD_RES (18), (19), (20), (21): Xaa is A or G or is absent
XSRVVMNSMEGIXXXXXXXXXMIQVTINSLKTPAXXPKPVY

SEQ ID NO: 46917 - protein, 38 aa, Artificial Sequence
  GFR-binding peptide
  MOD_RES (32), (32): Xaa is C or S
SRVVMNVTAKKIVNSSDDIKRVQVPRLKTPAXTPKTVH

SEQ ID NO: 46918 - protein, 37 aa, Artificial Sequence; identical to SEQ ID NO: 17437
  GFR-binding peptide
  MOD_RES (37), (37): Xaa is C or S

SEQ ID NO: 46919 - protein, 39 aa, Artificial Sequence
  GFR-binding peptide
  MOD_RES (2), (4), (37), (38): Xaa is C or S
  MOD_RES (15), (16), (17), (18), (19): Xaa is A or G
  MOD_RES (20), (21), (22), (23): Xaa is A or G or is absent
SXKXSKVVMSMEGIXXXXXXXXXMIQITINSLDQPVXXP

SEQ ID NO: 46920 - protein, 40 aa, Artificial Sequence
  GFR-binding peptide
  MOD_RES (2), (4), (36), (37): Xaa is C or S
HXGXSRVVMNSMEGIIVNSSDDMIQVTINSLKTPAXXPKP

SEQ ID NO: 46921 - protein, 39 aa, Artificial Sequence; identical to SEQ ID NO: 17441
  GFR-binding peptide
  MOD_RES (33), (33): Xaa is C or S
  MOD_RES (11), (12), (13), (14), (15): Xaa is A or G
  MOD_RES (16), (17), (18), (19): Xaa is A or G or is absent

SEQ ID NO: 46922 - protein, 34 aa, Artificial Sequence
  GFR-binding peptide
  MOD_RES (13), (14), (15), (16), (17): Xaa is A or G
  MOD_RES (18), (19), (20), (21): Xaa is A or G or is absent
ALHDELTNSLQEXXXXXXXXXYYLVTLPELQVQT

SEQ ID NO: 46923 - protein, 40 aa, Artificial Sequence; identical to SEQ ID NO: 17444
  GFR-binding peptide
  MOD_RES (2), (4): Xaa is C or S

SEQ ID NO: 46924 - protein, 36 aa, Artificial Sequence; identical to SEQ ID NO: 10255
  GFR-binding peptide
  MOD_RES (32), (32): Xaa is C or S

SEQ ID NO: 46925 - protein, 36 aa, Artificial Sequence
  GFR-binding peptide
  MOD_RES (36), (36): Xaa is C or S
  MOD_RES (12), (13), (14), (15), (16): Xaa is A or G
  MOD_RES (17), (18), (19), (20): Xaa is A or G or is absent
LHEELRNSLQEXXXXXXXXXYYLVTLPEHHVRSPQX

SEQ ID NO: 46926 - protein, 39 aa, Artificial Sequence; identical to SEQ ID NO: 17447
  GFR-binding peptide
  MOD_RES (37), (37): Xaa is C or S
  MOD_RES (13), (14), (15), (16), (17): Xaa is A or G
  MOD_RES (18), (19), (20), (21): Xaa is A or G or is absent

SEQ ID NO: 46927 - protein, 37 aa, Artificial Sequence
  GFR-binding peptide
  MOD_RES (1), (34), (35): Xaa is C or S
  MOD_RES (12), (13), (14), (15), (16): Xaa is A or G
  MOD_RES (17), (18), (19), (20): Xaa is A or G or is absent
XSRVIMVTAKKXXXXXXXXXIKRIQVPRLAQPVXXPA

SEQ ID NO: 46928 - protein, 40 aa, Artificial Sequence
  GFR-binding peptide
  MOD_RES (2), (39): Xaa is C or S
  MOD_RES (15), (16), (17), (18), (19): Xaa is A or G
  MOD_RES (20), (21), (22), (23): Xaa is A or G or is absent
KXALHDELTNSLQEXXXXXXXXXYYVVPLPELQVQTPRXQ

SEQ ID NO: 46929 - protein, 38 aa, Artificial Sequence
  GFR-binding peptide
  MOD_RES (33), (34): Xaa is C or S
  MOD_RES (11), (12), (13), (14), (15): Xaa is A or G
  MOD_RES (16), (17), (18), (19): Xaa is A or G or is absent
EVVMDVTAKKXXXXXXXXXIKRMQVPRLETPVXXAKPI

SEQ ID NO: 46930 - protein, 37 aa, Artificial Sequence
  GFR-binding peptide
  MOD_RES (34), (35): Xaa is C or S
  MOD_RES (12), (13), (14), (15), (16): Xaa is A or G
  MOD_RES (17), (18), (19), (20): Xaa is A or G or is absent
ARVVMNVQVEKXXXXXXXXXVKAVKVSRLQTPAXXPK

SEQ ID NO: 46931 - protein, 38 aa, Artificial Sequence
  GFR-binding peptide
  MOD_RES (36), (36): Xaa is C or S
LHDELTNSLQEFIPKKRVIEYYLVTLPELQVQTPRXQV

SEQ ID NO: 46932 - protein, 39 aa, Artificial Sequence; identical to SEQ ID NO: 10262
  GFR-binding peptide
  MOD_RES (2), (4), (38), (39): Xaa is C or S
  MOD_RES (16), (17), (18), (19), (20): Xaa is A or G
  MOD_RES (21), (22), (23), (24): Xaa is A or G or is absent

SEQ ID NO: 46933 - protein, 37 aa, Artificial Sequence; identical to SEQ ID NO: 10264
  GFR-binding peptide
  MOD_RES (1), (3), (34), (35): Xaa is C or S

SEQ ID NO: 46934 - protein, 39 aa, Artificial Sequence
  GFR-binding peptide
  MOD_RES (35), (35): Xaa is C or S
  MOD_RES (11), (12), (13), (14), (15): Xaa is A or G
  MOD_RES (16), (17), (18), (19): Xaa is A or G or is absent
HEELRNSLQEXXXXXXXXXYYLVTLPEHHVRSPQXKVSS

SEQ ID NO: 46935 - protein, 42 aa, Artificial Sequence; identical to SEQ ID NO: 17452
  GFR-binding peptide
  MOD_RES (1), (3), (40): Xaa is C or S

SEQ ID NO: 46936 - protein, 33 aa, Artificial Sequence
  GFR-binding peptide
  MOD_RES (12), (13), (14), (15), (16): Xaa is A or G
  MOD_RES (17), (18), (19), (20): Xaa is A or G or is absent
ARVVMNVQVEKXXXXXXXXXVKAVKVSRLQTPA

SEQ ID NO: 46937 - protein, 40 aa, Artificial Sequence
  GFR-binding peptide
  MOD_RES (1), (3), (34), (35): Xaa is C or S
XKXSKVVMVQVEKVKPTRGVVKAIKVSRLDQPVXXPSASA

SEQ ID NO: 46938 - protein, 36 aa, Artificial Sequence
  GFR-binding peptide
  MOD_RES (2), (36): Xaa is C or S
  MOD_RES (14), (15), (16), (17), (18): Xaa is A or G
  MOD_RES (19), (20), (21), (22): Xaa is A or G or is absent
GXGEVVMESMEGIXXXXXXXXXMIQMTINSLETPVX

SEQ ID NO: 46939 - protein, 40 aa, Artificial Sequence
  GFR-binding peptide
  MOD_RES (2), (36): Xaa is C or S
  MOD_RES (14), (15), (16), (17), (18): Xaa is A or G
  MOD_RES (19), (20), (21), (22): Xaa is A or G or is absent
GXSRVVMNVTAKKXXXXXXXXXIKRVQVPRLKTPAXTPKT

SEQ ID NO: 46940 - protein, 38 aa, Artificial Sequence
  GFR-binding peptide
  MOD_RES (33), (33): Xaa is C or S
NHQLFNSLQEHQGQHPKIRYYLMTLPEEETPVXELGED

SEQ ID NO: 46941 - protein, 35 aa, Artificial Sequence
  GFR-binding peptide
  MOD_RES (2), (4), (35): Xaa is C or S
SXKXSKVVMSMEGIVKPTRGVMIQITINSLDQPVX

SEQ ID NO: 46942 - protein, 34 aa, Artificial Sequence
  GFR-binding peptide
  MOD_RES (2), (2): Xaa is C or S
  MOD_RES (13), (14), (15), (16), (17): Xaa is A or G
  MOD_RES (18), (19), (20), (21): Xaa is A or G or is absent
KXSKVVMVTAKKXXXXXXXXXIKRIQVPRLDQPV

SEQ ID NO: 46943 - protein, 37 aa, Artificial Sequence
  GFR-binding peptide
  MOD_RES (34), (34): Xaa is C or S
  MOD_RES (12), (13), (14), (15), (16): Xaa is A or G
  MOD_RES (17), (18), (19), (20): Xaa is A or G or is absent
SRVVMNVTAKKXXXXXXXXXIKRVQVPRLKTPAXTPK

SEQ ID NO: 46944 - protein, 41 aa, Artificial Sequence
  GFR-binding peptide
  MOD_RES (1), (35), (36): Xaa is C or S
  MOD_RES (13), (14), (15), (16), (17): Xaa is A or G
  MOD_RES (18), (19), (20), (21): Xaa is A or G or is absent
XGEVVMDVQVEKXXXXXXXXXVKAMKVSRLETPVXXAKPIK

SEQ ID NO: 46945 - protein, 36 aa, Artificial Sequence
  GFR-binding peptide
  MOD_RES (1), (35), (36): Xaa is C or S
  MOD_RES (13), (14), (15), (16), (17): Xaa is A or G
  MOD_RES (18), (19), (20), (21): Xaa is A or G or is absent
XARVVMNVTAKKXXXXXXXXXIKRVQVPRLQTPAXX

SEQ ID NO: 46946 - protein, 41 aa, Artificial Sequence; identical to SEQ ID NO: 10273
  GFR-binding peptide
  MOD_RES (2), (4), (38): Xaa is C or S
  MOD_RES (16), (17), (18), (19), (20): Xaa is A or G
  MOD_RES (21), (22), (23), (24): Xaa is A or G or is absent

SEQ ID NO: 46947 - protein, 35 aa, Artificial Sequence; identical to SEQ ID NO: 10274
  GFR-binding peptide
  MOD_RES (1), (3), (34), (35): Xaa is C or S

SEQ ID NO: 46948 - protein, 38 aa, Artificial Sequence
  GFR-binding peptide
  MOD_RES (1), (32), (33): Xaa is C or S
XSKVIMVQVEKIKPTKGIVKAIKVSRLDQSVXXPSASA

SEQ ID NO: 46949 - protein, 39 aa, Artificial Sequence
  GFR-binding peptide
  MOD_RES (34), (34): Xaa is C or S
  MOD_RES (12), (13), (14), (15), (16): Xaa is A or G
  MOD_RES (17), (18), (19), (20): Xaa is A or G or is absent
KNHQLFNSLQEXXXXXXXXXYYLMTLPEEETPVXELGED

SEQ ID NO: 46950 - protein, 41 aa, Artificial Sequence
  GFR-binding peptide
  MOD_RES (2), (4), (37), (38): Xaa is C or S
  MOD_RES (15), (16), (17), (18), (19): Xaa is A or G
  MOD_RES (20), (21), (22), (23): Xaa is A or G or is absent
SXKXSKVIMSMEGIXXXXXXXXXMIQITINSLDQSVXXPSA

SEQ ID NO: 46951 - protein, 38 aa, Artificial Sequence; identical to SEQ ID NO: 10277
  GFR-binding peptide
  MOD_RES (1), (3), (37), (38): Xaa is C or S
  MOD_RES (15), (16), (17), (18), (19): Xaa is A or G
  MOD_RES (20), (21), (22), (23): Xaa is A or G or is absent

SEQ ID NO: 46952 - protein, 33 aa, Artificial Sequence
  GFR-binding peptide
  MOD_RES (32), (33): Xaa is C or S
GEVVMESMEGIVVKDYEDMIQMTINSLETPVXX

SEQ ID NO: 46953 - protein, 37 aa, Artificial Sequence
  GFR-binding peptide
  MOD_RES (37), (37): Xaa is C or S
ALHDELTNSLQEFIPKKRVIEYYLVTLPELQVQTPRX

SEQ ID NO: 46954 - protein, 38 aa, Artificial Sequence; identical to SEQ ID NO: 10280
  GFR-binding peptide
  MOD_RES (2), (36): Xaa is C or S
  MOD_RES (14), (15), (16), (17), (18): Xaa is A or G
  MOD_RES (19), (20), (21), (22): Xaa is A or G or is absent

SEQ ID NO: 46955 - protein, 31 aa, Artificial Sequence; identical to SEQ ID NO: 10281
  GFR-binding peptide

SEQ ID NO: 46956 - protein, 39 aa, Artificial Sequence; identical to SEQ ID NO: 10282
  GFR-binding peptide
  MOD_RES (1), (3), (35): Xaa is C or S

SEQ ID NO: 46957 - protein, 43 aa, Artificial Sequence
  GFR-binding peptide
  MOD_RES (1), (3), (37), (38): Xaa is C or S
  MOD_RES (15), (16), (17), (18), (19): Xaa is A or G
  MOD_RES (20), (21), (22), (23): Xaa is A or G or is absent
XGXSRVVMNVQVEKXXXXXXXXXVKAVKVSRLKTPAXXPKPVY

SEQ ID NO: 46958 - protein, 33 aa, Artificial Sequence; identical to SEQ ID NO: 17469
  GFR-binding peptide
  MOD_RES (33), (33): Xaa is C or S

SEQ ID NO: 46959 - protein, 35 aa, Artificial Sequence
  GFR-binding peptide
  MOD_RES (31), (32): Xaa is C or S
RVVMNVTAKKIVNSSDDIKRVQVPRLKTPAXXPKP

SEQ ID NO: 46960 - protein, 35 aa, Artificial Sequence
  GFR-binding peptide
  MOD_RES (2), (4): Xaa is C or S
HXGXARVVMNVQVEKIVNSSDDVKAVKVSRLQTPA

SEQ ID NO: 46961 - protein, 45 aa, Artificial Sequence
  GFR-binding peptide
  MOD_RES (2), (4), (41): Xaa is C or S
  MOD_RES (17), (18), (19), (20), (21): Xaa is A or G
  MOD_RES (22), (23), (24), (25): Xaa is A or G or is absent
EXKXALHDELTNSLQEXXXXXXXXXYYVVPLPELQVQTPRXQVNR

SEQ ID NO: 46962 - protein, 39 aa, Artificial Sequence
  GFR-binding peptide
  MOD_RES (1), (3), (36), (37): Xaa is C or S
  MOD_RES (14), (15), (16), (17), (18): Xaa is A or G
  MOD_RES (19), (20), (21), (22): Xaa is A or G or is absent
XKXSKVVMSMEGIXXXXXXXXXMIQITINSLDQPVXXPS

SEQ ID NO: 46963 - protein, 37 aa, Artificial Sequence; identical to SEQ ID NO: 10283
  GFR-binding peptide
  MOD_RES (1), (33): Xaa is C or S

SEQ ID NO: 46964 - protein, 34 aa, Artificial Sequence
  GFR-binding peptide
  MOD_RES (1), (3): Xaa is C or S
XGXGEVVMDVTAKKVVKENEDIKRMQVPRLETPV

SEQ ID NO: 46965 - protein, 39 aa, Artificial Sequence; identical to SEQ ID NO: 17472
  GFR-binding peptide
  MOD_RES (1), (38): Xaa is C or S
  MOD_RES (14), (15), (16), (17), (18): Xaa is A or G
  MOD_RES (19), (20), (21), (22): Xaa is A or G or is absent

SEQ ID NO: 46966 - protein, 35 aa, Artificial Sequence
  GFR-binding peptide
  MOD_RES (1), (35): Xaa is C or S
  MOD_RES (13), (14), (15), (16), (17): Xaa is A or G
  MOD_RES (18), (19), (20), (21): Xaa is A or G or is absent
XARVVMNVTAKKXXXXXXXXXIKRVQVPRLQTPAX

SEQ ID NO: 46967 - protein, 40 aa, Artificial Sequence
  GFR-binding peptide
  MOD_RES (2), (4), (37), (38): Xaa is C or S
  MOD_RES (15), (16), (17), (18), (19): Xaa is A or G
  MOD_RES (20), (21), (22), (23): Xaa is A or G or is absent
SXKXSKVIMSMEGIXXXXXXXXXMIQITINSLDQSVXXPS

SEQ ID NO: 46968 - protein, 39 aa, Artificial Sequence; identical to SEQ ID NO: 17474
  GFR-binding peptide
  MOD_RES (1), (35): Xaa is C or S
  MOD_RES (13), (14), (15), (16), (17): Xaa is A or G
  MOD_RES (18), (19), (20), (21): Xaa is A or G or is absent

SEQ ID NO: 46969 - protein, 43 aa, Artificial Sequence
  GFR-binding peptide
  MOD_RES (1), (3), (40): Xaa is C or S
  MOD_RES (16), (17), (18), (19), (20): Xaa is A or G
  MOD_RES (21), (22), (23), (24): Xaa is A or G or is absent
XKXALHDELTNSLQEXXXXXXXXXYYLVTLPELQVQTPRXQVN

SEQ ID NO: 46970 - protein, 32 aa, Artificial Sequence; identical to SEQ ID NO: 10291
  GFR-binding peptide
  MOD_RES (1), (32): Xaa is C or S

SEQ ID NO: 46971 - protein, 40 aa, Artificial Sequence
  GFR-binding peptide
  MOD_RES (2), (36): Xaa is C or S
  MOD_RES (14), (15), (16), (17), (18): Xaa is A or G
  MOD_RES (19), (20), (21), (22): Xaa is A or G or is absent
GXSRVVMNSMEGIXXXXXXXXXMIQVTINSLKTPAXTPKT

SEQ ID NO: 46972 - protein, 37 aa, Artificial Sequence; identical to SEQ ID NO: 10293
  GFR-binding peptide
  MOD_RES (1), (32), (33): Xaa is C or S

SEQ ID NO: 46973 - protein, 32 aa, Artificial Sequence; identical to SEQ ID NO: 10294
  GFR-binding peptide
  MOD_RES (31), (31): Xaa is C or S

SEQ ID NO: 46974 - protein, 42 aa, Artificial Sequence
  GFR-binding peptide
  MOD_RES (2), (4), (37), (38): Xaa is C or S
  MOD_RES (15), (16), (17), (18), (19): Xaa is A or G
  MOD_RES (20), (21), (22), (23): Xaa is A or G or is absent
SXKXSKVVMSMEGIXXXXXXXXXMIQITINSLDQPVXXPSAS

SEQ ID NO: 46975 - protein, 35 aa, Artificial Sequence; identical to SEQ ID NO: 10298
  GFR-binding peptide
  MOD_RES (1), (34), (35): Xaa is C or S
  MOD_RES (12), (13), (14), (15), (16): Xaa is A or G
  MOD_RES (17), (18), (19), (20): Xaa is A or G or is absent

SEQ ID NO: 46976 - protein, 43 aa, Artificial Sequence
  GFR-binding peptide
  MOD_RES (1), (3), (37): Xaa is C or S
  MOD_RES (15), (16), (17), (18), (19): Xaa is A or G
  MOD_RES (20), (21), (22), (23): Xaa is A or G or is absent
XEXKNHQLFNSLQEXXXXXXXXXYYVMPLPEEETPVXELGEDN

SEQ ID NO: 46977 - protein, 35 aa, Artificial Sequence; identical to SEQ ID NO: 10301
  GFR-binding peptide
  MOD_RES (2), (2): Xaa is C or S
  MOD_RES (14), (15), (16), (17), (18): Xaa is A or G
  MOD_RES (19), (20), (21), (22): Xaa is A or G or is absent

SEQ ID NO: 46978 - protein, 39 aa, Artificial Sequence
  GFR-binding peptide
  MOD_RES (2), (4), (35), (36): Xaa is C or S
SXKXSKVIMVTAKKIKPTKGIIKRIQVPRLDQSVXXPSA

SEQ ID NO: 46979 - protein, 33 aa, Artificial Sequence
  GFR-binding peptide
  MOD_RES (32), (32): Xaa is C or S
SRVVMNVTAKKIVNSSDDIKRVQVPRLKTPAXT

SEQ ID NO: 46980 - protein, 31 aa, Artificial Sequence
  GFR-binding peptide
  MOD_RES (31), (31): Xaa is C or S
EVVMEVQVEKVVKDYEDVKAMKVSRLETPVX

SEQ ID NO: 46981 - protein, 38 aa, Artificial Sequence
  GFR-binding peptide
  MOD_RES (2), (4), (37), (38): Xaa is C or S
  MOD_RES (15), (16), (17), (18), (19): Xaa is A or G
  MOD_RES (20), (21), (22), (23): Xaa is A or G or is absent
SXKXSKVIMVQVEKXXXXXXXXXVKAIKVSRLDQSVXX

SEQ ID NO: 46982 - protein, 34 aa, Artificial Sequence; identical to SEQ ID NO: 10302
  GFR-binding peptide
  MOD_RES (33), (34): Xaa is C or S
  MOD_RES (11), (12), (13), (14), (15): Xaa is A or G
  MOD_RES (16), (17), (18), (19): Xaa is A or G or is absent

SEQ ID NO: 46983 - protein, 38 aa, Artificial Sequence; identical to SEQ ID NO: 17485
  GFR-binding peptide
  MOD_RES (2), (4), (38): Xaa is C or S

SEQ ID NO: 46984 - protein, 39 aa, Artificial Sequence
  GFR-binding peptide
  MOD_RES (33), (34): Xaa is C or S
  MOD_RES (11), (12), (13), (14), (15): Xaa is A or G
  MOD_RES (16), (17), (18), (19): Xaa is A or G or is absent
RVVMNVTAKKXXXXXXXXXIKRVQVPRLKTPAXXPKPVY

SEQ ID NO: 46985 - protein, 44 aa, Artificial Sequence; identical to SEQ ID NO: 10304
  GFR-binding peptide
  MOD_RES (2), (4), (38), (39): Xaa is C or S
  MOD_RES (16), (17), (18), (19), (20): Xaa is A or G
  MOD_RES (21), (22), (23), (24): Xaa is A or G or is absent

SEQ ID NO: 46986 - protein, 38 aa, Artificial Sequence; identical to SEQ ID NO: 10305
  GFR-binding peptide
  MOD_RES (32), (33): Xaa is C or S

SEQ ID NO: 46987 - protein, 39 aa, Artificial Sequence; identical to SEQ ID NO: 17487
  GFR-binding peptide
  MOD_RES (1), (38): Xaa is C or S
  MOD_RES (14), (15), (16), (17), (18): Xaa is A or G
  MOD_RES (19), (20), (21), (22): Xaa is A or G or is absent

SEQ ID NO: 46988 - protein, 37 aa, Artificial Sequence; identical to SEQ ID NO: 10306
  GFR-binding peptide
  MOD_RES (1), (33), (34): Xaa is C or S

SEQ ID NO: 46989 - protein, 35 aa, Artificial Sequence
  GFR-binding peptide
  MOD_RES (35), (35): Xaa is C or S
HDELTNSLQEFIPKKRVIEYYVVPLPELQVQTPRX

SEQ ID NO: 46990 - protein, 37 aa, Artificial Sequence; identical to SEQ ID NO: 10307
  GFR-binding peptide
  MOD_RES (1), (3), (35), (36): Xaa is C or S

SEQ ID NO: 46991 - protein, 35 aa, Artificial Sequence; identical to SEQ ID NO: 10308
  GFR-binding peptide
  MOD_RES (1), (3), (35): Xaa is C or S

SEQ ID NO: 46992 - protein, 34 aa, Artificial Sequence
  GFR-binding peptide
  MOD_RES (31), (32): Xaa is C or S
SKVIMVQVEKIKPTKGIVKAIKVSRLDQSVXXPS

SEQ ID NO: 46993 - protein, 39 aa, Artificial Sequence; identical to SEQ ID NO: 17492
  GFR-binding peptide
  MOD_RES (2), (36): Xaa is C or S

SEQ ID NO: 46994 - protein, 44 aa, Artificial Sequence
  GFR-binding peptide
  MOD_RES (1), (3), (40): Xaa is C or S
  MOD_RES (16), (17), (18), (19), (20): Xaa is A or G
  MOD_RES (21), (22), (23), (24): Xaa is A or G or is absent
XKXALHDELTNSLQEXXXXXXXXXYYLVTLPELQVQTPRXQVNR

SEQ ID NO: 46995 - protein, 40 aa, Artificial Sequence
  GFR-binding peptide
  MOD_RES (1), (3), (37), (38): Xaa is C or S
  MOD_RES (15), (16), (17), (18), (19): Xaa is A or G
  MOD_RES (20), (21), (22), (23): Xaa is A or G or is absent
XGXSRVVMNSMEGIXXXXXXXXXMIQVTINSLKTPAXXPK

SEQ ID NO: 46996 - protein, 41 aa, Artificial Sequence
  GFR-binding peptide
  MOD_RES (2), (36): Xaa is C or S
  MOD_RES (14), (15), (16), (17), (18): Xaa is A or G
  MOD_RES (19), (20), (21), (22): Xaa is A or G or is absent
GXSRVVMNVQVEKXXXXXXXXXVKAVKVSRLKTPAXTPKTV

SEQ ID NO: 46997 - protein, 38 aa, Artificial Sequence
  GFR-binding peptide
  MOD_RES (1), (3): Xaa is C or S
XAXELHEELRNSLQELKPKKRVYEYYLVTLPEHHVRSP

SEQ ID NO: 46998 - protein, 37 aa, Artificial Sequence; identical to SEQ ID NO: 10310
  GFR-binding peptide
  MOD_RES (1), (3), (35), (36): Xaa is C or S

SEQ ID NO: 46999 - protein, 34 aa, Artificial Sequence; identical to SEQ ID NO: 10311
  GFR-binding peptide
  MOD_RES (32), (32): Xaa is C or S

SEQ ID NO: 47000 - protein, 35 aa, Artificial Sequence
  GFR-binding peptide
  MOD_RES (34), (34): Xaa is C or S
  MOD_RES (12), (13), (14), (15), (16): Xaa is A or G
  MOD_RES (17), (18), (19), (20): Xaa is A or G or is absent
SRVVMNSMEGIXXXXXXXXXMIQVTINSLKTPAXT

SEQ ID NO: 47001 - protein, 33 aa, Artificial Sequence; identical to SEQ ID NO: 10312
  GFR-binding peptide
  MOD_RES (31), (32): Xaa is C or S

SEQ ID NO: 47002 - protein, 41 aa, Artificial Sequence
  GFR-binding peptide
  MOD_RES (1), (3), (36), (37): Xaa is C or S
  MOD_RES (14), (15), (16), (17), (18): Xaa is A or G
  MOD_RES (19), (20), (21), (22): Xaa is A or G or is absent
XKXSKVVMVQVEKXXXXXXXXXVKAIKVSRLDQPVXXPSAS

SEQ ID NO: 47003 - protein, 38 aa, Artificial Sequence
  GFR-binding peptide
  MOD_RES (2), (4), (38): Xaa is C or S
  MOD_RES (16), (17), (18), (19), (20): Xaa is A or G
  MOD_RES (21), (22), (23), (24): Xaa is A or G or is absent
HXGXARVVMNSMEGIXXXXXXXXXMIQVTINSLQTPAX

SEQ ID NO: 47004 - protein, 33 aa, Artificial Sequence; identical to SEQ ID NO: 10314
  GFR-binding peptide
  MOD_RES (2), (2): Xaa is C or S

SEQ ID NO: 47005 - protein, 38 aa, Artificial Sequence; identical to SEQ ID NO: 36366
  GFR-binding peptide
  MOD_RES (2), (4), (35), (36): Xaa is C or S

SEQ ID NO: 47006 - protein, 36 aa, Artificial Sequence
  GFR-binding peptide
  MOD_RES (2), (4), (36): Xaa is C or S
HXGXARVVMNVQVEKIVNSSDDVKAVKVSRLQTPAX

SEQ ID NO: 47007 - protein, 39 aa, Artificial Sequence; identical to SEQ ID NO: 17498
  GFR-binding peptide
  MOD_RES (34), (34): Xaa is C or S

SEQ ID NO: 47008 - protein, 39 aa, Artificial Sequence
  GFR-binding peptide
  MOD_RES (36), (36): Xaa is C or S
LHEELRNSLQELKPKKRVYEYYLVTLPEHHVRSPQXKVS

SEQ ID NO: 47009 - protein, 35 aa, Artificial Sequence; identical to SEQ ID NO: 10317
  GFR-binding peptide
  MOD_RES (31), (32): Xaa is C or S

SEQ ID NO: 47010 - protein, 36 aa, Artificial Sequence; identical to SEQ ID NO: 10318
  GFR-binding peptide
  MOD_RES (2), (4): Xaa is C or S
  MOD_RES (15), (16), (17), (18), (19): Xaa is A or G
  MOD_RES (20), (21), (22), (23): Xaa is A or G or is absent

SEQ ID NO: 47011 - protein, 39 aa, Artificial Sequence
  GFR-binding peptide
  MOD_RES (33), (33): Xaa is C or S
  MOD_RES (11), (12), (13), (14), (15): Xaa is A or G
  MOD_RES (16), (17), (18), (19): Xaa is A or G or is absent
RVVMNSMEGIXXXXXXXXXMIQVTINSLKTPAXTPKTVH

SEQ ID NO: 47012 - protein, 34 aa, Artificial Sequence; identical to SEQ ID NO: 10320
  GFR-binding peptide
  MOD_RES (33), (34): Xaa is C or S
  MOD_RES (11), (12), (13), (14), (15): Xaa is A or G
  MOD_RES (16), (17), (18), (19): Xaa is A or G or is absent

SEQ ID NO: 47013 - protein, 36 aa, Artificial Sequence; identical to SEQ ID NO: 10321
  GFR-binding peptide
  MOD_RES (1), (35): Xaa is C or S
  MOD_RES (13), (14), (15), (16), (17): Xaa is A or G
  MOD_RES (18), (19), (20), (21): Xaa is A or G or is absent

SEQ ID NO: 47014 - protein, 35 aa, Artificial Sequence
  GFR-binding peptide
  MOD_RES (1), (33), (34): Xaa is C or S
XSRVVMNSMEGIIVNSSDDMIQVTINSLKTPAXXP

SEQ ID NO: 47015 - protein, 39 aa, Artificial Sequence
  GFR-binding peptide
  MOD_RES (37), (37): Xaa is C or S
ALHDELTNSLQEFIPKKRVIEYYVVPLPELQVQTPRXQV

SEQ ID NO: 47016 - protein, 40 aa, Artificial Sequence
  GFR-binding peptide
  MOD_RES (2), (4), (36), (37): Xaa is C or S
HXGXARVVMNSMEGIIVNSSDDMIQVTINSLQTPAXXPKP

SEQ ID NO: 47017 - protein, 37 aa, Artificial Sequence
  GFR-binding peptide
  MOD_RES (2), (35), (36): Xaa is C or S
  MOD_RES (13), (14), (15), (16), (17): Xaa is A or G
  MOD_RES (18), (19), (20), (21): Xaa is A or G or is absent
KXSKVIMVQVEKXXXXXXXXXVKAIKVSRLDQSVXXP

SEQ ID NO: 47018 - protein, 42 aa, Artificial Sequence
  GFR-binding peptide
  MOD_RES (2), (4), (41): Xaa is C or S
  MOD_RES (17), (18), (19), (20), (21): Xaa is A or G
  MOD_RES (22), (23), (24), (25): Xaa is A or G or is absent
EXKXALHDELTNSLQEXXXXXXXXXYYVVPLPELQVQTPRXQ

SEQ ID NO: 47019 - protein, 43 aa, Artificial Sequence; identical to SEQ ID NO: 17504
  GFR-binding peptide
  MOD_RES (1), (3), (40): Xaa is C or S

SEQ ID NO: 47020 - protein, 35 aa, Artificial Sequence
  GFR-binding peptide
  MOD_RES (1), (3), (34), (35): Xaa is C or S
XKXSKVIMVTAKKIKPTKGIIKRIQVPRLDQSVXX

SEQ ID NO: 47021 - protein, 44 aa, Artificial Sequence; identical to SEQ ID NO: 17507
  GFR-binding peptide
  MOD_RES (1), (3), (40): Xaa is C or S

SEQ ID NO: 47022 - protein, 35 aa, Artificial Sequence
  GFR-binding peptide
  MOD_RES (32), (33): Xaa is C or S
ARVVMNVTAKKIVNSSDDIKRVQVPRLQTPAXXPK

SEQ ID NO: 47023 - protein, 38 aa, Artificial Sequence; identical to SEQ ID NO: 10324
  GFR-binding peptide
  MOD_RES (1), (33), (34): Xaa is C or S

SEQ ID NO: 47024 - protein, 36 aa, Artificial Sequence
  GFR-binding peptide
ELHEELRNSLQELKPKKRVYEYYVVPLPEHHVRSPQ

SEQ ID NO: 47025 - protein, 35 aa, Artificial Sequence; identical to SEQ ID NO: 17511
  GFR-binding peptide
  MOD_RES (34), (34): Xaa is C or S
  MOD_RES (12), (13), (14), (15), (16): Xaa is A or G
  MOD_RES (17), (18), (19), (20): Xaa is A or G or is absent

SEQ ID NO: 47026 - protein, 37 aa, Artificial Sequence
  GFR-binding peptide
  MOD_RES (2), (36), (37): Xaa is C or S
  MOD_RES (14), (15), (16), (17), (18): Xaa is A or G
  MOD_RES (19), (20), (21), (22): Xaa is A or G or is absent
GXGEVVMDVQVEKXXXXXXXXXVKAMKVSRLETPVXX

SEQ ID NO: 47027 - protein, 41 aa, Artificial Sequence
  GFR-binding peptide
  MOD_RES (1), (38): Xaa is C or S
  MOD_RES (14), (15), (16), (17), (18): Xaa is A or G
  MOD_RES (19), (20), (21), (22): Xaa is A or G or is absent
XELHEELRNSLQEXXXXXXXXXYYVVPLPEHHVRSPQXKVS

SEQ ID NO: 47028 - protein, 37 aa, Artificial Sequence
  GFR-binding peptide
  MOD_RES (33), (34): Xaa is C or S
  MOD_RES (11), (12), (13), (14), (15): Xaa is A or G
  MOD_RES (16), (17), (18), (19): Xaa is A or G or is absent
EVVMEVTAKKXXXXXXXXXIKRMQVPRLETPVXXAKP

SEQ ID NO: 47029 - protein, 39 aa, Artificial Sequence
  GFR-binding peptide
  MOD_RES (1), (3): Xaa is C or S
XAXELHEELRNSLQELKPKKRVYEYYVVPLPEHHVRSPQ

SEQ ID NO: 47030 - protein, 36 aa, Artificial Sequence; identical to SEQ ID NO: 36384
  GFR-binding peptide
  MOD_RES (1), (3), (36): Xaa is C or S
  MOD_RES (14), (15), (16), (17), (18): Xaa is A or G
  MOD_RES (19), (20), (21), (22): Xaa is A or G or is absent

SEQ ID NO: 47031 - protein, 35 aa, Artificial Sequence
  GFR-binding peptide
  MOD_RES (1), (3), (34), (35): Xaa is C or S
XKXSRVIMVTAKKVKPKRGVIKRIQVPRLAQPVXX

SEQ ID NO: 47032 - protein, 40 aa, Artificial Sequence
  GFR-binding peptide
  MOD_RES (1), (35): Xaa is C or S
  MOD_RES (13), (14), (15), (16), (17): Xaa is A or G
  MOD_RES (18), (19), (20), (21): Xaa is A or G or is absent
XSRVVMNSMEGIXXXXXXXXXMIQVTINSLKTPAXTPKTV

SEQ ID NO: 47033 - protein, 35 aa, Artificial Sequence; identical to SEQ ID NO: 17515
  GFR-binding peptide
  MOD_RES (1), (35): Xaa is C or S

SEQ ID NO: 47034 - protein, 35 aa, Artificial Sequence
  GFR-binding peptide
  MOD_RES (1), (33), (34): Xaa is C or S
XGEVVMESMEGIVVKDYEDMIQMTINSLETPVXXA

SEQ ID NO: 47035 - protein, 38 aa, Artificial Sequence
  GFR-binding peptide
  MOD_RES (1), (3), (34), (35): Xaa is C or S
XKXSRVIMVTAKKVKPKRGVIKRIQVPRLAQPVXXPAA

SEQ ID NO: 47036 - protein, 39 aa, Artificial Sequence
  GFR-binding peptide
  MOD_RES (2), (4), (36), (37): Xaa is C or S
RXGXGEVVMDVQVEKVVKENEDVKAMKVSRLETPVXXAK

SEQ ID NO: 47037 - protein, 42 aa, Artificial Sequence
  GFR-binding peptide
  MOD_RES (2), (4), (41): Xaa is C or S
AXAXELHEELRNSLQELKPKKRVYEYYLVTLPEHHVRSPQXK

SEQ ID NO: 47038 - protein, 34 aa, Artificial Sequence
  GFR-binding peptide
  MOD_RES (34), (34): Xaa is C or S
  MOD_RES (12), (13), (14), (15), (16): Xaa is A or G
  MOD_RES (17), (18), (19), (20): Xaa is A or G or is absent
ARVVMNSMEGIXXXXXXXXXMIQVTINSLQTPAX

SEQ ID NO: 47039 - protein, 34 aa, Artificial Sequence
  GFR-binding peptide
  MOD_RES (1), (3), (34): Xaa is C or S
XKXSRVIMVTAKKVKPKRGVIKRIQVPRLAQPVX

SEQ ID NO: 47040 - protein, 39 aa, Artificial Sequence
  GFR-binding peptide
  MOD_RES (34), (35): Xaa is C or S
  MOD_RES (12), (13), (14), (15), (16): Xaa is A or G
  MOD_RES (17), (18), (19), (20): Xaa is A or G or is absent
ARVVMNVQVEKXXXXXXXXXVKAVKVSRLQTPAXXPKPV

SEQ ID NO: 47041 - protein, 37 aa, Artificial Sequence
  GFR-binding peptide
  MOD_RES (32), (32): Xaa is C or S
SRVVMNVQVEKIVNSSDDVKAVKVSRLKTPAXTPKTV

SEQ ID NO: 47042 - protein, 34 aa, Artificial Sequence; identical to SEQ ID NO: 10336
  GFR-binding peptide
  MOD_RES (1), (3), (34): Xaa is C or S

SEQ ID NO: 47043 - protein, 38 aa, Artificial Sequence; identical to SEQ ID NO: 10337
  GFR-binding peptide
  MOD_RES (2), (4), (36), (37): Xaa is C or S

SEQ ID NO: 47044 - protein, 40 aa, Artificial Sequence; identical to SEQ ID NO: 10338
  GFR-binding peptide
  MOD_RES (2), (4), (38), (39): Xaa is C or S
  MOD_RES (16), (17), (18), (19), (20): Xaa is A or G
  MOD_RES (21), (22), (23), (24): Xaa is A or G or is absent

SEQ ID NO: 47045 - protein, 40 aa, Artificial Sequence; identical to SEQ ID NO: 17526
  GFR-binding peptide
  MOD_RES (2), (4), (38): Xaa is C or S
  MOD_RES (16), (17), (18), (19), (20): Xaa is A or G
  MOD_RES (21), (22), (23), (24): Xaa is A or G or is absent

SEQ ID NO: 47046 - protein, 38 aa, Artificial Sequence; identical to SEQ ID NO: 10339
  GFR-binding peptide
  MOD_RES (1), (35): Xaa is C or S
  MOD_RES (13), (14), (15), (16), (17): Xaa is A or G
  MOD_RES (18), (19), (20), (21): Xaa is A or G or is absent

SEQ ID NO: 47047 - protein, 38 aa, Artificial Sequence; identical to SEQ ID NO: 17527
  GFR-binding peptide
  MOD_RES (2), (4): Xaa is C or S

SEQ ID NO: 47048 - protein, 37 aa, Artificial Sequence; identical to SEQ ID NO: 17528
  GFR-binding peptide
  MOD_RES (37), (37): Xaa is C or S

SEQ ID NO: 47049 - protein, 38 aa, Artificial Sequence
  GFR-binding peptide
  MOD_RES (2), (2): Xaa is C or S
  MOD_RES (15), (16), (17), (18), (19): Xaa is A or G
  MOD_RES (20), (21), (22), (23): Xaa is A or G or is absent
AXELHEELRNSLQEXXXXXXXXXYYLVTLPEHHVRSPQ

SEQ ID NO: 47050 - protein, 39 aa, Artificial Sequence
  GFR-binding peptide
  MOD_RES (1), (33), (34): Xaa is C or S
XARVVMNVQVEKIVNSSDDVKAVKVSRLQTPAXXPKPVT

SEQ ID NO: 47051 - protein, 40 aa, Artificial Sequence
  GFR-binding peptide
  MOD_RES (1), (34), (35): Xaa is C or S
  MOD_RES (12), (13), (14), (15), (16): Xaa is A or G
  MOD_RES (17), (18), (19), (20): Xaa is A or G or is absent
XSKVVMSMEGIXXXXXXXXXMIQITINSLDQPVXXPSASA

SEQ ID NO: 47052 - protein, 32 aa, Artificial Sequence
  GFR-binding peptide
  MOD_RES (1), (1): Xaa is C or S
XSRVVMNVQVEKIVNSSDDVKAVKVSRLKTPA

SEQ ID NO: 47053 - protein, 45 aa, Artificial Sequence; identical to SEQ ID NO: 17530
  GFR-binding peptide
  MOD_RES (2), (4), (41): Xaa is C or S
  MOD_RES (17), (18), (19), (20), (21): Xaa is A or G
  MOD_RES (22), (23), (24), (25): Xaa is A or G or is absent

SEQ ID NO: 47054 - protein, 43 aa, Artificial Sequence
  GFR-binding peptide
  MOD_RES (2), (4), (38), (39): Xaa is C or S
  MOD_RES (16), (17), (18), (19), (20): Xaa is A or G
  MOD_RES (21), (22), (23), (24): Xaa is A or G or is absent
HXGXARVVMNVTAKKXXXXXXXXXIKRVQVPRLQTPAXXPKPV

SEQ ID NO: 47055 - protein, 39 aa, Artificial Sequence
  GFR-binding peptide
  MOD_RES (1), (33), (34): Xaa is C or S
XGEVVMEVQVEKVVKDYEDVKAMKVSRLETPVXXAKPIS

SEQ ID NO: 47056 - protein, 39 aa, Artificial Sequence
  GFR-binding peptide
  MOD_RES (33), (33): Xaa is C or S
NHQLFNSLQEHQGQHPKIRYYLMTLPEEETPVXELGEDN

SEQ ID NO: 47057 - protein, 39 aa, Artificial Sequence
  GFR-binding peptide
  MOD_RES (33), (34): Xaa is C or S
  MOD_RES (11), (12), (13), (14), (15): Xaa is A or G
  MOD_RES (16), (17), (18), (19): Xaa is A or G or is absent
SRVIMVQVEKXXXXXXXXXVKAIKVSRLAQPVXXPAASA

SEQ ID NO: 47058 - protein, 33 aa, Artificial Sequence; identical to SEQ ID NO: 10343
  GFR-binding peptide
  MOD_RES (12), (13), (14), (15), (16): Xaa is A or G
  MOD_RES (17), (18), (19), (20): Xaa is A or G or is absent

SEQ ID NO: 47059 - protein, 34 aa, Artificial Sequence
  GFR-binding peptide
  MOD_RES (1), (1): Xaa is C or S
  MOD_RES (13), (14), (15), (16), (17): Xaa is A or G
  MOD_RES (18), (19), (20), (21): Xaa is A or G or is absent
XGEVVMEVTAKKXXXXXXXXXIKRMQVPRLETPV

SEQ ID NO: 47060 - protein, 39 aa, Artificial Sequence; identical to SEQ ID NO: 17532
  GFR-binding peptide
  MOD_RES (37), (37): Xaa is C or S

SEQ ID NO: 47061 - protein, 31 aa, Artificial Sequence
  GFR-binding peptide
ARVVMNVQVEKIVNSSDDVKAVKVSRLQTPA

SEQ ID NO: 47062 - protein, 34 aa, Artificial Sequence
  GFR-binding peptide
  MOD_RES (33), (34): Xaa is C or S
  MOD_RES (11), (12), (13), (14), (15): Xaa is A or G
  MOD_RES (16), (17), (18), (19): Xaa is A or G or is absent
RVVMNVQVEKXXXXXXXXXVKAVKVSRLQTPAXX

SEQ ID NO: 47063 - protein, 36 aa, Artificial Sequence
  GFR-binding peptide
  MOD_RES (2), (34), (35): Xaa is C or S
GXGEVVMDVQVEKVVKENEDVKAMKVSRLETPVXXA

SEQ ID NO: 47064 - protein, 42 aa, Artificial Sequence; identical to SEQ ID NO: 17533
  GFR-binding peptide
  MOD_RES (2), (39): Xaa is C or S
  MOD_RES (15), (16), (17), (18), (19): Xaa is A or G
  MOD_RES (20), (21), (22), (23): Xaa is A or G or is absent

SEQ ID NO: 47065 - protein, 38 aa, Artificial Sequence
  GFR-binding peptide
  MOD_RES (34), (34): Xaa is C or S
  MOD_RES (12), (13), (14), (15), (16): Xaa is A or G
  MOD_RES (17), (18), (19), (20): Xaa is A or G or is absent
SRVVMNVQVEKXXXXXXXXXVKAVKVSRLKTPAXTPKT

SEQ ID NO: 47066 - protein, 43 aa, Artificial Sequence
  GFR-binding peptide
  MOD_RES (2), (4), (38), (39): Xaa is C or S
  MOD_RES (16), (17), (18), (19), (20): Xaa is A or G
  MOD_RES (21), (22), (23), (24): Xaa is A or G or is absent
HXGXARVVMNVQVEKXXXXXXXXXVKAVKVSRLQTPAXXPKPV

SEQ ID NO: 47067 - protein, 43 aa, Artificial Sequence
  GFR-binding peptide
  MOD_RES (1), (3), (37), (38): Xaa is C or S
  MOD_RES (15), (16), (17), (18), (19): Xaa is A or G
  MOD_RES (20), (21), (22), (23): Xaa is A or G or is absent
XGXGEVVMESMEGIXXXXXXXXXMIQMTINSLETPVXXAKPIS

SEQ ID NO: 47068 - protein, 37 aa, Artificial Sequence; identical to SEQ ID NO: 10347
  GFR-binding peptide
  MOD_RES (2), (4), (35), (36): Xaa is C or S

SEQ ID NO: 47069 - protein, 37 aa, Artificial Sequence; identical to SEQ ID NO: 17538
  GFR-binding peptide
  MOD_RES (1), (1): Xaa is C or S

SEQ ID NO: 47070 - protein, 43 aa, Artificial Sequence
  GFR-binding peptide
  MOD_RES (1), (3), (37), (38): Xaa is C or S
  MOD_RES (15), (16), (17), (18), (19): Xaa is A or G
  MOD_RES (20), (21), (22), (23): Xaa is A or G or is absent
XGXGEVVMEVQVEKXXXXXXXXXVKAMKVSRLETPVXXAKPIS

SEQ ID NO: 47071 - protein, 37 aa, Artificial Sequence
  GFR-binding peptide
  MOD_RES (2), (4): Xaa is C or S
  MOD_RES (16), (17), (18), (19), (20): Xaa is A or G
  MOD_RES (21), (22), (23), (24): Xaa is A or G or is absent
RXEXKNHQLFNSLQEXXXXXXXXXYYVMPLPEEETPV

SEQ ID NO: 47072 - protein, 35 aa, Artificial Sequence
  GFR-binding peptide
  MOD_RES (33), (34): Xaa is C or S
  MOD_RES (11), (12), (13), (14), (15): Xaa is A or G
  MOD_RES (16), (17), (18), (19): Xaa is A or G or is absent
RVVMNSMEGIXXXXXXXXXMIQVTINSLQTPAXXP

SEQ ID NO: 47073 - protein, 34 aa, Artificial Sequence
  GFR-binding peptide
  MOD_RES (33), (33): Xaa is C or S
  MOD_RES (11), (12), (13), (14), (15): Xaa is A or G
  MOD_RES (16), (17), (18), (19): Xaa is A or G or is absent
RVVMNVTAKKXXXXXXXXXIKRVQVPRLKTPAXT

SEQ ID NO: 47074 - protein, 40 aa, Artificial Sequence
  GFR-binding peptide
  MOD_RES (2), (4), (35), (36): Xaa is C or S
SXKXSKVIMVQVEKIKPTKGIVKAIKVSRLDQSVXXPSAS

SEQ ID NO: 47075 - protein, 41 aa, Artificial Sequence
  GFR-binding peptide
  MOD_RES (2), (4), (37), (38): Xaa is C or S
  MOD_RES (15), (16), (17), (18), (19): Xaa is A or G
  MOD_RES (20), (21), (22), (23): Xaa is A or G or is absent
SXKXSKVVMSMEGIXXXXXXXXXMIQITINSLDQPVXXPSA

SEQ ID NO: 47076 - protein, 36 aa, Artificial Sequence
  GFR-binding peptide
  MOD_RES (31), (32): Xaa is C or S
RVVMNVTAKKIVNSSDDIKRVQVPRLQTPAXXPKPV

SEQ ID NO: 47077 - protein, 32 aa, Artificial Sequence
  GFR-binding peptide
  MOD_RES (31), (32): Xaa is C or S
EVVMDSMEGIVVKENEDMIQMTINSLETPVXX

SEQ ID NO: 47078 - protein, 37 aa, Artificial Sequence; identical to SEQ ID NO: 17540
  GFR-binding peptide
  MOD_RES (1), (3), (37): Xaa is C or S

SEQ ID NO: 47079 - protein, 41 aa, Artificial Sequence; identical to SEQ ID NO: 10351
  GFR-binding peptide
  MOD_RES (2), (4), (38), (39): Xaa is C or S
  MOD_RES (16), (17), (18), (19), (20): Xaa is A or G
  MOD_RES (21), (22), (23), (24): Xaa is A or G or is absent

SEQ ID NO: 47080 - protein, 36 aa, Artificial Sequence
  GFR-binding peptide
  MOD_RES (33), (33): Xaa is C or S
  MOD_RES (11), (12), (13), (14), (15): Xaa is A or G
  MOD_RES (16), (17), (18), (19): Xaa is A or G or is absent
NHQLFNSLQEXXXXXXXXXYYLMTLPEEETPVXELG

SEQ ID NO: 47081 - protein, 34 aa, Artificial Sequence; identical to SEQ ID NO: 17541
  GFR-binding peptide
  MOD_RES (12), (13), (14), (15), (16): Xaa is A or G
  MOD_RES (17), (18), (19), (20): Xaa is A or G or is absent

SEQ ID NO: 47082 - protein, 43 aa, Artificial Sequence
  GFR-binding peptide
  MOD_RES (2), (39): Xaa is C or S
AXELHEELRNSLQELKPKKRVYEYYLVTLPEHHVRSPQXKVSS

SEQ ID NO: 47083 - protein, 32 aa, Artificial Sequence; identical to SEQ ID NO: 10354
  GFR-binding peptide
  MOD_RES (31), (32): Xaa is C or S

SEQ ID NO: 47084 - protein, 37 aa, Artificial Sequence
  GFR-binding peptide
  MOD_RES (2), (4), (37): Xaa is C or S
  MOD_RES (15), (16), (17), (18), (19): Xaa is A or G
  MOD_RES (20), (21), (22), (23): Xaa is A or G or is absent
SXKXSKVVMSMEGIXXXXXXXXXMIQITINSLDQPVX

SEQ ID NO: 47085 - protein, 41 aa, Artificial Sequence
  GFR-binding peptide
  MOD_RES (1), (3), (40): Xaa is C or S
XAXELHEELRNSLQELKPKKRVYEYYVVPLPEHHVRSPQXK

SEQ ID NO: 47086 - protein, 36 aa, Artificial Sequence
  GFR-binding peptide
  MOD_RES (32), (33): Xaa is C or S
SRVVMNVTAKKIVNSSDDIKRVQVPRLKTPAXXPKP

SEQ ID NO: 47087 - protein, 33 aa, Artificial Sequence
  GFR-binding peptide
  MOD_RES (12), (13), (14), (15), (16): Xaa is A or G
  MOD_RES (17), (18), (19), (20): Xaa is A or G or is absent
ARVVMNSMEGIXXXXXXXXXMIQVTINSLQTPA

SEQ ID NO: 47088 - protein, 36 aa, Artificial Sequence
  GFR-binding peptide
  MOD_RES (1), (32), (33): Xaa is C or S
XSKVIMVTAKKIKPTKGIIKRIQVPRLDQSVXXPSA

SEQ ID NO: 47089 - protein, 37 aa, Artificial Sequence; identical to SEQ ID NO: 10358
  GFR-binding peptide
  MOD_RES (1), (35), (36): Xaa is C or S
  MOD_RES (13), (14), (15), (16), (17): Xaa is A or G
  MOD_RES (18), (19), (20), (21): Xaa is A or G or is absent

SEQ ID NO: 47090 - protein, 41 aa, Artificial Sequence
  GFR-binding peptide
  MOD_RES (1), (35): Xaa is C or S
  MOD_RES (13), (14), (15), (16), (17): Xaa is A or G
  MOD_RES (18), (19), (20), (21): Xaa is A or G or is absent
XKNHQLFNSLQEXXXXXXXXXYYLMTLPEEETPVXELGEDN

SEQ ID NO: 47091 - protein, 34 aa, Artificial Sequence; identical to SEQ ID NO: 10359
  GFR-binding peptide
  MOD_RES (33), (33): Xaa is C or S
  MOD_RES (11), (12), (13), (14), (15): Xaa is A or G
  MOD_RES (16), (17), (18), (19): Xaa is A or G or is absent

SEQ ID NO: 47092 - protein, 36 aa, Artificial Sequence
  GFR-binding peptide
  MOD_RES (2), (36): Xaa is C or S
  MOD_RES (14), (15), (16), (17), (18): Xaa is A or G
  MOD_RES (19), (20), (21), (22): Xaa is A or G or is absent
GXSRVVMNSMEGIXXXXXXXXXMIQVTINSLKTPAX

SEQ ID NO: 47093 - protein, 42 aa, Artificial Sequence
  GFR-binding peptide
  MOD_RES (1), (38): Xaa is C or S
XELHEELRNSLQELKPKKRVYEYYLVTLPEHHVRSPQXKVSS

SEQ ID NO: 47094 - protein, 42 aa, Artificial Sequence; identical to SEQ ID NO: 17549
  GFR-binding peptide
  MOD_RES (2), (39): Xaa is C or S
  MOD_RES (15), (16), (17), (18), (19): Xaa is A or G
  MOD_RES (20), (21), (22), (23): Xaa is A or G or is absent

SEQ ID NO: 47095 - protein, 41 aa, Artificial Sequence; identical to SEQ ID NO: 17550
  GFR-binding peptide
  MOD_RES (37), (37): Xaa is C or S
  MOD_RES (13), (14), (15), (16), (17): Xaa is A or G
  MOD_RES (18), (19), (20), (21): Xaa is A or G or is absent

SEQ ID NO: 47096 - protein, 36 aa, Artificial Sequence; identical to SEQ ID NO: 10365
  GFR-binding peptide
  MOD_RES (1), (35), (36): Xaa is C or S
  MOD_RES (13), (14), (15), (16), (17): Xaa is A or G
  MOD_RES (18), (19), (20), (21): Xaa is A or G or is absent

SEQ ID NO: 47097 - protein, 44 aa, Artificial Sequence; identical to SEQ ID NO: 10366
  GFR-binding peptide
  MOD_RES (2), (4), (38), (39): Xaa is C or S
  MOD_RES (16), (17), (18), (19), (20): Xaa is A or G
  MOD_RES (21), (22), (23), (24): Xaa is A or G or is absent

SEQ ID NO: 47098 - protein, 43 aa, Artificial Sequence; identical to SEQ ID NO: 17553
  GFR-binding peptide
  MOD_RES (2), (39): Xaa is C or S

SEQ ID NO: 47099 - protein, 41 aa, Artificial Sequence; identical to SEQ ID NO: 10368
  GFR-binding peptide
  MOD_RES (2), (36), (37): Xaa is C or S
  MOD_RES (14), (15), (16), (17), (18): Xaa is A or G
  MOD_RES (19), (20), (21), (22): Xaa is A or G or is absent

SEQ ID NO: 47100 - protein, 37 aa, Artificial Sequence
  GFR-binding peptide
  MOD_RES (2), (36), (37): Xaa is C or S
  MOD_RES (14), (15), (16), (17), (18): Xaa is A or G
  MOD_RES (19), (20), (21), (22): Xaa is A or G or is absent
GXARVVMNVQVEKXXXXXXXXXVKAVKVSRLQTPAXX

SEQ ID NO: 47101 - protein, 32 aa, Artificial Sequence; identical to SEQ ID NO: 36456
  GFR-binding peptide
  MOD_RES (1), (32): Xaa is C or S

SEQ ID NO: 47102 - protein, 34 aa, Artificial Sequence
  GFR-binding peptide
  MOD_RES (31), (32): Xaa is C or S
RVVMNVTAKKIVNSSDDIKRVQVPRLQTPAXXPK

SEQ ID NO: 47103 - protein, 35 aa, Artificial Sequence
  GFR-binding peptide
  MOD_RES (33), (33): Xaa is C or S
  MOD_RES (11), (12), (13), (14), (15): Xaa is A or G
  MOD_RES (16), (17), (18), (19): Xaa is A or G or is absent
RVVMNVTAKKXXXXXXXXXIKRVQVPRLKTPAXTP

SEQ ID NO: 47104 - protein, 39 aa, Artificial Sequence
  GFR-binding peptide
  MOD_RES (33), (34): Xaa is C or S
  MOD_RES (11), (12), (13), (14), (15): Xaa is A or G
  MOD_RES (16), (17), (18), (19): Xaa is A or G or is absent
EVVMESMEGIXXXXXXXXXMIQMTINSLETPVXXAKPIS

SEQ ID NO: 47105 - protein, 35 aa, Artificial Sequence
  GFR-binding peptide
  MOD_RES (32), (33): Xaa is C or S
SRVVMNVTAKKIVNSSDDIKRVQVPRLKTPAXXPK

SEQ ID NO: 47106 - protein, 33 aa, Artificial Sequence
  GFR-binding peptide
  MOD_RES (31), (32): Xaa is C or S
RVVMNVTAKKIVNSSDDIKRVQVPRLKTPAXXP

SEQ ID NO: 47107 - protein, 38 aa, Artificial Sequence; identical to SEQ ID NO: 17556
  GFR-binding peptide
  MOD_RES (2), (2): Xaa is C or S

SEQ ID NO: 47108 - protein, 41 aa, Artificial Sequence; identical to SEQ ID NO: 17558
  GFR-binding peptide
  MOD_RES (37), (37): Xaa is C or S

SEQ ID NO: 47109 - protein, 35 aa, Artificial Sequence
  GFR-binding peptide
  MOD_RES (1), (1): Xaa is C or S
XELHEELRNSLQELKPKKRVYEYYLVTLPEHHVRS

SEQ ID NO: 47110 - protein, 33 aa, Artificial Sequence
  GFR-binding peptide
  MOD_RES (1), (1): Xaa is C or S
  MOD_RES (12), (13), (14), (15), (16): Xaa is A or G
  MOD_RES (17), (18), (19), (20): Xaa is A or G or is absent
XSRVIMSMEGIXXXXXXXXXMIQITINSLAQPV

SEQ ID NO: 47111 - protein, 38 aa, Artificial Sequence; identical to SEQ ID NO: 10377
  GFR-binding peptide
  MOD_RES (1), (3), (35): Xaa is C or S

SEQ ID NO: 47112 - protein, 36 aa, Artificial Sequence; identical to SEQ ID NO: 17565
  GFR-binding peptide
  MOD_RES (2), (2): Xaa is C or S
  MOD_RES (15), (16), (17), (18), (19): Xaa is A or G
  MOD_RES (20), (21), (22), (23): Xaa is A or G or is absent

SEQ ID NO: 47113 - protein, 38 aa, Artificial Sequence
  GFR-binding peptide
  MOD_RES (1), (38): Xaa is C or S
  MOD_RES (14), (15), (16), (17), (18): Xaa is A or G
  MOD_RES (19), (20), (21), (22): Xaa is A or G or is absent
XELHEELRNSLQEXXXXXXXXXYYVVPLPEHHVRSPQX

SEQ ID NO: 47114 - protein, 38 aa, Artificial Sequence; identical to SEQ ID NO: 10381
  GFR-binding peptide
  MOD_RES (1), (3), (35), (36): Xaa is C or S

SEQ ID NO: 47115 - protein, 34 aa, Artificial Sequence
  GFR-binding peptide
  MOD_RES (1), (1): Xaa is C or S
  MOD_RES (13), (14), (15), (16), (17): Xaa is A or G
  MOD_RES (18), (19), (20), (21): Xaa is A or G or is absent
XSRVVMNVTAKKXXXXXXXXXIKRVQVPRLKTPA

SEQ ID NO: 47116 - protein, 43 aa, Artificial Sequence
  GFR-binding peptide
  MOD_RES (2), (4), (37), (38): Xaa is C or S
  MOD_RES (15), (16), (17), (18), (19): Xaa is A or G
  MOD_RES (20), (21), (22), (23): Xaa is A or G or is absent
SXKXSRVIMVQVEKXXXXXXXXXVKAIKVSRLAQPVXXPAASA

SEQ ID NO: 47117 - protein, 35 aa, Artificial Sequence
  GFR-binding peptide
  MOD_RES (34), (35): Xaa is C or S
  MOD_RES (12), (13), (14), (15), (16): Xaa is A or G
  MOD_RES (17), (18), (19), (20): Xaa is A or G or is absent
GEVVMESMEGIXXXXXXXXXMIQMTINSLETPVXX

SEQ ID NO: 47118 - protein, 37 aa, Artificial Sequence; identical to SEQ ID NO: 17569
  GFR-binding peptide
  MOD_RES (1), (1): Xaa is C or S

SEQ ID NO: 47119 - protein, 36 aa, Artificial Sequence
  GFR-binding peptide
  MOD_RES (1), (3), (35), (36): Xaa is C or S
XGXARVVMNVQVEKIVNSSDDVKAVKVSRLQTPAXX

SEQ ID NO: 47120 - protein, 31 aa, Artificial Sequence
  GFR-binding peptide
  MOD_RES (31), (31): Xaa is C or S
RVVMNVTAKKIVNSSDDIKRVQVPRLKTPAX

SEQ ID NO: 47121 - protein, 33 aa, Artificial Sequence
  GFR-binding peptide
  MOD_RES (1), (3): Xaa is C or S
XKXSRVIMVQVEKVKPKRGVVKAIKVSRLAQPV

SEQ ID NO: 47122 - protein, 39 aa, Artificial Sequence
  GFR-binding peptide
  MOD_RES (34), (35): Xaa is C or S
  MOD_RES (12), (13), (14), (15), (16): Xaa is A or G
  MOD_RES (17), (18), (19), (20): Xaa is A or G or is absent
GEVVMDVTAKKXXXXXXXXXIKRMQVPRLETPVXXAKPI

SEQ ID NO: 47123 - protein, 37 aa, Artificial Sequence
  GFR-binding peptide
  MOD_RES (31), (32): Xaa is C or S
EVVMDVTAKKVVKENEDIKRMQVPRLETPVXXAKPIK

SEQ ID NO: 47124 - protein, 37 aa, Artificial Sequence; identical to SEQ ID NO: 17574
  GFR-binding peptide
  MOD_RES (35), (35): Xaa is C or S
  MOD_RES (11), (12), (13), (14), (15): Xaa is A or G
  MOD_RES (16), (17), (18), (19): Xaa is A or G or is absent

SEQ ID NO: 47125 - protein, 39 aa, Artificial Sequence
  GFR-binding peptide
  MOD_RES (2), (4), (36), (37): Xaa is C or S
HXGXARVVMNVTAKKIVNSSDDIKRVQVPRLQTPAXXPK

SEQ ID NO: 47126 - protein, 37 aa, Artificial Sequence
  GFR-binding peptide
  MOD_RES (31), (32): Xaa is C or S
RVVMNSMEGIIVNSSDDMIQVTINSLKTPAXXPKPVY

SEQ ID NO: 47127 - protein, 31 aa, Artificial Sequence
  GFR-binding peptide
  MOD_RES (1), (1): Xaa is C or S
XSKVIMVQVEKIKPTKGIVKAIKVSRLDQSV

SEQ ID NO: 47128 - protein, 36 aa, Artificial Sequence; identical to SEQ ID NO: 17575
  GFR-binding peptide
  MOD_RES (34), (34): Xaa is C or S
  MOD_RES (12), (13), (14), (15), (16): Xaa is A or G
  MOD_RES (17), (18), (19), (20): Xaa is A or G or is absent

SEQ ID NO: 47129 - protein, 37 aa, Artificial Sequence
  GFR-binding peptide
  MOD_RES (1), (32), (33): Xaa is C or S
XSKVIMVQVEKIKPTKGIVKAIKVSRLDQSVXXPSAS

SEQ ID NO: 47130 - protein, 38 aa, Artificial Sequence
  GFR-binding peptide
  MOD_RES (1), (33): Xaa is C or S
XSRVVMNVTAKKIVNSSDDIKRVQVPRLKTPAXTPKTV

SEQ ID NO: 47131 - protein, 41 aa, Artificial Sequence
  GFR-binding peptide
  MOD_RES (2), (4), (35), (36): Xaa is C or S
SXKXSKVIMVTAKKIKPTKGIIKRIQVPRLDQSVXXPSASA

SEQ ID NO: 47132 - protein, 37 aa, Artificial Sequence
  GFR-binding peptide
  MOD_RES (1), (3), (35), (36): Xaa is C or S
XGXSRVVMNVQVEKIVNSSDDVKAVKVSRLKTPAXXP

SEQ ID NO: 47133 - protein, 38 aa, Artificial Sequence; identical to SEQ ID NO: 10390
  GFR-binding peptide
  MOD_RES (1), (32), (33): Xaa is C or S

SEQ ID NO: 47134 - protein, 44 aa, Artificial Sequence; identical to SEQ ID NO: 17578
  GFR-binding peptide
  MOD_RES (1), (3), (40): Xaa is C or S
  MOD_RES (16), (17), (18), (19), (20): Xaa is A or G
  MOD_RES (21), (22), (23), (24): Xaa is A or G or is absent

SEQ ID NO: 47135 - protein, 33 aa, Artificial Sequence
  GFR-binding peptide
  MOD_RES (1), (3): Xaa is C or S
XKXSKVVMSMEGIVKPTRGVMIQITINSLDQPV

SEQ ID NO: 47136 - protein, 33 aa, Artificial Sequence; identical to SEQ ID NO: 10393
  GFR-binding peptide
  MOD_RES (2), (2): Xaa is C or S

SEQ ID NO: 47137 - protein, 35 aa, Artificial Sequence
  GFR-binding peptide
  MOD_RES (35), (35): Xaa is C or S
HEELRNSLQELKPKKRVYEYYLVTLPEHHVRSPQX

SEQ ID NO: 47138 - protein, 43 aa, Artificial Sequence
  GFR-binding peptide
  MOD_RES (1), (3), (40): Xaa is C or S
  MOD_RES (16), (17), (18), (19), (20): Xaa is A or G
  MOD_RES (21), (22), (23), (24): Xaa is A or G or is absent
XAXELHEELRNSLQEXXXXXXXXXYYLVTLPEHHVRSPQXKVS

SEQ ID NO: 47139 - protein, 38 aa, Artificial Sequence; identical to SEQ ID NO: 17581
  GFR-binding peptide
  MOD_RES (2), (2): Xaa is C or S
  MOD_RES (15), (16), (17), (18), (19): Xaa is A or G
  MOD_RES (20), (21), (22), (23): Xaa is A or G or is absent

SEQ ID NO: 47140 - protein, 37 aa, Artificial Sequence
  GFR-binding peptide
  MOD_RES (33), (33): Xaa is C or S
  MOD_RES (11), (12), (13), (14), (15): Xaa is A or G
  MOD_RES (16), (17), (18), (19): Xaa is A or G or is absent
RVVMNSMEGIXXXXXXXXXMIQVTINSLKTPAXTPKT

SEQ ID NO: 47141 - protein, 39 aa, Artificial Sequence; identical to SEQ ID NO: 36495
  GFR-binding peptide
  MOD_RES (1), (3), (34), (35): Xaa is C or S

SEQ ID NO: 47142 - protein, 37 aa, Artificial Sequence
  GFR-binding peptide
  MOD_RES (36), (36): Xaa is C or S
  MOD_RES (12), (13), (14), (15), (16): Xaa is A or G
  MOD_RES (17), (18), (19), (20): Xaa is A or G or is absent
LHEELRNSLQEXXXXXXXXXYYLVTLPEHHVRSPQXK

SEQ ID NO: 47143 - protein, 39 aa, Artificial Sequence; identical to SEQ ID NO: 10395
  GFR-binding peptide
  MOD_RES (2), (4), (38): Xaa is C or S
  MOD_RES (16), (17), (18), (19), (20): Xaa is A or G
  MOD_RES (21), (22), (23), (24): Xaa is A or G or is absent

SEQ ID NO: 47144 - protein, 38 aa, Artificial Sequence; identical to SEQ ID NO: 10396
  GFR-binding peptide
  MOD_RES (1), (3), (37), (38): Xaa is C or S
  MOD_RES (15), (16), (17), (18), (19): Xaa is A or G
  MOD_RES (20), (21), (22), (23): Xaa is A or G or is absent

SEQ ID NO: 47145 - protein, 35 aa, Artificial Sequence
  GFR-binding peptide
  MOD_RES (2), (35): Xaa is C or S
  MOD_RES (13), (14), (15), (16), (17): Xaa is A or G
  MOD_RES (18), (19), (20), (21): Xaa is A or G or is absent
KXSRVIMVTAKKXXXXXXXXXIKRIQVPRLAQPVX

SEQ ID NO: 47146 - protein, 37 aa, Artificial Sequence; identical to SEQ ID NO: 17582
  GFR-binding peptide
  MOD_RES (36), (36): Xaa is C or S
  MOD_RES (12), (13), (14), (15), (16): Xaa is A or G
  MOD_RES (17), (18), (19), (20): Xaa is A or G or is absent

SEQ ID NO: 47147 - protein, 36 aa, Artificial Sequence; identical to SEQ ID NO: 10397
  GFR-binding peptide
  MOD_RES (1), (3), (34), (35): Xaa is C or S

SEQ ID NO: 47148 - protein, 38 aa, Artificial Sequence; identical to SEQ ID NO: 17584
  GFR-binding peptide
  MOD_RES (37), (37): Xaa is C or S
  MOD_RES (13), (14), (15), (16), (17): Xaa is A or G
  MOD_RES (18), (19), (20), (21): Xaa is A or G or is absent

SEQ ID NO: 47149 - protein, 35 aa, Artificial Sequence; identical to SEQ ID NO: 36500
  GFR-binding peptide
  MOD_RES (1), (3): Xaa is C or S
  MOD_RES (14), (15), (16), (17), (18): Xaa is A or G
  MOD_RES (19), (20), (21), (22): Xaa is A or G or is absent

SEQ ID NO: 47150 - protein, 38 aa, Artificial Sequence
  GFR-binding peptide
  MOD_RES (2), (36): Xaa is C or S
  MOD_RES (14), (15), (16), (17), (18): Xaa is A or G
  MOD_RES (19), (20), (21), (22): Xaa is A or G or is absent
GXSRVVMNVQVEKXXXXXXXXXVKAVKVSRLKTPAXTP

SEQ ID NO: 47151 - protein, 40 aa, Artificial Sequence
  GFR-binding peptide
  MOD_RES (2), (4), (38), (39): Xaa is C or S
  MOD_RES (16), (17), (18), (19), (20): Xaa is A or G
  MOD_RES (21), (22), (23), (24): Xaa is A or G or is absent
HXGXSRVVMNSMEGIXXXXXXXXXMIQVTINSLKTPAXXP

SEQ ID NO: 47152 - protein, 31 aa, Artificial Sequence
  GFR-binding peptide
  MOD_RES (31), (31): Xaa is C or S
SRVIMSMEGIVKPKRGVMIQITINSLAQPVX

SEQ ID NO: 47153 - protein, 38 aa, Artificial Sequence; identical to SEQ ID NO: 10399
  GFR-binding peptide
  MOD_RES (1), (3), (35), (36): Xaa is C or S

SEQ ID NO: 47154 - protein, 43 aa, Artificial Sequence
  GFR-binding peptide
  MOD_RES (2), (4), (38), (39): Xaa is C or S
  MOD_RES (16), (17), (18), (19), (20): Xaa is A or G
  MOD_RES (21), (22), (23), (24): Xaa is A or G or is absent
HXGXSRVVMNSMEGIXXXXXXXXXMIQVTINSLKTPAXXPKPV

SEQ ID NO: 47155 - protein, 40 aa, Artificial Sequence
  GFR-binding peptide
  MOD_RES (2), (4), (37), (38): Xaa is C or S
  MOD_RES (15), (16), (17), (18), (19): Xaa is A or G
  MOD_RES (20), (21), (22), (23): Xaa is A or G or is absent
SXKXSKVVMSMEGIXXXXXXXXXMIQITINSLDQPVXXPS

SEQ ID NO: 47156 - protein, 43 aa, Artificial Sequence; identical to SEQ ID NO: 17586
  GFR-binding peptide
  MOD_RES (1), (3), (37): Xaa is C or S

SEQ ID NO: 47157 - protein, 35 aa, Artificial Sequence; identical to SEQ ID NO: 10401
  GFR-binding peptide
  MOD_RES (31), (32): Xaa is C or S

SEQ ID NO: 47158 - protein, 34 aa, Artificial Sequence; identical to SEQ ID NO: 10402
  GFR-binding peptide
  MOD_RES (2), (34): Xaa is C or S

SEQ ID NO: 47159 - protein, 35 aa, Artificial Sequence; identical to SEQ ID NO: 17591
  GFR-binding peptide
  MOD_RES (1), (1): Xaa is C or S
  MOD_RES (14), (15), (16), (17), (18): Xaa is A or G
  MOD_RES (19), (20), (21), (22): Xaa is A or G or is absent

SEQ ID NO: 47160 - protein, 38 aa, Artificial Sequence
  GFR-binding peptide
  MOD_RES (1), (34), (35): Xaa is C or S
  MOD_RES (12), (13), (14), (15), (16): Xaa is A or G
  MOD_RES (17), (18), (19), (20): Xaa is A or G or is absent
XSKVIMVQVEKXXXXXXXXXVKAIKVSRLDQSVXXPSA

SEQ ID NO: 47161 - protein, 41 aa, Artificial Sequence; identical to SEQ ID NO: 17592
  GFR-binding peptide
  MOD_RES (1), (38): Xaa is C or S
  MOD_RES (14), (15), (16), (17), (18): Xaa is A or G
  MOD_RES (19), (20), (21), (22): Xaa is A or G or is absent

SEQ ID NO: 47162 - protein, 38 aa, Artificial Sequence; identical to SEQ ID NO: 10406
  GFR-binding peptide
  MOD_RES (1), (35), (36): Xaa is C or S
  MOD_RES (13), (14), (15), (16), (17): Xaa is A or G
  MOD_RES (18), (19), (20), (21): Xaa is A or G or is absent

SEQ ID NO: 47163 - protein, 33 aa, Artificial Sequence
  GFR-binding peptide
  MOD_RES (1), (32), (33): Xaa is C or S
XSKVVMVTAKKVKPTRGVIKRIQVPRLDQPVXX

SEQ ID NO: 47164 - protein, 40 aa, Artificial Sequence; identical to SEQ ID NO: 36514
  GFR-binding peptide
  MOD_RES (2), (35), (36): Xaa is C or S
  MOD_RES (13), (14), (15), (16), (17): Xaa is A or G
  MOD_RES (18), (19), (20), (21): Xaa is A or G or is absent

SEQ ID NO: 47165 - protein, 32 aa, Artificial Sequence
  GFR-binding peptide
  MOD_RES (2), (2): Xaa is C or S
KXSKVVMVTAKKVKPTRGVIKRIQVPRLDQPV

SEQ ID NO: 47166 - protein, 39 aa, Artificial Sequence
  GFR-binding peptide
  MOD_RES (1), (3), (37), (38): Xaa is C or S
  MOD_RES (15), (16), (17), (18), (19): Xaa is A or G
  MOD_RES (20), (21), (22), (23): Xaa is A or G or is absent
XGXGEVVMDVQVEKXXXXXXXXXVKAMKVSRLETPVXXA

SEQ ID NO: 47167 - protein, 39 aa, Artificial Sequence; identical to SEQ ID NO: 17599
  GFR-binding peptide
  MOD_RES (1), (38): Xaa is C or S

SEQ ID NO: 47168 - protein, 39 aa, Artificial Sequence
  GFR-binding peptide
  MOD_RES (37), (37): Xaa is C or S
ELHEELRNSLQELKPKKRVYEYYLVTLPEHHVRSPQXKV

SEQ ID NO: 47169 - protein, 40 aa, Artificial Sequence
  GFR-binding peptide
  MOD_RES (2), (34), (35): Xaa is C or S
GXARVVMNVTAKKIVNSSDDIKRVQVPRLQTPAXXPKPVT

SEQ ID NO: 47170 - protein, 37 aa, Artificial Sequence
  GFR-binding peptide
  MOD_RES (1), (3), (34), (35): Xaa is C or S
XKXSRVIMVQVEKVKPKRGVVKAIKVSRLAQPVXXPA

SEQ ID NO: 47171 - protein, 43 aa, Artificial Sequence; identical to SEQ ID NO: 17605
  GFR-binding peptide
  MOD_RES (1), (3), (37): Xaa is C or S

SEQ ID NO: 47172 - protein, 38 aa, Artificial Sequence; identical to SEQ ID NO: 17606
  GFR-binding peptide
  MOD_RES (35), (35): Xaa is C or S

SEQ ID NO: 47173 - protein, 37 aa, Artificial Sequence
  GFR-binding peptide
  MOD_RES (1), (33): Xaa is C or S
XSRVVMNSMEGIIVNSSDDMIQVTINSLKTPAXTPKT

SEQ ID NO: 47174 - protein, 33 aa, Artificial Sequence; identical to SEQ ID NO: 10419
  GFR-binding peptide
  MOD_RES (1), (33): Xaa is C or S

SEQ ID NO: 47175 - protein, 30 aa, Artificial Sequence
  GFR-binding peptide
EVVMDVTAKKVVKENEDIKRMQVPRLETPV

SEQ ID NO: 47176 - protein, 40 aa, Artificial Sequence; identical to SEQ ID NO: 10421
  GFR-binding peptide
  MOD_RES (2), (4), (37), (38): Xaa is C or S
  MOD_RES (15), (16), (17), (18), (19): Xaa is A or G
  MOD_RES (20), (21), (22), (23): Xaa is A or G or is absent

SEQ ID NO: 47177 - protein, 38 aa, Artificial Sequence; identical to SEQ ID NO: 10422
  GFR-binding peptide
  MOD_RES (33), (33): Xaa is C or S
  MOD_RES (11), (12), (13), (14), (15): Xaa is A or G
  MOD_RES (16), (17), (18), (19): Xaa is A or G or is absent

SEQ ID NO: 47178 - protein, 38 aa, Artificial Sequence
  GFR-binding peptide
  MOD_RES (2), (4): Xaa is C or S
AXAXELHEELRNSLQELKPKKRVYEYYVVPLPEHHVRS

SEQ ID NO: 47179 - protein, 39 aa, Artificial Sequence; identical to SEQ ID NO: 10423
  GFR-binding peptide
  MOD_RES (1), (33), (34): Xaa is C or S

SEQ ID NO: 47180 - protein, 42 aa, Artificial Sequence
  GFR-binding peptide
  MOD_RES (1), (38): Xaa is C or S
  MOD_RES (14), (15), (16), (17), (18): Xaa is A or G
  MOD_RES (19), (20), (21), (22): Xaa is A or G or is absent
XALHDELTNSLQEXXXXXXXXXYYLVTLPELQVQTPRXQVNR

SEQ ID NO: 47181 - protein, 36 aa, Artificial Sequence; identical to SEQ ID NO: 10424
  GFR-binding peptide
  MOD_RES (32), (33): Xaa is C or S

SEQ ID NO: 47182 - protein, 42 aa, Artificial Sequence; identical to SEQ ID NO: 10425
  GFR-binding peptide
  MOD_RES (2), (4), (38), (39): Xaa is C or S
  MOD_RES (16), (17), (18), (19), (20): Xaa is A or G
  MOD_RES (21), (22), (23), (24): Xaa is A or G or is absent

SEQ ID NO: 47183 - protein, 40 aa, Artificial Sequence
  GFR-binding peptide
  MOD_RES (2), (4), (37), (38): Xaa is C or S
  MOD_RES (15), (16), (17), (18), (19): Xaa is A or G
  MOD_RES (20), (21), (22), (23): Xaa is A or G or is absent
SXKXSKVVMVTAKKXXXXXXXXXIKRIQVPRLDQPVXXPS

SEQ ID NO: 47184 - protein, 34 aa, Artificial Sequence; identical to SEQ ID NO: 10426
  GFR-binding peptide
  MOD_RES (2), (33), (34): Xaa is C or S

SEQ ID NO: 47185 - protein, 34 aa, Artificial Sequence
  GFR-binding peptide
  MOD_RES (1), (33), (34): Xaa is C or S
XSRVVMNSMEGIIVNSSDDMIQVTINSLKTPAXX

SEQ ID NO: 47186 - protein, 42 aa, Artificial Sequence; identical to SEQ ID NO: 17611
  GFR-binding peptide
  MOD_RES (2), (4), (38): Xaa is C or S
  MOD_RES (16), (17), (18), (19), (20): Xaa is A or G
  MOD_RES (21), (22), (23), (24): Xaa is A or G or is absent

SEQ ID NO: 47187 - protein, 39 aa, Artificial Sequence
  GFR-binding peptide
  MOD_RES (1), (35), (36): Xaa is C or S
  MOD_RES (13), (14), (15), (16), (17): Xaa is A or G
  MOD_RES (18), (19), (20), (21): Xaa is A or G or is absent
XARVVMNSMEGIXXXXXXXXXMIQVTINSLQTPAXXPKP

SEQ ID NO: 47188 - protein, 37 aa, Artificial Sequence; identical to SEQ ID NO: 17613
  GFR-binding peptide
  MOD_RES (36), (36): Xaa is C or S
  MOD_RES (12), (13), (14), (15), (16): Xaa is A or G
  MOD_RES (17), (18), (19), (20): Xaa is A or G or is absent

SEQ ID NO: 47189 - protein, 36 aa, Artificial Sequence; identical to SEQ ID NO: 17614
  GFR-binding peptide
  MOD_RES (33), (33): Xaa is C or S
  MOD_RES (11), (12), (13), (14), (15): Xaa is A or G
  MOD_RES (16), (17), (18), (19): Xaa is A or G or is absent

SEQ ID NO: 47190 - protein, 39 aa, Artificial Sequence
  GFR-binding peptide
  MOD_RES (1), (34), (35): Xaa is C or S
  MOD_RES (12), (13), (14), (15), (16): Xaa is A or G
  MOD_RES (17), (18), (19), (20): Xaa is A or G or is absent
XSKVIMVTAKKXXXXXXXXXIKRIQVPRLDQSVXXPSAS

SEQ ID NO: 47191 - protein, 40 aa, Artificial Sequence
  GFR-binding peptide
  MOD_RES (1), (3), (40): Xaa is C or S
XKXALHDELTNSLQEFIPKKRVIEYYLVTLPELQVQTPRX

SEQ ID NO: 47192 - protein, 40 aa, Artificial Sequence; identical to SEQ ID NO: 10428
  GFR-binding peptide
  MOD_RES (2), (4), (36), (37): Xaa is C or S

SEQ ID NO: 47193 - protein, 37 aa, Artificial Sequence
  GFR-binding peptide
  MOD_RES (31), (32): Xaa is C or S
RVVMNSMEGIIVNSSDDMIQVTINSLQTPAXXPKPVT

SEQ ID NO: 47194 - protein, 39 aa, Artificial Sequence; identical to SEQ ID NO: 10429
  GFR-binding peptide
  MOD_RES (2), (4), (37), (38): Xaa is C or S
  MOD_RES (15), (16), (17), (18), (19): Xaa is A or G
  MOD_RES (20), (21), (22), (23): Xaa is A or G or is absent

SEQ ID NO: 47195 - protein, 40 aa, Artificial Sequence; identical to SEQ ID NO: 17615
  GFR-binding peptide
  MOD_RES (36), (36): Xaa is C or S
  MOD_RES (12), (13), (14), (15), (16): Xaa is A or G
  MOD_RES (17), (18), (19), (20): Xaa is A or G or is absent

SEQ ID NO: 47196 - protein, 35 aa, Artificial Sequence; identical to SEQ ID NO: 10430
  GFR-binding peptide
  MOD_RES (2), (4), (35): Xaa is C or S

SEQ ID NO: 47197 - protein, 36 aa, Artificial Sequence
  GFR-binding peptide
  MOD_RES (1), (1): Xaa is C or S
XALHDELTNSLQEFIPKKRVIEYYLVTLPELQVQTP

SEQ ID NO: 47198 - protein, 37 aa, Artificial Sequence; identical to SEQ ID NO: 17616
  GFR-binding peptide
  MOD_RES (33), (33): Xaa is C or S

SEQ ID NO: 47199 - protein, 32 aa, Artificial Sequence
  GFR-binding peptide
  MOD_RES (1), (32): Xaa is C or S
XSKVVMVQVEKVKPTRGVVKAIKVSRLDQPVX

SEQ ID NO: 47200 - protein, 33 aa, Artificial Sequence
  GFR-binding peptide
  MOD_RES (12), (13), (14), (15), (16): Xaa is A or G
  MOD_RES (17), (18), (19), (20): Xaa is A or G or is absent
GEVVMDSMEGIXXXXXXXXXMIQMTINSLETPV

SEQ ID NO: 47201 - protein, 37 aa, Artificial Sequence
  GFR-binding peptide
  MOD_RES (2), (34), (35): Xaa is C or S
GXGEVVMEVTAKKVVKDYEDIKRMQVPRLETPVXXAK

SEQ ID NO: 47202 - protein, 40 aa, Artificial Sequence; identical to SEQ ID NO: 17617
  GFR-binding peptide
  MOD_RES (37), (37): Xaa is C or S
  MOD_RES (13), (14), (15), (16), (17): Xaa is A or G
  MOD_RES (18), (19), (20), (21): Xaa is A or G or is absent

SEQ ID NO: 47203 - protein, 36 aa, Artificial Sequence; identical to SEQ ID NO: 17618
  GFR-binding peptide
  MOD_RES (1), (1): Xaa is C or S
  MOD_RES (14), (15), (16), (17), (18): Xaa is A or G
  MOD_RES (19), (20), (21), (22): Xaa is A or G or is absent

SEQ ID NO: 47204 - protein, 41 aa, Artificial Sequence; identical to SEQ ID NO: 17619
  GFR-binding peptide
  MOD_RES (1), (3), (40): Xaa is C or S

SEQ ID NO: 47205 - protein, 34 aa, Artificial Sequence; identical to SEQ ID NO: 10434
  GFR-binding peptide
  MOD_RES (2), (4): Xaa is C or S

SEQ ID NO: 47206 - protein, 36 aa, Artificial Sequence
  GFR-binding peptide
  MOD_RES (34), (34): Xaa is C or S
  MOD_RES (12), (13), (14), (15), (16): Xaa is A or G
  MOD_RES (17), (18), (19), (20): Xaa is A or G or is absent
KNHQLFNSLQEXXXXXXXXXYYLMTLPEEETPVXEL

SEQ ID NO: 47207 - protein, 38 aa, Artificial Sequence
  GFR-binding peptide
  MOD_RES (2), (35), (36): Xaa is C or S
  MOD_RES (13), (14), (15), (16), (17): Xaa is A or G
  MOD_RES (18), (19), (20), (21): Xaa is A or G or is absent
KXSRVIMVTAKKXXXXXXXXXIKRIQVPRLAQPVXXPA

SEQ ID NO: 47208 - protein, 37 aa, Artificial Sequence; identical to SEQ ID NO: 10436
  GFR-binding peptide
  MOD_RES (2), (4), (37): Xaa is C or S
  MOD_RES (15), (16), (17), (18), (19): Xaa is A or G
  MOD_RES (20), (21), (22), (23): Xaa is A or G or is absent

SEQ ID NO: 47209 - protein, 37 aa, Artificial Sequence; identical to SEQ ID NO: 10438
  GFR-binding peptide
  MOD_RES (2), (4): Xaa is C or S
  MOD_RES (16), (17), (18), (19), (20): Xaa is A or G
  MOD_RES (21), (22), (23), (24): Xaa is A or G or is absent

SEQ ID NO: 47210 - protein, 39 aa, Artificial Sequence
  GFR-binding peptide
  MOD_RES (2), (36): Xaa is C or S
  MOD_RES (14), (15), (16), (17), (18): Xaa is A or G
  MOD_RES (19), (20), (21), (22): Xaa is A or G or is absent
GXSRVVMNSMEGIXXXXXXXXXMIQVTINSLKTPAXTPK

SEQ ID NO: 47211 - protein, 37 aa, Artificial Sequence; identical to SEQ ID NO: 17628
  GFR-binding peptide
  MOD_RES (1), (3): Xaa is C or S

SEQ ID NO: 47212 - protein, 38 aa, Artificial Sequence
  GFR-binding peptide
  MOD_RES (2), (36): Xaa is C or S
EXKNHQLFNSLQEHQGQHPKIRYYLMTLPEEETPVXEL

SEQ ID NO: 47213 - protein, 35 aa, Artificial Sequence; identical to SEQ ID NO: 10442
  GFR-binding peptide
  MOD_RES (1), (33), (34): Xaa is C or S

SEQ ID NO: 47214 - protein, 36 aa, Artificial Sequence; identical to SEQ ID NO: 10445
  GFR-binding peptide
  MOD_RES (2), (35), (36): Xaa is C or S
  MOD_RES (13), (14), (15), (16), (17): Xaa is A or G
  MOD_RES (18), (19), (20), (21): Xaa is A or G or is absent

SEQ ID NO: 47215 - protein, 39 aa, Artificial Sequence
  GFR-binding peptide
  MOD_RES (2), (4), (38), (39): Xaa is C or S
  MOD_RES (16), (17), (18), (19), (20): Xaa is A or G
  MOD_RES (21), (22), (23), (24): Xaa is A or G or is absent
HXGXSRVVMNVTAKKXXXXXXXXXIKRVQVPRLKTPAXX

SEQ ID NO: 47216 - protein, 35 aa, Artificial Sequence
  GFR-binding peptide
LHEELRNSLQELKPKKRVYEYYLVTLPEHHVRSPQ

SEQ ID NO: 47217 - protein, 34 aa, Artificial Sequence; identical to SEQ ID NO: 36585
  GFR-binding peptide
  MOD_RES (31), (32): Xaa is C or S

SEQ ID NO: 47218 - protein, 38 aa, Artificial Sequence; identical to SEQ ID NO: 17633
  GFR-binding peptide
  MOD_RES (2), (2): Xaa is C or S
  MOD_RES (15), (16), (17), (18), (19): Xaa is A or G
  MOD_RES (20), (21), (22), (23): Xaa is A or G or is absent

SEQ ID NO: 47219 - protein, 43 aa, Artificial Sequence
  GFR-binding peptide
  MOD_RES (2), (4), (38), (39): Xaa is C or S
  MOD_RES (16), (17), (18), (19), (20): Xaa is A or G
  MOD_RES (21), (22), (23), (24): Xaa is A or G or is absent
RXGXGEVVMDVTAKKXXXXXXXXXIKRMQVPRLETPVXXAKPI

SEQ ID NO: 47220 - protein, 39 aa, Artificial Sequence
  GFR-binding peptide
  MOD_RES (1), (3), (34), (35): Xaa is C or S
XKXSKVIMVQVEKIKPTKGIVKAIKVSRLDQSVXXPSAS

SEQ ID NO: 47221 - protein, 41 aa, Artificial Sequence
  GFR-binding peptide
  MOD_RES (1), (3), (37): Xaa is C or S
XEXKNHQLFNSLQEHQGQHPKIRYYLMTLPEEETPVXELGE

SEQ ID NO: 47222 - protein, 39 aa, Artificial Sequence; identical to SEQ ID NO: 10450
  GFR-binding peptide
  MOD_RES (1), (34), (35): Xaa is C or S
  MOD_RES (12), (13), (14), (15), (16): Xaa is A or G
  MOD_RES (17), (18), (19), (20): Xaa is A or G or is absent

SEQ ID NO: 47223 - protein, 35 aa, Artificial Sequence
  GFR-binding peptide
  MOD_RES (32), (33): Xaa is C or S
GEVVMDVQVEKVVKENEDVKAMKVSRLETPVXXAK

SEQ ID NO: 47224 - protein, 43 aa, Artificial Sequence
  GFR-binding peptide
  MOD_RES (2), (4), (41): Xaa is C or S
EXKXALHDELTNSLQEFIPKKRVIEYYLVTLPELQVQTPRXQV

SEQ ID NO: 47225 - protein, 39 aa, Artificial Sequence; identical to SEQ ID NO: 17642
  GFR-binding peptide
  MOD_RES (1), (3): Xaa is C or S
  MOD_RES (16), (17), (18), (19), (20): Xaa is A or G
  MOD_RES (21), (22), (23), (24): Xaa is A or G or is absent

SEQ ID NO: 47226 - protein, 35 aa, Artificial Sequence; identical to SEQ ID NO: 36593
  GFR-binding peptide
  MOD_RES (33), (34): Xaa is C or S
  MOD_RES (11), (12), (13), (14), (15): Xaa is A or G
  MOD_RES (16), (17), (18), (19): Xaa is A or G or is absent

SEQ ID NO: 47227 - protein, 40 aa, Artificial Sequence; identical to SEQ ID NO: 36594
  GFR-binding peptide
  MOD_RES (2), (4), (35), (36): Xaa is C or S

SEQ ID NO: 47228 - protein, 32 aa, Artificial Sequence
  GFR-binding peptide
  MOD_RES (11), (12), (13), (14), (15): Xaa is A or G
  MOD_RES (16), (17), (18), (19): Xaa is A or G or is absent
EVVMDVTAKKXXXXXXXXXIKRMQVPRLETPV

SEQ ID NO: 47229 - protein, 41 aa, Artificial Sequence; identical to SEQ ID NO: 17645
  GFR-binding peptide
  MOD_RES (1), (3), (40): Xaa is C or S
  MOD_RES (16), (17), (18), (19), (20): Xaa is A or G
  MOD_RES (21), (22), (23), (24): Xaa is A or G or is absent

SEQ ID NO: 47230 - protein, 36 aa, Artificial Sequence
  GFR-binding peptide
  MOD_RES (2), (36): Xaa is C or S
EXKNHQLFNSLQEHQGQHPKIRYYVMPLPEEETPVX

SEQ ID NO: 47231 - protein, 40 aa, Artificial Sequence
  GFR-binding peptide
  MOD_RES (1), (35), (36): Xaa is C or S
  MOD_RES (13), (14), (15), (16), (17): Xaa is A or G
  MOD_RES (18), (19), (20), (21): Xaa is A or G or is absent
XGEVVMDVTAKKXXXXXXXXXIKRMQVPRLETPVXXAKPI

SEQ ID NO: 47232 - protein, 36 aa, Artificial Sequence
  GFR-binding peptide
  MOD_RES (33), (33): Xaa is C or S
NHQLFNSLQEHQGQHPKIRYYVMPLPEEETPVXELG

SEQ ID NO: 47233 - protein, 43 aa, Artificial Sequence; identical to SEQ ID NO: 17654
  GFR-binding peptide
  MOD_RES (2), (4), (41): Xaa is C or S
  MOD_RES (17), (18), (19), (20), (21): Xaa is A or G
  MOD_RES (22), (23), (24), (25): Xaa is A or G or is absent

SEQ ID NO: 47234 - protein, 39 aa, Artificial Sequence
  GFR-binding peptide
  MOD_RES (33), (34): Xaa is C or S
  MOD_RES (11), (12), (13), (14), (15): Xaa is A or G
  MOD_RES (16), (17), (18), (19): Xaa is A or G or is absent
SKVIMVQVEKXXXXXXXXXVKAIKVSRLDQSVXXPSASA

SEQ ID NO: 47235 - protein, 42 aa, Artificial Sequence; identical to SEQ ID NO: 17655
  GFR-binding peptide
  MOD_RES (2), (4), (38): Xaa is C or S
  MOD_RES (16), (17), (18), (19), (20): Xaa is A or G
  MOD_RES (21), (22), (23), (24): Xaa is A or G or is absent

SEQ ID NO: 47236 - protein, 39 aa, Artificial Sequence; identical to SEQ ID NO: 17656
  GFR-binding peptide
  MOD_RES (35), (35): Xaa is C or S
  MOD_RES (11), (12), (13), (14), (15): Xaa is A or G
  MOD_RES (16), (17), (18), (19): Xaa is A or G or is absent

SEQ ID NO: 47237 - protein, 39 aa, Artificial Sequence
  GFR-binding peptide
  MOD_RES (2), (34), (35): Xaa is C or S
GXGEVVMESMEGIVVKDYEDMIQMTINSLETPVXXAKPI

SEQ ID NO: 47238 - protein, 38 aa, Artificial Sequence
  GFR-binding peptide
  MOD_RES (33), (34): Xaa is C or S
  MOD_RES (11), (12), (13), (14), (15): Xaa is A or G
  MOD_RES (16), (17), (18), (19): Xaa is A or G or is absent
SKVIMVQVEKXXXXXXXXXVKAIKVSRLDQSVXXPSAS

SEQ ID NO: 47239 - protein, 37 aa, Artificial Sequence
  GFR-binding peptide
  MOD_RES (2), (2): Xaa is C or S
KXALHDELTNSLQEFIPKKRVIEYYVVPLPELQVQTP

SEQ ID NO: 47240 - protein, 36 aa, Artificial Sequence; identical to SEQ ID NO: 17659
  GFR-binding peptide
  MOD_RES (2), (2): Xaa is C or S
  MOD_RES (15), (16), (17), (18), (19): Xaa is A or G
  MOD_RES (20), (21), (22), (23): Xaa is A or G or is absent

SEQ ID NO: 47241 - protein, 38 aa, Artificial Sequence
  GFR-binding peptide
  MOD_RES (2), (4), (35), (36): Xaa is C or S
SXKXSKVIMVQVEKIKPTKGIVKAIKVSRLDQSVXXPS

SEQ ID NO: 47242 - protein, 35 aa, Artificial Sequence; identical to SEQ ID NO: 10461
  GFR-binding peptide
  MOD_RES (33), (34): Xaa is C or S
  MOD_RES (11), (12), (13), (14), (15): Xaa is A or G
  MOD_RES (16), (17), (18), (19): Xaa is A or G or is absent

SEQ ID NO: 47243 - protein, 42 aa, Artificial Sequence; identical to SEQ ID NO: 10463
  GFR-binding peptide
  MOD_RES (2), (4), (36), (37): Xaa is C or S

SEQ ID NO: 47244 - protein, 39 aa, Artificial Sequence
  GFR-binding peptide
  MOD_RES (2), (39): Xaa is C or S
  MOD_RES (15), (16), (17), (18), (19): Xaa is A or G
  MOD_RES (20), (21), (22), (23): Xaa is A or G or is absent
KXALHDELTNSLQEXXXXXXXXXYYVVPLPELQVQTPRX

SEQ ID NO: 47245 - protein, 42 aa, Artificial Sequence; identical to SEQ ID NO: 17661
  GFR-binding peptide
  MOD_RES (2), (4), (38): Xaa is C or S
  MOD_RES (16), (17), (18), (19), (20): Xaa is A or G
  MOD_RES (21), (22), (23), (24): Xaa is A or G or is absent

SEQ ID NO: 47246 - protein, 32 aa, Artificial Sequence; identical to SEQ ID NO: 17663
  GFR-binding peptide

SEQ ID NO: 47247 - protein, 38 aa, Artificial Sequence
  GFR-binding peptide
  MOD_RES (1), (3), (35): Xaa is C or S
XGXSRVVMNSMEGIIVNSSDDMIQVTINSLKTPAXTPK

SEQ ID NO: 47248 - protein, 39 aa, Artificial Sequence; identical to SEQ ID NO: 10466
  GFR-binding peptide
  MOD_RES (2), (34): Xaa is C or S

SEQ ID NO: 47249 - protein, 34 aa, Artificial Sequence; identical to SEQ ID NO: 10467
  GFR-binding peptide
  MOD_RES (33), (34): Xaa is C or S
  MOD_RES (11), (12), (13), (14), (15): Xaa is A or G
  MOD_RES (16), (17), (18), (19): Xaa is A or G or is absent

SEQ ID NO: 47250 - protein, 39 aa, Artificial Sequence; identical to SEQ ID NO: 36619
  GFR-binding peptide
  MOD_RES (2), (4), (35), (36): Xaa is C or S

SEQ ID NO: 47251 - protein, 35 aa, Artificial Sequence; identical to SEQ ID NO: 10469
  GFR-binding peptide
  MOD_RES (2), (4): Xaa is C or S

SEQ ID NO: 47252 - protein, 36 aa, Artificial Sequence; identical to SEQ ID NO: 10471
  GFR-binding peptide
  MOD_RES (2), (4), (36): Xaa is C or S

SEQ ID NO: 47253 - protein, 36 aa, Artificial Sequence
  GFR-binding peptide
  MOD_RES (2), (2): Xaa is C or S
AXELHEELRNSLQELKPKKRVYEYYVVPLPEHHVRS

SEQ ID NO: 47254 - protein, 36 aa, Artificial Sequence; identical to SEQ ID NO: 10473
  GFR-binding peptide
  MOD_RES (34), (35): Xaa is C or S
  MOD_RES (12), (13), (14), (15), (16): Xaa is A or G
  MOD_RES (17), (18), (19), (20): Xaa is A or G or is absent

SEQ ID NO: 47255 - protein, 41 aa, Artificial Sequence; identical to SEQ ID NO: 17666
  GFR-binding peptide
  MOD_RES (2), (4), (41): Xaa is C or S

SEQ ID NO: 47256 - protein, 38 aa, Artificial Sequence
  GFR-binding peptide
  MOD_RES (1), (33), (34): Xaa is C or S
XGEVVMESMEGIVVKDYEDMIQMTINSLETPVXXAKPI

SEQ ID NO: 47257 - protein, 37 aa, Artificial Sequence; identical to SEQ ID NO: 10474
  GFR-binding peptide
  MOD_RES (31), (32): Xaa is C or S

SEQ ID NO: 47258 - protein, 40 aa, Artificial Sequence
  GFR-binding peptide
  MOD_RES (34), (35): Xaa is C or S
  MOD_RES (12), (13), (14), (15), (16): Xaa is A or G
  MOD_RES (17), (18), (19), (20): Xaa is A or G or is absent
SRVVMNSMEGIXXXXXXXXXMIQVTINSLKTPAXXPKPVY

SEQ ID NO: 47259 - protein, 40 aa, Artificial Sequence
  GFR-binding peptide
  MOD_RES (2), (4), (38), (39): Xaa is C or S
  MOD_RES (16), (17), (18), (19), (20): Xaa is A or G
  MOD_RES (21), (22), (23), (24): Xaa is A or G or is absent
HXGXARVVMNVTAKKXXXXXXXXXIKRVQVPRLQTPAXXP

SEQ ID NO: 47260 - protein, 32 aa, Artificial Sequence
  GFR-binding peptide
HDELTNSLQEFIPKKRVIEYYVVPLPELQVQT

SEQ ID NO: 47261 - protein, 36 aa, Artificial Sequence
  GFR-binding peptide
  MOD_RES (1), (3), (36): Xaa is C or S
  MOD_RES (14), (15), (16), (17), (18): Xaa is A or G
  MOD_RES (19), (20), (21), (22): Xaa is A or G or is absent
XKXSKVVMSMEGIXXXXXXXXXMIQITINSLDQPVX

SEQ ID NO: 47262 - protein, 32 aa, Artificial Sequence; identical to SEQ ID NO: 17668
  GFR-binding peptide
  MOD_RES (11), (12), (13), (14), (15): Xaa is A or G
  MOD_RES (16), (17), (18), (19): Xaa is A or G or is absent

SEQ ID NO: 47263 - protein, 42 aa, Artificial Sequence; identical to SEQ ID NO: 17670
  GFR-binding peptide
  MOD_RES (2), (4), (41): Xaa is C or S

SEQ ID NO: 47264 - protein, 38 aa, Artificial Sequence
  GFR-binding peptide
  MOD_RES (33), (34): Xaa is C or S
  MOD_RES (11), (12), (13), (14), (15): Xaa is A or G
  MOD_RES (16), (17), (18), (19): Xaa is A or G or is absent
SKVIMVTAKKXXXXXXXXXIKRIQVPRLDQSVXXPSAS

SEQ ID NO: 47265 - protein, 32 aa, Artificial Sequence
  GFR-binding peptide
  MOD_RES (31), (32): Xaa is C or S
RVVMNVQVEKIVNSSDDVKAVKVSRLQTPAXX

SEQ ID NO: 47266 - protein, 41 aa, Artificial Sequence
  GFR-binding peptide
  MOD_RES (1), (38): Xaa is C or S
XELHEELRNSLQELKPKKRVYEYYLVTLPEHHVRSPQXKVS

SEQ ID NO: 47267 - protein, 35 aa, Artificial Sequence
  GFR-binding peptide
  MOD_RES (31), (32): Xaa is C or S
SKVIMVQVEKIKPTKGIVKAIKVSRLDQSVXXPSA

SEQ ID NO: 47268 - protein, 33 aa, Artificial Sequence
  GFR-binding peptide
  MOD_RES (32), (33): Xaa is C or S
SRVVMNVQVEKIVNSSDDVKAVKVSRLKTPAXX

SEQ ID NO: 47269 - protein, 41 aa, Artificial Sequence
  GFR-binding peptide
  MOD_RES (2), (36): Xaa is C or S
EXKNHQLFNSLQEHQGQHPKIRYYVMPLPEEETPVXELGED

SEQ ID NO: 47270 - protein, 39 aa, Artificial Sequence; identical to SEQ ID NO: 17674
  GFR-binding peptide
  MOD_RES (37), (37): Xaa is C or S
  MOD_RES (13), (14), (15), (16), (17): Xaa is A or G
  MOD_RES (18), (19), (20), (21): Xaa is A or G or is absent

SEQ ID NO: 47271 - protein, 33 aa, Artificial Sequence; identical to SEQ ID NO: 10480
  GFR-binding peptide
  MOD_RES (2), (2): Xaa is C or S

SEQ ID NO: 47272 - protein, 32 aa, Artificial Sequence; identical to SEQ ID NO: 17675
  GFR-binding peptide

SEQ ID NO: 47273 - protein, 34 aa, Artificial Sequence
  GFR-binding peptide
  MOD_RES (2), (34): Xaa is C or S
GXARVVMNSMEGIIVNSSDDMIQVTINSLQTPAX

SEQ ID NO: 47274 - protein, 36 aa, Artificial Sequence
  GFR-binding peptide
  MOD_RES (1), (34), (35): Xaa is C or S
  MOD_RES (12), (13), (14), (15), (16): Xaa is A or G
  MOD_RES (17), (18), (19), (20): Xaa is A or G or is absent
XSKVVMVQVEKXXXXXXXXXVKAIKVSRLDQPVXXP

SEQ ID NO: 47275 - protein, 37 aa, Artificial Sequence; identical to SEQ ID NO: 17676
  GFR-binding peptide
  MOD_RES (37), (37): Xaa is C or S
  MOD_RES (13), (14), (15), (16), (17): Xaa is A or G
  MOD_RES (18), (19), (20), (21): Xaa is A or G or is absent

SEQ ID NO: 47276 - protein, 38 aa, Artificial Sequence
  GFR-binding peptide
  MOD_RES (1), (32), (33): Xaa is C or S
XSKVVMVQVEKVKPTRGVVKAIKVSRLDQPVXXPSASA

SEQ ID NO: 47277 - protein, 36 aa, Artificial Sequence; identical to SEQ ID NO: 17678
  GFR-binding peptide

SEQ ID NO: 47278 - protein, 41 aa, Artificial Sequence
  GFR-binding peptide
  MOD_RES (1), (35), (36): Xaa is C or S
  MOD_RES (13), (14), (15), (16), (17): Xaa is A or G
  MOD_RES (18), (19), (20), (21): Xaa is A or G or is absent
XSRVVMNVQVEKXXXXXXXXXVKAVKVSRLKTPAXXPKPVY

SEQ ID NO: 47279 - protein, 35 aa, Artificial Sequence
  GFR-binding peptide
  MOD_RES (2), (34), (35): Xaa is C or S
GXGEVVMDVQVEKVVKENEDVKAMKVSRLETPVXX

SEQ ID NO: 47280 - protein, 39 aa, Artificial Sequence
  GFR-binding peptide
  MOD_RES (34), (35): Xaa is C or S
  MOD_RES (12), (13), (14), (15), (16): Xaa is A or G
  MOD_RES (17), (18), (19), (20): Xaa is A or G or is absent
ARVVMNVTAKKXXXXXXXXXIKRVQVPRLQTPAXXPKPV

SEQ ID NO: 47281 - protein, 40 aa, Artificial Sequence
  GFR-binding peptide
  MOD_RES (1), (35), (36): Xaa is C or S
  MOD_RES (13), (14), (15), (16), (17): Xaa is A or G
  MOD_RES (18), (19), (20), (21): Xaa is A or G or is absent
XGEVVMESMEGIXXXXXXXXXMIQMTINSLETPVXXAKPI

SEQ ID NO: 47282 - protein, 34 aa, Artificial Sequence; identical to SEQ ID NO: 10482
  GFR-binding peptide
  MOD_RES (1), (33), (34): Xaa is C or S

SEQ ID NO: 47283 - protein, 39 aa, Artificial Sequence; identical to SEQ ID NO: 36643
  GFR-binding peptide
  MOD_RES (1), (3), (36), (37): Xaa is C or S
  MOD_RES (14), (15), (16), (17), (18): Xaa is A or G
  MOD_RES (19), (20), (21), (22): Xaa is A or G or is absent

SEQ ID NO: 47284 - protein, 34 aa, Artificial Sequence
  GFR-binding peptide
  MOD_RES (2), (4): Xaa is C or S
SXKXSRVIMVTAKKVKPKRGVIKRIQVPRLAQPV

SEQ ID NO: 47285 - protein, 37 aa, Artificial Sequence; identical to SEQ ID NO: 10485
  GFR-binding peptide
  MOD_RES (2), (34): Xaa is C or S

SEQ ID NO: 47286 - protein, 43 aa, Artificial Sequence; identical to SEQ ID NO: 17683
  GFR-binding peptide
  MOD_RES (2), (4), (38): Xaa is C or S
  MOD_RES (16), (17), (18), (19), (20): Xaa is A or G
  MOD_RES (21), (22), (23), (24): Xaa is A or G or is absent

SEQ ID NO: 47287 - protein, 40 aa, Artificial Sequence; identical to SEQ ID NO: 17684
  GFR-binding peptide
  MOD_RES (2), (39): Xaa is C or S

SEQ ID NO: 47288 - protein, 38 aa, Artificial Sequence
  GFR-binding peptide
  MOD_RES (33), (34): Xaa is C or S
  MOD_RES (11), (12), (13), (14), (15): Xaa is A or G
  MOD_RES (16), (17), (18), (19): Xaa is A or G or is absent
EVVMDVQVEKXXXXXXXXXVKAMKVSRLETPVXXAKPI

SEQ ID NO: 47289 - protein, 42 aa, Artificial Sequence
  GFR-binding peptide
  MOD_RES (2), (39): Xaa is C or S
  MOD_RES (15), (16), (17), (18), (19): Xaa is A or G
  MOD_RES (20), (21), (22), (23): Xaa is A or G or is absent
KXALHDELTNSLQEXXXXXXXXXYYLVTLPELQVQTPRXQVN

SEQ ID NO: 47290 - protein, 34 aa, Artificial Sequence
  GFR-binding peptide
  MOD_RES (1), (34): Xaa is C or S
  MOD_RES (12), (13), (14), (15), (16): Xaa is A or G
  MOD_RES (17), (18), (19), (20): Xaa is A or G or is absent
XSRVIMVQVEKXXXXXXXXXVKAIKVSRLAQPVX

SEQ ID NO: 47291 - protein, 33 aa, Artificial Sequence
  GFR-binding peptide
  MOD_RES (31), (32): Xaa is C or S
EVVMEVTAKKVVKDYEDIKRMQVPRLETPVXXA

SEQ ID NO: 47292 - protein, 35 aa, Artificial Sequence
  GFR-binding peptide
  MOD_RES (31), (32): Xaa is C or S
EVVMEVQVEKVVKDYEDVKAMKVSRLETPVXXAKP

SEQ ID NO: 47293 - protein, 33 aa, Artificial Sequence
  GFR-binding peptide
  MOD_RES (32), (33): Xaa is C or S
GEVVMDVQVEKVVKENEDVKAMKVSRLETPVXX

SEQ ID NO: 47294 - protein, 37 aa, Artificial Sequence; identical to SEQ ID NO: 10488
  GFR-binding peptide
  MOD_RES (32), (33): Xaa is C or S

SEQ ID NO: 47295 - protein, 40 aa, Artificial Sequence
  GFR-binding peptide
  MOD_RES (1), (3), (37), (38): Xaa is C or S
  MOD_RES (15), (16), (17), (18), (19): Xaa is A or G
  MOD_RES (20), (21), (22), (23): Xaa is A or G or is absent
XGXGEVVMEVQVEKXXXXXXXXXVKAMKVSRLETPVXXAK

SEQ ID NO: 47296 - protein, 36 aa, Artificial Sequence; identical to SEQ ID NO: 10489
  GFR-binding peptide
  MOD_RES (1), (3), (36): Xaa is C or S
  MOD_RES (14), (15), (16), (17), (18): Xaa is A or G
  MOD_RES (19), (20), (21), (22): Xaa is A or G or is absent

SEQ ID NO: 47297 - protein, 38 aa, Artificial Sequence; identical to SEQ ID NO: 10490
  GFR-binding peptide
  MOD_RES (33), (33): Xaa is C or S
  MOD_RES (11), (12), (13), (14), (15): Xaa is A or G
  MOD_RES (16), (17), (18), (19): Xaa is A or G or is absent

SEQ ID NO: 47298 - protein, 36 aa, Artificial Sequence; identical to SEQ ID NO: 10491
  GFR-binding peptide
  MOD_RES (1), (35), (36): Xaa is C or S
  MOD_RES (13), (14), (15), (16), (17): Xaa is A or G
  MOD_RES (18), (19), (20), (21): Xaa is A or G or is absent

SEQ ID NO: 47299 - protein, 33 aa, Artificial Sequence
  GFR-binding peptide
  MOD_RES (1), (3): Xaa is C or S
XKXSKVIMSMEGIIKPTKGIMIQITINSLDQSV

SEQ ID NO: 47300 - protein, 36 aa, Artificial Sequence
  GFR-binding peptide
  MOD_RES (1), (3), (36): Xaa is C or S
  MOD_RES (14), (15), (16), (17), (18): Xaa is A or G
  MOD_RES (19), (20), (21), (22): Xaa is A or G or is absent
XKXSKVIMVQVEKXXXXXXXXXVKAIKVSRLDQSVX

SEQ ID NO: 47301 - protein, 33 aa, Artificial Sequence; identical to SEQ ID NO: 10495
  GFR-binding peptide
  MOD_RES (2), (33): Xaa is C or S

SEQ ID NO: 47302 - protein, 40 aa, Artificial Sequence
  GFR-binding peptide
  MOD_RES (1), (3), (34), (35): Xaa is C or S
XKXSKVIMVTAKKIKPTKGIIKRIQVPRLDQSVXXPSASA

SEQ ID NO: 47303 - protein, 34 aa, Artificial Sequence; identical to SEQ ID NO: 17692
  GFR-binding peptide
  MOD_RES (12), (13), (14), (15), (16): Xaa is A or G
  MOD_RES (17), (18), (19), (20): Xaa is A or G or is absent

SEQ ID NO: 47304 - protein, 41 aa, Artificial Sequence
  GFR-binding peptide
  MOD_RES (2), (4), (36), (37): Xaa is C or S
HXGXARVVMNVQVEKIVNSSDDVKAVKVSRLQTPAXXPKPV

SEQ ID NO: 47305 - protein, 39 aa, Artificial Sequence
  GFR-binding peptide
  MOD_RES (1), (3): Xaa is C or S
XKXALHDELTNSLQEFIPKKRVIEYYVVPLPELQVQTPR

SEQ ID NO: 47306 - protein, 39 aa, Artificial Sequence; identical to SEQ ID NO: 10498
  GFR-binding peptide
  MOD_RES (1), (3), (36), (37): Xaa is C or S
  MOD_RES (14), (15), (16), (17), (18): Xaa is A or G
  MOD_RES (19), (20), (21), (22): Xaa is A or G or is absent

SEQ ID NO: 47307 - protein, 37 aa, Artificial Sequence
  GFR-binding peptide
  MOD_RES (1), (3): Xaa is C or S
  MOD_RES (16), (17), (18), (19), (20): Xaa is A or G
  MOD_RES (21), (22), (23), (24): Xaa is A or G or is absent
XAXELHEELRNSLQEXXXXXXXXXYYLVTLPEHHVRS

SEQ ID NO: 47308 - protein, 34 aa, Artificial Sequence
  GFR-binding peptide
  MOD_RES (33), (34): Xaa is C or S
  MOD_RES (11), (12), (13), (14), (15): Xaa is A or G
  MOD_RES (16), (17), (18), (19): Xaa is A or G or is absent
RVVMNVTAKKXXXXXXXXXIKRVQVPRLKTPAXX

SEQ ID NO: 47309 - protein, 35 aa, Artificial Sequence
  GFR-binding peptide
  MOD_RES (1), (3), (35): Xaa is C or S
XGXSRVVMNSMEGIIVNSSDDMIQVTINSLKTPAX

SEQ ID NO: 47310 - protein, 39 aa, Artificial Sequence
  GFR-binding peptide
  MOD_RES (33), (33): Xaa is C or S
  MOD_RES (11), (12), (13), (14), (15): Xaa is A or G
  MOD_RES (16), (17), (18), (19): Xaa is A or G or is absent
NHQLFNSLQEXXXXXXXXXYYLMTLPEEETPVXELGEDN

SEQ ID NO: 47311 - protein, 35 aa, Artificial Sequence
  GFR-binding peptide
  MOD_RES (35), (35): Xaa is C or S
HEELRNSLQELKPKKRVYEYYVVPLPEHHVRSPQX

SEQ ID NO: 47312 - protein, 39 aa, Artificial Sequence; identical to SEQ ID NO: 10503
  GFR-binding peptide
  MOD_RES (1), (3), (37), (38): Xaa is C or S
  MOD_RES (15), (16), (17), (18), (19): Xaa is A or G
  MOD_RES (20), (21), (22), (23): Xaa is A or G or is absent

SEQ ID NO: 47313 - protein, 34 aa, Artificial Sequence; identical to SEQ ID NO: 10504
  GFR-binding peptide
  MOD_RES (31), (32): Xaa is C or S

SEQ ID NO: 47314 - protein, 38 aa, Artificial Sequence
  GFR-binding peptide
  MOD_RES (2), (4), (36), (37): Xaa is C or S
RXGXGEVVMDSMEGIVVKENEDMIQMTINSLETPVXXA

SEQ ID NO: 47315 - protein, 38 aa, Artificial Sequence; identical to SEQ ID NO: 10507
  GFR-binding peptide
  MOD_RES (2), (36), (37): Xaa is C or S
  MOD_RES (14), (15), (16), (17), (18): Xaa is A or G
  MOD_RES (19), (20), (21), (22): Xaa is A or G or is absent

SEQ ID NO: 47316 - protein, 39 aa, Artificial Sequence
  GFR-binding peptide
  MOD_RES (37), (37): Xaa is C or S
  MOD_RES (13), (14), (15), (16), (17): Xaa is A or G
  MOD_RES (18), (19), (20), (21): Xaa is A or G or is absent
ALHDELTNSLQEXXXXXXXXXYYVVPLPELQVQTPRXQV

SEQ ID NO: 47317 - protein, 38 aa, Artificial Sequence
  GFR-binding peptide
  MOD_RES (2), (34), (35): Xaa is C or S
GXGEVVMEVTAKKVVKDYEDIKRMQVPRLETPVXXAKP

SEQ ID NO: 47318 - protein, 39 aa, Artificial Sequence; identical to SEQ ID NO: 10509
  GFR-binding peptide
  MOD_RES (2), (36), (37): Xaa is C or S
  MOD_RES (14), (15), (16), (17), (18): Xaa is A or G
  MOD_RES (19), (20), (21), (22): Xaa is A or G or is absent

SEQ ID NO: 47319 - protein, 42 aa, Artificial Sequence
  GFR-binding peptide
  MOD_RES (2), (4), (36), (37): Xaa is C or S
HXGXARVVMNSMEGIIVNSSDDMIQVTINSLQTPAXXPKPVT

SEQ ID NO: 47320 - protein, 38 aa, Artificial Sequence
  GFR-binding peptide
  MOD_RES (2), (4), (38): Xaa is C or S
  MOD_RES (16), (17), (18), (19), (20): Xaa is A or G
  MOD_RES (21), (22), (23), (24): Xaa is A or G or is absent
HXGXARVVMNVTAKKXXXXXXXXXIKRVQVPRLQTPAX

SEQ ID NO: 47321 - protein, 39 aa, Artificial Sequence; identical to SEQ ID NO: 10511
  GFR-binding peptide
  MOD_RES (1), (3), (34), (35): Xaa is C or S

SEQ ID NO: 47322 - protein, 34 aa, Artificial Sequence; identical to SEQ ID NO: 10513
  GFR-binding peptide
  MOD_RES (33), (34): Xaa is C or S
  MOD_RES (11), (12), (13), (14), (15): Xaa is A or G
  MOD_RES (16), (17), (18), (19): Xaa is A or G or is absent

SEQ ID NO: 47323 - protein, 33 aa, Artificial Sequence; identical to SEQ ID NO: 10515
  GFR-binding peptide
  MOD_RES (31), (32): Xaa is C or S

SEQ ID NO: 47324 - protein, 36 aa, Artificial Sequence
  GFR-binding peptide
  MOD_RES (2), (4), (36): Xaa is C or S
HXGXARVVMNSMEGIIVNSSDDMIQVTINSLQTPAX

SEQ ID NO: 47325 - protein, 37 aa, Artificial Sequence
  GFR-binding peptide
  MOD_RES (1), (3), (35), (36): Xaa is C or S
XGXARVVMNSMEGIIVNSSDDMIQVTINSLQTPAXXP

SEQ ID NO: 47326 - protein, 38 aa, Artificial Sequence; identical to SEQ ID NO: 17699
  GFR-binding peptide
  MOD_RES (2), (4): Xaa is C or S
  MOD_RES (17), (18), (19), (20), (21): Xaa is A or G
  MOD_RES (22), (23), (24), (25): Xaa is A or G or is absent

SEQ ID NO: 47327 - protein, 40 aa, Artificial Sequence
  GFR-binding peptide
  MOD_RES (34), (35): Xaa is C or S
  MOD_RES (12), (13), (14), (15), (16): Xaa is A or G
  MOD_RES (17), (18), (19), (20): Xaa is A or G or is absent
SRVVMNVTAKKXXXXXXXXXIKRVQVPRLKTPAXXPKPVY

SEQ ID NO: 47328 - protein, 34 aa, Artificial Sequence; identical to SEQ ID NO: 10522
  GFR-binding peptide
  MOD_RES (34), (34): Xaa is C or S
  MOD_RES (12), (13), (14), (15), (16): Xaa is A or G
  MOD_RES (17), (18), (19), (20): Xaa is A or G or is absent

SEQ ID NO: 47329 - protein, 38 aa, Artificial Sequence; identical to SEQ ID NO: 10524
  GFR-binding peptide
  MOD_RES (1), (3), (37), (38): Xaa is C or S
  MOD_RES (15), (16), (17), (18), (19): Xaa is A or G
  MOD_RES (20), (21), (22), (23): Xaa is A or G or is absent

SEQ ID NO: 47330 - protein, 34 aa, Artificial Sequence
  GFR-binding peptide
  MOD_RES (12), (13), (14), (15), (16): Xaa is A or G
  MOD_RES (17), (18), (19), (20): Xaa is A or G or is absent
LHDELTNSLQEXXXXXXXXXYYLVTLPELQVQTP

SEQ ID NO: 47331 - protein, 38 aa, Artificial Sequence
  GFR-binding peptide
  MOD_RES (2), (4), (38): Xaa is C or S
  MOD_RES (16), (17), (18), (19), (20): Xaa is A or G
  MOD_RES (21), (22), (23), (24): Xaa is A or G or is absent
HXGXARVVMNVQVEKXXXXXXXXXVKAVKVSRLQTPAX

SEQ ID NO: 47332 - protein, 36 aa, Artificial Sequence
  GFR-binding peptide
  MOD_RES (36), (36): Xaa is C or S
LHEELRNSLQELKPKKRVYEYYLVTLPEHHVRSPQX

SEQ ID NO: 47333 - protein, 40 aa, Artificial Sequence; identical to SEQ ID NO: 10525
  GFR-binding peptide
  MOD_RES (2), (4), (37), (38): Xaa is C or S
  MOD_RES (15), (16), (17), (18), (19): Xaa is A or G
  MOD_RES (20), (21), (22), (23): Xaa is A or G or is absent

SEQ ID NO: 47334 - protein, 39 aa, Artificial Sequence; identical to SEQ ID NO: 17702
  GFR-binding peptide
  MOD_RES (2), (4): Xaa is C or S

SEQ ID NO: 47335 - protein, 32 aa, Artificial Sequence; identical to SEQ ID NO: 10527
  GFR-binding peptide
  MOD_RES (31), (32): Xaa is C or S

SEQ ID NO: 47336 - protein, 30 aa, Artificial Sequence; identical to SEQ ID NO: 36710
  GFR-binding peptide

SEQ ID NO: 47337 - protein, 40 aa, Artificial Sequence; identical to SEQ ID NO: 17704
  GFR-binding peptide
  MOD_RES (2), (4): Xaa is C or S
  MOD_RES (17), (18), (19), (20), (21): Xaa is A or G
  MOD_RES (22), (23), (24), (25): Xaa is A or G or is absent

SEQ ID NO: 47338 - protein, 35 aa, Artificial Sequence
  GFR-binding peptide
  MOD_RES (1), (3): Xaa is C or S
  MOD_RES (14), (15), (16), (17), (18): Xaa is A or G
  MOD_RES (19), (20), (21), (22): Xaa is A or G or is absent
XKXSKVVMSMEGIXXXXXXXXXMIQITINSLDQPV

SEQ ID NO: 47339 - protein, 34 aa, Artificial Sequence; identical to SEQ ID NO: 17705
  GFR-binding peptide
  MOD_RES (1), (1): Xaa is C or S
  MOD_RES (13), (14), (15), (16), (17): Xaa is A or G
  MOD_RES (18), (19), (20), (21): Xaa is A or G or is absent

SEQ ID NO: 47340 - protein, 35 aa, Artificial Sequence
  GFR-binding peptide
  MOD_RES (1), (1): Xaa is C or S
  MOD_RES (14), (15), (16), (17), (18): Xaa is A or G
  MOD_RES (19), (20), (21), (22): Xaa is A or G or is absent
XELHEELRNSLQEXXXXXXXXXYYVVPLPEHHVRS

SEQ ID NO: 47341 - protein, 37 aa, Artificial Sequence; identical to SEQ ID NO: 17706
  GFR-binding peptide
  MOD_RES (36), (36): Xaa is C or S
  MOD_RES (12), (13), (14), (15), (16): Xaa is A or G
  MOD_RES (17), (18), (19), (20): Xaa is A or G or is absent

SEQ ID NO: 47342 - protein, 37 aa, Artificial Sequence
  GFR-binding peptide
  MOD_RES (1), (3), (37): Xaa is C or S
  MOD_RES (15), (16), (17), (18), (19): Xaa is A or G
  MOD_RES (20), (21), (22), (23): Xaa is A or G or is absent
XGXARVVMNVTAKKXXXXXXXXXIKRVQVPRLQTPAX

SEQ ID NO: 47343 - protein, 41 aa, Artificial Sequence
  GFR-binding peptide
  MOD_RES (2), (36), (37): Xaa is C or S
  MOD_RES (14), (15), (16), (17), (18): Xaa is A or G
  MOD_RES (19), (20), (21), (22): Xaa is A or G or is absent
GXGEVVMEVQVEKXXXXXXXXXVKAMKVSRLETPVXXAKPI

SEQ ID NO: 47344 - protein, 38 aa, Artificial Sequence
  GFR-binding peptide
  MOD_RES (2), (4): Xaa is C or S
EXKXALHDELTNSLQEFIPKKRVIEYYVVPLPELQVQT

SEQ ID NO: 47345 - protein, 38 aa, Artificial Sequence
  GFR-binding peptide
  MOD_RES (34), (35): Xaa is C or S
  MOD_RES (12), (13), (14), (15), (16): Xaa is A or G
  MOD_RES (17), (18), (19), (20): Xaa is A or G or is absent
GEVVMDVTAKKXXXXXXXXXIKRMQVPRLETPVXXAKP

SEQ ID NO: 47346 - protein, 38 aa, Artificial Sequence
  GFR-binding peptide
  MOD_RES (2), (33), (34): Xaa is C or S
KXSRVIMVQVEKVKPKRGVVKAIKVSRLAQPVXXPAAS

SEQ ID NO: 47347 - protein, 41 aa, Artificial Sequence; identical to SEQ ID NO: 10534
  GFR-binding peptide
  MOD_RES (1), (35), (36): Xaa is C or S
  MOD_RES (13), (14), (15), (16), (17): Xaa is A or G
  MOD_RES (18), (19), (20), (21): Xaa is A or G or is absent

SEQ ID NO: 47348 - protein, 31 aa, Artificial Sequence
  GFR-binding peptide
  MOD_RES (31), (31): Xaa is C or S
EVVMEVTAKKVVKDYEDIKRMQVPRLETPVX

SEQ ID NO: 47349 - protein, 35 aa, Artificial Sequence
  GFR-binding peptide
  MOD_RES (33), (34): Xaa is C or S
  MOD_RES (11), (12), (13), (14), (15): Xaa is A or G
  MOD_RES (16), (17), (18), (19): Xaa is A or G or is absent
SRVIMVTAKKXXXXXXXXXIKRIQVPRLAQPVXXP

SEQ ID NO: 47350 - protein, 37 aa, Artificial Sequence
  GFR-binding peptide
  MOD_RES (2), (4), (36), (37): Xaa is C or S
RXGXGEVVMDSMEGIVVKENEDMIQMTINSLETPVXX

SEQ ID NO: 47351 - protein, 32 aa, Artificial Sequence
  GFR-binding peptide
  MOD_RES (32), (32): Xaa is C or S
ARVVMNVQVEKIVNSSDDVKAVKVSRLQTPAX

SEQ ID NO: 47352 - protein, 32 aa, Artificial Sequence; identical to SEQ ID NO: 10538
  GFR-binding peptide
  MOD_RES (1), (32): Xaa is C or S

SEQ ID NO: 47353 - protein, 37 aa, Artificial Sequence; identical to SEQ ID NO: 36728
  GFR-binding peptide
  MOD_RES (2), (35), (36): Xaa is C or S
  MOD_RES (13), (14), (15), (16), (17): Xaa is A or G
  MOD_RES (18), (19), (20), (21): Xaa is A or G or is absent

SEQ ID NO: 47354 - protein, 42 aa, Artificial Sequence; identical to SEQ ID NO: 17710
  GFR-binding peptide
  MOD_RES (2), (39): Xaa is C or S
  MOD_RES (15), (16), (17), (18), (19): Xaa is A or G
  MOD_RES (20), (21), (22), (23): Xaa is A or G or is absent

SEQ ID NO: 47355 - protein, 39 aa, Artificial Sequence
  GFR-binding peptide
  MOD_RES (2), (39): Xaa is C or S
  MOD_RES (15), (16), (17), (18), (19): Xaa is A or G
  MOD_RES (20), (21), (22), (23): Xaa is A or G or is absent
KXALHDELTNSLQEXXXXXXXXXYYLVTLPELQVQTPRX

SEQ ID NO: 47356 - protein, 42 aa, Artificial Sequence; identical to SEQ ID NO: 10539
  GFR-binding peptide
  MOD_RES (2), (4), (38), (39): Xaa is C or S
  MOD_RES (16), (17), (18), (19), (20): Xaa is A or G
  MOD_RES (21), (22), (23), (24): Xaa is A or G or is absent

SEQ ID NO: 47357 - protein, 38 aa, Artificial Sequence
  GFR-binding peptide
  MOD_RES (2), (2): Xaa is C or S
  MOD_RES (15), (16), (17), (18), (19): Xaa is A or G
  MOD_RES (20), (21), (22), (23): Xaa is A or G or is absent
AXELHEELRNSLQEXXXXXXXXXYYVVPLPEHHVRSPQ

SEQ ID NO: 47358 - protein, 42 aa, Artificial Sequence
  GFR-binding peptide
  MOD_RES (2), (36): Xaa is C or S
EXKNHQLFNSLQEHQGQHPKIRYYLMTLPEEETPVXELGEDN

SEQ ID NO: 47359 - protein, 32 aa, Artificial Sequence; identical to SEQ ID NO: 10543
  GFR-binding peptide
  MOD_RES (1), (1): Xaa is C or S

SEQ ID NO: 47360 - protein, 41 aa, Artificial Sequence
  GFR-binding peptide
  MOD_RES (2), (4), (35), (36): Xaa is C or S
SXKXSKVVMSMEGIVKPTRGVMIQITINSLDQPVXXPSASA

SEQ ID NO: 47361 - protein, 35 aa, Artificial Sequence; identical to SEQ ID NO: 10545
  GFR-binding peptide
  MOD_RES (2), (34): Xaa is C or S

SEQ ID NO: 47362 - protein, 35 aa, Artificial Sequence
  GFR-binding peptide
  MOD_RES (32), (32): Xaa is C or S
SRVVMNVTAKKIVNSSDDIKRVQVPRLKTPAXTPK

SEQ ID NO: 47363 - protein, 38 aa, Artificial Sequence
  GFR-binding peptide
  MOD_RES (2), (4), (36), (37): Xaa is C or S
HXGXARVVMNVTAKKIVNSSDDIKRVQVPRLQTPAXXP

SEQ ID NO: 47364 - protein, 32 aa, Artificial Sequence; identical to SEQ ID NO: 17713
  GFR-binding peptide
  MOD_RES (11), (12), (13), (14), (15): Xaa is A or G
  MOD_RES (16), (17), (18), (19): Xaa is A or G or is absent

SEQ ID NO: 47365 - protein, 36 aa, Artificial Sequence; identical to SEQ ID NO: 17715
  GFR-binding peptide
  MOD_RES (33), (33): Xaa is C or S
  MOD_RES (11), (12), (13), (14), (15): Xaa is A or G
  MOD_RES (16), (17), (18), (19): Xaa is A or G or is absent

SEQ ID NO: 47366 - protein, 35 aa, Artificial Sequence; identical to SEQ ID NO: 10548
  GFR-binding peptide
  MOD_RES (2), (4): Xaa is C or S

SEQ ID NO: 47367 - protein, 37 aa, Artificial Sequence; identical to SEQ ID NO: 10549
  GFR-binding peptide
  MOD_RES (34), (35): Xaa is C or S
  MOD_RES (12), (13), (14), (15), (16): Xaa is A or G
  MOD_RES (17), (18), (19), (20): Xaa is A or G or is absent

SEQ ID NO: 47368 - protein, 35 aa, Artificial Sequence
  GFR-binding peptide
  MOD_RES (2), (4), (35): Xaa is C or S
SXKXSRVIMVQVEKVKPKRGVVKAIKVSRLAQPVX

SEQ ID NO: 47369 - protein, 41 aa, Artificial Sequence; identical to SEQ ID NO: 10550
  GFR-binding peptide
  MOD_RES (2), (36), (37): Xaa is C or S
  MOD_RES (14), (15), (16), (17), (18): Xaa is A or G
  MOD_RES (19), (20), (21), (22): Xaa is A or G or is absent

SEQ ID NO: 47370 - protein, 40 aa, Artificial Sequence; identical to SEQ ID NO: 10551
  GFR-binding peptide
  MOD_RES (2), (36), (37): Xaa is C or S
  MOD_RES (14), (15), (16), (17), (18): Xaa is A or G
  MOD_RES (19), (20), (21), (22): Xaa is A or G or is absent

SEQ ID NO: 47371 - protein, 40 aa, Artificial Sequence
  GFR-binding peptide
  MOD_RES (2), (36): Xaa is C or S
EXKNHQLFNSLQEHQGQHPKIRYYLMTLPEEETPVXELGE

SEQ ID NO: 47372 - protein, 37 aa, Artificial Sequence; identical to SEQ ID NO: 10554
  GFR-binding peptide
  MOD_RES (1), (34), (35): Xaa is C or S
  MOD_RES (12), (13), (14), (15), (16): Xaa is A or G
  MOD_RES (17), (18), (19), (20): Xaa is A or G or is absent

SEQ ID NO: 47373 - protein, 40 aa, Artificial Sequence; identical to SEQ ID NO: 10555
  GFR-binding peptide
  MOD_RES (1), (3), (36), (37): Xaa is C or S
  MOD_RES (14), (15), (16), (17), (18): Xaa is A or G
  MOD_RES (19), (20), (21), (22): Xaa is A or G or is absent

SEQ ID NO: 47374 - protein, 35 aa, Artificial Sequence
  GFR-binding peptide
  MOD_RES (1), (3): Xaa is C or S
  MOD_RES (14), (15), (16), (17), (18): Xaa is A or G
  MOD_RES (19), (20), (21), (22): Xaa is A or G or is absent
XKXSRVIMSMEGIXXXXXXXXXMIQITINSLAQPV

SEQ ID NO: 47375 - protein, 32 aa, Artificial Sequence
  GFR-binding peptide
  MOD_RES (1), (32): Xaa is C or S
XSKVVMSMEGIVKPTRGVMIQITINSLDQPVX

SEQ ID NO: 47376 - protein, 41 aa, Artificial Sequence; identical to SEQ ID NO: 17723
  GFR-binding peptide
  MOD_RES (1), (38): Xaa is C or S
  MOD_RES (14), (15), (16), (17), (18): Xaa is A or G
  MOD_RES (19), (20), (21), (22): Xaa is A or G or is absent

SEQ ID NO: 47377 - protein, 38 aa, Artificial Sequence; identical to SEQ ID NO: 17724
  GFR-binding peptide
  MOD_RES (1), (38): Xaa is C or S
  MOD_RES (14), (15), (16), (17), (18): Xaa is A or G
  MOD_RES (19), (20), (21), (22): Xaa is A or G or is absent

SEQ ID NO: 47378 - protein, 35 aa, Artificial Sequence; identical to SEQ ID NO: 10556
  GFR-binding peptide
  MOD_RES (1), (3): Xaa is C or S
  MOD_RES (14), (15), (16), (17), (18): Xaa is A or G
  MOD_RES (19), (20), (21), (22): Xaa is A or G or is absent

SEQ ID NO: 47379 - protein, 37 aa, Artificial Sequence; identical to SEQ ID NO: 10557
  GFR-binding peptide
  MOD_RES (1), (32), (33): Xaa is C or S

SEQ ID NO: 47380 - protein, 35 aa, Artificial Sequence; identical to SEQ ID NO: 10558
  GFR-binding peptide
  MOD_RES (1), (3), (34), (35): Xaa is C or S

SEQ ID NO: 47381 - protein, 37 aa, Artificial Sequence
  GFR-binding peptide
  MOD_RES (1), (3), (37): Xaa is C or S
  MOD_RES (15), (16), (17), (18), (19): Xaa is A or G
  MOD_RES (20), (21), (22), (23): Xaa is A or G or is absent
XGXGEVVMESMEGIXXXXXXXXXMIQMTINSLETPVX

SEQ ID NO: 47382 - protein, 35 aa, Artificial Sequence; identical to SEQ ID NO: 10559
  GFR-binding peptide
  MOD_RES (34), (35): Xaa is C or S
  MOD_RES (12), (13), (14), (15), (16): Xaa is A or G
  MOD_RES (17), (18), (19), (20): Xaa is A or G or is absent

SEQ ID NO: 47383 - protein, 30 aa, Artificial Sequence; identical to SEQ ID NO: 10560
  GFR-binding peptide

SEQ ID NO: 47384 - protein, 38 aa, Artificial Sequence
  GFR-binding peptide
  MOD_RES (34), (35): Xaa is C or S
  MOD_RES (12), (13), (14), (15), (16): Xaa is A or G
  MOD_RES (17), (18), (19), (20): Xaa is A or G or is absent
ARVVMNSMEGIXXXXXXXXXMIQVTINSLQTPAXXPKP

SEQ ID NO: 47385 - protein, 38 aa, Artificial Sequence
  GFR-binding peptide
  MOD_RES (1), (35), (36): Xaa is C or S
  MOD_RES (13), (14), (15), (16), (17): Xaa is A or G
  MOD_RES (18), (19), (20), (21): Xaa is A or G or is absent
XGEVVMESMEGIXXXXXXXXXMIQMTINSLETPVXXAK

SEQ ID NO: 47386 - protein, 36 aa, Artificial Sequence; identical to SEQ ID NO: 10561
  GFR-binding peptide
  MOD_RES (2), (4), (36): Xaa is C or S

SEQ ID NO: 47387 - protein, 38 aa, Artificial Sequence
  GFR-binding peptide
  MOD_RES (32), (33): Xaa is C or S
GEVVMDSMEGIVVKENEDMIQMTINSLETPVXXAKPIK

SEQ ID NO: 47388 - protein, 42 aa, Artificial Sequence; identical to SEQ ID NO: 10562
  GFR-binding peptide
  MOD_RES (2), (36), (37): Xaa is C or S
  MOD_RES (14), (15), (16), (17), (18): Xaa is A or G
  MOD_RES (19), (20), (21), (22): Xaa is A or G or is absent

SEQ ID NO: 47389 - protein, 42 aa, Artificial Sequence
  GFR-binding peptide
  MOD_RES (2), (36): Xaa is C or S
  MOD_RES (14), (15), (16), (17), (18): Xaa is A or G
  MOD_RES (19), (20), (21), (22): Xaa is A or G or is absent
EXKNHQLFNSLQEXXXXXXXXXYYLMTLPEEETPVXELGEDN

SEQ ID NO: 47390 - protein, 34 aa, Artificial Sequence; identical to SEQ ID NO: 10565
  GFR-binding peptide
  MOD_RES (33), (34): Xaa is C or S
  MOD_RES (11), (12), (13), (14), (15): Xaa is A or G
  MOD_RES (16), (17), (18), (19): Xaa is A or G or is absent

SEQ ID NO: 47391 - protein, 38 aa, Artificial Sequence
  GFR-binding peptide
  MOD_RES (1), (34), (35): Xaa is C or S
  MOD_RES (12), (13), (14), (15), (16): Xaa is A or G
  MOD_RES (17), (18), (19), (20): Xaa is A or G or is absent
XSRVIMSMEGIXXXXXXXXXMIQITINSLAQPVXXPAA

SEQ ID NO: 47392 - protein, 37 aa, Artificial Sequence
  GFR-binding peptide
  MOD_RES (1), (1): Xaa is C or S
  MOD_RES (14), (15), (16), (17), (18): Xaa is A or G
  MOD_RES (19), (20), (21), (22): Xaa is A or G or is absent
XALHDELTNSLQEXXXXXXXXXYYLVTLPELQVQTPR

SEQ ID NO: 47393 - protein, 33 aa, Artificial Sequence; identical to SEQ ID NO: 17731
  GFR-binding peptide

SEQ ID NO: 47394 - protein, 37 aa, Artificial Sequence
  GFR-binding peptide
  MOD_RES (33), (34): Xaa is C or S
  MOD_RES (11), (12), (13), (14), (15): Xaa is A or G
  MOD_RES (16), (17), (18), (19): Xaa is A or G or is absent
EVVMEVQVEKXXXXXXXXXVKAMKVSRLETPVXXAKP

SEQ ID NO: 47395 - protein, 39 aa, Artificial Sequence
  GFR-binding peptide
  MOD_RES (33), (33): Xaa is C or S
NHQLFNSLQEHQGQHPKIRYYVMPLPEEETPVXELGEDN

SEQ ID NO: 47396 - protein, 37 aa, Artificial Sequence
  GFR-binding peptide
  MOD_RES (1), (3), (37): Xaa is C or S
XEXKNHQLFNSLQEHQGQHPKIRYYLMTLPEEETPVX

SEQ ID NO: 47397 - protein, 41 aa, Artificial Sequence; identical to SEQ ID NO: 17734
  GFR-binding peptide
  MOD_RES (37), (37): Xaa is C or S
  MOD_RES (13), (14), (15), (16), (17): Xaa is A or G
  MOD_RES (18), (19), (20), (21): Xaa is A or G or is absent

SEQ ID NO: 47398 - protein, 36 aa, Artificial Sequence; identical to SEQ ID NO: 17736
  GFR-binding peptide
  MOD_RES (2), (36): Xaa is C or S

SEQ ID NO: 47399 - protein, 35 aa, Artificial Sequence; identical to SEQ ID NO: 17737
  GFR-binding peptide

SEQ ID NO: 47400 - protein, 40 aa, Artificial Sequence
  GFR-binding peptide
  MOD_RES (2), (4), (35), (36): Xaa is C or S
SXKXSKVIMSMEGIIKPTKGIMIQITINSLDQSVXXPSAS

SEQ ID NO: 47401 - protein, 33 aa, Artificial Sequence
  GFR-binding peptide
  MOD_RES (31), (32): Xaa is C or S
RVVMNVQVEKIVNSSDDVKAVKVSRLQTPAXXP

SEQ ID NO: 47402 - protein, 36 aa, Artificial Sequence; identical to SEQ ID NO: 17741
  GFR-binding peptide
  MOD_RES (2), (2): Xaa is C or S

SEQ ID NO: 47403 - protein, 36 aa, Artificial Sequence; identical to SEQ ID NO: 10576
  GFR-binding peptide
  MOD_RES (34), (34): Xaa is C or S
  MOD_RES (12), (13), (14), (15), (16): Xaa is A or G
  MOD_RES (17), (18), (19), (20): Xaa is A or G or is absent

SEQ ID NO: 47404 - protein, 39 aa, Artificial Sequence
  GFR-binding peptide
  MOD_RES (1), (3), (37), (38): Xaa is C or S
  MOD_RES (15), (16), (17), (18), (19): Xaa is A or G
  MOD_RES (20), (21), (22), (23): Xaa is A or G or is absent
XGXARVVMNVQVEKXXXXXXXXXVKAVKVSRLQTPAXXP

SEQ ID NO: 47405 - protein, 36 aa, Artificial Sequence
  GFR-binding peptide
  MOD_RES (33), (33): Xaa is C or S
  MOD_RES (11), (12), (13), (14), (15): Xaa is A or G
  MOD_RES (16), (17), (18), (19): Xaa is A or G or is absent
NHQLFNSLQEXXXXXXXXXYYVMPLPEEETPVXELG

SEQ ID NO: 47406 - protein, 37 aa, Artificial Sequence
  GFR-binding peptide
  MOD_RES (1), (3), (37): Xaa is C or S
  MOD_RES (15), (16), (17), (18), (19): Xaa is A or G
  MOD_RES (20), (21), (22), (23): Xaa is A or G or is absent
XGXARVVMNSMEGIXXXXXXXXXMIQVTINSLQTPAX

SEQ ID NO: 47407 - protein, 42 aa, Artificial Sequence; identical to SEQ ID NO: 17742
  GFR-binding peptide
  MOD_RES (1), (3), (40): Xaa is C or S

SEQ ID NO: 47408 - protein, 36 aa, Artificial Sequence; identical to SEQ ID NO: 17744
  GFR-binding peptide
  MOD_RES (1), (1): Xaa is C or S
  MOD_RES (14), (15), (16), (17), (18): Xaa is A or G
  MOD_RES (19), (20), (21), (22): Xaa is A or G or is absent

SEQ ID NO: 47409 - protein, 41 aa, Artificial Sequence
  GFR-binding peptide
  MOD_RES (2), (4), (37), (38): Xaa is C or S
  MOD_RES (15), (16), (17), (18), (19): Xaa is A or G
  MOD_RES (20), (21), (22), (23): Xaa is A or G or is absent
SXKXSKVVMVQVEKXXXXXXXXXVKAIKVSRLDQPVXXPSA

SEQ ID NO: 47410 - protein, 39 aa, Artificial Sequence; identical to SEQ ID NO: 10579
  GFR-binding peptide
  MOD_RES (33), (33): Xaa is C or S
  MOD_RES (11), (12), (13), (14), (15): Xaa is A or G
  MOD_RES (16), (17), (18), (19): Xaa is A or G or is absent

SEQ ID NO: 47411 - protein, 34 aa, Artificial Sequence; identical to SEQ ID NO: 17746
  GFR-binding peptide

SEQ ID NO: 47412 - protein, 32 aa, Artificial Sequence; identical to SEQ ID NO: 10580
  GFR-binding peptide
  MOD_RES (32), (32): Xaa is C or S

SEQ ID NO: 47413 - protein, 41 aa, Artificial Sequence; identical to SEQ ID NO: 10583
  GFR-binding peptide
  MOD_RES (2), (4), (36), (37): Xaa is C or S

SEQ ID NO: 47414 - protein, 39 aa, Artificial Sequence; identical to SEQ ID NO: 10584
  GFR-binding peptide
  MOD_RES (2), (4), (38), (39): Xaa is C or S
  MOD_RES (16), (17), (18), (19), (20): Xaa is A or G
  MOD_RES (21), (22), (23), (24): Xaa is A or G or is absent

SEQ ID NO: 47415 - protein, 42 aa, Artificial Sequence; identical to SEQ ID NO: 10585
  GFR-binding peptide
  MOD_RES (2), (4), (38), (39): Xaa is C or S
  MOD_RES (16), (17), (18), (19), (20): Xaa is A or G
  MOD_RES (21), (22), (23), (24): Xaa is A or G or is absent

SEQ ID NO: 47416 - protein, 32 aa, Artificial Sequence
  GFR-binding peptide
  MOD_RES (31), (32): Xaa is C or S
SKVVMSMEGIVKPTRGVMIQITINSLDQPVXX

SEQ ID NO: 47417 - protein, 43 aa, Artificial Sequence
  GFR-binding peptide
  MOD_RES (2), (4), (38): Xaa is C or S
RXEXKNHQLFNSLQEHQGQHPKIRYYVMPLPEEETPVXELGED

SEQ ID NO: 47418 - protein, 33 aa, Artificial Sequence
  GFR-binding peptide
  MOD_RES (31), (31): Xaa is C or S
RVVMNVTAKKIVNSSDDIKRVQVPRLKTPAXTP

SEQ ID NO: 47419 - protein, 35 aa, Artificial Sequence
  GFR-binding peptide
  MOD_RES (31), (31): Xaa is C or S
RVVMNSMEGIIVNSSDDMIQVTINSLKTPAXTPKT

SEQ ID NO: 47420 - protein, 37 aa, Artificial Sequence
  GFR-binding peptide
  MOD_RES (33), (33): Xaa is C or S
  MOD_RES (11), (12), (13), (14), (15): Xaa is A or G
  MOD_RES (16), (17), (18), (19): Xaa is A or G or is absent
NHQLFNSLQEXXXXXXXXXYYVMPLPEEETPVXELGE

SEQ ID NO: 47421 - protein, 43 aa, Artificial Sequence; identical to SEQ ID NO: 10588
  GFR-binding peptide
  MOD_RES (2), (4), (38), (39): Xaa is C or S
  MOD_RES (16), (17), (18), (19), (20): Xaa is A or G
  MOD_RES (21), (22), (23), (24): Xaa is A or G or is absent

SEQ ID NO: 47422 - protein, 37 aa, Artificial Sequence
  GFR-binding peptide
  MOD_RES (1), (3), (36), (37): Xaa is C or S
  MOD_RES (14), (15), (16), (17), (18): Xaa is A or G
  MOD_RES (19), (20), (21), (22): Xaa is A or G or is absent
XKXSKVIMVTAKKXXXXXXXXXIKRIQVPRLDQSVXX

SEQ ID NO: 47423 - protein, 42 aa, Artificial Sequence; identical to SEQ ID NO: 17751
  GFR-binding peptide
  MOD_RES (1), (3), (40): Xaa is C or S

SEQ ID NO: 47424 - protein, 44 aa, Artificial Sequence
  GFR-binding peptide
  MOD_RES (2), (4), (38), (39): Xaa is C or S
  MOD_RES (16), (17), (18), (19), (20): Xaa is A or G
  MOD_RES (21), (22), (23), (24): Xaa is A or G or is absent
RXGXGEVVMEVQVEKXXXXXXXXXVKAMKVSRLETPVXXAKPIS

SEQ ID NO: 47425 - protein, 36 aa, Artificial Sequence
  GFR-binding peptide
  MOD_RES (2), (34), (35): Xaa is C or S
GXGEVVMDVTAKKVVKENEDIKRMQVPRLETPVXXA

SEQ ID NO: 47426 - protein, 41 aa, Artificial Sequence; identical to SEQ ID NO: 17756
  GFR-binding peptide
  MOD_RES (37), (37): Xaa is C or S

SEQ ID NO: 47427 - protein, 41 aa, Artificial Sequence; identical to SEQ ID NO: 10594
  GFR-binding peptide
  MOD_RES (1), (3), (37), (38): Xaa is C or S
  MOD_RES (15), (16), (17), (18), (19): Xaa is A or G
  MOD_RES (20), (21), (22), (23): Xaa is A or G or is absent

SEQ ID NO: 47428 - protein, 35 aa, Artificial Sequence
  GFR-binding peptide
  MOD_RES (1), (34), (35): Xaa is C or S
  MOD_RES (12), (13), (14), (15), (16): Xaa is A or G
  MOD_RES (17), (18), (19), (20): Xaa is A or G or is absent
XSRVIMVTAKKXXXXXXXXXIKRIQVPRLAQPVXX

SEQ ID NO: 47429 - protein, 41 aa, Artificial Sequence
  GFR-binding peptide
  MOD_RES (1), (35), (36): Xaa is C or S
  MOD_RES (13), (14), (15), (16), (17): Xaa is A or G
  MOD_RES (18), (19), (20), (21): Xaa is A or G or is absent
XGEVVMEVTAKKXXXXXXXXXIKRMQVPRLETPVXXAKPIS

SEQ ID NO: 47430 - protein, 41 aa, Artificial Sequence
  GFR-binding peptide
  MOD_RES (1), (3), (40): Xaa is C or S
  MOD_RES (16), (17), (18), (19), (20): Xaa is A or G
  MOD_RES (21), (22), (23), (24): Xaa is A or G or is absent
XKXALHDELTNSLQEXXXXXXXXXYYVVPLPELQVQTPRXQ

SEQ ID NO: 47431 - protein, 34 aa, Artificial Sequence
  GFR-binding peptide
  MOD_RES (33), (33): Xaa is C or S
  MOD_RES (11), (12), (13), (14), (15): Xaa is A or G
  MOD_RES (16), (17), (18), (19): Xaa is A or G or is absent
RVVMNVQVEKXXXXXXXXXVKAVKVSRLKTPAXT

SEQ ID NO: 47432 - protein, 38 aa, Artificial Sequence
  GFR-binding peptide
  MOD_RES (2), (4), (36), (37): Xaa is C or S
RXGXGEVVMDVQVEKVVKENEDVKAMKVSRLETPVXXA

SEQ ID NO: 47433 - protein, 36 aa, Artificial Sequence
  GFR-binding peptide
  MOD_RES (1), (34), (35): Xaa is C or S
  MOD_RES (12), (13), (14), (15), (16): Xaa is A or G
  MOD_RES (17), (18), (19), (20): Xaa is A or G or is absent
XSKVIMSMEGIXXXXXXXXXMIQITINSLDQSVXXP

SEQ ID NO: 47434 - protein, 40 aa, Artificial Sequence
  GFR-binding peptide
  MOD_RES (1), (3), (35), (36): Xaa is C or S
XGXARVVMNVQVEKIVNSSDDVKAVKVSRLQTPAXXPKPV

SEQ ID NO: 47435 - protein, 37 aa, Artificial Sequence
  GFR-binding peptide
  MOD_RES (35), (35): Xaa is C or S
  MOD_RES (11), (12), (13), (14), (15): Xaa is A or G
  MOD_RES (16), (17), (18), (19): Xaa is A or G or is absent
HEELRNSLQEXXXXXXXXXYYVVPLPEHHVRSPQXKV

SEQ ID NO: 47436 - protein, 39 aa, Artificial Sequence; identical to SEQ ID NO: 17761
  GFR-binding peptide
  MOD_RES (1), (3): Xaa is C or S
  MOD_RES (16), (17), (18), (19), (20): Xaa is A or G
  MOD_RES (21), (22), (23), (24): Xaa is A or G or is absent

SEQ ID NO: 47437 - protein, 35 aa, Artificial Sequence; identical to SEQ ID NO: 10597
  GFR-binding peptide
  MOD_RES (31), (31): Xaa is C or S

SEQ ID NO: 47438 - protein, 36 aa, Artificial Sequence
  GFR-binding peptide
  MOD_RES (2), (34), (35): Xaa is C or S
GXSRVVMNVTAKKIVNSSDDIKRVQVPRLKTPAXXP

SEQ ID NO: 47439 - protein, 33 aa, Artificial Sequence
  GFR-binding peptide
  MOD_RES (31), (32): Xaa is C or S
EVVMEVQVEKVVKDYEDVKAMKVSRLETPVXXA

SEQ ID NO: 47440 - protein, 32 aa, Artificial Sequence
  GFR-binding peptide
  MOD_RES (31), (32): Xaa is C or S
SKVIMSMEGIIKPTKGIMIQITINSLDQSVXX

SEQ ID NO: 47441 - protein, 43 aa, Artificial Sequence; identical to SEQ ID NO: 17762
  GFR-binding peptide
  MOD_RES (1), (3), (40): Xaa is C or S

SEQ ID NO: 47442 - protein, 36 aa, Artificial Sequence; identical to SEQ ID NO: 17763
  GFR-binding peptide
  MOD_RES (33), (33): Xaa is C or S

SEQ ID NO: 47443 - protein, 41 aa, Artificial Sequence; identical to SEQ ID NO: 17764
  GFR-binding peptide
  MOD_RES (1), (3), (40): Xaa is C or S
  MOD_RES (16), (17), (18), (19), (20): Xaa is A or G
  MOD_RES (21), (22), (23), (24): Xaa is A or G or is absent

SEQ ID NO: 47444 - protein, 32 aa, Artificial Sequence; identical to SEQ ID NO: 10600
  GFR-binding peptide
  MOD_RES (2), (2): Xaa is C or S

SEQ ID NO: 47445 - protein, 42 aa, Artificial Sequence; identical to SEQ ID NO: 10601
  GFR-binding peptide
  MOD_RES (2), (4), (36), (37): Xaa is C or S

SEQ ID NO: 47446 - protein, 40 aa, Artificial Sequence; identical to SEQ ID NO: 10602
  GFR-binding peptide
  MOD_RES (2), (35), (36): Xaa is C or S
  MOD_RES (13), (14), (15), (16), (17): Xaa is A or G
  MOD_RES (18), (19), (20), (21): Xaa is A or G or is absent

SEQ ID NO: 47447 - protein, 36 aa, Artificial Sequence; identical to SEQ ID NO: 10604
  GFR-binding peptide
  MOD_RES (1), (3): Xaa is C or S
  MOD_RES (15), (16), (17), (18), (19): Xaa is A or G
  MOD_RES (20), (21), (22), (23): Xaa is A or G or is absent

SEQ ID NO: 47448 - protein, 43 aa, Artificial Sequence
  GFR-binding peptide
  MOD_RES (1), (3), (37), (38): Xaa is C or S
  MOD_RES (15), (16), (17), (18), (19): Xaa is A or G
  MOD_RES (20), (21), (22), (23): Xaa is A or G or is absent
XGXGEVVMEVTAKKXXXXXXXXXIKRMQVPRLETPVXXAKPIS

SEQ ID NO: 47449 - protein, 39 aa, Artificial Sequence
  GFR-binding peptide
  MOD_RES (2), (36): Xaa is C or S
EXKNHQLFNSLQEHQGQHPKIRYYVMPLPEEETPVXELG

SEQ ID NO: 47450 - protein, 37 aa, Artificial Sequence
  GFR-binding peptide
  MOD_RES (1), (34), (35): Xaa is C or S
  MOD_RES (12), (13), (14), (15), (16): Xaa is A or G
  MOD_RES (17), (18), (19), (20): Xaa is A or G or is absent
XSRVIMSMEGIXXXXXXXXXMIQITINSLAQPVXXPA

SEQ ID NO: 47451 - protein, 36 aa, Artificial Sequence
  GFR-binding peptide
  MOD_RES (32), (33): Xaa is C or S
GEVVMEVTAKKVVKDYEDIKRMQVPRLETPVXXAKP

SEQ ID NO: 47452 - protein, 40 aa, Artificial Sequence; identical to SEQ ID NO: 10606
  GFR-binding peptide
  MOD_RES (2), (4), (38): Xaa is C or S
  MOD_RES (16), (17), (18), (19), (20): Xaa is A or G
  MOD_RES (21), (22), (23), (24): Xaa is A or G or is absent

SEQ ID NO: 47453 - protein, 39 aa, Artificial Sequence; identical to SEQ ID NO: 17768
  GFR-binding peptide
  MOD_RES (37), (37): Xaa is C or S

SEQ ID NO: 47454 - protein, 41 aa, Artificial Sequence; identical to SEQ ID NO: 17769
  GFR-binding peptide
  MOD_RES (2), (36): Xaa is C or S

SEQ ID NO: 47455 - protein, 41 aa, Artificial Sequence; identical to SEQ ID NO: 10607
  GFR-binding peptide
  MOD_RES (2), (4), (35), (36): Xaa is C or S

SEQ ID NO: 47456 - protein, 39 aa, Artificial Sequence
  GFR-binding peptide
  MOD_RES (2), (36): Xaa is C or S
  MOD_RES (14), (15), (16), (17), (18): Xaa is A or G
  MOD_RES (19), (20), (21), (22): Xaa is A or G or is absent
GXSRVVMNVTAKKXXXXXXXXXIKRVQVPRLKTPAXTPK

SEQ ID NO: 47457 - protein, 35 aa, Artificial Sequence; identical to SEQ ID NO: 10610
  GFR-binding peptide
  MOD_RES (1), (3), (35): Xaa is C or S

SEQ ID NO: 47458 - protein, 35 aa, Artificial Sequence; identical to SEQ ID NO: 10611
  GFR-binding peptide
  MOD_RES (1), (33), (34): Xaa is C or S

SEQ ID NO: 47459 - protein, 38 aa, Artificial Sequence
  GFR-binding peptide
  MOD_RES (1), (33), (34): Xaa is C or S
XSRVVMNVQVEKIVNSSDDVKAVKVSRLKTPAXXPKPV

SEQ ID NO: 47460 - protein, 35 aa, Artificial Sequence; identical to SEQ ID NO: 17773
  GFR-binding peptide
  MOD_RES (1), (35): Xaa is C or S
  MOD_RES (13), (14), (15), (16), (17): Xaa is A or G
  MOD_RES (18), (19), (20), (21): Xaa is A or G or is absent

SEQ ID NO: 47461 - protein, 32 aa, Artificial Sequence
  GFR-binding peptide
  MOD_RES (1), (1): Xaa is C or S
XSRVVMNSMEGIIVNSSDDMIQVTINSLKTPA

SEQ ID NO: 47462 - protein, 40 aa, Artificial Sequence; identical to SEQ ID NO: 10613
  GFR-binding peptide
  MOD_RES (2), (34), (35): Xaa is C or S

SEQ ID NO: 47463 - protein, 36 aa, Artificial Sequence; identical to SEQ ID NO: 10616
  GFR-binding peptide
  MOD_RES (1), (34), (35): Xaa is C or S
  MOD_RES (12), (13), (14), (15), (16): Xaa is A or G
  MOD_RES (17), (18), (19), (20): Xaa is A or G or is absent

SEQ ID NO: 47464 - protein, 36 aa, Artificial Sequence
  GFR-binding peptide
  MOD_RES (2), (35), (36): Xaa is C or S
  MOD_RES (13), (14), (15), (16), (17): Xaa is A or G
  MOD_RES (18), (19), (20), (21): Xaa is A or G or is absent
KXSRVIMVTAKKXXXXXXXXXIKRIQVPRLAQPVXX

SEQ ID NO: 47465 - protein, 40 aa, Artificial Sequence; identical to SEQ ID NO: 17774
  GFR-binding peptide
  MOD_RES (1), (38): Xaa is C or S
  MOD_RES (14), (15), (16), (17), (18): Xaa is A or G
  MOD_RES (19), (20), (21), (22): Xaa is A or G or is absent

SEQ ID NO: 47466 - protein, 37 aa, Artificial Sequence
  GFR-binding peptide
  MOD_RES (33), (33): Xaa is C or S
NHQLFNSLQEHQGQHPKIRYYLMTLPEEETPVXELGE

SEQ ID NO: 47467 - protein, 37 aa, Artificial Sequence; identical to SEQ ID NO: 10617
  GFR-binding peptide
  MOD_RES (1), (33), (34): Xaa is C or S

SEQ ID NO: 47468 - protein, 35 aa, Artificial Sequence
  GFR-binding peptide
  MOD_RES (1), (3), (35): Xaa is C or S
XGXGEVVMDVQVEKVVKENEDVKAMKVSRLETPVX

SEQ ID NO: 47469 - protein, 40 aa, Artificial Sequence; identical to SEQ ID NO: 10618
  GFR-binding peptide
  MOD_RES (1), (3), (34), (35): Xaa is C or S

SEQ ID NO: 47470 - protein, 34 aa, Artificial Sequence; identical to SEQ ID NO: 17778
  GFR-binding peptide
  MOD_RES (1), (1): Xaa is C or S

SEQ ID NO: 47471 - protein, 37 aa, Artificial Sequence; identical to SEQ ID NO: 17779
  GFR-binding peptide
  MOD_RES (36), (36): Xaa is C or S

SEQ ID NO: 47472 - protein, 39 aa, Artificial Sequence; identical to SEQ ID NO: 17780
  GFR-binding peptide
  MOD_RES (1), (38): Xaa is C or S

SEQ ID NO: 47473 - protein, 35 aa, Artificial Sequence
  GFR-binding peptide
  MOD_RES (1), (32), (33): Xaa is C or S
XSKVIMVTAKKIKPTKGIIKRIQVPRLDQSVXXPS

SEQ ID NO: 47474 - protein, 38 aa, Artificial Sequence
  GFR-binding peptide
  MOD_RES (37), (37): Xaa is C or S
  MOD_RES (13), (14), (15), (16), (17): Xaa is A or G
  MOD_RES (18), (19), (20), (21): Xaa is A or G or is absent
ELHEELRNSLQEXXXXXXXXXYYLVTLPEHHVRSPQXK

SEQ ID NO: 47475 - protein, 39 aa, Artificial Sequence
  GFR-binding peptide
  MOD_RES (1), (33), (34): Xaa is C or S
XGEVVMESMEGIVVKDYEDMIQMTINSLETPVXXAKPIS

SEQ ID NO: 47476 - protein, 40 aa, Artificial Sequence
  GFR-binding peptide
  MOD_RES (34), (35): Xaa is C or S
  MOD_RES (12), (13), (14), (15), (16): Xaa is A or G
  MOD_RES (17), (18), (19), (20): Xaa is A or G or is absent
SRVVMNVQVEKXXXXXXXXXVKAVKVSRLKTPAXXPKPVY

SEQ ID NO: 47477 - protein, 38 aa, Artificial Sequence; identical to SEQ ID NO: 10625
  GFR-binding peptide
  MOD_RES (2), (33), (34): Xaa is C or S

SEQ ID NO: 47478 - protein, 40 aa, Artificial Sequence; identical to SEQ ID NO: 36862
  GFR-binding peptide
  MOD_RES (1), (3), (36), (37): Xaa is C or S
  MOD_RES (14), (15), (16), (17), (18): Xaa is A or G
  MOD_RES (19), (20), (21), (22): Xaa is A or G or is absent

SEQ ID NO: 47479 - protein, 34 aa, Artificial Sequence; identical to SEQ ID NO: 10627
  GFR-binding peptide
  MOD_RES (1), (3), (34): Xaa is C or S

SEQ ID NO: 47480 - protein, 43 aa, Artificial Sequence
  GFR-binding peptide
  MOD_RES (2), (39): Xaa is C or S
KXALHDELTNSLQEFIPKKRVIEYYVVPLPELQVQTPRXQVNR

SEQ ID NO: 47481 - protein, 37 aa, Artificial Sequence; identical to SEQ ID NO: 10628
  GFR-binding peptide
  MOD_RES (2), (4): Xaa is C or S
  MOD_RES (16), (17), (18), (19), (20): Xaa is A or G
  MOD_RES (21), (22), (23), (24): Xaa is A or G or is absent

SEQ ID NO: 47482 - protein, 43 aa, Artificial Sequence; identical to SEQ ID NO: 17786
  GFR-binding peptide
  MOD_RES (1), (3), (37): Xaa is C or S
  MOD_RES (15), (16), (17), (18), (19): Xaa is A or G
  MOD_RES (20), (21), (22), (23): Xaa is A or G or is absent

SEQ ID NO: 47483 - protein, 41 aa, Artificial Sequence
  GFR-binding peptide
  MOD_RES (2), (4), (38): Xaa is C or S
RXEXKNHQLFNSLQEHQGQHPKIRYYLMTLPEEETPVXELG

SEQ ID NO: 47484 - protein, 39 aa, Artificial Sequence
  GFR-binding peptide
  MOD_RES (33), (34): Xaa is C or S
  MOD_RES (11), (12), (13), (14), (15): Xaa is A or G
  MOD_RES (16), (17), (18), (19): Xaa is A or G or is absent
SKVVMVTAKKXXXXXXXXXIKRIQVPRLDQPVXXPSASA

SEQ ID NO: 47485 - protein, 39 aa, Artificial Sequence
  GFR-binding peptide
  MOD_RES (1), (3), (34), (35): Xaa is C or S
XKXSKVIMVTAKKIKPTKGIIKRIQVPRLDQSVXXPSAS

SEQ ID NO: 47486 - protein, 33 aa, Artificial Sequence
  GFR-binding peptide
KNHQLFNSLQEHQGQHPKIRYYLMTLPEEETPV

SEQ ID NO: 47487 - protein, 41 aa, Artificial Sequence
  GFR-binding peptide
  MOD_RES (1), (3), (35), (36): Xaa is C or S
XGXARVVMNVQVEKIVNSSDDVKAVKVSRLQTPAXXPKPVT

SEQ ID NO: 47488 - protein, 43 aa, Artificial Sequence
  GFR-binding peptide
  MOD_RES (1), (3), (37), (38): Xaa is C or S
  MOD_RES (15), (16), (17), (18), (19): Xaa is A or G
  MOD_RES (20), (21), (22), (23): Xaa is A or G or is absent
XGXARVVMNVQVEKXXXXXXXXXVKAVKVSRLQTPAXXPKPVT

SEQ ID NO: 47489 - protein, 38 aa, Artificial Sequence
  GFR-binding peptide
  MOD_RES (1), (3), (36), (37): Xaa is C or S
  MOD_RES (14), (15), (16), (17), (18): Xaa is A or G
  MOD_RES (19), (20), (21), (22): Xaa is A or G or is absent
XKXSKVVMSMEGIXXXXXXXXXMIQITINSLDQPVXXP

SEQ ID NO: 47490 - protein, 39 aa, Artificial Sequence; identical to SEQ ID NO: 17792
  GFR-binding peptide
  MOD_RES (1), (3), (37): Xaa is C or S
  MOD_RES (15), (16), (17), (18), (19): Xaa is A or G
  MOD_RES (20), (21), (22), (23): Xaa is A or G or is absent

SEQ ID NO: 47491 - protein, 36 aa, Artificial Sequence; identical to SEQ ID NO: 10641
  GFR-binding peptide
  MOD_RES (1), (35): Xaa is C or S
  MOD_RES (13), (14), (15), (16), (17): Xaa is A or G
  MOD_RES (18), (19), (20), (21): Xaa is A or G or is absent

SEQ ID NO: 47492 - protein, 40 aa, Artificial Sequence; identical to SEQ ID NO: 17797
  GFR-binding peptide
  MOD_RES (34), (34): Xaa is C or S
  MOD_RES (12), (13), (14), (15), (16): Xaa is A or G
  MOD_RES (17), (18), (19), (20): Xaa is A or G or is absent

SEQ ID NO: 47493 - protein, 39 aa, Artificial Sequence
  GFR-binding peptide
  MOD_RES (2), (4): Xaa is C or S
AXAXELHEELRNSLQELKPKKRVYEYYVVPLPEHHVRSP

SEQ ID NO: 47494 - protein, 37 aa, Artificial Sequence; identical to SEQ ID NO: 10643
  GFR-binding peptide
  MOD_RES (32), (33): Xaa is C or S

SEQ ID NO: 47495 - protein, 35 aa, Artificial Sequence
  GFR-binding peptide
  MOD_RES (1), (3), (35): Xaa is C or S
XGXARVVMNVTAKKIVNSSDDIKRVQVPRLQTPAX

SEQ ID NO: 47496 - protein, 37 aa, Artificial Sequence
  GFR-binding peptide
  MOD_RES (2), (35), (36): Xaa is C or S
  MOD_RES (13), (14), (15), (16), (17): Xaa is A or G
  MOD_RES (18), (19), (20), (21): Xaa is A or G or is absent
KXSKVVMSMEGIXXXXXXXXXMIQITINSLDQPVXXP

SEQ ID NO: 47497 - protein, 32 aa, Artificial Sequence
  GFR-binding peptide
  MOD_RES (32), (32): Xaa is C or S
SRVVMNVQVEKIVNSSDDVKAVKVSRLKTPAX

SEQ ID NO: 47498 - protein, 37 aa, Artificial Sequence; identical to SEQ ID NO: 10644
  GFR-binding peptide
  MOD_RES (2), (4): Xaa is C or S
  MOD_RES (16), (17), (18), (19), (20): Xaa is A or G
  MOD_RES (21), (22), (23), (24): Xaa is A or G or is absent

SEQ ID NO: 47499 - protein, 37 aa, Artificial Sequence; identical to SEQ ID NO: 10646
  GFR-binding peptide
  MOD_RES (2), (33), (34): Xaa is C or S

SEQ ID NO: 47500 - protein, 37 aa, Artificial Sequence
  GFR-binding peptide
  MOD_RES (35), (35): Xaa is C or S
  MOD_RES (11), (12), (13), (14), (15): Xaa is A or G
  MOD_RES (16), (17), (18), (19): Xaa is A or G or is absent
HEELRNSLQEXXXXXXXXXYYLVTLPEHHVRSPQXKV

SEQ ID NO: 47501 - protein, 40 aa, Artificial Sequence
  GFR-binding peptide
  MOD_RES (2), (36), (37): Xaa is C or S
  MOD_RES (14), (15), (16), (17), (18): Xaa is A or G
  MOD_RES (19), (20), (21), (22): Xaa is A or G or is absent
GXARVVMNVQVEKXXXXXXXXXVKAVKVSRLQTPAXXPKP

SEQ ID NO: 47502 - protein, 35 aa, Artificial Sequence; identical to SEQ ID NO: 10651
  GFR-binding peptide
  MOD_RES (1), (35): Xaa is C or S
  MOD_RES (13), (14), (15), (16), (17): Xaa is A or G
  MOD_RES (18), (19), (20), (21): Xaa is A or G or is absent

SEQ ID NO: 47503 - protein, 34 aa, Artificial Sequence; identical to SEQ ID NO: 10652
  GFR-binding peptide
  MOD_RES (1), (34): Xaa is C or S
  MOD_RES (12), (13), (14), (15), (16): Xaa is A or G
  MOD_RES (17), (18), (19), (20): Xaa is A or G or is absent

SEQ ID NO: 47504 - protein, 36 aa, Artificial Sequence
  GFR-binding peptide
  MOD_RES (1), (3), (35), (36): Xaa is C or S
XGXSRVVMNVQVEKIVNSSDDVKAVKVSRLKTPAXX

SEQ ID NO: 47505 - protein, 34 aa, Artificial Sequence
  GFR-binding peptide
  MOD_RES (2), (34): Xaa is C or S
GXSRVVMNSMEGIIVNSSDDMIQVTINSLKTPAX

SEQ ID NO: 47506 - protein, 34 aa, Artificial Sequence; identical to SEQ ID NO: 10654
  GFR-binding peptide
  MOD_RES (31), (32): Xaa is C or S

SEQ ID NO: 47507 - protein, 41 aa, Artificial Sequence; identical to SEQ ID NO: 10655
  GFR-binding peptide
  MOD_RES (2), (36): Xaa is C or S
  MOD_RES (14), (15), (16), (17), (18): Xaa is A or G
  MOD_RES (19), (20), (21), (22): Xaa is A or G or is absent

SEQ ID NO: 47508 - protein, 42 aa, Artificial Sequence
  GFR-binding peptide
  MOD_RES (2), (36), (37): Xaa is C or S
  MOD_RES (14), (15), (16), (17), (18): Xaa is A or G
  MOD_RES (19), (20), (21), (22): Xaa is A or G or is absent
GXARVVMNVQVEKXXXXXXXXXVKAVKVSRLQTPAXXPKPVT

SEQ ID NO: 47509 - protein, 41 aa, Artificial Sequence; identical to SEQ ID NO: 17801
  GFR-binding peptide
  MOD_RES (1), (3), (40): Xaa is C or S

SEQ ID NO: 47510 - protein, 39 aa, Artificial Sequence
  GFR-binding peptide
  MOD_RES (1), (38): Xaa is C or S
XALHDELTNSLQEFIPKKRVIEYYVVPLPELQVQTPRXQ

SEQ ID NO: 47511 - protein, 37 aa, Artificial Sequence; identical to SEQ ID NO: 17803
  GFR-binding peptide
  MOD_RES (34), (34): Xaa is C or S

SEQ ID NO: 47512 - protein, 36 aa, Artificial Sequence; identical to SEQ ID NO: 10659
  GFR-binding peptide
  MOD_RES (1), (33), (34): Xaa is C or S

SEQ ID NO: 47513 - protein, 31 aa, Artificial Sequence
  GFR-binding peptide
  MOD_RES (1), (1): Xaa is C or S
XSKVIMSMEGIIKPTKGIMIQITINSLDQSV

SEQ ID NO: 47514 - protein, 37 aa, Artificial Sequence
  GFR-binding peptide
  MOD_RES (1), (35), (36): Xaa is C or S
  MOD_RES (13), (14), (15), (16), (17): Xaa is A or G
  MOD_RES (18), (19), (20), (21): Xaa is A or G or is absent
XGEVVMEVQVEKXXXXXXXXXVKAMKVSRLETPVXXA

SEQ ID NO: 47515 - protein, 44 aa, Artificial Sequence
  GFR-binding peptide
  MOD_RES (2), (4), (41): Xaa is C or S
EXKXALHDELTNSLQEFIPKKRVIEYYVVPLPELQVQTPRXQVN

SEQ ID NO: 47516 - protein, 39 aa, Artificial Sequence; identical to SEQ ID NO: 10662
  GFR-binding peptide
  MOD_RES (1), (33), (34): Xaa is C or S

SEQ ID NO: 47517 - protein, 36 aa, Artificial Sequence
  GFR-binding peptide
  MOD_RES (1), (3), (36): Xaa is C or S
  MOD_RES (14), (15), (16), (17), (18): Xaa is A or G
  MOD_RES (19), (20), (21), (22): Xaa is A or G or is absent
XKXSRVIMVTAKKXXXXXXXXXIKRIQVPRLAQPVX

SEQ ID NO: 47518 - protein, 35 aa, Artificial Sequence; identical to SEQ ID NO: 10663
  GFR-binding peptide
  MOD_RES (2), (35): Xaa is C or S
  MOD_RES (13), (14), (15), (16), (17): Xaa is A or G
  MOD_RES (18), (19), (20), (21): Xaa is A or G or is absent

SEQ ID NO: 47519 - protein, 40 aa, Artificial Sequence; identical to SEQ ID NO: 17806
  GFR-binding peptide
  MOD_RES (1), (38): Xaa is C or S
  MOD_RES (14), (15), (16), (17), (18): Xaa is A or G
  MOD_RES (19), (20), (21), (22): Xaa is A or G or is absent

SEQ ID NO: 47520 - protein, 36 aa, Artificial Sequence; identical to SEQ ID NO: 10664
  GFR-binding peptide
  MOD_RES (33), (34): Xaa is C or S
  MOD_RES (11), (12), (13), (14), (15): Xaa is A or G
  MOD_RES (16), (17), (18), (19): Xaa is A or G or is absent

SEQ ID NO: 47521 - protein, 32 aa, Artificial Sequence
  GFR-binding peptide
  MOD_RES (31), (31): Xaa is C or S
RVVMNVQVEKIVNSSDDVKAVKVSRLKTPAXT

SEQ ID NO: 47522 - protein, 39 aa, Artificial Sequence
  GFR-binding peptide
  MOD_RES (1), (3), (34), (35): Xaa is C or S
XKXSKVVMVTAKKVKPTRGVIKRIQVPRLDQPVXXPSAS

SEQ ID NO: 47523 - protein, 45 aa, Artificial Sequence
  GFR-binding peptide
  MOD_RES (2), (4), (41): Xaa is C or S
  MOD_RES (17), (18), (19), (20), (21): Xaa is A or G
  MOD_RES (22), (23), (24), (25): Xaa is A or G or is absent
AXAXELHEELRNSLQEXXXXXXXXXYYVVPLPEHHVRSPQXKVSS

SEQ ID NO: 47524 - protein, 34 aa, Artificial Sequence; identical to SEQ ID NO: 17808
  GFR-binding peptide

SEQ ID NO: 47525 - protein, 38 aa, Artificial Sequence
  GFR-binding peptide
  MOD_RES (1), (34), (35): Xaa is C or S
  MOD_RES (12), (13), (14), (15), (16): Xaa is A or G
  MOD_RES (17), (18), (19), (20): Xaa is A or G or is absent
XSKVVMSMEGIXXXXXXXXXMIQITINSLDQPVXXPSA

SEQ ID NO: 47526 - protein, 36 aa, Artificial Sequence
  GFR-binding peptide
  MOD_RES (1), (35): Xaa is C or S
  MOD_RES (13), (14), (15), (16), (17): Xaa is A or G
  MOD_RES (18), (19), (20), (21): Xaa is A or G or is absent
XKNHQLFNSLQEXXXXXXXXXYYVMPLPEEETPVXE

SEQ ID NO: 47527 - protein, 37 aa, Artificial Sequence
  GFR-binding peptide
  MOD_RES (1), (3), (34), (35): Xaa is C or S
XKXSRVIMVTAKKVKPKRGVIKRIQVPRLAQPVXXPA

SEQ ID NO: 47528 - protein, 39 aa, Artificial Sequence; identical to SEQ ID NO: 10666
  GFR-binding peptide
  MOD_RES (2), (34), (35): Xaa is C or S

SEQ ID NO: 47529 - protein, 35 aa, Artificial Sequence; identical to SEQ ID NO: 17810
  GFR-binding peptide
  MOD_RES (35), (35): Xaa is C or S

SEQ ID NO: 47530 - protein, 40 aa, Artificial Sequence
  GFR-binding peptide
  MOD_RES (2), (4), (36), (37): Xaa is C or S
HXGXSRVVMNVQVEKIVNSSDDVKAVKVSRLKTPAXXPKP

SEQ ID NO: 47531 - protein, 39 aa, Artificial Sequence
  GFR-binding peptide
  MOD_RES (36), (36): Xaa is C or S
  MOD_RES (12), (13), (14), (15), (16): Xaa is A or G
  MOD_RES (17), (18), (19), (20): Xaa is A or G or is absent
LHEELRNSLQEXXXXXXXXXYYLVTLPEHHVRSPQXKVS

SEQ ID NO: 47532 - protein, 37 aa, Artificial Sequence
  GFR-binding peptide
  MOD_RES (33), (33): Xaa is C or S
NHQLFNSLQEHQGQHPKIRYYVMPLPEEETPVXELGE

SEQ ID NO: 47533 - protein, 37 aa, Artificial Sequence
  GFR-binding peptide
  MOD_RES (1), (3): Xaa is C or S
  MOD_RES (16), (17), (18), (19), (20): Xaa is A or G
  MOD_RES (21), (22), (23), (24): Xaa is A or G or is absent
XKXALHDELTNSLQEXXXXXXXXXYYLVTLPELQVQT

SEQ ID NO: 47534 - protein, 35 aa, Artificial Sequence; identical to SEQ ID NO: 10669
  GFR-binding peptide
  MOD_RES (2), (2): Xaa is C or S
  MOD_RES (14), (15), (16), (17), (18): Xaa is A or G
  MOD_RES (19), (20), (21), (22): Xaa is A or G or is absent

SEQ ID NO: 47535 - protein, 38 aa, Artificial Sequence; identical to SEQ ID NO: 17813
  GFR-binding peptide
  MOD_RES (2), (4), (38): Xaa is C or S

SEQ ID NO: 47536 - protein, 37 aa, Artificial Sequence; identical to SEQ ID NO: 10670
  GFR-binding peptide
  MOD_RES (2), (36): Xaa is C or S
  MOD_RES (14), (15), (16), (17), (18): Xaa is A or G
  MOD_RES (19), (20), (21), (22): Xaa is A or G or is absent

SEQ ID NO: 47537 - protein, 43 aa, Artificial Sequence; identical to SEQ ID NO: 17815
  GFR-binding peptide
  MOD_RES (2), (4), (41): Xaa is C or S

SEQ ID NO: 47538 - protein, 37 aa, Artificial Sequence
  GFR-binding peptide
  MOD_RES (1), (33), (34): Xaa is C or S
XSRVVMNSMEGIIVNSSDDMIQVTINSLKTPAXXPKP

SEQ ID NO: 47539 - protein, 35 aa, Artificial Sequence
  GFR-binding peptide
  MOD_RES (2), (34), (35): Xaa is C or S
GXGEVVMDVTAKKVVKENEDIKRMQVPRLETPVXX

SEQ ID NO: 47540 - protein, 38 aa, Artificial Sequence
  GFR-binding peptide
  MOD_RES (1), (3), (37): Xaa is C or S
  MOD_RES (15), (16), (17), (18), (19): Xaa is A or G
  MOD_RES (20), (21), (22), (23): Xaa is A or G or is absent
XGXSRVVMNVQVEKXXXXXXXXXVKAVKVSRLKTPAXT

SEQ ID NO: 47541 - protein, 37 aa, Artificial Sequence; identical to SEQ ID NO: 10673
  GFR-binding peptide
  MOD_RES (2), (4), (36), (37): Xaa is C or S

SEQ ID NO: 47542 - protein, 42 aa, Artificial Sequence; identical to SEQ ID NO: 17821
  GFR-binding peptide
  MOD_RES (1), (38): Xaa is C or S
  MOD_RES (14), (15), (16), (17), (18): Xaa is A or G
  MOD_RES (19), (20), (21), (22): Xaa is A or G or is absent

SEQ ID NO: 47543 - protein, 39 aa, Artificial Sequence; identical to SEQ ID NO: 17822
  GFR-binding peptide
  MOD_RES (2), (39): Xaa is C or S

SEQ ID NO: 47544 - protein, 38 aa, Artificial Sequence; identical to SEQ ID NO: 17823
  GFR-binding peptide
  MOD_RES (1), (38): Xaa is C or S
  MOD_RES (14), (15), (16), (17), (18): Xaa is A or G
  MOD_RES (19), (20), (21), (22): Xaa is A or G or is absent

SEQ ID NO: 47545 - protein, 34 aa, Artificial Sequence
  GFR-binding peptide
  MOD_RES (31), (31): Xaa is C or S
RVVMNVTAKKIVNSSDDIKRVQVPRLKTPAXTPK

SEQ ID NO: 47546 - protein, 35 aa, Artificial Sequence
  GFR-binding peptide
  MOD_RES (34), (34): Xaa is C or S
  MOD_RES (12), (13), (14), (15), (16): Xaa is A or G
  MOD_RES (17), (18), (19), (20): Xaa is A or G or is absent
KNHQLFNSLQEXXXXXXXXXYYVMPLPEEETPVXE

SEQ ID NO: 47547 - protein, 37 aa, Artificial Sequence
  GFR-binding peptide
  MOD_RES (2), (4), (35), (36): Xaa is C or S
SXKXSKVVMVQVEKVKPTRGVVKAIKVSRLDQPVXXP

SEQ ID NO: 47548 - protein, 36 aa, Artificial Sequence
  GFR-binding peptide
  MOD_RES (32), (33): Xaa is C or S
GEVVMDVTAKKVVKENEDIKRMQVPRLETPVXXAKP

SEQ ID NO: 47549 - protein, 38 aa, Artificial Sequence
  GFR-binding peptide
  MOD_RES (1), (3): Xaa is C or S
XKXALHDELTNSLQEFIPKKRVIEYYVVPLPELQVQTP

SEQ ID NO: 47550 - protein, 36 aa, Artificial Sequence
  GFR-binding peptide
  MOD_RES (32), (32): Xaa is C or S
SRVVMNSMEGIIVNSSDDMIQVTINSLKTPAXTPKT

SEQ ID NO: 47551 - protein, 41 aa, Artificial Sequence; identical to SEQ ID NO: 10675
  GFR-binding peptide
  MOD_RES (2), (4), (35), (36): Xaa is C or S

SEQ ID NO: 47552 - protein, 36 aa, Artificial Sequence; identical to SEQ ID NO: 10676
  GFR-binding peptide
  MOD_RES (33), (34): Xaa is C or S
  MOD_RES (11), (12), (13), (14), (15): Xaa is A or G
  MOD_RES (16), (17), (18), (19): Xaa is A or G or is absent

SEQ ID NO: 47553 - protein, 39 aa, Artificial Sequence
  GFR-binding peptide
  MOD_RES (1), (3), (37), (38): Xaa is C or S
  MOD_RES (15), (16), (17), (18), (19): Xaa is A or G
  MOD_RES (20), (21), (22), (23): Xaa is A or G or is absent
XGXGEVVMDVTAKKXXXXXXXXXIKRMQVPRLETPVXXA

SEQ ID NO: 47554 - protein, 38 aa, Artificial Sequence; identical to SEQ ID NO: 17829
  GFR-binding peptide
  MOD_RES (1), (38): Xaa is C or S
  MOD_RES (14), (15), (16), (17), (18): Xaa is A or G
  MOD_RES (19), (20), (21), (22): Xaa is A or G or is absent

SEQ ID NO: 47555 - protein, 43 aa, Artificial Sequence
  GFR-binding peptide
  MOD_RES (2), (4), (41): Xaa is C or S
  MOD_RES (17), (18), (19), (20), (21): Xaa is A or G
  MOD_RES (22), (23), (24), (25): Xaa is A or G or is absent
AXAXELHEELRNSLQEXXXXXXXXXYYLVTLPEHHVRSPQXKV

SEQ ID NO: 47556 - protein, 35 aa, Artificial Sequence; identical to SEQ ID NO: 10680
  GFR-binding peptide
  MOD_RES (34), (34): Xaa is C or S
  MOD_RES (12), (13), (14), (15), (16): Xaa is A or G
  MOD_RES (17), (18), (19), (20): Xaa is A or G or is absent

SEQ ID NO: 47557 - protein, 40 aa, Artificial Sequence; identical to SEQ ID NO: 10682
  GFR-binding peptide
  MOD_RES (2), (36), (37): Xaa is C or S
  MOD_RES (14), (15), (16), (17), (18): Xaa is A or G
  MOD_RES (19), (20), (21), (22): Xaa is A or G or is absent

SEQ ID NO: 47558 - protein, 36 aa, Artificial Sequence
  GFR-binding peptide
  MOD_RES (1), (33), (34): Xaa is C or S
XSRVVMNVQVEKIVNSSDDVKAVKVSRLKTPAXXPK

SEQ ID NO: 47559 - protein, 42 aa, Artificial Sequence; identical to SEQ ID NO: 10687
  GFR-binding peptide
  MOD_RES (1), (3), (36), (37): Xaa is C or S
  MOD_RES (14), (15), (16), (17), (18): Xaa is A or G
  MOD_RES (19), (20), (21), (22): Xaa is A or G or is absent

SEQ ID NO: 47560 - protein, 43 aa, Artificial Sequence
  GFR-binding peptide
  MOD_RES (1), (3), (37), (38): Xaa is C or S
  MOD_RES (15), (16), (17), (18), (19): Xaa is A or G
  MOD_RES (20), (21), (22), (23): Xaa is A or G or is absent
XGXSRVVMNVTAKKXXXXXXXXXIKRVQVPRLKTPAXXPKPVY

SEQ ID NO: 47561 - protein, 37 aa, Artificial Sequence; identical to SEQ ID NO: 17834
  GFR-binding peptide
  MOD_RES (1), (1): Xaa is C or S

SEQ ID NO: 47562 - protein, 40 aa, Artificial Sequence; identical to SEQ ID NO: 10690
  GFR-binding peptide
  MOD_RES (1), (3), (34), (35): Xaa is C or S

SEQ ID NO: 47563 - protein, 33 aa, Artificial Sequence
  GFR-binding peptide
  MOD_RES (11), (12), (13), (14), (15): Xaa is A or G
  MOD_RES (16), (17), (18), (19): Xaa is A or G or is absent
HDELTNSLQEXXXXXXXXXYYVVPLPELQVQTP

SEQ ID NO: 47564 - protein, 37 aa, Artificial Sequence
  GFR-binding peptide
  MOD_RES (1), (35): Xaa is C or S
  MOD_RES (13), (14), (15), (16), (17): Xaa is A or G
  MOD_RES (18), (19), (20), (21): Xaa is A or G or is absent
XKNHQLFNSLQEXXXXXXXXXYYLMTLPEEETPVXEL

SEQ ID NO: 47565 - protein, 34 aa, Artificial Sequence; identical to SEQ ID NO: 10691
  GFR-binding peptide
  MOD_RES (1), (34): Xaa is C or S
  MOD_RES (12), (13), (14), (15), (16): Xaa is A or G
  MOD_RES (17), (18), (19), (20): Xaa is A or G or is absent

SEQ ID NO: 47566 - protein, 36 aa, Artificial Sequence; identical to SEQ ID NO: 10692
  GFR-binding peptide
  MOD_RES (33), (34): Xaa is C or S
  MOD_RES (11), (12), (13), (14), (15): Xaa is A or G
  MOD_RES (16), (17), (18), (19): Xaa is A or G or is absent

SEQ ID NO: 47567 - protein, 34 aa, Artificial Sequence
  GFR-binding peptide
  MOD_RES (2), (2): Xaa is C or S
  MOD_RES (13), (14), (15), (16), (17): Xaa is A or G
  MOD_RES (18), (19), (20), (21): Xaa is A or G or is absent
KXSKVIMSMEGIXXXXXXXXXMIQITINSLDQSV

SEQ ID NO: 47568 - protein, 38 aa, Artificial Sequence; identical to SEQ ID NO: 10696
  GFR-binding peptide
  MOD_RES (33), (34): Xaa is C or S
  MOD_RES (11), (12), (13), (14), (15): Xaa is A or G
  MOD_RES (16), (17), (18), (19): Xaa is A or G or is absent

SEQ ID NO: 47569 - protein, 35 aa, Artificial Sequence
  GFR-binding peptide
  MOD_RES (33), (34): Xaa is C or S
  MOD_RES (11), (12), (13), (14), (15): Xaa is A or G
  MOD_RES (16), (17), (18), (19): Xaa is A or G or is absent
SKVIMSMEGIXXXXXXXXXMIQITINSLDQSVXXP

SEQ ID NO: 47570 - protein, 35 aa, Artificial Sequence; identical to SEQ ID NO: 10697
  GFR-binding peptide
  MOD_RES (32), (33): Xaa is C or S

SEQ ID NO: 47571 - protein, 34 aa, Artificial Sequence
  GFR-binding peptide
  MOD_RES (34), (34): Xaa is C or S
KNHQLFNSLQEHQGQHPKIRYYVMPLPEEETPVX

SEQ ID NO: 47572 - protein, 32 aa, Artificial Sequence
  GFR-binding peptide
HDELTNSLQEFIPKKRVIEYYLVTLPELQVQT

SEQ ID NO: 47573 - protein, 38 aa, Artificial Sequence
  GFR-binding peptide
  MOD_RES (2), (4), (37), (38): Xaa is C or S
  MOD_RES (15), (16), (17), (18), (19): Xaa is A or G
  MOD_RES (20), (21), (22), (23): Xaa is A or G or is absent
SXKXSKVIMVTAKKXXXXXXXXXIKRIQVPRLDQSVXX

SEQ ID NO: 47574 - protein, 33 aa, Artificial Sequence; identical to SEQ ID NO: 10699
  GFR-binding peptide
  MOD_RES (1), (3): Xaa is C or S

SEQ ID NO: 47575 - protein, 36 aa, Artificial Sequence; identical to SEQ ID NO: 10700
  GFR-binding peptide
  MOD_RES (33), (34): Xaa is C or S
  MOD_RES (11), (12), (13), (14), (15): Xaa is A or G
  MOD_RES (16), (17), (18), (19): Xaa is A or G or is absent

SEQ ID NO: 47576 - protein, 30 aa, Artificial Sequence
  GFR-binding peptide
EVVMDVQVEKVVKENEDVKAMKVSRLETPV

SEQ ID NO: 47577 - protein, 39 aa, Artificial Sequence; identical to SEQ ID NO: 17837
  GFR-binding peptide
  MOD_RES (2), (4), (38): Xaa is C or S

SEQ ID NO: 47578 - protein, 41 aa, Artificial Sequence; identical to SEQ ID NO: 10701
  GFR-binding peptide
  MOD_RES (2), (35), (36): Xaa is C or S
  MOD_RES (13), (14), (15), (16), (17): Xaa is A or G
  MOD_RES (18), (19), (20), (21): Xaa is A or G or is absent

SEQ ID NO: 47579 - protein, 38 aa, Artificial Sequence
  GFR-binding peptide
  MOD_RES (1), (35), (36): Xaa is C or S
  MOD_RES (13), (14), (15), (16), (17): Xaa is A or G
  MOD_RES (18), (19), (20), (21): Xaa is A or G or is absent
XGEVVMDVTAKKXXXXXXXXXIKRMQVPRLETPVXXAK

SEQ ID NO: 47580 - protein, 33 aa, Artificial Sequence
  GFR-binding peptide
  MOD_RES (11), (12), (13), (14), (15): Xaa is A or G
  MOD_RES (16), (17), (18), (19): Xaa is A or G or is absent
HDELTNSLQEXXXXXXXXXYYLVTLPELQVQTP

SEQ ID NO: 47581 - protein, 36 aa, Artificial Sequence
  GFR-binding peptide
  MOD_RES (2), (36): Xaa is C or S
  MOD_RES (14), (15), (16), (17), (18): Xaa is A or G
  MOD_RES (19), (20), (21), (22): Xaa is A or G or is absent
GXSRVVMNVTAKKXXXXXXXXXIKRVQVPRLKTPAX

SEQ ID NO: 47582 - protein, 35 aa, Artificial Sequence
  GFR-binding peptide
  MOD_RES (2), (33), (34): Xaa is C or S
KXSRVIMVQVEKVKPKRGVVKAIKVSRLAQPVXXP

SEQ ID NO: 47583 - protein, 38 aa, Artificial Sequence
  GFR-binding peptide
  MOD_RES (1), (3), (34), (35): Xaa is C or S
XKXSRVIMVQVEKVKPKRGVVKAIKVSRLAQPVXXPAA

SEQ ID NO: 47584 - protein, 41 aa, Artificial Sequence
  GFR-binding peptide
  MOD_RES (1), (3), (35), (36): Xaa is C or S
XGXSRVVMNVQVEKIVNSSDDVKAVKVSRLKTPAXXPKPVY

SEQ ID NO: 47585 - protein, 40 aa, Artificial Sequence; identical to SEQ ID NO: 17843
  GFR-binding peptide
  MOD_RES (37), (37): Xaa is C or S

SEQ ID NO: 47586 - protein, 35 aa, Artificial Sequence; identical to SEQ ID NO: 10713
  GFR-binding peptide
  MOD_RES (2), (4): Xaa is C or S

SEQ ID NO: 47587 - protein, 37 aa, Artificial Sequence
  GFR-binding peptide
  MOD_RES (34), (35): Xaa is C or S
  MOD_RES (12), (13), (14), (15), (16): Xaa is A or G
  MOD_RES (17), (18), (19), (20): Xaa is A or G or is absent
GEVVMDVQVEKXXXXXXXXXVKAMKVSRLETPVXXAK

SEQ ID NO: 47588 - protein, 37 aa, Artificial Sequence
  GFR-binding peptide
  MOD_RES (2), (2): Xaa is C or S
KXALHDELTNSLQEFIPKKRVIEYYLVTLPELQVQTP

SEQ ID NO: 47589 - protein, 38 aa, Artificial Sequence; identical to SEQ ID NO: 17850
  GFR-binding peptide
  MOD_RES (34), (34): Xaa is C or S

SEQ ID NO: 47590 - protein, 35 aa, Artificial Sequence
  GFR-binding peptide
  MOD_RES (1), (35): Xaa is C or S
  MOD_RES (13), (14), (15), (16), (17): Xaa is A or G
  MOD_RES (18), (19), (20), (21): Xaa is A or G or is absent
XKNHQLFNSLQEXXXXXXXXXYYVMPLPEEETPVX

SEQ ID NO: 47591 - protein, 34 aa, Artificial Sequence
  GFR-binding peptide
  MOD_RES (1), (33), (34): Xaa is C or S
XSRVVMNVTAKKIVNSSDDIKRVQVPRLKTPAXX

SEQ ID NO: 47592 - protein, 38 aa, Artificial Sequence; identical to SEQ ID NO: 10719
  GFR-binding peptide
  MOD_RES (1), (3), (34), (35): Xaa is C or S

SEQ ID NO: 47593 - protein, 40 aa, Artificial Sequence
  GFR-binding peptide
  MOD_RES (34), (35): Xaa is C or S
  MOD_RES (12), (13), (14), (15), (16): Xaa is A or G
  MOD_RES (17), (18), (19), (20): Xaa is A or G or is absent
GEVVMEVQVEKXXXXXXXXXVKAMKVSRLETPVXXAKPIS

SEQ ID NO: 47594 - protein, 42 aa, Artificial Sequence
  GFR-binding peptide
  MOD_RES (1), (38): Xaa is C or S
  MOD_RES (14), (15), (16), (17), (18): Xaa is A or G
  MOD_RES (19), (20), (21), (22): Xaa is A or G or is absent
XALHDELTNSLQEXXXXXXXXXYYVVPLPELQVQTPRXQVNR

SEQ ID NO: 47595 - protein, 32 aa, Artificial Sequence; identical to SEQ ID NO: 17854
  GFR-binding peptide

SEQ ID NO: 47596 - protein, 36 aa, Artificial Sequence; identical to SEQ ID NO: 10721
  GFR-binding peptide
  MOD_RES (1), (3): Xaa is C or S
  MOD_RES (15), (16), (17), (18), (19): Xaa is A or G
  MOD_RES (20), (21), (22), (23): Xaa is A or G or is absent

SEQ ID NO: 47597 - protein, 35 aa, Artificial Sequence
  GFR-binding peptide
  MOD_RES (2), (2): Xaa is C or S
  MOD_RES (14), (15), (16), (17), (18): Xaa is A or G
  MOD_RES (19), (20), (21), (22): Xaa is A or G or is absent
GXGEVVMEVQVEKXXXXXXXXXVKAMKVSRLETPV

SEQ ID NO: 47598 - protein, 37 aa, Artificial Sequence
  GFR-binding peptide
  MOD_RES (1), (3), (37): Xaa is C or S
  MOD_RES (15), (16), (17), (18), (19): Xaa is A or G
  MOD_RES (20), (21), (22), (23): Xaa is A or G or is absent
XGXSRVVMNVQVEKXXXXXXXXXVKAVKVSRLKTPAX

SEQ ID NO: 47599 - protein, 40 aa, Artificial Sequence
  GFR-binding peptide
  MOD_RES (1), (38): Xaa is C or S
  MOD_RES (14), (15), (16), (17), (18): Xaa is A or G
  MOD_RES (19), (20), (21), (22): Xaa is A or G or is absent
XELHEELRNSLQEXXXXXXXXXYYVVPLPEHHVRSPQXKV

SEQ ID NO: 47600 - protein, 36 aa, Artificial Sequence
  GFR-binding peptide
  MOD_RES (32), (32): Xaa is C or S
SRVVMNVQVEKIVNSSDDVKAVKVSRLKTPAXTPKT

SEQ ID NO: 47601 - protein, 40 aa, Artificial Sequence
  GFR-binding peptide
  MOD_RES (1), (3), (35), (36): Xaa is C or S
XGXGEVVMDVQVEKVVKENEDVKAMKVSRLETPVXXAKPI

SEQ ID NO: 47602 - protein, 39 aa, Artificial Sequence; identical to SEQ ID NO: 17858
  GFR-binding peptide
  MOD_RES (36), (36): Xaa is C or S
  MOD_RES (12), (13), (14), (15), (16): Xaa is A or G
  MOD_RES (17), (18), (19), (20): Xaa is A or G or is absent

SEQ ID NO: 47603 - protein, 36 aa, Artificial Sequence
  GFR-binding peptide
  MOD_RES (33), (34): Xaa is C or S
  MOD_RES (11), (12), (13), (14), (15): Xaa is A or G
  MOD_RES (16), (17), (18), (19): Xaa is A or G or is absent
SKVIMSMEGIXXXXXXXXXMIQITINSLDQSVXXPS

SEQ ID NO: 47604 - protein, 41 aa, Artificial Sequence; identical to SEQ ID NO: 17859
  GFR-binding peptide
  MOD_RES (1), (3), (37): Xaa is C or S

SEQ ID NO: 47605 - protein, 41 aa, Artificial Sequence; identical to SEQ ID NO: 10728
  GFR-binding peptide
  MOD_RES (2), (36), (37): Xaa is C or S
  MOD_RES (14), (15), (16), (17), (18): Xaa is A or G
  MOD_RES (19), (20), (21), (22): Xaa is A or G or is absent

SEQ ID NO: 47606 - protein, 42 aa, Artificial Sequence; identical to SEQ ID NO: 17863
  GFR-binding peptide
  MOD_RES (1), (38): Xaa is C or S

SEQ ID NO: 47607 - protein, 38 aa, Artificial Sequence
  GFR-binding peptide
  MOD_RES (1), (3), (35), (36): Xaa is C or S
XGXSRVVMNVQVEKIVNSSDDVKAVKVSRLKTPAXXPK

SEQ ID NO: 47608 - protein, 38 aa, Artificial Sequence
  GFR-binding peptide
  MOD_RES (2), (2): Xaa is C or S
AXELHEELRNSLQELKPKKRVYEYYVVPLPEHHVRSPQ

SEQ ID NO: 47609 - protein, 38 aa, Artificial Sequence
  GFR-binding peptide
  MOD_RES (2), (34), (35): Xaa is C or S
GXGEVVMEVQVEKVVKDYEDVKAMKVSRLETPVXXAKP

SEQ ID NO: 47610 - protein, 40 aa, Artificial Sequence
  GFR-binding peptide
  MOD_RES (1), (35), (36): Xaa is C or S
  MOD_RES (13), (14), (15), (16), (17): Xaa is A or G
  MOD_RES (18), (19), (20), (21): Xaa is A or G or is absent
XGEVVMEVTAKKXXXXXXXXXIKRMQVPRLETPVXXAKPI

SEQ ID NO: 47611 - protein, 39 aa, Artificial Sequence
  GFR-binding peptide
  MOD_RES (2), (34), (35): Xaa is C or S
GXGEVVMDVQVEKVVKENEDVKAMKVSRLETPVXXAKPI

SEQ ID NO: 47612 - protein, 40 aa, Artificial Sequence
  GFR-binding peptide
  MOD_RES (2), (4), (35), (36): Xaa is C or S
SXKXSKVVMVQVEKVKPTRGVVKAIKVSRLDQPVXXPSAS

SEQ ID NO: 47613 - protein, 36 aa, Artificial Sequence; identical to SEQ ID NO: 10734
  GFR-binding peptide
  MOD_RES (2), (4), (36): Xaa is C or S

SEQ ID NO: 47614 - protein, 38 aa, Artificial Sequence; identical to SEQ ID NO: 10738
  GFR-binding peptide
  MOD_RES (2), (4), (37), (38): Xaa is C or S
  MOD_RES (15), (16), (17), (18), (19): Xaa is A or G
  MOD_RES (20), (21), (22), (23): Xaa is A or G or is absent

SEQ ID NO: 47615 - protein, 44 aa, Artificial Sequence
  GFR-binding peptide
  MOD_RES (2), (4), (38): Xaa is C or S
  MOD_RES (16), (17), (18), (19), (20): Xaa is A or G
  MOD_RES (21), (22), (23), (24): Xaa is A or G or is absent
RXEXKNHQLFNSLQEXXXXXXXXXYYVMPLPEEETPVXELGEDN

SEQ ID NO: 47616 - protein, 33 aa, Artificial Sequence; identical to SEQ ID NO: 17866
  GFR-binding peptide
  MOD_RES (12), (13), (14), (15), (16): Xaa is A or G
  MOD_RES (17), (18), (19), (20): Xaa is A or G or is absent

SEQ ID NO: 47617 - protein, 36 aa, Artificial Sequence
  GFR-binding peptide
  MOD_RES (1), (3), (35), (36): Xaa is C or S
XGXGEVVMDSMEGIVVKENEDMIQMTINSLETPVXX

SEQ ID NO: 47618 - protein, 38 aa, Artificial Sequence
  GFR-binding peptide
  MOD_RES (2), (35), (36): Xaa is C or S
  MOD_RES (13), (14), (15), (16), (17): Xaa is A or G
  MOD_RES (18), (19), (20), (21): Xaa is A or G or is absent
KXSKVVMSMEGIXXXXXXXXXMIQITINSLDQPVXXPS

SEQ ID NO: 47619 - protein, 33 aa, Artificial Sequence; identical to SEQ ID NO: 10739
  GFR-binding peptide
  MOD_RES (1), (1): Xaa is C or S
  MOD_RES (12), (13), (14), (15), (16): Xaa is A or G
  MOD_RES (17), (18), (19), (20): Xaa is A or G or is absent

SEQ ID NO: 47620 - protein, 40 aa, Artificial Sequence
  GFR-binding peptide
  MOD_RES (2), (34): Xaa is C or S
GXSRVVMNVTAKKIVNSSDDIKRVQVPRLKTPAXTPKTVH

SEQ ID NO: 47621 - protein, 32 aa, Artificial Sequence
  GFR-binding peptide
  MOD_RES (31), (32): Xaa is C or S
RVVMNSMEGIIVNSSDDMIQVTINSLQTPAXX

SEQ ID NO: 47622 - protein, 37 aa, Artificial Sequence; identical to SEQ ID NO: 17869
  GFR-binding peptide
  MOD_RES (1), (3): Xaa is C or S

SEQ ID NO: 47623 - protein, 38 aa, Artificial Sequence; identical to SEQ ID NO: 10741
  GFR-binding peptide
  MOD_RES (2), (4), (35), (36): Xaa is C or S

SEQ ID NO: 47624 - protein, 37 aa, Artificial Sequence; identical to SEQ ID NO: 10743
  GFR-binding peptide
  MOD_RES (1), (34), (35): Xaa is C or S
  MOD_RES (12), (13), (14), (15), (16): Xaa is A or G
  MOD_RES (17), (18), (19), (20): Xaa is A or G or is absent

SEQ ID NO: 47625 - protein, 33 aa, Artificial Sequence; identical to SEQ ID NO: 10746
  GFR-binding peptide
  MOD_RES (32), (33): Xaa is C or S

SEQ ID NO: 47626 - protein, 39 aa, Artificial Sequence
  GFR-binding peptide
  MOD_RES (2), (39): Xaa is C or S
KXALHDELTNSLQEFIPKKRVIEYYLVTLPELQVQTPRX

SEQ ID NO: 47627 - protein, 37 aa, Artificial Sequence; identical to SEQ ID NO: 10747
  GFR-binding peptide
  MOD_RES (1), (3), (35), (36): Xaa is C or S

SEQ ID NO: 47628 - protein, 40 aa, Artificial Sequence; identical to SEQ ID NO: 17875
  GFR-binding peptide
  MOD_RES (36), (36): Xaa is C or S

SEQ ID NO: 47629 - protein, 37 aa, Artificial Sequence; identical to SEQ ID NO: 10749
  GFR-binding peptide
  MOD_RES (32), (33): Xaa is C or S

SEQ ID NO: 47630 - protein, 39 aa, Artificial Sequence
  GFR-binding peptide
  MOD_RES (2), (4), (36), (37): Xaa is C or S
HXGXARVVMNSMEGIIVNSSDDMIQVTINSLQTPAXXPK

SEQ ID NO: 47631 - protein, 37 aa, Artificial Sequence; identical to SEQ ID NO: 10750
  GFR-binding peptide
  MOD_RES (2), (4): Xaa is C or S
  MOD_RES (16), (17), (18), (19), (20): Xaa is A or G
  MOD_RES (21), (22), (23), (24): Xaa is A or G or is absent

SEQ ID NO: 47632 - protein, 37 aa, Artificial Sequence
  GFR-binding peptide
  MOD_RES (1), (33), (34): Xaa is C or S
XGEVVMEVTAKKVVKDYEDIKRMQVPRLETPVXXAKP

SEQ ID NO: 47633 - protein, 36 aa, Artificial Sequence
  GFR-binding peptide
  MOD_RES (33), (33): Xaa is C or S
  MOD_RES (11), (12), (13), (14), (15): Xaa is A or G
  MOD_RES (16), (17), (18), (19): Xaa is A or G or is absent
RVVMNSMEGIXXXXXXXXXMIQVTINSLKTPAXTPK

SEQ ID NO: 47634 - protein, 35 aa, Artificial Sequence; identical to SEQ ID NO: 10752
  GFR-binding peptide
  MOD_RES (2), (34), (35): Xaa is C or S

SEQ ID NO: 47635 - protein, 37 aa, Artificial Sequence; identical to SEQ ID NO: 10753
  GFR-binding peptide
  MOD_RES (1), (33), (34): Xaa is C or S

SEQ ID NO: 47636 - protein, 37 aa, Artificial Sequence
  GFR-binding peptide
  MOD_RES (2), (36): Xaa is C or S
  MOD_RES (14), (15), (16), (17), (18): Xaa is A or G
  MOD_RES (19), (20), (21), (22): Xaa is A or G or is absent
GXSRVVMNVTAKKXXXXXXXXXIKRVQVPRLKTPAXT

SEQ ID NO: 47637 - protein, 35 aa, Artificial Sequence; identical to SEQ ID NO: 17877
  GFR-binding peptide

SEQ ID NO: 47638 - protein, 38 aa, Artificial Sequence
  GFR-binding peptide
  MOD_RES (2), (34): Xaa is C or S
GXSRVVMNSMEGIIVNSSDDMIQVTINSLKTPAXTPKT

SEQ ID NO: 47639 - protein, 38 aa, Artificial Sequence
  GFR-binding peptide
  MOD_RES (2), (4), (35), (36): Xaa is C or S
SXKXSRVIMSMEGIVKPKRGVMIQITINSLAQPVXXPA

SEQ ID NO: 47640 - protein, 38 aa, Artificial Sequence; identical to SEQ ID NO: 17879
  GFR-binding peptide
  MOD_RES (2), (4), (38): Xaa is C or S
  MOD_RES (16), (17), (18), (19), (20): Xaa is A or G
  MOD_RES (21), (22), (23), (24): Xaa is A or G or is absent

SEQ ID NO: 47641 - protein, 37 aa, Artificial Sequence
  GFR-binding peptide
  MOD_RES (2), (36), (37): Xaa is C or S
  MOD_RES (14), (15), (16), (17), (18): Xaa is A or G
  MOD_RES (19), (20), (21), (22): Xaa is A or G or is absent
GXSRVVMNSMEGIXXXXXXXXXMIQVTINSLKTPAXX

SEQ ID NO: 47642 - protein, 30 aa, Artificial Sequence; identical to SEQ ID NO: 10756
  GFR-binding peptide

SEQ ID NO: 47643 - protein, 39 aa, Artificial Sequence
  GFR-binding peptide
  MOD_RES (1), (3), (36), (37): Xaa is C or S
  MOD_RES (14), (15), (16), (17), (18): Xaa is A or G
  MOD_RES (19), (20), (21), (22): Xaa is A or G or is absent
XKXSRVIMVTAKKXXXXXXXXXIKRIQVPRLAQPVXXPA

SEQ ID NO: 47644 - protein, 37 aa, Artificial Sequence; identical to SEQ ID NO: 10758
  GFR-binding peptide
  MOD_RES (33), (34): Xaa is C or S
  MOD_RES (11), (12), (13), (14), (15): Xaa is A or G
  MOD_RES (16), (17), (18), (19): Xaa is A or G or is absent

SEQ ID NO: 47645 - protein, 33 aa, Artificial Sequence; identical to SEQ ID NO: 17885
  GFR-binding peptide

SEQ ID NO: 47646 - protein, 34 aa, Artificial Sequence; identical to SEQ ID NO: 17887
  GFR-binding peptide
  MOD_RES (33), (33): Xaa is C or S
  MOD_RES (11), (12), (13), (14), (15): Xaa is A or G
  MOD_RES (16), (17), (18), (19): Xaa is A or G or is absent

SEQ ID NO: 47647 - protein, 38 aa, Artificial Sequence; identical to SEQ ID NO: 10760
  GFR-binding peptide
  MOD_RES (2), (34), (35): Xaa is C or S

SEQ ID NO: 47648 - protein, 38 aa, Artificial Sequence
  GFR-binding peptide
  MOD_RES (2), (34), (35): Xaa is C or S
GXGEVVMDVTAKKVVKENEDIKRMQVPRLETPVXXAKP

SEQ ID NO: 47649 - protein, 39 aa, Artificial Sequence
  GFR-binding peptide
  MOD_RES (2), (4): Xaa is C or S
  MOD_RES (17), (18), (19), (20), (21): Xaa is A or G
  MOD_RES (22), (23), (24), (25): Xaa is A or G or is absent
EXKXALHDELTNSLQEXXXXXXXXXYYLVTLPELQVQTP

SEQ ID NO: 47650 - protein, 43 aa, Artificial Sequence
  GFR-binding peptide
  MOD_RES (2), (4), (38), (39): Xaa is C or S
  MOD_RES (16), (17), (18), (19), (20): Xaa is A or G
  MOD_RES (21), (22), (23), (24): Xaa is A or G or is absent
RXGXGEVVMESMEGIXXXXXXXXXMIQMTINSLETPVXXAKPI

SEQ ID NO: 47651 - protein, 36 aa, Artificial Sequence; identical to SEQ ID NO: 17892
  GFR-binding peptide
  MOD_RES (1), (3): Xaa is C or S

SEQ ID NO: 47652 - protein, 36 aa, Artificial Sequence; identical to SEQ ID NO: 10763
  GFR-binding peptide
  MOD_RES (2), (35), (36): Xaa is C or S
  MOD_RES (13), (14), (15), (16), (17): Xaa is A or G
  MOD_RES (18), (19), (20), (21): Xaa is A or G or is absent

SEQ ID NO: 47653 - protein, 37 aa, Artificial Sequence; identical to SEQ ID NO: 17895
  GFR-binding peptide
  MOD_RES (37), (37): Xaa is C or S

SEQ ID NO: 47654 - protein, 33 aa, Artificial Sequence; identical to SEQ ID NO: 17896
  GFR-binding peptide
  MOD_RES (12), (13), (14), (15), (16): Xaa is A or G
  MOD_RES (17), (18), (19), (20): Xaa is A or G or is absent

SEQ ID NO: 47655 - protein, 39 aa, Artificial Sequence; identical to SEQ ID NO: 17900
  GFR-binding peptide
  MOD_RES (33), (33): Xaa is C or S
  MOD_RES (11), (12), (13), (14), (15): Xaa is A or G
  MOD_RES (16), (17), (18), (19): Xaa is A or G or is absent

SEQ ID NO: 47656 - protein, 38 aa, Artificial Sequence; identical to SEQ ID NO: 17901
  GFR-binding peptide
  MOD_RES (1), (38): Xaa is C or S

SEQ ID NO: 47657 - protein, 35 aa, Artificial Sequence
  GFR-binding peptide
  MOD_RES (31), (32): Xaa is C or S
SKVIMSMEGIIKPTKGIMIQITINSLDQSVXXPSA

SEQ ID NO: 47658 - protein, 43 aa, Artificial Sequence
  GFR-binding peptide
  MOD_RES (2), (4), (41): Xaa is C or S
AXAXELHEELRNSLQELKPKKRVYEYYLVTLPEHHVRSPQXKV

SEQ ID NO: 47659 - protein, 35 aa, Artificial Sequence; identical to SEQ ID NO: 37084
  GFR-binding peptide
  MOD_RES (31), (32): Xaa is C or S

SEQ ID NO: 47660 - protein, 34 aa, Artificial Sequence
  GFR-binding peptide
  MOD_RES (31), (32): Xaa is C or S
RVVMNVQVEKIVNSSDDVKAVKVSRLQTPAXXPK

SEQ ID NO: 47661 - protein, 43 aa, Artificial Sequence; identical to SEQ ID NO: 10769
  GFR-binding peptide
  MOD_RES (2), (4), (38), (39): Xaa is C or S
  MOD_RES (16), (17), (18), (19), (20): Xaa is A or G
  MOD_RES (21), (22), (23), (24): Xaa is A or G or is absent

SEQ ID NO: 47662 - protein, 35 aa, Artificial Sequence; identical to SEQ ID NO: 17902
  GFR-binding peptide

SEQ ID NO: 47663 - protein, 35 aa, Artificial Sequence
  GFR-binding peptide
  MOD_RES (1), (3), (34), (35): Xaa is C or S
XKXSKVIMVQVEKIKPTKGIVKAIKVSRLDQSVXX

SEQ ID NO: 47664 - protein, 40 aa, Artificial Sequence
  GFR-binding peptide
  MOD_RES (2), (39): Xaa is C or S
  MOD_RES (15), (16), (17), (18), (19): Xaa is A or G
  MOD_RES (20), (21), (22), (23): Xaa is A or G or is absent
AXELHEELRNSLQEXXXXXXXXXYYLVTLPEHHVRSPQXK

SEQ ID NO: 47665 - protein, 33 aa, Artificial Sequence; identical to SEQ ID NO: 10773
  GFR-binding peptide
  MOD_RES (1), (1): Xaa is C or S
  MOD_RES (12), (13), (14), (15), (16): Xaa is A or G
  MOD_RES (17), (18), (19), (20): Xaa is A or G or is absent

SEQ ID NO: 47666 - protein, 32 aa, Artificial Sequence; identical to SEQ ID NO: 17904
  GFR-binding peptide
  MOD_RES (11), (12), (13), (14), (15): Xaa is A or G
  MOD_RES (16), (17), (18), (19): Xaa is A or G or is absent

SEQ ID NO: 47667 - protein, 42 aa, Artificial Sequence
  GFR-binding peptide
  MOD_RES (2), (4), (37), (38): Xaa is C or S
  MOD_RES (15), (16), (17), (18), (19): Xaa is A or G
  MOD_RES (20), (21), (22), (23): Xaa is A or G or is absent
SXKXSRVIMVQVEKXXXXXXXXXVKAIKVSRLAQPVXXPAAS

SEQ ID NO: 47668 - protein, 37 aa, Artificial Sequence
  GFR-binding peptide
  MOD_RES (1), (33), (34): Xaa is C or S
XGEVVMEVQVEKVVKDYEDVKAMKVSRLETPVXXAKP

SEQ ID NO: 47669 - protein, 34 aa, Artificial Sequence
  GFR-binding peptide
  MOD_RES (32), (33): Xaa is C or S
SRVVMNVTAKKIVNSSDDIKRVQVPRLKTPAXXP

SEQ ID NO: 47670 - protein, 38 aa, Artificial Sequence; identical to SEQ ID NO: 17909
  GFR-binding peptide
  MOD_RES (37), (37): Xaa is C or S
  MOD_RES (13), (14), (15), (16), (17): Xaa is A or G
  MOD_RES (18), (19), (20), (21): Xaa is A or G or is absent

SEQ ID NO: 47671 - protein, 43 aa, Artificial Sequence
  GFR-binding peptide
  MOD_RES (1), (3), (37), (38): Xaa is C or S
  MOD_RES (15), (16), (17), (18), (19): Xaa is A or G
  MOD_RES (20), (21), (22), (23): Xaa is A or G or is absent
XGXGEVVMDSMEGIXXXXXXXXXMIQMTINSLETPVXXAKPIK

SEQ ID NO: 47672 - protein, 41 aa, Artificial Sequence
  GFR-binding peptide
  MOD_RES (1), (3), (37): Xaa is C or S
  MOD_RES (15), (16), (17), (18), (19): Xaa is A or G
  MOD_RES (20), (21), (22), (23): Xaa is A or G or is absent
XGXSRVVMNSMEGIXXXXXXXXXMIQVTINSLKTPAXTPKT

SEQ ID NO: 47673 - protein, 36 aa, Artificial Sequence
  GFR-binding peptide
  MOD_RES (31), (32): Xaa is C or S
RVVMNVQVEKIVNSSDDVKAVKVSRLQTPAXXPKPV

SEQ ID NO: 47674 - protein, 42 aa, Artificial Sequence
  GFR-binding peptide
  MOD_RES (1), (38): Xaa is C or S
XALHDELTNSLQEFIPKKRVIEYYVVPLPELQVQTPRXQVNR

SEQ ID NO: 47675 - protein, 39 aa, Artificial Sequence; identical to SEQ ID NO: 17912
  GFR-binding peptide
  MOD_RES (35), (35): Xaa is C or S
  MOD_RES (11), (12), (13), (14), (15): Xaa is A or G
  MOD_RES (16), (17), (18), (19): Xaa is A or G or is absent

SEQ ID NO: 47676 - protein, 33 aa, Artificial Sequence
  GFR-binding peptide
  MOD_RES (33), (33): Xaa is C or S
NHQLFNSLQEHQGQHPKIRYYVMPLPEEETPVX

SEQ ID NO: 47677 - protein, 37 aa, Artificial Sequence
  GFR-binding peptide
  MOD_RES (2), (36), (37): Xaa is C or S
  MOD_RES (14), (15), (16), (17), (18): Xaa is A or G
  MOD_RES (19), (20), (21), (22): Xaa is A or G or is absent
GXGEVVMEVQVEKXXXXXXXXXVKAMKVSRLETPVXX

SEQ ID NO: 47678 - protein, 33 aa, Artificial Sequence
  GFR-binding peptide
LHDELTNSLQEFIPKKRVIEYYLVTLPELQVQT

SEQ ID NO: 47679 - protein, 35 aa, Artificial Sequence
  GFR-binding peptide
  MOD_RES (33), (34): Xaa is C or S
  MOD_RES (11), (12), (13), (14), (15): Xaa is A or G
  MOD_RES (16), (17), (18), (19): Xaa is A or G or is absent
SRVIMVQVEKXXXXXXXXXVKAIKVSRLAQPVXXP

SEQ ID NO: 47680 - protein, 44 aa, Artificial Sequence; identical to SEQ ID NO: 17918
  GFR-binding peptide
  MOD_RES (1), (3), (40): Xaa is C or S

SEQ ID NO: 47681 - protein, 32 aa, Artificial Sequence; identical to SEQ ID NO: 10782
  GFR-binding peptide
  MOD_RES (2), (2): Xaa is C or S

SEQ ID NO: 47682 - protein, 40 aa, Artificial Sequence
  GFR-binding peptide
  MOD_RES (37), (37): Xaa is C or S
  MOD_RES (13), (14), (15), (16), (17): Xaa is A or G
  MOD_RES (18), (19), (20), (21): Xaa is A or G or is absent
ELHEELRNSLQEXXXXXXXXXYYLVTLPEHHVRSPQXKVS

SEQ ID NO: 47683 - protein, 39 aa, Artificial Sequence
  GFR-binding peptide
  MOD_RES (2), (4), (38): Xaa is C or S
  MOD_RES (16), (17), (18), (19), (20): Xaa is A or G
  MOD_RES (21), (22), (23), (24): Xaa is A or G or is absent
HXGXSRVVMNVQVEKXXXXXXXXXVKAVKVSRLKTPAXT

SEQ ID NO: 47684 - protein, 40 aa, Artificial Sequence; identical to SEQ ID NO: 17920
  GFR-binding peptide
  MOD_RES (2), (36): Xaa is C or S

SEQ ID NO: 47685 - protein, 39 aa, Artificial Sequence; identical to SEQ ID NO: 17921
  GFR-binding peptide
  MOD_RES (1), (3), (37): Xaa is C or S

SEQ ID NO: 47686 - protein, 39 aa, Artificial Sequence
  GFR-binding peptide
  MOD_RES (1), (3), (35), (36): Xaa is C or S
XGXARVVMNVQVEKIVNSSDDVKAVKVSRLQTPAXXPKP

SEQ ID NO: 47687 - protein, 37 aa, Artificial Sequence; identical to SEQ ID NO: 17922
  GFR-binding peptide
  MOD_RES (2), (2): Xaa is C or S
  MOD_RES (15), (16), (17), (18), (19): Xaa is A or G
  MOD_RES (20), (21), (22), (23): Xaa is A or G or is absent

SEQ ID NO: 47688 - protein, 39 aa, Artificial Sequence
  GFR-binding peptide
  MOD_RES (2), (4): Xaa is C or S
EXKXALHDELTNSLQEFIPKKRVIEYYVVPLPELQVQTP

SEQ ID NO: 47689 - protein, 38 aa, Artificial Sequence; identical to SEQ ID NO: 10784
  GFR-binding peptide
  MOD_RES (32), (33): Xaa is C or S

SEQ ID NO: 47690 - protein, 34 aa, Artificial Sequence
  GFR-binding peptide
  MOD_RES (2), (33), (34): Xaa is C or S
KXSKVVMVTAKKVKPTRGVIKRIQVPRLDQPVXX

SEQ ID NO: 47691 - protein, 41 aa, Artificial Sequence; identical to SEQ ID NO: 17925
  GFR-binding peptide
  MOD_RES (2), (4), (41): Xaa is C or S
  MOD_RES (17), (18), (19), (20), (21): Xaa is A or G
  MOD_RES (22), (23), (24), (25): Xaa is A or G or is absent

SEQ ID NO: 47692 - protein, 35 aa, Artificial Sequence
  GFR-binding peptide
  MOD_RES (1), (32), (33): Xaa is C or S
XSKVVMSMEGIVKPTRGVMIQITINSLDQPVXXPS

SEQ ID NO: 47693 - protein, 41 aa, Artificial Sequence
  GFR-binding peptide
  MOD_RES (1), (3), (37), (38): Xaa is C or S
  MOD_RES (15), (16), (17), (18), (19): Xaa is A or G
  MOD_RES (20), (21), (22), (23): Xaa is A or G or is absent
XGXGEVVMDVTAKKXXXXXXXXXIKRMQVPRLETPVXXAKP

SEQ ID NO: 47694 - protein, 33 aa, Artificial Sequence; identical to SEQ ID NO: 17928
  GFR-binding peptide

SEQ ID NO: 47695 - protein, 41 aa, Artificial Sequence
  GFR-binding peptide
  MOD_RES (2), (4), (38), (39): Xaa is C or S
  MOD_RES (16), (17), (18), (19), (20): Xaa is A or G
  MOD_RES (21), (22), (23), (24): Xaa is A or G or is absent
RXGXGEVVMDVTAKKXXXXXXXXXIKRMQVPRLETPVXXAK

SEQ ID NO: 47696 - protein, 37 aa, Artificial Sequence
  GFR-binding peptide
  MOD_RES (1), (33), (34): Xaa is C or S
XSRVVMNVQVEKIVNSSDDVKAVKVSRLKTPAXXPKP

SEQ ID NO: 47697 - protein, 41 aa, Artificial Sequence; identical to SEQ ID NO: 17929
  GFR-binding peptide
  MOD_RES (1), (38): Xaa is C or S
  MOD_RES (14), (15), (16), (17), (18): Xaa is A or G
  MOD_RES (19), (20), (21), (22): Xaa is A or G or is absent

SEQ ID NO: 47698 - protein, 34 aa, Artificial Sequence
  GFR-binding peptide
  MOD_RES (1), (33), (34): Xaa is C or S
XSRVVMNVQVEKIVNSSDDVKAVKVSRLKTPAXX

SEQ ID NO: 47699 - protein, 32 aa, Artificial Sequence
  GFR-binding peptide
  MOD_RES (32), (32): Xaa is C or S
GEVVMDSMEGIVVKENEDMIQMTINSLETPVX

SEQ ID NO: 47700 - protein, 38 aa, Artificial Sequence
  GFR-binding peptide
  MOD_RES (1), (35), (36): Xaa is C or S
  MOD_RES (13), (14), (15), (16), (17): Xaa is A or G
  MOD_RES (18), (19), (20), (21): Xaa is A or G or is absent
XGEVVMEVTAKKXXXXXXXXXIKRMQVPRLETPVXXAK

SEQ ID NO: 47701 - protein, 36 aa, Artificial Sequence
  GFR-binding peptide
  MOD_RES (32), (33): Xaa is C or S
SRVVMNVQVEKIVNSSDDVKAVKVSRLKTPAXXPKP

SEQ ID NO: 47702 - protein, 40 aa, Artificial Sequence; identical to SEQ ID NO: 17933
  GFR-binding peptide
  MOD_RES (37), (37): Xaa is C or S
  MOD_RES (13), (14), (15), (16), (17): Xaa is A or G
  MOD_RES (18), (19), (20), (21): Xaa is A or G or is absent

SEQ ID NO: 47703 - protein, 39 aa, Artificial Sequence; identical to SEQ ID NO: 17934
  GFR-binding peptide
  MOD_RES (1), (3), (37): Xaa is C or S

SEQ ID NO: 47704 - protein, 39 aa, Artificial Sequence
  GFR-binding peptide
  MOD_RES (1), (35), (36): Xaa is C or S
  MOD_RES (13), (14), (15), (16), (17): Xaa is A or G
  MOD_RES (18), (19), (20), (21): Xaa is A or G or is absent
XGEVVMDSMEGIXXXXXXXXXMIQMTINSLETPVXXAKP

SEQ ID NO: 47705 - protein, 33 aa, Artificial Sequence; identical to SEQ ID NO: 10793
  GFR-binding peptide
  MOD_RES (33), (33): Xaa is C or S
  MOD_RES (11), (12), (13), (14), (15): Xaa is A or G
  MOD_RES (16), (17), (18), (19): Xaa is A or G or is absent

SEQ ID NO: 47706 - protein, 31 aa, Artificial Sequence; identical to SEQ ID NO: 10794
  GFR-binding peptide

SEQ ID NO: 47707 - protein, 39 aa, Artificial Sequence; identical to SEQ ID NO: 10796
  GFR-binding peptide
  MOD_RES (34), (35): Xaa is C or S
  MOD_RES (12), (13), (14), (15), (16): Xaa is A or G
  MOD_RES (17), (18), (19), (20): Xaa is A or G or is absent

SEQ ID NO: 47708 - protein, 40 aa, Artificial Sequence; identical to SEQ ID NO: 10797
  GFR-binding peptide
  MOD_RES (2), (34), (35): Xaa is C or S

SEQ ID NO: 47709 - protein, 34 aa, Artificial Sequence; identical to SEQ ID NO: 17940
  GFR-binding peptide
  MOD_RES (11), (12), (13), (14), (15): Xaa is A or G
  MOD_RES (16), (17), (18), (19): Xaa is A or G or is absent

SEQ ID NO: 47710 - protein, 44 aa, Artificial Sequence
  GFR-binding peptide
  MOD_RES (2), (4), (41): Xaa is C or S
EXKXALHDELTNSLQEFIPKKRVIEYYLVTLPELQVQTPRXQVN

SEQ ID NO: 47711 - protein, 32 aa, Artificial Sequence; identical to SEQ ID NO: 10803
  GFR-binding peptide
  MOD_RES (11), (12), (13), (14), (15): Xaa is A or G
  MOD_RES (16), (17), (18), (19): Xaa is A or G or is absent

SEQ ID NO: 47712 - protein, 33 aa, Artificial Sequence
  GFR-binding peptide
  MOD_RES (31), (32): Xaa is C or S
RVVMNVTAKKIVNSSDDIKRVQVPRLQTPAXXP

SEQ ID NO: 47713 - protein, 38 aa, Artificial Sequence
  GFR-binding peptide
  MOD_RES (33), (33): Xaa is C or S
  MOD_RES (11), (12), (13), (14), (15): Xaa is A or G
  MOD_RES (16), (17), (18), (19): Xaa is A or G or is absent
RVVMNVTAKKXXXXXXXXXIKRVQVPRLKTPAXTPKTV

SEQ ID NO: 47714 - protein, 40 aa, Artificial Sequence; identical to SEQ ID NO: 17943
  GFR-binding peptide
  MOD_RES (2), (39): Xaa is C or S
  MOD_RES (15), (16), (17), (18), (19): Xaa is A or G
  MOD_RES (20), (21), (22), (23): Xaa is A or G or is absent

SEQ ID NO: 47715 - protein, 34 aa, Artificial Sequence
  GFR-binding peptide
  MOD_RES (1), (33), (34): Xaa is C or S
XGEVVMDSMEGIVVKENEDMIQMTINSLETPVXX

SEQ ID NO: 47716 - protein, 38 aa, Artificial Sequence
  GFR-binding peptide
  MOD_RES (34), (35): Xaa is C or S
  MOD_RES (12), (13), (14), (15), (16): Xaa is A or G
  MOD_RES (17), (18), (19), (20): Xaa is A or G or is absent
ARVVMNVQVEKXXXXXXXXXVKAVKVSRLQTPAXXPKP

SEQ ID NO: 47717 - protein, 39 aa, Artificial Sequence
  GFR-binding peptide
  MOD_RES (2), (4): Xaa is C or S
  MOD_RES (17), (18), (19), (20), (21): Xaa is A or G
  MOD_RES (22), (23), (24), (25): Xaa is A or G or is absent
AXAXELHEELRNSLQEXXXXXXXXXYYLVTLPEHHVRSP

SEQ ID NO: 47718 - protein, 35 aa, Artificial Sequence
  GFR-binding peptide
  MOD_RES (1), (3), (35): Xaa is C or S
XGXGEVVMEVTAKKVVKDYEDIKRMQVPRLETPVX

SEQ ID NO: 47719 - protein, 39 aa, Artificial Sequence; identical to SEQ ID NO: 10804
  GFR-binding peptide
  MOD_RES (2), (34), (35): Xaa is C or S

SEQ ID NO: 47720 - protein, 35 aa, Artificial Sequence; identical to SEQ ID NO: 10807
  GFR-binding peptide
  MOD_RES (34), (35): Xaa is C or S
  MOD_RES (12), (13), (14), (15), (16): Xaa is A or G
  MOD_RES (17), (18), (19), (20): Xaa is A or G or is absent

SEQ ID NO: 47721 - protein, 39 aa, Artificial Sequence
  GFR-binding peptide
  MOD_RES (1), (3), (37), (38): Xaa is C or S
  MOD_RES (15), (16), (17), (18), (19): Xaa is A or G
  MOD_RES (20), (21), (22), (23): Xaa is A or G or is absent
XGXSRVVMNVQVEKXXXXXXXXXVKAVKVSRLKTPAXXP

SEQ ID NO: 47722 - protein, 38 aa, Artificial Sequence; identical to SEQ ID NO: 10808
  GFR-binding peptide
  MOD_RES (2), (34), (35): Xaa is C or S

SEQ ID NO: 47723 - protein, 42 aa, Artificial Sequence
  GFR-binding peptide
  MOD_RES (1), (3), (37), (38): Xaa is C or S
  MOD_RES (15), (16), (17), (18), (19): Xaa is A or G
  MOD_RES (20), (21), (22), (23): Xaa is A or G or is absent
XGXARVVMNSMEGIXXXXXXXXXMIQVTINSLQTPAXXPKPV

SEQ ID NO: 47724 - protein, 39 aa, Artificial Sequence
  GFR-binding peptide
  MOD_RES (36), (36): Xaa is C or S
LHDELTNSLQEFIPKKRVIEYYVVPLPELQVQTPRXQVN

SEQ ID NO: 47725 - protein, 36 aa, Artificial Sequence
  GFR-binding peptide
  MOD_RES (2), (34), (35): Xaa is C or S
GXGEVVMESMEGIVVKDYEDMIQMTINSLETPVXXA

SEQ ID NO: 47726 - protein, 37 aa, Artificial Sequence
  GFR-binding peptide
  MOD_RES (33), (34): Xaa is C or S
  MOD_RES (11), (12), (13), (14), (15): Xaa is A or G
  MOD_RES (16), (17), (18), (19): Xaa is A or G or is absent
SKVIMVTAKKXXXXXXXXXIKRIQVPRLDQSVXXPSA

SEQ ID NO: 47727 - protein, 36 aa, Artificial Sequence
  GFR-binding peptide
  MOD_RES (34), (35): Xaa is C or S
  MOD_RES (12), (13), (14), (15), (16): Xaa is A or G
  MOD_RES (17), (18), (19), (20): Xaa is A or G or is absent
ARVVMNSMEGIXXXXXXXXXMIQVTINSLQTPAXXP

SEQ ID NO: 47728 - protein, 40 aa, Artificial Sequence; identical to SEQ ID NO: 17948
  GFR-binding peptide
  MOD_RES (37), (37): Xaa is C or S
  MOD_RES (13), (14), (15), (16), (17): Xaa is A or G
  MOD_RES (18), (19), (20), (21): Xaa is A or G or is absent

SEQ ID NO: 47729 - protein, 35 aa, Artificial Sequence
  GFR-binding peptide
  MOD_RES (1), (3), (34), (35): Xaa is C or S
XKXSKVVMVTAKKVKPTRGVIKRIQVPRLDQPVXX

SEQ ID NO: 47730 - protein, 34 aa, Artificial Sequence
  GFR-binding peptide
  MOD_RES (31), (32): Xaa is C or S
SKVIMVTAKKIKPTKGIIKRIQVPRLDQSVXXPS

SEQ ID NO: 47731 - protein, 39 aa, Artificial Sequence
  GFR-binding peptide
  MOD_RES (1), (3), (36), (37): Xaa is C or S
  MOD_RES (14), (15), (16), (17), (18): Xaa is A or G
  MOD_RES (19), (20), (21), (22): Xaa is A or G or is absent
XKXSKVIMVTAKKXXXXXXXXXIKRIQVPRLDQSVXXPS

SEQ ID NO: 47732 - protein, 40 aa, Artificial Sequence
  GFR-binding peptide
  MOD_RES (2), (35), (36): Xaa is C or S
  MOD_RES (13), (14), (15), (16), (17): Xaa is A or G
  MOD_RES (18), (19), (20), (21): Xaa is A or G or is absent
KXSKVVMSMEGIXXXXXXXXXMIQITINSLDQPVXXPSAS

SEQ ID NO: 47733 - protein, 38 aa, Artificial Sequence; identical to SEQ ID NO: 10814
  GFR-binding peptide
  MOD_RES (1), (35), (36): Xaa is C or S
  MOD_RES (13), (14), (15), (16), (17): Xaa is A or G
  MOD_RES (18), (19), (20), (21): Xaa is A or G or is absent

SEQ ID NO: 47734 - protein, 38 aa, Artificial Sequence
  GFR-binding peptide
  MOD_RES (1), (34), (35): Xaa is C or S
  MOD_RES (12), (13), (14), (15), (16): Xaa is A or G
  MOD_RES (17), (18), (19), (20): Xaa is A or G or is absent
XSKVIMVTAKKXXXXXXXXXIKRIQVPRLDQSVXXPSA

SEQ ID NO: 47735 - protein, 36 aa, Artificial Sequence
  GFR-binding peptide
  MOD_RES (1), (3), (35), (36): Xaa is C or S
XGXARVVMNSMEGIIVNSSDDMIQVTINSLQTPAXX

SEQ ID NO: 47736 - protein, 42 aa, Artificial Sequence
  GFR-binding peptide
  MOD_RES (2), (39): Xaa is C or S
AXELHEELRNSLQELKPKKRVYEYYLVTLPEHHVRSPQXKVS

SEQ ID NO: 47737 - protein, 39 aa, Artificial Sequence
  GFR-binding peptide
  MOD_RES (34), (34): Xaa is C or S
  MOD_RES (12), (13), (14), (15), (16): Xaa is A or G
  MOD_RES (17), (18), (19), (20): Xaa is A or G or is absent
KNHQLFNSLQEXXXXXXXXXYYVMPLPEEETPVXELGED

SEQ ID NO: 47738 - protein, 35 aa, Artificial Sequence; identical to SEQ ID NO: 10818
  GFR-binding peptide
  MOD_RES (2), (4), (35): Xaa is C or S

SEQ ID NO: 47739 - protein, 38 aa, Artificial Sequence; identical to SEQ ID NO: 17962
  GFR-binding peptide
  MOD_RES (2), (4): Xaa is C or S
  MOD_RES (17), (18), (19), (20), (21): Xaa is A or G
  MOD_RES (22), (23), (24), (25): Xaa is A or G or is absent

SEQ ID NO: 47740 - protein, 35 aa, Artificial Sequence
  GFR-binding peptide
  MOD_RES (34), (35): Xaa is C or S
  MOD_RES (12), (13), (14), (15), (16): Xaa is A or G
  MOD_RES (17), (18), (19), (20): Xaa is A or G or is absent
ARVVMNVQVEKXXXXXXXXXVKAVKVSRLQTPAXX

SEQ ID NO: 47741 - protein, 39 aa, Artificial Sequence; identical to SEQ ID NO: 10819
  GFR-binding peptide
  MOD_RES (1), (3), (37), (38): Xaa is C or S
  MOD_RES (15), (16), (17), (18), (19): Xaa is A or G
  MOD_RES (20), (21), (22), (23): Xaa is A or G or is absent

SEQ ID NO: 47742 - protein, 40 aa, Artificial Sequence
  GFR-binding peptide
  MOD_RES (2), (4), (36), (37): Xaa is C or S
HXGXARVVMNVQVEKIVNSSDDVKAVKVSRLQTPAXXPKP

SEQ ID NO: 47743 - protein, 34 aa, Artificial Sequence
  GFR-binding peptide
  MOD_RES (2), (34): Xaa is C or S
GXARVVMNVQVEKIVNSSDDVKAVKVSRLQTPAX

SEQ ID NO: 47744 - protein, 37 aa, Artificial Sequence
  GFR-binding peptide
  MOD_RES (1), (3), (35): Xaa is C or S
XGXSRVVMNVTAKKIVNSSDDIKRVQVPRLKTPAXTP

SEQ ID NO: 47745 - protein, 38 aa, Artificial Sequence; identical to SEQ ID NO: 17964
  GFR-binding peptide
  MOD_RES (1), (3): Xaa is C or S
  MOD_RES (16), (17), (18), (19), (20): Xaa is A or G
  MOD_RES (21), (22), (23), (24): Xaa is A or G or is absent

SEQ ID NO: 47746 - protein, 39 aa, Artificial Sequence; identical to SEQ ID NO: 10822
  GFR-binding peptide
  MOD_RES (2), (36): Xaa is C or S
  MOD_RES (14), (15), (16), (17), (18): Xaa is A or G
  MOD_RES (19), (20), (21), (22): Xaa is A or G or is absent

SEQ ID NO: 47747 - protein, 39 aa, Artificial Sequence; identical to SEQ ID NO: 17968
  GFR-binding peptide
  MOD_RES (35), (35): Xaa is C or S

SEQ ID NO: 47748 - protein, 35 aa, Artificial Sequence
  GFR-binding peptide
  MOD_RES (1), (1): Xaa is C or S
  MOD_RES (14), (15), (16), (17), (18): Xaa is A or G
  MOD_RES (19), (20), (21), (22): Xaa is A or G or is absent
XELHEELRNSLQEXXXXXXXXXYYLVTLPEHHVRS

SEQ ID NO: 47749 - protein, 41 aa, Artificial Sequence
  GFR-binding peptide
  MOD_RES (1), (3), (35), (36): Xaa is C or S
XGXARVVMNVTAKKIVNSSDDIKRVQVPRLQTPAXXPKPVT

SEQ ID NO: 47750 - protein, 36 aa, Artificial Sequence
  GFR-binding peptide
  MOD_RES (31), (32): Xaa is C or S
EVVMDSMEGIVVKENEDMIQMTINSLETPVXXAKPI

SEQ ID NO: 47751 - protein, 40 aa, Artificial Sequence
  GFR-binding peptide
  MOD_RES (2), (4), (38), (39): Xaa is C or S
  MOD_RES (16), (17), (18), (19), (20): Xaa is A or G
  MOD_RES (21), (22), (23), (24): Xaa is A or G or is absent
RXGXGEVVMDVTAKKXXXXXXXXXIKRMQVPRLETPVXXA

SEQ ID NO: 47752 - protein, 41 aa, Artificial Sequence
  GFR-binding peptide
  MOD_RES (2), (39): Xaa is C or S
  MOD_RES (15), (16), (17), (18), (19): Xaa is A or G
  MOD_RES (20), (21), (22), (23): Xaa is A or G or is absent
AXELHEELRNSLQEXXXXXXXXXYYVVPLPEHHVRSPQXKV

SEQ ID NO: 47753 - protein, 37 aa, Artificial Sequence
  GFR-binding peptide
  MOD_RES (2), (35), (36): Xaa is C or S
  MOD_RES (13), (14), (15), (16), (17): Xaa is A or G
  MOD_RES (18), (19), (20), (21): Xaa is A or G or is absent
KXSKVIMVTAKKXXXXXXXXXIKRIQVPRLDQSVXXP

SEQ ID NO: 47754 - protein, 34 aa, Artificial Sequence
  GFR-binding peptide
  MOD_RES (1), (3), (34): Xaa is C or S
XKXSRVIMSMEGIVKPKRGVMIQITINSLAQPVX

SEQ ID NO: 47755 - protein, 39 aa, Artificial Sequence
  GFR-binding peptide
  MOD_RES (2), (34), (35): Xaa is C or S
GXARVVMNSMEGIIVNSSDDMIQVTINSLQTPAXXPKPV

SEQ ID NO: 47756 - protein, 42 aa, Artificial Sequence
  GFR-binding peptide
  MOD_RES (1), (3), (36), (37): Xaa is C or S
  MOD_RES (14), (15), (16), (17), (18): Xaa is A or G
  MOD_RES (19), (20), (21), (22): Xaa is A or G or is absent
XKXSKVIMVTAKKXXXXXXXXXIKRIQVPRLDQSVXXPSASA

SEQ ID NO: 47757 - protein, 36 aa, Artificial Sequence
  GFR-binding peptide
  MOD_RES (1), (34), (35): Xaa is C or S
  MOD_RES (12), (13), (14), (15), (16): Xaa is A or G
  MOD_RES (17), (18), (19), (20): Xaa is A or G or is absent
XSRVIMSMEGIXXXXXXXXXMIQITINSLAQPVXXP

SEQ ID NO: 47758 - protein, 44 aa, Artificial Sequence
  GFR-binding peptide
  MOD_RES (2), (4), (41): Xaa is C or S
AXAXELHEELRNSLQELKPKKRVYEYYLVTLPEHHVRSPQXKVS

SEQ ID NO: 47759 - protein, 40 aa, Artificial Sequence
  GFR-binding peptide
  MOD_RES (1), (3), (37), (38): Xaa is C or S
  MOD_RES (15), (16), (17), (18), (19): Xaa is A or G
  MOD_RES (20), (21), (22), (23): Xaa is A or G or is absent
XGXGEVVMDSMEGIXXXXXXXXXMIQMTINSLETPVXXAK

SEQ ID NO: 47760 - protein, 33 aa, Artificial Sequence
  GFR-binding peptide
  MOD_RES (33), (33): Xaa is C or S
  MOD_RES (11), (12), (13), (14), (15): Xaa is A or G
  MOD_RES (16), (17), (18), (19): Xaa is A or G or is absent
EVVMDSMEGIXXXXXXXXXMIQMTINSLETPVX

SEQ ID NO: 47761 - protein, 43 aa, Artificial Sequence; identical to SEQ ID NO: 17976
  GFR-binding peptide
  MOD_RES (1), (3), (40): Xaa is C or S

SEQ ID NO: 47762 - protein, 37 aa, Artificial Sequence; identical to SEQ ID NO: 10829
  GFR-binding peptide
  MOD_RES (1), (33), (34): Xaa is C or S

SEQ ID NO: 47763 - protein, 36 aa, Artificial Sequence; identical to SEQ ID NO: 10830
  GFR-binding peptide
  MOD_RES (2), (36): Xaa is C or S
  MOD_RES (14), (15), (16), (17), (18): Xaa is A or G
  MOD_RES (19), (20), (21), (22): Xaa is A or G or is absent

SEQ ID NO: 47764 - protein, 33 aa, Artificial Sequence; identical to SEQ ID NO: 10831
  GFR-binding peptide
  MOD_RES (32), (33): Xaa is C or S

SEQ ID NO: 47765 - protein, 40 aa, Artificial Sequence
  GFR-binding peptide
  MOD_RES (1), (3), (35), (36): Xaa is C or S
XGXGEVVMEVQVEKVVKDYEDVKAMKVSRLETPVXXAKPI

SEQ ID NO: 47766 - protein, 34 aa, Artificial Sequence
  GFR-binding peptide
  MOD_RES (13), (14), (15), (16), (17): Xaa is A or G
  MOD_RES (18), (19), (20), (21): Xaa is A or G or is absent
ELHEELRNSLQEXXXXXXXXXYYLVTLPEHHVRS

SEQ ID NO: 47767 - protein, 42 aa, Artificial Sequence
  GFR-binding peptide
  MOD_RES (2), (36), (37): Xaa is C or S
  MOD_RES (14), (15), (16), (17), (18): Xaa is A or G
  MOD_RES (19), (20), (21), (22): Xaa is A or G or is absent
GXGEVVMDVTAKKXXXXXXXXXIKRMQVPRLETPVXXAKPIK

SEQ ID NO: 47768 - protein, 40 aa, Artificial Sequence; identical to SEQ ID NO: 10832
  GFR-binding peptide
  MOD_RES (2), (36): Xaa is C or S
  MOD_RES (14), (15), (16), (17), (18): Xaa is A or G
  MOD_RES (19), (20), (21), (22): Xaa is A or G or is absent

SEQ ID NO: 47769 - protein, 35 aa, Artificial Sequence
  GFR-binding peptide
  MOD_RES (1), (35): Xaa is C or S
  MOD_RES (13), (14), (15), (16), (17): Xaa is A or G
  MOD_RES (18), (19), (20), (21): Xaa is A or G or is absent
XSRVVMNVQVEKXXXXXXXXXVKAVKVSRLKTPAX

SEQ ID NO: 47770 - protein, 34 aa, Artificial Sequence; identical to SEQ ID NO: 10833
  GFR-binding peptide
  MOD_RES (34), (34): Xaa is C or S
  MOD_RES (12), (13), (14), (15), (16): Xaa is A or G
  MOD_RES (17), (18), (19), (20): Xaa is A or G or is absent

SEQ ID NO: 47771 - protein, 37 aa, Artificial Sequence; identical to SEQ ID NO: 17981
  GFR-binding peptide
  MOD_RES (35), (35): Xaa is C or S
  MOD_RES (11), (12), (13), (14), (15): Xaa is A or G
  MOD_RES (16), (17), (18), (19): Xaa is A or G or is absent

SEQ ID NO: 47772 - protein, 35 aa, Artificial Sequence
  GFR-binding peptide
  MOD_RES (2), (33), (34): Xaa is C or S
KXSRVIMVTAKKVKPKRGVIKRIQVPRLAQPVXXP

SEQ ID NO: 47773 - protein, 36 aa, Artificial Sequence; identical to SEQ ID NO: 17982
  GFR-binding peptide
  MOD_RES (1), (35): Xaa is C or S

SEQ ID NO: 47774 - protein, 35 aa, Artificial Sequence
  GFR-binding peptide
  MOD_RES (13), (14), (15), (16), (17): Xaa is A or G
  MOD_RES (18), (19), (20), (21): Xaa is A or G or is absent
ELHEELRNSLQEXXXXXXXXXYYVVPLPEHHVRSP

SEQ ID NO: 47775 - protein, 37 aa, Artificial Sequence; identical to SEQ ID NO: 10835
  GFR-binding peptide
  MOD_RES (2), (35), (36): Xaa is C or S
  MOD_RES (13), (14), (15), (16), (17): Xaa is A or G
  MOD_RES (18), (19), (20), (21): Xaa is A or G or is absent

SEQ ID NO: 47776 - protein, 39 aa, Artificial Sequence
  GFR-binding peptide
  MOD_RES (1), (3): Xaa is C or S
XAXELHEELRNSLQELKPKKRVYEYYLVTLPEHHVRSPQ

SEQ ID NO: 47777 - protein, 37 aa, Artificial Sequence; identical to SEQ ID NO: 10836
  GFR-binding peptide
  MOD_RES (1), (33): Xaa is C or S

SEQ ID NO: 47778 - protein, 41 aa, Artificial Sequence; identical to SEQ ID NO: 17985
  GFR-binding peptide
  MOD_RES (1), (3), (37): Xaa is C or S

SEQ ID NO: 47779 - protein, 36 aa, Artificial Sequence; identical to SEQ ID NO: 17986
  GFR-binding peptide
  MOD_RES (35), (35): Xaa is C or S

SEQ ID NO: 47780 - protein, 42 aa, Artificial Sequence
  GFR-binding peptide
  MOD_RES (1), (3), (36), (37): Xaa is C or S
  MOD_RES (14), (15), (16), (17), (18): Xaa is A or G
  MOD_RES (19), (20), (21), (22): Xaa is A or G or is absent
XKXSRVIMVTAKKXXXXXXXXXIKRIQVPRLAQPVXXPAASA

SEQ ID NO: 47781 - protein, 36 aa, Artificial Sequence
  GFR-binding peptide
  MOD_RES (1), (33): Xaa is C or S
XSRVVMNVTAKKIVNSSDDIKRVQVPRLKTPAXTPK

SEQ ID NO: 47782 - protein, 42 aa, Artificial Sequence; identical to SEQ ID NO: 10840
  GFR-binding peptide
  MOD_RES (2), (4), (37), (38): Xaa is C or S
  MOD_RES (15), (16), (17), (18), (19): Xaa is A or G
  MOD_RES (20), (21), (22), (23): Xaa is A or G or is absent

SEQ ID NO: 47783 - protein, 41 aa, Artificial Sequence
  GFR-binding peptide
  MOD_RES (2), (4), (36), (37): Xaa is C or S
RXGXGEVVMDSMEGIVVKENEDMIQMTINSLETPVXXAKPI

SEQ ID NO: 47784 - protein, 37 aa, Artificial Sequence; identical to SEQ ID NO: 17989
  GFR-binding peptide
  MOD_RES (35), (35): Xaa is C or S
  MOD_RES (11), (12), (13), (14), (15): Xaa is A or G
  MOD_RES (16), (17), (18), (19): Xaa is A or G or is absent

SEQ ID NO: 47785 - protein, 39 aa, Artificial Sequence
  GFR-binding peptide
  MOD_RES (2), (4): Xaa is C or S
  MOD_RES (17), (18), (19), (20), (21): Xaa is A or G
  MOD_RES (22), (23), (24), (25): Xaa is A or G or is absent
EXKXALHDELTNSLQEXXXXXXXXXYYVVPLPELQVQTP

SEQ ID NO: 47786 - protein, 35 aa, Artificial Sequence
  GFR-binding peptide
  MOD_RES (1), (3), (35): Xaa is C or S
XGXGEVVMDVTAKKVVKENEDIKRMQVPRLETPVX

SEQ ID NO: 47787 - protein, 42 aa, Artificial Sequence
  GFR-binding peptide
  MOD_RES (2), (4), (38): Xaa is C or S
  MOD_RES (16), (17), (18), (19), (20): Xaa is A or G
  MOD_RES (21), (22), (23), (24): Xaa is A or G or is absent
HXGXSRVVMNSMEGIXXXXXXXXXMIQVTINSLKTPAXTPKT

SEQ ID NO: 47788 - protein, 35 aa, Artificial Sequence; identical to SEQ ID NO: 10843
  GFR-binding peptide
  MOD_RES (31), (32): Xaa is C or S

SEQ ID NO: 47789 - protein, 35 aa, Artificial Sequence
  GFR-binding peptide
  MOD_RES (33), (33): Xaa is C or S
  MOD_RES (11), (12), (13), (14), (15): Xaa is A or G
  MOD_RES (16), (17), (18), (19): Xaa is A or G or is absent
RVVMNVQVEKXXXXXXXXXVKAVKVSRLKTPAXTP

SEQ ID NO: 47790 - protein, 39 aa, Artificial Sequence
  GFR-binding peptide
  MOD_RES (1), (35): Xaa is C or S
  MOD_RES (13), (14), (15), (16), (17): Xaa is A or G
  MOD_RES (18), (19), (20), (21): Xaa is A or G or is absent
XKNHQLFNSLQEXXXXXXXXXYYLMTLPEEETPVXELGE

SEQ ID NO: 47791 - protein, 41 aa, Artificial Sequence; identical to SEQ ID NO: 10844
  GFR-binding peptide
  MOD_RES (1), (35), (36): Xaa is C or S
  MOD_RES (13), (14), (15), (16), (17): Xaa is A or G
  MOD_RES (18), (19), (20), (21): Xaa is A or G or is absent

SEQ ID NO: 47792 - protein, 37 aa, Artificial Sequence
  GFR-binding peptide
  MOD_RES (1), (3), (37): Xaa is C or S
  MOD_RES (15), (16), (17), (18), (19): Xaa is A or G
  MOD_RES (20), (21), (22), (23): Xaa is A or G or is absent
XGXGEVVMEVQVEKXXXXXXXXXVKAMKVSRLETPVX

SEQ ID NO: 47793 - protein, 35 aa, Artificial Sequence
  GFR-binding peptide
  MOD_RES (31), (32): Xaa is C or S
SRVIMVQVEKVKPKRGVVKAIKVSRLAQPVXXPAA

SEQ ID NO: 47794 - protein, 42 aa, Artificial Sequence
  GFR-binding peptide
  MOD_RES (2), (36), (37): Xaa is C or S
  MOD_RES (14), (15), (16), (17), (18): Xaa is A or G
  MOD_RES (19), (20), (21), (22): Xaa is A or G or is absent
GXGEVVMESMEGIXXXXXXXXXMIQMTINSLETPVXXAKPIS

SEQ ID NO: 47795 - protein, 35 aa, Artificial Sequence
  GFR-binding peptide
  MOD_RES (2), (34), (35): Xaa is C or S
GXSRVVMNSMEGIIVNSSDDMIQVTINSLKTPAXX

SEQ ID NO: 47796 - protein, 34 aa, Artificial Sequence; identical to SEQ ID NO: 37225
  GFR-binding peptide
  MOD_RES (33), (34): Xaa is C or S
  MOD_RES (11), (12), (13), (14), (15): Xaa is A or G
  MOD_RES (16), (17), (18), (19): Xaa is A or G or is absent

SEQ ID NO: 47797 - protein, 39 aa, Artificial Sequence
  GFR-binding peptide
  MOD_RES (2), (4), (35), (36): Xaa is C or S
SXKXSRVIMVQVEKVKPKRGVVKAIKVSRLAQPVXXPAA

SEQ ID NO: 47798 - protein, 40 aa, Artificial Sequence
  GFR-binding peptide
  MOD_RES (1), (3), (36), (37): Xaa is C or S
  MOD_RES (14), (15), (16), (17), (18): Xaa is A or G
  MOD_RES (19), (20), (21), (22): Xaa is A or G or is absent
XKXSRVIMVQVEKXXXXXXXXXVKAIKVSRLAQPVXXPAA

SEQ ID NO: 47799 - protein, 37 aa, Artificial Sequence
  GFR-binding peptide
  MOD_RES (33), (34): Xaa is C or S
  MOD_RES (11), (12), (13), (14), (15): Xaa is A or G
  MOD_RES (16), (17), (18), (19): Xaa is A or G or is absent
RVVMNVTAKKXXXXXXXXXIKRVQVPRLQTPAXXPKP

SEQ ID NO: 47800 - protein, 40 aa, Artificial Sequence; identical to SEQ ID NO: 10847
  GFR-binding peptide
  MOD_RES (34), (34): Xaa is C or S
  MOD_RES (12), (13), (14), (15), (16): Xaa is A or G
  MOD_RES (17), (18), (19), (20): Xaa is A or G or is absent

SEQ ID NO: 47801 - protein, 35 aa, Artificial Sequence
  GFR-binding peptide
  MOD_RES (1), (33): Xaa is C or S
XSRVVMNVQVEKIVNSSDDVKAVKVSRLKTPAXTP

SEQ ID NO: 47802 - protein, 32 aa, Artificial Sequence
  GFR-binding peptide
  MOD_RES (11), (12), (13), (14), (15): Xaa is A or G
  MOD_RES (16), (17), (18), (19): Xaa is A or G or is absent
EVVMEVQVEKXXXXXXXXXVKAMKVSRLETPV

SEQ ID NO: 47803 - protein, 37 aa, Artificial Sequence; identical to SEQ ID NO: 10850
  GFR-binding peptide
  MOD_RES (2), (4), (36), (37): Xaa is C or S

SEQ ID NO: 47804 - protein, 35 aa, Artificial Sequence
  GFR-binding peptide
  MOD_RES (2), (35): Xaa is C or S
  MOD_RES (13), (14), (15), (16), (17): Xaa is A or G
  MOD_RES (18), (19), (20), (21): Xaa is A or G or is absent
KXSKVVMVTAKKXXXXXXXXXIKRIQVPRLDQPVX

SEQ ID NO: 47805 - protein, 36 aa, Artificial Sequence
  GFR-binding peptide
  MOD_RES (2), (34): Xaa is C or S
GXSRVVMNVTAKKIVNSSDDIKRVQVPRLKTPAXTP

SEQ ID NO: 47806 - protein, 41 aa, Artificial Sequence; identical to SEQ ID NO: 10857
  GFR-binding peptide
  MOD_RES (1), (3), (35), (36): Xaa is C or S

SEQ ID NO: 47807 - protein, 34 aa, Artificial Sequence
  GFR-binding peptide
  MOD_RES (1), (1): Xaa is C or S
  MOD_RES (13), (14), (15), (16), (17): Xaa is A or G
  MOD_RES (18), (19), (20), (21): Xaa is A or G or is absent
XGEVVMDVTAKKXXXXXXXXXIKRMQVPRLETPV

SEQ ID NO: 47808 - protein, 36 aa, Artificial Sequence
  GFR-binding peptide
  MOD_RES (2), (36): Xaa is C or S
  MOD_RES (14), (15), (16), (17), (18): Xaa is A or G
  MOD_RES (19), (20), (21), (22): Xaa is A or G or is absent
GXARVVMNSMEGIXXXXXXXXXMIQVTINSLQTPAX

SEQ ID NO: 47809 - protein, 34 aa, Artificial Sequence
  GFR-binding peptide
  MOD_RES (1), (34): Xaa is C or S
  MOD_RES (12), (13), (14), (15), (16): Xaa is A or G
  MOD_RES (17), (18), (19), (20): Xaa is A or G or is absent
XSKVIMVTAKKXXXXXXXXXIKRIQVPRLDQSVX

SEQ ID NO: 47810 - protein, 37 aa, Artificial Sequence; identical to SEQ ID NO: 18004
  GFR-binding peptide
  MOD_RES (2), (4): Xaa is C or S

SEQ ID NO: 47811 - protein, 37 aa, Artificial Sequence; identical to SEQ ID NO: 18005
  GFR-binding peptide
  MOD_RES (2), (4): Xaa is C or S
  MOD_RES (16), (17), (18), (19), (20): Xaa is A or G
  MOD_RES (21), (22), (23), (24): Xaa is A or G or is absent

SEQ ID NO: 47812 - protein, 43 aa, Artificial Sequence; identical to SEQ ID NO: 10862
  GFR-binding peptide
  MOD_RES (2), (4), (37), (38): Xaa is C or S
  MOD_RES (15), (16), (17), (18), (19): Xaa is A or G
  MOD_RES (20), (21), (22), (23): Xaa is A or G or is absent

SEQ ID NO: 47813 - protein, 37 aa, Artificial Sequence
  GFR-binding peptide
  MOD_RES (2), (36), (37): Xaa is C or S
  MOD_RES (14), (15), (16), (17), (18): Xaa is A or G
  MOD_RES (19), (20), (21), (22): Xaa is A or G or is absent
GXGEVVMEVTAKKXXXXXXXXXIKRMQVPRLETPVXX

SEQ ID NO: 47814 - protein, 33 aa, Artificial Sequence
  GFR-binding peptide
  MOD_RES (1), (33): Xaa is C or S
XARVVMNVTAKKIVNSSDDIKRVQVPRLQTPAX

SEQ ID NO: 47815 - protein, 37 aa, Artificial Sequence; identical to SEQ ID NO: 10865
  GFR-binding peptide
  MOD_RES (1), (3), (37): Xaa is C or S
  MOD_RES (15), (16), (17), (18), (19): Xaa is A or G
  MOD_RES (20), (21), (22), (23): Xaa is A or G or is absent

SEQ ID NO: 47816 - protein, 35 aa, Artificial Sequence
  GFR-binding peptide
  MOD_RES (1), (33), (34): Xaa is C or S
XGEVVMDSMEGIVVKENEDMIQMTINSLETPVXXA

SEQ ID NO: 47817 - protein, 38 aa, Artificial Sequence; identical to SEQ ID NO: 18008
  GFR-binding peptide
  MOD_RES (36), (36): Xaa is C or S
  MOD_RES (12), (13), (14), (15), (16): Xaa is A or G
  MOD_RES (17), (18), (19), (20): Xaa is A or G or is absent

SEQ ID NO: 47818 - protein, 34 aa, Artificial Sequence; identical to SEQ ID NO: 10866
  GFR-binding peptide
  MOD_RES (1), (33), (34): Xaa is C or S

SEQ ID NO: 47819 - protein, 38 aa, Artificial Sequence; identical to SEQ ID NO: 10867
  GFR-binding peptide
  MOD_RES (2), (4), (36), (37): Xaa is C or S

SEQ ID NO: 47820 - protein, 33 aa, Artificial Sequence; identical to SEQ ID NO: 10868
  GFR-binding peptide
  MOD_RES (31), (31): Xaa is C or S

SEQ ID NO: 47821 - protein, 42 aa, Artificial Sequence
  GFR-binding peptide
  MOD_RES (1), (3), (40): Xaa is C or S
  MOD_RES (16), (17), (18), (19), (20): Xaa is A or G
  MOD_RES (21), (22), (23), (24): Xaa is A or G or is absent
XAXELHEELRNSLQEXXXXXXXXXYYVVPLPEHHVRSPQXKV

SEQ ID NO: 47822 - protein, 37 aa, Artificial Sequence
  GFR-binding peptide
  MOD_RES (32), (33): Xaa is C or S
ARVVMNVQVEKIVNSSDDVKAVKVSRLQTPAXXPKPV

SEQ ID NO: 47823 - protein, 38 aa, Artificial Sequence; identical to SEQ ID NO: 18012
  GFR-binding peptide
  MOD_RES (1), (38): Xaa is C or S

SEQ ID NO: 47824 - protein, 36 aa, Artificial Sequence
  GFR-binding peptide
  MOD_RES (36), (36): Xaa is C or S
  MOD_RES (12), (13), (14), (15), (16): Xaa is A or G
  MOD_RES (17), (18), (19), (20): Xaa is A or G or is absent
LHEELRNSLQEXXXXXXXXXYYVVPLPEHHVRSPQX

SEQ ID NO: 47825 - protein, 36 aa, Artificial Sequence
  GFR-binding peptide
  MOD_RES (2), (34), (35): Xaa is C or S
GXARVVMNVQVEKIVNSSDDVKAVKVSRLQTPAXXP

SEQ ID NO: 47826 - protein, 38 aa, Artificial Sequence
  GFR-binding peptide
  MOD_RES (2), (4), (38): Xaa is C or S
  MOD_RES (16), (17), (18), (19), (20): Xaa is A or G
  MOD_RES (21), (22), (23), (24): Xaa is A or G or is absent
HXGXSRVVMNVQVEKXXXXXXXXXVKAVKVSRLKTPAX

SEQ ID NO: 47827 - protein, 41 aa, Artificial Sequence; identical to SEQ ID NO: 18016
  GFR-binding peptide
  MOD_RES (2), (4), (41): Xaa is C or S

SEQ ID NO: 47828 - protein, 41 aa, Artificial Sequence; identical to SEQ ID NO: 18017
  GFR-binding peptide
  MOD_RES (1), (38): Xaa is C or S

SEQ ID NO: 47829 - protein, 42 aa, Artificial Sequence
  GFR-binding peptide
  MOD_RES (2), (4), (37), (38): Xaa is C or S
  MOD_RES (15), (16), (17), (18), (19): Xaa is A or G
  MOD_RES (20), (21), (22), (23): Xaa is A or G or is absent
SXKXSRVIMVTAKKXXXXXXXXXIKRIQVPRLAQPVXXPAAS

SEQ ID NO: 47830 - protein, 34 aa, Artificial Sequence; identical to SEQ ID NO: 10876
  GFR-binding peptide
  MOD_RES (2), (33), (34): Xaa is C or S

SEQ ID NO: 47831 - protein, 36 aa, Artificial Sequence
  GFR-binding peptide
ALHDELTNSLQEFIPKKRVIEYYVVPLPELQVQTPR

SEQ ID NO: 47832 - protein, 42 aa, Artificial Sequence; identical to SEQ ID NO: 18019
  GFR-binding peptide
  MOD_RES (2), (39): Xaa is C or S

SEQ ID NO: 47833 - protein, 40 aa, Artificial Sequence; identical to SEQ ID NO: 18021
  GFR-binding peptide
  MOD_RES (2), (4): Xaa is C or S

SEQ ID NO: 47834 - protein, 41 aa, Artificial Sequence; identical to SEQ ID NO: 10878
  GFR-binding peptide
  MOD_RES (1), (3), (35), (36): Xaa is C or S

SEQ ID NO: 47835 - protein, 41 aa, Artificial Sequence; identical to SEQ ID NO: 37275
  GFR-binding peptide
  MOD_RES (2), (35), (36): Xaa is C or S
  MOD_RES (13), (14), (15), (16), (17): Xaa is A or G
  MOD_RES (18), (19), (20), (21): Xaa is A or G or is absent

SEQ ID NO: 47836 - protein, 33 aa, Artificial Sequence
  GFR-binding peptide
  MOD_RES (1), (33): Xaa is C or S
XGEVVMDVQVEKVVKENEDVKAMKVSRLETPVX

SEQ ID NO: 47837 - protein, 40 aa, Artificial Sequence
  GFR-binding peptide
  MOD_RES (1), (3), (36), (37): Xaa is C or S
  MOD_RES (14), (15), (16), (17), (18): Xaa is A or G
  MOD_RES (19), (20), (21), (22): Xaa is A or G or is absent
XKXSKVIMVQVEKXXXXXXXXXVKAIKVSRLDQSVXXPSA

SEQ ID NO: 47838 - protein, 37 aa, Artificial Sequence
  GFR-binding peptide
  MOD_RES (2), (34), (35): Xaa is C or S
GXSRVVMNVTAKKIVNSSDDIKRVQVPRLKTPAXXPK

SEQ ID NO: 47839 - protein, 41 aa, Artificial Sequence; identical to SEQ ID NO: 10879
  GFR-binding peptide
  MOD_RES (1), (3), (37), (38): Xaa is C or S
  MOD_RES (15), (16), (17), (18), (19): Xaa is A or G
  MOD_RES (20), (21), (22), (23): Xaa is A or G or is absent

SEQ ID NO: 47840 - protein, 39 aa, Artificial Sequence; identical to SEQ ID NO: 10881
  GFR-binding peptide
  MOD_RES (2), (4), (35), (36): Xaa is C or S

SEQ ID NO: 47841 - protein, 34 aa, Artificial Sequence; identical to SEQ ID NO: 10882
  GFR-binding peptide
  MOD_RES (31), (32): Xaa is C or S

SEQ ID NO: 47842 - protein, 34 aa, Artificial Sequence; identical to SEQ ID NO: 10885
  GFR-binding peptide
  MOD_RES (31), (32): Xaa is C or S

SEQ ID NO: 47843 - protein, 43 aa, Artificial Sequence; identical to SEQ ID NO: 10886
  GFR-binding peptide
  MOD_RES (2), (4), (38): Xaa is C or S
  MOD_RES (16), (17), (18), (19), (20): Xaa is A or G
  MOD_RES (21), (22), (23), (24): Xaa is A or G or is absent

SEQ ID NO: 47844 - protein, 35 aa, Artificial Sequence; identical to SEQ ID NO: 18031
  GFR-binding peptide
  MOD_RES (1), (1): Xaa is C or S
  MOD_RES (14), (15), (16), (17), (18): Xaa is A or G
  MOD_RES (19), (20), (21), (22): Xaa is A or G or is absent

SEQ ID NO: 47845 - protein, 40 aa, Artificial Sequence; identical to SEQ ID NO: 10887
  GFR-binding peptide
  MOD_RES (2), (4), (38): Xaa is C or S
  MOD_RES (16), (17), (18), (19), (20): Xaa is A or G
  MOD_RES (21), (22), (23), (24): Xaa is A or G or is absent

SEQ ID NO: 47846 - protein, 43 aa, Artificial Sequence
  GFR-binding peptide
  MOD_RES (2), (4), (37), (38): Xaa is C or S
  MOD_RES (15), (16), (17), (18), (19): Xaa is A or G
  MOD_RES (20), (21), (22), (23): Xaa is A or G or is absent
SXKXSKVIMVTAKKXXXXXXXXXIKRIQVPRLDQSVXXPSASA

SEQ ID NO: 47847 - protein, 39 aa, Artificial Sequence
  GFR-binding peptide
  MOD_RES (1), (38): Xaa is C or S
XELHEELRNSLQELKPKKRVYEYYVVPLPEHHVRSPQXK

SEQ ID NO: 47848 - protein, 39 aa, Artificial Sequence; identical to SEQ ID NO: 10889
  GFR-binding peptide
  MOD_RES (1), (3), (37), (38): Xaa is C or S
  MOD_RES (15), (16), (17), (18), (19): Xaa is A or G
  MOD_RES (20), (21), (22), (23): Xaa is A or G or is absent

SEQ ID NO: 47849 - protein, 38 aa, Artificial Sequence
  GFR-binding peptide
  MOD_RES (1), (3), (37): Xaa is C or S
  MOD_RES (15), (16), (17), (18), (19): Xaa is A or G
  MOD_RES (20), (21), (22), (23): Xaa is A or G or is absent
XEXKNHQLFNSLQEXXXXXXXXXYYVMPLPEEETPVXE

SEQ ID NO: 47850 - protein, 41 aa, Artificial Sequence
  GFR-binding peptide
  MOD_RES (2), (4), (36), (37): Xaa is C or S
HXGXSRVVMNVQVEKIVNSSDDVKAVKVSRLKTPAXXPKPV

SEQ ID NO: 47851 - protein, 35 aa, Artificial Sequence
  GFR-binding peptide
  MOD_RES (1), (3), (35): Xaa is C or S
XGXARVVMNVQVEKIVNSSDDVKAVKVSRLQTPAX

SEQ ID NO: 47852 - protein, 36 aa, Artificial Sequence; identical to SEQ ID NO: 10898
  GFR-binding peptide
  MOD_RES (1), (33), (34): Xaa is C or S

SEQ ID NO: 47853 - protein, 32 aa, Artificial Sequence
  GFR-binding peptide
  MOD_RES (11), (12), (13), (14), (15): Xaa is A or G
  MOD_RES (16), (17), (18), (19): Xaa is A or G or is absent
SRVIMVQVEKXXXXXXXXXVKAIKVSRLAQPV

SEQ ID NO: 47854 - protein, 38 aa, Artificial Sequence; identical to SEQ ID NO: 18035
  GFR-binding peptide
  MOD_RES (2), (36): Xaa is C or S

SEQ ID NO: 47855 - protein, 43 aa, Artificial Sequence; identical to SEQ ID NO: 18037
  GFR-binding peptide
  MOD_RES (1), (3), (37): Xaa is C or S
  MOD_RES (15), (16), (17), (18), (19): Xaa is A or G
  MOD_RES (20), (21), (22), (23): Xaa is A or G or is absent

SEQ ID NO: 47856 - protein, 37 aa, Artificial Sequence; identical to SEQ ID NO: 18038
  GFR-binding peptide
  MOD_RES (1), (3): Xaa is C or S

SEQ ID NO: 47857 - protein, 42 aa, Artificial Sequence
  GFR-binding peptide
  MOD_RES (1), (3), (37), (38): Xaa is C or S
  MOD_RES (15), (16), (17), (18), (19): Xaa is A or G
  MOD_RES (20), (21), (22), (23): Xaa is A or G or is absent
XGXGEVVMDVTAKKXXXXXXXXXIKRMQVPRLETPVXXAKPI

SEQ ID NO: 47858 - protein, 36 aa, Artificial Sequence; identical to SEQ ID NO: 10901
  GFR-binding peptide
  MOD_RES (2), (34), (35): Xaa is C or S

SEQ ID NO: 47859 - protein, 40 aa, Artificial Sequence
  GFR-binding peptide
  MOD_RES (2), (4), (38): Xaa is C or S
  MOD_RES (16), (17), (18), (19), (20): Xaa is A or G
  MOD_RES (21), (22), (23), (24): Xaa is A or G or is absent
RXEXKNHQLFNSLQEXXXXXXXXXYYVMPLPEEETPVXEL

SEQ ID NO: 47860 - protein, 39 aa, Artificial Sequence
  GFR-binding peptide
  MOD_RES (1), (3), (36), (37): Xaa is C or S
  MOD_RES (14), (15), (16), (17), (18): Xaa is A or G
  MOD_RES (19), (20), (21), (22): Xaa is A or G or is absent
XKXSKVVMVTAKKXXXXXXXXXIKRIQVPRLDQPVXXPS

SEQ ID NO: 47861 - protein, 39 aa, Artificial Sequence; identical to SEQ ID NO: 18043
  GFR-binding peptide
  MOD_RES (2), (4), (38): Xaa is C or S

SEQ ID NO: 47862 - protein, 33 aa, Artificial Sequence; identical to SEQ ID NO: 10903
  GFR-binding peptide
  MOD_RES (2), (2): Xaa is C or S

SEQ ID NO: 47863 - protein, 38 aa, Artificial Sequence
  GFR-binding peptide
  MOD_RES (2), (4), (35), (36): Xaa is C or S
SXKXSKVIMSMEGIIKPTKGIMIQITINSLDQSVXXPS

SEQ ID NO: 47864 - protein, 41 aa, Artificial Sequence
  GFR-binding peptide
  MOD_RES (37), (37): Xaa is C or S
  MOD_RES (13), (14), (15), (16), (17): Xaa is A or G
  MOD_RES (18), (19), (20), (21): Xaa is A or G or is absent
ALHDELTNSLQEXXXXXXXXXYYLVTLPELQVQTPRXQVNR

SEQ ID NO: 47865 - protein, 40 aa, Artificial Sequence; identical to SEQ ID NO: 10906
  GFR-binding peptide
  MOD_RES (2), (35), (36): Xaa is C or S
  MOD_RES (13), (14), (15), (16), (17): Xaa is A or G
  MOD_RES (18), (19), (20), (21): Xaa is A or G or is absent

SEQ ID NO: 47866 - protein, 40 aa, Artificial Sequence; identical to SEQ ID NO: 10907
  GFR-binding peptide
  MOD_RES (2), (34), (35): Xaa is C or S

SEQ ID NO: 47867 - protein, 39 aa, Artificial Sequence
  GFR-binding peptide
  MOD_RES (1), (3), (37), (38): Xaa is C or S
  MOD_RES (15), (16), (17), (18), (19): Xaa is A or G
  MOD_RES (20), (21), (22), (23): Xaa is A or G or is absent
XGXSRVVMNVTAKKXXXXXXXXXIKRVQVPRLKTPAXXP

SEQ ID NO: 47868 - protein, 34 aa, Artificial Sequence
  GFR-binding peptide
  MOD_RES (1), (1): Xaa is C or S
XKNHQLFNSLQEHQGQHPKIRYYLMTLPEEETPV

SEQ ID NO: 47869 - protein, 38 aa, Artificial Sequence; identical to SEQ ID NO: 18049
  GFR-binding peptide
  MOD_RES (37), (37): Xaa is C or S

SEQ ID NO: 47870 - protein, 39 aa, Artificial Sequence; identical to SEQ ID NO: 18051
  GFR-binding peptide
  MOD_RES (37), (37): Xaa is C or S
  MOD_RES (13), (14), (15), (16), (17): Xaa is A or G
  MOD_RES (18), (19), (20), (21): Xaa is A or G or is absent

SEQ ID NO: 47871 - protein, 41 aa, Artificial Sequence
  GFR-binding peptide
  MOD_RES (1), (3), (37), (38): Xaa is C or S
  MOD_RES (15), (16), (17), (18), (19): Xaa is A or G
  MOD_RES (20), (21), (22), (23): Xaa is A or G or is absent
XGXGEVVMDVQVEKXXXXXXXXXVKAMKVSRLETPVXXAKP

SEQ ID NO: 47872 - protein, 32 aa, Artificial Sequence
  GFR-binding peptide
  MOD_RES (1), (1): Xaa is C or S
XARVVMNSMEGIIVNSSDDMIQVTINSLQTPA

SEQ ID NO: 47873 - protein, 39 aa, Artificial Sequence
  GFR-binding peptide
  MOD_RES (1), (33), (34): Xaa is C or S
XSRVVMNSMEGIIVNSSDDMIQVTINSLKTPAXXPKPVY

SEQ ID NO: 47874 - protein, 32 aa, Artificial Sequence; identical to SEQ ID NO: 10914
  GFR-binding peptide
  MOD_RES (31), (31): Xaa is C or S

SEQ ID NO: 47875 - protein, 34 aa, Artificial Sequence; identical to SEQ ID NO: 37334
  GFR-binding peptide
  MOD_RES (2), (33), (34): Xaa is C or S

SEQ ID NO: 47876 - protein, 38 aa, Artificial Sequence
  GFR-binding peptide
  MOD_RES (2), (4), (36), (37): Xaa is C or S
HXGXSRVVMNSMEGIIVNSSDDMIQVTINSLKTPAXXP

SEQ ID NO: 47877 - protein, 35 aa, Artificial Sequence; identical to SEQ ID NO: 10916
  GFR-binding peptide
  MOD_RES (34), (34): Xaa is C or S
  MOD_RES (12), (13), (14), (15), (16): Xaa is A or G
  MOD_RES (17), (18), (19), (20): Xaa is A or G or is absent

SEQ ID NO: 47878 - protein, 33 aa, Artificial Sequence; identical to SEQ ID NO: 10918
  GFR-binding peptide
  MOD_RES (31), (32): Xaa is C or S

SEQ ID NO: 47879 - protein, 39 aa, Artificial Sequence
  GFR-binding peptide
  MOD_RES (2), (36), (37): Xaa is C or S
  MOD_RES (14), (15), (16), (17), (18): Xaa is A or G
  MOD_RES (19), (20), (21), (22): Xaa is A or G or is absent
GXGEVVMDVTAKKXXXXXXXXXIKRMQVPRLETPVXXAK

SEQ ID NO: 47880 - protein, 36 aa, Artificial Sequence; identical to SEQ ID NO: 10919
  GFR-binding peptide
  MOD_RES (2), (36): Xaa is C or S
  MOD_RES (14), (15), (16), (17), (18): Xaa is A or G
  MOD_RES (19), (20), (21), (22): Xaa is A or G or is absent

SEQ ID NO: 47881 - protein, 33 aa, Artificial Sequence; identical to SEQ ID NO: 10920
  GFR-binding peptide
  MOD_RES (12), (13), (14), (15), (16): Xaa is A or G
  MOD_RES (17), (18), (19), (20): Xaa is A or G or is absent

SEQ ID NO: 47882 - protein, 34 aa, Artificial Sequence
  GFR-binding peptide
ALHDELTNSLQEFIPKKRVIEYYLVTLPELQVQT

SEQ ID NO: 47883 - protein, 34 aa, Artificial Sequence; identical to SEQ ID NO: 10921
  GFR-binding peptide
  MOD_RES (33), (33): Xaa is C or S
  MOD_RES (11), (12), (13), (14), (15): Xaa is A or G
  MOD_RES (16), (17), (18), (19): Xaa is A or G or is absent

SEQ ID NO: 47884 - protein, 40 aa, Artificial Sequence
  GFR-binding peptide
  MOD_RES (34), (34): Xaa is C or S
  MOD_RES (12), (13), (14), (15), (16): Xaa is A or G
  MOD_RES (17), (18), (19), (20): Xaa is A or G or is absent
KNHQLFNSLQEXXXXXXXXXYYVMPLPEEETPVXELGEDN

SEQ ID NO: 47885 - protein, 36 aa, Artificial Sequence
  GFR-binding peptide
  MOD_RES (2), (4): Xaa is C or S
  MOD_RES (15), (16), (17), (18), (19): Xaa is A or G
  MOD_RES (20), (21), (22), (23): Xaa is A or G or is absent
SXKXSKVVMVTAKKXXXXXXXXXIKRIQVPRLDQPV

SEQ ID NO: 47886 - protein, 37 aa, Artificial Sequence; identical to SEQ ID NO: 10930
  GFR-binding peptide
  MOD_RES (2), (34), (35): Xaa is C or S

SEQ ID NO: 47887 - protein, 37 aa, Artificial Sequence; identical to SEQ ID NO: 10931
  GFR-binding peptide
  MOD_RES (2), (33), (34): Xaa is C or S

SEQ ID NO: 47888 - protein, 37 aa, Artificial Sequence; identical to SEQ ID NO: 18070
  GFR-binding peptide
  MOD_RES (1), (35): Xaa is C or S

SEQ ID NO: 47889 - protein, 41 aa, Artificial Sequence
  GFR-binding peptide
  MOD_RES (2), (36): Xaa is C or S
  MOD_RES (14), (15), (16), (17), (18): Xaa is A or G
  MOD_RES (19), (20), (21), (22): Xaa is A or G or is absent
EXKNHQLFNSLQEXXXXXXXXXYYVMPLPEEETPVXELGED

SEQ ID NO: 47890 - protein, 39 aa, Artificial Sequence; identical to SEQ ID NO: 10935
  GFR-binding peptide
  MOD_RES (2), (4), (36), (37): Xaa is C or S

SEQ ID NO: 47891 - protein, 33 aa, Artificial Sequence
  GFR-binding peptide
  MOD_RES (32), (33): Xaa is C or S
SRVVMNSMEGIIVNSSDDMIQVTINSLKTPAXX

SEQ ID NO: 47892 - protein, 39 aa, Artificial Sequence
  GFR-binding peptide
  MOD_RES (2), (35), (36): Xaa is C or S
  MOD_RES (13), (14), (15), (16), (17): Xaa is A or G
  MOD_RES (18), (19), (20), (21): Xaa is A or G or is absent
KXSKVIMVQVEKXXXXXXXXXVKAIKVSRLDQSVXXPSA

SEQ ID NO: 47893 - protein, 37 aa, Artificial Sequence; identical to SEQ ID NO: 18072
  GFR-binding peptide
  MOD_RES (33), (33): Xaa is C or S
  MOD_RES (11), (12), (13), (14), (15): Xaa is A or G
  MOD_RES (16), (17), (18), (19): Xaa is A or G or is absent

SEQ ID NO: 47894 - protein, 40 aa, Artificial Sequence
  GFR-binding peptide
  MOD_RES (1), (34), (35): Xaa is C or S
  MOD_RES (12), (13), (14), (15), (16): Xaa is A or G
  MOD_RES (17), (18), (19), (20): Xaa is A or G or is absent
XSRVIMVQVEKXXXXXXXXXVKAIKVSRLAQPVXXPAASA

SEQ ID NO: 47895 - protein, 35 aa, Artificial Sequence
  GFR-binding peptide
LHDELTNSLQEFIPKKRVIEYYVVPLPELQVQTPR

SEQ ID NO: 47896 - protein, 35 aa, Artificial Sequence; identical to SEQ ID NO: 18073
  GFR-binding peptide
  MOD_RES (34), (34): Xaa is C or S

SEQ ID NO: 47897 - protein, 33 aa, Artificial Sequence
  GFR-binding peptide
  MOD_RES (33), (33): Xaa is C or S
NHQLFNSLQEHQGQHPKIRYYLMTLPEEETPVX

SEQ ID NO: 47898 - protein, 41 aa, Artificial Sequence; identical to SEQ ID NO: 18074
  GFR-binding peptide
  MOD_RES (1), (38): Xaa is C or S

SEQ ID NO: 47899 - protein, 39 aa, Artificial Sequence; identical to SEQ ID NO: 37372
  GFR-binding peptide
  MOD_RES (2), (4), (37), (38): Xaa is C or S
  MOD_RES (15), (16), (17), (18), (19): Xaa is A or G
  MOD_RES (20), (21), (22), (23): Xaa is A or G or is absent

SEQ ID NO: 47900 - protein, 36 aa, Artificial Sequence
  GFR-binding peptide
  MOD_RES (1), (32), (33): Xaa is C or S
XSKVVMVQVEKVKPTRGVVKAIKVSRLDQPVXXPSA

SEQ ID NO: 47901 - protein, 34 aa, Artificial Sequence
  GFR-binding peptide
  MOD_RES (31), (32): Xaa is C or S
RVVMNSMEGIIVNSSDDMIQVTINSLQTPAXXPK

SEQ ID NO: 47902 - protein, 40 aa, Artificial Sequence
  GFR-binding peptide
  MOD_RES (36), (36): Xaa is C or S
LHEELRNSLQELKPKKRVYEYYLVTLPEHHVRSPQXKVSS

SEQ ID NO: 47903 - protein, 43 aa, Artificial Sequence; identical to SEQ ID NO: 18075
  GFR-binding peptide
  MOD_RES (2), (4), (41): Xaa is C or S

SEQ ID NO: 47904 - protein, 37 aa, Artificial Sequence
  GFR-binding peptide
  MOD_RES (1), (33): Xaa is C or S
XSRVVMNVTAKKIVNSSDDIKRVQVPRLKTPAXTPKT

SEQ ID NO: 47905 - protein, 39 aa, Artificial Sequence; identical to SEQ ID NO: 18076
  GFR-binding peptide
  MOD_RES (33), (33): Xaa is C or S
  MOD_RES (11), (12), (13), (14), (15): Xaa is A or G
  MOD_RES (16), (17), (18), (19): Xaa is A or G or is absent

SEQ ID NO: 47906 - protein, 35 aa, Artificial Sequence
  GFR-binding peptide
  MOD_RES (1), (35): Xaa is C or S
XKNHQLFNSLQEHQGQHPKIRYYLMTLPEEETPVX

SEQ ID NO: 47907 - protein, 35 aa, Artificial Sequence
  GFR-binding peptide
  MOD_RES (33), (34): Xaa is C or S
  MOD_RES (11), (12), (13), (14), (15): Xaa is A or G
  MOD_RES (16), (17), (18), (19): Xaa is A or G or is absent
EVVMESMEGIXXXXXXXXXMIQMTINSLETPVXXA

SEQ ID NO: 47908 - protein, 38 aa, Artificial Sequence
  GFR-binding peptide
  MOD_RES (33), (34): Xaa is C or S
  MOD_RES (11), (12), (13), (14), (15): Xaa is A or G
  MOD_RES (16), (17), (18), (19): Xaa is A or G or is absent
EVVMDSMEGIXXXXXXXXXMIQMTINSLETPVXXAKPI

SEQ ID NO: 47909 - protein, 35 aa, Artificial Sequence
  GFR-binding peptide
  MOD_RES (1), (3): Xaa is C or S
  MOD_RES (14), (15), (16), (17), (18): Xaa is A or G
  MOD_RES (19), (20), (21), (22): Xaa is A or G or is absent
XKXSKVVMVTAKKXXXXXXXXXIKRIQVPRLDQPV

SEQ ID NO: 47910 - protein, 43 aa, Artificial Sequence
  GFR-binding peptide
  MOD_RES (2), (4), (41): Xaa is C or S
EXKXALHDELTNSLQEFIPKKRVIEYYVVPLPELQVQTPRXQV

SEQ ID NO: 47911 - protein, 38 aa, Artificial Sequence
  GFR-binding peptide
  MOD_RES (32), (33): Xaa is C or S
SRVVMNVQVEKIVNSSDDVKAVKVSRLKTPAXXPKPVY

SEQ ID NO: 47912 - protein, 33 aa, Artificial Sequence
  GFR-binding peptide
  MOD_RES (33), (33): Xaa is C or S
  MOD_RES (11), (12), (13), (14), (15): Xaa is A or G
  MOD_RES (16), (17), (18), (19): Xaa is A or G or is absent
SKVVMSMEGIXXXXXXXXXMIQITINSLDQPVX

SEQ ID NO: 47913 - protein, 38 aa, Artificial Sequence
  GFR-binding peptide
  MOD_RES (33), (33): Xaa is C or S
  MOD_RES (11), (12), (13), (14), (15): Xaa is A or G
  MOD_RES (16), (17), (18), (19): Xaa is A or G or is absent
RVVMNVQVEKXXXXXXXXXVKAVKVSRLKTPAXTPKTV

SEQ ID NO: 47914 - protein, 42 aa, Artificial Sequence
  GFR-binding peptide
  MOD_RES (1), (3), (37): Xaa is C or S
  MOD_RES (15), (16), (17), (18), (19): Xaa is A or G
  MOD_RES (20), (21), (22), (23): Xaa is A or G or is absent
XGXSRVVMNVTAKKXXXXXXXXXIKRVQVPRLKTPAXTPKTV

SEQ ID NO: 47915 - protein, 35 aa, Artificial Sequence
  GFR-binding peptide
  MOD_RES (1), (3): Xaa is C or S
  MOD_RES (14), (15), (16), (17), (18): Xaa is A or G
  MOD_RES (19), (20), (21), (22): Xaa is A or G or is absent
XKXSKVIMVQVEKXXXXXXXXXVKAIKVSRLDQSV

SEQ ID NO: 47916 - protein, 37 aa, Artificial Sequence
  GFR-binding peptide
  MOD_RES (2), (34), (35): Xaa is C or S
GXGEVVMEVQVEKVVKDYEDVKAMKVSRLETPVXXAK

SEQ ID NO: 47917 - protein, 37 aa, Artificial Sequence; identical to SEQ ID NO: 10946
  GFR-binding peptide
  MOD_RES (34), (34): Xaa is C or S
  MOD_RES (12), (13), (14), (15), (16): Xaa is A or G
  MOD_RES (17), (18), (19), (20): Xaa is A or G or is absent

SEQ ID NO: 47918 - protein, 37 aa, Artificial Sequence
  GFR-binding peptide
  MOD_RES (36), (36): Xaa is C or S
LHDELTNSLQEFIPKKRVIEYYVVPLPELQVQTPRXQ

SEQ ID NO: 47919 - protein, 35 aa, Artificial Sequence; identical to SEQ ID NO: 10948
  GFR-binding peptide
  MOD_RES (1), (35): Xaa is C or S
  MOD_RES (13), (14), (15), (16), (17): Xaa is A or G
  MOD_RES (18), (19), (20), (21): Xaa is A or G or is absent

SEQ ID NO: 47920 - protein, 32 aa, Artificial Sequence
  GFR-binding peptide
NHQLFNSLQEHQGQHPKIRYYVMPLPEEETPV

SEQ ID NO: 47921 - protein, 34 aa, Artificial Sequence
  GFR-binding peptide
  MOD_RES (1), (33), (34): Xaa is C or S
XARVVMNVTAKKIVNSSDDIKRVQVPRLQTPAXX

SEQ ID NO: 47922 - protein, 40 aa, Artificial Sequence; identical to SEQ ID NO: 18085
  GFR-binding peptide
  MOD_RES (2), (4): Xaa is C or S
  MOD_RES (17), (18), (19), (20), (21): Xaa is A or G
  MOD_RES (22), (23), (24), (25): Xaa is A or G or is absent

SEQ ID NO: 47923 - protein, 41 aa, Artificial Sequence
  GFR-binding peptide
  MOD_RES (1), (38): Xaa is C or S
  MOD_RES (14), (15), (16), (17), (18): Xaa is A or G
  MOD_RES (19), (20), (21), (22): Xaa is A or G or is absent
XELHEELRNSLQEXXXXXXXXXYYLVTLPEHHVRSPQXKVS

SEQ ID NO: 47924 - protein, 35 aa, Artificial Sequence
  GFR-binding peptide
  MOD_RES (1), (3): Xaa is C or S
  MOD_RES (14), (15), (16), (17), (18): Xaa is A or G
  MOD_RES (19), (20), (21), (22): Xaa is A or G or is absent
XKXSRVIMVTAKKXXXXXXXXXIKRIQVPRLAQPV

SEQ ID NO: 47925 - protein, 39 aa, Artificial Sequence
  GFR-binding peptide
  MOD_RES (1), (38): Xaa is C or S
  MOD_RES (14), (15), (16), (17), (18): Xaa is A or G
  MOD_RES (19), (20), (21), (22): Xaa is A or G or is absent
XALHDELTNSLQEXXXXXXXXXYYVVPLPELQVQTPRXQ

SEQ ID NO: 47926 - protein, 39 aa, Artificial Sequence; identical to SEQ ID NO: 18087
  GFR-binding peptide
  MOD_RES (34), (34): Xaa is C or S
  MOD_RES (12), (13), (14), (15), (16): Xaa is A or G
  MOD_RES (17), (18), (19), (20): Xaa is A or G or is absent

SEQ ID NO: 47927 - protein, 32 aa, Artificial Sequence
  GFR-binding peptide
  MOD_RES (31), (32): Xaa is C or S
SKVIMVTAKKIKPTKGIIKRIQVPRLDQSVXX

SEQ ID NO: 47928 - protein, 36 aa, Artificial Sequence; identical to SEQ ID NO: 10949
  GFR-binding peptide
  MOD_RES (2), (4), (36): Xaa is C or S

SEQ ID NO: 47929 - protein, 42 aa, Artificial Sequence; identical to SEQ ID NO: 10953
  GFR-binding peptide
  MOD_RES (1), (3), (37), (38): Xaa is C or S
  MOD_RES (15), (16), (17), (18), (19): Xaa is A or G
  MOD_RES (20), (21), (22), (23): Xaa is A or G or is absent

SEQ ID NO: 47930 - protein, 40 aa, Artificial Sequence; identical to SEQ ID NO: 10954
  GFR-binding peptide
  MOD_RES (1), (3), (37), (38): Xaa is C or S
  MOD_RES (15), (16), (17), (18), (19): Xaa is A or G
  MOD_RES (20), (21), (22), (23): Xaa is A or G or is absent

SEQ ID NO: 47931 - protein, 37 aa, Artificial Sequence; identical to SEQ ID NO: 10955
  GFR-binding peptide
  MOD_RES (2), (36), (37): Xaa is C or S
  MOD_RES (14), (15), (16), (17), (18): Xaa is A or G
  MOD_RES (19), (20), (21), (22): Xaa is A or G or is absent

SEQ ID NO: 47932 - protein, 38 aa, Artificial Sequence; identical to SEQ ID NO: 10957
  GFR-binding peptide
  MOD_RES (33), (34): Xaa is C or S
  MOD_RES (11), (12), (13), (14), (15): Xaa is A or G
  MOD_RES (16), (17), (18), (19): Xaa is A or G or is absent

SEQ ID NO: 47933 - protein, 33 aa, Artificial Sequence
  GFR-binding peptide
  MOD_RES (1), (3): Xaa is C or S
XKXSRVIMSMEGIVKPKRGVMIQITINSLAQPV

SEQ ID NO: 47934 - protein, 36 aa, Artificial Sequence; identical to SEQ ID NO: 18092
  GFR-binding peptide

SEQ ID NO: 47935 - protein, 36 aa, Artificial Sequence; identical to SEQ ID NO: 18093
  GFR-binding peptide
  MOD_RES (1), (1): Xaa is C or S

SEQ ID NO: 47936 - protein, 38 aa, Artificial Sequence; identical to SEQ ID NO: 18094
  GFR-binding peptide
  MOD_RES (1), (35): Xaa is C or S
  MOD_RES (13), (14), (15), (16), (17): Xaa is A or G
  MOD_RES (18), (19), (20), (21): Xaa is A or G or is absent

SEQ ID NO: 47937 - protein, 34 aa, Artificial Sequence; identical to SEQ ID NO: 10958
  GFR-binding peptide
  MOD_RES (1), (3): Xaa is C or S

SEQ ID NO: 47938 - protein, 38 aa, Artificial Sequence
  GFR-binding peptide
  MOD_RES (32), (33): Xaa is C or S
GEVVMEVQVEKVVKDYEDVKAMKVSRLETPVXXAKPIS

SEQ ID NO: 47939 - protein, 43 aa, Artificial Sequence; identical to SEQ ID NO: 10961
  GFR-binding peptide
  MOD_RES (1), (3), (37), (38): Xaa is C or S
  MOD_RES (15), (16), (17), (18), (19): Xaa is A or G
  MOD_RES (20), (21), (22), (23): Xaa is A or G or is absent

SEQ ID NO: 47940 - protein, 32 aa, Artificial Sequence; identical to SEQ ID NO: 10962
  GFR-binding peptide
  MOD_RES (1), (1): Xaa is C or S

SEQ ID NO: 47941 - protein, 40 aa, Artificial Sequence
  GFR-binding peptide
  MOD_RES (1), (3), (37), (38): Xaa is C or S
  MOD_RES (15), (16), (17), (18), (19): Xaa is A or G
  MOD_RES (20), (21), (22), (23): Xaa is A or G or is absent
XGXARVVMNVTAKKXXXXXXXXXIKRVQVPRLQTPAXXPK

SEQ ID NO: 47942 - protein, 38 aa, Artificial Sequence; identical to SEQ ID NO: 10966
  GFR-binding peptide
  MOD_RES (32), (33): Xaa is C or S

SEQ ID NO: 47943 - protein, 38 aa, Artificial Sequence
  GFR-binding peptide
  MOD_RES (32), (32): Xaa is C or S
SRVVMNVQVEKIVNSSDDVKAVKVSRLKTPAXTPKTVH

SEQ ID NO: 47944 - protein, 43 aa, Artificial Sequence; identical to SEQ ID NO: 10970
  GFR-binding peptide
  MOD_RES (1), (3), (37): Xaa is C or S
  MOD_RES (15), (16), (17), (18), (19): Xaa is A or G
  MOD_RES (20), (21), (22), (23): Xaa is A or G or is absent

SEQ ID NO: 47945 - protein, 31 aa, Artificial Sequence; identical to SEQ ID NO: 10972
  GFR-binding peptide
  MOD_RES (31), (31): Xaa is C or S

SEQ ID NO: 47946 - protein, 34 aa, Artificial Sequence; identical to SEQ ID NO: 18100
  GFR-binding peptide
  MOD_RES (34), (34): Xaa is C or S

SEQ ID NO: 47947 - protein, 44 aa, Artificial Sequence; identical to SEQ ID NO: 18103
  GFR-binding peptide
  MOD_RES (2), (4), (41): Xaa is C or S

SEQ ID NO: 47948 - protein, 38 aa, Artificial Sequence; identical to SEQ ID NO: 10974
  GFR-binding peptide
  MOD_RES (34), (35): Xaa is C or S
  MOD_RES (12), (13), (14), (15), (16): Xaa is A or G
  MOD_RES (17), (18), (19), (20): Xaa is A or G or is absent

SEQ ID NO: 47949 - protein, 37 aa, Artificial Sequence
  GFR-binding peptide
  MOD_RES (1), (35), (36): Xaa is C or S
  MOD_RES (13), (14), (15), (16), (17): Xaa is A or G
  MOD_RES (18), (19), (20), (21): Xaa is A or G or is absent
XSRVVMNVTAKKXXXXXXXXXIKRVQVPRLKTPAXXP

SEQ ID NO: 47950 - protein, 38 aa, Artificial Sequence
  GFR-binding peptide
  MOD_RES (1), (3), (37): Xaa is C or S
XEXKNHQLFNSLQEHQGQHPKIRYYLMTLPEEETPVXE

SEQ ID NO: 47951 - protein, 40 aa, Artificial Sequence
  GFR-binding peptide
  MOD_RES (1), (3), (37): Xaa is C or S
  MOD_RES (15), (16), (17), (18), (19): Xaa is A or G
  MOD_RES (20), (21), (22), (23): Xaa is A or G or is absent
XEXKNHQLFNSLQEXXXXXXXXXYYLMTLPEEETPVXELG

SEQ ID NO: 47952 - protein, 38 aa, Artificial Sequence
  GFR-binding peptide
  MOD_RES (1), (3), (37), (38): Xaa is C or S
  MOD_RES (15), (16), (17), (18), (19): Xaa is A or G
  MOD_RES (20), (21), (22), (23): Xaa is A or G or is absent
XGXGEVVMESMEGIXXXXXXXXXMIQMTINSLETPVXX

SEQ ID NO: 47953 - protein, 36 aa, Artificial Sequence
  GFR-binding peptide
  MOD_RES (1), (3): Xaa is C or S
XEXKNHQLFNSLQEHQGQHPKIRYYLMTLPEEETPV

SEQ ID NO: 47954 - protein, 38 aa, Artificial Sequence
  GFR-binding peptide
  MOD_RES (2), (4): Xaa is C or S
AXAXELHEELRNSLQELKPKKRVYEYYLVTLPEHHVRS

SEQ ID NO: 47955 - protein, 41 aa, Artificial Sequence; identical to SEQ ID NO: 10977
  GFR-binding peptide
  MOD_RES (1), (3), (35), (36): Xaa is C or S

SEQ ID NO: 47956 - protein, 31 aa, Artificial Sequence
  GFR-binding peptide
  MOD_RES (1), (1): Xaa is C or S
XSKVVMVTAKKVKPTRGVIKRIQVPRLDQPV

SEQ ID NO: 47957 - protein, 41 aa, Artificial Sequence
  GFR-binding peptide
  MOD_RES (2), (4), (36), (37): Xaa is C or S
RXGXGEVVMDVQVEKVVKENEDVKAMKVSRLETPVXXAKPI

SEQ ID NO: 47958 - protein, 39 aa, Artificial Sequence
  GFR-binding peptide
  MOD_RES (33), (34): Xaa is C or S
  MOD_RES (11), (12), (13), (14), (15): Xaa is A or G
  MOD_RES (16), (17), (18), (19): Xaa is A or G or is absent
RVVMNSMEGIXXXXXXXXXMIQVTINSLKTPAXXPKPVY

SEQ ID NO: 47959 - protein, 40 aa, Artificial Sequence; identical to SEQ ID NO: 18108
  GFR-binding peptide
  MOD_RES (37), (37): Xaa is C or S

SEQ ID NO: 47960 - protein, 30 aa, Artificial Sequence; identical to SEQ ID NO: 10978
  GFR-binding peptide

SEQ ID NO: 47961 - protein, 38 aa, Artificial Sequence; identical to SEQ ID NO: 18110
  GFR-binding peptide
  MOD_RES (36), (36): Xaa is C or S
  MOD_RES (12), (13), (14), (15), (16): Xaa is A or G
  MOD_RES (17), (18), (19), (20): Xaa is A or G or is absent

SEQ ID NO: 47962 - protein, 43 aa, Artificial Sequence
  GFR-binding peptide
  MOD_RES (1), (3), (37), (38): Xaa is C or S
  MOD_RES (15), (16), (17), (18), (19): Xaa is A or G
  MOD_RES (20), (21), (22), (23): Xaa is A or G or is absent
XGXARVVMNSMEGIXXXXXXXXXMIQVTINSLQTPAXXPKPVT

SEQ ID NO: 47963 - protein, 32 aa, Artificial Sequence
  GFR-binding peptide
  MOD_RES (1), (32): Xaa is C or S
XSKVIMVTAKKIKPTKGIIKRIQVPRLDQSVX

SEQ ID NO: 47964 - protein, 34 aa, Artificial Sequence
  GFR-binding peptide
  MOD_RES (1), (33): Xaa is C or S
XSRVVMNSMEGIIVNSSDDMIQVTINSLKTPAXT

SEQ ID NO: 47965 - protein, 41 aa, Artificial Sequence; identical to SEQ ID NO: 18113
  GFR-binding peptide
  MOD_RES (2), (39): Xaa is C or S

SEQ ID NO: 47966 - protein, 36 aa, Artificial Sequence; identical to SEQ ID NO: 10983
  GFR-binding peptide
  MOD_RES (2), (34): Xaa is C or S

SEQ ID NO: 47967 - protein, 39 aa, Artificial Sequence; identical to SEQ ID NO: 18114
  GFR-binding peptide
  MOD_RES (1), (38): Xaa is C or S

SEQ ID NO: 47968 - protein, 36 aa, Artificial Sequence; identical to SEQ ID NO: 18115
  GFR-binding peptide
  MOD_RES (35), (35): Xaa is C or S
  MOD_RES (11), (12), (13), (14), (15): Xaa is A or G
  MOD_RES (16), (17), (18), (19): Xaa is A or G or is absent

SEQ ID NO: 47969 - protein, 35 aa, Artificial Sequence; identical to SEQ ID NO: 10984
  GFR-binding peptide
  MOD_RES (1), (3), (34), (35): Xaa is C or S

SEQ ID NO: 47970 - protein, 44 aa, Artificial Sequence; identical to SEQ ID NO: 18117
  GFR-binding peptide
  MOD_RES (1), (3), (40): Xaa is C or S
  MOD_RES (16), (17), (18), (19), (20): Xaa is A or G
  MOD_RES (21), (22), (23), (24): Xaa is A or G or is absent

SEQ ID NO: 47971 - protein, 36 aa, Artificial Sequence; identical to SEQ ID NO: 10985
  GFR-binding peptide
  MOD_RES (1), (35), (36): Xaa is C or S
  MOD_RES (13), (14), (15), (16), (17): Xaa is A or G
  MOD_RES (18), (19), (20), (21): Xaa is A or G or is absent

SEQ ID NO: 47972 - protein, 35 aa, Artificial Sequence; identical to SEQ ID NO: 10986
  GFR-binding peptide
  MOD_RES (1), (3), (35): Xaa is C or S

SEQ ID NO: 47973 - protein, 35 aa, Artificial Sequence
  GFR-binding peptide
  MOD_RES (2), (4): Xaa is C or S
HXGXARVVMNSMEGIIVNSSDDMIQVTINSLQTPA

SEQ ID NO: 47974 - protein, 44 aa, Artificial Sequence
  GFR-binding peptide
  MOD_RES (2), (4), (38): Xaa is C or S
  MOD_RES (16), (17), (18), (19), (20): Xaa is A or G
  MOD_RES (21), (22), (23), (24): Xaa is A or G or is absent
HXGXSRVVMNVTAKKXXXXXXXXXIKRVQVPRLKTPAXTPKTVH

SEQ ID NO: 47975 - protein, 36 aa, Artificial Sequence; identical to SEQ ID NO: 10989
  GFR-binding peptide
  MOD_RES (2), (34), (35): Xaa is C or S

SEQ ID NO: 47976 - protein, 43 aa, Artificial Sequence; identical to SEQ ID NO: 18121
  GFR-binding peptide
  MOD_RES (2), (4), (41): Xaa is C or S

SEQ ID NO: 47977 - protein, 38 aa, Artificial Sequence; identical to SEQ ID NO: 18122
  GFR-binding peptide
  MOD_RES (2), (4), (38): Xaa is C or S
  MOD_RES (16), (17), (18), (19), (20): Xaa is A or G
  MOD_RES (21), (22), (23), (24): Xaa is A or G or is absent

SEQ ID NO: 47978 - protein, 35 aa, Artificial Sequence; identical to SEQ ID NO: 37462
  GFR-binding peptide
  MOD_RES (1), (3), (34), (35): Xaa is C or S

SEQ ID NO: 47979 - protein, 40 aa, Artificial Sequence; identical to SEQ ID NO: 10990
  GFR-binding peptide
  MOD_RES (2), (34), (35): Xaa is C or S

SEQ ID NO: 47980 - protein, 39 aa, Artificial Sequence; identical to SEQ ID NO: 10991
  GFR-binding peptide
  MOD_RES (2), (4), (38), (39): Xaa is C or S
  MOD_RES (16), (17), (18), (19), (20): Xaa is A or G
  MOD_RES (21), (22), (23), (24): Xaa is A or G or is absent

SEQ ID NO: 47981 - protein, 40 aa, Artificial Sequence
  GFR-binding peptide
  MOD_RES (2), (34), (35): Xaa is C or S
GXGEVVMEVQVEKVVKDYEDVKAMKVSRLETPVXXAKPIS

SEQ ID NO: 47982 - protein, 31 aa, Artificial Sequence
  GFR-binding peptide
  MOD_RES (31), (31): Xaa is C or S
EVVMDSMEGIVVKENEDMIQMTINSLETPVX

SEQ ID NO: 47983 - protein, 32 aa, Artificial Sequence; identical to SEQ ID NO: 10993
  GFR-binding peptide
  MOD_RES (2), (2): Xaa is C or S

SEQ ID NO: 47984 - protein, 38 aa, Artificial Sequence
  GFR-binding peptide
  MOD_RES (1), (38): Xaa is C or S
XALHDELTNSLQEFIPKKRVIEYYLVTLPELQVQTPRX

SEQ ID NO: 47985 - protein, 39 aa, Artificial Sequence
  GFR-binding peptide
  MOD_RES (1), (34), (35): Xaa is C or S
  MOD_RES (12), (13), (14), (15), (16): Xaa is A or G
  MOD_RES (17), (18), (19), (20): Xaa is A or G or is absent
XSKVVMVQVEKXXXXXXXXXVKAIKVSRLDQPVXXPSAS

SEQ ID NO: 47986 - protein, 45 aa, Artificial Sequence; identical to SEQ ID NO: 18125
  GFR-binding peptide
  MOD_RES (2), (4), (41): Xaa is C or S

SEQ ID NO: 47987 - protein, 37 aa, Artificial Sequence; identical to SEQ ID NO: 10997
  GFR-binding peptide
  MOD_RES (31), (31): Xaa is C or S

SEQ ID NO: 47988 - protein, 38 aa, Artificial Sequence
  GFR-binding peptide
  MOD_RES (34), (35): Xaa is C or S
  MOD_RES (12), (13), (14), (15), (16): Xaa is A or G
  MOD_RES (17), (18), (19), (20): Xaa is A or G or is absent
SRVVMNVQVEKXXXXXXXXXVKAVKVSRLKTPAXXPKP

SEQ ID NO: 47989 - protein, 37 aa, Artificial Sequence; identical to SEQ ID NO: 18127
  GFR-binding peptide
  MOD_RES (1), (3): Xaa is C or S

SEQ ID NO: 47990 - protein, 34 aa, Artificial Sequence
  GFR-binding peptide
  MOD_RES (1), (33): Xaa is C or S
XSRVVMNVTAKKIVNSSDDIKRVQVPRLKTPAXT

SEQ ID NO: 47991 - protein, 40 aa, Artificial Sequence; identical to SEQ ID NO: 18128
  GFR-binding peptide
  MOD_RES (2), (4), (38): Xaa is C or S
  MOD_RES (16), (17), (18), (19), (20): Xaa is A or G
  MOD_RES (21), (22), (23), (24): Xaa is A or G or is absent

SEQ ID NO: 47992 - protein, 37 aa, Artificial Sequence
  GFR-binding peptide
  MOD_RES (31), (32): Xaa is C or S
RVVMNVTAKKIVNSSDDIKRVQVPRLQTPAXXPKPVT

SEQ ID NO: 47993 - protein, 42 aa, Artificial Sequence
  GFR-binding peptide
  MOD_RES (2), (4), (38), (39): Xaa is C or S
  MOD_RES (16), (17), (18), (19), (20): Xaa is A or G
  MOD_RES (21), (22), (23), (24): Xaa is A or G or is absent
HXGXSRVVMNVTAKKXXXXXXXXXIKRVQVPRLKTPAXXPKP

SEQ ID NO: 47994 - protein, 42 aa, Artificial Sequence
  GFR-binding peptide
  MOD_RES (2), (4), (38): Xaa is C or S
  MOD_RES (16), (17), (18), (19), (20): Xaa is A or G
  MOD_RES (21), (22), (23), (24): Xaa is A or G or is absent
HXGXSRVVMNVQVEKXXXXXXXXXVKAVKVSRLKTPAXTPKT

SEQ ID NO: 47995 - protein, 44 aa, Artificial Sequence; identical to SEQ ID NO: 18130
  GFR-binding peptide
  MOD_RES (2), (4), (38): Xaa is C or S
  MOD_RES (16), (17), (18), (19), (20): Xaa is A or G
  MOD_RES (21), (22), (23), (24): Xaa is A or G or is absent

SEQ ID NO: 47996 - protein, 37 aa, Artificial Sequence
  GFR-binding peptide
  MOD_RES (2), (4), (36), (37): Xaa is C or S
HXGXARVVMNSMEGIIVNSSDDMIQVTINSLQTPAXX

SEQ ID NO: 47997 - protein, 38 aa, Artificial Sequence
  GFR-binding peptide
  MOD_RES (1), (38): Xaa is C or S
  MOD_RES (14), (15), (16), (17), (18): Xaa is A or G
  MOD_RES (19), (20), (21), (22): Xaa is A or G or is absent
XALHDELTNSLQEXXXXXXXXXYYVVPLPELQVQTPRX

SEQ ID NO: 47998 - protein, 31 aa, Artificial Sequence; identical to SEQ ID NO: 37488
  GFR-binding peptide
  MOD_RES (31), (31): Xaa is C or S

SEQ ID NO: 47999 - protein, 34 aa, Artificial Sequence; identical to SEQ ID NO: 11005
  GFR-binding peptide
  MOD_RES (34), (34): Xaa is C or S
  MOD_RES (12), (13), (14), (15), (16): Xaa is A or G
  MOD_RES (17), (18), (19), (20): Xaa is A or G or is absent

SEQ ID NO: 48000 - protein, 44 aa, Artificial Sequence
  GFR-binding peptide
  MOD_RES (2), (4), (38): Xaa is C or S
  MOD_RES (16), (17), (18), (19), (20): Xaa is A or G
  MOD_RES (21), (22), (23), (24): Xaa is A or G or is absent
RXEXKNHQLFNSLQEXXXXXXXXXYYLMTLPEEETPVXELGEDN

SEQ ID NO: 48001 - protein, 39 aa, Artificial Sequence
  GFR-binding peptide
  MOD_RES (1), (3): Xaa is C or S
  MOD_RES (16), (17), (18), (19), (20): Xaa is A or G
  MOD_RES (21), (22), (23), (24): Xaa is A or G or is absent
XAXELHEELRNSLQEXXXXXXXXXYYVVPLPEHHVRSPQ

SEQ ID NO: 48002 - protein, 40 aa, Artificial Sequence
  GFR-binding peptide
  MOD_RES (2), (4), (35), (36): Xaa is C or S
SXKXSKVIMVTAKKIKPTKGIIKRIQVPRLDQSVXXPSAS

SEQ ID NO: 48003 - protein, 35 aa, Artificial Sequence; identical to SEQ ID NO: 11008
  GFR-binding peptide
  MOD_RES (31), (32): Xaa is C or S

SEQ ID NO: 48004 - protein, 37 aa, Artificial Sequence; identical to SEQ ID NO: 11009
  GFR-binding peptide
  MOD_RES (2), (4), (36): Xaa is C or S

SEQ ID NO: 48005 - protein, 41 aa, Artificial Sequence; identical to SEQ ID NO: 11010
  GFR-binding peptide
  MOD_RES (2), (4), (37), (38): Xaa is C or S
  MOD_RES (15), (16), (17), (18), (19): Xaa is A or G
  MOD_RES (20), (21), (22), (23): Xaa is A or G or is absent

SEQ ID NO: 48006 - protein, 36 aa, Artificial Sequence
  GFR-binding peptide
  MOD_RES (34), (35): Xaa is C or S
  MOD_RES (12), (13), (14), (15), (16): Xaa is A or G
  MOD_RES (17), (18), (19), (20): Xaa is A or G or is absent
SRVVMNSMEGIXXXXXXXXXMIQVTINSLKTPAXXP

SEQ ID NO: 48007 - protein, 35 aa, Artificial Sequence
  GFR-binding peptide
  MOD_RES (2), (4), (35): Xaa is C or S
SXKXSKVIMVQVEKIKPTKGIVKAIKVSRLDQSVX

SEQ ID NO: 48008 - protein, 40 aa, Artificial Sequence; identical to SEQ ID NO: 11014
  GFR-binding peptide
  MOD_RES (34), (35): Xaa is C or S
  MOD_RES (12), (13), (14), (15), (16): Xaa is A or G
  MOD_RES (17), (18), (19), (20): Xaa is A or G or is absent

SEQ ID NO: 48009 - protein, 37 aa, Artificial Sequence
  GFR-binding peptide
  MOD_RES (2), (2): Xaa is C or S
AXELHEELRNSLQELKPKKRVYEYYVVPLPEHHVRSP

SEQ ID NO: 48010 - protein, 38 aa, Artificial Sequence; identical to SEQ ID NO: 18144
  GFR-binding peptide
  MOD_RES (34), (34): Xaa is C or S
  MOD_RES (12), (13), (14), (15), (16): Xaa is A or G
  MOD_RES (17), (18), (19), (20): Xaa is A or G or is absent

SEQ ID NO: 48011 - protein, 41 aa, Artificial Sequence
  GFR-binding peptide
  MOD_RES (2), (4), (36), (37): Xaa is C or S
RXGXGEVVMEVTAKKVVKDYEDIKRMQVPRLETPVXXAKPI

SEQ ID NO: 48012 - protein, 34 aa, Artificial Sequence; identical to SEQ ID NO: 11017
  GFR-binding peptide
  MOD_RES (2), (34): Xaa is C or S

SEQ ID NO: 48013 - protein, 39 aa, Artificial Sequence
  GFR-binding peptide
  MOD_RES (2), (36): Xaa is C or S
  MOD_RES (14), (15), (16), (17), (18): Xaa is A or G
  MOD_RES (19), (20), (21), (22): Xaa is A or G or is absent
GXSRVVMNVQVEKXXXXXXXXXVKAVKVSRLKTPAXTPK

SEQ ID NO: 48014 - protein, 36 aa, Artificial Sequence; identical to SEQ ID NO: 11019
  GFR-binding peptide
  MOD_RES (1), (35), (36): Xaa is C or S
  MOD_RES (13), (14), (15), (16), (17): Xaa is A or G
  MOD_RES (18), (19), (20), (21): Xaa is A or G or is absent

SEQ ID NO: 48015 - protein, 34 aa, Artificial Sequence
  GFR-binding peptide
  MOD_RES (1), (33): Xaa is C or S
XSRVVMNVQVEKIVNSSDDVKAVKVSRLKTPAXT

SEQ ID NO: 48016 - protein, 40 aa, Artificial Sequence; identical to SEQ ID NO: 11020
  GFR-binding peptide
  MOD_RES (34), (35): Xaa is C or S
  MOD_RES (12), (13), (14), (15), (16): Xaa is A or G
  MOD_RES (17), (18), (19), (20): Xaa is A or G or is absent

SEQ ID NO: 48017 - protein, 37 aa, Artificial Sequence
  GFR-binding peptide
  MOD_RES (32), (33): Xaa is C or S
ARVVMNVTAKKIVNSSDDIKRVQVPRLQTPAXXPKPV

SEQ ID NO: 48018 - protein, 34 aa, Artificial Sequence
  GFR-binding peptide
  MOD_RES (2), (4): Xaa is C or S
SXKXSKVIMVTAKKIKPTKGIIKRIQVPRLDQSV

SEQ ID NO: 48019 - protein, 40 aa, Artificial Sequence; identical to SEQ ID NO: 11022
  GFR-binding peptide
  MOD_RES (2), (34): Xaa is C or S

SEQ ID NO: 48020 - protein, 40 aa, Artificial Sequence; identical to SEQ ID NO: 18147
  GFR-binding peptide
  MOD_RES (1), (35): Xaa is C or S
  MOD_RES (13), (14), (15), (16), (17): Xaa is A or G
  MOD_RES (18), (19), (20), (21): Xaa is A or G or is absent

SEQ ID NO: 48021 - protein, 40 aa, Artificial Sequence; identical to SEQ ID NO: 18149
  GFR-binding peptide
  MOD_RES (36), (36): Xaa is C or S
  MOD_RES (12), (13), (14), (15), (16): Xaa is A or G
  MOD_RES (17), (18), (19), (20): Xaa is A or G or is absent

SEQ ID NO: 48022 - protein, 35 aa, Artificial Sequence; identical to SEQ ID NO: 11023
  GFR-binding peptide
  MOD_RES (2), (33), (34): Xaa is C or S

SEQ ID NO: 48023 - protein, 34 aa, Artificial Sequence
  GFR-binding peptide
  MOD_RES (1), (34): Xaa is C or S
  MOD_RES (12), (13), (14), (15), (16): Xaa is A or G
  MOD_RES (17), (18), (19), (20): Xaa is A or G or is absent
XSRVIMSMEGIXXXXXXXXXMIQITINSLAQPVX

SEQ ID NO: 48024 - protein, 37 aa, Artificial Sequence; identical to SEQ ID NO: 11024
  GFR-binding peptide
  MOD_RES (2), (4): Xaa is C or S
  MOD_RES (16), (17), (18), (19), (20): Xaa is A or G
  MOD_RES (21), (22), (23), (24): Xaa is A or G or is absent

SEQ ID NO: 48025 - protein, 37 aa, Artificial Sequence
  GFR-binding peptide
  MOD_RES (35), (35): Xaa is C or S
  MOD_RES (11), (12), (13), (14), (15): Xaa is A or G
  MOD_RES (16), (17), (18), (19): Xaa is A or G or is absent
HDELTNSLQEXXXXXXXXXYYVVPLPELQVQTPRXQV

SEQ ID NO: 48026 - protein, 37 aa, Artificial Sequence; identical to SEQ ID NO: 11028
  GFR-binding peptide
  MOD_RES (2), (34), (35): Xaa is C or S

SEQ ID NO: 48027 - protein, 39 aa, Artificial Sequence; identical to SEQ ID NO: 11031
  GFR-binding peptide
  MOD_RES (2), (36), (37): Xaa is C or S
  MOD_RES (14), (15), (16), (17), (18): Xaa is A or G
  MOD_RES (19), (20), (21), (22): Xaa is A or G or is absent

SEQ ID NO: 48028 - protein, 39 aa, Artificial Sequence
  GFR-binding peptide
  MOD_RES (35), (35): Xaa is C or S
HEELRNSLQELKPKKRVYEYYLVTLPEHHVRSPQXKVSS

SEQ ID NO: 48029 - protein, 36 aa, Artificial Sequence; identical to SEQ ID NO: 11032
  GFR-binding peptide
  MOD_RES (31), (32): Xaa is C or S

SEQ ID NO: 48030 - protein, 37 aa, Artificial Sequence; identical to SEQ ID NO: 11033
  GFR-binding peptide
  MOD_RES (2), (4), (36), (37): Xaa is C or S

SEQ ID NO: 48031 - protein, 36 aa, Artificial Sequence; identical to SEQ ID NO: 18157
  GFR-binding peptide
  MOD_RES (1), (35): Xaa is C or S
  MOD_RES (13), (14), (15), (16), (17): Xaa is A or G
  MOD_RES (18), (19), (20), (21): Xaa is A or G or is absent

SEQ ID NO: 48032 - protein, 39 aa, Artificial Sequence
  GFR-binding peptide
  MOD_RES (33), (34): Xaa is C or S
  MOD_RES (11), (12), (13), (14), (15): Xaa is A or G
  MOD_RES (16), (17), (18), (19): Xaa is A or G or is absent
SKVIMSMEGIXXXXXXXXXMIQITINSLDQSVXXPSASA

SEQ ID NO: 48033 - protein, 39 aa, Artificial Sequence
  GFR-binding peptide
  MOD_RES (1), (33), (34): Xaa is C or S
XGEVVMDVQVEKVVKENEDVKAMKVSRLETPVXXAKPIK

SEQ ID NO: 48034 - protein, 35 aa, Artificial Sequence
  GFR-binding peptide
  MOD_RES (2), (2): Xaa is C or S
  MOD_RES (14), (15), (16), (17), (18): Xaa is A or G
  MOD_RES (19), (20), (21), (22): Xaa is A or G or is absent
GXGEVVMDSMEGIXXXXXXXXXMIQMTINSLETPV

SEQ ID NO: 48035 - protein, 34 aa, Artificial Sequence
  GFR-binding peptide
  MOD_RES (1), (1): Xaa is C or S
  MOD_RES (13), (14), (15), (16), (17): Xaa is A or G
  MOD_RES (18), (19), (20), (21): Xaa is A or G or is absent
XGEVVMESMEGIXXXXXXXXXMIQMTINSLETPV

SEQ ID NO: 48036 - protein, 37 aa, Artificial Sequence; identical to SEQ ID NO: 18162
  GFR-binding peptide
  MOD_RES (36), (36): Xaa is C or S

SEQ ID NO: 48037 - protein, 30 aa, Artificial Sequence; identical to SEQ ID NO: 11038
  GFR-binding peptide

SEQ ID NO: 48038 - protein, 38 aa, Artificial Sequence; identical to SEQ ID NO: 11039
  GFR-binding peptide
  MOD_RES (1), (3), (37), (38): Xaa is C or S
  MOD_RES (15), (16), (17), (18), (19): Xaa is A or G
  MOD_RES (20), (21), (22), (23): Xaa is A or G or is absent

SEQ ID NO: 48039 - protein, 39 aa, Artificial Sequence
  GFR-binding peptide
  MOD_RES (2), (36), (37): Xaa is C or S
  MOD_RES (14), (15), (16), (17), (18): Xaa is A or G
  MOD_RES (19), (20), (21), (22): Xaa is A or G or is absent
GXARVVMNVTAKKXXXXXXXXXIKRVQVPRLQTPAXXPK

SEQ ID NO: 48040 - protein, 39 aa, Artificial Sequence; identical to SEQ ID NO: 11040
  GFR-binding peptide
  MOD_RES (2), (4), (36), (37): Xaa is C or S

SEQ ID NO: 48041 - protein, 39 aa, Artificial Sequence
  GFR-binding peptide
  MOD_RES (2), (33), (34): Xaa is C or S
KXSRVIMVTAKKVKPKRGVIKRIQVPRLAQPVXXPAASA

SEQ ID NO: 48042 - protein, 34 aa, Artificial Sequence
  GFR-binding peptide
  MOD_RES (2), (33), (34): Xaa is C or S
KXSRVIMSMEGIVKPKRGVMIQITINSLAQPVXX

SEQ ID NO: 48043 - protein, 41 aa, Artificial Sequence; identical to SEQ ID NO: 11042
  GFR-binding peptide
  MOD_RES (2), (35), (36): Xaa is C or S
  MOD_RES (13), (14), (15), (16), (17): Xaa is A or G
  MOD_RES (18), (19), (20), (21): Xaa is A or G or is absent

SEQ ID NO: 48044 - protein, 43 aa, Artificial Sequence; identical to SEQ ID NO: 11044
  GFR-binding peptide
  MOD_RES (2), (4), (38), (39): Xaa is C or S
  MOD_RES (16), (17), (18), (19), (20): Xaa is A or G
  MOD_RES (21), (22), (23), (24): Xaa is A or G or is absent

SEQ ID NO: 48045 - protein, 42 aa, Artificial Sequence; identical to SEQ ID NO: 11046
  GFR-binding peptide
  MOD_RES (2), (4), (36), (37): Xaa is C or S

SEQ ID NO: 48046 - protein, 37 aa, Artificial Sequence
  GFR-binding peptide
  MOD_RES (31), (32): Xaa is C or S
SKVIMVTAKKIKPTKGIIKRIQVPRLDQSVXXPSASA

SEQ ID NO: 48047 - protein, 35 aa, Artificial Sequence
  GFR-binding peptide
  MOD_RES (1), (34), (35): Xaa is C or S
  MOD_RES (12), (13), (14), (15), (16): Xaa is A or G
  MOD_RES (17), (18), (19), (20): Xaa is A or G or is absent
XSKVIMSMEGIXXXXXXXXXMIQITINSLDQSVXX

SEQ ID NO: 48048 - protein, 37 aa, Artificial Sequence; identical to SEQ ID NO: 11049
  GFR-binding peptide
  MOD_RES (2), (34), (35): Xaa is C or S

SEQ ID NO: 48049 - protein, 34 aa, Artificial Sequence; identical to SEQ ID NO: 11050
  GFR-binding peptide
  MOD_RES (2), (33), (34): Xaa is C or S

SEQ ID NO: 48050 - protein, 38 aa, Artificial Sequence; identical to SEQ ID NO: 11051
  GFR-binding peptide
  MOD_RES (2), (33), (34): Xaa is C or S

SEQ ID NO: 48051 - protein, 40 aa, Artificial Sequence
  GFR-binding peptide
  MOD_RES (2), (4), (36), (37): Xaa is C or S
RXGXGEVVMEVQVEKVVKDYEDVKAMKVSRLETPVXXAKP

SEQ ID NO: 48052 - protein, 40 aa, Artificial Sequence
  GFR-binding peptide
  MOD_RES (1), (3), (35), (36): Xaa is C or S
XGXSRVVMNSMEGIIVNSSDDMIQVTINSLKTPAXXPKPV

SEQ ID NO: 48053 - protein, 37 aa, Artificial Sequence; identical to SEQ ID NO: 11052
  GFR-binding peptide
  MOD_RES (33), (33): Xaa is C or S
  MOD_RES (11), (12), (13), (14), (15): Xaa is A or G
  MOD_RES (16), (17), (18), (19): Xaa is A or G or is absent

SEQ ID NO: 48054 - protein, 34 aa, Artificial Sequence; identical to SEQ ID NO: 11053
  GFR-binding peptide
  MOD_RES (32), (33): Xaa is C or S

SEQ ID NO: 48055 - protein, 43 aa, Artificial Sequence; identical to SEQ ID NO: 18166
  GFR-binding peptide
  MOD_RES (1), (3), (40): Xaa is C or S

SEQ ID NO: 48056 - protein, 41 aa, Artificial Sequence
  GFR-binding peptide
  MOD_RES (1), (35), (36): Xaa is C or S
  MOD_RES (13), (14), (15), (16), (17): Xaa is A or G
  MOD_RES (18), (19), (20), (21): Xaa is A or G or is absent
XGEVVMESMEGIXXXXXXXXXMIQMTINSLETPVXXAKPIS

SEQ ID NO: 48057 - protein, 37 aa, Artificial Sequence
  GFR-binding peptide
  MOD_RES (1), (3), (35), (36): Xaa is C or S
XGXGEVVMEVQVEKVVKDYEDVKAMKVSRLETPVXXA

SEQ ID NO: 48058 - protein, 38 aa, Artificial Sequence
  GFR-binding peptide
  MOD_RES (2), (4), (38): Xaa is C or S
  MOD_RES (16), (17), (18), (19), (20): Xaa is A or G
  MOD_RES (21), (22), (23), (24): Xaa is A or G or is absent
HXGXSRVVMNSMEGIXXXXXXXXXMIQVTINSLKTPAX

SEQ ID NO: 48059 - protein, 40 aa, Artificial Sequence
  GFR-binding peptide
  MOD_RES (34), (34): Xaa is C or S
KNHQLFNSLQEHQGQHPKIRYYLMTLPEEETPVXELGEDN

SEQ ID NO: 48060 - protein, 38 aa, Artificial Sequence; identical to SEQ ID NO: 18167
  GFR-binding peptide
  MOD_RES (35), (35): Xaa is C or S

SEQ ID NO: 48061 - protein, 37 aa, Artificial Sequence
  GFR-binding peptide
  MOD_RES (1), (3), (36), (37): Xaa is C or S
  MOD_RES (14), (15), (16), (17), (18): Xaa is A or G
  MOD_RES (19), (20), (21), (22): Xaa is A or G or is absent
XKXSKVVMVTAKKXXXXXXXXXIKRIQVPRLDQPVXX

SEQ ID NO: 48062 - protein, 37 aa, Artificial Sequence
  GFR-binding peptide
  MOD_RES (2), (4), (37): Xaa is C or S
  MOD_RES (15), (16), (17), (18), (19): Xaa is A or G
  MOD_RES (20), (21), (22), (23): Xaa is A or G or is absent
SXKXSRVIMSMEGIXXXXXXXXXMIQITINSLAQPVX

SEQ ID NO: 48063 - protein, 37 aa, Artificial Sequence; identical to SEQ ID NO: 11055
  GFR-binding peptide
  MOD_RES (1), (33), (34): Xaa is C or S

SEQ ID NO: 48064 - protein, 30 aa, Artificial Sequence
  GFR-binding peptide
SKVVMVQVEKVKPTRGVVKAIKVSRLDQPV

SEQ ID NO: 48065 - protein, 42 aa, Artificial Sequence; identical to SEQ ID NO: 11058
  GFR-binding peptide
  MOD_RES (2), (4), (36): Xaa is C or S

SEQ ID NO: 48066 - protein, 36 aa, Artificial Sequence
  GFR-binding peptide
  MOD_RES (1), (1): Xaa is C or S
  MOD_RES (14), (15), (16), (17), (18): Xaa is A or G
  MOD_RES (19), (20), (21), (22): Xaa is A or G or is absent
XELHEELRNSLQEXXXXXXXXXYYLVTLPEHHVRSP

SEQ ID NO: 48067 - protein, 38 aa, Artificial Sequence
  GFR-binding peptide
  MOD_RES (32), (33): Xaa is C or S
ARVVMNVTAKKIVNSSDDIKRVQVPRLQTPAXXPKPVT

SEQ ID NO: 48068 - protein, 33 aa, Artificial Sequence
  GFR-binding peptide
  MOD_RES (31), (31): Xaa is C or S
RVVMNVQVEKIVNSSDDVKAVKVSRLKTPAXTP

SEQ ID NO: 48069 - protein, 39 aa, Artificial Sequence; identical to SEQ ID NO: 18180
  GFR-binding peptide
  MOD_RES (2), (4), (38): Xaa is C or S

SEQ ID NO: 48070 - protein, 36 aa, Artificial Sequence
  GFR-binding peptide
  MOD_RES (1), (3): Xaa is C or S
  MOD_RES (15), (16), (17), (18), (19): Xaa is A or G
  MOD_RES (20), (21), (22), (23): Xaa is A or G or is absent
XGXGEVVMEVTAKKXXXXXXXXXIKRMQVPRLETPV

SEQ ID NO: 48071 - protein, 33 aa, Artificial Sequence; identical to SEQ ID NO: 11060
  GFR-binding peptide
  MOD_RES (32), (33): Xaa is C or S

SEQ ID NO: 48072 - protein, 40 aa, Artificial Sequence; identical to SEQ ID NO: 11063
  GFR-binding peptide
  MOD_RES (1), (3), (35), (36): Xaa is C or S

SEQ ID NO: 48073 - protein, 40 aa, Artificial Sequence
  GFR-binding peptide
  MOD_RES (34), (35): Xaa is C or S
  MOD_RES (12), (13), (14), (15), (16): Xaa is A or G
  MOD_RES (17), (18), (19), (20): Xaa is A or G or is absent
ARVVMNSMEGIXXXXXXXXXMIQVTINSLQTPAXXPKPVT

SEQ ID NO: 48074 - protein, 42 aa, Artificial Sequence; identical to SEQ ID NO: 18184
  GFR-binding peptide
  MOD_RES (1), (3), (37): Xaa is C or S

SEQ ID NO: 48075 - protein, 38 aa, Artificial Sequence
  GFR-binding peptide
  MOD_RES (1), (3), (35), (36): Xaa is C or S
XGXGEVVMESMEGIVVKDYEDMIQMTINSLETPVXXAK

SEQ ID NO: 48076 - protein, 33 aa, Artificial Sequence
  GFR-binding peptide
  MOD_RES (2), (33): Xaa is C or S
KXSRVIMSMEGIVKPKRGVMIQITINSLAQPVX

SEQ ID NO: 48077 - protein, 40 aa, Artificial Sequence
  GFR-binding peptide
  MOD_RES (2), (4), (36), (37): Xaa is C or S
RXGXGEVVMDVTAKKVVKENEDIKRMQVPRLETPVXXAKP

SEQ ID NO: 48078 - protein, 31 aa, Artificial Sequence; identical to SEQ ID NO: 11066
  GFR-binding peptide
  MOD_RES (31), (31): Xaa is C or S

SEQ ID NO: 48079 - protein, 39 aa, Artificial Sequence; identical to SEQ ID NO: 18185
  GFR-binding peptide
  MOD_RES (35), (35): Xaa is C or S

SEQ ID NO: 48080 - protein, 42 aa, Artificial Sequence; identical to SEQ ID NO: 11068
  GFR-binding peptide
  MOD_RES (1), (3), (37): Xaa is C or S
  MOD_RES (15), (16), (17), (18), (19): Xaa is A or G
  MOD_RES (20), (21), (22), (23): Xaa is A or G or is absent

SEQ ID NO: 48081 - protein, 39 aa, Artificial Sequence
  GFR-binding peptide
  MOD_RES (2), (4), (35), (36): Xaa is C or S
SXKXSRVIMVTAKKVKPKRGVIKRIQVPRLAQPVXXPAA

SEQ ID NO: 48082 - protein, 39 aa, Artificial Sequence
  GFR-binding peptide
  MOD_RES (1), (3): Xaa is C or S
XKXALHDELTNSLQEFIPKKRVIEYYLVTLPELQVQTPR

SEQ ID NO: 48083 - protein, 36 aa, Artificial Sequence; identical to SEQ ID NO: 11071
  GFR-binding peptide
  MOD_RES (33), (34): Xaa is C or S
  MOD_RES (11), (12), (13), (14), (15): Xaa is A or G
  MOD_RES (16), (17), (18), (19): Xaa is A or G or is absent

SEQ ID NO: 48084 - protein, 36 aa, Artificial Sequence; identical to SEQ ID NO: 18196
  GFR-binding peptide
  MOD_RES (2), (2): Xaa is C or S

SEQ ID NO: 48085 - protein, 34 aa, Artificial Sequence
  GFR-binding peptide
  MOD_RES (33), (34): Xaa is C or S
  MOD_RES (11), (12), (13), (14), (15): Xaa is A or G
  MOD_RES (16), (17), (18), (19): Xaa is A or G or is absent
SKVVMSMEGIXXXXXXXXXMIQITINSLDQPVXX

SEQ ID NO: 48086 - protein, 33 aa, Artificial Sequence; identical to SEQ ID NO: 11075
  GFR-binding peptide
  MOD_RES (33), (33): Xaa is C or S
  MOD_RES (11), (12), (13), (14), (15): Xaa is A or G
  MOD_RES (16), (17), (18), (19): Xaa is A or G or is absent

SEQ ID NO: 48087 - protein, 42 aa, Artificial Sequence; identical to SEQ ID NO: 18198
  GFR-binding peptide
  MOD_RES (2), (4), (41): Xaa is C or S

SEQ ID NO: 48088 - protein, 37 aa, Artificial Sequence; identical to SEQ ID NO: 11078
  GFR-binding peptide
  MOD_RES (33), (34): Xaa is C or S
  MOD_RES (11), (12), (13), (14), (15): Xaa is A or G
  MOD_RES (16), (17), (18), (19): Xaa is A or G or is absent

SEQ ID NO: 48089 - protein, 43 aa, Artificial Sequence
  GFR-binding peptide
  MOD_RES (2), (4), (38): Xaa is C or S
RXEXKNHQLFNSLQEHQGQHPKIRYYLMTLPEEETPVXELGED

SEQ ID NO: 48090 - protein, 33 aa, Artificial Sequence; identical to SEQ ID NO: 11079
  GFR-binding peptide
  MOD_RES (33), (33): Xaa is C or S
  MOD_RES (11), (12), (13), (14), (15): Xaa is A or G
  MOD_RES (16), (17), (18), (19): Xaa is A or G or is absent

SEQ ID NO: 48091 - protein, 40 aa, Artificial Sequence; identical to SEQ ID NO: 11080
  GFR-binding peptide
  MOD_RES (2), (4), (35), (36): Xaa is C or S

SEQ ID NO: 48092 - protein, 41 aa, Artificial Sequence
  GFR-binding peptide
  MOD_RES (2), (4), (35), (36): Xaa is C or S
SXKXSKVIMSMEGIIKPTKGIMIQITINSLDQSVXXPSASA

SEQ ID NO: 48093 - protein, 36 aa, Artificial Sequence
  GFR-binding peptide
  MOD_RES (2), (4), (35), (36): Xaa is C or S
SXKXSKVIMSMEGIIKPTKGIMIQITINSLDQSVXX

SEQ ID NO: 48094 - protein, 37 aa, Artificial Sequence; identical to SEQ ID NO: 18199
  GFR-binding peptide
  MOD_RES (34), (34): Xaa is C or S
  MOD_RES (12), (13), (14), (15), (16): Xaa is A or G
  MOD_RES (17), (18), (19), (20): Xaa is A or G or is absent

SEQ ID NO: 48095 - protein, 42 aa, Artificial Sequence
  GFR-binding peptide
  MOD_RES (2), (36): Xaa is C or S
  MOD_RES (14), (15), (16), (17), (18): Xaa is A or G
  MOD_RES (19), (20), (21), (22): Xaa is A or G or is absent
GXSRVVMNSMEGIXXXXXXXXXMIQVTINSLKTPAXTPKTVH

SEQ ID NO: 48096 - protein, 42 aa, Artificial Sequence; identical to SEQ ID NO: 18200
  GFR-binding peptide
  MOD_RES (2), (4), (41): Xaa is C or S

SEQ ID NO: 48097 - protein, 36 aa, Artificial Sequence
  GFR-binding peptide
  MOD_RES (13), (14), (15), (16), (17): Xaa is A or G
  MOD_RES (18), (19), (20), (21): Xaa is A or G or is absent
ELHEELRNSLQEXXXXXXXXXYYVVPLPEHHVRSPQ

SEQ ID NO: 48098 - protein, 44 aa, Artificial Sequence
  GFR-binding peptide
  MOD_RES (2), (4), (41): Xaa is C or S
  MOD_RES (17), (18), (19), (20), (21): Xaa is A or G
  MOD_RES (22), (23), (24), (25): Xaa is A or G or is absent
EXKXALHDELTNSLQEXXXXXXXXXYYVVPLPELQVQTPRXQVN

SEQ ID NO: 48099 - protein, 42 aa, Artificial Sequence
  GFR-binding peptide
  MOD_RES (2), (36), (37): Xaa is C or S
  MOD_RES (14), (15), (16), (17), (18): Xaa is A or G
  MOD_RES (19), (20), (21), (22): Xaa is A or G or is absent
GXSRVVMNSMEGIXXXXXXXXXMIQVTINSLKTPAXXPKPVY

SEQ ID NO: 48100 - protein, 44 aa, Artificial Sequence; identical to SEQ ID NO: 18201
  GFR-binding peptide
  MOD_RES (2), (4), (41): Xaa is C or S
  MOD_RES (17), (18), (19), (20), (21): Xaa is A or G
  MOD_RES (22), (23), (24), (25): Xaa is A or G or is absent

SEQ ID NO: 48101 - protein, 36 aa, Artificial Sequence; identical to SEQ ID NO: 11082
  GFR-binding peptide
  MOD_RES (2), (4): Xaa is C or S
  MOD_RES (15), (16), (17), (18), (19): Xaa is A or G
  MOD_RES (20), (21), (22), (23): Xaa is A or G or is absent

SEQ ID NO: 48102 - protein, 37 aa, Artificial Sequence
  GFR-binding peptide
  MOD_RES (2), (2): Xaa is C or S
  MOD_RES (15), (16), (17), (18), (19): Xaa is A or G
  MOD_RES (20), (21), (22), (23): Xaa is A or G or is absent
KXALHDELTNSLQEXXXXXXXXXYYLVTLPELQVQTP

SEQ ID NO: 48103 - protein, 42 aa, Artificial Sequence; identical to SEQ ID NO: 11087
  GFR-binding peptide
  MOD_RES (1), (3), (37), (38): Xaa is C or S
  MOD_RES (15), (16), (17), (18), (19): Xaa is A or G
  MOD_RES (20), (21), (22), (23): Xaa is A or G or is absent

SEQ ID NO: 48104 - protein, 39 aa, Artificial Sequence; identical to SEQ ID NO: 18207
  GFR-binding peptide
  MOD_RES (35), (35): Xaa is C or S

SEQ ID NO: 48105 - protein, 32 aa, Artificial Sequence; identical to SEQ ID NO: 11088
  GFR-binding peptide
  MOD_RES (1), (1): Xaa is C or S

SEQ ID NO: 48106 - protein, 38 aa, Artificial Sequence
  GFR-binding peptide
  MOD_RES (37), (37): Xaa is C or S
ELHEELRNSLQELKPKKRVYEYYLVTLPEHHVRSPQXK

SEQ ID NO: 48107 - protein, 32 aa, Artificial Sequence; identical to SEQ ID NO: 11089
  GFR-binding peptide
  MOD_RES (11), (12), (13), (14), (15): Xaa is A or G
  MOD_RES (16), (17), (18), (19): Xaa is A or G or is absent

SEQ ID NO: 48108 - protein, 40 aa, Artificial Sequence
  GFR-binding peptide
  MOD_RES (1), (3), (36), (37): Xaa is C or S
  MOD_RES (14), (15), (16), (17), (18): Xaa is A or G
  MOD_RES (19), (20), (21), (22): Xaa is A or G or is absent
XKXSRVIMVTAKKXXXXXXXXXIKRIQVPRLAQPVXXPAA

SEQ ID NO: 48109 - protein, 33 aa, Artificial Sequence
  GFR-binding peptide
  MOD_RES (1), (33): Xaa is C or S
XGEVVMDVTAKKVVKENEDIKRMQVPRLETPVX

SEQ ID NO: 48110 - protein, 38 aa, Artificial Sequence; identical to SEQ ID NO: 18212
  GFR-binding peptide
  MOD_RES (33), (33): Xaa is C or S
  MOD_RES (11), (12), (13), (14), (15): Xaa is A or G
  MOD_RES (16), (17), (18), (19): Xaa is A or G or is absent

SEQ ID NO: 48111 - protein, 42 aa, Artificial Sequence
  GFR-binding peptide
  MOD_RES (2), (39): Xaa is C or S
KXALHDELTNSLQEFIPKKRVIEYYVVPLPELQVQTPRXQVN

SEQ ID NO: 48112 - protein, 32 aa, Artificial Sequence; identical to SEQ ID NO: 11094
  GFR-binding peptide
  MOD_RES (31), (32): Xaa is C or S

SEQ ID NO: 48113 - protein, 44 aa, Artificial Sequence; identical to SEQ ID NO: 18214
  GFR-binding peptide
  MOD_RES (1), (3), (40): Xaa is C or S

SEQ ID NO: 48114 - protein, 38 aa, Artificial Sequence
  GFR-binding peptide
  MOD_RES (1), (3), (37), (38): Xaa is C or S
  MOD_RES (15), (16), (17), (18), (19): Xaa is A or G
  MOD_RES (20), (21), (22), (23): Xaa is A or G or is absent
XGXSRVVMNSMEGIXXXXXXXXXMIQVTINSLKTPAXX

SEQ ID NO: 48115 - protein, 40 aa, Artificial Sequence; identical to SEQ ID NO: 11098
  GFR-binding peptide
  MOD_RES (2), (36), (37): Xaa is C or S
  MOD_RES (14), (15), (16), (17), (18): Xaa is A or G
  MOD_RES (19), (20), (21), (22): Xaa is A or G or is absent

SEQ ID NO: 48116 - protein, 34 aa, Artificial Sequence
  GFR-binding peptide
  MOD_RES (34), (34): Xaa is C or S
  MOD_RES (12), (13), (14), (15), (16): Xaa is A or G
  MOD_RES (17), (18), (19), (20): Xaa is A or G or is absent
GEVVMDVTAKKXXXXXXXXXIKRMQVPRLETPVX

SEQ ID NO: 48117 - protein, 41 aa, Artificial Sequence
  GFR-binding peptide
  MOD_RES (1), (3), (37), (38): Xaa is C or S
  MOD_RES (15), (16), (17), (18), (19): Xaa is A or G
  MOD_RES (20), (21), (22), (23): Xaa is A or G or is absent
XGXGEVVMEVTAKKXXXXXXXXXIKRMQVPRLETPVXXAKP

SEQ ID NO: 48118 - protein, 38 aa, Artificial Sequence; identical to SEQ ID NO: 18220
  GFR-binding peptide
  MOD_RES (37), (37): Xaa is C or S

SEQ ID NO: 48119 - protein, 40 aa, Artificial Sequence; identical to SEQ ID NO: 18221
  GFR-binding peptide
  MOD_RES (1), (3), (37): Xaa is C or S
  MOD_RES (15), (16), (17), (18), (19): Xaa is A or G
  MOD_RES (20), (21), (22), (23): Xaa is A or G or is absent

SEQ ID NO: 48120 - protein, 36 aa, Artificial Sequence
  GFR-binding peptide
  MOD_RES (1), (35), (36): Xaa is C or S
  MOD_RES (13), (14), (15), (16), (17): Xaa is A or G
  MOD_RES (18), (19), (20), (21): Xaa is A or G or is absent
XSRVVMNVTAKKXXXXXXXXXIKRVQVPRLKTPAXX

SEQ ID NO: 48121 - protein, 38 aa, Artificial Sequence; identical to SEQ ID NO: 11101
  GFR-binding peptide
  MOD_RES (33), (34): Xaa is C or S
  MOD_RES (11), (12), (13), (14), (15): Xaa is A or G
  MOD_RES (16), (17), (18), (19): Xaa is A or G or is absent

SEQ ID NO: 48122 - protein, 35 aa, Artificial Sequence
  GFR-binding peptide
  MOD_RES (12), (13), (14), (15), (16): Xaa is A or G
  MOD_RES (17), (18), (19), (20): Xaa is A or G or is absent
LHEELRNSLQEXXXXXXXXXYYLVTLPEHHVRSPQ

SEQ ID NO: 48123 - protein, 40 aa, Artificial Sequence; identical to SEQ ID NO: 11103
  GFR-binding peptide
  MOD_RES (1), (35), (36): Xaa is C or S
  MOD_RES (13), (14), (15), (16), (17): Xaa is A or G
  MOD_RES (18), (19), (20), (21): Xaa is A or G or is absent

SEQ ID NO: 48124 - protein, 42 aa, Artificial Sequence; identical to SEQ ID NO: 11106
  GFR-binding peptide
  MOD_RES (1), (3), (37), (38): Xaa is C or S
  MOD_RES (15), (16), (17), (18), (19): Xaa is A or G
  MOD_RES (20), (21), (22), (23): Xaa is A or G or is absent

SEQ ID NO: 48125 - protein, 36 aa, Artificial Sequence
  GFR-binding peptide
  MOD_RES (2), (4), (36): Xaa is C or S
HXGXSRVVMNVTAKKIVNSSDDIKRVQVPRLKTPAX

SEQ ID NO: 48126 - protein, 39 aa, Artificial Sequence; identical to SEQ ID NO: 18226
  GFR-binding peptide
  MOD_RES (2), (4): Xaa is C or S

SEQ ID NO: 48127 - protein, 37 aa, Artificial Sequence; identical to SEQ ID NO: 11109
  GFR-binding peptide
  MOD_RES (2), (34), (35): Xaa is C or S

SEQ ID NO: 48128 - protein, 38 aa, Artificial Sequence
  GFR-binding peptide
  MOD_RES (1), (34), (35): Xaa is C or S
  MOD_RES (12), (13), (14), (15), (16): Xaa is A or G
  MOD_RES (17), (18), (19), (20): Xaa is A or G or is absent
XSKVVMVTAKKXXXXXXXXXIKRIQVPRLDQPVXXPSA

SEQ ID NO: 48129 - protein, 35 aa, Artificial Sequence
  GFR-binding peptide
  MOD_RES (2), (2): Xaa is C or S
  MOD_RES (14), (15), (16), (17), (18): Xaa is A or G
  MOD_RES (19), (20), (21), (22): Xaa is A or G or is absent
GXARVVMNVQVEKXXXXXXXXXVKAVKVSRLQTPA

SEQ ID NO: 48130 - protein, 39 aa, Artificial Sequence; identical to SEQ ID NO: 11113
  GFR-binding peptide
  MOD_RES (1), (35): Xaa is C or S
  MOD_RES (13), (14), (15), (16), (17): Xaa is A or G
  MOD_RES (18), (19), (20), (21): Xaa is A or G or is absent

SEQ ID NO: 48131 - protein, 33 aa, Artificial Sequence
  GFR-binding peptide
  MOD_RES (12), (13), (14), (15), (16): Xaa is A or G
  MOD_RES (17), (18), (19), (20): Xaa is A or G or is absent
GEVVMESMEGIXXXXXXXXXMIQMTINSLETPV

SEQ ID NO: 48132 - protein, 38 aa, Artificial Sequence; identical to SEQ ID NO: 11114
  GFR-binding peptide
  MOD_RES (2), (4), (38): Xaa is C or S
  MOD_RES (16), (17), (18), (19), (20): Xaa is A or G
  MOD_RES (21), (22), (23), (24): Xaa is A or G or is absent

SEQ ID NO: 48133 - protein, 38 aa, Artificial Sequence; identical to SEQ ID NO: 11117
  GFR-binding peptide
  MOD_RES (33), (34): Xaa is C or S
  MOD_RES (11), (12), (13), (14), (15): Xaa is A or G
  MOD_RES (16), (17), (18), (19): Xaa is A or G or is absent

SEQ ID NO: 48134 - protein, 40 aa, Artificial Sequence; identical to SEQ ID NO: 11119
  GFR-binding peptide
  MOD_RES (34), (35): Xaa is C or S
  MOD_RES (12), (13), (14), (15), (16): Xaa is A or G
  MOD_RES (17), (18), (19), (20): Xaa is A or G or is absent

SEQ ID NO: 48135 - protein, 35 aa, Artificial Sequence
  GFR-binding peptide
  MOD_RES (2), (35): Xaa is C or S
  MOD_RES (13), (14), (15), (16), (17): Xaa is A or G
  MOD_RES (18), (19), (20), (21): Xaa is A or G or is absent
KXSKVIMVQVEKXXXXXXXXXVKAIKVSRLDQSVX

SEQ ID NO: 48136 - protein, 41 aa, Artificial Sequence; identical to SEQ ID NO: 11120
  GFR-binding peptide
  MOD_RES (2), (4), (38), (39): Xaa is C or S
  MOD_RES (16), (17), (18), (19), (20): Xaa is A or G
  MOD_RES (21), (22), (23), (24): Xaa is A or G or is absent

SEQ ID NO: 48137 - protein, 39 aa, Artificial Sequence
  GFR-binding peptide
  MOD_RES (33), (33): Xaa is C or S
  MOD_RES (11), (12), (13), (14), (15): Xaa is A or G
  MOD_RES (16), (17), (18), (19): Xaa is A or G or is absent
RVVMNVTAKKXXXXXXXXXIKRVQVPRLKTPAXTPKTVH

SEQ ID NO: 48138 - protein, 39 aa, Artificial Sequence
  GFR-binding peptide
  MOD_RES (33), (33): Xaa is C or S
  MOD_RES (11), (12), (13), (14), (15): Xaa is A or G
  MOD_RES (16), (17), (18), (19): Xaa is A or G or is absent
RVVMNVQVEKXXXXXXXXXVKAVKVSRLKTPAXTPKTVH

SEQ ID NO: 48139 - protein, 37 aa, Artificial Sequence; identical to SEQ ID NO: 11128
  GFR-binding peptide
  MOD_RES (33), (33): Xaa is C or S
  MOD_RES (11), (12), (13), (14), (15): Xaa is A or G
  MOD_RES (16), (17), (18), (19): Xaa is A or G or is absent

SEQ ID NO: 48140 - protein, 36 aa, Artificial Sequence
  GFR-binding peptide
  MOD_RES (2), (36): Xaa is C or S
  MOD_RES (14), (15), (16), (17), (18): Xaa is A or G
  MOD_RES (19), (20), (21), (22): Xaa is A or G or is absent
EXKNHQLFNSLQEXXXXXXXXXYYVMPLPEEETPVX

SEQ ID NO: 48141 - protein, 41 aa, Artificial Sequence; identical to SEQ ID NO: 18238
  GFR-binding peptide
  MOD_RES (1), (35): Xaa is C or S
  MOD_RES (13), (14), (15), (16), (17): Xaa is A or G
  MOD_RES (18), (19), (20), (21): Xaa is A or G or is absent

SEQ ID NO: 48142 - protein, 38 aa, Artificial Sequence
  GFR-binding peptide
  MOD_RES (36), (36): Xaa is C or S
  MOD_RES (12), (13), (14), (15), (16): Xaa is A or G
  MOD_RES (17), (18), (19), (20): Xaa is A or G or is absent
LHDELTNSLQEXXXXXXXXXYYLVTLPELQVQTPRXQV

SEQ ID NO: 48143 - protein, 38 aa, Artificial Sequence; identical to SEQ ID NO: 18242
  GFR-binding peptide
  MOD_RES (33), (33): Xaa is C or S

SEQ ID NO: 48144 - protein, 35 aa, Artificial Sequence
  GFR-binding peptide
  MOD_RES (32), (33): Xaa is C or S
GEVVMDVTAKKVVKENEDIKRMQVPRLETPVXXAK

SEQ ID NO: 48145 - protein, 40 aa, Artificial Sequence
  GFR-binding peptide
  MOD_RES (34), (34): Xaa is C or S
  MOD_RES (12), (13), (14), (15), (16): Xaa is A or G
  MOD_RES (17), (18), (19), (20): Xaa is A or G or is absent
KNHQLFNSLQEXXXXXXXXXYYLMTLPEEETPVXELGEDN

SEQ ID NO: 48146 - protein, 40 aa, Artificial Sequence; identical to SEQ ID NO: 11135
  GFR-binding peptide
  MOD_RES (34), (35): Xaa is C or S
  MOD_RES (12), (13), (14), (15), (16): Xaa is A or G
  MOD_RES (17), (18), (19), (20): Xaa is A or G or is absent

SEQ ID NO: 48147 - protein, 42 aa, Artificial Sequence; identical to SEQ ID NO: 18243
  GFR-binding peptide
  MOD_RES (1), (3), (40): Xaa is C or S
  MOD_RES (16), (17), (18), (19), (20): Xaa is A or G
  MOD_RES (21), (22), (23), (24): Xaa is A or G or is absent

SEQ ID NO: 48148 - protein, 41 aa, Artificial Sequence
  GFR-binding peptide
  MOD_RES (1), (38): Xaa is C or S
XALHDELTNSLQEFIPKKRVIEYYLVTLPELQVQTPRXQVN

SEQ ID NO: 48149 - protein, 38 aa, Artificial Sequence
  GFR-binding peptide
  MOD_RES (1), (33), (34): Xaa is C or S
XARVVMNVTAKKIVNSSDDIKRVQVPRLQTPAXXPKPV

SEQ ID NO: 48150 - protein, 33 aa, Artificial Sequence
  GFR-binding peptide
  MOD_RES (2), (2): Xaa is C or S
GXGEVVMDSMEGIVVKENEDMIQMTINSLETPV

SEQ ID NO: 48151 - protein, 41 aa, Artificial Sequence
  GFR-binding peptide
  MOD_RES (2), (36), (37): Xaa is C or S
  MOD_RES (14), (15), (16), (17), (18): Xaa is A or G
  MOD_RES (19), (20), (21), (22): Xaa is A or G or is absent
GXGEVVMDVTAKKXXXXXXXXXIKRMQVPRLETPVXXAKPI

SEQ ID NO: 48152 - protein, 36 aa, Artificial Sequence
  GFR-binding peptide
  MOD_RES (1), (3): Xaa is C or S
XEXKNHQLFNSLQEHQGQHPKIRYYVMPLPEEETPV

SEQ ID NO: 48153 - protein, 39 aa, Artificial Sequence; identical to SEQ ID NO: 11142
  GFR-binding peptide
  MOD_RES (2), (4), (35), (36): Xaa is C or S

SEQ ID NO: 48154 - protein, 40 aa, Artificial Sequence
  GFR-binding peptide
  MOD_RES (1), (34), (35): Xaa is C or S
  MOD_RES (12), (13), (14), (15), (16): Xaa is A or G
  MOD_RES (17), (18), (19), (20): Xaa is A or G or is absent
XSRVIMSMEGIXXXXXXXXXMIQITINSLAQPVXXPAASA

SEQ ID NO: 48155 - protein, 40 aa, Artificial Sequence; identical to SEQ ID NO: 11143
  GFR-binding peptide
  MOD_RES (1), (3), (35), (36): Xaa is C or S

SEQ ID NO: 48156 - protein, 43 aa, Artificial Sequence; identical to SEQ ID NO: 11144
  GFR-binding peptide
  MOD_RES (1), (3), (37), (38): Xaa is C or S
  MOD_RES (15), (16), (17), (18), (19): Xaa is A or G
  MOD_RES (20), (21), (22), (23): Xaa is A or G or is absent

SEQ ID NO: 48157 - protein, 33 aa, Artificial Sequence; identical to SEQ ID NO: 11145
  GFR-binding peptide
  MOD_RES (12), (13), (14), (15), (16): Xaa is A or G
  MOD_RES (17), (18), (19), (20): Xaa is A or G or is absent

SEQ ID NO: 48158 - protein, 32 aa, Artificial Sequence; identical to SEQ ID NO: 11146
  GFR-binding peptide
  MOD_RES (31), (32): Xaa is C or S

SEQ ID NO: 48159 - protein, 38 aa, Artificial Sequence
  GFR-binding peptide
  MOD_RES (35), (35): Xaa is C or S
HEELRNSLQELKPKKRVYEYYLVTLPEHHVRSPQXKVS

SEQ ID NO: 48160 - protein, 42 aa, Artificial Sequence; identical to SEQ ID NO: 11147
  GFR-binding peptide
  MOD_RES (2), (4), (38), (39): Xaa is C or S
  MOD_RES (16), (17), (18), (19), (20): Xaa is A or G
  MOD_RES (21), (22), (23), (24): Xaa is A or G or is absent

SEQ ID NO: 48161 - protein, 36 aa, Artificial Sequence
  GFR-binding peptide
  MOD_RES (1), (3), (35): Xaa is C or S
XGXSRVVMNVTAKKIVNSSDDIKRVQVPRLKTPAXT

SEQ ID NO: 48162 - protein, 34 aa, Artificial Sequence; identical to SEQ ID NO: 11148
  GFR-binding peptide
  MOD_RES (32), (33): Xaa is C or S

SEQ ID NO: 48163 - protein, 37 aa, Artificial Sequence
  GFR-binding peptide
  MOD_RES (1), (32), (33): Xaa is C or S
XSRVIMSMEGIVKPKRGVMIQITINSLAQPVXXPAAS

SEQ ID NO: 48164 - protein, 37 aa, Artificial Sequence
  GFR-binding peptide
  MOD_RES (34), (35): Xaa is C or S
  MOD_RES (12), (13), (14), (15), (16): Xaa is A or G
  MOD_RES (17), (18), (19), (20): Xaa is A or G or is absent
GEVVMEVTAKKXXXXXXXXXIKRMQVPRLETPVXXAK

SEQ ID NO: 48165 - protein, 41 aa, Artificial Sequence; identical to SEQ ID NO: 11151
  GFR-binding peptide
  MOD_RES (1), (3), (35), (36): Xaa is C or S

SEQ ID NO: 48166 - protein, 40 aa, Artificial Sequence
  GFR-binding peptide
  MOD_RES (1), (3), (36), (37): Xaa is C or S
  MOD_RES (14), (15), (16), (17), (18): Xaa is A or G
  MOD_RES (19), (20), (21), (22): Xaa is A or G or is absent
XKXSKVIMVTAKKXXXXXXXXXIKRIQVPRLDQSVXXPSA

SEQ ID NO: 48167 - protein, 38 aa, Artificial Sequence
  GFR-binding peptide
  MOD_RES (35), (35): Xaa is C or S
HEELRNSLQELKPKKRVYEYYVVPLPEHHVRSPQXKVS

SEQ ID NO: 48168 - protein, 40 aa, Artificial Sequence
  GFR-binding peptide
  MOD_RES (2), (34), (35): Xaa is C or S
GXARVVMNVQVEKIVNSSDDVKAVKVSRLQTPAXXPKPVT

SEQ ID NO: 48169 - protein, 37 aa, Artificial Sequence
  GFR-binding peptide
  MOD_RES (1), (3), (37): Xaa is C or S
  MOD_RES (15), (16), (17), (18), (19): Xaa is A or G
  MOD_RES (20), (21), (22), (23): Xaa is A or G or is absent
XEXKNHQLFNSLQEXXXXXXXXXYYVMPLPEEETPVX

SEQ ID NO: 48170 - protein, 34 aa, Artificial Sequence; identical to SEQ ID NO: 11154
  GFR-binding peptide
  MOD_RES (2), (4): Xaa is C or S

SEQ ID NO: 48171 - protein, 36 aa, Artificial Sequence
  GFR-binding peptide
  MOD_RES (2), (35), (36): Xaa is C or S
  MOD_RES (13), (14), (15), (16), (17): Xaa is A or G
  MOD_RES (18), (19), (20), (21): Xaa is A or G or is absent
KXSKVVMVQVEKXXXXXXXXXVKAIKVSRLDQPVXX

SEQ ID NO: 48172 - protein, 38 aa, Artificial Sequence; identical to SEQ ID NO: 11156
  GFR-binding peptide
  MOD_RES (1), (3), (37): Xaa is C or S
  MOD_RES (15), (16), (17), (18), (19): Xaa is A or G
  MOD_RES (20), (21), (22), (23): Xaa is A or G or is absent

SEQ ID NO: 48173 - protein, 39 aa, Artificial Sequence; identical to SEQ ID NO: 11157
  GFR-binding peptide
  MOD_RES (2), (33), (34): Xaa is C or S

SEQ ID NO: 48174 - protein, 39 aa, Artificial Sequence; identical to SEQ ID NO: 18254
  GFR-binding peptide
  MOD_RES (1), (35): Xaa is C or S
  MOD_RES (13), (14), (15), (16), (17): Xaa is A or G
  MOD_RES (18), (19), (20), (21): Xaa is A or G or is absent

SEQ ID NO: 48175 - protein, 40 aa, Artificial Sequence; identical to SEQ ID NO: 11158
  GFR-binding peptide
  MOD_RES (1), (3), (37), (38): Xaa is C or S
  MOD_RES (15), (16), (17), (18), (19): Xaa is A or G
  MOD_RES (20), (21), (22), (23): Xaa is A or G or is absent

SEQ ID NO: 48176 - protein, 37 aa, Artificial Sequence; identical to SEQ ID NO: 37740
  GFR-binding peptide
  MOD_RES (33), (34): Xaa is C or S
  MOD_RES (11), (12), (13), (14), (15): Xaa is A or G
  MOD_RES (16), (17), (18), (19): Xaa is A or G or is absent

SEQ ID NO: 48177 - protein, 38 aa, Artificial Sequence; identical to SEQ ID NO: 18255
  GFR-binding peptide
  MOD_RES (2), (4): Xaa is C or S

SEQ ID NO: 48178 - protein, 33 aa, Artificial Sequence
  GFR-binding peptide
  MOD_RES (2), (33): Xaa is C or S
KXSRVIMVQVEKVKPKRGVVKAIKVSRLAQPVX

SEQ ID NO: 48179 - protein, 36 aa, Artificial Sequence; identical to SEQ ID NO: 11160
  GFR-binding peptide
  MOD_RES (1), (3), (35), (36): Xaa is C or S

SEQ ID NO: 48180 - protein, 40 aa, Artificial Sequence
  GFR-binding peptide
  MOD_RES (37), (37): Xaa is C or S
  MOD_RES (13), (14), (15), (16), (17): Xaa is A or G
  MOD_RES (18), (19), (20), (21): Xaa is A or G or is absent
ALHDELTNSLQEXXXXXXXXXYYLVTLPELQVQTPRXQVN

SEQ ID NO: 48181 - protein, 39 aa, Artificial Sequence; identical to SEQ ID NO: 11163
  GFR-binding peptide
  MOD_RES (1), (33), (34): Xaa is C or S

SEQ ID NO: 48182 - protein, 38 aa, Artificial Sequence
  GFR-binding peptide
  MOD_RES (2), (4), (36), (37): Xaa is C or S
HXGXSRVVMNVQVEKIVNSSDDVKAVKVSRLKTPAXXP

SEQ ID NO: 48183 - protein, 39 aa, Artificial Sequence
  GFR-binding peptide
  MOD_RES (35), (35): Xaa is C or S
  MOD_RES (11), (12), (13), (14), (15): Xaa is A or G
  MOD_RES (16), (17), (18), (19): Xaa is A or G or is absent
HEELRNSLQEXXXXXXXXXYYVVPLPEHHVRSPQXKVSS

SEQ ID NO: 48184 - protein, 40 aa, Artificial Sequence; identical to SEQ ID NO: 18260
  GFR-binding peptide
  MOD_RES (37), (37): Xaa is C or S

SEQ ID NO: 48185 - protein, 34 aa, Artificial Sequence
  GFR-binding peptide
  MOD_RES (33), (34): Xaa is C or S
  MOD_RES (11), (12), (13), (14), (15): Xaa is A or G
  MOD_RES (16), (17), (18), (19): Xaa is A or G or is absent
EVVMDVTAKKXXXXXXXXXIKRMQVPRLETPVXX

SEQ ID NO: 48186 - protein, 35 aa, Artificial Sequence; identical to SEQ ID NO: 11165
  GFR-binding peptide
  MOD_RES (2), (2): Xaa is C or S
  MOD_RES (14), (15), (16), (17), (18): Xaa is A or G
  MOD_RES (19), (20), (21), (22): Xaa is A or G or is absent

SEQ ID NO: 48187 - protein, 40 aa, Artificial Sequence
  GFR-binding peptide
  MOD_RES (1), (3), (34), (35): Xaa is C or S
XKXSRVIMVQVEKVKPKRGVVKAIKVSRLAQPVXXPAASA

SEQ ID NO: 48188 - protein, 39 aa, Artificial Sequence; identical to SEQ ID NO: 11167
  GFR-binding peptide
  MOD_RES (1), (3), (35), (36): Xaa is C or S

SEQ ID NO: 48189 - protein, 36 aa, Artificial Sequence
  GFR-binding peptide
  MOD_RES (13), (14), (15), (16), (17): Xaa is A or G
  MOD_RES (18), (19), (20), (21): Xaa is A or G or is absent
ALHDELTNSLQEXXXXXXXXXYYVVPLPELQVQTPR

SEQ ID NO: 48190 - protein, 38 aa, Artificial Sequence
  GFR-binding peptide
  MOD_RES (2), (4): Xaa is C or S
  MOD_RES (17), (18), (19), (20), (21): Xaa is A or G
  MOD_RES (22), (23), (24), (25): Xaa is A or G or is absent
EXKXALHDELTNSLQEXXXXXXXXXYYVVPLPELQVQT

SEQ ID NO: 48191 - protein, 41 aa, Artificial Sequence
  GFR-binding peptide
  MOD_RES (37), (37): Xaa is C or S
ALHDELTNSLQEFIPKKRVIEYYLVTLPELQVQTPRXQVNR

SEQ ID NO: 48192 - protein, 42 aa, Artificial Sequence; identical to SEQ ID NO: 11171
  GFR-binding peptide
  MOD_RES (1), (3), (37), (38): Xaa is C or S
  MOD_RES (15), (16), (17), (18), (19): Xaa is A or G
  MOD_RES (20), (21), (22), (23): Xaa is A or G or is absent

SEQ ID NO: 48193 - protein, 37 aa, Artificial Sequence
  GFR-binding peptide
  MOD_RES (33), (34): Xaa is C or S
  MOD_RES (11), (12), (13), (14), (15): Xaa is A or G
  MOD_RES (16), (17), (18), (19): Xaa is A or G or is absent
SRVIMVQVEKXXXXXXXXXVKAIKVSRLAQPVXXPAA

SEQ ID NO: 48194 - protein, 34 aa, Artificial Sequence; identical to SEQ ID NO: 18268
  GFR-binding peptide

SEQ ID NO: 48195 - protein, 32 aa, Artificial Sequence
  GFR-binding peptide
  MOD_RES (31), (32): Xaa is C or S
SKVVMVTAKKVKPTRGVIKRIQVPRLDQPVXX

SEQ ID NO: 48196 - protein, 35 aa, Artificial Sequence; identical to SEQ ID NO: 11173
  GFR-binding peptide
  MOD_RES (1), (3), (35): Xaa is C or S

SEQ ID NO: 48197 - protein, 37 aa, Artificial Sequence; identical to SEQ ID NO: 18269
  GFR-binding peptide
  MOD_RES (33), (33): Xaa is C or S
  MOD_RES (11), (12), (13), (14), (15): Xaa is A or G
  MOD_RES (16), (17), (18), (19): Xaa is A or G or is absent

SEQ ID NO: 48198 - protein, 37 aa, Artificial Sequence; identical to SEQ ID NO: 11174
  GFR-binding peptide
  MOD_RES (1), (3), (35): Xaa is C or S

SEQ ID NO: 48199 - protein, 36 aa, Artificial Sequence
  GFR-binding peptide
  MOD_RES (1), (34), (35): Xaa is C or S
  MOD_RES (12), (13), (14), (15), (16): Xaa is A or G
  MOD_RES (17), (18), (19), (20): Xaa is A or G or is absent
XSKVIMVTAKKXXXXXXXXXIKRIQVPRLDQSVXXP

SEQ ID NO: 48200 - protein, 42 aa, Artificial Sequence; identical to SEQ ID NO: 11175
  GFR-binding peptide
  MOD_RES (2), (4), (37), (38): Xaa is C or S
  MOD_RES (15), (16), (17), (18), (19): Xaa is A or G
  MOD_RES (20), (21), (22), (23): Xaa is A or G or is absent

SEQ ID NO: 48201 - protein, 40 aa, Artificial Sequence; identical to SEQ ID NO: 18271
  GFR-binding peptide
  MOD_RES (34), (34): Xaa is C or S

SEQ ID NO: 48202 - protein, 37 aa, Artificial Sequence; identical to SEQ ID NO: 18272
  GFR-binding peptide
  MOD_RES (2), (4): Xaa is C or S
  MOD_RES (16), (17), (18), (19), (20): Xaa is A or G
  MOD_RES (21), (22), (23), (24): Xaa is A or G or is absent

SEQ ID NO: 48203 - protein, 31 aa, Artificial Sequence
  GFR-binding peptide
  MOD_RES (31), (31): Xaa is C or S
SKVVMVTAKKVKPTRGVIKRIQVPRLDQPVX

SEQ ID NO: 48204 - protein, 34 aa, Artificial Sequence; identical to SEQ ID NO: 11176
  GFR-binding peptide
  MOD_RES (1), (1): Xaa is C or S
  MOD_RES (13), (14), (15), (16), (17): Xaa is A or G
  MOD_RES (18), (19), (20), (21): Xaa is A or G or is absent

SEQ ID NO: 48205 - protein, 36 aa, Artificial Sequence
  GFR-binding peptide
  MOD_RES (1), (33), (34): Xaa is C or S
XGEVVMEVQVEKVVKDYEDVKAMKVSRLETPVXXAK

SEQ ID NO: 48206 - protein, 43 aa, Artificial Sequence; identical to SEQ ID NO: 11177
  GFR-binding peptide
  MOD_RES (2), (4), (38), (39): Xaa is C or S
  MOD_RES (16), (17), (18), (19), (20): Xaa is A or G
  MOD_RES (21), (22), (23), (24): Xaa is A or G or is absent

SEQ ID NO: 48207 - protein, 42 aa, Artificial Sequence
  GFR-binding peptide
  MOD_RES (2), (4), (38), (39): Xaa is C or S
  MOD_RES (16), (17), (18), (19), (20): Xaa is A or G
  MOD_RES (21), (22), (23), (24): Xaa is A or G or is absent
RXGXGEVVMDVTAKKXXXXXXXXXIKRMQVPRLETPVXXAKP

SEQ ID NO: 48208 - protein, 38 aa, Artificial Sequence; identical to SEQ ID NO: 18275
  GFR-binding peptide
  MOD_RES (1), (35): Xaa is C or S

SEQ ID NO: 48209 - protein, 38 aa, Artificial Sequence; identical to SEQ ID NO: 18276
  GFR-binding peptide
  MOD_RES (35), (35): Xaa is C or S
  MOD_RES (11), (12), (13), (14), (15): Xaa is A or G
  MOD_RES (16), (17), (18), (19): Xaa is A or G or is absent

SEQ ID NO: 48210 - protein, 38 aa, Artificial Sequence; identical to SEQ ID NO: 18277
  GFR-binding peptide
  MOD_RES (2), (4): Xaa is C or S
  MOD_RES (17), (18), (19), (20), (21): Xaa is A or G
  MOD_RES (22), (23), (24), (25): Xaa is A or G or is absent

SEQ ID NO: 48211 - protein, 37 aa, Artificial Sequence; identical to SEQ ID NO: 11179
  GFR-binding peptide
  MOD_RES (2), (35), (36): Xaa is C or S
  MOD_RES (13), (14), (15), (16), (17): Xaa is A or G
  MOD_RES (18), (19), (20), (21): Xaa is A or G or is absent

SEQ ID NO: 48212 - protein, 38 aa, Artificial Sequence
  GFR-binding peptide
  MOD_RES (34), (35): Xaa is C or S
  MOD_RES (12), (13), (14), (15), (16): Xaa is A or G
  MOD_RES (17), (18), (19), (20): Xaa is A or G or is absent
SRVVMNVTAKKXXXXXXXXXIKRVQVPRLKTPAXXPKP

SEQ ID NO: 48213 - protein, 40 aa, Artificial Sequence; identical to SEQ ID NO: 11183
  GFR-binding peptide
  MOD_RES (1), (3), (37), (38): Xaa is C or S
  MOD_RES (15), (16), (17), (18), (19): Xaa is A or G
  MOD_RES (20), (21), (22), (23): Xaa is A or G or is absent

SEQ ID NO: 48214 - protein, 37 aa, Artificial Sequence
  GFR-binding peptide
  MOD_RES (2), (34), (35): Xaa is C or S
GXARVVMNVTAKKIVNSSDDIKRVQVPRLQTPAXXPK

SEQ ID NO: 48215 - protein, 36 aa, Artificial Sequence
  GFR-binding peptide
  MOD_RES (1), (3): Xaa is C or S
  MOD_RES (15), (16), (17), (18), (19): Xaa is A or G
  MOD_RES (20), (21), (22), (23): Xaa is A or G or is absent
XGXSRVVMNSMEGIXXXXXXXXXMIQVTINSLKTPA

SEQ ID NO: 48216 - protein, 41 aa, Artificial Sequence
  GFR-binding peptide
  MOD_RES (2), (35), (36): Xaa is C or S
  MOD_RES (13), (14), (15), (16), (17): Xaa is A or G
  MOD_RES (18), (19), (20), (21): Xaa is A or G or is absent
KXSKVIMVTAKKXXXXXXXXXIKRIQVPRLDQSVXXPSASA

SEQ ID NO: 48217 - protein, 40 aa, Artificial Sequence; identical to SEQ ID NO: 11186
  GFR-binding peptide
  MOD_RES (1), (3), (37), (38): Xaa is C or S
  MOD_RES (15), (16), (17), (18), (19): Xaa is A or G
  MOD_RES (20), (21), (22), (23): Xaa is A or G or is absent

SEQ ID NO: 48218 - protein, 38 aa, Artificial Sequence; identical to SEQ ID NO: 11189
  GFR-binding peptide
  MOD_RES (1), (3), (35), (36): Xaa is C or S

SEQ ID NO: 48219 - protein, 37 aa, Artificial Sequence; identical to SEQ ID NO: 11190
  GFR-binding peptide
  MOD_RES (31), (32): Xaa is C or S

SEQ ID NO: 48220 - protein, 41 aa, Artificial Sequence
  GFR-binding peptide
  MOD_RES (1), (3), (35): Xaa is C or S
XGXSRVVMNSMEGIIVNSSDDMIQVTINSLKTPAXTPKTVH

SEQ ID NO: 48221 - protein, 37 aa, Artificial Sequence
  GFR-binding peptide
  MOD_RES (1), (3), (35), (36): Xaa is C or S
XGXGEVVMDVQVEKVVKENEDVKAMKVSRLETPVXXA

SEQ ID NO: 48222 - protein, 34 aa, Artificial Sequence
  GFR-binding peptide
  MOD_RES (1), (3): Xaa is C or S
XGXARVVMNVTAKKIVNSSDDIKRVQVPRLQTPA

SEQ ID NO: 48223 - protein, 36 aa, Artificial Sequence
  GFR-binding peptide
  MOD_RES (2), (33), (34): Xaa is C or S
KXSKVVMSMEGIVKPTRGVMIQITINSLDQPVXXPS

SEQ ID NO: 48224 - protein, 38 aa, Artificial Sequence; identical to SEQ ID NO: 18289
  GFR-binding peptide
  MOD_RES (37), (37): Xaa is C or S
  MOD_RES (13), (14), (15), (16), (17): Xaa is A or G
  MOD_RES (18), (19), (20), (21): Xaa is A or G or is absent

SEQ ID NO: 48225 - protein, 41 aa, Artificial Sequence; identical to SEQ ID NO: 18291
  GFR-binding peptide
  MOD_RES (37), (37): Xaa is C or S

SEQ ID NO: 48226 - protein, 38 aa, Artificial Sequence
  GFR-binding peptide
  MOD_RES (37), (37): Xaa is C or S
  MOD_RES (13), (14), (15), (16), (17): Xaa is A or G
  MOD_RES (18), (19), (20), (21): Xaa is A or G or is absent
ALHDELTNSLQEXXXXXXXXXYYLVTLPELQVQTPRXQ

SEQ ID NO: 48227 - protein, 38 aa, Artificial Sequence; identical to SEQ ID NO: 18292
  GFR-binding peptide
  MOD_RES (1), (3): Xaa is C or S

SEQ ID NO: 48228 - protein, 32 aa, Artificial Sequence; identical to SEQ ID NO: 18294
  GFR-binding peptide
  MOD_RES (11), (12), (13), (14), (15): Xaa is A or G
  MOD_RES (16), (17), (18), (19): Xaa is A or G or is absent

SEQ ID NO: 48229 - protein, 36 aa, Artificial Sequence; identical to SEQ ID NO: 18295
  GFR-binding peptide
  MOD_RES (36), (36): Xaa is C or S

SEQ ID NO: 48230 - protein, 40 aa, Artificial Sequence
  GFR-binding peptide
  MOD_RES (1), (3), (37): Xaa is C or S
  MOD_RES (15), (16), (17), (18), (19): Xaa is A or G
  MOD_RES (20), (21), (22), (23): Xaa is A or G or is absent
XEXKNHQLFNSLQEXXXXXXXXXYYVMPLPEEETPVXELG

SEQ ID NO: 48231 - protein, 41 aa, Artificial Sequence; identical to SEQ ID NO: 11200
  GFR-binding peptide
  MOD_RES (1), (35), (36): Xaa is C or S
  MOD_RES (13), (14), (15), (16), (17): Xaa is A or G
  MOD_RES (18), (19), (20), (21): Xaa is A or G or is absent

SEQ ID NO: 48232 - protein, 33 aa, Artificial Sequence; identical to SEQ ID NO: 11201
  GFR-binding peptide
  MOD_RES (33), (33): Xaa is C or S
  MOD_RES (11), (12), (13), (14), (15): Xaa is A or G
  MOD_RES (16), (17), (18), (19): Xaa is A or G or is absent

SEQ ID NO: 48233 - protein, 32 aa, Artificial Sequence; identical to SEQ ID NO: 11203
  GFR-binding peptide
  MOD_RES (31), (32): Xaa is C or S
